(19) United States
(12) Patent Application Publication
(10) Pub. No.: US 2024/0194290 A1
(43) Pub. Date: Jun. 13, 2024

(54) HIDDEN ANTIBIOTICS IN THE HUMAN PROTEOME

(71) Applicant: THE TRUSTEES OF THE UNIVERSITY OF PENNSYLVANIA, Philadelphia, PA (US)

(72) Inventors: Orlando CRESCENZI, Apice (IT); Eugenio NOTOMISTA, Napoli (IT); César DE LA FUENTA-NUNEZ, Philadelphia, PA (US); Marcelo DER TOROSSIAN TORRES, Philadelphia, PA (US); Marcelo CARDOSO DOS REIS MELO, Philadelphia, PA (US)

(21) Appl. No.: 18/554,531

(22) PCT Filed: Apr. 8, 2022
(86) PCT No.: PCT/US2022/071642

§ 371 Date: Oct. 9, 2023

Related U.S. Application Data
(60) Provisional application No. 63/172,792, filed on Apr. 9, 2021.

(51) Int. Cl. G16B 15/20; A61K 38/00; A61P 31/04; C07K 14/47

(52) U.S. Cl. CPC G16B 15/20; A61P 31/04; C07K 14/47; A61K 38/00

(57) ABSTRACT

Disclosed are methods for computationally identifying candidate antimicrobial peptides by scanning the human protcome, ranking identified sequences according to a scoring system in order to identify the candidate sequences. Also provided are novel candidate antimicrobial peptides, as well as combinations of peptides that exhibit synergistic antimicrobial properties.

### CROSS-REFERENCE TO RELATED APPLICATIONS

[0001] The present application claims the benefit of priority to U.S. Provisional Application No. 63/172,792, filed Apr. 9, 2021, the entire contents of which are incorporated herein by reference.

### GOVERNMENT RIGHTS

[0002] This invention was made with government support under GM138201 awarded by the National Institutes of Health and HRTRA-21-1-0014 awarded by the Department of Defense. The government has certain rights in the invention.

### TECHNICAL FIELD

[0003] The present disclosure pertains to identification and use of novel antimicrobial agents.

### BACKGROUND

[0004] According to the Centers for Disease Control and Prevention (CDC), in 2019, 2.8 million antibiotic-resistant infections occurred in the US, leading to approximately 35,000 deaths¹. Such untreatable infections are projected to reach 10 million people per year worldwide, becoming the leading cause of death in our society². This daunting scenario coincides with the lack of innovation in antibiotic discovery. Most antibiotics available today have been used for over 30 years. These drugs often have unintended side effects, readily select for antibiotic resistance, and, in the face of this resistance, are losing effectiveness³. Thus, there is an urgent need to discover new antimicrobial agents to target drug-resistant infections⁴.

### SUMMARY

[0005] Disclosed herein are methods for computationally identifying candidate encrypted peptides with predicted antimicrobial activity.

[0006] Also disclosed are antimicrobial peptides, peptide, wherein the peptide is any one of SEQ ID NOS: 1-43055.

[0007] Also provided are methods of treating a microbial infection comprising administering to a subject in need thereof a pharmaceutically effective amount of a peptide of any one or more of SEQ ID NOS: 1-43055.

### BRIEF DESCRIPTION OF THE DRAWINGS

[0008] The file of this patent or application contains at least one drawing/photograph executed in color. Copies of this patent or patent application publication with color drawing(s)/photograph(s) will be provided by the Office upon request and payment of the necessary fee.

[0009] FIG. 1. Discovery of hidden peptide antibiotics encoded in the human proteome. (FIG. 1A) Encrypted peptides were identified within protein sequences from the human proteome using a physicochemical-guided scoring function that took into account the main physicochemical features of AMPs, i.e., length, charge, and hydrophobicity. (FIG. 1B) Normalized abundance of genes encoding different protein classes across the two groups, proteins containing predicted encrypted peptides, and proteins in the entire human genome. The analysis was performed using Panther Proteins Classification system with a false discovery rate cutoff of 0.05.

[0010] FIG. 2. Composition and bacteria-targeting properties of encrypted peptides. (FIG. 2A) Amino acid frequency in encrypted peptides compared to known antimicrobial peptides. Amino acid usage was calculated from candidate encrypted peptides from the human proteome and from the DBAASP database. Encrypted peptides had overrepresentation of phenylalanine (F), isoleucine (I), leucine (L), and valine (V) compared to classical AMPs present in the DBAASP database. (FIG. 2B) Antimicrobial activity of the encrypted peptides. Briefly, 10⁶ bacterial cells and serially diluted encrypted peptides (0-128 μmol L⁻¹) were added to a 96-well plate and incubated at 37° C. One day post-treatment, the solution in each well was measured in a microplate reader (600 nm) to check for inhibition of bacteria compared to the untreated controls and presented as a heat map of antimicrobial activities (umol L⁻¹) against 8 pathogenic, 11 gut commensal, and 6 skin commensal bacterial strains. Assays were performed in three independent replicates and heat map OD₆₀₀ values are the arithmetic mean of the replicates in each condition. (FIG. 2C) Predictive power of the physicochemical-based scoring function. The figure shows how the experimentally determined Minimum Inhibitory Concentration (MIC) of selected peptides correlates with their predicted scores. Multiple microbes were grouped in this test, ranging from pathogenic strains to gut and skin commensals. Higher predicted scores correlate with lower MICs (more potent antimicrobial activity).

[0011] FIG. 3. Synergy, resistance development and mechanism of action studies of encrypted peptides. (FIG. 3A) Synergistic interactions of encrypted peptides from the CUB domain against A. baumannii, resulting in 100-fold lower concentrations of all the three peptides needed to completely inhibit bacterial growth. (FIG. 3B) Evolution of resistance by A. baumannii to encrypted peptides derived from the CUB domain (red) or polymyxin B (gray) after 30 days of serial passaging in liquid nutrient broth. Peptides and antibiotics were used at sub-inhibitory concentrations. Cells were passaged every 48 h. (FIG. 3C) Schematic showing increased fluorescence resulting from membrane destabilization (left panel—blue) and depolarization (right panel—red) caused by the peptides at their MIC over time. (FIG. 3D) Cytoplasmic membrane depolarization effects of the encrypted peptides against A. baumannii. (FIG. 3E) NPN assays showing the effect of encrypted peptides derived from the CUB domain and natriuretic peptide on permeabilization of the outer membrane of A. baumannii.

[0012] FIG. 4. Anti-infective activity and synergistic interactions of encrypted peptides in vivo. (FIG. 4A) Schematic of the skin abscess mouse model used to assess the anti-infective activity of selected encrypted peptides from plasma proteins. (FIG. 4B) SCUB1-SKE25 (25 μmol L⁻¹; 77.9 g mL⁻¹) and SCUB3-MLP22 (25 μmol L⁻¹; 66.9 μg mL⁻¹) showed inhibitory activity, especially when used in combination, against both A. baumannii ATCC19606 and P. aeruginosa PAO1. (FIG. 4C) Mouse weight was monitored throughout the experiment (2 days) to rule out potential toxic effects of the encrypted peptides. (FIG. 4D) Schematic of the neutropenic thigh infection mouse model used to assess the anti-infective activity of selected encrypted peptides from plasma proteins. (FIG. 4E) SCUB1-SKE25 (25 μmol L⁻¹, 77.9 μg mL⁻¹) and SCUB3-MLP22 (25 mmol L⁻¹; 66.9 μg mL⁻¹) either alone or in combination reduced infections caused by A. baumannii ATCC19606 and P. aeruginosa PAO1. (FIG. 4F) Mouse weight was monitored throughout the experiment (8 days) to rule out potential toxic effects of the encrypted peptides.

[0013] FIG. 5. Comparison of amino acid usage patterns. The figure shows the frequency of usage of all amino acid residue types in sequences from encrypted peptides (red), the entire human proteome (blue), peptides from DBAASP (green), and peptides from DBAASP (purple) with relative scores above 0.8. The frequency of occurrence of each amino acid residue type shows different residue utilization profiles in each group.

[0014] FIG. 6. Distribution of physicochemical properties for AMPs and encrypted peptides. (FIG. 6A) The plot shows the relation between absolute score [as defined in⁹] and peptide length. Circles represent peptides from the DBAASP database and are colored depending on the ratio between charge and length. Black triangles represent the 55 encrypted peptides experimentally tested in this study. (FIG. 6B) The same AMPs from the DBAASP database and 55 encrypted peptides are shown, in this case correlating hydrophobicity and length.

[0015] FIG. 7. Antimicrobial activity of encrypted peptides expressed in μg mL⁻¹. Briefly, 10⁶ bacterial cells per mL and serially diluted encrypted peptides (0-250 μg mL⁻¹) were added to a 96-well plate and incubated at 37° C. One day post-treatment, the solution in each well was measured in a microplate reader (600 nm) to check for inhibition of bacterial growth compared to the untreated control group. All data are presented as a heat map of antimicrobial activities (μg mL⁻¹) against 8 pathogenic, 11 gut commensal, and 6 skin commensal bacterial strains. Assays were performed in three independent replicates and heat map OD₆₀₀ values are the arithmetic mean of the replicates in each condition.

[0016] FIG. 8. Expression levels of proteins containing encrypted peptides. FIG. 8A: Schematic of the biogeographic region within the human body where proteins containing encrypted peptides are located. Expression levels are displayed in a gradient; organs in blue indicate high expression levels and organs in red, low expression levels. FIG. 8B: Normalized expression level values expressed in log₁₀ intensity based absolute quantification (iBAQ), a commonly used metric for protein abundance⁴⁶.

[0017] FIG. 9. Synergy between encrypted peptides found within the same area of the human body. FIG. 9A: Experimental layout of the 96-well plates used for two-way synergy experiments using pairs of encrypted peptides. The following encrypted peptides were used: apelin-36, apelin receptor early endogenous 1, natriuretic peptide, big dynorphin, FIBa-GVV27, vWF-PQR19, SRFP1-KKI32, SRFP1-FAL48, INTb-FTR26, SCUB1-SKE25, SCUB3-KHK26, and SCUB3-MLP22. Briefly, two-fold dilutions ranging from 0 to 50 μmol L⁻¹ of the peptide solutions were plated in 96-well plates and 10⁶ bacterial cells in Nutrient Broth (NB) were added to each well to reach a final volume of 200 μL. The FIC value, which indicates the degree of synergy between two antimicrobial agents against a target microorganism (in this case, P. aeruginosa PAO1) was calculated based on the MICs of the peptides used alone and in combination. FIC index values ≤0.5 indicate synergy; additive effects are captured by 0.5≤FIC≤1; 1≤FIC≤4 indicates indifference; and FIC index ≥4 represents antagonism.

[0018] FIG. 10. Membrane permeabilization and depolarization assays for several bacterial strains. FIG. 10A: Outer membrane permeabilization experiments showed that encrypted peptides (SCUB1-SKE25, SCUB3-KHK26 and natriuretic peptide) permeabilized the outer membranes of P. aeruginosa PAO1, B. fragilis ATCC25285, and S. epidermidis as much as they permeabilized the A. baumannii ATCC19606 outer membrane (FIG. 3E). FIG. 10B: Cytoplasmic membrane depolarization assays performed against P. aeruginosa PAO1 and the gut commensal B. fragilis ATCC25285. As shown for A. baumannii ATCC19606 (FIG. 3D), the encrypted peptides did not depolarize the cytoplasmic membrane.

### DETAILED DESCRIPTION OF ILLUSTRATIVE EMBODIMENTS

[0019] The presently disclosed inventive subject matter may be understood more readily by reference to the following detailed description taken in connection with the accompanying figures and examples, which form a part of this disclosure. It is to be understood that these inventions are not limited to the specific products, methods, conditions or parameters described and/or shown herein, and that the terminology used herein is for the purpose of describing particular embodiments by way of example only and is not intended to be limiting of the claimed inventions.

[0020] The entire disclosures of each patent, patent application, and publication cited or described in this document are hereby incorporated herein by reference.

[0021] As employed above and throughout the disclosure, the following terms and abbreviations, unless otherwise indicated, shall be understood to have the following meanings.

[0022] In the present disclosure the singular forms “a,” “an,” and “the” include the plural reference, and reference to a particular numerical value includes at least that particular value, unless the context clearly indicates otherwise. Thus, for example, a reference to “a treatment” is a reference to one or more of such treatments and equivalents thereof known to those skilled in the art, and so forth. Furthermore, when indicating that a certain element “may be” X, Y, or Z, it is not intended by such usage to exclude in all instances other choices for the element.

[0023] When values are expressed as approximations, by use of the antecedent “about,” it will be understood that the particular value forms another embodiment. As used herein, “about X” (where X is a numerical value) preferably refers to +10% of the recited value, inclusive. For example, the phrase “about 8” preferably refers to a value of 7.2 to 8.8, inclusive; as another example, the phrase “about 8%” preferably refers to a value of 7.2% to 8.8%, inclusive. Where present, all ranges are inclusive and combinable. For example, when a range of “1 to 5” is recited, the recited range should be construed as optionally including ranges “1 to 4”, “1 to 3”, “1-2”, “1-2 & 4-5”, “1-3 & 5”, and the like. In addition, when a list of alternatives is positively provided, such a listing can also include embodiments where any of the alternatives may be excluded. For example, when a range of “1 to 5” is described, such a description can support situations whereby any of 1, 2, 3, 4, or 5 are excluded; thus, a recitation of “1 to 5” may support “1 and 3-5, but not 2”, or simply “wherein 2 is not included.” The phrase “at least about x” is intended to embrace both “about x” and “at least x”. It is also understood that where a parameter range is provided, all integers within that range, and tenths thereof, are also provided by the invention. For example, “2-5 hours” includes 2 hours, 2.1 hours, 2.2 hours, 2.3 hours etc., up to 5 hours.

[0024] Publications with potential relevance to the presently disclosed subject matter are cited in the present disclosure using superscripted numerals that correspond to the numbered references that are listed in the present disclosure under the heading “References”, infra.

[0025] A broad array of computational methods have been developed to expedite drug development, usually focusing on small molecule docking and optimization⁵. However, the application of such methods for antibiotic discovery is still in its infancy⁶. The computer-aided design of antimicrobial peptides (AMPs)^{7,8} has surged as a promising source of new bioactive compounds, which could provide alternatives to conventional antibiotics. AMPs are small molecules (for example, 8 to 50 amino acid residues in length) produced by virtually all living organisms⁹, usually presenting amphipathic and cationic sequences. Here, the present inventors used certain physicochemical features of amino acids to inform a scoring function that comprehensively searched the human proteome for novel antimicrobials (FIG. 1A).

[0026] Disclosed herein are methods for computationally identifying candidate encrypted peptides with predicted antimicrobial activity comprising: i) identifying a peptide segment of a protein sequence from the human proteome, the segment being defined by a first sequence window of 5 to 80 amino acids in length, wherein the first residue within the sequence window represents the first residue within the protein sequence; ii) assigning the identified peptide segment a score based on a scoring function that determines mean hydrophobicity, net charge, and length of the peptide, increases the determined mean hydrophobicity by 0.9, increases the determined net charge by 1.1, and multiples all obtained values linearly; iii) identifying a further peptide segment of the protein sequence, the further peptide segment also being defined by the first sequence window length, but wherein the first residue within the sequence window for the further peptide segment represents the second residue within the protein sequence; iv) assigning the further identified peptide segment a score based on said scoring function; v) conducting additional scans of the protein sequence until all segments defined by the sequence window have been identified, and assigning each of the identified segments a score based on the scoring function; vi) ranking all identified segments by score; and, vii) repeating each of steps i)-vi) for all protein sequences from the human proteome; wherein the segments that are ranked among the top 1,000 using the scoring function represent the candidate encrypted peptides for the first sequence window length.

[0027] The computational method disclosed herein therefore scans the human genome to find candidate encrypted peptides with predicted antimicrobial activity. The method can utilize one or more of the following: (1) the translated Coding Sequences from the Homo Sapiens genome reconstruction provided by UniProt (publicly available at https://www.uniprot.org/). This is also known as the “human proteome”; (2) a previously developed “scoring function” made public in Pane, K, et al., Journal of Theoretical Biology Volume 419, 21 Apr. 2017, Pages 254-265; and (3) publicly available software development tools and packages in Python. In some embodiments, each of these resources is used pursuant to the present methods.

[0028] Preferably, the method scans protein sequences using a “sliding window” technique where, given a window length “L”, every sub-sequence of length “L” is used to calculate a score. For example, in a protein with 100 amino acid, and a window length of 10, the amino acids 1 through 10 will be analyzed as a sub-sequence, then 2 to 11, then 3 to 12, until the window 91 to 100 is verified. In this example, 91 scores for 91 subsequences will be calculated for this protein. The present method scans all proteins in the human proteome with windows of length 5 to 80 (a total of 75 possible window lengths). In some embodiments, the window length is narrower, e.g., 6 to 80, 6 to 75, 6 to 70, 7 to 65, 7 to 60, 7 to 55, 8 to 55, or 8 to 50 residues. In some embodiments, as described more fully below, the methods may use a parallel strategy to significantly accelerate the scanning process. The present method also increases diversity in amino acid sequences by minimizing overlapping sequences and optimizes the search for novel predicted antimicrobial peptides. This method enables the filtering the hundreds of millions of possible sub-sequences in the human proteome down a desired subset. For example, using the present methods, a subset of 43,000 candidate peptide sequences (SEQ ID NOS:1-43000, submitted herewith as Appendix A) was identified.

[0029] The present methods may further comprise repeating each of steps i)-vii) for a second sequence window length of 5 to 80 amino acids that is different from the first sequence window length, wherein the segments that are ranked among the top 1,000 using the scoring function represent the candidate encrypted peptides for the second sequence window length. For example, if the sequence window length was 8 residues, then the second sequence window length may be any number from 9 to 50. Thus, the present methods may include repeating each of steps i)-vii) for at least one other possible sequence window length from 5 to 80 amino acids. In some embodiments, the methods comprise repeating each of steps i)-vii) for every other possible sequence window length from 5 to 80 amino acids.

[0030] The ranking process of step vi) may exclude from the ranking consecutive segments having a sequence overlap of about 50% or more. More specifically, given a window size of 10 and an initial “base sequence” in a protein (e.g., amino acids 1 through 10), the next selected subsequence of that protein will be the one with the highest score among all 10-residue long sub-sequences that start in residues 6 through 15. If, for example, the sub-sequence between amino acids 8 and 17 has the highest score, that will be the new “base sequence”, and the process starts again.

[0031] In some embodiments, the protein sequences from the human proteome includes all protein sequence isoforms from the human proteome. Previous methods did not include protein isoforms.

[0032] The methods may include performing step i) with respect to a second protein sequence at substantially the same time as performing step i) with respect to the first protein sequence, using the same sequence window of 5 to 80 amino acids. In other words, a scan of a first protein sequence using a certain window length may be performed in isolation, or alternatively at substantially the same time as scans of a different protein sequence using the same window length. The “parallel strategy” of scanning different proteins at the same time (i.e., simultaneously scanning multiple proteins for each window length), enhances the efficiency of the method. A scan of a first protein sequence that occurs at substantially the same time as a scan of a second protein sequence using the same window length refers to situations in which there is temporal overlap between the respective scans. Accordingly, a scan of a first protein sequence that occurs during a time period that at least partially overlaps the time period during which a scan of a second protein sequence occurs can be said to be at substantially the same time. When there is no overlap between the time period during which a scan of a first protein sequence occurs and the time period during which a scan of a second protein sequence occurs, then the treatments may be described as sequential. Thus, in certain embodiments, scans of respective protein sequences may occur sequentially.

[0033] Also provided herein are peptides that were identified using the presently disclosed methods for identifying antimicrobial candidate peptides, wherein said peptide is any one of SEQ ID NOS:1-43055. Also provided herein are methods of treating a microbial infection comprising administering to a subject in need thereof a pharmaceutically effective amount of a peptide of any one of SEQ ID NOS: 1-43055. The present disclosure also provides methods of treating a microbial infection comprising administering to a subject in need thereof a pharmaceutically effective amount of a peptide of any one of SEQ ID NOS:43001-43055. Also disclosed are methods of treating a microbial infection comprising administering to a subject in need thereof a pharmaceutically effective amount of any two or more of SEQ ID NO: 43016, SEQ ID NO: 43015, natriuretic peptide A, SEQ ID NO: 43014, SEQ ID NO: 43024, SEQ ID NO: 43032, SEQ ID NO: 43040, SEQ ID NO: 43039, SEQ ID NO: 43041, SEQ ID NO: 43033, SEQ ID NO: 43034, and SEQ ID NO: 43035. For example, the methods may comprise administering to the subject a peptide of SEQ ID NO: 43033 and a peptide of SEQ ID NO: 43035.

[0034] The microbial infection that may be treated according to the present methods may be, for example, viral or bacterial. When the microbial infection is viral, it may include any known viral pathogen. When the microbial infection is bacterial, it may include any known bacterial pathogen. In certain embodiments, the infection may include, Escherichia coli ATCC11775, Pseudomonas aeruginosa PAO1, Pseudomonas aeruginosa PA14, Staphylococcus aureus ATCC12600, Escherichia coli AIG221, E. coli AIG222, Klebsiella pneumoniae ATCC133883, and Acinetobacter baumannii ATCC19606, or any combination thereof.

### EXAMPLES

[0035] The present invention is further defined in the following Examples. It should be understood that these examples, while indicating preferred embodiments of the invention, are given by way of illustration only, and should not be construed as limiting the appended claims. From the above discussion and these examples, one skilled in the art can ascertain the essential characteristics of this invention, and without departing from the spirit and scope thereof, can make various changes and modifications of the invention to adapt it to various usages and conditions.

### Example 1—Identification of Candidate Peptides

[0036] To find novel antibiotic scaffolds, the present inventors intentionally avoided the use of known conserved amino acid sequences (i.e., patterns and motifs) found in previously described AMPs. Instead, physicochemical properties were utilized to guide the discovery approach. This allowed a focus on the balance of key physicochemical features to discover a new region of peptide sequence space populated with antimicrobial peptide sequences (FIG. 5). The search algorithm was based on key physicochemical determinants of AMPs, including net charge, average hydrophobicity, and sequence length, integrated into a fitness function 10 that selects for antimicrobial sequences. Using this scoring function, the entire human proteome, including protein isoforms, was scanned to find peptides ranging from 5 to 80 residues in length, with predicted antimicrobial activity. From the hundreds of millions of possible peptides within 42,361 protein sequences, a total of 43,000 peptide candidates were identified (Appendix A). The Panther Classification System¹¹ was then applied to analyze genes coding for peptides with predicted antimicrobial activity, where an overrepresentation of genes for secreted or membrane-bound proteins was found, as well as an underrepresentation of DNA-bound and gene regulatory proteins (FIG. 1B). This observation supports the hypothesis that encrypted peptides have been evolutionarily selected and maintained in proteins that are exposed to the extracellular environment, where they are more likely to encounter pathogens upon injury and infection.

[0037] The search was focused on the most potent and promising encrypted peptides in the human proteome, and the sequences of secreted proteins was scanned to discover 2,603 predicted peptide antibiotics (Table 1).

TABLE 1
Amino acid frequency in encrypted peptides compared to AMPs from DBAASP.

| | | | | | Amino Acid |
|---|---|---|---|---|---|
| Amino | | Frequency (%) | | Ratio | Type Ratio |
| Acid | Amino Acid | Encrypted | Antimicrobial | (Encrypted/ | (Encrypted/ |
| Type | Residue | Peptides | Peptides | Antimicrobial) | Antimicrobial) |
| Aliphatic | Alanine | 5.1 | 7.2 | 0.71 | 1.00 |
| | Glycine | 3.2 | 8.0 | 0.40 | |
| | Isoleucine | 7.3 | 6.6 | 1.10 | |
| | Leucine | 17.6 | 11.2 | 1.56 | |
| | Proline | 3.2 | 4.3 | 0.75 | |
| | Valine | 6.6 | 5.6 | 1.17 | |
| Aromatic | Phenylalanine | 6.7 | 4.7 | 1.43 | 1.16 |
| | Tryptophan | 2.7 | 3.6 | 0.75 | |
| | Tyrosine | 2.8 | 2.2 | 1.28 | |
| Acidic | Aspartic acid | 0.5 | 1.7 | 0.31 | 0.32 |
| | Glutamic acid | 0.8 | 2.4 | 0.33 | |
| Basic | Arginine | 15.0 | 9.3 | 1.62 | 1.08 |
| | Histidine | 1.9 | 2.0 | 0.92 | |
| | Lysine | 11.2 | 14.7 | 0.76 | |
| Polar | Asparagine | 1.9 | 2.7 | 0.71 | 0.942 |
| | Cysteine | 1.9 | 3.3 | 0.58 | |
| | Glutamine | 2.7 | 2.3 | 1.14 | |
| | Methionine | 2.3 | 1.0 | 2.40 | |
| | Serine | 3.8 | 4.1 | 0.93 | |
| | Threonine | 2.8 | 2.9 | 0.96 | |

The identified molecules belonged to two major classes: 1) previously undescribed encrypted peptides derived from proteins with various biological functions, such as plasma proteins, coagulation factors, protein inhibitors, enzymes, and signaling cascade factors; and 2) peptide hormones with well-described putative functions but previously undisclosed antibiotic properties, such as neuropeptides, regulators of G-protein coupled receptors (GPCRs), and diuretic hormones (FIG. 1B). To validate the predictions made by the inventive algorithm, 55 representative peptides (Appendix B, SEQ ID NOS: 43001-43055) were synthesized and characterized in detail; these peptides exhibited a range of predicted scores given by the fitness function and were derived from the cardiovascular, nervous, renal, hematopoietic, and digestive systems.

[0038] Importantly, the amino acid patterns among the 55 encrypted peptides were significantly different from those of AMPs present in the broadly used DBAASP database¹² (FIG. 2A), even when searches were based on the physicochemical properties displayed by these classical AMPs (FIG. 6). Previously identified AMPs contain motifs and repeats of cationic and hydrophobic amino acid residues, creating an amphipathic structure that plays a key role in their mechanism of action. In contrast, the encrypted peptides we identified displayed heterogeneous sequences that diverged from those of the AMPs. While most AMPs described in the literature¹³ present sequences with 40-60% hydrophobic residues (e.g., leucine, isoleucine, valine, proline, glycine and alanine) and cationic residues (e.g., histidine, lysine and arginine), the encrypted peptides described here displayed a substantially higher content of hydrophobic (16.3%) and basic (8.1%) amino acid residues and a lower content of polar (5.8%) and acidic (68.0%) residues than reported for AMPs, while the content of aliphatic residues was similar (Table 1). For example, out of the nine most common amino acid residues found in AMPs (alanine, arginine, glycine, isoleucine, leucine, lysine, phenylalanine, proline, and valine)¹², four hydrophobic residues (phenylalanine, isoleucine, leucine, and valine) and the basic amino acid residue arginine were more frequently represented in encrypted peptides than in AMPs. AMPs, on the other hand, display small aliphatic and cationic residues (i.e., alanine, glycine, and lysine) at higher frequency than encrypted peptides (FIG. 2A). These data suggest that the encrypted peptides identified and described here may represent a novel class of natural peptide antibiotics, which does not necessarily rely on amphipathic structures but instead consists of arginine-rich, slightly more hydrophobic sequences.

[0039] Methods: Human proteome screening for encrypted peptides. To scan the human proteome, all canonical and isoform sequences of Homo sapiens proteins were downloaded from UniProt⁴⁹. A Python script was used to scan all proteins using multiple moving windows with lengths ranging from 5 to 80 residues, leading to millions of peptide sequences. Each sequence was scored using the method described in Pane, et. al.¹⁰, which uses peptide length, charged residues and hydrophobic residues to create a score for the propensity of the peptide to present antimicrobial activity. After the scan, identical peptide sequences were filtered out (even if present in multiple proteins or isoforms) so that only unique sequences were present in the final dataset. Finally, the top 1,000 scoring peptides per sequence length were combined to form a 43,000-long dataset of candidates from across the human genome. An analogous search was carried out to generate a final list of top candidates, but this time, focusing solely on secreted proteins, as those were predicted to provide more biologically relevant encrypted peptides. Peptide Synthesis. The peptides were synthesized using solid-phase peptide synthesis and N-9-fluoromethyloxycarbonyl (Fmoc) strategy. They were purified by high-performance liquid chromatography (HPLC). The peptide purity used in all assays was higher than 95%.

### Example 2—Assessment of Antimicrobial Activity

[0040] A library composed of 55 encrypted peptides (SEQ ID NOS: 43001-43055—see Appendix B) was synthesized and antimicrobial activity was assessed against 8 clinically relevant pathogens (Escherichia coli ATCC11775, Pseudomonas aeruginosa PAO1, Pseudomonas aeruginosa PA14, Staphylococcus aureus ATCC12600, E. coli AIG221, E. coli AIG222, Klebsiella pneumoniae ATCC133883, and Acinetobacter baumannii ATCC19606—FIG. 2B and FIG. 7), all of which play a major role in infectious diseases and are ranked in the World Health Organization's watchlist 2. Lead encrypted peptides that completely sterilized bacterial cultures (˜10⁶ bacterial cells mL⁻¹) were identified of at least one of these eight pathogens (FIG. 2B and FIG. 7). The majority (63.6%) of the encrypted peptides synthesized and tested displayed antimicrobial activity against pathogens (FIG. 2B and FIG. 7), thus validating the inventive algorithm and indicating the peptides' potential role in host defense, even though they are derived from proteins involved in processes unrelated to the immune system.

[0041] In addition to their ability to kill pathogenic organisms, several peptides targeted human commensals from the gut and skin microbiota (FIGS. 2B and 2C), an interesting observation given that some previously described natural peptides are inactive against indigenous microbiota members¹⁴. The 13 most abundant members of the human gut microbiota¹⁵ were exposed to increasing concentrations of the peptides. Species from four different phyla were used to determine susceptibility to the encrypted peptides: Akkermansia muciniphila (Verrucomicrobia); Bacteroides fragilis, Bacteroides thetaiotaomicron, Bacteroides vulgatus, Bacteroides uniformis, Bacteroides eggerthi, Parabacteroidetes distasonis, and Prevotella copri (Bacteroidetes); Collinsella aerofaciens (Actinobacteria); and Clostridium scindens and Clostridium spiroforme (Firmicutes). The peptides displayed low micromolar antimicrobial activity against Gram-positive commensals, and five lead peptides were also able to target A. muciniphila and Bacteroidetes species.

[0042] One of the five lead antimicrobial candidates, CPX1-HVR25, derives from the probable carboxypeptidase X1, a protein expressed in many organs that may be involved in cell-cell interactions, collagen binding¹⁶, and regulation of adipogenesis¹⁷; this peptide is classified as a metallocarboxypeptidase based on sequence similarity, although no carboxypeptidase activity has been reported¹⁸. PSPI-KTL24, another peptide with activity against A. muciniphila, a beneficial member of the gut microbiome that has been shown to contribute to obesity, glucose metabolism and intestinal immunity¹⁹, derives from the human plasma serine protease inhibitor and is present throughout the body in the bloodstream. This peptide is responsible for the inactivation of serine proteases by irreversibly binding to their serine activation site and is involved in the regulation of intravascular and extravascular proteolytic activities. In addition, it plays hemostatic roles in blood plasma, acting as a procoagulant and pro-inflammatory factor by inhibiting the anticoagulant activated protein C factor as well as generating the activated protein C factor by thrombin/thrombomodulin complex²⁰. The peptides SCUB1-SKE25, SCUB3-KHK26, and SCUB3-MLP22 also showed potent activity against Gram-negative gut commensals. These are fragments from the terminal portions of two different CUB (complemented C1r/C1s, Uegf, Bmp1) domains, which are structural motifs found in extracellular and plasma membrane-associated proteins. Proteins containing the CUB domains are involved in a diverse range of functions, including developmental patterning, tissue repair, axon guidance and angiogenesis, cell signaling, fertilization, hemostasis, inflammation, neurotransmission, receptor-mediated endocytosis, tumor suppression²¹, and complement activation, which has been shown to contribute to innate immunity by generating antibacterial peptides²². Altogether, the present findings suggest that encrypted peptides may be involved in shaping the gut microbiota, with implications for human health as disruptions in gut commensal communities have been associated with numerous diseases, including obesity, diabetes, inflammatory bowel disease, colitis, cancer and neurodegenerative disorders^{23,24}. Encrypted peptides also targeted skin commensals, including Gram-positive strains isolated from healthy patients, including Micrococcus luteus, Staphylococcus capitis, Staphylococcus epidermidis, Staphylococcus hominis, Staphylococcus haemolyticus, and Staphylococcus warneri (FIG. 2B). Perturbations of the skin microbiota have been associated with conditions such as atopic dermatitis, rosacea, psoriasis, and acne^{25,26}; again, our results revealed novel microbiota-modulating functions of natural peptides. Similar to the gut microbiota experiments, the peptides were active against skin commensals at low micromolar doses (FIG. 2B). To assess the predictive power of our physicochemical-based scoring function, we correlated experimentally determined minimal inhibitory concentrations (MICs) of encrypted peptides with their predicted scores. Generally, the antimicrobial activity of the peptides correlated with their predicted scores against pathogens, and gut and skin commensals (FIG. 2C), and at least 80% of the 55 tested encrypted peptides targeted either pathogens, gut, or skin commensals.

[0043] Methods: Bacterial strains and media. The strains used in this study were the pathogens Escherichia coli ATCC11775, Acinetobacter baumannii ATCC19606, Pseudomonas aeruginosa PAO1, Pseudomonas aeruginosa PA14, Staphylococcus aureus ATCC12600, Escherichia coli AIG221, Escherichia coli AIG222 (colistin-resistant strain), Klebsiella pneumoniae ATCC13883, and the gut commensals Akkermansia muciniphila ATCCBAA-635, Bacteriodetes fragilis ATCC25285, Bacteroidetes thetaiotaomicron ATCC29148, Bacteroidetes eggerthi ATCC27754, Bacteroidetes uniformis ATCC8492, Bacteroidetes vulgatus ATCC8482, Parabacteroidetes distasonis ATCC8503, Prevotella copri DSMZ18205, Colinisella aerofaciens ATCC25986, Clostriudium seindens ATCC35704. In addition, we used the following skin commensals in this study: Micrococcus luteus, Staphylococcus capitis, Staphylococucus epidermidis, Staphylococcus haemolyticus, Staphylococcus hominis and Staphylococcus warneri. Pathogenic bacteria were grown and plated on Luria-Bertani (LB) and Pseudomonas Isolation (Pseudomonas aeruginosa strains) agar plates incubated overnight at 37° C., gut microbiome commensals were grown and plated on brain heart infusion (BHI) agar plates supplemented with vitamin K3, hemin and L-cysteine from frozen stocks incubated overnight at 37° C., and skin microbiome commensals were grown in nutrient broth (NB) and plated in tryptic soy broth (TSB) from 4° C. stocks which were incubated overnight at 37° C. Following the incubation period, one isolated colony was transferred to 5 mL of medium (LB, NB or supplemented BHI broth), which were incubated overnight (12-16 h) at 37° C. In the following day, inoculums were prepared by diluting the bacterial overnight solutions 1:100 in 5 mL of the respective media and incubated at 37° C. until logarithmic phase (OD₆₀₀=0.3-0.5). Antibacterial assays. Minimum inhibitory concentrations (MICs) of peptides were determined using the broth microdilution technique in LB, NB and supplemented BHI with an initial inoculum of 5×10⁶ cells in nontreated polystyrene microtiter plates (Corning, USA). Peptides were added to the plate as solutions in LB, NB and supplemented BHI broth in concentrations ranging from 0 to 128 μmol L⁻¹. The MIC was considered as the lowest concentration of peptide that completely inhibited the visible growth (readings were made in a spectrophotometer at 600 nm) of bacteria after 24 h of incubation of the plates at 37° C. All assays were done in three independent replicates.

### Example 3—Synergistic Antimicrobial Activity

[0044] Next, it was investigated whether peptides from the same biogeographical area could synergize to target bacteria at levels that are physiologically relevant (i.e., in most cases from picomolar to millimolar concentrations) (Table 2 and FIG. 8).

TABLE 2
Expression levels in the human body of several proteins
containing 37 of the encrypted peptides studied.

| | | Expression | |
|---|---|---|---|
| | UniProt | levels | Related Encrypted |
| Protein | ID | (pmol L⁻¹)⁴⁶ | peptide(s) |
| Probable carboxypeptidase X1 | Q96SM3 | 10⁶ | CPX1-HVR25 |
| C-X-C motif chemokine 9 | Q07325 | 10⁻⁴ | CXC19-VKE44 |
| Secretin | P09683 | 10⁻⁵ | Secretin |
| Natriuretic peptide A | P01160 | 10⁻⁵ | Natriuretic peptide A |
| Urocortin | P55089 | 10⁻¹ | Urocortin |
| Napsin-A | O96009 | 10⁶ | NAPP-LIR38 |
| | | | NAPP-LIR23 |
| Plasma serine protease inhibitor | P05154 | 10¹¹ | PSPI-KTL24 |
| Follicular dendritic cell secreted | Q8NFU4 | 10⁻⁶ | FDSCP-PYP41 |
| peptide | | | FDSCP-PYP29 |
| Interleukin-26 | Q9NPH9 | 10⁻² | IL26-ALY34 |
| | | | IL26-ALY35 |
| Human serum albumin | P02768 | 10¹⁶ | HSA-YKF36 |
| | | | HSA-KER30 |
| | | | HSA-TFL34 |
| | | | HSA-GKA38 |
| Fibroblast growth factor 5 | P12034 | 10⁻¹ | FGF5-KKK33 |
| | | | FGF5-KKK19 |
| Fibrinogen alpha chain | P02671 | 10¹⁴ | FIBa-GVV27 |
| | | | FIBa-SFR22 |
| Fibrinogen beta chain | P02675 | 10¹⁴ | FIBb-GVV28 |
| | | | FIBb-NWK23 |
| Fibrinogen gamma chain | P02679 | 10¹⁴ | FIBg-GII30 |
| | | | FIBg-TWK25 |
| Interferon beta | P01574 | 10⁻² | INTb-AWT25 |
| | | | INTb-FTR26 |
| Interferon kappa | Q9P0W0 | 10⁰ | INFk-AWE26 |
| Secreted frizzled-related protein 1 | Q8N474 | 10⁸ | SFRP1-FAL48 |
| | | | SFRP1-KKI32 |
| Signal peptide, CUB and EGF- | Q8IX30 | 10⁻² | SCUB3-KHK26 |
| like domain-containing protein 3 | | | SCUB3-MLP22 |
| Signal peptide, CUB and EGF- | Q8IWY4 | 10² | SCUB1-MPF22 |
| like domain-containing protein 1 | | | SCUB1-SKE25 |
| von Willebrand factor | P04275 | 10¹⁰ | vWF-PQR44 |
| | | | vWF-PQR29 |
| | | | vWF-PQR19 |
| Proenkephalin-B | P01213 | 10⁸ | Big dynorphin |

Remarkably, one pair of encrypted peptides synergized to kill pathogens at low micromolar to nanomolar concentrations both in vitro and in animal models (FIG. 3A and FIG. 4B and FIG. 9), displaying activity comparable to, and with even higher potency in some cases than, the most potent venom-derived peptides^{27,28} and defensins from the human immune system²⁹. To investigate synergy, the activity between combinations of 12 peptides was evaluated: apelin receptor early endogenous 1, apelin-36, big dynorphin, natriuretic peptide and encrypted peptides from the coagulation factors, blood glycoproteins, serine proteases, cytokines and the CUB domains. These peptides were assessed for their ability to synergize with each other to inhibit the growth of the Gram-negative pathogenic bacterium Pseudomonas aeruginosa PAO1. The 12 peptides tested in synergy assays were selected on the basis of their potency against P. aeruginosa, an intrinsically resistant bacterium 30 that infects the urinary tract, gastrointestinal tissue, and skin and soft tissues; P. aeruginosa also causes pneumonia and is one of the most common opportunistic pathogens in patients with cystic fibrosis 31. To quantify synergistic interactions between peptides, their fractional inhibitory concentration (FIC) index was determined as previously described^{32,33}. For most of the peptide combinations tested (82%), the peptides interacted additively, with FIC values ranging from 0.6 to 1 (FIG. 9). Highly synergistic interactions (FIC≤0.5) (FIG. 9) were observed between the peptide hormones big dynorphin and apelin receptor early endogenous 1. Big dynorphin is the most potent endogenous opioid peptide, having affinity for k-opioid receptors produced in the brain, and is involved in pain response, control of appetite, circadian rhythms, and temperature regulation³⁴. Apelin receptor early endogenous 1, on the other hand, is responsible for mesendodermal differentiation, blood vessel formation, and heart morphogenesis³⁵. To test synergistic interactions involving more than 2 encrypted peptides derived from the same protein, 3-way synergy experiments were designed and performed. Three representatives were selected from the CUB domains 1 and 3 (SCUB1-SKE25, SCUB1-MPF22, and SCUB3-MLP22), which were active against the Gram-negative pathogen A. baumannii at extremely low concentrations (1.56-3.12 μmol L⁻¹; 4.9-8.2 μg mL⁻¹) comparable to the inhibitory concentrations of standard-of-care antibiotics (e.g., polymyxin B)³⁶. The combination of the 3 peptides increased their individual antimicrobial activity by 100-fold, yielding MIC values of 40-90 nmol L⁻¹ (125-280 ng mL⁻¹) and a combined FIC index of 0.2 (FIG. 3A). Overall, these results are significant because a number of parent proteins containing several of the encrypted peptides reported here are produced physiologically at levels at which the peptides present antimicrobial activity (Table 2 and FIG. 8)³⁷. The ability of these agents to potentiate each other's antibiotic properties further underscores their potential involvement in innate defense.

[0045] Methods: Synergy Assays. P. aeruginosa PAO1 and A. baumannii ATCC19606 were chosen for the synergy assays because of their relevance as pathogens that are intrinsically resistant to antimicrobials 30 their ability to infect the urinary tract, gastrointestinal tissue, and skin and soft tissues. After determination of the MIC for each peptide, the most active encrypted peptides against P. aeruginosa and A. baumannii were orthogonally diluted using the microdilution technique with concentrations ranging from 2-fold MIC to 0.03-fold MIC. Plates were incubated for 24 h at 37° C. All assays were done in three independent replicates.

### Example 4—Resistance Assays

[0046] In any antibiotic discovery effort, it is crucial to assess how readily the molecules identified select for resistance mechanisms in bacteria, as the emergence of resistance has hampered the antibiotic field since its very inception with the discovery of penicillin in 1928³⁸. To determine whether bacteria become resistant to encrypted peptides, longitudinal resistance assays were performed with peptides derived from the CUB domains 1 and 3 against A. baumannii, using polymyxin B as a control (FIG. 3B). Bacterial cells became highly resistant to polymyxin B after 26 days, when concentrations needed to kill A. baumannii increased by as much as 256-fold (FIG. 3B). Conversely, treatment with the encrypted peptides did not lead to the evolution of spontaneous peptide-resistant A. baumannii mutant cells over the same time period (FIG. 3B). These results identify encrypted peptides as agents that do not readily select for bacterial resistance and point towards a different mechanism of action than that of the AMPs, such as polymyxin B, which have already been characterized.

[0047] Methods: Bacterial resistance development assays. The evolution of resistance by A. baumannii cells to encrypted peptides was monitored for 30 days of serial passaging in liquid nutrient broth. The experiment was designed to avoid population extinction. Thus, peptides and polymyxin B, which was used as control, were plated in checkerboard pattern to avoid cross-contamination at concentrations ranging from 8- to 0.25-fold MIC. Bacterial loads of 10⁶ cells were added in each passage and the sub-inhibitory concentrations (0.5-fold MIC) were considered as the first concentration of peptide that inhibited cell growth by ˜50%. Bacteria remaining upon treatment with sub-inhibitory concentrations were re-grown overnight and after each incubation period, a new inoculum of 10⁶ cells was prepared for inoculation of the following passage containing fresh medium and increased doses of the antimicrobial agent. To ensure reproducibility, three parallel experiments with two technical replicates per compound were performed. Cells were passaged every 48 h.

### Example 5—Membrane Studies

[0048] In order to investigate the mode of action of encrypted peptides against bacterial cells, assays were performed to study their effects on the bacterial membrane. First, the ability of encrypted peptides to disrupt and depolarize the bacterial cytoplasmic membrane was assessed (FIG. 3C). 3,3′-dipropylthiadicarbocyanine iodide [DiSC₃(5)] was used, a potentiometric fluorophore that accumulates and aggregates in the cytoplasmic membrane, quenching its fluorescence. Upon imbalances of the cytoplasmic membrane transmembrane potential, the fluorophore migrates to the cytoplasm or the outer environment, generating fluorescence. None of the peptides tested depolarized the cytoplasmic membrane of either pathogenic or commensal bacterial cells to the extent of the positive control group treated with polymyxin B, a well-known depolarizing peptide antibiotic that permeabilizes and disrupts bacterial membranes (FIG. 3D and FIG. 10). These data reveal that encrypted peptides operate via a mechanism that is independent of cytoplasmic membrane depolarization and thus distinct from that of AMPs characterized so far. In order to assess whether encrypted peptides permeabilized the outer membrane, 1-(N-phenylamino)naphthalene (NPN) assays were performed. NPN, a lipophilic dye that fluoresces weakly in aqueous environments but whose fluorescence is greatly increased upon contact with lipidic environments such as bacterial membranes, was added to bacterial solutions (FIG. 3E). NPN does not permeate the bacterial outer membrane unless the membrane is damaged, or its integrity has been compromised. Bacteria exposed to the most active encrypted peptides (i.e., natriuretic peptide, which is responsible for inducing the excretion of sodium by the kidneys, SCUB1-SKE25 and SCUB3-MLP22) at their MIC values (FIG. 3E) emitted increased fluorescence compared to either the untreated control group or to cells treated with the positive control AMP polymyxin B. Thus, encrypted peptides exhibited increased ability to permeabilize the outer membrane compared to conventional AMPs. Overall, these data suggest that the encrypted peptides do not affect the cytoplasmic membrane of bacteria but instead exert their inhibitory effects by permeabilizing the outer membrane.

[0049] Methods: Membrane depolarization assays. The cytoplasmic membrane depolarization activity of the peptides was determined by measurements of fluorescence of the membrane potential-sensitive dye, DiSC₃(5). Briefly, A. baumannii ATCC19606, P. aeruginosa PAO1 and B. fragilis ATCC25285 were grown at 37° C. with agitation until they reached mid-log phase (OD₆₀₀=0.5). The cells were then centrifuged and washed twice with washing buffer (20 mmol L⁻¹ glucose, 5 mmol L⁻¹ HEPES, pH 7.2) and re-suspended to an OD₆₀₀ of 0.05 in the same buffer (20 mmol L⁻¹ glucose, 5 mmol L⁻¹ HEPES, pH 7.2) but containing 0.1 mol L⁻¹ KCl. Thereafter, the cells (100 μL) were incubated for 15 min with 20 nmol L⁻¹ of DiSC₃(5) until a stable reduction of fluorescence was achieved, indicating the incorporation of the dye into the bacterial membrane. Membrane depolarization was then monitored by observing the change in the fluorescence emission intensity of the membrane potential-sensitive dye, DiSC₃(5) (λₑₓ=622 nm, λₑₘ=670 nm), after the addition of peptides (100 μL solution at MIC values). Membrane permeabilization assay. The membrane permeability of the peptides was determined by using the N-phenyl-1-napthylamine (NPN) uptake assay. A. baumannii ATCC19606, P. aeruginosa PAO1, S. epidermidis and B. fragilis ATCC25285 were grown to an OD₆₀₀ of 0.4, centrifuged (10,000 rpm at 4° ° C. for 10 min), washed and resuspended in buffer (5 mmol L⁻¹ HEPES, 5 mmol L⁻¹ glucose, pH 7.4). 4 μL of NPN solution (0.5 mmol L⁻¹-working concentration of 10 μmol L⁻¹ after dilutions) was added to 100 μL of the bacterial solution in a white 96-wells plate. The background fluorescence was recorded at λₑₓ=350 nm and λₑₘ=420 nm. Peptides solution in water (100 μL solution at their MIC values) were added to the 96-wells plate, and fluorescence was recorded as a function of time until no further increase in fluorescence was observed (20 min).

### Example 6—In Vivo Models

[0050] To test whether the peptides retain their antimicrobial activity in a complex living system, their properties in two mouse models were assessed. The most active encrypted peptides, SCUB1-SKE25 and SCUB3-MLP22, were selected. Since these peptides are mostly found in plasma, a relevant skin abscess mouse model was used to test their anti-infective activity (FIG. 4A). Mice were infected with bacterial loads of 10⁵ and 10⁶ cells in 20 μL of the clinically relevant Gram-negative pathogens P. aeruginosa and A. baumannii, respectively (FIG. 4B). A single dose of each encrypted peptide (25 μmol L⁻¹, 77.9 μg mL⁻¹ and 66.9 μg mL⁻¹) delivered to the infected area markedly reduced the bacterial load by 3 orders of magnitude, highlighting the anti-infective potential of these agents. In order to validate the synergistic effects obtained in vitro (FIG. 3D and FIG. 9), infected mice were treated with combinations of encrypted peptides (FIG. 4B). Treatment with a combination of SCUB1-SKE25 and SCUB3-MLP22 significantly decreased bacterial counts by 5 and 6 orders of magnitude for A. baumannii and P. aeruginosa, respectively (FIG. 4B). No damage or deleterious effects exerted by the peptides were detected in the mice in any of our experiments. Of note, the anti-infective activity displayed by the encrypted peptides was comparable to that of some of the most potent antimicrobial peptides described to date, such as polybia-CP and PaDBS1R6^{28,39-42}.

[0051] Next, the efficacy of the same encrypted peptides (SCUB1-SKE25 and SCUB3-MLP22) was assessed in monotherapy and in combination therapy in a murine thigh infection model (FIG. 4D). This preclinical model is sensitive, standardized, and widely used for assessing antibiotic translatability^{43,44}. Briefly, mice were rendered neutropenic by cyclophosphamide treatment prior to intramuscular infection with 10⁶ cells mL⁻¹ of the bacterial pathogens P. aeruginosa and A. baumannii (FIG. 4E). Either a single dose of each encrypted peptide (at 25 μmol L⁻¹) or their combination (also at 25 μmol L⁻¹) were delivered to the infected site via intramuscular administration. Three days post-treatment, on average the peptides reduced the bacterial load of P. aeruginosa and A. baumannii by 4 and 2 orders of magnitude, respectively, compared to untreated mice. Compared to untreated controls, treatment with SCUB1-SKE25 and SCUB3-MLP22 significantly decreased bacterial counts of both pathogens by 3 orders of magnitude, and combination treatment reduced by 7 and 5 orders of magnitude infections caused by P. aeruginosa and A. baumannii, respectively (FIG. 4E). Importantly, no significant changes in weight, a proxy for toxicity, were observed in our experiments (FIG. 4C and FIG. 4F), thus further demonstrating the lack of toxicity of the encrypted peptides in relevant mouse models. These in vivo results demonstrate the antibiotic and synergistic properties of encrypted peptides under physiological conditions and strongly suggest that the peptides constitute excellent candidates for the development of antibacterial agents.

[0052] Methods: Skin abscess infection mouse model. A. baumannii ATCC19606 and P. aeruginosa strain PAO1 were used to infect the murine skin. Briefly, bacteria were grown in tryptic soy broth (TSB) medium. Subsequently, cells were washed twice with sterile PBS (pH 7.4, 13,000 rpm for 1 min), and resuspended to a final concentration of 1×10⁵ and 1×10⁶ CFU/20 μL for A. baumannii and P. aeruginosa, respectively. Female CD-1 mice (six-weeks old) were anesthetized with isoflurane and had their backs shaved and a superficial linear skin abrasion was made with a needle in order to damage the stratum corneum and upper-layer of the epidermis. An aliquot of 20 μL containing the bacterial load in PBS was inoculated over each defined area containing the scratch with a pipette tip. One hour after the infection, peptides at their MIC value were administered to the infected area. Animals were euthanized and the area of scarified skin was excised two- and four-days post-infection, homogenized using a bead beater for 20 minutes (25 Hz), and 10-fold serially diluted for CFU quantification. Two independent experiments were performed with 8 mice per group in each condition. Neutropenic thigh infection mouse model. Two doses of cyclophosphamide (150 mg Kg-1) applied intraperitoneally with an interval of 3 days were used to render the mice neutropenic. One day later, the mice were infected intramuscularly in their right thigh with a bacterial load of 10⁶ CFU mL⁻¹ of the pathogens A. baumannii ATCC19606 and P. aeruginosa PAO1, which were grown in TSB, washed twice with PBS and resuspended to the desired concentration. Two hours later, peptides were administered in the infection site. Prior to each injection, mice were anesthetized with isoflurane and monitored (respiratory rate and pedal reflexes). Next, we monitored the formation of the abscess and euthanized the mice. The infected area was excised three-days post-infection, homogenized using a bead beater for 20 min (25 Hz), and 10-fold serially diluted for CFU quantification. One experiment was performed using 16 mice per group in each condition (untreated controls, mice treated with a single peptide and mice treated with combination therapy of two peptides).

[0053] Although several approaches have been previously taken⁴⁵⁻⁴⁷ to identify novel molecules in the human microbiota and soil bacteria⁴⁸, to date, a systematic study exploring the human body as a potential source of drugs has not been performed. Here, reported is the discovery of 2,603 previously undescribed antibiotics encrypted within the human proteome. At least 55 of these agents, tested as described herein, were found to target both pathogens and commensals, to operate by permeabilizing the bacterial outer membrane, to display synergistic interactions that potentiate their activity, and to effectively reduce infections in a relevant rodent model. It has been shown herein that encrypted peptides differ from conventional AMPs because they: 1) possess a different amino acid frequency profile (FIG. 2A); and 2) target commensals (FIG. 2B-2C). These results point to the proteome as a previously untapped source of novel antibiotics and reveal the multifunctional nature of numerous proteins that were traditionally thought to have only a single biological function. Because the presently disclosed approach computationally identifies antibiotics already optimized by nature and produced in our own bodies, it is expected that they will serve as excellent candidates for antibiotic development. The data presented also suggest connections between host defense and other systems in the body that were previously unrecognized as arms of host immunity, such as the nervous, endocrine, digestive, and cardiovascular systems. More broadly, it is believed that the existence of proteins with multiple functions, enabled by encrypted fragments, reflects an evolutionary mechanism that expanded protein capabilities while minimizing genomic expansion. This reduced the number of protein coding genes that perform all the functionalities necessary to operate and defend the human body.

### REFERENCES

[0054] The following references may be relevant to the present disclosure:
[0055] 1. Centers for Disease Control and Prevention. 2019 Antimicrobial Resistant Threats Report. (2019).
[0056] 2. World Health Organization. Antimicrobial resistance: Global Health Report on Surveillance. Bull. World Health Organ. 1-256 (2014). doi:10.1007/s13312-014-0374-3
[0057] 3. Lepore, C., Silver, L., Theuretzbacher, U., Thomas, J. & Visi, D. The small-molecule antibiotics pipeline: 2014-2018. Nat. Rev. Drug Discov. (2019). doi:10.1038/d41573-019-00130-8
[0058] 4. de la Fuente-Nunez, C., Torres, M. D., Mojica, F. J. & Lu, T. K. Next-generation precision antimicrobials: towards personalized treatment of infectious diseases. Curr. Opin. Microbiol. 37, 95-102 (2017).
[0059] 5. Torres, P. H. M., Sodero, A. C. R., Jofily, P. & Silva-Jr, F. P. Key Topics in Molecular Docking for Drug Design. Int. J. Mol. Sci. 20, 4574 (2019).
[0060] 6. Torres, M. D. T., Cao, J., Franco, O. L., Lu, T. K. & de la Fuente-Nunez, C. Synthetic Biology and Computer-Based Frameworks for Antimicrobial Peptide Discovery. ACS Nano 15, 2143-2164 (2021).
[0061] 7. Torres, M. D. T. & de la Fuente-Nunez, C. Toward computer-made artificial antibiotics. Curr. Opin. Microbiol. 51, 30-38 (2019).
[0062] 8. Porto, W. F. et al. In silico optimization of a guava antimicrobial peptide enables combinatorial exploration for peptide design. Nat. Commun. 9, (2018).
[0063] 9. Zasloff, M. Antimicrobial peptides of multicellular organisms. Nature 415, 389-395 (2002).
[0064] 10. Pane, K. et al. Antimicrobial potency of cationic antimicrobial peptides can be predicted from their amino acid composition: Application to the detection of “cryptic” antimicrobial peptides. J. Theor. Biol. 419, 254-265 (2017).
[0065] 11. Mi, H., Muruganujan, A., Ebert, D., Huang, X. & Thomas, P. D. PANTHER version 14: more genomes, a new PANTHER GO-slim and improvements in enrichment analysis tools. Nucleic Acids Res. 47, D419-D426 (2019).
[0066] 12. Pirtskhalava, M. et al. DBAASP v.2: An enhanced database of structure and antimicrobial/cytotoxic activity of natural and synthetic peptides. Nucleic Acids Res. 44, D1104-D1112 (2016).
[0067] 13. Kang, X. et al. DRAMP 2.0, an updated data repository of antimicrobial peptides. Sci. Data 6, 148 (2019).
[0068] 14. Cullen, T. W. et al. Antimicrobial peptide resistance mediates resilience of prominent gut commensals during inflammation. Science (80-.). 347, 170-175 (2015).
[0069] 15. Almeida, A. et al. A new genomic blueprint of the human gut microbiota. Nature 568, 499-504 (2019).
[0070] 16. Kim, Y.-H., O'Neill, H. M. & Whitehead, J. P. Carboxypeptidase X-1 (CPX-1) is a secreted collagen-binding glycoprotein. Biochem. Biophys. Res. Commun. 468, 894-899 (2015).
[0071] 17. Kim, Y. et al. Identification of carboxypeptidase X (CPX)-1 as a positive regulator of adipogenesis. FASEB J. 30, 2528-2540 (2016).
[0072] 18. Lei, Y., Xin, X., Morgan, D., Pintar, J. E. & Fricker, L. D. Identification of Mouse CPX-1, a Novel Member of the Metallocarboxypeptidase Gene Family with Highest Similarity to CPX-2. DNA Cell Biol. 18, 175-185 (1999).
[0073] 19. Cani, P. D. & de Vos, W. M. Next-Generation Beneficial Microbes: The Case of Akkermansia muciniphila. Front. Microbiol. 8, 1765 (2017).
[0074] 20. Brenner, A. V. et al. Common Single Nucleotide Polymorphisms in Genes Related to Immune Function and Risk of Papillary Thyroid Cancer. PLOS One 8, e57243 (2013).
[0075] 21. Bork, P. & Beckmann, G. The CUB Domain. J. Mol. Biol. 231, 539-545 (1993).
[0076] 22. Nordahl, E. A. et al. Activation of the complement system generates antibacterial peptides. Proc. Natl. Acad. Sci. 101, 16879-16884 (2004).
[0077] 23. Durack, J. & Lynch, S. V. The gut microbiome: Relationships with disease and opportunities for therapy. J. Exp. Med. 216, 20-40 (2019).
[0078] 24. Shreiner, A. B., Kao, J. Y. & Young, V. B. The gut microbiome in health and in disease. Curr. Opin. Gastroenterol. 31, 69-75 (2015).
[0079] 25. Grice, E. The skin microbiome: potential for novel diagnostic and therapeutic approaches to cutaneous disease. Semin. Cutan. Med. Surg. 33, 98-103 (2014).
[0080] 26. Sanford, J. A. & Gallo, R. L. Functions of the skin microbiota in health and disease. Semin. Immunol. 25, 370-377 (2013).
[0081] 27. Robinson, S. D. et al. A comprehensive portrait of the venom of the giant red bull ant, Myrmecia gulosa, reveals a hyperdiverse hymenopteran toxin gene family. Sci. Adv. 4, eaau4640 (2018).
[0082] 28. Torres, M. D. T. et al. Structure-function-guided exploration of the antimicrobial peptide polybia-CP identifies activity determinants and generates synthetic therapeutic candidates. Commun. Biol. 1, 221 (2018).
[0083] 29. Magana, M. et al. The value of antimicrobial peptides in the age of resistance. Lancet Infect. Dis. (2020). doi:10.1016/S1473-3099(20)30327-3
[0084] 30. Breidenstein, E. B. M., de la Fuente-Núñez, C. & Hancock, R. E. W. Pseudomonas aeruginosa: all roads lead to resistance. Trends Microbiol. 19, 419-426 (2011).
[0085] 31. Pachori, P., Gothalwal, R. & Gandhi, P. Emergence of antibiotic resistance Pseudomonas aeruginosa in intensive care unit; a critical review. Genes Dis. 6, 109-119 (2019).
[0086] 32. Tyers, M. & Wright, G. D. Drug combinations: a strategy to extend the life of antibiotics in the 21st century. Nat. Rev. Microbiol. 17, 141-155 (2019).
[0087] 33. Reffuveille, F., de la Fuente-Núñez, C., Mansour, S. & Hancock, R. E. W. A Broad-Spectrum Antibiofilm Peptide Enhances Antibiotic Action against Bacterial Biofilms. Antimicrob. Agents Chemother. 58, 5363-5371 (2014).
[0088] 34. Merg, F. et al. Big dynorphin as a putative endogenous ligand for the kappa-opioid receptor. J. Neurochem. 97, 292-301 (2006).
[0089] 35. Wang, Z. et al. Elabela-Apelin Receptor Signaling Pathway is Functional in Mammalian Systems. Sci. Rep. 5, 8170 (2015).
[0090] 36. Cheah, S.-E. et al. Polymyxin Resistance in Acinetobacter baumannii: Genetic Mutations and Transcriptomic Changes in Response to Clinically Relevant Dosage Regimens. Sci. Rep. 6, 26233 (2016).
[0091] 37. Samaras, P. et al. ProteomicsDB: a multi-omics and multi-organism resource for life science research. Nucleic Acids Res. 48, D1153-D1163 (2019).
[0092] 38. Fleming, A. Penicillin. Nobel Lecture (1945). Available at: https://www.nobelprize.org/uploads/2018/06/fleming-lecture.pdf. (Accessed: 7 Aug. 2020)
[0093] 39. Fensterseifer, I. C. M. et al. Selective antibacterial activity of the cationic peptide PaDBS1R6 against Gram-negative bacteria. Biochim. Biophys. Acta—Biomembr. 1861, 1375-1387 (2019).
[0094] 40. Cardoso, M. H. et al. A Computationally Designed Peptide Derived from Escherichia coli as a Potential Drug Template for Antibacterial and Antibiofilm Therapies. ACS Infect. Dis. 4, 1727-1736 (2018).
[0095] 41. Cândido, E. S. et al. Short Cationic Peptide Derived from Archaea with Dual Antibacterial Properties and Anti-Infective Potential. ACS Infect. Dis. 5, 1081-1086 (2019).
[0096] 42. Pane, K. et al. Identification of Novel Cryptic Multifunctional Antimicrobial Peptides from the Human Stomach Enabled by a Computational-Experimental Platform. ACS Synth. Biol. 7, 2105-2115 (2018).
[0097] 43. Ling, L. L. et al. A new antibiotic kills pathogens without detectable resistance. Nature 517, 455-459 (2015).
[0098] 44. Gudmundsson, S. & Erlendsdóttir, H. Murine Thigh Infection Model. in Handbook of Animal Models of Infection 137-144 (Elsevier, 1999). doi:10.1016/B978-012775390-4/50154-8
[0099] 45. Sberro, H. et al. Large-Scale Analyses of Human Microbiomes Reveal Thousands of Small, Novel Genes. Cell 178, 1245-1259.e14 (2019).
[0100] 46. Donia, M. S. & Fischbach, M. A. Small molecules from the human microbiota. Science (80-.). 349, 1254766-1254766 (2015).
[0101] 47. Sugimoto, Y. et al. A metagenomic strategy for harnessing the chemical repertoire of the human microbiome. Science (80-.). 366, eaax9176 (2019).
[0102] 48. Culp, E. J. et al. Hidden antibiotics in actinomycetes can be identified by inactivation of gene clusters for common antibiotics. Nat. Biotechnol. 37, 1149-1154 (2019).
[0103] 49. The UniProt Consortium. UniProt: a worldwide hub of protein knowledge. Nucleic Acids Res. 47, D506-D515 (2019).

The application's sequence listing, which the Patent Office published only in electronic form, follows.

SEQUENCE LISTING (43055 sequences)

SEQ ID NO: 1 - protein, 8 aa, Artificial Sequence
  Quasi-synthetic sequence derived from human genome
RRLWRFLW

SEQ ID NO: 2 - protein, 8 aa, Artificial Sequence
  Quasi-synthetic sequence derived from human genome
LRLRWRWF

SEQ ID NO: 3 - protein, 8 aa, Artificial Sequence
  Quasi-synthetic sequence derived from human genome
LLLWWRRR

SEQ ID NO: 4 - protein, 8 aa, Artificial Sequence
  Quasi-synthetic sequence derived from human genome
WRLRRLLL

SEQ ID NO: 5 - protein, 8 aa, Artificial Sequence
  Quasi-synthetic sequence derived from human genome
LWLLRLRR

SEQ ID NO: 6 - protein, 8 aa, Artificial Sequence
  Quasi-synthetic sequence derived from human genome
FRWRRRLL

SEQ ID NO: 7 - protein, 8 aa, Artificial Sequence
  Quasi-synthetic sequence derived from human genome
RRLRWRLL

SEQ ID NO: 8 - protein, 8 aa, Artificial Sequence
  Quasi-synthetic sequence derived from human genome
RRRRLLFW

SEQ ID NO: 9 - protein, 8 aa, Artificial Sequence
  Quasi-synthetic sequence derived from human genome
RLRRRLWL

SEQ ID NO: 10 - protein, 8 aa, Artificial Sequence
  Quasi-synthetic sequence derived from human genome
WLRWRILR

SEQ ID NO: 11 - protein, 8 aa, Artificial Sequence
  Quasi-synthetic sequence derived from human genome
RRLWKFFW

SEQ ID NO: 12 - protein, 8 aa, Artificial Sequence
  Quasi-synthetic sequence derived from human genome
LRWFLKRW

SEQ ID NO: 13 - protein, 8 aa, Artificial Sequence
  Quasi-synthetic sequence derived from human genome
LRRRFLLL

SEQ ID NO: 14 - protein, 8 aa, Artificial Sequence
  Quasi-synthetic sequence derived from human genome
LRLFRRLL

SEQ ID NO: 15 - protein, 8 aa, Artificial Sequence
  Quasi-synthetic sequence derived from human genome
RLLLRRFL

SEQ ID NO: 16 - protein, 8 aa, Artificial Sequence
  Quasi-synthetic sequence derived from human genome
RLLRLLRL

SEQ ID NO: 17 - protein, 8 aa, Artificial Sequence
  Quasi-synthetic sequence derived from human genome
RRRLLLLL

SEQ ID NO: 18 - protein, 8 aa, Artificial Sequence
  Quasi-synthetic sequence derived from human genome
LRRLFRFR

SEQ ID NO: 19 - protein, 8 aa, Artificial Sequence
  Quasi-synthetic sequence derived from human genome
LLRRLRRL

SEQ ID NO: 20 - protein, 8 aa, Artificial Sequence
  Quasi-synthetic sequence derived from human genome
RRLLRLLR

SEQ ID NO: 21 - protein, 8 aa, Artificial Sequence
  Quasi-synthetic sequence derived from human genome
LLRRRFRL

SEQ ID NO: 22 - protein, 8 aa, Artificial Sequence
  Quasi-synthetic sequence derived from human genome
LLLRRLRR

SEQ ID NO: 23 - protein, 8 aa, Artificial Sequence
  Quasi-synthetic sequence derived from human genome
LRLLLRRR

SEQ ID NO: 24 - protein, 8 aa, Artificial Sequence
  Quasi-synthetic sequence derived from human genome
RRFLLFRR

SEQ ID NO: 25 - protein, 8 aa, Artificial Sequence
  Quasi-synthetic sequence derived from human genome
RRLLRRLL

SEQ ID NO: 26 - protein, 8 aa, Artificial Sequence
  Quasi-synthetic sequence derived from human genome
LLRLRRRF

SEQ ID NO: 27 - protein, 8 aa, Artificial Sequence
  Quasi-synthetic sequence derived from human genome
WLLLRRIR

SEQ ID NO: 28 - protein, 8 aa, Artificial Sequence
  Quasi-synthetic sequence derived from human genome
WKRLRLLL

SEQ ID NO: 29 - protein, 8 aa, Artificial Sequence
  Quasi-synthetic sequence derived from human genome
LFKWLRLR

SEQ ID NO: 30 - protein, 8 aa, Artificial Sequence
  Quasi-synthetic sequence derived from human genome
RLFRWLLK

SEQ ID NO: 31 - protein, 8 aa, Artificial Sequence
  Quasi-synthetic sequence derived from human genome
LWRLLRKL

SEQ ID NO: 32 - protein, 8 aa, Artificial Sequence
  Quasi-synthetic sequence derived from human genome
WKLLLLRR

SEQ ID NO: 33 - protein, 8 aa, Artificial Sequence
  Quasi-synthetic sequence derived from human genome
RLLWRRLK

SEQ ID NO: 34 - protein, 8 aa, Artificial Sequence
  Quasi-synthetic sequence derived from human genome
RLRLWLKR

SEQ ID NO: 35 - protein, 8 aa, Artificial Sequence
  Quasi-synthetic sequence derived from human genome
WRKRWFIL

SEQ ID NO: 36 - protein, 8 aa, Artificial Sequence
  Quasi-synthetic sequence derived from human genome
LKIRWRWF

SEQ ID NO: 37 - protein, 8 aa, Artificial Sequence
  Quasi-synthetic sequence derived from human genome
RWLRIKLW

SEQ ID NO: 38 - protein, 8 aa, Artificial Sequence
  Quasi-synthetic sequence derived from human genome
RRLIRLLL

SEQ ID NO: 39 - protein, 8 aa, Artificial Sequence
  Quasi-synthetic sequence derived from human genome
RLFLFIRR

SEQ ID NO: 40 - protein, 8 aa, Artificial Sequence
  Quasi-synthetic sequence derived from human genome
LLLRILRR

SEQ ID NO: 41 - protein, 8 aa, Artificial Sequence
  Quasi-synthetic sequence derived from human genome
RFLLRRIL

SEQ ID NO: 42 - protein, 8 aa, Artificial Sequence
  Quasi-synthetic sequence derived from human genome
LRLLRLIR

SEQ ID NO: 43 - protein, 8 aa, Artificial Sequence
  Quasi-synthetic sequence derived from human genome
KLFFFLRR

SEQ ID NO: 44 - protein, 8 aa, Artificial Sequence
  Quasi-synthetic sequence derived from human genome
FLFKRFLR

SEQ ID NO: 45 - protein, 8 aa, Artificial Sequence
  Quasi-synthetic sequence derived from human genome
RFLKLLRF

SEQ ID NO: 46 - protein, 8 aa, Artificial Sequence
  Quasi-synthetic sequence derived from human genome
LLFFRFKR

SEQ ID NO: 47 - protein, 8 aa, Artificial Sequence
  Quasi-synthetic sequence derived from human genome
LLLRRKFF

SEQ ID NO: 48 - protein, 8 aa, Artificial Sequence
  Quasi-synthetic sequence derived from human genome
LRFLFRKL

SEQ ID NO: 49 - protein, 8 aa, Artificial Sequence
  Quasi-synthetic sequence derived from human genome
FLKRFLRL

SEQ ID NO: 50 - protein, 8 aa, Artificial Sequence
  Quasi-synthetic sequence derived from human genome
RKLLFLFR

SEQ ID NO: 51 - protein, 8 aa, Artificial Sequence
  Quasi-synthetic sequence derived from human genome
LRLFFRKF

SEQ ID NO: 52 - protein, 8 aa, Artificial Sequence
  Quasi-synthetic sequence derived from human genome
RIIRFWRF

SEQ ID NO: 53 - protein, 8 aa, Artificial Sequence
  Quasi-synthetic sequence derived from human genome
ILRRLLRR

SEQ ID NO: 54 - protein, 8 aa, Artificial Sequence
  Quasi-synthetic sequence derived from human genome
WRLWKKIW

SEQ ID NO: 55 - protein, 8 aa, Artificial Sequence
  Quasi-synthetic sequence derived from human genome
RWLLIRFK

SEQ ID NO: 56 - protein, 8 aa, Artificial Sequence
  Quasi-synthetic sequence derived from human genome
LLRKIRLW

SEQ ID NO: 57 - protein, 8 aa, Artificial Sequence
  Quasi-synthetic sequence derived from human genome
LRLRKRFL

SEQ ID NO: 58 - protein, 8 aa, Artificial Sequence
  Quasi-synthetic sequence derived from human genome
LFRLFKRR

SEQ ID NO: 59 - protein, 8 aa, Artificial Sequence
  Quasi-synthetic sequence derived from human genome
RFLLRRKF

SEQ ID NO: 60 - protein, 8 aa, Artificial Sequence
  Quasi-synthetic sequence derived from human genome
LLLKLRRR

SEQ ID NO: 61 - protein, 8 aa, Artificial Sequence
  Quasi-synthetic sequence derived from human genome
WKFFFRKL

SEQ ID NO: 62 - protein, 8 aa, Artificial Sequence
  Quasi-synthetic sequence derived from human genome
RWLKIIWR

SEQ ID NO: 63 - protein, 8 aa, Artificial Sequence
  Quasi-synthetic sequence derived from human genome
LLRRIIRF

SEQ ID NO: 64 - protein, 8 aa, Artificial Sequence
  Quasi-synthetic sequence derived from human genome
RILWRLKR

SEQ ID NO: 65 - protein, 8 aa, Artificial Sequence
  Quasi-synthetic sequence derived from human genome
WKKRWFIL

SEQ ID NO: 66 - protein, 8 aa, Artificial Sequence
  Quasi-synthetic sequence derived from human genome
LRRLILFK

SEQ ID NO: 67 - protein, 8 aa, Artificial Sequence
  Quasi-synthetic sequence derived from human genome
LIRKFRLF

SEQ ID NO: 68 - protein, 8 aa, Artificial Sequence
  Quasi-synthetic sequence derived from human genome
RLLLRFKI

SEQ ID NO: 69 - protein, 8 aa, Artificial Sequence
  Quasi-synthetic sequence derived from human genome
LRRLIFLK

SEQ ID NO: 70 - protein, 8 aa, Artificial Sequence
  Quasi-synthetic sequence derived from human genome
LRKLILRL

SEQ ID NO: 71 - protein, 8 aa, Artificial Sequence
  Quasi-synthetic sequence derived from human genome
LIFFLKRR

SEQ ID NO: 72 - protein, 8 aa, Artificial Sequence
  Quasi-synthetic sequence derived from human genome
LIRFLKRL

SEQ ID NO: 73 - protein, 8 aa, Artificial Sequence
  Quasi-synthetic sequence derived from human genome
LLLIRRFK

SEQ ID NO: 74 - protein, 8 aa, Artificial Sequence
  Quasi-synthetic sequence derived from human genome
IFLFRRLK

SEQ ID NO: 75 - protein, 8 aa, Artificial Sequence
  Quasi-synthetic sequence derived from human genome
LRLLRIFK

SEQ ID NO: 76 - protein, 8 aa, Artificial Sequence
  Quasi-synthetic sequence derived from human genome
LFRLIKRL

SEQ ID NO: 77 - protein, 8 aa, Artificial Sequence
  Quasi-synthetic sequence derived from human genome
RLIFRLLK

SEQ ID NO: 78 - protein, 8 aa, Artificial Sequence
  Quasi-synthetic sequence derived from human genome
FKKRWFRL

SEQ ID NO: 79 - protein, 8 aa, Artificial Sequence
  Quasi-synthetic sequence derived from human genome
FLRKKLFF

SEQ ID NO: 80 - protein, 8 aa, Artificial Sequence
  Quasi-synthetic sequence derived from human genome
FKKRLFLL

SEQ ID NO: 81 - protein, 8 aa, Artificial Sequence
  Quasi-synthetic sequence derived from human genome
LLRLFKLK

SEQ ID NO: 82 - protein, 8 aa, Artificial Sequence
  Quasi-synthetic sequence derived from human genome
FKKLLRLF

SEQ ID NO: 83 - protein, 8 aa, Artificial Sequence
  Quasi-synthetic sequence derived from human genome
KFFLLKRF

SEQ ID NO: 84 - protein, 8 aa, Artificial Sequence
  Quasi-synthetic sequence derived from human genome
KLLFRFLK

SEQ ID NO: 85 - protein, 8 aa, Artificial Sequence
  Quasi-synthetic sequence derived from human genome
LFFRKKLL

SEQ ID NO: 86 - protein, 8 aa, Artificial Sequence
  Quasi-synthetic sequence derived from human genome
FWIKRRIL

SEQ ID NO: 87 - protein, 8 aa, Artificial Sequence
  Quasi-synthetic sequence derived from human genome
FRLRKWII

SEQ ID NO: 88 - protein, 8 aa, Artificial Sequence
  Quasi-synthetic sequence derived from human genome
RWKFIKRW

SEQ ID NO: 89 - protein, 8 aa, Artificial Sequence
  Quasi-synthetic sequence derived from human genome
WRLLFKKI

SEQ ID NO: 90 - protein, 8 aa, Artificial Sequence
  Quasi-synthetic sequence derived from human genome
LLIKLWRK

SEQ ID NO: 91 - protein, 8 aa, Artificial Sequence
  Quasi-synthetic sequence derived from human genome
WKKRFFIL

SEQ ID NO: 92 - protein, 8 aa, Artificial Sequence
  Quasi-synthetic sequence derived from human genome
ILRLRRKF

SEQ ID NO: 93 - protein, 8 aa, Artificial Sequence
  Quasi-synthetic sequence derived from human genome
LILLRKRR

SEQ ID NO: 94 - protein, 8 aa, Artificial Sequence
  Quasi-synthetic sequence derived from human genome
RLIRKRFL

SEQ ID NO: 95 - protein, 8 aa, Artificial Sequence
  Quasi-synthetic sequence derived from human genome
FFIKRRFR

SEQ ID NO: 96 - protein, 8 aa, Artificial Sequence
  Quasi-synthetic sequence derived from human genome
IRLRFKRL

SEQ ID NO: 97 - protein, 8 aa, Artificial Sequence
  Quasi-synthetic sequence derived from human genome
LLLRIRKR

SEQ ID NO: 98 - protein, 8 aa, Artificial Sequence
  Quasi-synthetic sequence derived from human genome
LLRRIIRI

SEQ ID NO: 99 - protein, 8 aa, Artificial Sequence
  Quasi-synthetic sequence derived from human genome
LLLKLKKW

SEQ ID NO: 100 - protein, 8 aa, Artificial Sequence
  Quasi-synthetic sequence derived from human genome
LKLWKFLK

SEQ ID NO: 101 - protein, 8 aa, Artificial Sequence
  Quasi-synthetic sequence derived from human genome
KKFKLWLL

SEQ ID NO: 102 - protein, 8 aa, Artificial Sequence
  Quasi-synthetic sequence derived from human genome
KLLLRRKF

SEQ ID NO: 103 - protein, 8 aa, Artificial Sequence
  Quasi-synthetic sequence derived from human genome
RRFKLKFL

SEQ ID NO: 104 - protein, 8 aa, Artificial Sequence
  Quasi-synthetic sequence derived from human genome
RRKLLLFK

SEQ ID NO: 105 - protein, 8 aa, Artificial Sequence
  Quasi-synthetic sequence derived from human genome
LRFLKLKR

SEQ ID NO: 106 - protein, 8 aa, Artificial Sequence
  Quasi-synthetic sequence derived from human genome
KFKFFFRR

SEQ ID NO: 107 - protein, 8 aa, Artificial Sequence
  Quasi-synthetic sequence derived from human genome
RFLRKLLK

SEQ ID NO: 108 - protein, 8 aa, Artificial Sequence
  Quasi-synthetic sequence derived from human genome
RILRILKL

SEQ ID NO: 109 - protein, 8 aa, Artificial Sequence
  Quasi-synthetic sequence derived from human genome
LIFLRIKR

SEQ ID NO: 110 - protein, 8 aa, Artificial Sequence
  Quasi-synthetic sequence derived from human genome
RLLRIFKI

SEQ ID NO: 111 - protein, 8 aa, Artificial Sequence
  Quasi-synthetic sequence derived from human genome
RILRIFKL

SEQ ID NO: 112 - protein, 8 aa, Artificial Sequence
  Quasi-synthetic sequence derived from human genome
RIFRILKL

SEQ ID NO: 113 - protein, 8 aa, Artificial Sequence
  Quasi-synthetic sequence derived from human genome
IIFRRLLK

SEQ ID NO: 114 - protein, 8 aa, Artificial Sequence
  Quasi-synthetic sequence derived from human genome
LWVFRRRW

SEQ ID NO: 115 - protein, 8 aa, Artificial Sequence
  Quasi-synthetic sequence derived from human genome
LIKIRRLF

SEQ ID NO: 116 - protein, 8 aa, Artificial Sequence
  Quasi-synthetic sequence derived from human genome
LLRKRILI

SEQ ID NO: 117 - protein, 8 aa, Artificial Sequence
  Quasi-synthetic sequence derived from human genome
WRRRWFVL

SEQ ID NO: 118 - protein, 8 aa, Artificial Sequence
  Quasi-synthetic sequence derived from human genome
RKFIIFLR

SEQ ID NO: 119 - protein, 8 aa, Artificial Sequence
  Quasi-synthetic sequence derived from human genome
IKRRILLL

SEQ ID NO: 120 - protein, 8 aa, Artificial Sequence
  Quasi-synthetic sequence derived from human genome
IRRRIKWL

SEQ ID NO: 121 - protein, 8 aa, Artificial Sequence
  Quasi-synthetic sequence derived from human genome
LILWKWKK

SEQ ID NO: 122 - protein, 8 aa, Artificial Sequence
  Quasi-synthetic sequence derived from human genome
IFKRLKFL

SEQ ID NO: 123 - protein, 8 aa, Artificial Sequence
  Quasi-synthetic sequence derived from human genome
FLLKFIRK

SEQ ID NO: 124 - protein, 8 aa, Artificial Sequence
  Quasi-synthetic sequence derived from human genome
RILKFLKL

SEQ ID NO: 125 - protein, 8 aa, Artificial Sequence
  Quasi-synthetic sequence derived from human genome
LIRLKKLL

SEQ ID NO: 126 - protein, 8 aa, Artificial Sequence
  Quasi-synthetic sequence derived from human genome
RLFKKLIL

SEQ ID NO: 127 - protein, 8 aa, Artificial Sequence
  Quasi-synthetic sequence derived from human genome
LKFLIKRL

SEQ ID NO: 128 - protein, 8 aa, Artificial Sequence
  Quasi-synthetic sequence derived from human genome
KLRLLIKL

SEQ ID NO: 129 - protein, 8 aa, Artificial Sequence
  Quasi-synthetic sequence derived from human genome
IKKLFFFR

SEQ ID NO: 130 - protein, 8 aa, Artificial Sequence
  Quasi-synthetic sequence derived from human genome
KKLILRLL

SEQ ID NO: 131 - protein, 8 aa, Artificial Sequence
  Quasi-synthetic sequence derived from human genome
KLLILKLR

SEQ ID NO: 132 - protein, 8 aa, Artificial Sequence
  Quasi-synthetic sequence derived from human genome
LKRLILKL

SEQ ID NO: 133 - protein, 8 aa, Artificial Sequence
  Quasi-synthetic sequence derived from human genome
RKKLILFF

SEQ ID NO: 134 - protein, 8 aa, Artificial Sequence
  Quasi-synthetic sequence derived from human genome
RLFLLIKK

SEQ ID NO: 135 - protein, 8 aa, Artificial Sequence
  Quasi-synthetic sequence derived from human genome
FKLLLLKK

SEQ ID NO: 136 - protein, 8 aa, Artificial Sequence
  Quasi-synthetic sequence derived from human genome
LKKFLLKL

SEQ ID NO: 137 - protein, 8 aa, Artificial Sequence
  Quasi-synthetic sequence derived from human genome
KKKFLFFL

SEQ ID NO: 138 - protein, 8 aa, Artificial Sequence
  Quasi-synthetic sequence derived from human genome
FLFLLKKK

SEQ ID NO: 139 - protein, 8 aa, Artificial Sequence
  Quasi-synthetic sequence derived from human genome
KKKFLLFL

SEQ ID NO: 140 - protein, 8 aa, Artificial Sequence
  Quasi-synthetic sequence derived from human genome
LKLLFLKK

SEQ ID NO: 141 - protein, 8 aa, Artificial Sequence
  Quasi-synthetic sequence derived from human genome
IRRRIRIL

SEQ ID NO: 142 - protein, 8 aa, Artificial Sequence
  Quasi-synthetic sequence derived from human genome
LLWVRLRR

SEQ ID NO: 143 - protein, 8 aa, Artificial Sequence
  Quasi-synthetic sequence derived from human genome
LLRRVRWL

SEQ ID NO: 144 - protein, 8 aa, Artificial Sequence
  Quasi-synthetic sequence derived from human genome
RWLRRLVF

SEQ ID NO: 145 - protein, 8 aa, Artificial Sequence
  Quasi-synthetic sequence derived from human genome
RRRLLVWL

SEQ ID NO: 146 - protein, 8 aa, Artificial Sequence
  Quasi-synthetic sequence derived from human genome
LVLRLRRW

SEQ ID NO: 147 - protein, 8 aa, Artificial Sequence
  Quasi-synthetic sequence derived from human genome
WLFRRVRF

SEQ ID NO: 148 - protein, 8 aa, Artificial Sequence
  Quasi-synthetic sequence derived from human genome
LLRVRWLR

SEQ ID NO: 149 - protein, 8 aa, Artificial Sequence
  Quasi-synthetic sequence derived from human genome
FKKKLFWR

SEQ ID NO: 150 - protein, 8 aa, Artificial Sequence
  Quasi-synthetic sequence derived from human genome
KLWRKLFK

SEQ ID NO: 151 - protein, 8 aa, Artificial Sequence
  Quasi-synthetic sequence derived from human genome
FLWLKKRK

SEQ ID NO: 152 - protein, 8 aa, Artificial Sequence
  Quasi-synthetic sequence derived from human genome
WFLFRKKK

SEQ ID NO: 153 - protein, 8 aa, Artificial Sequence
  Quasi-synthetic sequence derived from human genome
FRLWLKKK

SEQ ID NO: 154 - protein, 8 aa, Artificial Sequence
  Quasi-synthetic sequence derived from human genome
RLWRLLLW

SEQ ID NO: 155 - protein, 8 aa, Artificial Sequence
  Quasi-synthetic sequence derived from human genome
ILKKWFLK

SEQ ID NO: 156 - protein, 8 aa, Artificial Sequence
  Quasi-synthetic sequence derived from human genome
IRKLILRR

SEQ ID NO: 157 - protein, 8 aa, Artificial Sequence
  Quasi-synthetic sequence derived from human genome
LRIRKRIF

SEQ ID NO: 158 - protein, 8 aa, Artificial Sequence
  Quasi-synthetic sequence derived from human genome
LRLFRMLR

SEQ ID NO: 159 - protein, 8 aa, Artificial Sequence
  Quasi-synthetic sequence derived from human genome
LMLLRRFR

SEQ ID NO: 160 - protein, 8 aa, Artificial Sequence
  Quasi-synthetic sequence derived from human genome
RLLRRMLL

SEQ ID NO: 161 - protein, 8 aa, Artificial Sequence
  Quasi-synthetic sequence derived from human genome
MRLRLRLL

SEQ ID NO: 162 - protein, 8 aa, Artificial Sequence
  Quasi-synthetic sequence derived from human genome
LFMFRRLR

SEQ ID NO: 163 - protein, 8 aa, Artificial Sequence
  Quasi-synthetic sequence derived from human genome
RFLRMLLR

SEQ ID NO: 164 - protein, 8 aa, Artificial Sequence
  Quasi-synthetic sequence derived from human genome
LFLRRRLM

SEQ ID NO: 165 - protein, 8 aa, Artificial Sequence
  Quasi-synthetic sequence derived from human genome
RFRLLLRM

SEQ ID NO: 166 - protein, 8 aa, Artificial Sequence
  Quasi-synthetic sequence derived from human genome
WWLLWKRL

SEQ ID NO: 167 - protein, 8 aa, Artificial Sequence
  Quasi-synthetic sequence derived from human genome
FKRKRFLI

SEQ ID NO: 168 - protein, 8 aa, Artificial Sequence
  Quasi-synthetic sequence derived from human genome
LKRKLIRL

SEQ ID NO: 169 - protein, 8 aa, Artificial Sequence
  Quasi-synthetic sequence derived from human genome
LLKKRIRF

SEQ ID NO: 170 - protein, 8 aa, Artificial Sequence
  Quasi-synthetic sequence derived from human genome
KIRLLLRK

SEQ ID NO: 171 - protein, 8 aa, Artificial Sequence
  Quasi-synthetic sequence derived from human genome
ILLFKRKR

SEQ ID NO: 172 - protein, 8 aa, Artificial Sequence
  Quasi-synthetic sequence derived from human genome
FRKFKILR

SEQ ID NO: 173 - protein, 8 aa, Artificial Sequence
  Quasi-synthetic sequence derived from human genome
RLLWLLRL

SEQ ID NO: 174 - protein, 8 aa, Artificial Sequence
  Quasi-synthetic sequence derived from human genome
FRWMRLRI

SEQ ID NO: 175 - protein, 8 aa, Artificial Sequence
  Quasi-synthetic sequence derived from human genome
IIKLLLRK

SEQ ID NO: 176 - protein, 8 aa, Artificial Sequence
  Quasi-synthetic sequence derived from human genome
LRKILLKI

SEQ ID NO: 177 - protein, 8 aa, Artificial Sequence
  Quasi-synthetic sequence derived from human genome
WRKRWFVL

SEQ ID NO: 178 - protein, 8 aa, Artificial Sequence
  Quasi-synthetic sequence derived from human genome
WKRRWFVL

SEQ ID NO: 179 - protein, 8 aa, Artificial Sequence
  Quasi-synthetic sequence derived from human genome
FIKILLKR

SEQ ID NO: 180 - protein, 8 aa, Artificial Sequence
  Quasi-synthetic sequence derived from human genome
LRLVRLRL

SEQ ID NO: 181 - protein, 8 aa, Artificial Sequence
  Quasi-synthetic sequence derived from human genome
LRVLFRRL

SEQ ID NO: 182 - protein, 8 aa, Artificial Sequence
  Quasi-synthetic sequence derived from human genome
LVRFLLRR

SEQ ID NO: 183 - protein, 8 aa, Artificial Sequence
  Quasi-synthetic sequence derived from human genome
RRVLRLLL

SEQ ID NO: 184 - protein, 8 aa, Artificial Sequence
  Quasi-synthetic sequence derived from human genome
LRVRLFFR

SEQ ID NO: 185 - protein, 8 aa, Artificial Sequence
  Quasi-synthetic sequence derived from human genome
LRFRRLLV

SEQ ID NO: 186 - protein, 8 aa, Artificial Sequence
  Quasi-synthetic sequence derived from human genome
LRVLRLLR

SEQ ID NO: 187 - protein, 8 aa, Artificial Sequence
  Quasi-synthetic sequence derived from human genome
LWKKLKKW

SEQ ID NO: 188 - protein, 8 aa, Artificial Sequence
  Quasi-synthetic sequence derived from human genome
FKLKRKLF

SEQ ID NO: 189 - protein, 8 aa, Artificial Sequence
  Quasi-synthetic sequence derived from human genome
LLKKLLKR

SEQ ID NO: 190 - protein, 8 aa, Artificial Sequence
  Quasi-synthetic sequence derived from human genome
KFKKLFRL

SEQ ID NO: 191 - protein, 8 aa, Artificial Sequence
  Quasi-synthetic sequence derived from human genome
FRLKKLLK

SEQ ID NO: 192 - protein, 8 aa, Artificial Sequence
  Quasi-synthetic sequence derived from human genome
FKLFKKIF

SEQ ID NO: 193 - protein, 8 aa, Artificial Sequence
  Quasi-synthetic sequence derived from human genome
LKKFIKLL

SEQ ID NO: 194 - protein, 8 aa, Artificial Sequence
  Quasi-synthetic sequence derived from human genome
LKLKLIKF

SEQ ID NO: 195 - protein, 8 aa, Artificial Sequence
  Quasi-synthetic sequence derived from human genome
WKKRLIRI

SEQ ID NO: 196 - protein, 8 aa, Artificial Sequence
  Quasi-synthetic sequence derived from human genome
KWIIRLRK

SEQ ID NO: 197 - protein, 8 aa, Artificial Sequence
  Quasi-synthetic sequence derived from human genome
IWIKLKRR

SEQ ID NO: 198 - protein, 8 aa, Artificial Sequence
  Quasi-synthetic sequence derived from human genome
RRRLWVIF

SEQ ID NO: 199 - protein, 8 aa, Artificial Sequence
  Quasi-synthetic sequence derived from human genome
LLLLLLRR

SEQ ID NO: 200 - protein, 8 aa, Artificial Sequence
  Quasi-synthetic sequence derived from human genome
RRLLLLLL

SEQ ID NO: 201 - protein, 8 aa, Artificial Sequence
  Quasi-synthetic sequence derived from human genome
LLRLLRLL

SEQ ID NO: 202 - protein, 8 aa, Artificial Sequence
  Quasi-synthetic sequence derived from human genome
RLRLLLLL

SEQ ID NO: 203 - protein, 8 aa, Artificial Sequence
  Quasi-synthetic sequence derived from human genome
LLLRFFLR

SEQ ID NO: 204 - protein, 8 aa, Artificial Sequence
  Quasi-synthetic sequence derived from human genome
FLFRLLLR

SEQ ID NO: 205 - protein, 8 aa, Artificial Sequence
  Quasi-synthetic sequence derived from human genome
LRLRLLLL

SEQ ID NO: 206 - protein, 8 aa, Artificial Sequence
  Quasi-synthetic sequence derived from human genome
LRRLLLLL

SEQ ID NO: 207 - protein, 8 aa, Artificial Sequence
  Quasi-synthetic sequence derived from human genome
LLLLFLRR

SEQ ID NO: 208 - protein, 8 aa, Artificial Sequence
  Quasi-synthetic sequence derived from human genome
LLFLLLRR

SEQ ID NO: 209 - protein, 8 aa, Artificial Sequence
  Quasi-synthetic sequence derived from human genome
LKKWIKIL

SEQ ID NO: 210 - protein, 8 aa, Artificial Sequence
  Quasi-synthetic sequence derived from human genome
WKKKFIRF

SEQ ID NO: 211 - protein, 8 aa, Artificial Sequence
  Quasi-synthetic sequence derived from human genome
LFIRMLRR

SEQ ID NO: 212 - protein, 8 aa, Artificial Sequence
  Quasi-synthetic sequence derived from human genome
RILRLRFM

SEQ ID NO: 213 - protein, 8 aa, Artificial Sequence
  Quasi-synthetic sequence derived from human genome
LRLMRIFR

SEQ ID NO: 214 - protein, 8 aa, Artificial Sequence
  Quasi-synthetic sequence derived from human genome
FRLMRIFR

SEQ ID NO: 215 - protein, 8 aa, Artificial Sequence
  Quasi-synthetic sequence derived from human genome
KLRLVRWL

SEQ ID NO: 216 - protein, 8 aa, Artificial Sequence
  Quasi-synthetic sequence derived from human genome
LLRKRWVL

SEQ ID NO: 217 - protein, 8 aa, Artificial Sequence
  Quasi-synthetic sequence derived from human genome
RLKLLWRV

SEQ ID NO: 218 - protein, 8 aa, Artificial Sequence
  Quasi-synthetic sequence derived from human genome
LVLWLKRR

SEQ ID NO: 219 - protein, 8 aa, Artificial Sequence
  Quasi-synthetic sequence derived from human genome
KRWIFWLW

SEQ ID NO: 220 - protein, 8 aa, Artificial Sequence
  Quasi-synthetic sequence derived from human genome
RRRLLRRL

SEQ ID NO: 221 - protein, 8 aa, Artificial Sequence
  Quasi-synthetic sequence derived from human genome
RRLFRRFR

SEQ ID NO: 222 - protein, 8 aa, Artificial Sequence
  Quasi-synthetic sequence derived from human genome
RRMRLLLR

SEQ ID NO: 223 - protein, 8 aa, Artificial Sequence
  Quasi-synthetic sequence derived from human genome
LIFLLRRW

SEQ ID NO: 224 - protein, 8 aa, Artificial Sequence
  Quasi-synthetic sequence derived from human genome
RLRFWLLI

SEQ ID NO: 225 - protein, 8 aa, Artificial Sequence
  Quasi-synthetic sequence derived from human genome
IRIRFIRK

SEQ ID NO: 226 - protein, 8 aa, Artificial Sequence
  Quasi-synthetic sequence derived from human genome
IKIIRRRL

SEQ ID NO: 227 - protein, 8 aa, Artificial Sequence
  Quasi-synthetic sequence derived from human genome
LLRLKMFR

SEQ ID NO: 228 - protein, 8 aa, Artificial Sequence
  Quasi-synthetic sequence derived from human genome
RLLFRFMK

SEQ ID NO: 229 - protein, 8 aa, Artificial Sequence
  Quasi-synthetic sequence derived from human genome
LLFYRWRR

SEQ ID NO: 230 - protein, 8 aa, Artificial Sequence
  Quasi-synthetic sequence derived from human genome
FFYWRLRR

SEQ ID NO: 231 - protein, 8 aa, Artificial Sequence
  Quasi-synthetic sequence derived from human genome
KRLFFRFM

SEQ ID NO: 232 - protein, 8 aa, Artificial Sequence
  Quasi-synthetic sequence derived from human genome
RWLLLKLL

SEQ ID NO: 233 - protein, 8 aa, Artificial Sequence
  Quasi-synthetic sequence derived from human genome
RFWLLKLL

SEQ ID NO: 234 - protein, 8 aa, Artificial Sequence
  Quasi-synthetic sequence derived from human genome
FLKLLWLR

SEQ ID NO: 235 - protein, 8 aa, Artificial Sequence
  Quasi-synthetic sequence derived from human genome
LWKRLFLL

SEQ ID NO: 236 - protein, 8 aa, Artificial Sequence
  Quasi-synthetic sequence derived from human genome
WRRFKWVI

SEQ ID NO: 237 - protein, 8 aa, Artificial Sequence
  Quasi-synthetic sequence derived from human genome
IRIFILKK

SEQ ID NO: 238 - protein, 8 aa, Artificial Sequence
  Quasi-synthetic sequence derived from human genome
IKKIIRFL

SEQ ID NO: 239 - protein, 8 aa, Artificial Sequence
  Quasi-synthetic sequence derived from human genome
FRLIKIKI

SEQ ID NO: 240 - protein, 8 aa, Artificial Sequence
  Quasi-synthetic sequence derived from human genome
LLVRRRFI

SEQ ID NO: 241 - protein, 8 aa, Artificial Sequence
  Quasi-synthetic sequence derived from human genome
RRFRLVLI

SEQ ID NO: 242 - protein, 8 aa, Artificial Sequence
  Quasi-synthetic sequence derived from human genome
FRIVRFRF

SEQ ID NO: 243 - protein, 8 aa, Artificial Sequence
  Quasi-synthetic sequence derived from human genome
LRLVRILR

SEQ ID NO: 244 - protein, 8 aa, Artificial Sequence
  Quasi-synthetic sequence derived from human genome
KLKLIIRR

SEQ ID NO: 245 - protein, 8 aa, Artificial Sequence
  Quasi-synthetic sequence derived from human genome
LRRILKIK

SEQ ID NO: 246 - protein, 8 aa, Artificial Sequence
  Quasi-synthetic sequence derived from human genome
LRFKRKII

SEQ ID NO: 247 - protein, 8 aa, Artificial Sequence
  Quasi-synthetic sequence derived from human genome
LIKRRLIK

SEQ ID NO: 248 - protein, 8 aa, Artificial Sequence
  Quasi-synthetic sequence derived from human genome
RIKRLKLI

SEQ ID NO: 249 - protein, 8 aa, Artificial Sequence
  Quasi-synthetic sequence derived from human genome
RRIRRWLR

SEQ ID NO: 250 - protein, 8 aa, Artificial Sequence
  Quasi-synthetic sequence derived from human genome
FRRRVRLL

SEQ ID NO: 251 - protein, 8 aa, Artificial Sequence
  Quasi-synthetic sequence derived from human genome
RRRLLLVR

SEQ ID NO: 252 - protein, 8 aa, Artificial Sequence
  Quasi-synthetic sequence derived from human genome
RLRVLRLR

SEQ ID NO: 253 - protein, 8 aa, Artificial Sequence
  Quasi-synthetic sequence derived from human genome
LRLVRRLR

SEQ ID NO: 254 - protein, 8 aa, Artificial Sequence
  Quasi-synthetic sequence derived from human genome
RWLLIWFK

SEQ ID NO: 255 - protein, 8 aa, Artificial Sequence
  Quasi-synthetic sequence derived from human genome
IRFWLFWK

SEQ ID NO: 256 - protein, 8 aa, Artificial Sequence
  Quasi-synthetic sequence derived from human genome
KRRLILWM

SEQ ID NO: 257 - protein, 8 aa, Artificial Sequence
  Quasi-synthetic sequence derived from human genome
RKLMRWIL

SEQ ID NO: 258 - protein, 8 aa, Artificial Sequence
  Quasi-synthetic sequence derived from human genome
RLRKWMFI

SEQ ID NO: 259 - protein, 8 aa, Artificial Sequence
  Quasi-synthetic sequence derived from human genome
FIIKKFKL

SEQ ID NO: 260 - protein, 8 aa, Artificial Sequence
  Quasi-synthetic sequence derived from human genome
WKKRWFVL

SEQ ID NO: 261 - protein, 8 aa, Artificial Sequence
  Quasi-synthetic sequence derived from human genome
RRFIFLFF

SEQ ID NO: 262 - protein, 8 aa, Artificial Sequence
  Quasi-synthetic sequence derived from human genome
ILRLLFRF

SEQ ID NO: 263 - protein, 8 aa, Artificial Sequence
  Quasi-synthetic sequence derived from human genome
FLIFLRRF

SEQ ID NO: 264 - protein, 8 aa, Artificial Sequence
  Quasi-synthetic sequence derived from human genome
KWLKKWIK

SEQ ID NO: 265 - protein, 8 aa, Artificial Sequence
  Quasi-synthetic sequence derived from human genome
LLLVRKRL

SEQ ID NO: 266 - protein, 8 aa, Artificial Sequence
  Quasi-synthetic sequence derived from human genome
LRKLLRVL

SEQ ID NO: 267 - protein, 8 aa, Artificial Sequence
  Quasi-synthetic sequence derived from human genome
FKRFRFLV

SEQ ID NO: 268 - protein, 8 aa, Artificial Sequence
  Quasi-synthetic sequence derived from human genome
RLLRLLVK

SEQ ID NO: 269 - protein, 8 aa, Artificial Sequence
  Quasi-synthetic sequence derived from human genome
RKVFLRLL

SEQ ID NO: 270 - protein, 8 aa, Artificial Sequence
  Quasi-synthetic sequence derived from human genome
LLLLVKRR

SEQ ID NO: 271 - protein, 8 aa, Artificial Sequence
  Quasi-synthetic sequence derived from human genome
KVLRFLRL

SEQ ID NO: 272 - protein, 8 aa, Artificial Sequence
  Quasi-synthetic sequence derived from human genome
RFRKFLVF

SEQ ID NO: 273 - protein, 8 aa, Artificial Sequence
  Quasi-synthetic sequence derived from human genome
FLRLVRKL

SEQ ID NO: 274 - protein, 8 aa, Artificial Sequence
  Quasi-synthetic sequence derived from human genome
FRLLRVFK

SEQ ID NO: 275 - protein, 8 aa, Artificial Sequence
  Quasi-synthetic sequence derived from human genome
RRKLLVFL

SEQ ID NO: 276 - protein, 8 aa, Artificial Sequence
  Quasi-synthetic sequence derived from human genome
FRVKFLLR

SEQ ID NO: 277 - protein, 8 aa, Artificial Sequence
  Quasi-synthetic sequence derived from human genome
FRLLRVLK

SEQ ID NO: 278 - protein, 8 aa, Artificial Sequence
  Quasi-synthetic sequence derived from human genome
LFRKLRLV

SEQ ID NO: 279 - protein, 8 aa, Artificial Sequence
  Quasi-synthetic sequence derived from human genome
LKVFLLRR

SEQ ID NO: 280 - protein, 8 aa, Artificial Sequence
  Quasi-synthetic sequence derived from human genome
KVLLRRLL

SEQ ID NO: 281 - protein, 8 aa, Artificial Sequence
  Quasi-synthetic sequence derived from human genome
LRVRKLLL

SEQ ID NO: 282 - protein, 8 aa, Artificial Sequence
  Quasi-synthetic sequence derived from human genome
LLLVLRKR

SEQ ID NO: 283 - protein, 8 aa, Artificial Sequence
  Quasi-synthetic sequence derived from human genome
MWKLLRRR

SEQ ID NO: 284 - protein, 8 aa, Artificial Sequence
  Quasi-synthetic sequence derived from human genome
WRMFRLKR

SEQ ID NO: 285 - protein, 8 aa, Artificial Sequence
  Quasi-synthetic sequence derived from human genome
KLLRKIFK

SEQ ID NO: 286 - protein, 8 aa, Artificial Sequence
  Quasi-synthetic sequence derived from human genome
KRLLLLLL

SEQ ID NO: 287 - protein, 8 aa, Artificial Sequence
  Quasi-synthetic sequence derived from human genome
KRLLLLFL

SEQ ID NO: 288 - protein, 8 aa, Artificial Sequence
  Quasi-synthetic sequence derived from human genome
KRFLFLLL

SEQ ID NO: 289 - protein, 8 aa, Artificial Sequence
  Quasi-synthetic sequence derived from human genome
KRLLFLLL

SEQ ID NO: 290 - protein, 8 aa, Artificial Sequence
  Quasi-synthetic sequence derived from human genome
RFFLKFFL

SEQ ID NO: 291 - protein, 8 aa, Artificial Sequence
  Quasi-synthetic sequence derived from human genome
LLLKRFLL

SEQ ID NO: 292 - protein, 8 aa, Artificial Sequence
  Quasi-synthetic sequence derived from human genome
KFRLLLLL

SEQ ID NO: 293 - protein, 8 aa, Artificial Sequence
  Quasi-synthetic sequence derived from human genome
LRLLLFKL

SEQ ID NO: 294 - protein, 8 aa, Artificial Sequence
  Quasi-synthetic sequence derived from human genome
RRKKWIII

SEQ ID NO: 295 - protein, 8 aa, Artificial Sequence
  Quasi-synthetic sequence derived from human genome
LRKWLKMF

SEQ ID NO: 296 - protein, 8 aa, Artificial Sequence
  Quasi-synthetic sequence derived from human genome
RWLRRKLR

SEQ ID NO: 297 - protein, 8 aa, Artificial Sequence
  Quasi-synthetic sequence derived from human genome
FRWLIFRI

SEQ ID NO: 298 - protein, 8 aa, Artificial Sequence
  Quasi-synthetic sequence derived from human genome
RLLILWRI

SEQ ID NO: 299 - protein, 8 aa, Artificial Sequence
  Quasi-synthetic sequence derived from human genome
RIRIFWLL

SEQ ID NO: 300 - protein, 8 aa, Artificial Sequence
  Quasi-synthetic sequence derived from human genome
LYLLRLRR

SEQ ID NO: 301 - protein, 8 aa, Artificial Sequence
  Quasi-synthetic sequence derived from human genome
RRLLLRYL

SEQ ID NO: 302 - protein, 8 aa, Artificial Sequence
  Quasi-synthetic sequence derived from human genome
RYRLFRLL

SEQ ID NO: 303 - protein, 8 aa, Artificial Sequence
  Quasi-synthetic sequence derived from human genome
FFYRLFRR

SEQ ID NO: 304 - protein, 8 aa, Artificial Sequence
  Quasi-synthetic sequence derived from human genome
LRFMRRII

SEQ ID NO: 305 - protein, 8 aa, Artificial Sequence
  Quasi-synthetic sequence derived from human genome
FRIMRILR

SEQ ID NO: 306 - protein, 8 aa, Artificial Sequence
  Quasi-synthetic sequence derived from human genome
IWVFRLKR

SEQ ID NO: 307 - protein, 8 aa, Artificial Sequence
  Quasi-synthetic sequence derived from human genome
LWRRKVIL

SEQ ID NO: 308 - protein, 8 aa, Artificial Sequence
  Quasi-synthetic sequence derived from human genome
WRRWCWRW

SEQ ID NO: 309 - protein, 8 aa, Artificial Sequence
  Quasi-synthetic sequence derived from human genome
LVWKRRIL

SEQ ID NO: 310 - protein, 8 aa, Artificial Sequence
  Quasi-synthetic sequence derived from human genome
WIVFLRRK

SEQ ID NO: 311 - protein, 8 aa, Artificial Sequence
  Quasi-synthetic sequence derived from human genome
KIRRVLWL

SEQ ID NO: 312 - protein, 8 aa, Artificial Sequence
  Quasi-synthetic sequence derived from human genome
KKFKFFKF

SEQ ID NO: 313 - protein, 8 aa, Artificial Sequence
  Quasi-synthetic sequence derived from human genome
LKKFKLKL

SEQ ID NO: 314 - protein, 8 aa, Artificial Sequence
  Quasi-synthetic sequence derived from human genome
KKKKLLLL

SEQ ID NO: 315 - protein, 8 aa, Artificial Sequence
  Quasi-synthetic sequence derived from human genome
KLLLKLKK

SEQ ID NO: 316 - protein, 8 aa, Artificial Sequence
  Quasi-synthetic sequence derived from human genome
FKKLFKKL

SEQ ID NO: 317 - protein, 8 aa, Artificial Sequence
  Quasi-synthetic sequence derived from human genome
LKLFLKKK

SEQ ID NO: 318 - protein, 8 aa, Artificial Sequence
  Quasi-synthetic sequence derived from human genome
LKKFKFLK

SEQ ID NO: 319 - protein, 8 aa, Artificial Sequence
  Quasi-synthetic sequence derived from human genome
FIRWLLKL

SEQ ID NO: 320 - protein, 8 aa, Artificial Sequence
  Quasi-synthetic sequence derived from human genome
IWKLFLRF

SEQ ID NO: 321 - protein, 8 aa, Artificial Sequence
  Quasi-synthetic sequence derived from human genome
FILKRLFW

SEQ ID NO: 322 - protein, 8 aa, Artificial Sequence
  Quasi-synthetic sequence derived from human genome
RFLWIKFF

SEQ ID NO: 323 - protein, 8 aa, Artificial Sequence
  Quasi-synthetic sequence derived from human genome
RFLWLLKI

SEQ ID NO: 324 - protein, 8 aa, Artificial Sequence
  Quasi-synthetic sequence derived from human genome
IMRRLLRR

SEQ ID NO: 325 - protein, 8 aa, Artificial Sequence
  Quasi-synthetic sequence derived from human genome
RRMIRFRF

SEQ ID NO: 326 - protein, 8 aa, Artificial Sequence
  Quasi-synthetic sequence derived from human genome
RWVFKRRL

SEQ ID NO: 327 - protein, 8 aa, Artificial Sequence
  Quasi-synthetic sequence derived from human genome
RWKVLRRF

SEQ ID NO: 328 - protein, 8 aa, Artificial Sequence
  Quasi-synthetic sequence derived from human genome
VRLRRWKL

SEQ ID NO: 329 - protein, 8 aa, Artificial Sequence
  Quasi-synthetic sequence derived from human genome
LIMLRRFK

SEQ ID NO: 330 - protein, 8 aa, Artificial Sequence
  Quasi-synthetic sequence derived from human genome
RLKMILRL

SEQ ID NO: 331 - protein, 8 aa, Artificial Sequence
  Quasi-synthetic sequence derived from human genome
LRILMRKL

SEQ ID NO: 332 - protein, 8 aa, Artificial Sequence
  Quasi-synthetic sequence derived from human genome
MRILKRFL

SEQ ID NO: 333 - protein, 8 aa, Artificial Sequence
  Quasi-synthetic sequence derived from human genome
KRLMRLLI

SEQ ID NO: 334 - protein, 8 aa, Artificial Sequence
  Quasi-synthetic sequence derived from human genome
LMFRRLKI

SEQ ID NO: 335 - protein, 8 aa, Artificial Sequence
  Quasi-synthetic sequence derived from human genome
LRILRMKL

SEQ ID NO: 336 - protein, 8 aa, Artificial Sequence
  Quasi-synthetic sequence derived from human genome
LKRFLVWK

SEQ ID NO: 337 - protein, 8 aa, Artificial Sequence
  Quasi-synthetic sequence derived from human genome
RLLVKKLW

SEQ ID NO: 338 - protein, 8 aa, Artificial Sequence
  Quasi-synthetic sequence derived from human genome
RWLLKKVF

SEQ ID NO: 339 - protein, 8 aa, Artificial Sequence
  Quasi-synthetic sequence derived from human genome
RLLWFKVK

SEQ ID NO: 340 - protein, 8 aa, Artificial Sequence
  Quasi-synthetic sequence derived from human genome
LWRVKKFL

SEQ ID NO: 341 - protein, 8 aa, Artificial Sequence
  Quasi-synthetic sequence derived from human genome
LRFLVKKW

SEQ ID NO: 342 - protein, 8 aa, Artificial Sequence
  Quasi-synthetic sequence derived from human genome
KLVRLKLW

SEQ ID NO: 343 - protein, 8 aa, Artificial Sequence
  Quasi-synthetic sequence derived from human genome
KLLKLLLW

SEQ ID NO: 344 - protein, 8 aa, Artificial Sequence
  Quasi-synthetic sequence derived from human genome
FIKKRIII

SEQ ID NO: 345 - protein, 8 aa, Artificial Sequence
  Quasi-synthetic sequence derived from human genome
RKKLIIII

SEQ ID NO: 346 - protein, 8 aa, Artificial Sequence
  Quasi-synthetic sequence derived from human genome
FIIFRWWK

SEQ ID NO: 347 - protein, 8 aa, Artificial Sequence
  Quasi-synthetic sequence derived from human genome
RWKILWFI

SEQ ID NO: 348 - protein, 8 aa, Artificial Sequence
  Quasi-synthetic sequence derived from human genome
LRLLRLII

SEQ ID NO: 349 - protein, 8 aa, Artificial Sequence
  Quasi-synthetic sequence derived from human genome
IRLLLILR

SEQ ID NO: 350 - protein, 8 aa, Artificial Sequence
  Quasi-synthetic sequence derived from human genome
RRLLILIL

SEQ ID NO: 351 - protein, 8 aa, Artificial Sequence
  Quasi-synthetic sequence derived from human genome
ILRLLRIL

SEQ ID NO: 352 - protein, 8 aa, Artificial Sequence
  Quasi-synthetic sequence derived from human genome
RLLRLIIL

SEQ ID NO: 353 - protein, 8 aa, Artificial Sequence
  Quasi-synthetic sequence derived from human genome
LRIIRLVR

SEQ ID NO: 354 - protein, 8 aa, Artificial Sequence
  Quasi-synthetic sequence derived from human genome
RIRFLVIR

SEQ ID NO: 355 - protein, 8 aa, Artificial Sequence
  Quasi-synthetic sequence derived from human genome
IFRLRIRV

SEQ ID NO: 356 - protein, 8 aa, Artificial Sequence
  Quasi-synthetic sequence derived from human genome
ILFRRRRR

SEQ ID NO: 357 - protein, 8 aa, Artificial Sequence
  Quasi-synthetic sequence derived from human genome
LLMKLKRL

SEQ ID NO: 358 - protein, 8 aa, Artificial Sequence
  Quasi-synthetic sequence derived from human genome
RWKLRYFL

SEQ ID NO: 359 - protein, 8 aa, Artificial Sequence
  Quasi-synthetic sequence derived from human genome
FKLFMKRL

SEQ ID NO: 360 - protein, 8 aa, Artificial Sequence
  Quasi-synthetic sequence derived from human genome
LLWMWWRR

SEQ ID NO: 361 - protein, 8 aa, Artificial Sequence
  Quasi-synthetic sequence derived from human genome
WLRRRYLR

SEQ ID NO: 362 - protein, 8 aa, Artificial Sequence
  Quasi-synthetic sequence derived from human genome
RLLRKMLR

SEQ ID NO: 363 - protein, 8 aa, Artificial Sequence
  Quasi-synthetic sequence derived from human genome
RRRMKLLL

SEQ ID NO: 364 - protein, 8 aa, Artificial Sequence
  Quasi-synthetic sequence derived from human genome
LFRRFRKM

SEQ ID NO: 365 - protein, 8 aa, Artificial Sequence
  Quasi-synthetic sequence derived from human genome
RLKRWIMI

SEQ ID NO: 366 - protein, 8 aa, Artificial Sequence
  Quasi-synthetic sequence derived from human genome
WIKRLIRM

SEQ ID NO: 367 - protein, 8 aa, Artificial Sequence
  Quasi-synthetic sequence derived from human genome
ILILKKKI

SEQ ID NO: 368 - protein, 8 aa, Artificial Sequence
  Quasi-synthetic sequence derived from human genome
VILKRKWW

SEQ ID NO: 369 - protein, 8 aa, Artificial Sequence
  Quasi-synthetic sequence derived from human genome
FKLFLLRI

SEQ ID NO: 370 - protein, 8 aa, Artificial Sequence
  Quasi-synthetic sequence derived from human genome
RIFLFLKL

SEQ ID NO: 371 - protein, 8 aa, Artificial Sequence
  Quasi-synthetic sequence derived from human genome
KLRFLIFF

SEQ ID NO: 372 - protein, 8 aa, Artificial Sequence
  Quasi-synthetic sequence derived from human genome
LIKLLLLR

SEQ ID NO: 373 - protein, 8 aa, Artificial Sequence
  Quasi-synthetic sequence derived from human genome
ILLKRLFF

SEQ ID NO: 374 - protein, 8 aa, Artificial Sequence
  Quasi-synthetic sequence derived from human genome
IKLLFLRF

SEQ ID NO: 375 - protein, 8 aa, Artificial Sequence
  Quasi-synthetic sequence derived from human genome
LLLIFLRK

SEQ ID NO: 376 - protein, 8 aa, Artificial Sequence
  Quasi-synthetic sequence derived from human genome
LFLRIKFF

SEQ ID NO: 377 - protein, 8 aa, Artificial Sequence
  Quasi-synthetic sequence derived from human genome
FLLRIFLK

SEQ ID NO: 378 - protein, 8 aa, Artificial Sequence
  Quasi-synthetic sequence derived from human genome
KIKLIIRR

SEQ ID NO: 379 - protein, 8 aa, Artificial Sequence
  Quasi-synthetic sequence derived from human genome
RIIRKFIK

SEQ ID NO: 380 - protein, 8 aa, Artificial Sequence
  Quasi-synthetic sequence derived from human genome
RVFRIFKL

SEQ ID NO: 381 - protein, 8 aa, Artificial Sequence
  Quasi-synthetic sequence derived from human genome
LWCWWRRR

SEQ ID NO: 382 - protein, 8 aa, Artificial Sequence
  Quasi-synthetic sequence derived from human genome
FRVFRIFK

SEQ ID NO: 383 - protein, 8 aa, Artificial Sequence
  Quasi-synthetic sequence derived from human genome
LVRIKRLF

SEQ ID NO: 384 - protein, 8 aa, Artificial Sequence
  Quasi-synthetic sequence derived from human genome
KLIFRFVR

SEQ ID NO: 385 - protein, 8 aa, Artificial Sequence
  Quasi-synthetic sequence derived from human genome
LFRIVLKR

SEQ ID NO: 386 - protein, 8 aa, Artificial Sequence
  Quasi-synthetic sequence derived from human genome
LIFVLRKR

SEQ ID NO: 387 - protein, 8 aa, Artificial Sequence
  Quasi-synthetic sequence derived from human genome
RLKRIVFF

SEQ ID NO: 388 - protein, 8 aa, Artificial Sequence
  Quasi-synthetic sequence derived from human genome
LVRKLIRL

SEQ ID NO: 389 - protein, 8 aa, Artificial Sequence
  Quasi-synthetic sequence derived from human genome
RLVKLRIL

SEQ ID NO: 390 - protein, 8 aa, Artificial Sequence
  Quasi-synthetic sequence derived from human genome
RLLRIFKV

SEQ ID NO: 391 - protein, 8 aa, Artificial Sequence
  Quasi-synthetic sequence derived from human genome
LKLRVRIL

SEQ ID NO: 392 - protein, 8 aa, Artificial Sequence
  Quasi-synthetic sequence derived from human genome
RKVLRLLI

SEQ ID NO: 393 - protein, 8 aa, Artificial Sequence
  Quasi-synthetic sequence derived from human genome
ILLRVRRR

SEQ ID NO: 394 - protein, 8 aa, Artificial Sequence
  Quasi-synthetic sequence derived from human genome
VLRRILRR

SEQ ID NO: 395 - protein, 8 aa, Artificial Sequence
  Quasi-synthetic sequence derived from human genome
RLFRVIRR

SEQ ID NO: 396 - protein, 8 aa, Artificial Sequence
  Quasi-synthetic sequence derived from human genome
IRLVRRLR

SEQ ID NO: 397 - protein, 8 aa, Artificial Sequence
  Quasi-synthetic sequence derived from human genome
RLLKRRLR

SEQ ID NO: 398 - protein, 8 aa, Artificial Sequence
  Quasi-synthetic sequence derived from human genome
RRRKLRLL

SEQ ID NO: 399 - protein, 8 aa, Artificial Sequence
  Quasi-synthetic sequence derived from human genome
LRKRRRLL

SEQ ID NO: 400 - protein, 8 aa, Artificial Sequence
  Quasi-synthetic sequence derived from human genome
LLRFRRKR

SEQ ID NO: 401 - protein, 8 aa, Artificial Sequence
  Quasi-synthetic sequence derived from human genome
LRRRKRLL

SEQ ID NO: 402 - protein, 8 aa, Artificial Sequence
  Quasi-synthetic sequence derived from human genome
IWLYWRRK

SEQ ID NO: 403 - protein, 8 aa, Artificial Sequence
  Quasi-synthetic sequence derived from human genome
LWKRLMIK

SEQ ID NO: 404 - protein, 8 aa, Artificial Sequence
  Quasi-synthetic sequence derived from human genome
IKLLLRIW

SEQ ID NO: 405 - protein, 8 aa, Artificial Sequence
  Quasi-synthetic sequence derived from human genome
FLRRLIYR

SEQ ID NO: 406 - protein, 8 aa, Artificial Sequence
  Quasi-synthetic sequence derived from human genome
LLIYRRLR

SEQ ID NO: 407 - protein, 8 aa, Artificial Sequence
  Quasi-synthetic sequence derived from human genome
FRIRFYFR

SEQ ID NO: 408 - protein, 8 aa, Artificial Sequence
  Quasi-synthetic sequence derived from human genome
LRLLLVKK

SEQ ID NO: 409 - protein, 8 aa, Artificial Sequence
  Quasi-synthetic sequence derived from human genome
LVLLKKLR

SEQ ID NO: 410 - protein, 8 aa, Artificial Sequence
  Quasi-synthetic sequence derived from human genome
LRKFKLVF

SEQ ID NO: 411 - protein, 8 aa, Artificial Sequence
  Quasi-synthetic sequence derived from human genome
LLRLKLKV

SEQ ID NO: 412 - protein, 8 aa, Artificial Sequence
  Quasi-synthetic sequence derived from human genome
RKVLKLLL

SEQ ID NO: 413 - protein, 8 aa, Artificial Sequence
  Quasi-synthetic sequence derived from human genome
LKLVKRLL

SEQ ID NO: 414 - protein, 8 aa, Artificial Sequence
  Quasi-synthetic sequence derived from human genome
RLVLLKKL

SEQ ID NO: 415 - protein, 8 aa, Artificial Sequence
  Quasi-synthetic sequence derived from human genome
KLLVRKFL

SEQ ID NO: 416 - protein, 8 aa, Artificial Sequence
  Quasi-synthetic sequence derived from human genome
LKLRVKFF

SEQ ID NO: 417 - protein, 8 aa, Artificial Sequence
  Quasi-synthetic sequence derived from human genome
LIFIKKKR

SEQ ID NO: 418 - protein, 8 aa, Artificial Sequence
  Quasi-synthetic sequence derived from human genome
LKRKILIK

SEQ ID NO: 419 - protein, 8 aa, Artificial Sequence
  Quasi-synthetic sequence derived from human genome
KVWWRLRK

SEQ ID NO: 420 - protein, 8 aa, Artificial Sequence
  Quasi-synthetic sequence derived from human genome
LRKKILKI

SEQ ID NO: 421 - protein, 8 aa, Artificial Sequence
  Quasi-synthetic sequence derived from human genome
KFIIRKLK

SEQ ID NO: 422 - protein, 8 aa, Artificial Sequence
  Quasi-synthetic sequence derived from human genome
LVRLRKRL

SEQ ID NO: 423 - protein, 8 aa, Artificial Sequence
  Quasi-synthetic sequence derived from human genome
RRVRLLLK

SEQ ID NO: 424 - protein, 8 aa, Artificial Sequence
  Quasi-synthetic sequence derived from human genome
KVRLLRLR

SEQ ID NO: 425 - protein, 8 aa, Artificial Sequence
  Quasi-synthetic sequence derived from human genome
LVLRKLRR

SEQ ID NO: 426 - protein, 8 aa, Artificial Sequence
  Quasi-synthetic sequence derived from human genome
RRFRKFLV

SEQ ID NO: 427 - protein, 8 aa, Artificial Sequence
  Quasi-synthetic sequence derived from human genome
LRKRRVLF

SEQ ID NO: 428 - protein, 8 aa, Artificial Sequence
  Quasi-synthetic sequence derived from human genome
LRVRLLKR

SEQ ID NO: 429 - protein, 8 aa, Artificial Sequence
  Quasi-synthetic sequence derived from human genome
LLRRKVRL

SEQ ID NO: 430 - protein, 8 aa, Artificial Sequence
  Quasi-synthetic sequence derived from human genome
RRVRLFLK

SEQ ID NO: 431 - protein, 8 aa, Artificial Sequence
  Quasi-synthetic sequence derived from human genome
RVLLRKFR

SEQ ID NO: 432 - protein, 8 aa, Artificial Sequence
  Quasi-synthetic sequence derived from human genome
RLVRKRFL

SEQ ID NO: 433 - protein, 8 aa, Artificial Sequence
  Quasi-synthetic sequence derived from human genome
LFKRRRVL

SEQ ID NO: 434 - protein, 8 aa, Artificial Sequence
  Quasi-synthetic sequence derived from human genome
FLRLKRRV

SEQ ID NO: 435 - protein, 8 aa, Artificial Sequence
  Quasi-synthetic sequence derived from human genome
FLWLRWRM

SEQ ID NO: 436 - protein, 8 aa, Artificial Sequence
  Quasi-synthetic sequence derived from human genome
FLKLIFKW

SEQ ID NO: 437 - protein, 8 aa, Artificial Sequence
  Quasi-synthetic sequence derived from human genome
LLLLKIWK

SEQ ID NO: 438 - protein, 8 aa, Artificial Sequence
  Quasi-synthetic sequence derived from human genome
LLFYLRKR

SEQ ID NO: 439 - protein, 8 aa, Artificial Sequence
  Quasi-synthetic sequence derived from human genome
RYLLKLFR

SEQ ID NO: 440 - protein, 8 aa, Artificial Sequence
  Quasi-synthetic sequence derived from human genome
FLRLYLRK

SEQ ID NO: 441 - protein, 8 aa, Artificial Sequence
  Quasi-synthetic sequence derived from human genome
YLRLLLRK

SEQ ID NO: 442 - protein, 8 aa, Artificial Sequence
  Quasi-synthetic sequence derived from human genome
LIFIRILR

SEQ ID NO: 443 - protein, 8 aa, Artificial Sequence
  Quasi-synthetic sequence derived from human genome
IIFIFLRR

SEQ ID NO: 444 - protein, 8 aa, Artificial Sequence
  Quasi-synthetic sequence derived from human genome
LRLIILIR

SEQ ID NO: 445 - protein, 8 aa, Artificial Sequence
  Quasi-synthetic sequence derived from human genome
IWFRRRRK

SEQ ID NO: 446 - protein, 8 aa, Artificial Sequence
  Quasi-synthetic sequence derived from human genome
RRKLMFII

SEQ ID NO: 447 - protein, 8 aa, Artificial Sequence
  Quasi-synthetic sequence derived from human genome
RKIMIRLL

SEQ ID NO: 448 - protein, 8 aa, Artificial Sequence
  Quasi-synthetic sequence derived from human genome
KLIRILRM

SEQ ID NO: 449 - protein, 8 aa, Artificial Sequence
  Quasi-synthetic sequence derived from human genome
KLMRRKWL

SEQ ID NO: 450 - protein, 8 aa, Artificial Sequence
  Quasi-synthetic sequence derived from human genome
ILRWKLVK

SEQ ID NO: 451 - protein, 8 aa, Artificial Sequence
  Quasi-synthetic sequence derived from human genome
RKIWVFLK

SEQ ID NO: 452 - protein, 8 aa, Artificial Sequence
  Quasi-synthetic sequence derived from human genome
KLKVWFRI

SEQ ID NO: 453 - protein, 8 aa, Artificial Sequence
  Quasi-synthetic sequence derived from human genome
KLFWIRVK

SEQ ID NO: 454 - protein, 8 aa, Artificial Sequence
  Quasi-synthetic sequence derived from human genome
ILKFLKKK

SEQ ID NO: 455 - protein, 8 aa, Artificial Sequence
  Quasi-synthetic sequence derived from human genome
KFLKKILK

SEQ ID NO: 456 - protein, 8 aa, Artificial Sequence
  Quasi-synthetic sequence derived from human genome
RFRYRLRL

SEQ ID NO: 457 - protein, 8 aa, Artificial Sequence
  Quasi-synthetic sequence derived from human genome
IIKKIWKR

SEQ ID NO: 458 - protein, 8 aa, Artificial Sequence
  Quasi-synthetic sequence derived from human genome
RLLRRYRL

SEQ ID NO: 459 - protein, 8 aa, Artificial Sequence
  Quasi-synthetic sequence derived from human genome
LILILKRL

SEQ ID NO: 460 - protein, 8 aa, Artificial Sequence
  Quasi-synthetic sequence derived from human genome
IFKLILRF

SEQ ID NO: 461 - protein, 8 aa, Artificial Sequence
  Quasi-synthetic sequence derived from human genome
KRIILFLF

SEQ ID NO: 462 - protein, 8 aa, Artificial Sequence
  Quasi-synthetic sequence derived from human genome
RLLILILK

SEQ ID NO: 463 - protein, 8 aa, Artificial Sequence
  Quasi-synthetic sequence derived from human genome
IIFLLKRL

SEQ ID NO: 464 - protein, 8 aa, Artificial Sequence
  Quasi-synthetic sequence derived from human genome
FFLLIIRK

SEQ ID NO: 465 - protein, 8 aa, Artificial Sequence
  Quasi-synthetic sequence derived from human genome
ILILRLKL

SEQ ID NO: 466 - protein, 8 aa, Artificial Sequence
  Quasi-synthetic sequence derived from human genome
RKIMKLLL

SEQ ID NO: 467 - protein, 8 aa, Artificial Sequence
  Quasi-synthetic sequence derived from human genome
KKLMIFLR

SEQ ID NO: 468 - protein, 8 aa, Artificial Sequence
  Quasi-synthetic sequence derived from human genome
MRLFFKIK

SEQ ID NO: 469 - protein, 8 aa, Artificial Sequence
  Quasi-synthetic sequence derived from human genome
ILLKYRWR

SEQ ID NO: 470 - protein, 8 aa, Artificial Sequence
  Quasi-synthetic sequence derived from human genome
KKRFMILL

SEQ ID NO: 471 - protein, 8 aa, Artificial Sequence
  Quasi-synthetic sequence derived from human genome
KRMIFKLF

SEQ ID NO: 472 - protein, 8 aa, Artificial Sequence
  Quasi-synthetic sequence derived from human genome
WKKLKLFV

SEQ ID NO: 473 - protein, 8 aa, Artificial Sequence
  Quasi-synthetic sequence derived from human genome
MLLWRRFL

SEQ ID NO: 474 - protein, 8 aa, Artificial Sequence
  Quasi-synthetic sequence derived from human genome
LLFFIKKL

SEQ ID NO: 475 - protein, 8 aa, Artificial Sequence
  Quasi-synthetic sequence derived from human genome
KLLLKILF

SEQ ID NO: 476 - protein, 8 aa, Artificial Sequence
  Quasi-synthetic sequence derived from human genome
FLLILKLK

SEQ ID NO: 477 - protein, 8 aa, Artificial Sequence
  Quasi-synthetic sequence derived from human genome
RWFKFRKR

SEQ ID NO: 478 - protein, 8 aa, Artificial Sequence
  Quasi-synthetic sequence derived from human genome
LKKFRRRW

SEQ ID NO: 479 - protein, 8 aa, Artificial Sequence
  Quasi-synthetic sequence derived from human genome
KWILKKIK

SEQ ID NO: 480 - protein, 8 aa, Artificial Sequence
  Quasi-synthetic sequence derived from human genome
RILIRKVL

SEQ ID NO: 481 - protein, 8 aa, Artificial Sequence
  Quasi-synthetic sequence derived from human genome
RFIRVFIK

SEQ ID NO: 482 - protein, 8 aa, Artificial Sequence
  Quasi-synthetic sequence derived from human genome
VIRKRLLI

SEQ ID NO: 483 - protein, 8 aa, Artificial Sequence
  Quasi-synthetic sequence derived from human genome
KLVLRIRI

SEQ ID NO: 484 - protein, 8 aa, Artificial Sequence
  Quasi-synthetic sequence derived from human genome
RILKLIVR

SEQ ID NO: 485 - protein, 8 aa, Artificial Sequence
  Quasi-synthetic sequence derived from human genome
KIRLLMRR

SEQ ID NO: 486 - protein, 8 aa, Artificial Sequence
  Quasi-synthetic sequence derived from human genome
RLKIRRLM

SEQ ID NO: 487 - protein, 8 aa, Artificial Sequence
  Quasi-synthetic sequence derived from human genome
RKIMRFLR

SEQ ID NO: 488 - protein, 8 aa, Artificial Sequence
  Quasi-synthetic sequence derived from human genome
LKRMFRRI

SEQ ID NO: 489 - protein, 8 aa, Artificial Sequence
  Quasi-synthetic sequence derived from human genome
FMIRKFRR

SEQ ID NO: 490 - protein, 8 aa, Artificial Sequence
  Quasi-synthetic sequence derived from human genome
RWKKRFFV

SEQ ID NO: 491 - protein, 8 aa, Artificial Sequence
  Quasi-synthetic sequence derived from human genome
VWKRLFRK

SEQ ID NO: 492 - protein, 8 aa, Artificial Sequence
  Quasi-synthetic sequence derived from human genome
LYRLWKKF

SEQ ID NO: 493 - protein, 8 aa, Artificial Sequence
  Quasi-synthetic sequence derived from human genome
KLRWYFKL

SEQ ID NO: 494 - protein, 8 aa, Artificial Sequence
  Quasi-synthetic sequence derived from human genome
LFKFMKKF

SEQ ID NO: 495 - protein, 8 aa, Artificial Sequence
  Quasi-synthetic sequence derived from human genome
FWYKFLKR

SEQ ID NO: 496 - protein, 8 aa, Artificial Sequence
  Quasi-synthetic sequence derived from human genome
FKLLKKLM

SEQ ID NO: 497 - protein, 8 aa, Artificial Sequence
  Quasi-synthetic sequence derived from human genome
KKMKLLLF

SEQ ID NO: 498 - protein, 8 aa, Artificial Sequence
  Quasi-synthetic sequence derived from human genome
MRILWKKI

SEQ ID NO: 499 - protein, 8 aa, Artificial Sequence
  Quasi-synthetic sequence derived from human genome
WIKLFKFI

SEQ ID NO: 500 - protein, 8 aa, Artificial Sequence
  Quasi-synthetic sequence derived from human genome
ILLLKIWK

SEQ ID NO: 501 - protein, 8 aa, Artificial Sequence
  Quasi-synthetic sequence derived from human genome
LRRRLYII

SEQ ID NO: 502 - protein, 8 aa, Artificial Sequence
  Quasi-synthetic sequence derived from human genome
LRVRWLLL

SEQ ID NO: 503 - protein, 8 aa, Artificial Sequence
  Quasi-synthetic sequence derived from human genome
LFRWLVLR

SEQ ID NO: 504 - protein, 8 aa, Artificial Sequence
  Quasi-synthetic sequence derived from human genome
RLWLRVLL

SEQ ID NO: 505 - protein, 8 aa, Artificial Sequence
  Quasi-synthetic sequence derived from human genome
RLFRLWLV

SEQ ID NO: 506 - protein, 8 aa, Artificial Sequence
  Quasi-synthetic sequence derived from human genome
LKFVRILK

SEQ ID NO: 507 - protein, 8 aa, Artificial Sequence
  Quasi-synthetic sequence derived from human genome
KKRLIVLF

SEQ ID NO: 508 - protein, 8 aa, Artificial Sequence
  Quasi-synthetic sequence derived from human genome
LWRRFRWA

SEQ ID NO: 509 - protein, 8 aa, Artificial Sequence
  Quasi-synthetic sequence derived from human genome
LVFRILKK

SEQ ID NO: 510 - protein, 8 aa, Artificial Sequence
  Quasi-synthetic sequence derived from human genome
FRILKVFK

SEQ ID NO: 511 - protein, 8 aa, Artificial Sequence
  Quasi-synthetic sequence derived from human genome
LVLIRLKK

SEQ ID NO: 512 - protein, 8 aa, Artificial Sequence
  Quasi-synthetic sequence derived from human genome
LFIVFRKK

SEQ ID NO: 513 - protein, 8 aa, Artificial Sequence
  Quasi-synthetic sequence derived from human genome
FFRVLKKI

SEQ ID NO: 514 - protein, 8 aa, Artificial Sequence
  Quasi-synthetic sequence derived from human genome
LRVKKIFL

SEQ ID NO: 515 - protein, 8 aa, Artificial Sequence
  Quasi-synthetic sequence derived from human genome
KFRKVLFI

SEQ ID NO: 516 - protein, 8 aa, Artificial Sequence
  Quasi-synthetic sequence derived from human genome
IVRKLKLL

SEQ ID NO: 517 - protein, 8 aa, Artificial Sequence
  Quasi-synthetic sequence derived from human genome
LLFIVRKK

SEQ ID NO: 518 - protein, 8 aa, Artificial Sequence
  Quasi-synthetic sequence derived from human genome
VFFILRKK

SEQ ID NO: 519 - protein, 8 aa, Artificial Sequence
  Quasi-synthetic sequence derived from human genome
LRIKFVKL

SEQ ID NO: 520 - protein, 8 aa, Artificial Sequence
  Quasi-synthetic sequence derived from human genome
VKFLRKFI

SEQ ID NO: 521 - protein, 8 aa, Artificial Sequence
  Quasi-synthetic sequence derived from human genome
IVFLRKFK

SEQ ID NO: 522 - protein, 8 aa, Artificial Sequence
  Quasi-synthetic sequence derived from human genome
WPLRRFWR

SEQ ID NO: 523 - protein, 8 aa, Artificial Sequence
  Quasi-synthetic sequence derived from human genome
RILLKKVF

SEQ ID NO: 524 - protein, 8 aa, Artificial Sequence
  Quasi-synthetic sequence derived from human genome
VLLLIKKR

SEQ ID NO: 525 - protein, 8 aa, Artificial Sequence
  Quasi-synthetic sequence derived from human genome
RIRIRRVL

SEQ ID NO: 526 - protein, 8 aa, Artificial Sequence
  Quasi-synthetic sequence derived from human genome
LRRCFFWR

SEQ ID NO: 527 - protein, 8 aa, Artificial Sequence
  Quasi-synthetic sequence derived from human genome
RFFWRLCR

SEQ ID NO: 528 - protein, 8 aa, Artificial Sequence
  Quasi-synthetic sequence derived from human genome
RFRKLKLM

SEQ ID NO: 529 - protein, 8 aa, Artificial Sequence
  Quasi-synthetic sequence derived from human genome
MKLLKLRR

SEQ ID NO: 530 - protein, 8 aa, Artificial Sequence
  Quasi-synthetic sequence derived from human genome
KRLRFYWR

SEQ ID NO: 531 - protein, 8 aa, Artificial Sequence
  Quasi-synthetic sequence derived from human genome
RMKFFFKR

SEQ ID NO: 532 - protein, 8 aa, Artificial Sequence
  Quasi-synthetic sequence derived from human genome
RRFWRKYL

SEQ ID NO: 533 - protein, 8 aa, Artificial Sequence
  Quasi-synthetic sequence derived from human genome
KLKMFRRL

SEQ ID NO: 534 - protein, 8 aa, Artificial Sequence
  Quasi-synthetic sequence derived from human genome
FKLWLMWR

SEQ ID NO: 535 - protein, 8 aa, Artificial Sequence
  Quasi-synthetic sequence derived from human genome
LLWKLMWR

SEQ ID NO: 536 - protein, 8 aa, Artificial Sequence
  Quasi-synthetic sequence derived from human genome
FFRFWMKW

SEQ ID NO: 537 - protein, 8 aa, Artificial Sequence
  Quasi-synthetic sequence derived from human genome
RRMLFLFL

SEQ ID NO: 538 - protein, 8 aa, Artificial Sequence
  Quasi-synthetic sequence derived from human genome
LLMLLLRR

SEQ ID NO: 539 - protein, 8 aa, Artificial Sequence
  Quasi-synthetic sequence derived from human genome
KWWVRKRI

SEQ ID NO: 540 - protein, 8 aa, Artificial Sequence
  Quasi-synthetic sequence derived from human genome
KIIILKRK

SEQ ID NO: 541 - protein, 8 aa, Artificial Sequence
  Quasi-synthetic sequence derived from human genome
IFRYFLRK

SEQ ID NO: 542 - protein, 8 aa, Artificial Sequence
  Quasi-synthetic sequence derived from human genome
KLRRLYFI

SEQ ID NO: 543 - protein, 8 aa, Artificial Sequence
  Quasi-synthetic sequence derived from human genome
FFIYKRRL

SEQ ID NO: 544 - protein, 8 aa, Artificial Sequence
  Quasi-synthetic sequence derived from human genome
RKLLLIYR

SEQ ID NO: 545 - protein, 8 aa, Artificial Sequence
  Quasi-synthetic sequence derived from human genome
LFLIYRRK

SEQ ID NO: 546 - protein, 8 aa, Artificial Sequence
  Quasi-synthetic sequence derived from human genome
YFLRKLRI

SEQ ID NO: 547 - protein, 8 aa, Artificial Sequence
  Quasi-synthetic sequence derived from human genome
YLRKLLIR

SEQ ID NO: 548 - protein, 8 aa, Artificial Sequence
  Quasi-synthetic sequence derived from human genome
YKRILLRL

SEQ ID NO: 549 - protein, 8 aa, Artificial Sequence
  Quasi-synthetic sequence derived from human genome
LRKLRILY

SEQ ID NO: 550 - protein, 8 aa, Artificial Sequence
  Quasi-synthetic sequence derived from human genome
FYFLIRKR

SEQ ID NO: 551 - protein, 8 aa, Artificial Sequence
  Quasi-synthetic sequence derived from human genome
FYLLIRKR

SEQ ID NO: 552 - protein, 8 aa, Artificial Sequence
  Quasi-synthetic sequence derived from human genome
WILVRLWR

SEQ ID NO: 553 - protein, 8 aa, Artificial Sequence
  Quasi-synthetic sequence derived from human genome
ILFIKRFI

SEQ ID NO: 554 - protein, 8 aa, Artificial Sequence
  Quasi-synthetic sequence derived from human genome
KFLLKLVK

SEQ ID NO: 555 - protein, 8 aa, Artificial Sequence
  Quasi-synthetic sequence derived from human genome
LLKKVLLK

SEQ ID NO: 556 - protein, 8 aa, Artificial Sequence
  Quasi-synthetic sequence derived from human genome
VLLKKFKL

SEQ ID NO: 557 - protein, 8 aa, Artificial Sequence
  Quasi-synthetic sequence derived from human genome
VLRRFIKR

SEQ ID NO: 558 - protein, 8 aa, Artificial Sequence
  Quasi-synthetic sequence derived from human genome
VRKLILRR

SEQ ID NO: 559 - protein, 8 aa, Artificial Sequence
  Quasi-synthetic sequence derived from human genome
RFKRRVLI

SEQ ID NO: 560 - protein, 8 aa, Artificial Sequence
  Quasi-synthetic sequence derived from human genome
RKVFRIFR

SEQ ID NO: 561 - protein, 8 aa, Artificial Sequence
  Quasi-synthetic sequence derived from human genome
RILVKKWI

SEQ ID NO: 562 - protein, 8 aa, Artificial Sequence
  Quasi-synthetic sequence derived from human genome
LWRRRVVL

SEQ ID NO: 563 - protein, 8 aa, Artificial Sequence
  Quasi-synthetic sequence derived from human genome
LFWMFRIR

SEQ ID NO: 564 - protein, 8 aa, Artificial Sequence
  Quasi-synthetic sequence derived from human genome
LILLIKKL

SEQ ID NO: 565 - protein, 8 aa, Artificial Sequence
  Quasi-synthetic sequence derived from human genome
KIIKLLLL

SEQ ID NO: 566 - protein, 8 aa, Artificial Sequence
  Quasi-synthetic sequence derived from human genome
WVRLFFWK

SEQ ID NO: 567 - protein, 8 aa, Artificial Sequence
  Quasi-synthetic sequence derived from human genome
FIFLKILK

SEQ ID NO: 568 - protein, 8 aa, Artificial Sequence
  Quasi-synthetic sequence derived from human genome
ILKLLIKF

SEQ ID NO: 569 - protein, 8 aa, Artificial Sequence
  Quasi-synthetic sequence derived from human genome
LKLILIKF

SEQ ID NO: 570 - protein, 8 aa, Artificial Sequence
  Quasi-synthetic sequence derived from human genome
YLLKLLRK

SEQ ID NO: 571 - protein, 8 aa, Artificial Sequence
  Quasi-synthetic sequence derived from human genome
LLYLKRLK

SEQ ID NO: 572 - protein, 8 aa, Artificial Sequence
  Quasi-synthetic sequence derived from human genome
YLKKFRLF

SEQ ID NO: 573 - protein, 8 aa, Artificial Sequence
  Quasi-synthetic sequence derived from human genome
RKKLYLLF

SEQ ID NO: 574 - protein, 8 aa, Artificial Sequence
  Quasi-synthetic sequence derived from human genome
YLRLKKLF

SEQ ID NO: 575 - protein, 8 aa, Artificial Sequence
  Quasi-synthetic sequence derived from human genome
YFRKFFKF

SEQ ID NO: 576 - protein, 8 aa, Artificial Sequence
  Quasi-synthetic sequence derived from human genome
YLFKLLRK

SEQ ID NO: 577 - protein, 8 aa, Artificial Sequence
  Quasi-synthetic sequence derived from human genome
RYLLKKLL

SEQ ID NO: 578 - protein, 8 aa, Artificial Sequence
  Quasi-synthetic sequence derived from human genome
RKLYKFLL

SEQ ID NO: 579 - protein, 8 aa, Artificial Sequence
  Quasi-synthetic sequence derived from human genome
LRFKYLLK

SEQ ID NO: 580 - protein, 8 aa, Artificial Sequence
  Quasi-synthetic sequence derived from human genome
LLRRLLVF

SEQ ID NO: 581 - protein, 8 aa, Artificial Sequence
  Quasi-synthetic sequence derived from human genome
FVLFLRLR

SEQ ID NO: 582 - protein, 8 aa, Artificial Sequence
  Quasi-synthetic sequence derived from human genome
FVFFFFRR

SEQ ID NO: 583 - protein, 8 aa, Artificial Sequence
  Quasi-synthetic sequence derived from human genome
VLRLRLLL

SEQ ID NO: 584 - protein, 8 aa, Artificial Sequence
  Quasi-synthetic sequence derived from human genome
RVRLLLLL

SEQ ID NO: 585 - protein, 8 aa, Artificial Sequence
  Quasi-synthetic sequence derived from human genome
FFRVLLLR

SEQ ID NO: 586 - protein, 8 aa, Artificial Sequence
  Quasi-synthetic sequence derived from human genome
RRVLLLLL

SEQ ID NO: 587 - protein, 8 aa, Artificial Sequence
  Quasi-synthetic sequence derived from human genome
RWLWKKVK

SEQ ID NO: 588 - protein, 8 aa, Artificial Sequence
  Quasi-synthetic sequence derived from human genome
WMRRMRIL

SEQ ID NO: 589 - protein, 8 aa, Artificial Sequence
  Quasi-synthetic sequence derived from human genome
IKMRKLIL

SEQ ID NO: 590 - protein, 8 aa, Artificial Sequence
  Quasi-synthetic sequence derived from human genome
WIRLYKIR

SEQ ID NO: 591 - protein, 8 aa, Artificial Sequence
  Quasi-synthetic sequence derived from human genome
LIRKMKLI

SEQ ID NO: 592 - protein, 8 aa, Artificial Sequence
  Quasi-synthetic sequence derived from human genome
IKILRKML

SEQ ID NO: 593 - protein, 8 aa, Artificial Sequence
  Quasi-synthetic sequence derived from human genome
FFKRKIMI

SEQ ID NO: 594 - protein, 8 aa, Artificial Sequence
  Quasi-synthetic sequence derived from human genome
KIRFFKIM

SEQ ID NO: 595 - protein, 8 aa, Artificial Sequence
  Quasi-synthetic sequence derived from human genome
KKIVWLKL

SEQ ID NO: 596 - protein, 8 aa, Artificial Sequence
  Quasi-synthetic sequence derived from human genome
KKLWFVIK

SEQ ID NO: 597 - protein, 8 aa, Artificial Sequence
  Quasi-synthetic sequence derived from human genome
WRKARWWL

SEQ ID NO: 598 - protein, 8 aa, Artificial Sequence
  Quasi-synthetic sequence derived from human genome
LRKLKRRF

SEQ ID NO: 599 - protein, 8 aa, Artificial Sequence
  Quasi-synthetic sequence derived from human genome
LRLKRRKF

SEQ ID NO: 600 - protein, 8 aa, Artificial Sequence
  Quasi-synthetic sequence derived from human genome
RKLRKRLL

SEQ ID NO: 601 - protein, 8 aa, Artificial Sequence
  Quasi-synthetic sequence derived from human genome
RLRKKLLR

SEQ ID NO: 602 - protein, 8 aa, Artificial Sequence
  Quasi-synthetic sequence derived from human genome
FRRKLFKR

SEQ ID NO: 603 - protein, 8 aa, Artificial Sequence
  Quasi-synthetic sequence derived from human genome
LFKKRRLR

SEQ ID NO: 604 - protein, 8 aa, Artificial Sequence
  Quasi-synthetic sequence derived from human genome
RFRYRILR

SEQ ID NO: 605 - protein, 8 aa, Artificial Sequence
  Quasi-synthetic sequence derived from human genome
LYRRILRR

SEQ ID NO: 606 - protein, 8 aa, Artificial Sequence
  Quasi-synthetic sequence derived from human genome
IRYRFRRF

SEQ ID NO: 607 - protein, 8 aa, Artificial Sequence
  Quasi-synthetic sequence derived from human genome
LRRVFLKK

SEQ ID NO: 608 - protein, 8 aa, Artificial Sequence
  Quasi-synthetic sequence derived from human genome
LFVKLRKR

SEQ ID NO: 609 - protein, 8 aa, Artificial Sequence
  Quasi-synthetic sequence derived from human genome
VKFLRRFK

SEQ ID NO: 610 - protein, 8 aa, Artificial Sequence
  Quasi-synthetic sequence derived from human genome
VRLRKLKF

SEQ ID NO: 611 - protein, 8 aa, Artificial Sequence
  Quasi-synthetic sequence derived from human genome
KLVRRLLK

SEQ ID NO: 612 - protein, 8 aa, Artificial Sequence
  Quasi-synthetic sequence derived from human genome
KFKLFRVR

SEQ ID NO: 613 - protein, 8 aa, Artificial Sequence
  Quasi-synthetic sequence derived from human genome
FLKKVRRL

SEQ ID NO: 614 - protein, 8 aa, Artificial Sequence
  Quasi-synthetic sequence derived from human genome
RLKVLRLK

SEQ ID NO: 615 - protein, 8 aa, Artificial Sequence
  Quasi-synthetic sequence derived from human genome
FLLRRVKK

SEQ ID NO: 616 - protein, 8 aa, Artificial Sequence
  Quasi-synthetic sequence derived from human genome
RLFRVMRL

SEQ ID NO: 617 - protein, 8 aa, Artificial Sequence
  Quasi-synthetic sequence derived from human genome
RRFLMRVL

SEQ ID NO: 618 - protein, 8 aa, Artificial Sequence
  Quasi-synthetic sequence derived from human genome
FRLFRVMR

SEQ ID NO: 619 - protein, 8 aa, Artificial Sequence
  Quasi-synthetic sequence derived from human genome
LLFMKLRW

SEQ ID NO: 620 - protein, 8 aa, Artificial Sequence
  Quasi-synthetic sequence derived from human genome
MLWKLLLR

SEQ ID NO: 621 - protein, 8 aa, Artificial Sequence
  Quasi-synthetic sequence derived from human genome
LMWRLLKL

SEQ ID NO: 622 - protein, 8 aa, Artificial Sequence
  Quasi-synthetic sequence derived from human genome
WRRWLFYL

SEQ ID NO: 623 - protein, 8 aa, Artificial Sequence
  Quasi-synthetic sequence derived from human genome
LWMLLKLR

SEQ ID NO: 624 - protein, 8 aa, Artificial Sequence
  Quasi-synthetic sequence derived from human genome
LLRWLRAR

SEQ ID NO: 625 - protein, 8 aa, Artificial Sequence
  Quasi-synthetic sequence derived from human genome
RWFFLPRR

SEQ ID NO: 626 - protein, 8 aa, Artificial Sequence
  Quasi-synthetic sequence derived from human genome
LLRRWLPR

SEQ ID NO: 627 - protein, 8 aa, Artificial Sequence
  Quasi-synthetic sequence derived from human genome
LALRLRRW

SEQ ID NO: 628 - protein, 8 aa, Artificial Sequence
  Quasi-synthetic sequence derived from human genome
LRRWLRAL

SEQ ID NO: 629 - protein, 8 aa, Artificial Sequence
  Quasi-synthetic sequence derived from human genome
RLLRRWAF

SEQ ID NO: 630 - protein, 8 aa, Artificial Sequence
  Quasi-synthetic sequence derived from human genome
RARRLWLL

SEQ ID NO: 631 - protein, 8 aa, Artificial Sequence
  Quasi-synthetic sequence derived from human genome
WRLLPFRR

SEQ ID NO: 632 - protein, 8 aa, Artificial Sequence
  Quasi-synthetic sequence derived from human genome
IRRMRRII

SEQ ID NO: 633 - protein, 8 aa, Artificial Sequence
  Quasi-synthetic sequence derived from human genome
FIIKLIKW

SEQ ID NO: 634 - protein, 8 aa, Artificial Sequence
  Quasi-synthetic sequence derived from human genome
RIKLIVRI

SEQ ID NO: 635 - protein, 8 aa, Artificial Sequence
  Quasi-synthetic sequence derived from human genome
IKRIVLRI

SEQ ID NO: 636 - protein, 8 aa, Artificial Sequence
  Quasi-synthetic sequence derived from human genome
RLLLRRLC

SEQ ID NO: 637 - protein, 8 aa, Artificial Sequence
  Quasi-synthetic sequence derived from human genome
LRFLRLCR

SEQ ID NO: 638 - protein, 8 aa, Artificial Sequence
  Quasi-synthetic sequence derived from human genome
RLCLRLRL

SEQ ID NO: 639 - protein, 8 aa, Artificial Sequence
  Quasi-synthetic sequence derived from human genome
LRLLRLRC

SEQ ID NO: 640 - protein, 8 aa, Artificial Sequence
  Quasi-synthetic sequence derived from human genome
LLLCRLRR

SEQ ID NO: 641 - protein, 8 aa, Artificial Sequence
  Quasi-synthetic sequence derived from human genome
RLFCFRLR

SEQ ID NO: 642 - protein, 8 aa, Artificial Sequence
  Quasi-synthetic sequence derived from human genome
FRWLVLRI

SEQ ID NO: 643 - protein, 8 aa, Artificial Sequence
  Quasi-synthetic sequence derived from human genome
FVFFIWRR

SEQ ID NO: 644 - protein, 8 aa, Artificial Sequence
  Quasi-synthetic sequence derived from human genome
LILWRVLR

SEQ ID NO: 645 - protein, 8 aa, Artificial Sequence
  Quasi-synthetic sequence derived from human genome
KKLMRKWL

SEQ ID NO: 646 - protein, 8 aa, Artificial Sequence
  Quasi-synthetic sequence derived from human genome
FLKKWRMK

SEQ ID NO: 647 - protein, 8 aa, Artificial Sequence
  Quasi-synthetic sequence derived from human genome
FKRKLKMW

SEQ ID NO: 648 - protein, 8 aa, Artificial Sequence
  Quasi-synthetic sequence derived from human genome
KRKRWLYW

SEQ ID NO: 649 - protein, 8 aa, Artificial Sequence
  Quasi-synthetic sequence derived from human genome
KKFLKIMF

SEQ ID NO: 650 - protein, 8 aa, Artificial Sequence
  Quasi-synthetic sequence derived from human genome
MIKKLLKL

SEQ ID NO: 651 - protein, 8 aa, Artificial Sequence
  Quasi-synthetic sequence derived from human genome
LKMKILLK

SEQ ID NO: 652 - protein, 8 aa, Artificial Sequence
  Quasi-synthetic sequence derived from human genome
KWKRYLLI

SEQ ID NO: 653 - protein, 8 aa, Artificial Sequence
  Quasi-synthetic sequence derived from human genome
MKLFFKIK

SEQ ID NO: 654 - protein, 8 aa, Artificial Sequence
  Quasi-synthetic sequence derived from human genome
MKFLKKIL

SEQ ID NO: 655 - protein, 8 aa, Artificial Sequence
  Quasi-synthetic sequence derived from human genome
LKYLRRRF

SEQ ID NO: 656 - protein, 8 aa, Artificial Sequence
  Quasi-synthetic sequence derived from human genome
RYKLLRRL

SEQ ID NO: 657 - protein, 8 aa, Artificial Sequence
  Quasi-synthetic sequence derived from human genome
YLLRKRLR

SEQ ID NO: 658 - protein, 8 aa, Artificial Sequence
  Quasi-synthetic sequence derived from human genome
FRFLRKYR

SEQ ID NO: 659 - protein, 8 aa, Artificial Sequence
  Quasi-synthetic sequence derived from human genome
RYRRFLKL

SEQ ID NO: 660 - protein, 8 aa, Artificial Sequence
  Quasi-synthetic sequence derived from human genome
LFRMLIRL

SEQ ID NO: 661 - protein, 8 aa, Artificial Sequence
  Quasi-synthetic sequence derived from human genome
LKRLWVLL

SEQ ID NO: 662 - protein, 8 aa, Artificial Sequence
  Quasi-synthetic sequence derived from human genome
RKLLWLVL

SEQ ID NO: 663 - protein, 8 aa, Artificial Sequence
  Quasi-synthetic sequence derived from human genome
VKFRWFFL

SEQ ID NO: 664 - protein, 8 aa, Artificial Sequence
  Quasi-synthetic sequence derived from human genome
VKRWFLLL

SEQ ID NO: 665 - protein, 8 aa, Artificial Sequence
  Quasi-synthetic sequence derived from human genome
KLLVRWLL

SEQ ID NO: 666 - protein, 8 aa, Artificial Sequence
  Quasi-synthetic sequence derived from human genome
KLRVLWLF

SEQ ID NO: 667 - protein, 8 aa, Artificial Sequence
  Quasi-synthetic sequence derived from human genome
LLVRIKIK

SEQ ID NO: 668 - protein, 8 aa, Artificial Sequence
  Quasi-synthetic sequence derived from human genome
KRIIKLLV

SEQ ID NO: 669 - protein, 8 aa, Artificial Sequence
  Quasi-synthetic sequence derived from human genome
IKKVRLLI

SEQ ID NO: 670 - protein, 8 aa, Artificial Sequence
  Quasi-synthetic sequence derived from human genome
ILIVKLRK

SEQ ID NO: 671 - protein, 8 aa, Artificial Sequence
  Quasi-synthetic sequence derived from human genome
FKLVRKII

SEQ ID NO: 672 - protein, 8 aa, Artificial Sequence
  Quasi-synthetic sequence derived from human genome
VIFILRKK

SEQ ID NO: 673 - protein, 8 aa, Artificial Sequence
  Quasi-synthetic sequence derived from human genome
LIIKKRFV

SEQ ID NO: 674 - protein, 8 aa, Artificial Sequence
  Quasi-synthetic sequence derived from human genome
LLRVIKIK

SEQ ID NO: 675 - protein, 8 aa, Artificial Sequence
  Quasi-synthetic sequence derived from human genome
RRLIMKRI

SEQ ID NO: 676 - protein, 8 aa, Artificial Sequence
  Quasi-synthetic sequence derived from human genome
RMWRVRWR

SEQ ID NO: 677 - protein, 8 aa, Artificial Sequence
  Quasi-synthetic sequence derived from human genome
WRWRRARW

SEQ ID NO: 678 - protein, 8 aa, Artificial Sequence
  Quasi-synthetic sequence derived from human genome
RIILRVWW

SEQ ID NO: 679 - protein, 8 aa, Artificial Sequence
  Quasi-synthetic sequence derived from human genome
RLLRLVRV

SEQ ID NO: 680 - protein, 8 aa, Artificial Sequence
  Quasi-synthetic sequence derived from human genome
VVRLLRLR

SEQ ID NO: 681 - protein, 8 aa, Artificial Sequence
  Quasi-synthetic sequence derived from human genome
LRVFRVFR

SEQ ID NO: 682 - protein, 8 aa, Artificial Sequence
  Quasi-synthetic sequence derived from human genome
LRVLVLRR

SEQ ID NO: 683 - protein, 8 aa, Artificial Sequence
  Quasi-synthetic sequence derived from human genome
LVRRFRVL

SEQ ID NO: 684 - protein, 8 aa, Artificial Sequence
  Quasi-synthetic sequence derived from human genome
LRVLRVLR

SEQ ID NO: 685 - protein, 8 aa, Artificial Sequence
  Quasi-synthetic sequence derived from human genome
RRVRLVFL

SEQ ID NO: 686 - protein, 8 aa, Artificial Sequence
  Quasi-synthetic sequence derived from human genome
RRLLRLVV

SEQ ID NO: 687 - protein, 8 aa, Artificial Sequence
  Quasi-synthetic sequence derived from human genome
LLVVRRLR

SEQ ID NO: 688 - protein, 8 aa, Artificial Sequence
  Quasi-synthetic sequence derived from human genome
RLRLRVLV

SEQ ID NO: 689 - protein, 8 aa, Artificial Sequence
  Quasi-synthetic sequence derived from human genome
RRFILRWC

SEQ ID NO: 690 - protein, 8 aa, Artificial Sequence
  Quasi-synthetic sequence derived from human genome
KKLKYLWL

SEQ ID NO: 691 - protein, 8 aa, Artificial Sequence
  Quasi-synthetic sequence derived from human genome
KWYLKKLL

SEQ ID NO: 692 - protein, 8 aa, Artificial Sequence
  Quasi-synthetic sequence derived from human genome
FKFWLMWK

SEQ ID NO: 693 - protein, 8 aa, Artificial Sequence
  Quasi-synthetic sequence derived from human genome
LKLWLMWK

SEQ ID NO: 694 - protein, 8 aa, Artificial Sequence
  Quasi-synthetic sequence derived from human genome
FRKFLLML

SEQ ID NO: 695 - protein, 8 aa, Artificial Sequence
  Quasi-synthetic sequence derived from human genome
LWRYFLLR

SEQ ID NO: 696 - protein, 8 aa, Artificial Sequence
  Quasi-synthetic sequence derived from human genome
LLLLKMLR

SEQ ID NO: 697 - protein, 8 aa, Artificial Sequence
  Quasi-synthetic sequence derived from human genome
LWYLRLLR

SEQ ID NO: 698 - protein, 8 aa, Artificial Sequence
  Quasi-synthetic sequence derived from human genome
LWRLLLYR

SEQ ID NO: 699 - protein, 8 aa, Artificial Sequence
  Quasi-synthetic sequence derived from human genome
RLFRLLYW

SEQ ID NO: 700 - protein, 8 aa, Artificial Sequence
  Quasi-synthetic sequence derived from human genome
KRFRYIIL

SEQ ID NO: 701 - protein, 8 aa, Artificial Sequence
  Quasi-synthetic sequence derived from human genome
IIYLRRFK

SEQ ID NO: 702 - protein, 8 aa, Artificial Sequence
  Quasi-synthetic sequence derived from human genome
RYLRKILI

SEQ ID NO: 703 - protein, 8 aa, Artificial Sequence
  Quasi-synthetic sequence derived from human genome
MKFFRWVR

SEQ ID NO: 704 - protein, 8 aa, Artificial Sequence
  Quasi-synthetic sequence derived from human genome
MKFLVRRW

SEQ ID NO: 705 - protein, 8 aa, Artificial Sequence
  Quasi-synthetic sequence derived from human genome
FFRIYKRI

SEQ ID NO: 706 - protein, 8 aa, Artificial Sequence
  Quasi-synthetic sequence derived from human genome
LWRRVMLK

SEQ ID NO: 707 - protein, 8 aa, Artificial Sequence
  Quasi-synthetic sequence derived from human genome
IRRYILKF

SEQ ID NO: 708 - protein, 8 aa, Artificial Sequence
  Quasi-synthetic sequence derived from human genome
FYLIIRRK

SEQ ID NO: 709 - protein, 8 aa, Artificial Sequence
  Quasi-synthetic sequence derived from human genome
LIKIIKLF

SEQ ID NO: 710 - protein, 8 aa, Artificial Sequence
  Quasi-synthetic sequence derived from human genome
KKLIIFIL

SEQ ID NO: 711 - protein, 8 aa, Artificial Sequence
  Quasi-synthetic sequence derived from human genome
IKLKLIFI

SEQ ID NO: 712 - protein, 8 aa, Artificial Sequence
  Quasi-synthetic sequence derived from human genome
LLKKVKFI

SEQ ID NO: 713 - protein, 8 aa, Artificial Sequence
  Quasi-synthetic sequence derived from human genome
RWLLKHWR

SEQ ID NO: 714 - protein, 8 aa, Artificial Sequence
  Quasi-synthetic sequence derived from human genome
LLKKLVKI

SEQ ID NO: 715 - protein, 8 aa, Artificial Sequence
  Quasi-synthetic sequence derived from human genome
LFWWAKRR

SEQ ID NO: 716 - protein, 8 aa, Artificial Sequence
  Quasi-synthetic sequence derived from human genome
WKWARLLR

SEQ ID NO: 717 - protein, 8 aa, Artificial Sequence
  Quasi-synthetic sequence derived from human genome
IVKLFLKK

SEQ ID NO: 718 - protein, 8 aa, Artificial Sequence
  Quasi-synthetic sequence derived from human genome
PKRRWLFW

SEQ ID NO: 719 - protein, 8 aa, Artificial Sequence
  Quasi-synthetic sequence derived from human genome
LLRRWKHW

SEQ ID NO: 720 - protein, 8 aa, Artificial Sequence
  Quasi-synthetic sequence derived from human genome
KIVLFKKF

SEQ ID NO: 721 - protein, 8 aa, Artificial Sequence
  Quasi-synthetic sequence derived from human genome
LKFKILVK

SEQ ID NO: 722 - protein, 8 aa, Artificial Sequence
  Quasi-synthetic sequence derived from human genome
ILFKKVLK

SEQ ID NO: 723 - protein, 8 aa, Artificial Sequence
  Quasi-synthetic sequence derived from human genome
RAWKWLRL

SEQ ID NO: 724 - protein, 8 aa, Artificial Sequence
  Quasi-synthetic sequence derived from human genome
LLVKIKLK

SEQ ID NO: 725 - protein, 8 aa, Artificial Sequence
  Quasi-synthetic sequence derived from human genome
VKLFKLIK

SEQ ID NO: 726 - protein, 8 aa, Artificial Sequence
  Quasi-synthetic sequence derived from human genome
WLWRFKAR

SEQ ID NO: 727 - protein, 8 aa, Artificial Sequence
  Quasi-synthetic sequence derived from human genome
LIVFRFLR

SEQ ID NO: 728 - protein, 8 aa, Artificial Sequence
  Quasi-synthetic sequence derived from human genome
FLLIVLRR

SEQ ID NO: 729 - protein, 8 aa, Artificial Sequence
  Quasi-synthetic sequence derived from human genome
FILFRVLR

SEQ ID NO: 730 - protein, 8 aa, Artificial Sequence
  Quasi-synthetic sequence derived from human genome
KRIFLKRM

SEQ ID NO: 731 - protein, 8 aa, Artificial Sequence
  Quasi-synthetic sequence derived from human genome
LIRKKFRM

SEQ ID NO: 732 - protein, 8 aa, Artificial Sequence
  Quasi-synthetic sequence derived from human genome
RFKKRMLI

SEQ ID NO: 733 - protein, 8 aa, Artificial Sequence
  Quasi-synthetic sequence derived from human genome
HRRFLLFR

SEQ ID NO: 734 - protein, 8 aa, Artificial Sequence
  Quasi-synthetic sequence derived from human genome
RRRLALFL

SEQ ID NO: 735 - protein, 8 aa, Artificial Sequence
  Quasi-synthetic sequence derived from human genome
RFLRRLLA

SEQ ID NO: 736 - protein, 8 aa, Artificial Sequence
  Quasi-synthetic sequence derived from human genome
RFLRLAFR

SEQ ID NO: 737 - protein, 8 aa, Artificial Sequence
  Quasi-synthetic sequence derived from human genome
RFFHFRRL

SEQ ID NO: 738 - protein, 8 aa, Artificial Sequence
  Quasi-synthetic sequence derived from human genome
RLARFLRL

SEQ ID NO: 739 - protein, 8 aa, Artificial Sequence
  Quasi-synthetic sequence derived from human genome
LRRLLRPL

SEQ ID NO: 740 - protein, 8 aa, Artificial Sequence
  Quasi-synthetic sequence derived from human genome
RLRRLALF

SEQ ID NO: 741 - protein, 8 aa, Artificial Sequence
  Quasi-synthetic sequence derived from human genome
LALLRRFR

SEQ ID NO: 742 - protein, 8 aa, Artificial Sequence
  Quasi-synthetic sequence derived from human genome
RAFLRRLL

SEQ ID NO: 743 - protein, 8 aa, Artificial Sequence
  Quasi-synthetic sequence derived from human genome
RRRFLALL

SEQ ID NO: 744 - protein, 8 aa, Artificial Sequence
  Quasi-synthetic sequence derived from human genome
LRLHRLLR

SEQ ID NO: 745 - protein, 8 aa, Artificial Sequence
  Quasi-synthetic sequence derived from human genome
FLRAFRLR

SEQ ID NO: 746 - protein, 8 aa, Artificial Sequence
  Quasi-synthetic sequence derived from human genome
LRRARLFL

SEQ ID NO: 747 - protein, 8 aa, Artificial Sequence
  Quasi-synthetic sequence derived from human genome
LCWKLRFR

SEQ ID NO: 748 - protein, 8 aa, Artificial Sequence
  Quasi-synthetic sequence derived from human genome
RRLLLLPR

SEQ ID NO: 749 - protein, 8 aa, Artificial Sequence
  Quasi-synthetic sequence derived from human genome
RRALLRFL

SEQ ID NO: 750 - protein, 8 aa, Artificial Sequence
  Quasi-synthetic sequence derived from human genome
RRLLRPFF

SEQ ID NO: 751 - protein, 8 aa, Artificial Sequence
  Quasi-synthetic sequence derived from human genome
RFRLLHLR

SEQ ID NO: 752 - protein, 8 aa, Artificial Sequence
  Quasi-synthetic sequence derived from human genome
RHLRLLRL

SEQ ID NO: 753 - protein, 8 aa, Artificial Sequence
  Quasi-synthetic sequence derived from human genome
LRLRLLRA

SEQ ID NO: 754 - protein, 8 aa, Artificial Sequence
  Quasi-synthetic sequence derived from human genome
RARRLLLF

SEQ ID NO: 755 - protein, 8 aa, Artificial Sequence
  Quasi-synthetic sequence derived from human genome
LRFLRALR

SEQ ID NO: 756 - protein, 8 aa, Artificial Sequence
  Quasi-synthetic sequence derived from human genome
FLRRRLAF

SEQ ID NO: 757 - protein, 8 aa, Artificial Sequence
  Quasi-synthetic sequence derived from human genome
ALLRLRLR

SEQ ID NO: 758 - protein, 8 aa, Artificial Sequence
  Quasi-synthetic sequence derived from human genome
PRLRLLLR

SEQ ID NO: 759 - protein, 8 aa, Artificial Sequence
  Quasi-synthetic sequence derived from human genome
LRRRFFLH

SEQ ID NO: 760 - protein, 8 aa, Artificial Sequence
  Quasi-synthetic sequence derived from human genome
RLALLRRL

SEQ ID NO: 761 - protein, 8 aa, Artificial Sequence
  Quasi-synthetic sequence derived from human genome
LRLLRALR

SEQ ID NO: 762 - protein, 8 aa, Artificial Sequence
  Quasi-synthetic sequence derived from human genome
RHRRLLLL

SEQ ID NO: 763 - protein, 8 aa, Artificial Sequence
  Quasi-synthetic sequence derived from human genome
AFLLRRRF

SEQ ID NO: 764 - protein, 8 aa, Artificial Sequence
  Quasi-synthetic sequence derived from human genome
RAFLRLLR

SEQ ID NO: 765 - protein, 8 aa, Artificial Sequence
  Quasi-synthetic sequence derived from human genome
LLRFLRAR

SEQ ID NO: 766 - protein, 8 aa, Artificial Sequence
  Quasi-synthetic sequence derived from human genome
LRPFLLRR

SEQ ID NO: 767 - protein, 8 aa, Artificial Sequence
  Quasi-synthetic sequence derived from human genome
RLLPLRRL

SEQ ID NO: 768 - protein, 8 aa, Artificial Sequence
  Quasi-synthetic sequence derived from human genome
LWLRKCLR

SEQ ID NO: 769 - protein, 8 aa, Artificial Sequence
  Quasi-synthetic sequence derived from human genome
LLALRRRL

SEQ ID NO: 770 - protein, 8 aa, Artificial Sequence
  Quasi-synthetic sequence derived from human genome
KKKVFLWR

SEQ ID NO: 771 - protein, 8 aa, Artificial Sequence
  Quasi-synthetic sequence derived from human genome
IVVFRRRW

SEQ ID NO: 772 - protein, 8 aa, Artificial Sequence
  Quasi-synthetic sequence derived from human genome
LFIWLKMR

SEQ ID NO: 773 - protein, 8 aa, Artificial Sequence
  Quasi-synthetic sequence derived from human genome
FMWLKLRI

SEQ ID NO: 774 - protein, 8 aa, Artificial Sequence
  Quasi-synthetic sequence derived from human genome
LRYILLKK

SEQ ID NO: 775 - protein, 8 aa, Artificial Sequence
  Quasi-synthetic sequence derived from human genome
FLIYKFKR

SEQ ID NO: 776 - protein, 8 aa, Artificial Sequence
  Quasi-synthetic sequence derived from human genome
KLIRYLKL

SEQ ID NO: 777 - protein, 8 aa, Artificial Sequence
  Quasi-synthetic sequence derived from human genome
IKRLYKLL

SEQ ID NO: 778 - protein, 8 aa, Artificial Sequence
  Quasi-synthetic sequence derived from human genome
KKRYFILL

SEQ ID NO: 779 - protein, 8 aa, Artificial Sequence
  Quasi-synthetic sequence derived from human genome
LYLIKKRL

SEQ ID NO: 780 - protein, 8 aa, Artificial Sequence
  Quasi-synthetic sequence derived from human genome
RKKLILYF

SEQ ID NO: 781 - protein, 8 aa, Artificial Sequence
  Quasi-synthetic sequence derived from human genome
KIKLLYRL

SEQ ID NO: 782 - protein, 8 aa, Artificial Sequence
  Quasi-synthetic sequence derived from human genome
RKLFYFKI

SEQ ID NO: 783 - protein, 8 aa, Artificial Sequence
  Quasi-synthetic sequence derived from human genome
KILKRLYL

SEQ ID NO: 784 - protein, 8 aa, Artificial Sequence
  Quasi-synthetic sequence derived from human genome
KKIYFFLR

SEQ ID NO: 785 - protein, 8 aa, Artificial Sequence
  Quasi-synthetic sequence derived from human genome
VRKLIIRR

SEQ ID NO: 786 - protein, 8 aa, Artificial Sequence
  Quasi-synthetic sequence derived from human genome
IRIRVKFR

SEQ ID NO: 787 - protein, 8 aa, Artificial Sequence
  Quasi-synthetic sequence derived from human genome
VKIIRRRL

SEQ ID NO: 788 - protein, 8 aa, Artificial Sequence
  Quasi-synthetic sequence derived from human genome
FFKLFRVL

SEQ ID NO: 789 - protein, 8 aa, Artificial Sequence
  Quasi-synthetic sequence derived from human genome
LFKLFRLV

SEQ ID NO: 790 - protein, 8 aa, Artificial Sequence
  Quasi-synthetic sequence derived from human genome
FKFVFFLR

SEQ ID NO: 791 - protein, 8 aa, Artificial Sequence
  Quasi-synthetic sequence derived from human genome
RVFFKFLL

SEQ ID NO: 792 - protein, 8 aa, Artificial Sequence
  Quasi-synthetic sequence derived from human genome
LRVLKLFL

SEQ ID NO: 793 - protein, 8 aa, Artificial Sequence
  Quasi-synthetic sequence derived from human genome
VLLFKFLR

SEQ ID NO: 794 - protein, 8 aa, Artificial Sequence
  Quasi-synthetic sequence derived from human genome
YRIKWRII

SEQ ID NO: 795 - protein, 8 aa, Artificial Sequence
  Quasi-synthetic sequence derived from human genome
ILRIKRRR

SEQ ID NO: 796 - protein, 8 aa, Artificial Sequence
  Quasi-synthetic sequence derived from human genome
RILRRRKI

SEQ ID NO: 797 - protein, 8 aa, Artificial Sequence
  Quasi-synthetic sequence derived from human genome
WKKLRYFR

SEQ ID NO: 798 - protein, 8 aa, Artificial Sequence
  Quasi-synthetic sequence derived from human genome
RFRKWLYK

SEQ ID NO: 799 - protein, 8 aa, Artificial Sequence
  Quasi-synthetic sequence derived from human genome
WKRYRFKL

SEQ ID NO: 800 - protein, 8 aa, Artificial Sequence
  Quasi-synthetic sequence derived from human genome
RKLLMLKK

SEQ ID NO: 801 - protein, 8 aa, Artificial Sequence
  Quasi-synthetic sequence derived from human genome
LKKRLRWY

SEQ ID NO: 802 - protein, 8 aa, Artificial Sequence
  Quasi-synthetic sequence derived from human genome
LKMLKRLK

SEQ ID NO: 803 - protein, 8 aa, Artificial Sequence
  Quasi-synthetic sequence derived from human genome
LKKKRLMF

SEQ ID NO: 804 - protein, 8 aa, Artificial Sequence
  Quasi-synthetic sequence derived from human genome
RFFIRRMV

SEQ ID NO: 805 - protein, 8 aa, Artificial Sequence
  Quasi-synthetic sequence derived from human genome
FLWLMKLK

SEQ ID NO: 806 - protein, 8 aa, Artificial Sequence
  Quasi-synthetic sequence derived from human genome
LRRLWVVK

SEQ ID NO: 807 - protein, 8 aa, Artificial Sequence
  Quasi-synthetic sequence derived from human genome
RIFRPWRL

SEQ ID NO: 808 - protein, 8 aa, Artificial Sequence
  Quasi-synthetic sequence derived from human genome
LIRPWRRL

SEQ ID NO: 809 - protein, 8 aa, Artificial Sequence
  Quasi-synthetic sequence derived from human genome
LWIRWKCR

SEQ ID NO: 810 - protein, 8 aa, Artificial Sequence
  Quasi-synthetic sequence derived from human genome
FWIKCRRW

SEQ ID NO: 811 - protein, 8 aa, Artificial Sequence
  Quasi-synthetic sequence derived from human genome
WVKFLRRV

SEQ ID NO: 812 - protein, 8 aa, Artificial Sequence
  Quasi-synthetic sequence derived from human genome
RLLARIWR

SEQ ID NO: 813 - protein, 8 aa, Artificial Sequence
  Quasi-synthetic sequence derived from human genome
LRILWRRP

SEQ ID NO: 814 - protein, 8 aa, Artificial Sequence
  Quasi-synthetic sequence derived from human genome
LFRVRVWK

SEQ ID NO: 815 - protein, 8 aa, Artificial Sequence
  Quasi-synthetic sequence derived from human genome
IRALRLWR

SEQ ID NO: 816 - protein, 8 aa, Artificial Sequence
  Quasi-synthetic sequence derived from human genome
WRLKVLVR

SEQ ID NO: 817 - protein, 8 aa, Artificial Sequence
  Quasi-synthetic sequence derived from human genome
IRWLRAFR

SEQ ID NO: 818 - protein, 8 aa, Artificial Sequence
  Quasi-synthetic sequence derived from human genome
LLLFLYRR

SEQ ID NO: 819 - protein, 8 aa, Artificial Sequence
  Quasi-synthetic sequence derived from human genome
YFLLRRLL

SEQ ID NO: 820 - protein, 8 aa, Artificial Sequence
  Quasi-synthetic sequence derived from human genome
LLYLLRLR

SEQ ID NO: 821 - protein, 8 aa, Artificial Sequence
  Quasi-synthetic sequence derived from human genome
WMIKIRKR

SEQ ID NO: 822 - protein, 8 aa, Artificial Sequence
  Quasi-synthetic sequence derived from human genome
KIKFIIKK

SEQ ID NO: 823 - protein, 8 aa, Artificial Sequence
  Quasi-synthetic sequence derived from human genome
CRLRIFLR

SEQ ID NO: 824 - protein, 8 aa, Artificial Sequence
  Quasi-synthetic sequence derived from human genome
CLIRRLRL

SEQ ID NO: 825 - protein, 8 aa, Artificial Sequence
  Quasi-synthetic sequence derived from human genome
LRIRLFCR

SEQ ID NO: 826 - protein, 8 aa, Artificial Sequence
  Quasi-synthetic sequence derived from human genome
LRCIRLLR

SEQ ID NO: 827 - protein, 8 aa, Artificial Sequence
  Quasi-synthetic sequence derived from human genome
RRFFLRCI

SEQ ID NO: 828 - protein, 8 aa, Artificial Sequence
  Quasi-synthetic sequence derived from human genome
RLLRMIIL

SEQ ID NO: 829 - protein, 8 aa, Artificial Sequence
  Quasi-synthetic sequence derived from human genome
FKKLKFYL

SEQ ID NO: 830 - protein, 8 aa, Artificial Sequence
  Quasi-synthetic sequence derived from human genome
KYLLKLLK

SEQ ID NO: 831 - protein, 8 aa, Artificial Sequence
  Quasi-synthetic sequence derived from human genome
LLKYLKKL

SEQ ID NO: 832 - protein, 8 aa, Artificial Sequence
  Quasi-synthetic sequence derived from human genome
LFKKLFKY

SEQ ID NO: 833 - protein, 8 aa, Artificial Sequence
  Quasi-synthetic sequence derived from human genome
LKYFLLKK

SEQ ID NO: 834 - protein, 8 aa, Artificial Sequence
  Quasi-synthetic sequence derived from human genome
WRILKVLL

SEQ ID NO: 835 - protein, 8 aa, Artificial Sequence
  Quasi-synthetic sequence derived from human genome
LVFWKLIR

SEQ ID NO: 836 - protein, 8 aa, Artificial Sequence
  Quasi-synthetic sequence derived from human genome
WVFILFRK

SEQ ID NO: 837 - protein, 8 aa, Artificial Sequence
  Quasi-synthetic sequence derived from human genome
RLLWKLVI

SEQ ID NO: 838 - protein, 8 aa, Artificial Sequence
  Quasi-synthetic sequence derived from human genome
LVILRKKR

SEQ ID NO: 839 - protein, 8 aa, Artificial Sequence
  Quasi-synthetic sequence derived from human genome
RRWHRWRL

SEQ ID NO: 840 - protein, 8 aa, Artificial Sequence
  Quasi-synthetic sequence derived from human genome
LKRIRKVL

SEQ ID NO: 841 - protein, 8 aa, Artificial Sequence
  Quasi-synthetic sequence derived from human genome
VRLLRIKK

SEQ ID NO: 842 - protein, 8 aa, Artificial Sequence
  Quasi-synthetic sequence derived from human genome
LKIRVRKL

SEQ ID NO: 843 - protein, 8 aa, Artificial Sequence
  Quasi-synthetic sequence derived from human genome
KVRILRLK

SEQ ID NO: 844 - protein, 8 aa, Artificial Sequence
  Quasi-synthetic sequence derived from human genome
LKRKLIVR

SEQ ID NO: 845 - protein, 8 aa, Artificial Sequence
  Quasi-synthetic sequence derived from human genome
LRVKIRKL

SEQ ID NO: 846 - protein, 8 aa, Artificial Sequence
  Quasi-synthetic sequence derived from human genome
RIWKLYIK

SEQ ID NO: 847 - protein, 8 aa, Artificial Sequence
  Quasi-synthetic sequence derived from human genome
WLIKYIKR

SEQ ID NO: 848 - protein, 8 aa, Artificial Sequence
  Quasi-synthetic sequence derived from human genome
LIKMILKK

SEQ ID NO: 849 - protein, 8 aa, Artificial Sequence
  Quasi-synthetic sequence derived from human genome
LKFIKIMK

SEQ ID NO: 850 - protein, 8 aa, Artificial Sequence
  Quasi-synthetic sequence derived from human genome
WAFRKWKW

SEQ ID NO: 851 - protein, 8 aa, Artificial Sequence
  Quasi-synthetic sequence derived from human genome
FWKIFKMW

SEQ ID NO: 852 - protein, 8 aa, Artificial Sequence
  Quasi-synthetic sequence derived from human genome
FKWKMLWI

SEQ ID NO: 853 - protein, 8 aa, Artificial Sequence
  Quasi-synthetic sequence derived from human genome
FRRVMKLL

SEQ ID NO: 854 - protein, 8 aa, Artificial Sequence
  Quasi-synthetic sequence derived from human genome
FRMVLRKL

SEQ ID NO: 855 - protein, 8 aa, Artificial Sequence
  Quasi-synthetic sequence derived from human genome
VWRYLLRR

SEQ ID NO: 856 - protein, 8 aa, Artificial Sequence
  Quasi-synthetic sequence derived from human genome
LLWRRRVY

SEQ ID NO: 857 - protein, 8 aa, Artificial Sequence
  Quasi-synthetic sequence derived from human genome
RVLLMLRK

SEQ ID NO: 858 - protein, 8 aa, Artificial Sequence
  Quasi-synthetic sequence derived from human genome
VLKLFRMR

SEQ ID NO: 859 - protein, 8 aa, Artificial Sequence
  Quasi-synthetic sequence derived from human genome
LRCWRLRR

SEQ ID NO: 860 - protein, 8 aa, Artificial Sequence
  Quasi-synthetic sequence derived from human genome
RKHLWRLF

SEQ ID NO: 861 - protein, 8 aa, Artificial Sequence
  Quasi-synthetic sequence derived from human genome
LHLKRFRW

SEQ ID NO: 862 - protein, 8 aa, Artificial Sequence
  Quasi-synthetic sequence derived from human genome
LKRALWLR

SEQ ID NO: 863 - protein, 8 aa, Artificial Sequence
  Quasi-synthetic sequence derived from human genome
KLRLFAWR

SEQ ID NO: 864 - protein, 8 aa, Artificial Sequence
  Quasi-synthetic sequence derived from human genome
LLKRRFHW

SEQ ID NO: 865 - protein, 8 aa, Artificial Sequence
  Quasi-synthetic sequence derived from human genome
RRKLALLW

SEQ ID NO: 866 - protein, 8 aa, Artificial Sequence
  Quasi-synthetic sequence derived from human genome
PWRLFFRK

SEQ ID NO: 867 - protein, 8 aa, Artificial Sequence
  Quasi-synthetic sequence derived from human genome
ALRWFLRK

SEQ ID NO: 868 - protein, 8 aa, Artificial Sequence
  Quasi-synthetic sequence derived from human genome
FARLWKRL

SEQ ID NO: 869 - protein, 8 aa, Artificial Sequence
  Quasi-synthetic sequence derived from human genome
RLFRKWFA

SEQ ID NO: 870 - protein, 8 aa, Artificial Sequence
  Quasi-synthetic sequence derived from human genome
LLRKWLRA

SEQ ID NO: 871 - protein, 8 aa, Artificial Sequence
  Quasi-synthetic sequence derived from human genome
LWLLRKPR

SEQ ID NO: 872 - protein, 8 aa, Artificial Sequence
  Quasi-synthetic sequence derived from human genome
KWRLAFRF

SEQ ID NO: 873 - protein, 8 aa, Artificial Sequence
  Quasi-synthetic sequence derived from human genome
WKRFCFWK

SEQ ID NO: 874 - protein, 8 aa, Artificial Sequence
  Quasi-synthetic sequence derived from human genome
KRLAFLRW

SEQ ID NO: 875 - protein, 8 aa, Artificial Sequence
  Quasi-synthetic sequence derived from human genome
RWRHKLLL

SEQ ID NO: 876 - protein, 8 aa, Artificial Sequence
  Quasi-synthetic sequence derived from human genome
LRRLYFIW

SEQ ID NO: 877 - protein, 8 aa, Artificial Sequence
  Quasi-synthetic sequence derived from human genome
FLIFRKLM

SEQ ID NO: 878 - protein, 8 aa, Artificial Sequence
  Quasi-synthetic sequence derived from human genome
RRLILWYF

SEQ ID NO: 879 - protein, 8 aa, Artificial Sequence
  Quasi-synthetic sequence derived from human genome
ILYFRRWL

SEQ ID NO: 880 - protein, 8 aa, Artificial Sequence
  Quasi-synthetic sequence derived from human genome
LRILLLMK

SEQ ID NO: 881 - protein, 8 aa, Artificial Sequence
  Quasi-synthetic sequence derived from human genome
RFLFLKIM

SEQ ID NO: 882 - protein, 8 aa, Artificial Sequence
  Quasi-synthetic sequence derived from human genome
KKVLLLLW

SEQ ID NO: 883 - protein, 8 aa, Artificial Sequence
  Quasi-synthetic sequence derived from human genome
KVLLLLWK

SEQ ID NO: 884 - protein, 8 aa, Artificial Sequence
  Quasi-synthetic sequence derived from human genome
LVLWLKKL

SEQ ID NO: 885 - protein, 8 aa, Artificial Sequence
  Quasi-synthetic sequence derived from human genome
KKRRRFLI

SEQ ID NO: 886 - protein, 8 aa, Artificial Sequence
  Quasi-synthetic sequence derived from human genome
RIRFKLKR

SEQ ID NO: 887 - protein, 8 aa, Artificial Sequence
  Quasi-synthetic sequence derived from human genome
LLRKKRRI

SEQ ID NO: 888 - protein, 8 aa, Artificial Sequence
  Quasi-synthetic sequence derived from human genome
RRRKKLIL

SEQ ID NO: 889 - protein, 8 aa, Artificial Sequence
  Quasi-synthetic sequence derived from human genome
KCRLRLLL

SEQ ID NO: 890 - protein, 8 aa, Artificial Sequence
  Quasi-synthetic sequence derived from human genome
RCLLLKRL

SEQ ID NO: 891 - protein, 8 aa, Artificial Sequence
  Quasi-synthetic sequence derived from human genome
LRLCLKRF

SEQ ID NO: 892 - protein, 8 aa, Artificial Sequence
  Quasi-synthetic sequence derived from human genome
KRFFCFLR

SEQ ID NO: 893 - protein, 8 aa, Artificial Sequence
  Quasi-synthetic sequence derived from human genome
KRRFLLCL

SEQ ID NO: 894 - protein, 8 aa, Artificial Sequence
  Quasi-synthetic sequence derived from human genome
RLRKCLFL

SEQ ID NO: 895 - protein, 8 aa, Artificial Sequence
  Quasi-synthetic sequence derived from human genome
FLFRRCFK

SEQ ID NO: 896 - protein, 8 aa, Artificial Sequence
  Quasi-synthetic sequence derived from human genome
LKRLRCLL

SEQ ID NO: 897 - protein, 8 aa, Artificial Sequence
  Quasi-synthetic sequence derived from human genome
IIMLRIWR

SEQ ID NO: 898 - protein, 8 aa, Artificial Sequence
  Quasi-synthetic sequence derived from human genome
KIIRVLWW

SEQ ID NO: 899 - protein, 8 aa, Artificial Sequence
  Quasi-synthetic sequence derived from human genome
VIFRWWKI

SEQ ID NO: 900 - protein, 8 aa, Artificial Sequence
  Quasi-synthetic sequence derived from human genome
IRLVRVFR

SEQ ID NO: 901 - protein, 8 aa, Artificial Sequence
  Quasi-synthetic sequence derived from human genome
FRRIVRLV

SEQ ID NO: 902 - protein, 8 aa, Artificial Sequence
  Quasi-synthetic sequence derived from human genome
RRVIRLVL

SEQ ID NO: 903 - protein, 8 aa, Artificial Sequence
  Quasi-synthetic sequence derived from human genome
IRRVRLLV

SEQ ID NO: 904 - protein, 8 aa, Artificial Sequence
  Quasi-synthetic sequence derived from human genome
FIVLIRRL

SEQ ID NO: 905 - protein, 8 aa, Artificial Sequence
  Quasi-synthetic sequence derived from human genome
VILLIFRR

SEQ ID NO: 906 - protein, 8 aa, Artificial Sequence
  Quasi-synthetic sequence derived from human genome
FRIVFRIF

SEQ ID NO: 907 - protein, 8 aa, Artificial Sequence
  Quasi-synthetic sequence derived from human genome
LIIVRRLL

SEQ ID NO: 908 - protein, 8 aa, Artificial Sequence
  Quasi-synthetic sequence derived from human genome
LIKYRRLR

SEQ ID NO: 909 - protein, 8 aa, Artificial Sequence
  Quasi-synthetic sequence derived from human genome
KRIYFRLR

SEQ ID NO: 910 - protein, 8 aa, Artificial Sequence
  Quasi-synthetic sequence derived from human genome
RYRRLILK

SEQ ID NO: 911 - protein, 8 aa, Artificial Sequence
  Quasi-synthetic sequence derived from human genome
IKRLRRLY

SEQ ID NO: 912 - protein, 8 aa, Artificial Sequence
  Quasi-synthetic sequence derived from human genome
KVLRKLLK

SEQ ID NO: 913 - protein, 8 aa, Artificial Sequence
  Quasi-synthetic sequence derived from human genome
LRKKVLLK

SEQ ID NO: 914 - protein, 8 aa, Artificial Sequence
  Quasi-synthetic sequence derived from human genome
VRFLKLKK

SEQ ID NO: 915 - protein, 8 aa, Artificial Sequence
  Quasi-synthetic sequence derived from human genome
RLVKKLKL

SEQ ID NO: 916 - protein, 8 aa, Artificial Sequence
  Quasi-synthetic sequence derived from human genome
RFFKKVKF

SEQ ID NO: 917 - protein, 8 aa, Artificial Sequence
  Quasi-synthetic sequence derived from human genome
KKLRLVFK

SEQ ID NO: 918 - protein, 8 aa, Artificial Sequence
  Quasi-synthetic sequence derived from human genome
LKRVKKLL

SEQ ID NO: 919 - protein, 8 aa, Artificial Sequence
  Quasi-synthetic sequence derived from human genome
RKVKLLLK

SEQ ID NO: 920 - protein, 8 aa, Artificial Sequence
  Quasi-synthetic sequence derived from human genome
LVKKFLKR

SEQ ID NO: 921 - protein, 8 aa, Artificial Sequence
  Quasi-synthetic sequence derived from human genome
LMLYRRRL

SEQ ID NO: 922 - protein, 8 aa, Artificial Sequence
  Quasi-synthetic sequence derived from human genome
YLRKWLLL

SEQ ID NO: 923 - protein, 8 aa, Artificial Sequence
  Quasi-synthetic sequence derived from human genome
LKLLRYLW

SEQ ID NO: 924 - protein, 8 aa, Artificial Sequence
  Quasi-synthetic sequence derived from human genome
KFRYLWLF

SEQ ID NO: 925 - protein, 8 aa, Artificial Sequence
  Quasi-synthetic sequence derived from human genome
MRIKWIFL

SEQ ID NO: 926 - protein, 8 aa, Artificial Sequence
  Quasi-synthetic sequence derived from human genome
IRKFRYII

SEQ ID NO: 927 - protein, 8 aa, Artificial Sequence
  Quasi-synthetic sequence derived from human genome
ILKKKILV

SEQ ID NO: 928 - protein, 8 aa, Artificial Sequence
  Quasi-synthetic sequence derived from human genome
IWRFAWRK

SEQ ID NO: 929 - protein, 8 aa, Artificial Sequence
  Quasi-synthetic sequence derived from human genome
VRVKWWKL

SEQ ID NO: 930 - protein, 8 aa, Artificial Sequence
  Quasi-synthetic sequence derived from human genome
LIVLFLRK

SEQ ID NO: 931 - protein, 8 aa, Artificial Sequence
  Quasi-synthetic sequence derived from human genome
LIFLRVKF

SEQ ID NO: 932 - protein, 8 aa, Artificial Sequence
  Quasi-synthetic sequence derived from human genome
LIRKLLVL

SEQ ID NO: 933 - protein, 8 aa, Artificial Sequence
  Quasi-synthetic sequence derived from human genome
VLKRLILL

SEQ ID NO: 934 - protein, 8 aa, Artificial Sequence
  Quasi-synthetic sequence derived from human genome
LILVLKRF

SEQ ID NO: 935 - protein, 8 aa, Artificial Sequence
  Quasi-synthetic sequence derived from human genome
KRFFFIVF

SEQ ID NO: 936 - protein, 8 aa, Artificial Sequence
  Quasi-synthetic sequence derived from human genome
LRKLLIVF

SEQ ID NO: 937 - protein, 8 aa, Artificial Sequence
  Quasi-synthetic sequence derived from human genome
LLFIFVKR

SEQ ID NO: 938 - protein, 8 aa, Artificial Sequence
  Quasi-synthetic sequence derived from human genome
LKILRFLV

SEQ ID NO: 939 - protein, 8 aa, Artificial Sequence
  Quasi-synthetic sequence derived from human genome
LVRKLILL

SEQ ID NO: 940 - protein, 8 aa, Artificial Sequence
  Quasi-synthetic sequence derived from human genome
VIFLLKRL

SEQ ID NO: 941 - protein, 8 aa, Artificial Sequence
  Quasi-synthetic sequence derived from human genome
FVLLILKR

SEQ ID NO: 942 - protein, 8 aa, Artificial Sequence
  Quasi-synthetic sequence derived from human genome
VLFFLIRK

SEQ ID NO: 943 - protein, 8 aa, Artificial Sequence
  Quasi-synthetic sequence derived from human genome
FRFKVLIL

SEQ ID NO: 944 - protein, 8 aa, Artificial Sequence
  Quasi-synthetic sequence derived from human genome
RLVKILLL

SEQ ID NO: 945 - protein, 8 aa, Artificial Sequence
  Quasi-synthetic sequence derived from human genome
RKLFIVLL

SEQ ID NO: 946 - protein, 8 aa, Artificial Sequence
  Quasi-synthetic sequence derived from human genome
LLLVKRFI

SEQ ID NO: 947 - protein, 8 aa, Artificial Sequence
  Quasi-synthetic sequence derived from human genome
RKLILFLV

SEQ ID NO: 948 - protein, 8 aa, Artificial Sequence
  Quasi-synthetic sequence derived from human genome
WFLICKRR

SEQ ID NO: 949 - protein, 8 aa, Artificial Sequence
  Quasi-synthetic sequence derived from human genome
LLAILRRR

SEQ ID NO: 950 - protein, 8 aa, Artificial Sequence
  Quasi-synthetic sequence derived from human genome
LRFPRFIR

SEQ ID NO: 951 - protein, 8 aa, Artificial Sequence
  Quasi-synthetic sequence derived from human genome
FRPFIRRL

SEQ ID NO: 952 - protein, 8 aa, Artificial Sequence
  Quasi-synthetic sequence derived from human genome
LRLPRLIR

SEQ ID NO: 953 - protein, 8 aa, Artificial Sequence
  Quasi-synthetic sequence derived from human genome
FALRRILR

SEQ ID NO: 954 - protein, 8 aa, Artificial Sequence
  Quasi-synthetic sequence derived from human genome
RWRWWQRL

SEQ ID NO: 955 - protein, 8 aa, Artificial Sequence
  Quasi-synthetic sequence derived from human genome
LRRVKVLL

SEQ ID NO: 956 - protein, 8 aa, Artificial Sequence
  Quasi-synthetic sequence derived from human genome
PRRLRLIL

SEQ ID NO: 957 - protein, 8 aa, Artificial Sequence
  Quasi-synthetic sequence derived from human genome
VFKVLRRL

SEQ ID NO: 958 - protein, 8 aa, Artificial Sequence
  Quasi-synthetic sequence derived from human genome
RLALIRFR

SEQ ID NO: 959 - protein, 8 aa, Artificial Sequence
  Quasi-synthetic sequence derived from human genome
RVLKLVRF

SEQ ID NO: 960 - protein, 8 aa, Artificial Sequence
  Quasi-synthetic sequence derived from human genome
LRPLRRLI

SEQ ID NO: 961 - protein, 8 aa, Artificial Sequence
  Quasi-synthetic sequence derived from human genome
LVVRLKRF

SEQ ID NO: 962 - protein, 8 aa, Artificial Sequence
  Quasi-synthetic sequence derived from human genome
RLAIRLLR

SEQ ID NO: 963 - protein, 8 aa, Artificial Sequence
  Quasi-synthetic sequence derived from human genome
LRIARFRF

SEQ ID NO: 964 - protein, 8 aa, Artificial Sequence
  Quasi-synthetic sequence derived from human genome
FVFVLKRR

SEQ ID NO: 965 - protein, 8 aa, Artificial Sequence
  Quasi-synthetic sequence derived from human genome
LKVVRLLR

SEQ ID NO: 966 - protein, 8 aa, Artificial Sequence
  Quasi-synthetic sequence derived from human genome
VRRVLKLL

SEQ ID NO: 967 - protein, 8 aa, Artificial Sequence
  Quasi-synthetic sequence derived from human genome
WRFILCKR

SEQ ID NO: 968 - protein, 8 aa, Artificial Sequence
  Quasi-synthetic sequence derived from human genome
RRFLLRAI

SEQ ID NO: 969 - protein, 8 aa, Artificial Sequence
  Quasi-synthetic sequence derived from human genome
ILRFLRAR

SEQ ID NO: 970 - protein, 8 aa, Artificial Sequence
  Quasi-synthetic sequence derived from human genome
RVRKLLLV

SEQ ID NO: 971 - protein, 8 aa, Artificial Sequence
  Quasi-synthetic sequence derived from human genome
VRFLRKVL

SEQ ID NO: 972 - protein, 8 aa, Artificial Sequence
  Quasi-synthetic sequence derived from human genome
RHLRRFIL

SEQ ID NO: 973 - protein, 8 aa, Artificial Sequence
  Quasi-synthetic sequence derived from human genome
VLKRVLLR

SEQ ID NO: 974 - protein, 8 aa, Artificial Sequence
  Quasi-synthetic sequence derived from human genome
WWFSWRRR

SEQ ID NO: 975 - protein, 8 aa, Artificial Sequence
  Quasi-synthetic sequence derived from human genome
FRVLRVFK

SEQ ID NO: 976 - protein, 8 aa, Artificial Sequence
  Quasi-synthetic sequence derived from human genome
LRRLFRAI

SEQ ID NO: 977 - protein, 8 aa, Artificial Sequence
  Quasi-synthetic sequence derived from human genome
IARRLLLR

SEQ ID NO: 978 - protein, 8 aa, Artificial Sequence
  Quasi-synthetic sequence derived from human genome
RICRFKWL

SEQ ID NO: 979 - protein, 8 aa, Artificial Sequence
  Quasi-synthetic sequence derived from human genome
LRRRLILA

SEQ ID NO: 980 - protein, 8 aa, Artificial Sequence
  Quasi-synthetic sequence derived from human genome
FFPRILRR

SEQ ID NO: 981 - protein, 8 aa, Artificial Sequence
  Quasi-synthetic sequence derived from human genome
KLKRKYWW

SEQ ID NO: 982 - protein, 8 aa, Artificial Sequence
  Quasi-synthetic sequence derived from human genome
RRLIIIWV

SEQ ID NO: 983 - protein, 8 aa, Artificial Sequence
  Quasi-synthetic sequence derived from human genome
KLRLKLRK

SEQ ID NO: 984 - protein, 8 aa, Artificial Sequence
  Quasi-synthetic sequence derived from human genome
RKKKLRLL

SEQ ID NO: 985 - protein, 8 aa, Artificial Sequence
  Quasi-synthetic sequence derived from human genome
RLKLKFKR

SEQ ID NO: 986 - protein, 8 aa, Artificial Sequence
  Quasi-synthetic sequence derived from human genome
KKLRLKFR

SEQ ID NO: 987 - protein, 8 aa, Artificial Sequence
  Quasi-synthetic sequence derived from human genome
KKKLRRLL

SEQ ID NO: 988 - protein, 8 aa, Artificial Sequence
  Quasi-synthetic sequence derived from human genome
KLKKRFLR

SEQ ID NO: 989 - protein, 8 aa, Artificial Sequence
  Quasi-synthetic sequence derived from human genome
FKRFLRKK

SEQ ID NO: 990 - protein, 8 aa, Artificial Sequence
  Quasi-synthetic sequence derived from human genome
KKLRRLYL

SEQ ID NO: 991 - protein, 8 aa, Artificial Sequence
  Quasi-synthetic sequence derived from human genome
KRYLLKRL

SEQ ID NO: 992 - protein, 8 aa, Artificial Sequence
  Quasi-synthetic sequence derived from human genome
KKRYFRLL

SEQ ID NO: 993 - protein, 8 aa, Artificial Sequence
  Quasi-synthetic sequence derived from human genome
KYRLKFRF

SEQ ID NO: 994 - protein, 8 aa, Artificial Sequence
  Quasi-synthetic sequence derived from human genome
RLKRLIMM

SEQ ID NO: 995 - protein, 8 aa, Artificial Sequence
  Quasi-synthetic sequence derived from human genome
LLRYLIRF

SEQ ID NO: 996 - protein, 8 aa, Artificial Sequence
  Quasi-synthetic sequence derived from human genome
IRLLLYLR

SEQ ID NO: 997 - protein, 8 aa, Artificial Sequence
  Quasi-synthetic sequence derived from human genome
LFLRFRYI

SEQ ID NO: 998 - protein, 8 aa, Artificial Sequence
  Quasi-synthetic sequence derived from human genome
LLLYRRIL

SEQ ID NO: 999 - protein, 8 aa, Artificial Sequence
  Quasi-synthetic sequence derived from human genome
YFRRLIFL

SEQ ID NO: 1000 - protein, 8 aa, Artificial Sequence
  Quasi-synthetic sequence derived from human genome
FKIYIRLK

SEQ ID NO: 1001 - protein, 9 aa, Artificial Sequence
  Quasi-synthetic sequence derived from human genome
LRWFLKRWR

SEQ ID NO: 1002 - protein, 9 aa, Artificial Sequence
  Quasi-synthetic sequence derived from human genome
LRLWKRRWF

SEQ ID NO: 1003 - protein, 9 aa, Artificial Sequence
  Quasi-synthetic sequence derived from human genome
LLRRRFRLL

SEQ ID NO: 1004 - protein, 9 aa, Artificial Sequence
  Quasi-synthetic sequence derived from human genome
RWKRLRLLL

SEQ ID NO: 1005 - protein, 9 aa, Artificial Sequence
  Quasi-synthetic sequence derived from human genome
WRKRWFILR

SEQ ID NO: 1006 - protein, 9 aa, Artificial Sequence
  Quasi-synthetic sequence derived from human genome
LIFLRRRLR

SEQ ID NO: 1007 - protein, 9 aa, Artificial Sequence
  Quasi-synthetic sequence derived from human genome
IRRLLRLLR

SEQ ID NO: 1008 - protein, 9 aa, Artificial Sequence
  Quasi-synthetic sequence derived from human genome
FLKRFLRLR

SEQ ID NO: 1009 - protein, 9 aa, Artificial Sequence
  Quasi-synthetic sequence derived from human genome
RFFRFLLRK

SEQ ID NO: 1010 - protein, 9 aa, Artificial Sequence
  Quasi-synthetic sequence derived from human genome
LFLRRLRLW

SEQ ID NO: 1011 - protein, 9 aa, Artificial Sequence
  Quasi-synthetic sequence derived from human genome
RRRRRLLFW

SEQ ID NO: 1012 - protein, 9 aa, Artificial Sequence
  Quasi-synthetic sequence derived from human genome
RWLLIRFKR

SEQ ID NO: 1013 - protein, 9 aa, Artificial Sequence
  Quasi-synthetic sequence derived from human genome
LWLRWRILR

SEQ ID NO: 1014 - protein, 9 aa, Artificial Sequence
  Quasi-synthetic sequence derived from human genome
ILRLRWRWF

SEQ ID NO: 1015 - protein, 9 aa, Artificial Sequence
  Quasi-synthetic sequence derived from human genome
RLLWRKLLW

SEQ ID NO: 1016 - protein, 9 aa, Artificial Sequence
  Quasi-synthetic sequence derived from human genome
LLLLFLRRR

SEQ ID NO: 1017 - protein, 9 aa, Artificial Sequence
  Quasi-synthetic sequence derived from human genome
LRLFRRLLL

SEQ ID NO: 1018 - protein, 9 aa, Artificial Sequence
  Quasi-synthetic sequence derived from human genome
RLLRLLRLL

SEQ ID NO: 1019 - protein, 9 aa, Artificial Sequence
  Quasi-synthetic sequence derived from human genome
RWLKIIWRR

SEQ ID NO: 1020 - protein, 9 aa, Artificial Sequence
  Quasi-synthetic sequence derived from human genome
WRRLLRKRW

SEQ ID NO: 1021 - protein, 9 aa, Artificial Sequence
  Quasi-synthetic sequence derived from human genome
LLLRRLRRR

SEQ ID NO: 1022 - protein, 9 aa, Artificial Sequence
  Quasi-synthetic sequence derived from human genome
FRRRLRLLR

SEQ ID NO: 1023 - protein, 9 aa, Artificial Sequence
  Quasi-synthetic sequence derived from human genome
WKKRWFILR

SEQ ID NO: 1024 - protein, 9 aa, Artificial Sequence
  Quasi-synthetic sequence derived from human genome
KRFLLRRIL

SEQ ID NO: 1025 - protein, 9 aa, Artificial Sequence
  Quasi-synthetic sequence derived from human genome
KLLLRILRR

SEQ ID NO: 1026 - protein, 9 aa, Artificial Sequence
  Quasi-synthetic sequence derived from human genome
FFRKLRLIR

SEQ ID NO: 1027 - protein, 9 aa, Artificial Sequence
  Quasi-synthetic sequence derived from human genome
LLLWRLKRL

SEQ ID NO: 1028 - protein, 9 aa, Artificial Sequence
  Quasi-synthetic sequence derived from human genome
KLLKRLRLL

SEQ ID NO: 1029 - protein, 9 aa, Artificial Sequence
  Quasi-synthetic sequence derived from human genome
KLRLFFRKF

SEQ ID NO: 1030 - protein, 9 aa, Artificial Sequence
  Quasi-synthetic sequence derived from human genome
RLRKWIIFR

SEQ ID NO: 1031 - protein, 9 aa, Artificial Sequence
  Quasi-synthetic sequence derived from human genome
RWLLIWFKR

SEQ ID NO: 1032 - protein, 9 aa, Artificial Sequence
  Quasi-synthetic sequence derived from human genome
WILWRLLRK

SEQ ID NO: 1033 - protein, 9 aa, Artificial Sequence
  Quasi-synthetic sequence derived from human genome
FLRLLRLIR

SEQ ID NO: 1034 - protein, 9 aa, Artificial Sequence
  Quasi-synthetic sequence derived from human genome
LLLFFRFKR

SEQ ID NO: 1035 - protein, 9 aa, Artificial Sequence
  Quasi-synthetic sequence derived from human genome
FFLWLKKRK

SEQ ID NO: 1036 - protein, 9 aa, Artificial Sequence
  Quasi-synthetic sequence derived from human genome
LWRLWKKIW

SEQ ID NO: 1037 - protein, 9 aa, Artificial Sequence
  Quasi-synthetic sequence derived from human genome
WLRLRKILF

SEQ ID NO: 1038 - protein, 9 aa, Artificial Sequence
  Quasi-synthetic sequence derived from human genome
RWRRRWFVL

SEQ ID NO: 1039 - protein, 9 aa, Artificial Sequence
  Quasi-synthetic sequence derived from human genome
LWVFRRRWR

SEQ ID NO: 1040 - protein, 9 aa, Artificial Sequence
  Quasi-synthetic sequence derived from human genome
RRILFIKRF

SEQ ID NO: 1041 - protein, 9 aa, Artificial Sequence
  Quasi-synthetic sequence derived from human genome
RILRRLLRR

SEQ ID NO: 1042 - protein, 9 aa, Artificial Sequence
  Quasi-synthetic sequence derived from human genome
RWLRIKLWI

SEQ ID NO: 1043 - protein, 9 aa, Artificial Sequence
  Quasi-synthetic sequence derived from human genome
ILKIRWRWF

SEQ ID NO: 1044 - protein, 9 aa, Artificial Sequence
  Quasi-synthetic sequence derived from human genome
FLRLKRKFI

SEQ ID NO: 1045 - protein, 9 aa, Artificial Sequence
  Quasi-synthetic sequence derived from human genome
LLKKRIRFL

SEQ ID NO: 1046 - protein, 9 aa, Artificial Sequence
  Quasi-synthetic sequence derived from human genome
LLLIRRFKK

SEQ ID NO: 1047 - protein, 9 aa, Artificial Sequence
  Quasi-synthetic sequence derived from human genome
LKRKLIRLF

SEQ ID NO: 1048 - protein, 9 aa, Artificial Sequence
  Quasi-synthetic sequence derived from human genome
RRWKRWFKF

SEQ ID NO: 1049 - protein, 9 aa, Artificial Sequence
  Quasi-synthetic sequence derived from human genome
RILRLLRIL

SEQ ID NO: 1050 - protein, 9 aa, Artificial Sequence
  Quasi-synthetic sequence derived from human genome
KRRLLRRLL

SEQ ID NO: 1051 - protein, 9 aa, Artificial Sequence
  Quasi-synthetic sequence derived from human genome
KRFRLRRLL

SEQ ID NO: 1052 - protein, 9 aa, Artificial Sequence
  Quasi-synthetic sequence derived from human genome
FLRKKLFFK

SEQ ID NO: 1053 - protein, 9 aa, Artificial Sequence
  Quasi-synthetic sequence derived from human genome
LLIFFLKRR

SEQ ID NO: 1054 - protein, 9 aa, Artificial Sequence
  Quasi-synthetic sequence derived from human genome
FFKFFLRRI

SEQ ID NO: 1055 - protein, 9 aa, Artificial Sequence
  Quasi-synthetic sequence derived from human genome
RLLLRFKIL

SEQ ID NO: 1056 - protein, 9 aa, Artificial Sequence
  Quasi-synthetic sequence derived from human genome
FLFKRFLRI

SEQ ID NO: 1057 - protein, 9 aa, Artificial Sequence
  Quasi-synthetic sequence derived from human genome
RKLLFLFRI

SEQ ID NO: 1058 - protein, 9 aa, Artificial Sequence
  Quasi-synthetic sequence derived from human genome
KLLKRLFLF

SEQ ID NO: 1059 - protein, 9 aa, Artificial Sequence
  Quasi-synthetic sequence derived from human genome
WIKRRILLL

SEQ ID NO: 1060 - protein, 9 aa, Artificial Sequence
  Quasi-synthetic sequence derived from human genome
MRLWKRRWF

SEQ ID NO: 1061 - protein, 9 aa, Artificial Sequence
  Quasi-synthetic sequence derived from human genome
LWKRLIKLK

SEQ ID NO: 1062 - protein, 9 aa, Artificial Sequence
  Quasi-synthetic sequence derived from human genome
LLRLRRRFM

SEQ ID NO: 1063 - protein, 9 aa, Artificial Sequence
  Quasi-synthetic sequence derived from human genome
MLLRRLRRL

SEQ ID NO: 1064 - protein, 9 aa, Artificial Sequence
  Quasi-synthetic sequence derived from human genome
LKLRFKRRW

SEQ ID NO: 1065 - protein, 9 aa, Artificial Sequence
  Quasi-synthetic sequence derived from human genome
LLKLWKFLK

SEQ ID NO: 1066 - protein, 9 aa, Artificial Sequence
  Quasi-synthetic sequence derived from human genome
WKRRWFVLR

SEQ ID NO: 1067 - protein, 9 aa, Artificial Sequence
  Quasi-synthetic sequence derived from human genome
WRKRWFVLR

SEQ ID NO: 1068 - protein, 9 aa, Artificial Sequence
  Quasi-synthetic sequence derived from human genome
RRVRRLLLL

SEQ ID NO: 1069 - protein, 9 aa, Artificial Sequence
  Quasi-synthetic sequence derived from human genome
FFRILRIFK

SEQ ID NO: 1070 - protein, 9 aa, Artificial Sequence
  Quasi-synthetic sequence derived from human genome
LRLLRIFKI

SEQ ID NO: 1071 - protein, 9 aa, Artificial Sequence
  Quasi-synthetic sequence derived from human genome
LLRKRILIF

SEQ ID NO: 1072 - protein, 9 aa, Artificial Sequence
  Quasi-synthetic sequence derived from human genome
RRLLILILK

SEQ ID NO: 1073 - protein, 9 aa, Artificial Sequence
  Quasi-synthetic sequence derived from human genome
ILWKKLKKW

SEQ ID NO: 1074 - protein, 9 aa, Artificial Sequence
  Quasi-synthetic sequence derived from human genome
KKLILFFKR

SEQ ID NO: 1075 - protein, 9 aa, Artificial Sequence
  Quasi-synthetic sequence derived from human genome
KRILKFLKL

SEQ ID NO: 1076 - protein, 9 aa, Artificial Sequence
  Quasi-synthetic sequence derived from human genome
RWRRRLLVI

SEQ ID NO: 1077 - protein, 9 aa, Artificial Sequence
  Quasi-synthetic sequence derived from human genome
WKRWKKRFF

SEQ ID NO: 1078 - protein, 9 aa, Artificial Sequence
  Quasi-synthetic sequence derived from human genome
LKKFKLKLL

SEQ ID NO: 1079 - protein, 9 aa, Artificial Sequence
  Quasi-synthetic sequence derived from human genome
KKKKFLLFL

SEQ ID NO: 1080 - protein, 9 aa, Artificial Sequence
  Quasi-synthetic sequence derived from human genome
LRKLRKRLL

SEQ ID NO: 1081 - protein, 9 aa, Artificial Sequence
  Quasi-synthetic sequence derived from human genome
LRKLKRRFL

SEQ ID NO: 1082 - protein, 9 aa, Artificial Sequence
  Quasi-synthetic sequence derived from human genome
RIRRRIKWL

SEQ ID NO: 1083 - protein, 9 aa, Artificial Sequence
  Quasi-synthetic sequence derived from human genome
RLWLRVLLR

SEQ ID NO: 1084 - protein, 9 aa, Artificial Sequence
  Quasi-synthetic sequence derived from human genome
RLFRWLVLR

SEQ ID NO: 1085 - protein, 9 aa, Artificial Sequence
  Quasi-synthetic sequence derived from human genome
LLVLRLRRW

SEQ ID NO: 1086 - protein, 9 aa, Artificial Sequence
  Quasi-synthetic sequence derived from human genome
RRLKLLWRV

SEQ ID NO: 1087 - protein, 9 aa, Artificial Sequence
  Quasi-synthetic sequence derived from human genome
LVLWLKRRR

SEQ ID NO: 1088 - protein, 9 aa, Artificial Sequence
  Quasi-synthetic sequence derived from human genome
RFWMKWLLR

SEQ ID NO: 1089 - protein, 9 aa, Artificial Sequence
  Quasi-synthetic sequence derived from human genome
LFLRRRLMF

SEQ ID NO: 1090 - protein, 9 aa, Artificial Sequence
  Quasi-synthetic sequence derived from human genome
RFRLLLRML

SEQ ID NO: 1091 - protein, 9 aa, Artificial Sequence
  Quasi-synthetic sequence derived from human genome
RFLMRKRLL

SEQ ID NO: 1092 - protein, 9 aa, Artificial Sequence
  Quasi-synthetic sequence derived from human genome
LLFYRWRRR

SEQ ID NO: 1093 - protein, 9 aa, Artificial Sequence
  Quasi-synthetic sequence derived from human genome
WLRRRYLRL

SEQ ID NO: 1094 - protein, 9 aa, Artificial Sequence
  Quasi-synthetic sequence derived from human genome
ILFIILRKR

SEQ ID NO: 1095 - protein, 9 aa, Artificial Sequence
  Quasi-synthetic sequence derived from human genome
IKRRILLLI

SEQ ID NO: 1096 - protein, 9 aa, Artificial Sequence
  Quasi-synthetic sequence derived from human genome
LVLRRILRR

SEQ ID NO: 1097 - protein, 9 aa, Artificial Sequence
  Quasi-synthetic sequence derived from human genome
LRKILLKIK

SEQ ID NO: 1098 - protein, 9 aa, Artificial Sequence
  Quasi-synthetic sequence derived from human genome
WKKRWFVLR

SEQ ID NO: 1099 - protein, 9 aa, Artificial Sequence
  Quasi-synthetic sequence derived from human genome
WKRRWFVLK

SEQ ID NO: 1100 - protein, 9 aa, Artificial Sequence
  Quasi-synthetic sequence derived from human genome
LLLVLRKRR

SEQ ID NO: 1101 - protein, 9 aa, Artificial Sequence
  Quasi-synthetic sequence derived from human genome
MRLFRWLLK

SEQ ID NO: 1102 - protein, 9 aa, Artificial Sequence
  Quasi-synthetic sequence derived from human genome
FLFLLKKKI

SEQ ID NO: 1103 - protein, 9 aa, Artificial Sequence
  Quasi-synthetic sequence derived from human genome
WVRLLRRLI

SEQ ID NO: 1104 - protein, 9 aa, Artificial Sequence
  Quasi-synthetic sequence derived from human genome
LRLLRRYRL

SEQ ID NO: 1105 - protein, 9 aa, Artificial Sequence
  Quasi-synthetic sequence derived from human genome
LLRFRYRLR

SEQ ID NO: 1106 - protein, 9 aa, Artificial Sequence
  Quasi-synthetic sequence derived from human genome
WRKMLWRFI

SEQ ID NO: 1107 - protein, 9 aa, Artificial Sequence
  Quasi-synthetic sequence derived from human genome
RWKFIKRWK

SEQ ID NO: 1108 - protein, 9 aa, Artificial Sequence
  Quasi-synthetic sequence derived from human genome
IRWVFKRRL

SEQ ID NO: 1109 - protein, 9 aa, Artificial Sequence
  Quasi-synthetic sequence derived from human genome
IWVFRLKRR

SEQ ID NO: 1110 - protein, 9 aa, Artificial Sequence
  Quasi-synthetic sequence derived from human genome
ILFMFRRLR

SEQ ID NO: 1111 - protein, 9 aa, Artificial Sequence
  Quasi-synthetic sequence derived from human genome
KLRLVRWLL

SEQ ID NO: 1112 - protein, 9 aa, Artificial Sequence
  Quasi-synthetic sequence derived from human genome
LILLRKRRK

SEQ ID NO: 1113 - protein, 9 aa, Artificial Sequence
  Quasi-synthetic sequence derived from human genome
RRKLLIKRL

SEQ ID NO: 1114 - protein, 9 aa, Artificial Sequence
  Quasi-synthetic sequence derived from human genome
LLRKKRRIF

SEQ ID NO: 1115 - protein, 9 aa, Artificial Sequence
  Quasi-synthetic sequence derived from human genome
KILRRKRLL

SEQ ID NO: 1116 - protein, 9 aa, Artificial Sequence
  Quasi-synthetic sequence derived from human genome
KLKKWIKIL

SEQ ID NO: 1117 - protein, 9 aa, Artificial Sequence
  Quasi-synthetic sequence derived from human genome
LRILRMKLR

SEQ ID NO: 1118 - protein, 9 aa, Artificial Sequence
  Quasi-synthetic sequence derived from human genome
LRILMRKLR

SEQ ID NO: 1119 - protein, 9 aa, Artificial Sequence
  Quasi-synthetic sequence derived from human genome
RLRILMLRK

SEQ ID NO: 1120 - protein, 9 aa, Artificial Sequence
  Quasi-synthetic sequence derived from human genome
FFYWRLRRL

SEQ ID NO: 1121 - protein, 9 aa, Artificial Sequence
  Quasi-synthetic sequence derived from human genome
WKRLFRKVL

SEQ ID NO: 1122 - protein, 9 aa, Artificial Sequence
  Quasi-synthetic sequence derived from human genome
RLRFLVKKW

SEQ ID NO: 1123 - protein, 9 aa, Artificial Sequence
  Quasi-synthetic sequence derived from human genome
LRLKLRKKL

SEQ ID NO: 1124 - protein, 9 aa, Artificial Sequence
  Quasi-synthetic sequence derived from human genome
LKLRLKKLR

SEQ ID NO: 1125 - protein, 9 aa, Artificial Sequence
  Quasi-synthetic sequence derived from human genome
MKLWKKRWF

SEQ ID NO: 1126 - protein, 9 aa, Artificial Sequence
  Quasi-synthetic sequence derived from human genome
KKRLFMFRF

SEQ ID NO: 1127 - protein, 9 aa, Artificial Sequence
  Quasi-synthetic sequence derived from human genome
FIRRKMLLW

SEQ ID NO: 1128 - protein, 9 aa, Artificial Sequence
  Quasi-synthetic sequence derived from human genome
FRKLMRWIL

SEQ ID NO: 1129 - protein, 9 aa, Artificial Sequence
  Quasi-synthetic sequence derived from human genome
WWRWRRARW

SEQ ID NO: 1130 - protein, 9 aa, Artificial Sequence
  Quasi-synthetic sequence derived from human genome
FRVKFLLRL

SEQ ID NO: 1131 - protein, 9 aa, Artificial Sequence
  Quasi-synthetic sequence derived from human genome
KVLRFLRLF

SEQ ID NO: 1132 - protein, 9 aa, Artificial Sequence
  Quasi-synthetic sequence derived from human genome
RRKLLVFLL

SEQ ID NO: 1133 - protein, 9 aa, Artificial Sequence
  Quasi-synthetic sequence derived from human genome
LRVRKLLLL

SEQ ID NO: 1134 - protein, 9 aa, Artificial Sequence
  Quasi-synthetic sequence derived from human genome
FRLLRVLKL

SEQ ID NO: 1135 - protein, 9 aa, Artificial Sequence
  Quasi-synthetic sequence derived from human genome
FRLLRVFKL

SEQ ID NO: 1136 - protein, 9 aa, Artificial Sequence
  Quasi-synthetic sequence derived from human genome
FLRRKFVLL

SEQ ID NO: 1137 - protein, 9 aa, Artificial Sequence
  Quasi-synthetic sequence derived from human genome
LLLVRKRLL

SEQ ID NO: 1138 - protein, 9 aa, Artificial Sequence
  Quasi-synthetic sequence derived from human genome
LFRIVLKRR

SEQ ID NO: 1139 - protein, 9 aa, Artificial Sequence
  Quasi-synthetic sequence derived from human genome
FIFWRKKRK

SEQ ID NO: 1140 - protein, 9 aa, Artificial Sequence
  Quasi-synthetic sequence derived from human genome
RRLLLRYLF

SEQ ID NO: 1141 - protein, 9 aa, Artificial Sequence
  Quasi-synthetic sequence derived from human genome
FLYLLRLRR

SEQ ID NO: 1142 - protein, 9 aa, Artificial Sequence
  Quasi-synthetic sequence derived from human genome
LLYLLRLRR

SEQ ID NO: 1143 - protein, 9 aa, Artificial Sequence
  Quasi-synthetic sequence derived from human genome
WKRLMIKFR

SEQ ID NO: 1144 - protein, 9 aa, Artificial Sequence
  Quasi-synthetic sequence derived from human genome
LWKLWRVKK

SEQ ID NO: 1145 - protein, 9 aa, Artificial Sequence
  Quasi-synthetic sequence derived from human genome
ILRLMRIFR

SEQ ID NO: 1146 - protein, 9 aa, Artificial Sequence
  Quasi-synthetic sequence derived from human genome
RILFRMLIR

SEQ ID NO: 1147 - protein, 9 aa, Artificial Sequence
  Quasi-synthetic sequence derived from human genome
LRLMRIFRI

SEQ ID NO: 1148 - protein, 9 aa, Artificial Sequence
  Quasi-synthetic sequence derived from human genome
KLILWRVLR

SEQ ID NO: 1149 - protein, 9 aa, Artificial Sequence
  Quasi-synthetic sequence derived from human genome
LVWKRRILF

SEQ ID NO: 1150 - protein, 9 aa, Artificial Sequence
  Quasi-synthetic sequence derived from human genome
FLRRLIYRR

SEQ ID NO: 1151 - protein, 9 aa, Artificial Sequence
  Quasi-synthetic sequence derived from human genome
LYRRILRRL

SEQ ID NO: 1152 - protein, 9 aa, Artificial Sequence
  Quasi-synthetic sequence derived from human genome
RRLLRYLIR

SEQ ID NO: 1153 - protein, 9 aa, Artificial Sequence
  Quasi-synthetic sequence derived from human genome
KIRRRIRIL

SEQ ID NO: 1154 - protein, 9 aa, Artificial Sequence
  Quasi-synthetic sequence derived from human genome
LLRRLKLVK

SEQ ID NO: 1155 - protein, 9 aa, Artificial Sequence
  Quasi-synthetic sequence derived from human genome
LLLLVRKKR

SEQ ID NO: 1156 - protein, 9 aa, Artificial Sequence
  Quasi-synthetic sequence derived from human genome
LKRLKVLRL

SEQ ID NO: 1157 - protein, 9 aa, Artificial Sequence
  Quasi-synthetic sequence derived from human genome
RLVLLKKLR

SEQ ID NO: 1158 - protein, 9 aa, Artificial Sequence
  Quasi-synthetic sequence derived from human genome
FLRKKVLLR

SEQ ID NO: 1159 - protein, 9 aa, Artificial Sequence
  Quasi-synthetic sequence derived from human genome
RWIFWLWWR

SEQ ID NO: 1160 - protein, 9 aa, Artificial Sequence
  Quasi-synthetic sequence derived from human genome
IRMRFIRRI

SEQ ID NO: 1161 - protein, 9 aa, Artificial Sequence
  Quasi-synthetic sequence derived from human genome
RLKMILRLL

SEQ ID NO: 1162 - protein, 9 aa, Artificial Sequence
  Quasi-synthetic sequence derived from human genome
LFRMLRIFK

SEQ ID NO: 1163 - protein, 9 aa, Artificial Sequence
  Quasi-synthetic sequence derived from human genome
LKLVRLKLW

SEQ ID NO: 1164 - protein, 9 aa, Artificial Sequence
  Quasi-synthetic sequence derived from human genome
LRKWLKMFK

SEQ ID NO: 1165 - protein, 9 aa, Artificial Sequence
  Quasi-synthetic sequence derived from human genome
FKRKLKMWL

SEQ ID NO: 1166 - protein, 9 aa, Artificial Sequence
  Quasi-synthetic sequence derived from human genome
WRRFKWVII

SEQ ID NO: 1167 - protein, 9 aa, Artificial Sequence
  Quasi-synthetic sequence derived from human genome
IWKIKKLIK

SEQ ID NO: 1168 - protein, 9 aa, Artificial Sequence
  Quasi-synthetic sequence derived from human genome
LRRRLKYFF

SEQ ID NO: 1169 - protein, 9 aa, Artificial Sequence
  Quasi-synthetic sequence derived from human genome
RWMRLRIRR

SEQ ID NO: 1170 - protein, 9 aa, Artificial Sequence
  Quasi-synthetic sequence derived from human genome
RFVRILRIF

SEQ ID NO: 1171 - protein, 9 aa, Artificial Sequence
  Quasi-synthetic sequence derived from human genome
LVILKRKWW

SEQ ID NO: 1172 - protein, 9 aa, Artificial Sequence
  Quasi-synthetic sequence derived from human genome
KKLIIFILK

SEQ ID NO: 1173 - protein, 9 aa, Artificial Sequence
  Quasi-synthetic sequence derived from human genome
RRLFVFKLI

SEQ ID NO: 1174 - protein, 9 aa, Artificial Sequence
  Quasi-synthetic sequence derived from human genome
LRLLRIFKV

SEQ ID NO: 1175 - protein, 9 aa, Artificial Sequence
  Quasi-synthetic sequence derived from human genome
KLMFRRLKI

SEQ ID NO: 1176 - protein, 9 aa, Artificial Sequence
  Quasi-synthetic sequence derived from human genome
MFRKFKILR

SEQ ID NO: 1177 - protein, 9 aa, Artificial Sequence
  Quasi-synthetic sequence derived from human genome
LKLKKRWFV

SEQ ID NO: 1178 - protein, 9 aa, Artificial Sequence
  Quasi-synthetic sequence derived from human genome
RLLWFKVKK

SEQ ID NO: 1179 - protein, 9 aa, Artificial Sequence
  Quasi-synthetic sequence derived from human genome
FKRKRFLIK

SEQ ID NO: 1180 - protein, 9 aa, Artificial Sequence
  Quasi-synthetic sequence derived from human genome
LKKKILRFR

SEQ ID NO: 1181 - protein, 9 aa, Artificial Sequence
  Quasi-synthetic sequence derived from human genome
KFIKKRIII

SEQ ID NO: 1182 - protein, 9 aa, Artificial Sequence
  Quasi-synthetic sequence derived from human genome
RLRLLLLLW

SEQ ID NO: 1183 - protein, 9 aa, Artificial Sequence
  Quasi-synthetic sequence derived from human genome
IRYRLFRLL

SEQ ID NO: 1184 - protein, 9 aa, Artificial Sequence
  Quasi-synthetic sequence derived from human genome
VFKKLLRLF

SEQ ID NO: 1185 - protein, 9 aa, Artificial Sequence
  Quasi-synthetic sequence derived from human genome
LRKFKLVFL

SEQ ID NO: 1186 - protein, 9 aa, Artificial Sequence
  Quasi-synthetic sequence derived from human genome
LVKIIRRRL

SEQ ID NO: 1187 - protein, 9 aa, Artificial Sequence
  Quasi-synthetic sequence derived from human genome
ILKLIVRRR

SEQ ID NO: 1188 - protein, 9 aa, Artificial Sequence
  Quasi-synthetic sequence derived from human genome
IFRIMRILR

SEQ ID NO: 1189 - protein, 9 aa, Artificial Sequence
  Quasi-synthetic sequence derived from human genome
WRFIRVFIK

SEQ ID NO: 1190 - protein, 9 aa, Artificial Sequence
  Quasi-synthetic sequence derived from human genome
WKKLRYFRL

SEQ ID NO: 1191 - protein, 9 aa, Artificial Sequence
  Quasi-synthetic sequence derived from human genome
LLMKLKRLK

SEQ ID NO: 1192 - protein, 9 aa, Artificial Sequence
  Quasi-synthetic sequence derived from human genome
LLKYRWRKL

SEQ ID NO: 1193 - protein, 9 aa, Artificial Sequence
  Quasi-synthetic sequence derived from human genome
FWKRYRFKL

SEQ ID NO: 1194 - protein, 9 aa, Artificial Sequence
  Quasi-synthetic sequence derived from human genome
FKRWKLRYF

SEQ ID NO: 1195 - protein, 9 aa, Artificial Sequence
  Quasi-synthetic sequence derived from human genome
KLKKLFRKL

SEQ ID NO: 1196 - protein, 9 aa, Artificial Sequence
  Quasi-synthetic sequence derived from human genome
LRKKIWIRM

SEQ ID NO: 1197 - protein, 9 aa, Artificial Sequence
  Quasi-synthetic sequence derived from human genome
RLRFWLLIW

SEQ ID NO: 1198 - protein, 9 aa, Artificial Sequence
  Quasi-synthetic sequence derived from human genome
LLLRRKFFY

SEQ ID NO: 1199 - protein, 9 aa, Artificial Sequence
  Quasi-synthetic sequence derived from human genome
RFLKLLRFY

SEQ ID NO: 1200 - protein, 9 aa, Artificial Sequence
  Quasi-synthetic sequence derived from human genome
LMRIFRILK

SEQ ID NO: 1201 - protein, 9 aa, Artificial Sequence
  Quasi-synthetic sequence derived from human genome
IRFRYRILR

SEQ ID NO: 1202 - protein, 9 aa, Artificial Sequence
  Quasi-synthetic sequence derived from human genome
VMWRLFRRR

SEQ ID NO: 1203 - protein, 9 aa, Artificial Sequence
  Quasi-synthetic sequence derived from human genome
IWKFRKVLF

SEQ ID NO: 1204 - protein, 9 aa, Artificial Sequence
  Quasi-synthetic sequence derived from human genome
LRKIWVFLK

SEQ ID NO: 1205 - protein, 9 aa, Artificial Sequence
  Quasi-synthetic sequence derived from human genome
LKKLVRLIR

SEQ ID NO: 1206 - protein, 9 aa, Artificial Sequence
  Quasi-synthetic sequence derived from human genome
LLFIVRKKR

SEQ ID NO: 1207 - protein, 9 aa, Artificial Sequence
  Quasi-synthetic sequence derived from human genome
FVLRKRIKL

SEQ ID NO: 1208 - protein, 9 aa, Artificial Sequence
  Quasi-synthetic sequence derived from human genome
VFRKRLFKI

SEQ ID NO: 1209 - protein, 9 aa, Artificial Sequence
  Quasi-synthetic sequence derived from human genome
LLVRKKRLI

SEQ ID NO: 1210 - protein, 9 aa, Artificial Sequence
  Quasi-synthetic sequence derived from human genome
FLKKVRRLI

SEQ ID NO: 1211 - protein, 9 aa, Artificial Sequence
  Quasi-synthetic sequence derived from human genome
RKLLRWVRR

SEQ ID NO: 1212 - protein, 9 aa, Artificial Sequence
  Quasi-synthetic sequence derived from human genome
RVRLRRWKL

SEQ ID NO: 1213 - protein, 9 aa, Artificial Sequence
  Quasi-synthetic sequence derived from human genome
ILRIIRLVR

SEQ ID NO: 1214 - protein, 9 aa, Artificial Sequence
  Quasi-synthetic sequence derived from human genome
RRLIIILVR

SEQ ID NO: 1215 - protein, 9 aa, Artificial Sequence
  Quasi-synthetic sequence derived from human genome
LLLFLLLRR

SEQ ID NO: 1216 - protein, 9 aa, Artificial Sequence
  Quasi-synthetic sequence derived from human genome
FFLFRLLLR

SEQ ID NO: 1217 - protein, 9 aa, Artificial Sequence
  Quasi-synthetic sequence derived from human genome
RLRLLLLLL

SEQ ID NO: 1218 - protein, 9 aa, Artificial Sequence
  Quasi-synthetic sequence derived from human genome
LLLLLLLRR

SEQ ID NO: 1219 - protein, 9 aa, Artificial Sequence
  Quasi-synthetic sequence derived from human genome
LRRLLLLLL

SEQ ID NO: 1220 - protein, 9 aa, Artificial Sequence
  Quasi-synthetic sequence derived from human genome
RLRLLLLLF

SEQ ID NO: 1221 - protein, 9 aa, Artificial Sequence
  Quasi-synthetic sequence derived from human genome
RRLLLLLLL

SEQ ID NO: 1222 - protein, 9 aa, Artificial Sequence
  Quasi-synthetic sequence derived from human genome
IWLYWRRKK

SEQ ID NO: 1223 - protein, 9 aa, Artificial Sequence
  Quasi-synthetic sequence derived from human genome
RKFLYLWIR

SEQ ID NO: 1224 - protein, 9 aa, Artificial Sequence
  Quasi-synthetic sequence derived from human genome
KLKMILLRL

SEQ ID NO: 1225 - protein, 9 aa, Artificial Sequence
  Quasi-synthetic sequence derived from human genome
KLRRLYFIW

SEQ ID NO: 1226 - protein, 9 aa, Artificial Sequence
  Quasi-synthetic sequence derived from human genome
KKVLLLLWK

SEQ ID NO: 1227 - protein, 9 aa, Artificial Sequence
  Quasi-synthetic sequence derived from human genome
KLVLLKKLR

SEQ ID NO: 1228 - protein, 9 aa, Artificial Sequence
  Quasi-synthetic sequence derived from human genome
KLKLVKRLL

SEQ ID NO: 1229 - protein, 9 aa, Artificial Sequence
  Quasi-synthetic sequence derived from human genome
VRLLRIFKI

SEQ ID NO: 1230 - protein, 9 aa, Artificial Sequence
  Quasi-synthetic sequence derived from human genome
RLVKIRFLI

SEQ ID NO: 1231 - protein, 9 aa, Artificial Sequence
  Quasi-synthetic sequence derived from human genome
LWLFIFRLR

SEQ ID NO: 1232 - protein, 9 aa, Artificial Sequence
  Quasi-synthetic sequence derived from human genome
RRFKRRMLL

SEQ ID NO: 1233 - protein, 9 aa, Artificial Sequence
  Quasi-synthetic sequence derived from human genome
MKKLLLFLK

SEQ ID NO: 1234 - protein, 9 aa, Artificial Sequence
  Quasi-synthetic sequence derived from human genome
KKMKLLLFL

SEQ ID NO: 1235 - protein, 9 aa, Artificial Sequence
  Quasi-synthetic sequence derived from human genome
WKKLWFVIK

SEQ ID NO: 1236 - protein, 9 aa, Artificial Sequence
  Quasi-synthetic sequence derived from human genome
LYLRFLKKR

SEQ ID NO: 1237 - protein, 9 aa, Artificial Sequence
  Quasi-synthetic sequence derived from human genome
LLKRYLLKR

SEQ ID NO: 1238 - protein, 9 aa, Artificial Sequence
  Quasi-synthetic sequence derived from human genome
RRYLLKKLL

SEQ ID NO: 1239 - protein, 9 aa, Artificial Sequence
  Quasi-synthetic sequence derived from human genome
RRKKLYLLF

SEQ ID NO: 1240 - protein, 9 aa, Artificial Sequence
  Quasi-synthetic sequence derived from human genome
RFWLLKLLF

SEQ ID NO: 1241 - protein, 9 aa, Artificial Sequence
  Quasi-synthetic sequence derived from human genome
RWLLLKLLL

SEQ ID NO: 1242 - protein, 9 aa, Artificial Sequence
  Quasi-synthetic sequence derived from human genome
RMFRWLVLR

SEQ ID NO: 1243 - protein, 9 aa, Artificial Sequence
  Quasi-synthetic sequence derived from human genome
ILLRVRRRR

SEQ ID NO: 1244 - protein, 9 aa, Artificial Sequence
  Quasi-synthetic sequence derived from human genome
LWRLHWRRL

SEQ ID NO: 1245 - protein, 9 aa, Artificial Sequence
  Quasi-synthetic sequence derived from human genome
KFVLLILKR

SEQ ID NO: 1246 - protein, 9 aa, Artificial Sequence
  Quasi-synthetic sequence derived from human genome
LVRKLILLK

SEQ ID NO: 1247 - protein, 9 aa, Artificial Sequence
  Quasi-synthetic sequence derived from human genome
KRLVKILLL

SEQ ID NO: 1248 - protein, 9 aa, Artificial Sequence
  Quasi-synthetic sequence derived from human genome
VKLRLLIKL

SEQ ID NO: 1249 - protein, 9 aa, Artificial Sequence
  Quasi-synthetic sequence derived from human genome
RRFFWWARF

SEQ ID NO: 1250 - protein, 9 aa, Artificial Sequence
  Quasi-synthetic sequence derived from human genome
FFRVLKKIL

SEQ ID NO: 1251 - protein, 9 aa, Artificial Sequence
  Quasi-synthetic sequence derived from human genome
LFRILKVFK

SEQ ID NO: 1252 - protein, 9 aa, Artificial Sequence
  Quasi-synthetic sequence derived from human genome
RAWRWLLRL

SEQ ID NO: 1253 - protein, 9 aa, Artificial Sequence
  Quasi-synthetic sequence derived from human genome
WMRRMRILR

SEQ ID NO: 1254 - protein, 9 aa, Artificial Sequence
  Quasi-synthetic sequence derived from human genome
RIKMRKLIL

SEQ ID NO: 1255 - protein, 9 aa, Artificial Sequence
  Quasi-synthetic sequence derived from human genome
WIRLYKIRR

SEQ ID NO: 1256 - protein, 9 aa, Artificial Sequence
  Quasi-synthetic sequence derived from human genome
MILKKLIRR

SEQ ID NO: 1257 - protein, 9 aa, Artificial Sequence
  Quasi-synthetic sequence derived from human genome
RFFKRKIMI

SEQ ID NO: 1258 - protein, 9 aa, Artificial Sequence
  Quasi-synthetic sequence derived from human genome
KKLKVWFRI

SEQ ID NO: 1259 - protein, 9 aa, Artificial Sequence
  Quasi-synthetic sequence derived from human genome
LRRCFFWRF

SEQ ID NO: 1260 - protein, 9 aa, Artificial Sequence
  Quasi-synthetic sequence derived from human genome
LMRRLVRRL

SEQ ID NO: 1261 - protein, 9 aa, Artificial Sequence
  Quasi-synthetic sequence derived from human genome
LRRRLRWAL

SEQ ID NO: 1262 - protein, 9 aa, Artificial Sequence
  Quasi-synthetic sequence derived from human genome
FRARFRRLW

SEQ ID NO: 1263 - protein, 9 aa, Artificial Sequence
  Quasi-synthetic sequence derived from human genome
WKLWRCRLR

SEQ ID NO: 1264 - protein, 9 aa, Artificial Sequence
  Quasi-synthetic sequence derived from human genome
RKWWKYILL

SEQ ID NO: 1265 - protein, 9 aa, Artificial Sequence
  Quasi-synthetic sequence derived from human genome
RRLCLRLRL

SEQ ID NO: 1266 - protein, 9 aa, Artificial Sequence
  Quasi-synthetic sequence derived from human genome
LRKKILKIR

SEQ ID NO: 1267 - protein, 9 aa, Artificial Sequence
  Quasi-synthetic sequence derived from human genome
LRRILKIKK

SEQ ID NO: 1268 - protein, 9 aa, Artificial Sequence
  Quasi-synthetic sequence derived from human genome
KKFLFFVLK

SEQ ID NO: 1269 - protein, 9 aa, Artificial Sequence
  Quasi-synthetic sequence derived from human genome
VKKLLLFLK

SEQ ID NO: 1270 - protein, 9 aa, Artificial Sequence
  Quasi-synthetic sequence derived from human genome
LLLILRLLR

SEQ ID NO: 1271 - protein, 9 aa, Artificial Sequence
  Quasi-synthetic sequence derived from human genome
RRKLMFIII

SEQ ID NO: 1272 - protein, 9 aa, Artificial Sequence
  Quasi-synthetic sequence derived from human genome
WKIVRKLLI

SEQ ID NO: 1273 - protein, 9 aa, Artificial Sequence
  Quasi-synthetic sequence derived from human genome
RKIMKLLLK

SEQ ID NO: 1274 - protein, 9 aa, Artificial Sequence
  Quasi-synthetic sequence derived from human genome
WRIRKKYFL

SEQ ID NO: 1275 - protein, 9 aa, Artificial Sequence
  Quasi-synthetic sequence derived from human genome
RKWKRYLLI

SEQ ID NO: 1276 - protein, 9 aa, Artificial Sequence
  Quasi-synthetic sequence derived from human genome
RRVRLFLKR

SEQ ID NO: 1277 - protein, 9 aa, Artificial Sequence
  Quasi-synthetic sequence derived from human genome
RLRVRLLKR

SEQ ID NO: 1278 - protein, 9 aa, Artificial Sequence
  Quasi-synthetic sequence derived from human genome
KRLLLLLLL

SEQ ID NO: 1279 - protein, 9 aa, Artificial Sequence
  Quasi-synthetic sequence derived from human genome
KRLLLLFLF

SEQ ID NO: 1280 - protein, 9 aa, Artificial Sequence
  Quasi-synthetic sequence derived from human genome
RLLLLLLLK

SEQ ID NO: 1281 - protein, 9 aa, Artificial Sequence
  Quasi-synthetic sequence derived from human genome
LRLLLFKLL

SEQ ID NO: 1282 - protein, 9 aa, Artificial Sequence
  Quasi-synthetic sequence derived from human genome
ILWKWKKKK

SEQ ID NO: 1283 - protein, 9 aa, Artificial Sequence
  Quasi-synthetic sequence derived from human genome
KWLKKWIKK

SEQ ID NO: 1284 - protein, 9 aa, Artificial Sequence
  Quasi-synthetic sequence derived from human genome
FYLFKLLRK

SEQ ID NO: 1285 - protein, 9 aa, Artificial Sequence
  Quasi-synthetic sequence derived from human genome
LYLRLFKLK

SEQ ID NO: 1286 - protein, 9 aa, Artificial Sequence
  Quasi-synthetic sequence derived from human genome
LLLYLKRLK

SEQ ID NO: 1287 - protein, 9 aa, Artificial Sequence
  Quasi-synthetic sequence derived from human genome
RKLYKFLLL

SEQ ID NO: 1288 - protein, 9 aa, Artificial Sequence
  Quasi-synthetic sequence derived from human genome
KRILIRKVL

SEQ ID NO: 1289 - protein, 9 aa, Artificial Sequence
  Quasi-synthetic sequence derived from human genome
RIKRLKLIV

SEQ ID NO: 1290 - protein, 9 aa, Artificial Sequence
  Quasi-synthetic sequence derived from human genome
KIRFFKIML

SEQ ID NO: 1291 - protein, 9 aa, Artificial Sequence
  Quasi-synthetic sequence derived from human genome
LIRKMKLIL

SEQ ID NO: 1292 - protein, 9 aa, Artificial Sequence
  Quasi-synthetic sequence derived from human genome
KKIVWLKLL

SEQ ID NO: 1293 - protein, 9 aa, Artificial Sequence
  Quasi-synthetic sequence derived from human genome
FKRKFKILK

SEQ ID NO: 1294 - protein, 9 aa, Artificial Sequence
  Quasi-synthetic sequence derived from human genome
RRLLRLVVR

SEQ ID NO: 1295 - protein, 9 aa, Artificial Sequence
  Quasi-synthetic sequence derived from human genome
LRLRVRRVL

SEQ ID NO: 1296 - protein, 9 aa, Artificial Sequence
  Quasi-synthetic sequence derived from human genome
RVVRLLRLR

SEQ ID NO: 1297 - protein, 9 aa, Artificial Sequence
  Quasi-synthetic sequence derived from human genome
FFRLFRVMR

SEQ ID NO: 1298 - protein, 9 aa, Artificial Sequence
  Quasi-synthetic sequence derived from human genome
MRRVLRLLL

SEQ ID NO: 1299 - protein, 9 aa, Artificial Sequence
  Quasi-synthetic sequence derived from human genome
RFKKLKYLW

SEQ ID NO: 1300 - protein, 9 aa, Artificial Sequence
  Quasi-synthetic sequence derived from human genome
WRALLRLRL

SEQ ID NO: 1301 - protein, 9 aa, Artificial Sequence
  Quasi-synthetic sequence derived from human genome
RARRLWLLL

SEQ ID NO: 1302 - protein, 9 aa, Artificial Sequence
  Quasi-synthetic sequence derived from human genome
LWLLRLRRH

SEQ ID NO: 1303 - protein, 9 aa, Artificial Sequence
  Quasi-synthetic sequence derived from human genome
LLRRWLRAL

SEQ ID NO: 1304 - protein, 9 aa, Artificial Sequence
  Quasi-synthetic sequence derived from human genome
LLALRLRRW

SEQ ID NO: 1305 - protein, 9 aa, Artificial Sequence
  Quasi-synthetic sequence derived from human genome
LLLLRWRRP

SEQ ID NO: 1306 - protein, 9 aa, Artificial Sequence
  Quasi-synthetic sequence derived from human genome
FLLRWLRAR

SEQ ID NO: 1307 - protein, 9 aa, Artificial Sequence
  Quasi-synthetic sequence derived from human genome
RRLFRRFRY

SEQ ID NO: 1308 - protein, 9 aa, Artificial Sequence
  Quasi-synthetic sequence derived from human genome
IIRILVRKL

SEQ ID NO: 1309 - protein, 9 aa, Artificial Sequence
  Quasi-synthetic sequence derived from human genome
LLLCRLRRL

SEQ ID NO: 1310 - protein, 9 aa, Artificial Sequence
  Quasi-synthetic sequence derived from human genome
FLRRRCFLL

SEQ ID NO: 1311 - protein, 9 aa, Artificial Sequence
  Quasi-synthetic sequence derived from human genome
LLRFLRLCR

SEQ ID NO: 1312 - protein, 9 aa, Artificial Sequence
  Quasi-synthetic sequence derived from human genome
LRLFCFRLR

SEQ ID NO: 1313 - protein, 9 aa, Artificial Sequence
  Quasi-synthetic sequence derived from human genome
RFLWLLKIL

SEQ ID NO: 1314 - protein, 9 aa, Artificial Sequence
  Quasi-synthetic sequence derived from human genome
MKFFRWVRR

SEQ ID NO: 1315 - protein, 9 aa, Artificial Sequence
  Quasi-synthetic sequence derived from human genome
RKLFYFKIW

SEQ ID NO: 1316 - protein, 9 aa, Artificial Sequence
  Quasi-synthetic sequence derived from human genome
YWRLLFKKI

SEQ ID NO: 1317 - protein, 9 aa, Artificial Sequence
  Quasi-synthetic sequence derived from human genome
FLKMKILLK

SEQ ID NO: 1318 - protein, 9 aa, Artificial Sequence
  Quasi-synthetic sequence derived from human genome
FRRAWRKLW

SEQ ID NO: 1319 - protein, 9 aa, Artificial Sequence
  Quasi-synthetic sequence derived from human genome
IRLLKKFKV

SEQ ID NO: 1320 - protein, 9 aa, Artificial Sequence
  Quasi-synthetic sequence derived from human genome
LWRRRKWPF

SEQ ID NO: 1321 - protein, 9 aa, Artificial Sequence
  Quasi-synthetic sequence derived from human genome
LLKVIRKKL

SEQ ID NO: 1322 - protein, 9 aa, Artificial Sequence
  Quasi-synthetic sequence derived from human genome
VKRLLIKKL

SEQ ID NO: 1323 - protein, 9 aa, Artificial Sequence
  Quasi-synthetic sequence derived from human genome
LVLIRLKKK

SEQ ID NO: 1324 - protein, 9 aa, Artificial Sequence
  Quasi-synthetic sequence derived from human genome
KIKVFRLFK

SEQ ID NO: 1325 - protein, 9 aa, Artificial Sequence
  Quasi-synthetic sequence derived from human genome
HRRFLLFRR

SEQ ID NO: 1326 - protein, 9 aa, Artificial Sequence
  Quasi-synthetic sequence derived from human genome
RRLALLRRL

SEQ ID NO: 1327 - protein, 9 aa, Artificial Sequence
  Quasi-synthetic sequence derived from human genome
RFLRAFRLR

SEQ ID NO: 1328 - protein, 9 aa, Artificial Sequence
  Quasi-synthetic sequence derived from human genome
LLRRLARRL

SEQ ID NO: 1329 - protein, 9 aa, Artificial Sequence
  Quasi-synthetic sequence derived from human genome
FRLRPLRFR

SEQ ID NO: 1330 - protein, 9 aa, Artificial Sequence
  Quasi-synthetic sequence derived from human genome
RRFLLFRRA

SEQ ID NO: 1331 - protein, 9 aa, Artificial Sequence
  Quasi-synthetic sequence derived from human genome
RRLARFLRL

SEQ ID NO: 1332 - protein, 9 aa, Artificial Sequence
  Quasi-synthetic sequence derived from human genome
RAFLLRRRF

SEQ ID NO: 1333 - protein, 9 aa, Artificial Sequence
  Quasi-synthetic sequence derived from human genome
LKKKKLFKL

SEQ ID NO: 1334 - protein, 9 aa, Artificial Sequence
  Quasi-synthetic sequence derived from human genome
KKKKKLLLL

SEQ ID NO: 1335 - protein, 9 aa, Artificial Sequence
  Quasi-synthetic sequence derived from human genome
KLKKLKKLL

SEQ ID NO: 1336 - protein, 9 aa, Artificial Sequence
  Quasi-synthetic sequence derived from human genome
KKFKFFKFK

SEQ ID NO: 1337 - protein, 9 aa, Artificial Sequence
  Quasi-synthetic sequence derived from human genome
ILWRRFRWA

SEQ ID NO: 1338 - protein, 9 aa, Artificial Sequence
  Quasi-synthetic sequence derived from human genome
VLRVLRLLR

SEQ ID NO: 1339 - protein, 9 aa, Artificial Sequence
  Quasi-synthetic sequence derived from human genome
RRFILRWCL

SEQ ID NO: 1340 - protein, 9 aa, Artificial Sequence
  Quasi-synthetic sequence derived from human genome
VLRVRLFFR

SEQ ID NO: 1341 - protein, 9 aa, Artificial Sequence
  Quasi-synthetic sequence derived from human genome
RRFIFLFFI

SEQ ID NO: 1342 - protein, 9 aa, Artificial Sequence
  Quasi-synthetic sequence derived from human genome
LRLLRLIIL

SEQ ID NO: 1343 - protein, 9 aa, Artificial Sequence
  Quasi-synthetic sequence derived from human genome
KWYLKKLLF

SEQ ID NO: 1344 - protein, 9 aa, Artificial Sequence
  Quasi-synthetic sequence derived from human genome
KLILYFKRR

SEQ ID NO: 1345 - protein, 9 aa, Artificial Sequence
  Quasi-synthetic sequence derived from human genome
KYLRKLLIR

SEQ ID NO: 1346 - protein, 9 aa, Artificial Sequence
  Quasi-synthetic sequence derived from human genome
RKIMRFLRR

SEQ ID NO: 1347 - protein, 9 aa, Artificial Sequence
  Quasi-synthetic sequence derived from human genome
LKLFLKKKV

SEQ ID NO: 1348 - protein, 9 aa, Artificial Sequence
  Quasi-synthetic sequence derived from human genome
KLLLKLKKV

SEQ ID NO: 1349 - protein, 9 aa, Artificial Sequence
  Quasi-synthetic sequence derived from human genome
FFKKRVRRW

SEQ ID NO: 1350 - protein, 9 aa, Artificial Sequence
  Quasi-synthetic sequence derived from human genome
MLFIRMLRR

SEQ ID NO: 1351 - protein, 9 aa, Artificial Sequence
  Quasi-synthetic sequence derived from human genome
LIKRIYLLR

SEQ ID NO: 1352 - protein, 9 aa, Artificial Sequence
  Quasi-synthetic sequence derived from human genome
FYFLIRKRI

SEQ ID NO: 1353 - protein, 9 aa, Artificial Sequence
  Quasi-synthetic sequence derived from human genome
LRWLLKHWR

SEQ ID NO: 1354 - protein, 9 aa, Artificial Sequence
  Quasi-synthetic sequence derived from human genome
ILLKKVLLK

SEQ ID NO: 1355 - protein, 9 aa, Artificial Sequence
  Quasi-synthetic sequence derived from human genome
LLRRWKHWL

SEQ ID NO: 1356 - protein, 9 aa, Artificial Sequence
  Quasi-synthetic sequence derived from human genome
FKLFLLRIL

SEQ ID NO: 1357 - protein, 9 aa, Artificial Sequence
  Quasi-synthetic sequence derived from human genome
ILLKRLFFF

SEQ ID NO: 1358 - protein, 9 aa, Artificial Sequence
  Quasi-synthetic sequence derived from human genome
LWIRWKCRR

SEQ ID NO: 1359 - protein, 9 aa, Artificial Sequence
  Quasi-synthetic sequence derived from human genome
RIFRPWRLR

SEQ ID NO: 1360 - protein, 9 aa, Artificial Sequence
  Quasi-synthetic sequence derived from human genome
RRLLARIWR

SEQ ID NO: 1361 - protein, 9 aa, Artificial Sequence
  Quasi-synthetic sequence derived from human genome
RARRLLLFL

SEQ ID NO: 1362 - protein, 9 aa, Artificial Sequence
  Quasi-synthetic sequence derived from human genome
RRALLRFLF

SEQ ID NO: 1363 - protein, 9 aa, Artificial Sequence
  Quasi-synthetic sequence derived from human genome
RLLLPRLLR

SEQ ID NO: 1364 - protein, 9 aa, Artificial Sequence
  Quasi-synthetic sequence derived from human genome
RWLLLCFKR

SEQ ID NO: 1365 - protein, 9 aa, Artificial Sequence
  Quasi-synthetic sequence derived from human genome
RRLLRPFFL

SEQ ID NO: 1366 - protein, 9 aa, Artificial Sequence
  Quasi-synthetic sequence derived from human genome
RHLRLLRLL

SEQ ID NO: 1367 - protein, 9 aa, Artificial Sequence
  Quasi-synthetic sequence derived from human genome
LLLLRALRR

SEQ ID NO: 1368 - protein, 9 aa, Artificial Sequence
  Quasi-synthetic sequence derived from human genome
FLLRFLRAR

SEQ ID NO: 1369 - protein, 9 aa, Artificial Sequence
  Quasi-synthetic sequence derived from human genome
LRFLRALRL

SEQ ID NO: 1370 - protein, 9 aa, Artificial Sequence
  Quasi-synthetic sequence derived from human genome
LRPFLLRRL

SEQ ID NO: 1371 - protein, 9 aa, Artificial Sequence
  Quasi-synthetic sequence derived from human genome
LLARRFLLR

SEQ ID NO: 1372 - protein, 9 aa, Artificial Sequence
  Quasi-synthetic sequence derived from human genome
LRRRFLLLP

SEQ ID NO: 1373 - protein, 9 aa, Artificial Sequence
  Quasi-synthetic sequence derived from human genome
FLRRRLAFL

SEQ ID NO: 1374 - protein, 9 aa, Artificial Sequence
  Quasi-synthetic sequence derived from human genome
RLLLRRFLA

SEQ ID NO: 1375 - protein, 9 aa, Artificial Sequence
  Quasi-synthetic sequence derived from human genome
RLLPLRRLF

SEQ ID NO: 1376 - protein, 9 aa, Artificial Sequence
  Quasi-synthetic sequence derived from human genome
RLRLRLLAL

SEQ ID NO: 1377 - protein, 9 aa, Artificial Sequence
  Quasi-synthetic sequence derived from human genome
WKRFFCFLR

SEQ ID NO: 1378 - protein, 9 aa, Artificial Sequence
  Quasi-synthetic sequence derived from human genome
FLRRRRRFK

SEQ ID NO: 1379 - protein, 9 aa, Artificial Sequence
  Quasi-synthetic sequence derived from human genome
RCLIRRLRL

SEQ ID NO: 1380 - protein, 9 aa, Artificial Sequence
  Quasi-synthetic sequence derived from human genome
FKKLKFYLR

SEQ ID NO: 1381 - protein, 9 aa, Artificial Sequence
  Quasi-synthetic sequence derived from human genome
LKRFLYKKL

SEQ ID NO: 1382 - protein, 9 aa, Artificial Sequence
  Quasi-synthetic sequence derived from human genome
LKILKRLYL

SEQ ID NO: 1383 - protein, 9 aa, Artificial Sequence
  Quasi-synthetic sequence derived from human genome
KLLILKLRY

SEQ ID NO: 1384 - protein, 9 aa, Artificial Sequence
  Quasi-synthetic sequence derived from human genome
KIMKLRKIL

SEQ ID NO: 1385 - protein, 9 aa, Artificial Sequence
  Quasi-synthetic sequence derived from human genome
KLKLKIMIR

SEQ ID NO: 1386 - protein, 9 aa, Artificial Sequence
  Quasi-synthetic sequence derived from human genome
IFIRWLLKL

SEQ ID NO: 1387 - protein, 9 aa, Artificial Sequence
  Quasi-synthetic sequence derived from human genome
LKKWLKVKI

SEQ ID NO: 1388 - protein, 9 aa, Artificial Sequence
  Quasi-synthetic sequence derived from human genome
LVMRKRLRL

SEQ ID NO: 1389 - protein, 9 aa, Artificial Sequence
  Quasi-synthetic sequence derived from human genome
FWRRLRKAL

SEQ ID NO: 1390 - protein, 9 aa, Artificial Sequence
  Quasi-synthetic sequence derived from human genome
RLHLKRFRW

SEQ ID NO: 1391 - protein, 9 aa, Artificial Sequence
  Quasi-synthetic sequence derived from human genome
RLLWRRLKP

SEQ ID NO: 1392 - protein, 9 aa, Artificial Sequence
  Quasi-synthetic sequence derived from human genome
FRFFIRRMV

SEQ ID NO: 1393 - protein, 9 aa, Artificial Sequence
  Quasi-synthetic sequence derived from human genome
RLMRIFRVL

SEQ ID NO: 1394 - protein, 9 aa, Artificial Sequence
  Quasi-synthetic sequence derived from human genome
WRLKVLVRL

SEQ ID NO: 1395 - protein, 9 aa, Artificial Sequence
  Quasi-synthetic sequence derived from human genome
FWIKCRRWL

SEQ ID NO: 1396 - protein, 9 aa, Artificial Sequence
  Quasi-synthetic sequence derived from human genome
FLFRVRVWK

SEQ ID NO: 1397 - protein, 9 aa, Artificial Sequence
  Quasi-synthetic sequence derived from human genome
LLRIRALRW

SEQ ID NO: 1398 - protein, 9 aa, Artificial Sequence
  Quasi-synthetic sequence derived from human genome
LLRRLWVVK

SEQ ID NO: 1399 - protein, 9 aa, Artificial Sequence
  Quasi-synthetic sequence derived from human genome
LLAILRRRW

SEQ ID NO: 1400 - protein, 9 aa, Artificial Sequence
  Quasi-synthetic sequence derived from human genome
FRRKLCLLR

SEQ ID NO: 1401 - protein, 9 aa, Artificial Sequence
  Quasi-synthetic sequence derived from human genome
RRCLLLKRL

SEQ ID NO: 1402 - protein, 9 aa, Artificial Sequence
  Quasi-synthetic sequence derived from human genome
KRIRRVRLL

SEQ ID NO: 1403 - protein, 9 aa, Artificial Sequence
  Quasi-synthetic sequence derived from human genome
LKLLFLKKY

SEQ ID NO: 1404 - protein, 9 aa, Artificial Sequence
  Quasi-synthetic sequence derived from human genome
LKYLLKLKF

SEQ ID NO: 1405 - protein, 9 aa, Artificial Sequence
  Quasi-synthetic sequence derived from human genome
FYLLLKLKK

SEQ ID NO: 1406 - protein, 9 aa, Artificial Sequence
  Quasi-synthetic sequence derived from human genome
LLKFIKIMK

SEQ ID NO: 1407 - protein, 9 aa, Artificial Sequence
  Quasi-synthetic sequence derived from human genome
ILWRILYKK

SEQ ID NO: 1408 - protein, 9 aa, Artificial Sequence
  Quasi-synthetic sequence derived from human genome
LRRRWWKYM

SEQ ID NO: 1409 - protein, 9 aa, Artificial Sequence
  Quasi-synthetic sequence derived from human genome
RLLRLIILI

SEQ ID NO: 1410 - protein, 9 aa, Artificial Sequence
  Quasi-synthetic sequence derived from human genome
WRWLTFWRR

SEQ ID NO: 1411 - protein, 9 aa, Artificial Sequence
  Quasi-synthetic sequence derived from human genome
LVWRYLLRR

SEQ ID NO: 1412 - protein, 9 aa, Artificial Sequence
  Quasi-synthetic sequence derived from human genome
LLLLVKRRM

SEQ ID NO: 1413 - protein, 9 aa, Artificial Sequence
  Quasi-synthetic sequence derived from human genome
LLALKLRRW

SEQ ID NO: 1414 - protein, 9 aa, Artificial Sequence
  Quasi-synthetic sequence derived from human genome
WLLRLHLKR

SEQ ID NO: 1415 - protein, 9 aa, Artificial Sequence
  Quasi-synthetic sequence derived from human genome
FWKRFCFWK

SEQ ID NO: 1416 - protein, 9 aa, Artificial Sequence
  Quasi-synthetic sequence derived from human genome
WKLLLLRRP

SEQ ID NO: 1417 - protein, 9 aa, Artificial Sequence
  Quasi-synthetic sequence derived from human genome
KARLFRLWL

SEQ ID NO: 1418 - protein, 9 aa, Artificial Sequence
  Quasi-synthetic sequence derived from human genome
VLIIIRLKK

SEQ ID NO: 1419 - protein, 9 aa, Artificial Sequence
  Quasi-synthetic sequence derived from human genome
KLIFIKKKR

SEQ ID NO: 1420 - protein, 9 aa, Artificial Sequence
  Quasi-synthetic sequence derived from human genome
RLCKLLFFR

SEQ ID NO: 1421 - protein, 9 aa, Artificial Sequence
  Quasi-synthetic sequence derived from human genome
KRRFLLCLL

SEQ ID NO: 1422 - protein, 9 aa, Artificial Sequence
  Quasi-synthetic sequence derived from human genome
KRKVIIFLK

SEQ ID NO: 1423 - protein, 9 aa, Artificial Sequence
  Quasi-synthetic sequence derived from human genome
RVRVKWWKL

SEQ ID NO: 1424 - protein, 9 aa, Artificial Sequence
  Quasi-synthetic sequence derived from human genome
LRVFRVFRI

SEQ ID NO: 1425 - protein, 9 aa, Artificial Sequence
  Quasi-synthetic sequence derived from human genome
LVRRFRVLI

SEQ ID NO: 1426 - protein, 9 aa, Artificial Sequence
  Quasi-synthetic sequence derived from human genome
RLVRVFRIF

SEQ ID NO: 1427 - protein, 9 aa, Artificial Sequence
  Quasi-synthetic sequence derived from human genome
ILLVVRRLR

SEQ ID NO: 1428 - protein, 9 aa, Artificial Sequence
  Quasi-synthetic sequence derived from human genome
LKLIIRLFL

SEQ ID NO: 1429 - protein, 9 aa, Artificial Sequence
  Quasi-synthetic sequence derived from human genome
ILLLIFLRK

SEQ ID NO: 1430 - protein, 9 aa, Artificial Sequence
  Quasi-synthetic sequence derived from human genome
FFLLIIRKL

SEQ ID NO: 1431 - protein, 9 aa, Artificial Sequence
  Quasi-synthetic sequence derived from human genome
ILILRLKLF

SEQ ID NO: 1432 - protein, 9 aa, Artificial Sequence
  Quasi-synthetic sequence derived from human genome
KLFKRRRVL

SEQ ID NO: 1433 - protein, 9 aa, Artificial Sequence
  Quasi-synthetic sequence derived from human genome
LFVKRLRRK

SEQ ID NO: 1434 - protein, 9 aa, Artificial Sequence
  Quasi-synthetic sequence derived from human genome
KRRFRKFLV

SEQ ID NO: 1435 - protein, 9 aa, Artificial Sequence
  Quasi-synthetic sequence derived from human genome
KLVLRKLRR

SEQ ID NO: 1436 - protein, 9 aa, Artificial Sequence
  Quasi-synthetic sequence derived from human genome
LRKRRVLFV

SEQ ID NO: 1437 - protein, 9 aa, Artificial Sequence
  Quasi-synthetic sequence derived from human genome
RWWFSWRRR

SEQ ID NO: 1438 - protein, 9 aa, Artificial Sequence
  Quasi-synthetic sequence derived from human genome
FFPRILRRR

SEQ ID NO: 1439 - protein, 9 aa, Artificial Sequence
  Quasi-synthetic sequence derived from human genome
LRIARFRFR

SEQ ID NO: 1440 - protein, 9 aa, Artificial Sequence
  Quasi-synthetic sequence derived from human genome
RRHRILLRL

SEQ ID NO: 1441 - protein, 9 aa, Artificial Sequence
  Quasi-synthetic sequence derived from human genome
RLAIRLLRR

SEQ ID NO: 1442 - protein, 9 aa, Artificial Sequence
  Quasi-synthetic sequence derived from human genome
VLVRLRKRL

SEQ ID NO: 1443 - protein, 9 aa, Artificial Sequence
  Quasi-synthetic sequence derived from human genome
FRRAFRRIL

SEQ ID NO: 1444 - protein, 9 aa, Artificial Sequence
  Quasi-synthetic sequence derived from human genome
WLLVRMKIR

SEQ ID NO: 1445 - protein, 9 aa, Artificial Sequence
  Quasi-synthetic sequence derived from human genome
ILLVKIKLK

SEQ ID NO: 1446 - protein, 9 aa, Artificial Sequence
  Quasi-synthetic sequence derived from human genome
LLRRRKKRW

SEQ ID NO: 1447 - protein, 9 aa, Artificial Sequence
  Quasi-synthetic sequence derived from human genome
FLKRRWRKR

SEQ ID NO: 1448 - protein, 9 aa, Artificial Sequence
  Quasi-synthetic sequence derived from human genome
FRVLRVFKL

SEQ ID NO: 1449 - protein, 9 aa, Artificial Sequence
  Quasi-synthetic sequence derived from human genome
RWRWWQRLL

SEQ ID NO: 1450 - protein, 9 aa, Artificial Sequence
  Quasi-synthetic sequence derived from human genome
LKVVRLLRL

SEQ ID NO: 1451 - protein, 9 aa, Artificial Sequence
  Quasi-synthetic sequence derived from human genome
LFVFVLKRR

SEQ ID NO: 1452 - protein, 9 aa, Artificial Sequence
  Quasi-synthetic sequence derived from human genome
LFLILRHRR

SEQ ID NO: 1453 - protein, 9 aa, Artificial Sequence
  Quasi-synthetic sequence derived from human genome
RRARLFLLI

SEQ ID NO: 1454 - protein, 9 aa, Artificial Sequence
  Quasi-synthetic sequence derived from human genome
LWFLICKRR

SEQ ID NO: 1455 - protein, 9 aa, Artificial Sequence
  Quasi-synthetic sequence derived from human genome
LRRLFRAIF

SEQ ID NO: 1456 - protein, 9 aa, Artificial Sequence
  Quasi-synthetic sequence derived from human genome
FILRFLRAR

SEQ ID NO: 1457 - protein, 9 aa, Artificial Sequence
  Quasi-synthetic sequence derived from human genome
LCWKLRFRI

SEQ ID NO: 1458 - protein, 9 aa, Artificial Sequence
  Quasi-synthetic sequence derived from human genome
RVLKLVRFL

SEQ ID NO: 1459 - protein, 9 aa, Artificial Sequence
  Quasi-synthetic sequence derived from human genome
FFLRFIRAR

SEQ ID NO: 1460 - protein, 9 aa, Artificial Sequence
  Quasi-synthetic sequence derived from human genome
LRPFLLRRI

SEQ ID NO: 1461 - protein, 9 aa, Artificial Sequence
  Quasi-synthetic sequence derived from human genome
LRLPRLIRL

SEQ ID NO: 1462 - protein, 9 aa, Artificial Sequence
  Quasi-synthetic sequence derived from human genome
KKRFRYIIL

SEQ ID NO: 1463 - protein, 9 aa, Artificial Sequence
  Quasi-synthetic sequence derived from human genome
KKIIRRLYL

SEQ ID NO: 1464 - protein, 9 aa, Artificial Sequence
  Quasi-synthetic sequence derived from human genome
RKRKRWLYW

SEQ ID NO: 1465 - protein, 9 aa, Artificial Sequence
  Quasi-synthetic sequence derived from human genome
LKKLIVKKF

SEQ ID NO: 1466 - protein, 9 aa, Artificial Sequence
  Quasi-synthetic sequence derived from human genome
YRRLLRVLR

SEQ ID NO: 1467 - protein, 9 aa, Artificial Sequence
  Quasi-synthetic sequence derived from human genome
FFYRRRFVR

SEQ ID NO: 1468 - protein, 9 aa, Artificial Sequence
  Quasi-synthetic sequence derived from human genome
LALRLRKRF

SEQ ID NO: 1469 - protein, 9 aa, Artificial Sequence
  Quasi-synthetic sequence derived from human genome
RFRLKHLLR

SEQ ID NO: 1470 - protein, 9 aa, Artificial Sequence
  Quasi-synthetic sequence derived from human genome
LWLRKCLRK

SEQ ID NO: 1471 - protein, 9 aa, Artificial Sequence
  Quasi-synthetic sequence derived from human genome
KRFRLLHLR

SEQ ID NO: 1472 - protein, 9 aa, Artificial Sequence
  Quasi-synthetic sequence derived from human genome
KRAFLRLLR

SEQ ID NO: 1473 - protein, 9 aa, Artificial Sequence
  Quasi-synthetic sequence derived from human genome
HLLLKLRRR

SEQ ID NO: 1474 - protein, 9 aa, Artificial Sequence
  Quasi-synthetic sequence derived from human genome
FLRKFRARF

SEQ ID NO: 1475 - protein, 9 aa, Artificial Sequence
  Quasi-synthetic sequence derived from human genome
LALLRKRFR

SEQ ID NO: 1476 - protein, 9 aa, Artificial Sequence
  Quasi-synthetic sequence derived from human genome
LRPLFRKLR

SEQ ID NO: 1477 - protein, 9 aa, Artificial Sequence
  Quasi-synthetic sequence derived from human genome
FRRLLKLPR

SEQ ID NO: 1478 - protein, 9 aa, Artificial Sequence
  Quasi-synthetic sequence derived from human genome
LLRRLPKLR

SEQ ID NO: 1479 - protein, 9 aa, Artificial Sequence
  Quasi-synthetic sequence derived from human genome
LKRFLLARR

SEQ ID NO: 1480 - protein, 9 aa, Artificial Sequence
  Quasi-synthetic sequence derived from human genome
RYKIIKLLL

SEQ ID NO: 1481 - protein, 9 aa, Artificial Sequence
  Quasi-synthetic sequence derived from human genome
KVLMWRLLK

SEQ ID NO: 1482 - protein, 9 aa, Artificial Sequence
  Quasi-synthetic sequence derived from human genome
RIRIRRVLM

SEQ ID NO: 1483 - protein, 9 aa, Artificial Sequence
  Quasi-synthetic sequence derived from human genome
WRKLLKAFW

SEQ ID NO: 1484 - protein, 9 aa, Artificial Sequence
  Quasi-synthetic sequence derived from human genome
AFLWRKKWL

SEQ ID NO: 1485 - protein, 9 aa, Artificial Sequence
  Quasi-synthetic sequence derived from human genome
ILLLLKIWK

SEQ ID NO: 1486 - protein, 9 aa, Artificial Sequence
  Quasi-synthetic sequence derived from human genome
RIIMRFRKR

SEQ ID NO: 1487 - protein, 9 aa, Artificial Sequence
  Quasi-synthetic sequence derived from human genome
LVFFLYRRR

SEQ ID NO: 1488 - protein, 9 aa, Artificial Sequence
  Quasi-synthetic sequence derived from human genome
RFVRRLLYF

SEQ ID NO: 1489 - protein, 9 aa, Artificial Sequence
  Quasi-synthetic sequence derived from human genome
KRLFFPRFF

SEQ ID NO: 1490 - protein, 9 aa, Artificial Sequence
  Quasi-synthetic sequence derived from human genome
RFAKLLLRL

SEQ ID NO: 1491 - protein, 9 aa, Artificial Sequence
  Quasi-synthetic sequence derived from human genome
LLRFLAKRL

SEQ ID NO: 1492 - protein, 9 aa, Artificial Sequence
  Quasi-synthetic sequence derived from human genome
LRFLFRKLA

SEQ ID NO: 1493 - protein, 9 aa, Artificial Sequence
  Quasi-synthetic sequence derived from human genome
FRKLFHRFL

SEQ ID NO: 1494 - protein, 9 aa, Artificial Sequence
  Quasi-synthetic sequence derived from human genome
PRFLKRLLL

SEQ ID NO: 1495 - protein, 9 aa, Artificial Sequence
  Quasi-synthetic sequence derived from human genome
RLFRLLAKL

SEQ ID NO: 1496 - protein, 9 aa, Artificial Sequence
  Quasi-synthetic sequence derived from human genome
RLLFFKHRL

SEQ ID NO: 1497 - protein, 9 aa, Artificial Sequence
  Quasi-synthetic sequence derived from human genome
RRLFKFPFL

SEQ ID NO: 1498 - protein, 9 aa, Artificial Sequence
  Quasi-synthetic sequence derived from human genome
LHLLFLKRR

SEQ ID NO: 1499 - protein, 9 aa, Artificial Sequence
  Quasi-synthetic sequence derived from human genome
LRVRWLLLL

SEQ ID NO: 1500 - protein, 9 aa, Artificial Sequence
  Quasi-synthetic sequence derived from human genome
YWRMFRLKR

SEQ ID NO: 1501 - protein, 9 aa, Artificial Sequence
  Quasi-synthetic sequence derived from human genome
FLIYKFKRK

SEQ ID NO: 1502 - protein, 9 aa, Artificial Sequence
  Quasi-synthetic sequence derived from human genome
KIKRLYKLL

SEQ ID NO: 1503 - protein, 9 aa, Artificial Sequence
  Quasi-synthetic sequence derived from human genome
LKLILKRYK

SEQ ID NO: 1504 - protein, 9 aa, Artificial Sequence
  Quasi-synthetic sequence derived from human genome
KKLIRYLKL

SEQ ID NO: 1505 - protein, 9 aa, Artificial Sequence
  Quasi-synthetic sequence derived from human genome
LRCIRLLRI

SEQ ID NO: 1506 - protein, 9 aa, Artificial Sequence
  Quasi-synthetic sequence derived from human genome
RRFFLRCII

SEQ ID NO: 1507 - protein, 9 aa, Artificial Sequence
  Quasi-synthetic sequence derived from human genome
MWYRLRLLK

SEQ ID NO: 1508 - protein, 9 aa, Artificial Sequence
  Quasi-synthetic sequence derived from human genome
LLKLFYIKK

SEQ ID NO: 1509 - protein, 9 aa, Artificial Sequence
  Quasi-synthetic sequence derived from human genome
RRMLFLFLL

SEQ ID NO: 1510 - protein, 9 aa, Artificial Sequence
  Quasi-synthetic sequence derived from human genome
VFMIRKFRR

SEQ ID NO: 1511 - protein, 9 aa, Artificial Sequence
  Quasi-synthetic sequence derived from human genome
VMRRLLRKI

SEQ ID NO: 1512 - protein, 9 aa, Artificial Sequence
  Quasi-synthetic sequence derived from human genome
IRIWKLYIK

SEQ ID NO: 1513 - protein, 9 aa, Artificial Sequence
  Quasi-synthetic sequence derived from human genome
WPRLIRKLR

SEQ ID NO: 1514 - protein, 9 aa, Artificial Sequence
  Quasi-synthetic sequence derived from human genome
KIRWLRAFR

SEQ ID NO: 1515 - protein, 9 aa, Artificial Sequence
  Quasi-synthetic sequence derived from human genome
WKRLLIARR

SEQ ID NO: 1516 - protein, 9 aa, Artificial Sequence
  Quasi-synthetic sequence derived from human genome
RARKILWRF

SEQ ID NO: 1517 - protein, 9 aa, Artificial Sequence
  Quasi-synthetic sequence derived from human genome
KLRRFLVMI

SEQ ID NO: 1518 - protein, 9 aa, Artificial Sequence
  Quasi-synthetic sequence derived from human genome
RVMRLIKLL

SEQ ID NO: 1519 - protein, 9 aa, Artificial Sequence
  Quasi-synthetic sequence derived from human genome
RRRLLIKKM

SEQ ID NO: 1520 - protein, 9 aa, Artificial Sequence
  Quasi-synthetic sequence derived from human genome
HILRLRWKL

SEQ ID NO: 1521 - protein, 9 aa, Artificial Sequence
  Quasi-synthetic sequence derived from human genome
VKWLLRFKV

SEQ ID NO: 1522 - protein, 9 aa, Artificial Sequence
  Quasi-synthetic sequence derived from human genome
WGWLLRRRR

SEQ ID NO: 1523 - protein, 9 aa, Artificial Sequence
  Quasi-synthetic sequence derived from human genome
RLIRKRFLC

SEQ ID NO: 1524 - protein, 9 aa, Artificial Sequence
  Quasi-synthetic sequence derived from human genome
LCRLKIRRL

SEQ ID NO: 1525 - protein, 9 aa, Artificial Sequence
  Quasi-synthetic sequence derived from human genome
YFKKLFKKL

SEQ ID NO: 1526 - protein, 9 aa, Artificial Sequence
  Quasi-synthetic sequence derived from human genome
RKKLIIIIV

SEQ ID NO: 1527 - protein, 9 aa, Artificial Sequence
  Quasi-synthetic sequence derived from human genome
RLIKIKIIV

SEQ ID NO: 1528 - protein, 9 aa, Artificial Sequence
  Quasi-synthetic sequence derived from human genome
RICFLLRKL

SEQ ID NO: 1529 - protein, 9 aa, Artificial Sequence
  Quasi-synthetic sequence derived from human genome
KLLILRCFR

SEQ ID NO: 1530 - protein, 9 aa, Artificial Sequence
  Quasi-synthetic sequence derived from human genome
RRRWWKYMI

SEQ ID NO: 1531 - protein, 9 aa, Artificial Sequence
  Quasi-synthetic sequence derived from human genome
IRLVRVFRI

SEQ ID NO: 1532 - protein, 9 aa, Artificial Sequence
  Quasi-synthetic sequence derived from human genome
ILRVIRLVR

SEQ ID NO: 1533 - protein, 9 aa, Artificial Sequence
  Quasi-synthetic sequence derived from human genome
FWVRLFFWK

SEQ ID NO: 1534 - protein, 9 aa, Artificial Sequence
  Quasi-synthetic sequence derived from human genome
FFIFLKILK

SEQ ID NO: 1535 - protein, 9 aa, Artificial Sequence
  Quasi-synthetic sequence derived from human genome
WILKKIKYL

SEQ ID NO: 1536 - protein, 9 aa, Artificial Sequence
  Quasi-synthetic sequence derived from human genome
RVRLLLLLL

SEQ ID NO: 1537 - protein, 9 aa, Artificial Sequence
  Quasi-synthetic sequence derived from human genome
LFFRVLLLR

SEQ ID NO: 1538 - protein, 9 aa, Artificial Sequence
  Quasi-synthetic sequence derived from human genome
RRVLLLLLL

SEQ ID NO: 1539 - protein, 9 aa, Artificial Sequence
  Quasi-synthetic sequence derived from human genome
VRKLIIRRR

SEQ ID NO: 1540 - protein, 9 aa, Artificial Sequence
  Quasi-synthetic sequence derived from human genome
WKLRPLKRL

SEQ ID NO: 1541 - protein, 9 aa, Artificial Sequence
  Quasi-synthetic sequence derived from human genome
KKLRLFAWR

SEQ ID NO: 1542 - protein, 9 aa, Artificial Sequence
  Quasi-synthetic sequence derived from human genome
KRRFLKAWL

SEQ ID NO: 1543 - protein, 9 aa, Artificial Sequence
  Quasi-synthetic sequence derived from human genome
RLLKFWKRA

SEQ ID NO: 1544 - protein, 9 aa, Artificial Sequence
  Quasi-synthetic sequence derived from human genome
RKHFLRKWL

SEQ ID NO: 1545 - protein, 9 aa, Artificial Sequence
  Quasi-synthetic sequence derived from human genome
RRALLLKKW

SEQ ID NO: 1546 - protein, 9 aa, Artificial Sequence
  Quasi-synthetic sequence derived from human genome
RKYWVRFLL

SEQ ID NO: 1547 - protein, 9 aa, Artificial Sequence
  Quasi-synthetic sequence derived from human genome
LLLKMKRVL

SEQ ID NO: 1548 - protein, 9 aa, Artificial Sequence
  Quasi-synthetic sequence derived from human genome
KLVRFLMKL

SEQ ID NO: 1549 - protein, 9 aa, Artificial Sequence
  Quasi-synthetic sequence derived from human genome
LKALLRWKL

SEQ ID NO: 1550 - protein, 9 aa, Artificial Sequence
  Quasi-synthetic sequence derived from human genome
FFLWKRALK

SEQ ID NO: 1551 - protein, 9 aa, Artificial Sequence
  Quasi-synthetic sequence derived from human genome
LRPLLKKWL

SEQ ID NO: 1552 - protein, 9 aa, Artificial Sequence
  Quasi-synthetic sequence derived from human genome
KLHFWRFLK

SEQ ID NO: 1553 - protein, 9 aa, Artificial Sequence
  Quasi-synthetic sequence derived from human genome
WIKRLIRMV

SEQ ID NO: 1554 - protein, 9 aa, Artificial Sequence
  Quasi-synthetic sequence derived from human genome
RLRRRLWLT

SEQ ID NO: 1555 - protein, 9 aa, Artificial Sequence
  Quasi-synthetic sequence derived from human genome
LLWLRRLTR

SEQ ID NO: 1556 - protein, 9 aa, Artificial Sequence
  Quasi-synthetic sequence derived from human genome
RLRLLLRTW

SEQ ID NO: 1557 - protein, 9 aa, Artificial Sequence
  Quasi-synthetic sequence derived from human genome
LFCFRLRKK

SEQ ID NO: 1558 - protein, 9 aa, Artificial Sequence
  Quasi-synthetic sequence derived from human genome
FFLFRLCKK

SEQ ID NO: 1559 - protein, 9 aa, Artificial Sequence
  Quasi-synthetic sequence derived from human genome
LLLWKMRLF

SEQ ID NO: 1560 - protein, 9 aa, Artificial Sequence
  Quasi-synthetic sequence derived from human genome
RLFRLLYWW

SEQ ID NO: 1561 - protein, 9 aa, Artificial Sequence
  Quasi-synthetic sequence derived from human genome
LLLFMKLRW

SEQ ID NO: 1562 - protein, 9 aa, Artificial Sequence
  Quasi-synthetic sequence derived from human genome
RMKKKRLLL

SEQ ID NO: 1563 - protein, 9 aa, Artificial Sequence
  Quasi-synthetic sequence derived from human genome
KRMKFFFKR

SEQ ID NO: 1564 - protein, 9 aa, Artificial Sequence
  Quasi-synthetic sequence derived from human genome
FRVLLVKIR

SEQ ID NO: 1565 - protein, 9 aa, Artificial Sequence
  Quasi-synthetic sequence derived from human genome
RLFRPRLII

SEQ ID NO: 1566 - protein, 9 aa, Artificial Sequence
  Quasi-synthetic sequence derived from human genome
LRFIRRLIH

SEQ ID NO: 1567 - protein, 9 aa, Artificial Sequence
  Quasi-synthetic sequence derived from human genome
RLILVKVLR

SEQ ID NO: 1568 - protein, 9 aa, Artificial Sequence
  Quasi-synthetic sequence derived from human genome
RFRARILIF

SEQ ID NO: 1569 - protein, 9 aa, Artificial Sequence
  Quasi-synthetic sequence derived from human genome
PRLIRLIRL

SEQ ID NO: 1570 - protein, 9 aa, Artificial Sequence
  Quasi-synthetic sequence derived from human genome
VRRLVKILL

SEQ ID NO: 1571 - protein, 9 aa, Artificial Sequence
  Quasi-synthetic sequence derived from human genome
RLLAIRRIL

SEQ ID NO: 1572 - protein, 9 aa, Artificial Sequence
  Quasi-synthetic sequence derived from human genome
KILRVLRVL

SEQ ID NO: 1573 - protein, 9 aa, Artificial Sequence
  Quasi-synthetic sequence derived from human genome
FIIKLIKWL

SEQ ID NO: 1574 - protein, 9 aa, Artificial Sequence
  Quasi-synthetic sequence derived from human genome
RRVFIVFRK

SEQ ID NO: 1575 - protein, 9 aa, Artificial Sequence
  Quasi-synthetic sequence derived from human genome
LLVRVKRRI

SEQ ID NO: 1576 - protein, 9 aa, Artificial Sequence
  Quasi-synthetic sequence derived from human genome
KRRVIRLVL

SEQ ID NO: 1577 - protein, 9 aa, Artificial Sequence
  Quasi-synthetic sequence derived from human genome
FLRRRKRFK

SEQ ID NO: 1578 - protein, 9 aa, Artificial Sequence
  Quasi-synthetic sequence derived from human genome
RLFKKRRLR

SEQ ID NO: 1579 - protein, 9 aa, Artificial Sequence
  Quasi-synthetic sequence derived from human genome
RRYKLFLMF

SEQ ID NO: 1580 - protein, 9 aa, Artificial Sequence
  Quasi-synthetic sequence derived from human genome
FKMRFYRLL

SEQ ID NO: 1581 - protein, 9 aa, Artificial Sequence
  Quasi-synthetic sequence derived from human genome
LYKLMLRRF

SEQ ID NO: 1582 - protein, 9 aa, Artificial Sequence
  Quasi-synthetic sequence derived from human genome
YKRLFFRFM

SEQ ID NO: 1583 - protein, 9 aa, Artificial Sequence
  Quasi-synthetic sequence derived from human genome
LRRLLKYMF

SEQ ID NO: 1584 - protein, 9 aa, Artificial Sequence
  Quasi-synthetic sequence derived from human genome
RRYFMKRLL

SEQ ID NO: 1585 - protein, 9 aa, Artificial Sequence
  Quasi-synthetic sequence derived from human genome
RRLKRKLIV

SEQ ID NO: 1586 - protein, 9 aa, Artificial Sequence
  Quasi-synthetic sequence derived from human genome
LRKRIVFRK

SEQ ID NO: 1587 - protein, 9 aa, Artificial Sequence
  Quasi-synthetic sequence derived from human genome
RRRWHRWRL

SEQ ID NO: 1588 - protein, 9 aa, Artificial Sequence
  Quasi-synthetic sequence derived from human genome
IIILKRKYF

SEQ ID NO: 1589 - protein, 9 aa, Artificial Sequence
  Quasi-synthetic sequence derived from human genome
RWKLVIMLK

SEQ ID NO: 1590 - protein, 9 aa, Artificial Sequence
  Quasi-synthetic sequence derived from human genome
RILKLWKAW

SEQ ID NO: 1591 - protein, 9 aa, Artificial Sequence
  Quasi-synthetic sequence derived from human genome
RIFKPWKWR

SEQ ID NO: 1592 - protein, 9 aa, Artificial Sequence
  Quasi-synthetic sequence derived from human genome
IKIVKKLKL

SEQ ID NO: 1593 - protein, 9 aa, Artificial Sequence
  Quasi-synthetic sequence derived from human genome
LRRRLYVIF

SEQ ID NO: 1594 - protein, 9 aa, Artificial Sequence
  Quasi-synthetic sequence derived from human genome
LRLLRYIVR

SEQ ID NO: 1595 - protein, 9 aa, Artificial Sequence
  Quasi-synthetic sequence derived from human genome
FLKRILPLR

SEQ ID NO: 1596 - protein, 9 aa, Artificial Sequence
  Quasi-synthetic sequence derived from human genome
FLIRAFRLK

SEQ ID NO: 1597 - protein, 9 aa, Artificial Sequence
  Quasi-synthetic sequence derived from human genome
FKRRFFHLI

SEQ ID NO: 1598 - protein, 9 aa, Artificial Sequence
  Quasi-synthetic sequence derived from human genome
LRPLRIFKL

SEQ ID NO: 1599 - protein, 9 aa, Artificial Sequence
  Quasi-synthetic sequence derived from human genome
LKLRVKFFV

SEQ ID NO: 1600 - protein, 9 aa, Artificial Sequence
  Quasi-synthetic sequence derived from human genome
FRKLLKFVV

SEQ ID NO: 1601 - protein, 9 aa, Artificial Sequence
  Quasi-synthetic sequence derived from human genome
KLIHLLLRR

SEQ ID NO: 1602 - protein, 9 aa, Artificial Sequence
  Quasi-synthetic sequence derived from human genome
IKLLFLPRR

SEQ ID NO: 1603 - protein, 9 aa, Artificial Sequence
  Quasi-synthetic sequence derived from human genome
KFLVKLRVL

SEQ ID NO: 1604 - protein, 9 aa, Artificial Sequence
  Quasi-synthetic sequence derived from human genome
LRLRLAILK

SEQ ID NO: 1605 - protein, 9 aa, Artificial Sequence
  Quasi-synthetic sequence derived from human genome
IAFFLRKFR

SEQ ID NO: 1606 - protein, 9 aa, Artificial Sequence
  Quasi-synthetic sequence derived from human genome
LRRKALLIF

SEQ ID NO: 1607 - protein, 9 aa, Artificial Sequence
  Quasi-synthetic sequence derived from human genome
FLLRRKFIP

SEQ ID NO: 1608 - protein, 9 aa, Artificial Sequence
  Quasi-synthetic sequence derived from human genome
KLPLRLRIF

SEQ ID NO: 1609 - protein, 9 aa, Artificial Sequence
  Quasi-synthetic sequence derived from human genome
RKVLKLLLV

SEQ ID NO: 1610 - protein, 9 aa, Artificial Sequence
  Quasi-synthetic sequence derived from human genome
RLIHLRLKL

SEQ ID NO: 1611 - protein, 9 aa, Artificial Sequence
  Quasi-synthetic sequence derived from human genome
ALKLRLRFI

SEQ ID NO: 1612 - protein, 9 aa, Artificial Sequence
  Quasi-synthetic sequence derived from human genome
LRKLILRLH

SEQ ID NO: 1613 - protein, 9 aa, Artificial Sequence
  Quasi-synthetic sequence derived from human genome
LFLLWVRLK

SEQ ID NO: 1614 - protein, 9 aa, Artificial Sequence
  Quasi-synthetic sequence derived from human genome
IVRRYLLRR

SEQ ID NO: 1615 - protein, 9 aa, Artificial Sequence
  Quasi-synthetic sequence derived from human genome
YVLRRILRR

SEQ ID NO: 1616 - protein, 9 aa, Artificial Sequence
  Quasi-synthetic sequence derived from human genome
RIFFYVRRR

SEQ ID NO: 1617 - protein, 9 aa, Artificial Sequence
  Quasi-synthetic sequence derived from human genome
LLKRVLVRK

SEQ ID NO: 1618 - protein, 9 aa, Artificial Sequence
  Quasi-synthetic sequence derived from human genome
IPLLRKRRF

SEQ ID NO: 1619 - protein, 9 aa, Artificial Sequence
  Quasi-synthetic sequence derived from human genome
IFRRPRKLF

SEQ ID NO: 1620 - protein, 9 aa, Artificial Sequence
  Quasi-synthetic sequence derived from human genome
LRKRLARIL

SEQ ID NO: 1621 - protein, 9 aa, Artificial Sequence
  Quasi-synthetic sequence derived from human genome
VLKRRLVKL

SEQ ID NO: 1622 - protein, 9 aa, Artificial Sequence
  Quasi-synthetic sequence derived from human genome
FKHILFRRR

SEQ ID NO: 1623 - protein, 9 aa, Artificial Sequence
  Quasi-synthetic sequence derived from human genome
ILKRRRLPL

SEQ ID NO: 1624 - protein, 9 aa, Artificial Sequence
  Quasi-synthetic sequence derived from human genome
LRLKRPILR

SEQ ID NO: 1625 - protein, 9 aa, Artificial Sequence
  Quasi-synthetic sequence derived from human genome
RIKRRALLF

SEQ ID NO: 1626 - protein, 9 aa, Artificial Sequence
  Quasi-synthetic sequence derived from human genome
RKHRFILLR

SEQ ID NO: 1627 - protein, 9 aa, Artificial Sequence
  Quasi-synthetic sequence derived from human genome
LIKLRALRR

SEQ ID NO: 1628 - protein, 9 aa, Artificial Sequence
  Quasi-synthetic sequence derived from human genome
IRVWFIKVR

SEQ ID NO: 1629 - protein, 9 aa, Artificial Sequence
  Quasi-synthetic sequence derived from human genome
LLGLRLRRW

SEQ ID NO: 1630 - protein, 9 aa, Artificial Sequence
  Quasi-synthetic sequence derived from human genome
LLLLWRRRQ

SEQ ID NO: 1631 - protein, 9 aa, Artificial Sequence
  Quasi-synthetic sequence derived from human genome
LRLGRLWLR

SEQ ID NO: 1632 - protein, 9 aa, Artificial Sequence
  Quasi-synthetic sequence derived from human genome
RIWRVKRVI

SEQ ID NO: 1633 - protein, 9 aa, Artificial Sequence
  Quasi-synthetic sequence derived from human genome
FLSRFRWRR

SEQ ID NO: 1634 - protein, 9 aa, Artificial Sequence
  Quasi-synthetic sequence derived from human genome
FWRLRGLRR

SEQ ID NO: 1635 - protein, 9 aa, Artificial Sequence
  Quasi-synthetic sequence derived from human genome
GWRRLRRLL

SEQ ID NO: 1636 - protein, 9 aa, Artificial Sequence
  Quasi-synthetic sequence derived from human genome
RRGLLWRLR

SEQ ID NO: 1637 - protein, 9 aa, Artificial Sequence
  Quasi-synthetic sequence derived from human genome
RRLRRWGLL

SEQ ID NO: 1638 - protein, 9 aa, Artificial Sequence
  Quasi-synthetic sequence derived from human genome
FRFLRRRWG

SEQ ID NO: 1639 - protein, 9 aa, Artificial Sequence
  Quasi-synthetic sequence derived from human genome
WLFSRRRRL

SEQ ID NO: 1640 - protein, 9 aa, Artificial Sequence
  Quasi-synthetic sequence derived from human genome
LWQRRLRRL

SEQ ID NO: 1641 - protein, 9 aa, Artificial Sequence
  Quasi-synthetic sequence derived from human genome
KRIYRLWMF

SEQ ID NO: 1642 - protein, 9 aa, Artificial Sequence
  Quasi-synthetic sequence derived from human genome
KLKYFIKIF

SEQ ID NO: 1643 - protein, 9 aa, Artificial Sequence
  Quasi-synthetic sequence derived from human genome
IYLIKLKKL

SEQ ID NO: 1644 - protein, 9 aa, Artificial Sequence
  Quasi-synthetic sequence derived from human genome
LWYLRLLRL

SEQ ID NO: 1645 - protein, 9 aa, Artificial Sequence
  Quasi-synthetic sequence derived from human genome
MKRFLFLLL

SEQ ID NO: 1646 - protein, 9 aa, Artificial Sequence
  Quasi-synthetic sequence derived from human genome
VFYLRRFFK

SEQ ID NO: 1647 - protein, 9 aa, Artificial Sequence
  Quasi-synthetic sequence derived from human genome
LLRKLYVFR

SEQ ID NO: 1648 - protein, 9 aa, Artificial Sequence
  Quasi-synthetic sequence derived from human genome
LFRKLRLVY

SEQ ID NO: 1649 - protein, 9 aa, Artificial Sequence
  Quasi-synthetic sequence derived from human genome
FVFLRKRYL

SEQ ID NO: 1650 - protein, 9 aa, Artificial Sequence
  Quasi-synthetic sequence derived from human genome
LRLLVKLYR

SEQ ID NO: 1651 - protein, 9 aa, Artificial Sequence
  Quasi-synthetic sequence derived from human genome
LRLVKRLYF

SEQ ID NO: 1652 - protein, 9 aa, Artificial Sequence
  Quasi-synthetic sequence derived from human genome
RTKRLWFLW

SEQ ID NO: 1653 - protein, 9 aa, Artificial Sequence
  Quasi-synthetic sequence derived from human genome
RKFIYKIKL

SEQ ID NO: 1654 - protein, 9 aa, Artificial Sequence
  Quasi-synthetic sequence derived from human genome
LLFKFRAKF

SEQ ID NO: 1655 - protein, 9 aa, Artificial Sequence
  Quasi-synthetic sequence derived from human genome
FLKLPRLKL

SEQ ID NO: 1656 - protein, 9 aa, Artificial Sequence
  Quasi-synthetic sequence derived from human genome
AKRLKLLLF

SEQ ID NO: 1657 - protein, 9 aa, Artificial Sequence
  Quasi-synthetic sequence derived from human genome
KLLAKLRFL

SEQ ID NO: 1658 - protein, 9 aa, Artificial Sequence
  Quasi-synthetic sequence derived from human genome
LFFRKKLLH

SEQ ID NO: 1659 - protein, 9 aa, Artificial Sequence
  Quasi-synthetic sequence derived from human genome
RLHLKKFLL

SEQ ID NO: 1660 - protein, 9 aa, Artificial Sequence
  Quasi-synthetic sequence derived from human genome
FLALKLLKR

SEQ ID NO: 1661 - protein, 9 aa, Artificial Sequence
  Quasi-synthetic sequence derived from human genome
WRILKVLLW

SEQ ID NO: 1662 - protein, 9 aa, Artificial Sequence
  Quasi-synthetic sequence derived from human genome
ILILLIKKL

SEQ ID NO: 1663 - protein, 9 aa, Artificial Sequence
  Quasi-synthetic sequence derived from human genome
LRRKVKKLL

SEQ ID NO: 1664 - protein, 9 aa, Artificial Sequence
  Quasi-synthetic sequence derived from human genome
LVRMWRVRW

SEQ ID NO: 1665 - protein, 9 aa, Artificial Sequence
  Quasi-synthetic sequence derived from human genome
IVKRLIMRL

SEQ ID NO: 1666 - protein, 9 aa, Artificial Sequence
  Quasi-synthetic sequence derived from human genome
KLVLRIRIM

SEQ ID NO: 1667 - protein, 9 aa, Artificial Sequence
  Quasi-synthetic sequence derived from human genome
RLRLTRLLL

SEQ ID NO: 1668 - protein, 9 aa, Artificial Sequence
  Quasi-synthetic sequence derived from human genome
RTLLRLLLR

SEQ ID NO: 1669 - protein, 9 aa, Artificial Sequence
  Quasi-synthetic sequence derived from human genome
RTLFRRLLF

SEQ ID NO: 1670 - protein, 9 aa, Artificial Sequence
  Quasi-synthetic sequence derived from human genome
LFILFRVLR

SEQ ID NO: 1671 - protein, 9 aa, Artificial Sequence
  Quasi-synthetic sequence derived from human genome
LLRLLLRIV

SEQ ID NO: 1672 - protein, 9 aa, Artificial Sequence
  Quasi-synthetic sequence derived from human genome
RLRVLLRYK

SEQ ID NO: 1673 - protein, 9 aa, Artificial Sequence
  Quasi-synthetic sequence derived from human genome
VLLLKYRRR

SEQ ID NO: 1674 - protein, 9 aa, Artificial Sequence
  Quasi-synthetic sequence derived from human genome
FRALLLKKR

SEQ ID NO: 1675 - protein, 9 aa, Artificial Sequence
  Quasi-synthetic sequence derived from human genome
LRPLKKFLR

SEQ ID NO: 1676 - protein, 9 aa, Artificial Sequence
  Quasi-synthetic sequence derived from human genome
FALLRRKLK

SEQ ID NO: 1677 - protein, 9 aa, Artificial Sequence
  Quasi-synthetic sequence derived from human genome
LKLPFLKRR

SEQ ID NO: 1678 - protein, 9 aa, Artificial Sequence
  Quasi-synthetic sequence derived from human genome
LRALKRLFK

SEQ ID NO: 1679 - protein, 9 aa, Artificial Sequence
  Quasi-synthetic sequence derived from human genome
LLLCRWKKK

SEQ ID NO: 1680 - protein, 9 aa, Artificial Sequence
  Quasi-synthetic sequence derived from human genome
LKRKRPLLL

SEQ ID NO: 1681 - protein, 9 aa, Artificial Sequence
  Quasi-synthetic sequence derived from human genome
RWILQFRRW

SEQ ID NO: 1682 - protein, 9 aa, Artificial Sequence
  Quasi-synthetic sequence derived from human genome
RRWSWILRL

SEQ ID NO: 1683 - protein, 9 aa, Artificial Sequence
  Quasi-synthetic sequence derived from human genome
LILGRRWRW

SEQ ID NO: 1684 - protein, 9 aa, Artificial Sequence
  Quasi-synthetic sequence derived from human genome
FRWLWRQRI

SEQ ID NO: 1685 - protein, 9 aa, Artificial Sequence
  Quasi-synthetic sequence derived from human genome
RFKYMWKLL

SEQ ID NO: 1686 - protein, 9 aa, Artificial Sequence
  Quasi-synthetic sequence derived from human genome
IMRRVLRKI

SEQ ID NO: 1687 - protein, 9 aa, Artificial Sequence
  Quasi-synthetic sequence derived from human genome
RRLIMKRIV

SEQ ID NO: 1688 - protein, 9 aa, Artificial Sequence
  Quasi-synthetic sequence derived from human genome
RRFLRTLRL

SEQ ID NO: 1689 - protein, 9 aa, Artificial Sequence
  Quasi-synthetic sequence derived from human genome
LRTLLRRRL

SEQ ID NO: 1690 - protein, 9 aa, Artificial Sequence
  Quasi-synthetic sequence derived from human genome
WIHILRKRR

SEQ ID NO: 1691 - protein, 9 aa, Artificial Sequence
  Quasi-synthetic sequence derived from human genome
LTRRLRFRL

SEQ ID NO: 1692 - protein, 9 aa, Artificial Sequence
  Quasi-synthetic sequence derived from human genome
RLFMILWLK

SEQ ID NO: 1693 - protein, 9 aa, Artificial Sequence
  Quasi-synthetic sequence derived from human genome
WKRWKKRYF

SEQ ID NO: 1694 - protein, 9 aa, Artificial Sequence
  Quasi-synthetic sequence derived from human genome
FKFVFFLRL

SEQ ID NO: 1695 - protein, 9 aa, Artificial Sequence
  Quasi-synthetic sequence derived from human genome
KCIFRLRIR

SEQ ID NO: 1696 - protein, 9 aa, Artificial Sequence
  Quasi-synthetic sequence derived from human genome
KFLKKILKY

SEQ ID NO: 1697 - protein, 9 aa, Artificial Sequence
  Quasi-synthetic sequence derived from human genome
LKIYKKFLK

SEQ ID NO: 1698 - protein, 9 aa, Artificial Sequence
  Quasi-synthetic sequence derived from human genome
KIFLKYLKK

SEQ ID NO: 1699 - protein, 9 aa, Artificial Sequence
  Quasi-synthetic sequence derived from human genome
IVRKLKLLM

SEQ ID NO: 1700 - protein, 9 aa, Artificial Sequence
  Quasi-synthetic sequence derived from human genome
RVLMKLFIK

SEQ ID NO: 1701 - protein, 9 aa, Artificial Sequence
  Quasi-synthetic sequence derived from human genome
IVFWKYRRF

SEQ ID NO: 1702 - protein, 9 aa, Artificial Sequence
  Quasi-synthetic sequence derived from human genome
MRILLKKVF

SEQ ID NO: 1703 - protein, 9 aa, Artificial Sequence
  Quasi-synthetic sequence derived from human genome
VRIRIFWLL

SEQ ID NO: 1704 - protein, 9 aa, Artificial Sequence
  Quasi-synthetic sequence derived from human genome
ILKKHLRWL

SEQ ID NO: 1705 - protein, 9 aa, Artificial Sequence
  Quasi-synthetic sequence derived from human genome
KRLRYKRLL

SEQ ID NO: 1706 - protein, 9 aa, Artificial Sequence
  Quasi-synthetic sequence derived from human genome
RLFRWILTR

SEQ ID NO: 1707 - protein, 9 aa, Artificial Sequence
  Quasi-synthetic sequence derived from human genome
RLWIRTLRL

SEQ ID NO: 1708 - protein, 9 aa, Artificial Sequence
  Quasi-synthetic sequence derived from human genome
LWGFLRWRK

SEQ ID NO: 1709 - protein, 9 aa, Artificial Sequence
  Quasi-synthetic sequence derived from human genome
KLLRWLRNW

SEQ ID NO: 1710 - protein, 9 aa, Artificial Sequence
  Quasi-synthetic sequence derived from human genome
LLLLICKKR

SEQ ID NO: 1711 - protein, 9 aa, Artificial Sequence
  Quasi-synthetic sequence derived from human genome
LRGWFLWKR

SEQ ID NO: 1712 - protein, 9 aa, Artificial Sequence
  Quasi-synthetic sequence derived from human genome
KCILKFFLR

SEQ ID NO: 1713 - protein, 9 aa, Artificial Sequence
  Quasi-synthetic sequence derived from human genome
FRLWRWLQK

SEQ ID NO: 1714 - protein, 9 aa, Artificial Sequence
  Quasi-synthetic sequence derived from human genome
IFLRLCLKK

SEQ ID NO: 1715 - protein, 9 aa, Artificial Sequence
  Quasi-synthetic sequence derived from human genome
LLKKLFCRI

SEQ ID NO: 1716 - protein, 9 aa, Artificial Sequence
  Quasi-synthetic sequence derived from human genome
LFLWLMKLK

SEQ ID NO: 1717 - protein, 9 aa, Artificial Sequence
  Quasi-synthetic sequence derived from human genome
KFRYLWLFW

SEQ ID NO: 1718 - protein, 9 aa, Artificial Sequence
  Quasi-synthetic sequence derived from human genome
FIIFRWWKM

SEQ ID NO: 1719 - protein, 9 aa, Artificial Sequence
  Quasi-synthetic sequence derived from human genome
RRRLYIIMR

SEQ ID NO: 1720 - protein, 9 aa, Artificial Sequence
  Quasi-synthetic sequence derived from human genome
FLLLFLYRR

SEQ ID NO: 1721 - protein, 9 aa, Artificial Sequence
  Quasi-synthetic sequence derived from human genome
IRVLVIRKL

SEQ ID NO: 1722 - protein, 9 aa, Artificial Sequence
  Quasi-synthetic sequence derived from human genome
RIIHRLLRI

SEQ ID NO: 1723 - protein, 9 aa, Artificial Sequence
  Quasi-synthetic sequence derived from human genome
LRVVRLIKI

SEQ ID NO: 1724 - protein, 9 aa, Artificial Sequence
  Quasi-synthetic sequence derived from human genome
RLLRRLGLL

SEQ ID NO: 1725 - protein, 9 aa, Artificial Sequence
  Quasi-synthetic sequence derived from human genome
RRLLGLLRF

SEQ ID NO: 1726 - protein, 9 aa, Artificial Sequence
  Quasi-synthetic sequence derived from human genome
RLLRRLQLL

SEQ ID NO: 1727 - protein, 9 aa, Artificial Sequence
  Quasi-synthetic sequence derived from human genome
FLRFRRSLL

SEQ ID NO: 1728 - protein, 9 aa, Artificial Sequence
  Quasi-synthetic sequence derived from human genome
LRLRGRLLL

SEQ ID NO: 1729 - protein, 9 aa, Artificial Sequence
  Quasi-synthetic sequence derived from human genome
LLRLLRGRL

SEQ ID NO: 1730 - protein, 9 aa, Artificial Sequence
  Quasi-synthetic sequence derived from human genome
FRLFQRRLL

SEQ ID NO: 1731 - protein, 9 aa, Artificial Sequence
  Quasi-synthetic sequence derived from human genome
SLRRLLRLL

SEQ ID NO: 1732 - protein, 9 aa, Artificial Sequence
  Quasi-synthetic sequence derived from human genome
RLLNRRLLL

SEQ ID NO: 1733 - protein, 9 aa, Artificial Sequence
  Quasi-synthetic sequence derived from human genome
LLFRRLSRF

SEQ ID NO: 1734 - protein, 9 aa, Artificial Sequence
  Quasi-synthetic sequence derived from human genome
LLLLLSRRR

SEQ ID NO: 1735 - protein, 9 aa, Artificial Sequence
  Quasi-synthetic sequence derived from human genome
RSFLLRRLL

SEQ ID NO: 1736 - protein, 9 aa, Artificial Sequence
  Quasi-synthetic sequence derived from human genome
RLSRLLLRL

SEQ ID NO: 1737 - protein, 9 aa, Artificial Sequence
  Quasi-synthetic sequence derived from human genome
RRLFSRFLL

SEQ ID NO: 1738 - protein, 9 aa, Artificial Sequence
  Quasi-synthetic sequence derived from human genome
LLLLLGRRR

SEQ ID NO: 1739 - protein, 9 aa, Artificial Sequence
  Quasi-synthetic sequence derived from human genome
GRRRLLLLL

SEQ ID NO: 1740 - protein, 9 aa, Artificial Sequence
  Quasi-synthetic sequence derived from human genome
LRYIVKWRR

SEQ ID NO: 1741 - protein, 9 aa, Artificial Sequence
  Quasi-synthetic sequence derived from human genome
WIRLLKRAK

SEQ ID NO: 1742 - protein, 9 aa, Artificial Sequence
  Quasi-synthetic sequence derived from human genome
LIWAKFKRR

SEQ ID NO: 1743 - protein, 9 aa, Artificial Sequence
  Quasi-synthetic sequence derived from human genome
RLLWKLVIL

SEQ ID NO: 1744 - protein, 9 aa, Artificial Sequence
  Quasi-synthetic sequence derived from human genome
IKLLVRWLL

SEQ ID NO: 1745 - protein, 9 aa, Artificial Sequence
  Quasi-synthetic sequence derived from human genome
LMYKRILLR

SEQ ID NO: 1746 - protein, 9 aa, Artificial Sequence
  Quasi-synthetic sequence derived from human genome
RLLKYMFIR

SEQ ID NO: 1747 - protein, 9 aa, Artificial Sequence
  Quasi-synthetic sequence derived from human genome
YLIMLRRFK

SEQ ID NO: 1748 - protein, 9 aa, Artificial Sequence
  Quasi-synthetic sequence derived from human genome
LVYLKWKRF

SEQ ID NO: 1749 - protein, 9 aa, Artificial Sequence
  Quasi-synthetic sequence derived from human genome
FLYLKWRVK

SEQ ID NO: 1750 - protein, 9 aa, Artificial Sequence
  Quasi-synthetic sequence derived from human genome
LLRARWRRR

SEQ ID NO: 1751 - protein, 9 aa, Artificial Sequence
  Quasi-synthetic sequence derived from human genome
LLRRAWRRR

SEQ ID NO: 1752 - protein, 9 aa, Artificial Sequence
  Quasi-synthetic sequence derived from human genome
WRRRKSLWL

SEQ ID NO: 1753 - protein, 9 aa, Artificial Sequence
  Quasi-synthetic sequence derived from human genome
RKCLLLKIR

SEQ ID NO: 1754 - protein, 9 aa, Artificial Sequence
  Quasi-synthetic sequence derived from human genome
LRRWKRNWF

SEQ ID NO: 1755 - protein, 9 aa, Artificial Sequence
  Quasi-synthetic sequence derived from human genome
KTRLFWLLR

SEQ ID NO: 1756 - protein, 9 aa, Artificial Sequence
  Quasi-synthetic sequence derived from human genome
TLFKWLRLR

SEQ ID NO: 1757 - protein, 9 aa, Artificial Sequence
  Quasi-synthetic sequence derived from human genome
FLLTRWRKF

SEQ ID NO: 1758 - protein, 9 aa, Artificial Sequence
  Quasi-synthetic sequence derived from human genome
RLRTLKLWL

SEQ ID NO: 1759 - protein, 9 aa, Artificial Sequence
  Quasi-synthetic sequence derived from human genome
KFWRTRFLL

SEQ ID NO: 1760 - protein, 9 aa, Artificial Sequence
  Quasi-synthetic sequence derived from human genome
WILRKAWKI

SEQ ID NO: 1761 - protein, 9 aa, Artificial Sequence
  Quasi-synthetic sequence derived from human genome
RRILRRRKI

SEQ ID NO: 1762 - protein, 9 aa, Artificial Sequence
  Quasi-synthetic sequence derived from human genome
LFRRCRRRL

SEQ ID NO: 1763 - protein, 9 aa, Artificial Sequence
  Quasi-synthetic sequence derived from human genome
RFGRRRLLL

SEQ ID NO: 1764 - protein, 9 aa, Artificial Sequence
  Quasi-synthetic sequence derived from human genome
LRSRFRLRL

SEQ ID NO: 1765 - protein, 9 aa, Artificial Sequence
  Quasi-synthetic sequence derived from human genome
RLLRLQRRL

SEQ ID NO: 1766 - protein, 9 aa, Artificial Sequence
  Quasi-synthetic sequence derived from human genome
LRRLRGLLR

SEQ ID NO: 1767 - protein, 9 aa, Artificial Sequence
  Quasi-synthetic sequence derived from human genome
LRRRQLLLR

SEQ ID NO: 1768 - protein, 9 aa, Artificial Sequence
  Quasi-synthetic sequence derived from human genome
LRGRLLFRR

SEQ ID NO: 1769 - protein, 9 aa, Artificial Sequence
  Quasi-synthetic sequence derived from human genome
LLRSFFRRR

SEQ ID NO: 1770 - protein, 9 aa, Artificial Sequence
  Quasi-synthetic sequence derived from human genome
LRLLRGLRR

SEQ ID NO: 1771 - protein, 9 aa, Artificial Sequence
  Quasi-synthetic sequence derived from human genome
FRRLRQLLR

SEQ ID NO: 1772 - protein, 9 aa, Artificial Sequence
  Quasi-synthetic sequence derived from human genome
RRLLGLLRR

SEQ ID NO: 1773 - protein, 9 aa, Artificial Sequence
  Quasi-synthetic sequence derived from human genome
LRRLGLRLR

SEQ ID NO: 1774 - protein, 9 aa, Artificial Sequence
  Quasi-synthetic sequence derived from human genome
FRLRFRQLR

SEQ ID NO: 1775 - protein, 9 aa, Artificial Sequence
  Quasi-synthetic sequence derived from human genome
FLIFRKLML

SEQ ID NO: 1776 - protein, 9 aa, Artificial Sequence
  Quasi-synthetic sequence derived from human genome
FLLRIFLKM

SEQ ID NO: 1777 - protein, 9 aa, Artificial Sequence
  Quasi-synthetic sequence derived from human genome
IFRKFLLML

SEQ ID NO: 1778 - protein, 9 aa, Artificial Sequence
  Quasi-synthetic sequence derived from human genome
LLWFRRLYI

SEQ ID NO: 1779 - protein, 9 aa, Artificial Sequence
  Quasi-synthetic sequence derived from human genome
FRFKFLMLI

SEQ ID NO: 1780 - protein, 9 aa, Artificial Sequence
  Quasi-synthetic sequence derived from human genome
KVLILVLKR

SEQ ID NO: 1781 - protein, 9 aa, Artificial Sequence
  Quasi-synthetic sequence derived from human genome
LRKRPLIFI

SEQ ID NO: 1782 - protein, 9 aa, Artificial Sequence
  Quasi-synthetic sequence derived from human genome
RKFFFIRAI

SEQ ID NO: 1783 - protein, 9 aa, Artificial Sequence
  Quasi-synthetic sequence derived from human genome
FLRKRILIA

SEQ ID NO: 1784 - protein, 9 aa, Artificial Sequence
  Quasi-synthetic sequence derived from human genome
RILRILKLA

SEQ ID NO: 1785 - protein, 9 aa, Artificial Sequence
  Quasi-synthetic sequence derived from human genome
RRILFIKHF

SEQ ID NO: 1786 - protein, 9 aa, Artificial Sequence
  Quasi-synthetic sequence derived from human genome
RKLIILHLR

SEQ ID NO: 1787 - protein, 9 aa, Artificial Sequence
  Quasi-synthetic sequence derived from human genome
RIFRILKLA

SEQ ID NO: 1788 - protein, 9 aa, Artificial Sequence
  Quasi-synthetic sequence derived from human genome
LKFHIRRFI

SEQ ID NO: 1789 - protein, 9 aa, Artificial Sequence
  Quasi-synthetic sequence derived from human genome
IFRILKLAR

SEQ ID NO: 1790 - protein, 9 aa, Artificial Sequence
  Quasi-synthetic sequence derived from human genome
LFIKRVVLK

SEQ ID NO: 1791 - protein, 9 aa, Artificial Sequence
  Quasi-synthetic sequence derived from human genome
RPRVLLRWW

SEQ ID NO: 1792 - protein, 9 aa, Artificial Sequence
  Quasi-synthetic sequence derived from human genome
LIIRRKPLF

SEQ ID NO: 1793 - protein, 9 aa, Artificial Sequence
  Quasi-synthetic sequence derived from human genome
KRIIRPFFL

SEQ ID NO: 1794 - protein, 9 aa, Artificial Sequence
  Quasi-synthetic sequence derived from human genome
IILPFKRRL

SEQ ID NO: 1795 - protein, 9 aa, Artificial Sequence
  Quasi-synthetic sequence derived from human genome
KFIILRPLR

SEQ ID NO: 1796 - protein, 9 aa, Artificial Sequence
  Quasi-synthetic sequence derived from human genome
LIIMLRIWR

SEQ ID NO: 1797 - protein, 9 aa, Artificial Sequence
  Quasi-synthetic sequence derived from human genome
WMFRIRIIL

SEQ ID NO: 1798 - protein, 9 aa, Artificial Sequence
  Quasi-synthetic sequence derived from human genome
MRKFYFRRI

SEQ ID NO: 1799 - protein, 9 aa, Artificial Sequence
  Quasi-synthetic sequence derived from human genome
RYRRRYWIL

SEQ ID NO: 1800 - protein, 9 aa, Artificial Sequence
  Quasi-synthetic sequence derived from human genome
LKRMFRRIY

SEQ ID NO: 1801 - protein, 9 aa, Artificial Sequence
  Quasi-synthetic sequence derived from human genome
LKKRLMVKF

SEQ ID NO: 1802 - protein, 9 aa, Artificial Sequence
  Quasi-synthetic sequence derived from human genome
RKKKLMVFF

SEQ ID NO: 1803 - protein, 9 aa, Artificial Sequence
  Quasi-synthetic sequence derived from human genome
MLKRVKKLL

SEQ ID NO: 1804 - protein, 9 aa, Artificial Sequence
  Quasi-synthetic sequence derived from human genome
RWFRVLLCR

SEQ ID NO: 1805 - protein, 9 aa, Artificial Sequence
  Quasi-synthetic sequence derived from human genome
RILFWFGRR

SEQ ID NO: 1806 - protein, 9 aa, Artificial Sequence
  Quasi-synthetic sequence derived from human genome
FGRRFILRW

SEQ ID NO: 1807 - protein, 9 aa, Artificial Sequence
  Quasi-synthetic sequence derived from human genome
RRRLLVWLC

SEQ ID NO: 1808 - protein, 9 aa, Artificial Sequence
  Quasi-synthetic sequence derived from human genome
LRLINRWRL

SEQ ID NO: 1809 - protein, 9 aa, Artificial Sequence
  Quasi-synthetic sequence derived from human genome
KLWRKKLHL

SEQ ID NO: 1810 - protein, 9 aa, Artificial Sequence
  Quasi-synthetic sequence derived from human genome
WLLKRLKAK

SEQ ID NO: 1811 - protein, 9 aa, Artificial Sequence
  Quasi-synthetic sequence derived from human genome
FKKKLFWRA

SEQ ID NO: 1812 - protein, 9 aa, Artificial Sequence
  Quasi-synthetic sequence derived from human genome
LLKKRKWPL

SEQ ID NO: 1813 - protein, 9 aa, Artificial Sequence
  Quasi-synthetic sequence derived from human genome
KKKWHLLRL

SEQ ID NO: 1814 - protein, 9 aa, Artificial Sequence
  Quasi-synthetic sequence derived from human genome
AFRLWLKKK

SEQ ID NO: 1815 - protein, 9 aa, Artificial Sequence
  Quasi-synthetic sequence derived from human genome
LLWRKKHKL

SEQ ID NO: 1816 - protein, 9 aa, Artificial Sequence
  Quasi-synthetic sequence derived from human genome
LYLRMFKLK

SEQ ID NO: 1817 - protein, 9 aa, Artificial Sequence
  Quasi-synthetic sequence derived from human genome
KRYLWFYRF

SEQ ID NO: 1818 - protein, 9 aa, Artificial Sequence
  Quasi-synthetic sequence derived from human genome
MYFRKFFKF

SEQ ID NO: 1819 - protein, 9 aa, Artificial Sequence
  Quasi-synthetic sequence derived from human genome
LFRIVFRIF

SEQ ID NO: 1820 - protein, 9 aa, Artificial Sequence
  Quasi-synthetic sequence derived from human genome
LIVFRFLRI

SEQ ID NO: 1821 - protein, 9 aa, Artificial Sequence
  Quasi-synthetic sequence derived from human genome
FLLLIIRRV

SEQ ID NO: 1822 - protein, 9 aa, Artificial Sequence
  Quasi-synthetic sequence derived from human genome
TRLRLWLKR

SEQ ID NO: 1823 - protein, 9 aa, Artificial Sequence
  Quasi-synthetic sequence derived from human genome
RRRFFWKTL

SEQ ID NO: 1824 - protein, 9 aa, Artificial Sequence
  Quasi-synthetic sequence derived from human genome
YFLKLLWLR

SEQ ID NO: 1825 - protein, 9 aa, Artificial Sequence
  Quasi-synthetic sequence derived from human genome
LAMLWRRRF

SEQ ID NO: 1826 - protein, 9 aa, Artificial Sequence
  Quasi-synthetic sequence derived from human genome
FVRYLLKRI

SEQ ID NO: 1827 - protein, 9 aa, Artificial Sequence
  Quasi-synthetic sequence derived from human genome
MRLLRRWAF

SEQ ID NO: 1828 - protein, 9 aa, Artificial Sequence
  Quasi-synthetic sequence derived from human genome
RRLMRPLWL

SEQ ID NO: 1829 - protein, 9 aa, Artificial Sequence
  Quasi-synthetic sequence derived from human genome
TWKRRWFIL

SEQ ID NO: 1830 - protein, 9 aa, Artificial Sequence
  Quasi-synthetic sequence derived from human genome
LILLVRYRK

SEQ ID NO: 1831 - protein, 9 aa, Artificial Sequence
  Quasi-synthetic sequence derived from human genome
LFIWLKMRI

SEQ ID NO: 1832 - protein, 9 aa, Artificial Sequence
  Quasi-synthetic sequence derived from human genome
RKLHFRRII

SEQ ID NO: 1833 - protein, 9 aa, Artificial Sequence
  Quasi-synthetic sequence derived from human genome
RRWVPRRLW

SEQ ID NO: 1834 - protein, 9 aa, Artificial Sequence
  Quasi-synthetic sequence derived from human genome
IVFRKKVFR

SEQ ID NO: 1835 - protein, 9 aa, Artificial Sequence
  Quasi-synthetic sequence derived from human genome
WWWFFSRKK

SEQ ID NO: 1836 - protein, 9 aa, Artificial Sequence
  Quasi-synthetic sequence derived from human genome
FLPKIFFRK

SEQ ID NO: 1837 - protein, 9 aa, Artificial Sequence
  Quasi-synthetic sequence derived from human genome
LKFKHIFFR

SEQ ID NO: 1838 - protein, 9 aa, Artificial Sequence
  Quasi-synthetic sequence derived from human genome
RLFFKIKPL

SEQ ID NO: 1839 - protein, 9 aa, Artificial Sequence
  Quasi-synthetic sequence derived from human genome
LLKHKFILR

SEQ ID NO: 1840 - protein, 9 aa, Artificial Sequence
  Quasi-synthetic sequence derived from human genome
LVLKLKKLV

SEQ ID NO: 1841 - protein, 9 aa, Artificial Sequence
  Quasi-synthetic sequence derived from human genome
LIRLKKLLH

SEQ ID NO: 1842 - protein, 9 aa, Artificial Sequence
  Quasi-synthetic sequence derived from human genome
LILRLKLHK

SEQ ID NO: 1843 - protein, 9 aa, Artificial Sequence
  Quasi-synthetic sequence derived from human genome
LPLKRLILK

SEQ ID NO: 1844 - protein, 9 aa, Artificial Sequence
  Quasi-synthetic sequence derived from human genome
KFRLPLKLI

SEQ ID NO: 1845 - protein, 9 aa, Artificial Sequence
  Quasi-synthetic sequence derived from human genome
KILLRLLKH

SEQ ID NO: 1846 - protein, 9 aa, Artificial Sequence
  Quasi-synthetic sequence derived from human genome
IAFFLRKFK

SEQ ID NO: 1847 - protein, 9 aa, Artificial Sequence
  Quasi-synthetic sequence derived from human genome
RKRVIKILR

SEQ ID NO: 1848 - protein, 9 aa, Artificial Sequence
  Quasi-synthetic sequence derived from human genome
ILKRVRRKI

SEQ ID NO: 1849 - protein, 9 aa, Artificial Sequence
  Quasi-synthetic sequence derived from human genome
LRRRTILLL

SEQ ID NO: 1850 - protein, 9 aa, Artificial Sequence
  Quasi-synthetic sequence derived from human genome
FFLTRRRIF

SEQ ID NO: 1851 - protein, 9 aa, Artificial Sequence
  Quasi-synthetic sequence derived from human genome
LRRTRLILF

SEQ ID NO: 1852 - protein, 9 aa, Artificial Sequence
  Quasi-synthetic sequence derived from human genome
RKLFIVLLL

SEQ ID NO: 1853 - protein, 9 aa, Artificial Sequence
  Quasi-synthetic sequence derived from human genome
IFKLFVFRL

SEQ ID NO: 1854 - protein, 9 aa, Artificial Sequence
  Quasi-synthetic sequence derived from human genome
LFLRIKFFV

SEQ ID NO: 1855 - protein, 9 aa, Artificial Sequence
  Quasi-synthetic sequence derived from human genome
RKLILFLVF

SEQ ID NO: 1856 - protein, 9 aa, Artificial Sequence
  Quasi-synthetic sequence derived from human genome
FLSWRRKLL

SEQ ID NO: 1857 - protein, 9 aa, Artificial Sequence
  Quasi-synthetic sequence derived from human genome
FLLQRKRLW

SEQ ID NO: 1858 - protein, 9 aa, Artificial Sequence
  Quasi-synthetic sequence derived from human genome
LLRKRWFQL

SEQ ID NO: 1859 - protein, 9 aa, Artificial Sequence
  Quasi-synthetic sequence derived from human genome
RKLFQWRLL

SEQ ID NO: 1860 - protein, 9 aa, Artificial Sequence
  Quasi-synthetic sequence derived from human genome
FLVWRRCRR

SEQ ID NO: 1861 - protein, 9 aa, Artificial Sequence
  Quasi-synthetic sequence derived from human genome
RRLIIIWVL

SEQ ID NO: 1862 - protein, 9 aa, Artificial Sequence
  Quasi-synthetic sequence derived from human genome
KIIILRCLR

SEQ ID NO: 1863 - protein, 9 aa, Artificial Sequence
  Quasi-synthetic sequence derived from human genome
WKKYWFVLK

SEQ ID NO: 1864 - protein, 9 aa, Artificial Sequence
  Quasi-synthetic sequence derived from human genome
RWKKRYFKL

SEQ ID NO: 1865 - protein, 9 aa, Artificial Sequence
  Quasi-synthetic sequence derived from human genome
RMKWKKIVL

SEQ ID NO: 1866 - protein, 9 aa, Artificial Sequence
  Quasi-synthetic sequence derived from human genome
IRFWLFWKY

SEQ ID NO: 1867 - protein, 9 aa, Artificial Sequence
  Quasi-synthetic sequence derived from human genome
KIFKPWKWR

SEQ ID NO: 1868 - protein, 9 aa, Artificial Sequence
  Quasi-synthetic sequence derived from human genome
RILRYFRFY

SEQ ID NO: 1869 - protein, 9 aa, Artificial Sequence
  Quasi-synthetic sequence derived from human genome
YFRIRFYFR

SEQ ID NO: 1870 - protein, 9 aa, Artificial Sequence
  Quasi-synthetic sequence derived from human genome
KVRFKFFYL

SEQ ID NO: 1871 - protein, 9 aa, Artificial Sequence
  Quasi-synthetic sequence derived from human genome
LVLFKYKRL

SEQ ID NO: 1872 - protein, 9 aa, Artificial Sequence
  Quasi-synthetic sequence derived from human genome
VLRFKYLLK

SEQ ID NO: 1873 - protein, 9 aa, Artificial Sequence
  Quasi-synthetic sequence derived from human genome
KVRLYFLKF

SEQ ID NO: 1874 - protein, 9 aa, Artificial Sequence
  Quasi-synthetic sequence derived from human genome
PLKKFLLKL

SEQ ID NO: 1875 - protein, 9 aa, Artificial Sequence
  Quasi-synthetic sequence derived from human genome
KLAKLLKLL

SEQ ID NO: 1876 - protein, 9 aa, Artificial Sequence
  Quasi-synthetic sequence derived from human genome
KPLLLKLLK

SEQ ID NO: 1877 - protein, 9 aa, Artificial Sequence
  Quasi-synthetic sequence derived from human genome
FKLLKKLAF

SEQ ID NO: 1878 - protein, 9 aa, Artificial Sequence
  Quasi-synthetic sequence derived from human genome
FLKKFHFLK

SEQ ID NO: 1879 - protein, 9 aa, Artificial Sequence
  Quasi-synthetic sequence derived from human genome
FKHLKKLLL

SEQ ID NO: 1880 - protein, 9 aa, Artificial Sequence
  Quasi-synthetic sequence derived from human genome
FIFLRRYFL

SEQ ID NO: 1881 - protein, 9 aa, Artificial Sequence
  Quasi-synthetic sequence derived from human genome
VRKLILRRY

SEQ ID NO: 1882 - protein, 9 aa, Artificial Sequence
  Quasi-synthetic sequence derived from human genome
RRLVKRLYI

SEQ ID NO: 1883 - protein, 9 aa, Artificial Sequence
  Quasi-synthetic sequence derived from human genome
LRRFIKRVY

SEQ ID NO: 1884 - protein, 9 aa, Artificial Sequence
  Quasi-synthetic sequence derived from human genome
LKIVYRRFR

SEQ ID NO: 1885 - protein, 9 aa, Artificial Sequence
  Quasi-synthetic sequence derived from human genome
KIRRLFHKL

SEQ ID NO: 1886 - protein, 9 aa, Artificial Sequence
  Quasi-synthetic sequence derived from human genome
WLKKCLKRI

SEQ ID NO: 1887 - protein, 9 aa, Artificial Sequence
  Quasi-synthetic sequence derived from human genome
LLKRKHRFI

SEQ ID NO: 1888 - protein, 9 aa, Artificial Sequence
  Quasi-synthetic sequence derived from human genome
LAKRILRFK

SEQ ID NO: 1889 - protein, 9 aa, Artificial Sequence
  Quasi-synthetic sequence derived from human genome
ARLRLKKIF

SEQ ID NO: 1890 - protein, 9 aa, Artificial Sequence
  Quasi-synthetic sequence derived from human genome
LKFRKFIHR

SEQ ID NO: 1891 - protein, 9 aa, Artificial Sequence
  Quasi-synthetic sequence derived from human genome
KIRLLLRKH

SEQ ID NO: 1892 - protein, 9 aa, Artificial Sequence
  Quasi-synthetic sequence derived from human genome
FLVKLRKVK

SEQ ID NO: 1893 - protein, 9 aa, Artificial Sequence
  Quasi-synthetic sequence derived from human genome
IRFKLKRPL

SEQ ID NO: 1894 - protein, 9 aa, Artificial Sequence
  Quasi-synthetic sequence derived from human genome
RKLILPKRL

SEQ ID NO: 1895 - protein, 9 aa, Artificial Sequence
  Quasi-synthetic sequence derived from human genome
ILLLPKRKR

SEQ ID NO: 1896 - protein, 9 aa, Artificial Sequence
  Quasi-synthetic sequence derived from human genome
KVLLVRLKK

SEQ ID NO: 1897 - protein, 9 aa, Artificial Sequence
  Quasi-synthetic sequence derived from human genome
FAFRRKLKI

SEQ ID NO: 1898 - protein, 9 aa, Artificial Sequence
  Quasi-synthetic sequence derived from human genome
PILRKRKLL

SEQ ID NO: 1899 - protein, 9 aa, Artificial Sequence
  Quasi-synthetic sequence derived from human genome
LPRKLKRIL

SEQ ID NO: 1900 - protein, 9 aa, Artificial Sequence
  Quasi-synthetic sequence derived from human genome
IKRFRKLLP

SEQ ID NO: 1901 - protein, 9 aa, Artificial Sequence
  Quasi-synthetic sequence derived from human genome
RLRKLKFAI

SEQ ID NO: 1902 - protein, 9 aa, Artificial Sequence
  Quasi-synthetic sequence derived from human genome
FLMKRKIIV

SEQ ID NO: 1903 - protein, 9 aa, Artificial Sequence
  Quasi-synthetic sequence derived from human genome
IKKIRFLVM

SEQ ID NO: 1904 - protein, 9 aa, Artificial Sequence
  Quasi-synthetic sequence derived from human genome
FRKFIWVIL

SEQ ID NO: 1905 - protein, 9 aa, Artificial Sequence
  Quasi-synthetic sequence derived from human genome
RAWKKILIL

SEQ ID NO: 1906 - protein, 9 aa, Artificial Sequence
  Quasi-synthetic sequence derived from human genome
WFIKILKRH

SEQ ID NO: 1907 - protein, 9 aa, Artificial Sequence
  Quasi-synthetic sequence derived from human genome
WFRKAIKLI

SEQ ID NO: 1908 - protein, 9 aa, Artificial Sequence
  Quasi-synthetic sequence derived from human genome
LFRRTFKLL

SEQ ID NO: 1909 - protein, 9 aa, Artificial Sequence
  Quasi-synthetic sequence derived from human genome
LLRRLKTLL

SEQ ID NO: 1910 - protein, 9 aa, Artificial Sequence
  Quasi-synthetic sequence derived from human genome
RRLLLTKLF

SEQ ID NO: 1911 - protein, 9 aa, Artificial Sequence
  Quasi-synthetic sequence derived from human genome
LKFFFLRTR

SEQ ID NO: 1912 - protein, 9 aa, Artificial Sequence
  Quasi-synthetic sequence derived from human genome
RFKRRWMVR

SEQ ID NO: 1913 - protein, 9 aa, Artificial Sequence
  Quasi-synthetic sequence derived from human genome
LRRILRTLR

SEQ ID NO: 1914 - protein, 9 aa, Artificial Sequence
  Quasi-synthetic sequence derived from human genome
VMRFLLRVR

SEQ ID NO: 1915 - protein, 9 aa, Artificial Sequence
  Quasi-synthetic sequence derived from human genome
LKKIRRFKV

SEQ ID NO: 1916 - protein, 9 aa, Artificial Sequence
  Quasi-synthetic sequence derived from human genome
LRVKIRKLK

SEQ ID NO: 1917 - protein, 9 aa, Artificial Sequence
  Quasi-synthetic sequence derived from human genome
RRKWRRWHL

SEQ ID NO: 1918 - protein, 9 aa, Artificial Sequence
  Quasi-synthetic sequence derived from human genome
FRRLKLQRW

SEQ ID NO: 1919 - protein, 9 aa, Artificial Sequence
  Quasi-synthetic sequence derived from human genome
LLQRKLWRR

SEQ ID NO: 1920 - protein, 9 aa, Artificial Sequence
  Quasi-synthetic sequence derived from human genome
RGLWRLFRK

SEQ ID NO: 1921 - protein, 9 aa, Artificial Sequence
  Quasi-synthetic sequence derived from human genome
LRRWNKLRL

SEQ ID NO: 1922 - protein, 9 aa, Artificial Sequence
  Quasi-synthetic sequence derived from human genome
WFRNRRFKL

SEQ ID NO: 1923 - protein, 9 aa, Artificial Sequence
  Quasi-synthetic sequence derived from human genome
ARWLRRLVF

SEQ ID NO: 1924 - protein, 9 aa, Artificial Sequence
  Quasi-synthetic sequence derived from human genome
LKLLKCRII

SEQ ID NO: 1925 - protein, 9 aa, Artificial Sequence
  Quasi-synthetic sequence derived from human genome
LIRKKCILF

SEQ ID NO: 1926 - protein, 9 aa, Artificial Sequence
  Quasi-synthetic sequence derived from human genome
WRHLRRLVL

SEQ ID NO: 1927 - protein, 9 aa, Artificial Sequence
  Quasi-synthetic sequence derived from human genome
FRWWKISLR

SEQ ID NO: 1928 - protein, 9 aa, Artificial Sequence
  Quasi-synthetic sequence derived from human genome
PLLWVRLRR

SEQ ID NO: 1929 - protein, 9 aa, Artificial Sequence
  Quasi-synthetic sequence derived from human genome
RRRALLVLW

SEQ ID NO: 1930 - protein, 9 aa, Artificial Sequence
  Quasi-synthetic sequence derived from human genome
RLFRWLVHR

SEQ ID NO: 1931 - protein, 9 aa, Artificial Sequence
  Quasi-synthetic sequence derived from human genome
KYLWWKRYL

SEQ ID NO: 1932 - protein, 9 aa, Artificial Sequence
  Quasi-synthetic sequence derived from human genome
YKFRLLLLL

SEQ ID NO: 1933 - protein, 9 aa, Artificial Sequence
  Quasi-synthetic sequence derived from human genome
LLYRLLLLK

SEQ ID NO: 1934 - protein, 9 aa, Artificial Sequence
  Quasi-synthetic sequence derived from human genome
LRLLRILGR

SEQ ID NO: 1935 - protein, 9 aa, Artificial Sequence
  Quasi-synthetic sequence derived from human genome
LRQILRLLR

SEQ ID NO: 1936 - protein, 9 aa, Artificial Sequence
  Quasi-synthetic sequence derived from human genome
LILLSRRFR

SEQ ID NO: 1937 - protein, 9 aa, Artificial Sequence
  Quasi-synthetic sequence derived from human genome
RFLLVLRCR

SEQ ID NO: 1938 - protein, 9 aa, Artificial Sequence
  Quasi-synthetic sequence derived from human genome
RLLRLSRLI

SEQ ID NO: 1939 - protein, 9 aa, Artificial Sequence
  Quasi-synthetic sequence derived from human genome
FFFLIRNRR

SEQ ID NO: 1940 - protein, 9 aa, Artificial Sequence
  Quasi-synthetic sequence derived from human genome
LLRLSRLIR

SEQ ID NO: 1941 - protein, 9 aa, Artificial Sequence
  Quasi-synthetic sequence derived from human genome
QRLFLFIRR

SEQ ID NO: 1942 - protein, 9 aa, Artificial Sequence
  Quasi-synthetic sequence derived from human genome
LRNLRLRLI

SEQ ID NO: 1943 - protein, 9 aa, Artificial Sequence
  Quasi-synthetic sequence derived from human genome
LRRFFLRIG

SEQ ID NO: 1944 - protein, 9 aa, Artificial Sequence
  Quasi-synthetic sequence derived from human genome
LLIGLRLRR

SEQ ID NO: 1945 - protein, 9 aa, Artificial Sequence
  Quasi-synthetic sequence derived from human genome
FRKMKIFMK

SEQ ID NO: 1946 - protein, 9 aa, Artificial Sequence
  Quasi-synthetic sequence derived from human genome
HRRRLLRRL

SEQ ID NO: 1947 - protein, 9 aa, Artificial Sequence
  Quasi-synthetic sequence derived from human genome
RRFRPRRFF

SEQ ID NO: 1948 - protein, 9 aa, Artificial Sequence
  Quasi-synthetic sequence derived from human genome
RLARLRFRR

SEQ ID NO: 1949 - protein, 9 aa, Artificial Sequence
  Quasi-synthetic sequence derived from human genome
RRRRPLLRL

SEQ ID NO: 1950 - protein, 9 aa, Artificial Sequence
  Quasi-synthetic sequence derived from human genome
LYKKIIKKL

SEQ ID NO: 1951 - protein, 9 aa, Artificial Sequence
  Quasi-synthetic sequence derived from human genome
LVKKLMKKW

SEQ ID NO: 1952 - protein, 9 aa, Artificial Sequence
  Quasi-synthetic sequence derived from human genome
WKKFVKFMK

SEQ ID NO: 1953 - protein, 9 aa, Artificial Sequence
  Quasi-synthetic sequence derived from human genome
IFKLILRFM

SEQ ID NO: 1954 - protein, 9 aa, Artificial Sequence
  Quasi-synthetic sequence derived from human genome
WRVWLFFMR

SEQ ID NO: 1955 - protein, 9 aa, Artificial Sequence
  Quasi-synthetic sequence derived from human genome
IKKLLLVFW

SEQ ID NO: 1956 - protein, 9 aa, Artificial Sequence
  Quasi-synthetic sequence derived from human genome
LFVMWMKRR

SEQ ID NO: 1957 - protein, 9 aa, Artificial Sequence
  Quasi-synthetic sequence derived from human genome
MILIKYRRL

SEQ ID NO: 1958 - protein, 9 aa, Artificial Sequence
  Quasi-synthetic sequence derived from human genome
FLKKWYRVI

SEQ ID NO: 1959 - protein, 9 aa, Artificial Sequence
  Quasi-synthetic sequence derived from human genome
LRVIKKYWL

SEQ ID NO: 1960 - protein, 9 aa, Artificial Sequence
  Quasi-synthetic sequence derived from human genome
KLFWIRVKY

SEQ ID NO: 1961 - protein, 9 aa, Artificial Sequence
  Quasi-synthetic sequence derived from human genome
KKKLIAFWL

SEQ ID NO: 1962 - protein, 9 aa, Artificial Sequence
  Quasi-synthetic sequence derived from human genome
ILKKWFLKP

SEQ ID NO: 1963 - protein, 9 aa, Artificial Sequence
  Quasi-synthetic sequence derived from human genome
KAILLWKKF

SEQ ID NO: 1964 - protein, 9 aa, Artificial Sequence
  Quasi-synthetic sequence derived from human genome
VKYRLKFRF

SEQ ID NO: 1965 - protein, 9 aa, Artificial Sequence
  Quasi-synthetic sequence derived from human genome
LRRKLYVLK

SEQ ID NO: 1966 - protein, 9 aa, Artificial Sequence
  Quasi-synthetic sequence derived from human genome
VKLFYRFRK

SEQ ID NO: 1967 - protein, 9 aa, Artificial Sequence
  Quasi-synthetic sequence derived from human genome
LLLRKYRVK

SEQ ID NO: 1968 - protein, 9 aa, Artificial Sequence
  Quasi-synthetic sequence derived from human genome
LKLFRPKKL

SEQ ID NO: 1969 - protein, 9 aa, Artificial Sequence
  Quasi-synthetic sequence derived from human genome
LPKLKLRKL

SEQ ID NO: 1970 - protein, 9 aa, Artificial Sequence
  Quasi-synthetic sequence derived from human genome
HFRLKKLLK

SEQ ID NO: 1971 - protein, 9 aa, Artificial Sequence
  Quasi-synthetic sequence derived from human genome
LHLKLKRLK

SEQ ID NO: 1972 - protein, 9 aa, Artificial Sequence
  Quasi-synthetic sequence derived from human genome
LFKALKRLK

SEQ ID NO: 1973 - protein, 9 aa, Artificial Sequence
  Quasi-synthetic sequence derived from human genome
LLKKFKLPR

SEQ ID NO: 1974 - protein, 9 aa, Artificial Sequence
  Quasi-synthetic sequence derived from human genome
FLARKKFKL

SEQ ID NO: 1975 - protein, 9 aa, Artificial Sequence
  Quasi-synthetic sequence derived from human genome
RFKLKFLAK

SEQ ID NO: 1976 - protein, 9 aa, Artificial Sequence
  Quasi-synthetic sequence derived from human genome
FPLLKKRKL

SEQ ID NO: 1977 - protein, 9 aa, Artificial Sequence
  Quasi-synthetic sequence derived from human genome
WRTIKLLLR

SEQ ID NO: 1978 - protein, 9 aa, Artificial Sequence
  Quasi-synthetic sequence derived from human genome
MRLRRLALF

SEQ ID NO: 1979 - protein, 9 aa, Artificial Sequence
  Quasi-synthetic sequence derived from human genome
PRLLRRMLL

SEQ ID NO: 1980 - protein, 9 aa, Artificial Sequence
  Quasi-synthetic sequence derived from human genome
RFLPLLRMR

SEQ ID NO: 1981 - protein, 9 aa, Artificial Sequence
  Quasi-synthetic sequence derived from human genome
WRKLRLITF

SEQ ID NO: 1982 - protein, 9 aa, Artificial Sequence
  Quasi-synthetic sequence derived from human genome
RFRTLKWLI

SEQ ID NO: 1983 - protein, 9 aa, Artificial Sequence
  Quasi-synthetic sequence derived from human genome
LRLLRALRM

SEQ ID NO: 1984 - protein, 9 aa, Artificial Sequence
  Quasi-synthetic sequence derived from human genome
RLRTLWLKI

SEQ ID NO: 1985 - protein, 9 aa, Artificial Sequence
  Quasi-synthetic sequence derived from human genome
KKLRLLGWW

SEQ ID NO: 1986 - protein, 9 aa, Artificial Sequence
  Quasi-synthetic sequence derived from human genome
SKRLWKFFW

SEQ ID NO: 1987 - protein, 9 aa, Artificial Sequence
  Quasi-synthetic sequence derived from human genome
WLWKQFLKR

SEQ ID NO: 1988 - protein, 9 aa, Artificial Sequence
  Quasi-synthetic sequence derived from human genome
LLWKNWRLK

SEQ ID NO: 1989 - protein, 9 aa, Artificial Sequence
  Quasi-synthetic sequence derived from human genome
KIKIRRVLM

SEQ ID NO: 1990 - protein, 9 aa, Artificial Sequence
  Quasi-synthetic sequence derived from human genome
KKRVIRMLI

SEQ ID NO: 1991 - protein, 9 aa, Artificial Sequence
  Quasi-synthetic sequence derived from human genome
RRPWKKILI

SEQ ID NO: 1992 - protein, 9 aa, Artificial Sequence
  Quasi-synthetic sequence derived from human genome
FLRLKRTRL

SEQ ID NO: 1993 - protein, 9 aa, Artificial Sequence
  Quasi-synthetic sequence derived from human genome
TLLRLRLRK

SEQ ID NO: 1994 - protein, 9 aa, Artificial Sequence
  Quasi-synthetic sequence derived from human genome
RRWLRRVRR

SEQ ID NO: 1995 - protein, 9 aa, Artificial Sequence
  Quasi-synthetic sequence derived from human genome
RRRRWVRLR

SEQ ID NO: 1996 - protein, 9 aa, Artificial Sequence
  Quasi-synthetic sequence derived from human genome
KIILPRLIR

SEQ ID NO: 1997 - protein, 9 aa, Artificial Sequence
  Quasi-synthetic sequence derived from human genome
IIRKVVKLF

SEQ ID NO: 1998 - protein, 9 aa, Artificial Sequence
  Quasi-synthetic sequence derived from human genome
RKAIFIFIR

SEQ ID NO: 1999 - protein, 9 aa, Artificial Sequence
  Quasi-synthetic sequence derived from human genome
KKVIFFRVI

SEQ ID NO: 2000 - protein, 9 aa, Artificial Sequence
  Quasi-synthetic sequence derived from human genome
IIKILLRRP

SEQ ID NO: 2001 - protein, 10 aa, Artificial Sequence
  Quasi-synthetic sequence derived from human genome
RLLWLLRLRR

SEQ ID NO: 2002 - protein, 10 aa, Artificial Sequence
  Quasi-synthetic sequence derived from human genome
LLRRRFRLLL

SEQ ID NO: 2003 - protein, 10 aa, Artificial Sequence
  Quasi-synthetic sequence derived from human genome
KFILWRRFRW

SEQ ID NO: 2004 - protein, 10 aa, Artificial Sequence
  Quasi-synthetic sequence derived from human genome
LLIFLRRRLR

SEQ ID NO: 2005 - protein, 10 aa, Artificial Sequence
  Quasi-synthetic sequence derived from human genome
KLRWFLKRWR

SEQ ID NO: 2006 - protein, 10 aa, Artificial Sequence
  Quasi-synthetic sequence derived from human genome
FRWLLIRFKR

SEQ ID NO: 2007 - protein, 10 aa, Artificial Sequence
  Quasi-synthetic sequence derived from human genome
WKRRLIRLLL

SEQ ID NO: 2008 - protein, 10 aa, Artificial Sequence
  Quasi-synthetic sequence derived from human genome
RLRKWIIFRL

SEQ ID NO: 2009 - protein, 10 aa, Artificial Sequence
  Quasi-synthetic sequence derived from human genome
RRFLLRRKFI

SEQ ID NO: 2010 - protein, 10 aa, Artificial Sequence
  Quasi-synthetic sequence derived from human genome
LLWVFRRRWR

SEQ ID NO: 2011 - protein, 10 aa, Artificial Sequence
  Quasi-synthetic sequence derived from human genome
RRRRLVFLWW

SEQ ID NO: 2012 - protein, 10 aa, Artificial Sequence
  Quasi-synthetic sequence derived from human genome
RRRRRRLLFW

SEQ ID NO: 2013 - protein, 10 aa, Artificial Sequence
  Quasi-synthetic sequence derived from human genome
LIKKLRLFFR

SEQ ID NO: 2014 - protein, 10 aa, Artificial Sequence
  Quasi-synthetic sequence derived from human genome
KRWIFWLWWR

SEQ ID NO: 2015 - protein, 10 aa, Artificial Sequence
  Quasi-synthetic sequence derived from human genome
LWLRWRILRL

SEQ ID NO: 2016 - protein, 10 aa, Artificial Sequence
  Quasi-synthetic sequence derived from human genome
LVLLRRRLRW

SEQ ID NO: 2017 - protein, 10 aa, Artificial Sequence
  Quasi-synthetic sequence derived from human genome
LFRLLLRFLR

SEQ ID NO: 2018 - protein, 10 aa, Artificial Sequence
  Quasi-synthetic sequence derived from human genome
RLWKRRWFVL

SEQ ID NO: 2019 - protein, 10 aa, Artificial Sequence
  Quasi-synthetic sequence derived from human genome
LRLWKRRWFV

SEQ ID NO: 2020 - protein, 10 aa, Artificial Sequence
  Quasi-synthetic sequence derived from human genome
RRIRRWLRRF

SEQ ID NO: 2021 - protein, 10 aa, Artificial Sequence
  Quasi-synthetic sequence derived from human genome
FRWLLIWFKR

SEQ ID NO: 2022 - protein, 10 aa, Artificial Sequence
  Quasi-synthetic sequence derived from human genome
KRILKFLKLF

SEQ ID NO: 2023 - protein, 10 aa, Artificial Sequence
  Quasi-synthetic sequence derived from human genome
FRWRRRLLVI

SEQ ID NO: 2024 - protein, 10 aa, Artificial Sequence
  Quasi-synthetic sequence derived from human genome
LLRLRRRFMR

SEQ ID NO: 2025 - protein, 10 aa, Artificial Sequence
  Quasi-synthetic sequence derived from human genome
RWRRRWFVLK

SEQ ID NO: 2026 - protein, 10 aa, Artificial Sequence
  Quasi-synthetic sequence derived from human genome
LLRKKRRIFI

SEQ ID NO: 2027 - protein, 10 aa, Artificial Sequence
  Quasi-synthetic sequence derived from human genome
IRRLLRLLRV

SEQ ID NO: 2028 - protein, 10 aa, Artificial Sequence
  Quasi-synthetic sequence derived from human genome
LLLLVLRKRR

SEQ ID NO: 2029 - protein, 10 aa, Artificial Sequence
  Quasi-synthetic sequence derived from human genome
RVKFLLRLLR

SEQ ID NO: 2030 - protein, 10 aa, Artificial Sequence
  Quasi-synthetic sequence derived from human genome
VFLKRFLRLR

SEQ ID NO: 2031 - protein, 10 aa, Artificial Sequence
  Quasi-synthetic sequence derived from human genome
RRYLRRLLLL

SEQ ID NO: 2032 - protein, 10 aa, Artificial Sequence
  Quasi-synthetic sequence derived from human genome
LLRFRYRLRL

SEQ ID NO: 2033 - protein, 10 aa, Artificial Sequence
  Quasi-synthetic sequence derived from human genome
RRMRILRRLL

SEQ ID NO: 2034 - protein, 10 aa, Artificial Sequence
  Quasi-synthetic sequence derived from human genome
KLRLVRWLLK

SEQ ID NO: 2035 - protein, 10 aa, Artificial Sequence
  Quasi-synthetic sequence derived from human genome
RLLRLIILIR

SEQ ID NO: 2036 - protein, 10 aa, Artificial Sequence
  Quasi-synthetic sequence derived from human genome
LRKRIIFRKI

SEQ ID NO: 2037 - protein, 10 aa, Artificial Sequence
  Quasi-synthetic sequence derived from human genome
FFRILRIFKL

SEQ ID NO: 2038 - protein, 10 aa, Artificial Sequence
  Quasi-synthetic sequence derived from human genome
KFIVWRRFKW

SEQ ID NO: 2039 - protein, 10 aa, Artificial Sequence
  Quasi-synthetic sequence derived from human genome
LFRIVLKRRL

SEQ ID NO: 2040 - protein, 10 aa, Artificial Sequence
  Quasi-synthetic sequence derived from human genome
LILWKWKKKK

SEQ ID NO: 2041 - protein, 10 aa, Artificial Sequence
  Quasi-synthetic sequence derived from human genome
RIWVFRLKRR

SEQ ID NO: 2042 - protein, 10 aa, Artificial Sequence
  Quasi-synthetic sequence derived from human genome
FRFWMKWLLR

SEQ ID NO: 2043 - protein, 10 aa, Artificial Sequence
  Quasi-synthetic sequence derived from human genome
RLMRIFRILK

SEQ ID NO: 2044 - protein, 10 aa, Artificial Sequence
  Quasi-synthetic sequence derived from human genome
LKKKKKLLLL

SEQ ID NO: 2045 - protein, 10 aa, Artificial Sequence
  Quasi-synthetic sequence derived from human genome
RRLLILILKI

SEQ ID NO: 2046 - protein, 10 aa, Artificial Sequence
  Quasi-synthetic sequence derived from human genome
LIFLRKRILI

SEQ ID NO: 2047 - protein, 10 aa, Artificial Sequence
  Quasi-synthetic sequence derived from human genome
FMFRKFKILR

SEQ ID NO: 2048 - protein, 10 aa, Artificial Sequence
  Quasi-synthetic sequence derived from human genome
LKLKKRWFVL

SEQ ID NO: 2049 - protein, 10 aa, Artificial Sequence
  Quasi-synthetic sequence derived from human genome
LRRLLRLLVL

SEQ ID NO: 2050 - protein, 10 aa, Artificial Sequence
  Quasi-synthetic sequence derived from human genome
VRLLRLLRLL

SEQ ID NO: 2051 - protein, 10 aa, Artificial Sequence
  Quasi-synthetic sequence derived from human genome
RFVRILRIFK

SEQ ID NO: 2052 - protein, 10 aa, Artificial Sequence
  Quasi-synthetic sequence derived from human genome
FKRWKLRYFL

SEQ ID NO: 2053 - protein, 10 aa, Artificial Sequence
  Quasi-synthetic sequence derived from human genome
FKLLKKLMRL

SEQ ID NO: 2054 - protein, 10 aa, Artificial Sequence
  Quasi-synthetic sequence derived from human genome
WRRKKLYLLF

SEQ ID NO: 2055 - protein, 10 aa, Artificial Sequence
  Quasi-synthetic sequence derived from human genome
RWWRWRRARW

SEQ ID NO: 2056 - protein, 10 aa, Artificial Sequence
  Quasi-synthetic sequence derived from human genome
LVILKRKWWK

SEQ ID NO: 2057 - protein, 10 aa, Artificial Sequence
  Quasi-synthetic sequence derived from human genome
KKLIIFILKK

SEQ ID NO: 2058 - protein, 10 aa, Artificial Sequence
  Quasi-synthetic sequence derived from human genome
RIKLLVRKFL

SEQ ID NO: 2059 - protein, 10 aa, Artificial Sequence
  Quasi-synthetic sequence derived from human genome
LILFMFRRLR

SEQ ID NO: 2060 - protein, 10 aa, Artificial Sequence
  Quasi-synthetic sequence derived from human genome
LLRLFRMLRI

SEQ ID NO: 2061 - protein, 10 aa, Artificial Sequence
  Quasi-synthetic sequence derived from human genome
KRKRRLILWM

SEQ ID NO: 2062 - protein, 10 aa, Artificial Sequence
  Quasi-synthetic sequence derived from human genome
RILFIKRFII

SEQ ID NO: 2063 - protein, 10 aa, Artificial Sequence
  Quasi-synthetic sequence derived from human genome
FLRRLIYRRR

SEQ ID NO: 2064 - protein, 10 aa, Artificial Sequence
  Quasi-synthetic sequence derived from human genome
KRRFRKFLVF

SEQ ID NO: 2065 - protein, 10 aa, Artificial Sequence
  Quasi-synthetic sequence derived from human genome
RIMRILRILK

SEQ ID NO: 2066 - protein, 10 aa, Artificial Sequence
  Quasi-synthetic sequence derived from human genome
LIKLWRRKVI

SEQ ID NO: 2067 - protein, 10 aa, Artificial Sequence
  Quasi-synthetic sequence derived from human genome
LRKLIWVRKI

SEQ ID NO: 2068 - protein, 10 aa, Artificial Sequence
  Quasi-synthetic sequence derived from human genome
FLYWRLRRLL

SEQ ID NO: 2069 - protein, 10 aa, Artificial Sequence
  Quasi-synthetic sequence derived from human genome
FFYWRLRRLL

SEQ ID NO: 2070 - protein, 10 aa, Artificial Sequence
  Quasi-synthetic sequence derived from human genome
FWIRLYKIRR

SEQ ID NO: 2071 - protein, 10 aa, Artificial Sequence
  Quasi-synthetic sequence derived from human genome
KLWRVKKFLI

SEQ ID NO: 2072 - protein, 10 aa, Artificial Sequence
  Quasi-synthetic sequence derived from human genome
KYLRRLFRFR

SEQ ID NO: 2073 - protein, 10 aa, Artificial Sequence
  Quasi-synthetic sequence derived from human genome
KFIKKRIIII

SEQ ID NO: 2074 - protein, 10 aa, Artificial Sequence
  Quasi-synthetic sequence derived from human genome
RLWRLLPFRR

SEQ ID NO: 2075 - protein, 10 aa, Artificial Sequence
  Quasi-synthetic sequence derived from human genome
RFRLLCLLRR

SEQ ID NO: 2076 - protein, 10 aa, Artificial Sequence
  Quasi-synthetic sequence derived from human genome
LILLKYRWRK

SEQ ID NO: 2077 - protein, 10 aa, Artificial Sequence
  Quasi-synthetic sequence derived from human genome
WKKIYFFLRR

SEQ ID NO: 2078 - protein, 10 aa, Artificial Sequence
  Quasi-synthetic sequence derived from human genome
KLRILRMKLR

SEQ ID NO: 2079 - protein, 10 aa, Artificial Sequence
  Quasi-synthetic sequence derived from human genome
KRWKKRFFVL

SEQ ID NO: 2080 - protein, 10 aa, Artificial Sequence
  Quasi-synthetic sequence derived from human genome
LRILFRMLIR

SEQ ID NO: 2081 - protein, 10 aa, Artificial Sequence
  Quasi-synthetic sequence derived from human genome
LLLRILRRMI

SEQ ID NO: 2082 - protein, 10 aa, Artificial Sequence
  Quasi-synthetic sequence derived from human genome
VWLRLRKILF

SEQ ID NO: 2083 - protein, 10 aa, Artificial Sequence
  Quasi-synthetic sequence derived from human genome
LLVWLLIRRK

SEQ ID NO: 2084 - protein, 10 aa, Artificial Sequence
  Quasi-synthetic sequence derived from human genome
LVWKRRILFF

SEQ ID NO: 2085 - protein, 10 aa, Artificial Sequence
  Quasi-synthetic sequence derived from human genome
RILKLIVRRR

SEQ ID NO: 2086 - protein, 10 aa, Artificial Sequence
  Quasi-synthetic sequence derived from human genome
FRLKMILRLL

SEQ ID NO: 2087 - protein, 10 aa, Artificial Sequence
  Quasi-synthetic sequence derived from human genome
MLVLWLKRRR

SEQ ID NO: 2088 - protein, 10 aa, Artificial Sequence
  Quasi-synthetic sequence derived from human genome
LRLFAWRKRW

SEQ ID NO: 2089 - protein, 10 aa, Artificial Sequence
  Quasi-synthetic sequence derived from human genome
LLARRFLLRR

SEQ ID NO: 2090 - protein, 10 aa, Artificial Sequence
  Quasi-synthetic sequence derived from human genome
RRALLRFLFR

SEQ ID NO: 2091 - protein, 10 aa, Artificial Sequence
  Quasi-synthetic sequence derived from human genome
RRFLLFRRAF

SEQ ID NO: 2092 - protein, 10 aa, Artificial Sequence
  Quasi-synthetic sequence derived from human genome
VRILRLLRIL

SEQ ID NO: 2093 - protein, 10 aa, Artificial Sequence
  Quasi-synthetic sequence derived from human genome
RIRYRFRRFI

SEQ ID NO: 2094 - protein, 10 aa, Artificial Sequence
  Quasi-synthetic sequence derived from human genome
RKLMRWILIL

SEQ ID NO: 2095 - protein, 10 aa, Artificial Sequence
  Quasi-synthetic sequence derived from human genome
RYIFKRLKFL

SEQ ID NO: 2096 - protein, 10 aa, Artificial Sequence
  Quasi-synthetic sequence derived from human genome
LRVRKLLLLI

SEQ ID NO: 2097 - protein, 10 aa, Artificial Sequence
  Quasi-synthetic sequence derived from human genome
LRRLFVFKLI

SEQ ID NO: 2098 - protein, 10 aa, Artificial Sequence
  Quasi-synthetic sequence derived from human genome
IKILRWKLVK

SEQ ID NO: 2099 - protein, 10 aa, Artificial Sequence
  Quasi-synthetic sequence derived from human genome
IWLYWRRKKR

SEQ ID NO: 2100 - protein, 10 aa, Artificial Sequence
  Quasi-synthetic sequence derived from human genome
RRLLARIWRL

SEQ ID NO: 2101 - protein, 10 aa, Artificial Sequence
  Quasi-synthetic sequence derived from human genome
LYLRLFKLKK

SEQ ID NO: 2102 - protein, 10 aa, Artificial Sequence
  Quasi-synthetic sequence derived from human genome
LKKLVLRKLR

SEQ ID NO: 2103 - protein, 10 aa, Artificial Sequence
  Quasi-synthetic sequence derived from human genome
IFLYLLRLRR

SEQ ID NO: 2104 - protein, 10 aa, Artificial Sequence
  Quasi-synthetic sequence derived from human genome
ILLYLLRLRR

SEQ ID NO: 2105 - protein, 10 aa, Artificial Sequence
  Quasi-synthetic sequence derived from human genome
KFKFVFFLRL

SEQ ID NO: 2106 - protein, 10 aa, Artificial Sequence
  Quasi-synthetic sequence derived from human genome
RKIMKLLLKI

SEQ ID NO: 2107 - protein, 10 aa, Artificial Sequence
  Quasi-synthetic sequence derived from human genome
KLIRKMKLIL

SEQ ID NO: 2108 - protein, 10 aa, Artificial Sequence
  Quasi-synthetic sequence derived from human genome
LRLLWRRRVY

SEQ ID NO: 2109 - protein, 10 aa, Artificial Sequence
  Quasi-synthetic sequence derived from human genome
FWRRLRKALL

SEQ ID NO: 2110 - protein, 10 aa, Artificial Sequence
  Quasi-synthetic sequence derived from human genome
RLLWRRLKPL

SEQ ID NO: 2111 - protein, 10 aa, Artificial Sequence
  Quasi-synthetic sequence derived from human genome
LRLHLKRFRW

SEQ ID NO: 2112 - protein, 10 aa, Artificial Sequence
  Quasi-synthetic sequence derived from human genome
MLLKLWKFLK

SEQ ID NO: 2113 - protein, 10 aa, Artificial Sequence
  Quasi-synthetic sequence derived from human genome
KLRLFCFRLR

SEQ ID NO: 2114 - protein, 10 aa, Artificial Sequence
  Quasi-synthetic sequence derived from human genome
RWMRLRIRRM

SEQ ID NO: 2115 - protein, 10 aa, Artificial Sequence
  Quasi-synthetic sequence derived from human genome
CLLLLWWRRR

SEQ ID NO: 2116 - protein, 10 aa, Artificial Sequence
  Quasi-synthetic sequence derived from human genome
ILIKYRRLRI

SEQ ID NO: 2117 - protein, 10 aa, Artificial Sequence
  Quasi-synthetic sequence derived from human genome
LAILRRRWWK

SEQ ID NO: 2118 - protein, 10 aa, Artificial Sequence
  Quasi-synthetic sequence derived from human genome
RIRRLLRPFF

SEQ ID NO: 2119 - protein, 10 aa, Artificial Sequence
  Quasi-synthetic sequence derived from human genome
RLLRVLKLVR

SEQ ID NO: 2120 - protein, 10 aa, Artificial Sequence
  Quasi-synthetic sequence derived from human genome
KMFRFFIRRM

SEQ ID NO: 2121 - protein, 10 aa, Artificial Sequence
  Quasi-synthetic sequence derived from human genome
KLRWLLKHWR

SEQ ID NO: 2122 - protein, 10 aa, Artificial Sequence
  Quasi-synthetic sequence derived from human genome
WIKRMIFKLF

SEQ ID NO: 2123 - protein, 10 aa, Artificial Sequence
  Quasi-synthetic sequence derived from human genome
LALRLRKRFL

SEQ ID NO: 2124 - protein, 10 aa, Artificial Sequence
  Quasi-synthetic sequence derived from human genome
LRPFLLRRLK

SEQ ID NO: 2125 - protein, 10 aa, Artificial Sequence
  Quasi-synthetic sequence derived from human genome
RKLWKRFFCF

SEQ ID NO: 2126 - protein, 10 aa, Artificial Sequence
  Quasi-synthetic sequence derived from human genome
LLRRRFLHLK

SEQ ID NO: 2127 - protein, 10 aa, Artificial Sequence
  Quasi-synthetic sequence derived from human genome
FLLRFLRARK

SEQ ID NO: 2128 - protein, 10 aa, Artificial Sequence
  Quasi-synthetic sequence derived from human genome
LRKRIVFRKI

SEQ ID NO: 2129 - protein, 10 aa, Artificial Sequence
  Quasi-synthetic sequence derived from human genome
LLLVVRRRRR

SEQ ID NO: 2130 - protein, 10 aa, Artificial Sequence
  Quasi-synthetic sequence derived from human genome
LKFRKKKLRF

SEQ ID NO: 2131 - protein, 10 aa, Artificial Sequence
  Quasi-synthetic sequence derived from human genome
KKLRKLLKRL

SEQ ID NO: 2132 - protein, 10 aa, Artificial Sequence
  Quasi-synthetic sequence derived from human genome
MRRKLKFFFM

SEQ ID NO: 2133 - protein, 10 aa, Artificial Sequence
  Quasi-synthetic sequence derived from human genome
RLLKLRYLIL

SEQ ID NO: 2134 - protein, 10 aa, Artificial Sequence
  Quasi-synthetic sequence derived from human genome
YFFKILLRLR

SEQ ID NO: 2135 - protein, 10 aa, Artificial Sequence
  Quasi-synthetic sequence derived from human genome
ILVFWILKRK

SEQ ID NO: 2136 - protein, 10 aa, Artificial Sequence
  Quasi-synthetic sequence derived from human genome
RLFRVMRLIK

SEQ ID NO: 2137 - protein, 10 aa, Artificial Sequence
  Quasi-synthetic sequence derived from human genome
LWKRLLIARR

SEQ ID NO: 2138 - protein, 10 aa, Artificial Sequence
  Quasi-synthetic sequence derived from human genome
WKRCFWKRRW

SEQ ID NO: 2139 - protein, 10 aa, Artificial Sequence
  Quasi-synthetic sequence derived from human genome
LLFIVRKKRK

SEQ ID NO: 2140 - protein, 10 aa, Artificial Sequence
  Quasi-synthetic sequence derived from human genome
VLLVLRLRRW

SEQ ID NO: 2141 - protein, 10 aa, Artificial Sequence
  Quasi-synthetic sequence derived from human genome
RLIRKRFLCL

SEQ ID NO: 2142 - protein, 10 aa, Artificial Sequence
  Quasi-synthetic sequence derived from human genome
RRRRRLALFL

SEQ ID NO: 2143 - protein, 10 aa, Artificial Sequence
  Quasi-synthetic sequence derived from human genome
LRLLLRRRAR

SEQ ID NO: 2144 - protein, 10 aa, Artificial Sequence
  Quasi-synthetic sequence derived from human genome
RIIRLVRVFR

SEQ ID NO: 2145 - protein, 10 aa, Artificial Sequence
  Quasi-synthetic sequence derived from human genome
LFFLMKRKII

SEQ ID NO: 2146 - protein, 10 aa, Artificial Sequence
  Quasi-synthetic sequence derived from human genome
YRRLKLLWRV

SEQ ID NO: 2147 - protein, 10 aa, Artificial Sequence
  Quasi-synthetic sequence derived from human genome
FFRLFRVMRL

SEQ ID NO: 2148 - protein, 10 aa, Artificial Sequence
  Quasi-synthetic sequence derived from human genome
LWKFALLRKR

SEQ ID NO: 2149 - protein, 10 aa, Artificial Sequence
  Quasi-synthetic sequence derived from human genome
IMLRIWRVKR

SEQ ID NO: 2150 - protein, 10 aa, Artificial Sequence
  Quasi-synthetic sequence derived from human genome
FLFLRRRCFL

SEQ ID NO: 2151 - protein, 10 aa, Artificial Sequence
  Quasi-synthetic sequence derived from human genome
RWLKIIWRRH

SEQ ID NO: 2152 - protein, 10 aa, Artificial Sequence
  Quasi-synthetic sequence derived from human genome
RLVRVFRIFK

SEQ ID NO: 2153 - protein, 10 aa, Artificial Sequence
  Quasi-synthetic sequence derived from human genome
RVFRVFRIFK

SEQ ID NO: 2154 - protein, 10 aa, Artificial Sequence
  Quasi-synthetic sequence derived from human genome
VRKLLRWVRR

SEQ ID NO: 2155 - protein, 10 aa, Artificial Sequence
  Quasi-synthetic sequence derived from human genome
LRRYFMKRLL

SEQ ID NO: 2156 - protein, 10 aa, Artificial Sequence
  Quasi-synthetic sequence derived from human genome
RMFRWLVLRI

SEQ ID NO: 2157 - protein, 10 aa, Artificial Sequence
  Quasi-synthetic sequence derived from human genome
KFRKVLFILI

SEQ ID NO: 2158 - protein, 10 aa, Artificial Sequence
  Quasi-synthetic sequence derived from human genome
RRFFWWARFI

SEQ ID NO: 2159 - protein, 10 aa, Artificial Sequence
  Quasi-synthetic sequence derived from human genome
LFRRCRRRLI

SEQ ID NO: 2160 - protein, 10 aa, Artificial Sequence
  Quasi-synthetic sequence derived from human genome
LLKKVWKVWR

SEQ ID NO: 2161 - protein, 10 aa, Artificial Sequence
  Quasi-synthetic sequence derived from human genome
RRFILRWCLL

SEQ ID NO: 2162 - protein, 10 aa, Artificial Sequence
  Quasi-synthetic sequence derived from human genome
FYLLLKLKKW

SEQ ID NO: 2163 - protein, 10 aa, Artificial Sequence
  Quasi-synthetic sequence derived from human genome
LRRRLYVIFR

SEQ ID NO: 2164 - protein, 10 aa, Artificial Sequence
  Quasi-synthetic sequence derived from human genome
RLKLRVKFFV

SEQ ID NO: 2165 - protein, 10 aa, Artificial Sequence
  Quasi-synthetic sequence derived from human genome
RIKRRALLFL

SEQ ID NO: 2166 - protein, 10 aa, Artificial Sequence
  Quasi-synthetic sequence derived from human genome
FLRFIRARKF

SEQ ID NO: 2167 - protein, 10 aa, Artificial Sequence
  Quasi-synthetic sequence derived from human genome
FILRFLRARK

SEQ ID NO: 2168 - protein, 10 aa, Artificial Sequence
  Quasi-synthetic sequence derived from human genome
RALRLLRIFK

SEQ ID NO: 2169 - protein, 10 aa, Artificial Sequence
  Quasi-synthetic sequence derived from human genome
RFFKRKIMIK

SEQ ID NO: 2170 - protein, 10 aa, Artificial Sequence
  Quasi-synthetic sequence derived from human genome
WWRWLTFWRR

SEQ ID NO: 2171 - protein, 10 aa, Artificial Sequence
  Quasi-synthetic sequence derived from human genome
FRFLRRRWGL

SEQ ID NO: 2172 - protein, 10 aa, Artificial Sequence
  Quasi-synthetic sequence derived from human genome
LLRRWKHWLL

SEQ ID NO: 2173 - protein, 10 aa, Artificial Sequence
  Quasi-synthetic sequence derived from human genome
RLLWRKLLWH

SEQ ID NO: 2174 - protein, 10 aa, Artificial Sequence
  Quasi-synthetic sequence derived from human genome
MRLRVRLLKR

SEQ ID NO: 2175 - protein, 10 aa, Artificial Sequence
  Quasi-synthetic sequence derived from human genome
LLLLLRALRR

SEQ ID NO: 2176 - protein, 10 aa, Artificial Sequence
  Quasi-synthetic sequence derived from human genome
LRLFRRLLLA

SEQ ID NO: 2177 - protein, 10 aa, Artificial Sequence
  Quasi-synthetic sequence derived from human genome
RLRLRLLALL

SEQ ID NO: 2178 - protein, 10 aa, Artificial Sequence
  Quasi-synthetic sequence derived from human genome
FLLWLRKCLR

SEQ ID NO: 2179 - protein, 10 aa, Artificial Sequence
  Quasi-synthetic sequence derived from human genome
RHLRLLRLLL

SEQ ID NO: 2180 - protein, 10 aa, Artificial Sequence
  Quasi-synthetic sequence derived from human genome
RHRLLLLLLR

SEQ ID NO: 2181 - protein, 10 aa, Artificial Sequence
  Quasi-synthetic sequence derived from human genome
LRFLRALRLL

SEQ ID NO: 2182 - protein, 10 aa, Artificial Sequence
  Quasi-synthetic sequence derived from human genome
ALRRRLLLLL

SEQ ID NO: 2183 - protein, 10 aa, Artificial Sequence
  Quasi-synthetic sequence derived from human genome
RLLWFKVKKM

SEQ ID NO: 2184 - protein, 10 aa, Artificial Sequence
  Quasi-synthetic sequence derived from human genome
KFIRIYKLFK

SEQ ID NO: 2185 - protein, 10 aa, Artificial Sequence
  Quasi-synthetic sequence derived from human genome
WKLRPLLKKW

SEQ ID NO: 2186 - protein, 10 aa, Artificial Sequence
  Quasi-synthetic sequence derived from human genome
LVRRRKRRFF

SEQ ID NO: 2187 - protein, 10 aa, Artificial Sequence
  Quasi-synthetic sequence derived from human genome
LVFFLYRRRK

SEQ ID NO: 2188 - protein, 10 aa, Artificial Sequence
  Quasi-synthetic sequence derived from human genome
LLRKLYVFRR

SEQ ID NO: 2189 - protein, 10 aa, Artificial Sequence
  Quasi-synthetic sequence derived from human genome
KLLKRLRLLP

SEQ ID NO: 2190 - protein, 10 aa, Artificial Sequence
  Quasi-synthetic sequence derived from human genome
LLLYLKRLKI

SEQ ID NO: 2191 - protein, 10 aa, Artificial Sequence
  Quasi-synthetic sequence derived from human genome
LVRMWRVRWR

SEQ ID NO: 2192 - protein, 10 aa, Artificial Sequence
  Quasi-synthetic sequence derived from human genome
FWIIKLPRRR

SEQ ID NO: 2193 - protein, 10 aa, Artificial Sequence
  Quasi-synthetic sequence derived from human genome
LRTLLRRRLF

SEQ ID NO: 2194 - protein, 10 aa, Artificial Sequence
  Quasi-synthetic sequence derived from human genome
LRRFLRTLRL

SEQ ID NO: 2195 - protein, 10 aa, Artificial Sequence
  Quasi-synthetic sequence derived from human genome
KKIVWLKLLI

SEQ ID NO: 2196 - protein, 10 aa, Artificial Sequence
  Quasi-synthetic sequence derived from human genome
RLLWLLRLLF

SEQ ID NO: 2197 - protein, 10 aa, Artificial Sequence
  Quasi-synthetic sequence derived from human genome
LLRRLWVVKF

SEQ ID NO: 2198 - protein, 10 aa, Artificial Sequence
  Quasi-synthetic sequence derived from human genome
RLIFLLRRWA

SEQ ID NO: 2199 - protein, 10 aa, Artificial Sequence
  Quasi-synthetic sequence derived from human genome
KLLKLFYIKK

SEQ ID NO: 2200 - protein, 10 aa, Artificial Sequence
  Quasi-synthetic sequence derived from human genome
KFLLLFYLKK

SEQ ID NO: 2201 - protein, 10 aa, Artificial Sequence
  Quasi-synthetic sequence derived from human genome
LRRRLYIIMR

SEQ ID NO: 2202 - protein, 10 aa, Artificial Sequence
  Quasi-synthetic sequence derived from human genome
LILWRILYKK

SEQ ID NO: 2203 - protein, 10 aa, Artificial Sequence
  Quasi-synthetic sequence derived from human genome
RLRFWLLIWL

SEQ ID NO: 2204 - protein, 10 aa, Artificial Sequence
  Quasi-synthetic sequence derived from human genome
WRKLLKAFWW

SEQ ID NO: 2205 - protein, 10 aa, Artificial Sequence
  Quasi-synthetic sequence derived from human genome
FLKKVRRLIM

SEQ ID NO: 2206 - protein, 10 aa, Artificial Sequence
  Quasi-synthetic sequence derived from human genome
VLLVKRWKKL

SEQ ID NO: 2207 - protein, 10 aa, Artificial Sequence
  Quasi-synthetic sequence derived from human genome
KHILRLRWKL

SEQ ID NO: 2208 - protein, 10 aa, Artificial Sequence
  Quasi-synthetic sequence derived from human genome
KLKKLKKLLM

SEQ ID NO: 2209 - protein, 10 aa, Artificial Sequence
  Quasi-synthetic sequence derived from human genome
FLMKKKKFKF

SEQ ID NO: 2210 - protein, 10 aa, Artificial Sequence
  Quasi-synthetic sequence derived from human genome
RRLFKFPFLW

SEQ ID NO: 2211 - protein, 10 aa, Artificial Sequence
  Quasi-synthetic sequence derived from human genome
RCLLKWLKLW

SEQ ID NO: 2212 - protein, 10 aa, Artificial Sequence
  Quasi-synthetic sequence derived from human genome
RLIKIKIIVK

SEQ ID NO: 2213 - protein, 10 aa, Artificial Sequence
  Quasi-synthetic sequence derived from human genome
LRKILLRKFC

SEQ ID NO: 2214 - protein, 10 aa, Artificial Sequence
  Quasi-synthetic sequence derived from human genome
VLIRIFILKK

SEQ ID NO: 2215 - protein, 10 aa, Artificial Sequence
  Quasi-synthetic sequence derived from human genome
KRRFLLCLLL

SEQ ID NO: 2216 - protein, 10 aa, Artificial Sequence
  Quasi-synthetic sequence derived from human genome
RIRVLVIRKL

SEQ ID NO: 2217 - protein, 10 aa, Artificial Sequence
  Quasi-synthetic sequence derived from human genome
RFNLFLRRRL

SEQ ID NO: 2218 - protein, 10 aa, Artificial Sequence
  Quasi-synthetic sequence derived from human genome
RRLLNRRLLL

SEQ ID NO: 2219 - protein, 10 aa, Artificial Sequence
  Quasi-synthetic sequence derived from human genome
RRRLLGLLRF

SEQ ID NO: 2220 - protein, 10 aa, Artificial Sequence
  Quasi-synthetic sequence derived from human genome
KWILKKIKYL

SEQ ID NO: 2221 - protein, 10 aa, Artificial Sequence
  Quasi-synthetic sequence derived from human genome
LVRRFRVLIL

SEQ ID NO: 2222 - protein, 10 aa, Artificial Sequence
  Quasi-synthetic sequence derived from human genome
RRFFLRCIIW

SEQ ID NO: 2223 - protein, 10 aa, Artificial Sequence
  Quasi-synthetic sequence derived from human genome
RYLRKILIRK

SEQ ID NO: 2224 - protein, 10 aa, Artificial Sequence
  Quasi-synthetic sequence derived from human genome
FKIYIRLKRR

SEQ ID NO: 2225 - protein, 10 aa, Artificial Sequence
  Quasi-synthetic sequence derived from human genome
KLKKLFRKLK

SEQ ID NO: 2226 - protein, 10 aa, Artificial Sequence
  Quasi-synthetic sequence derived from human genome
LKFRKKKLKF

SEQ ID NO: 2227 - protein, 10 aa, Artificial Sequence
  Quasi-synthetic sequence derived from human genome
KLLKVIRKKL

SEQ ID NO: 2228 - protein, 10 aa, Artificial Sequence
  Quasi-synthetic sequence derived from human genome
KKKLKLIRVL

SEQ ID NO: 2229 - protein, 10 aa, Artificial Sequence
  Quasi-synthetic sequence derived from human genome
FLLLFLLLRR

SEQ ID NO: 2230 - protein, 10 aa, Artificial Sequence
  Quasi-synthetic sequence derived from human genome
RRLLLLLLLL

SEQ ID NO: 2231 - protein, 10 aa, Artificial Sequence
  Quasi-synthetic sequence derived from human genome
LRRLLLLLLL

SEQ ID NO: 2232 - protein, 10 aa, Artificial Sequence
  Quasi-synthetic sequence derived from human genome
LLRLLLRLLL

SEQ ID NO: 2233 - protein, 10 aa, Artificial Sequence
  Quasi-synthetic sequence derived from human genome
FFLLLRFFLR

SEQ ID NO: 2234 - protein, 10 aa, Artificial Sequence
  Quasi-synthetic sequence derived from human genome
RRLLKYMFIR

SEQ ID NO: 2235 - protein, 10 aa, Artificial Sequence
  Quasi-synthetic sequence derived from human genome
RIKLYMRRLL

SEQ ID NO: 2236 - protein, 10 aa, Artificial Sequence
  Quasi-synthetic sequence derived from human genome
KKLPLWFLRK

SEQ ID NO: 2237 - protein, 10 aa, Artificial Sequence
  Quasi-synthetic sequence derived from human genome
FLLKKRKWPL

SEQ ID NO: 2238 - protein, 10 aa, Artificial Sequence
  Quasi-synthetic sequence derived from human genome
RIVIKKIWKR

SEQ ID NO: 2239 - protein, 10 aa, Artificial Sequence
  Quasi-synthetic sequence derived from human genome
KRALLLLRRR

SEQ ID NO: 2240 - protein, 10 aa, Artificial Sequence
  Quasi-synthetic sequence derived from human genome
MRLMRIFRIL

SEQ ID NO: 2241 - protein, 10 aa, Artificial Sequence
  Quasi-synthetic sequence derived from human genome
VFFIWRRYWR

SEQ ID NO: 2242 - protein, 10 aa, Artificial Sequence
  Quasi-synthetic sequence derived from human genome
LILLVKIKLK

SEQ ID NO: 2243 - protein, 10 aa, Artificial Sequence
  Quasi-synthetic sequence derived from human genome
LTRLRLWLKR

SEQ ID NO: 2244 - protein, 10 aa, Artificial Sequence
  Quasi-synthetic sequence derived from human genome
IRLPRIRRWR

SEQ ID NO: 2245 - protein, 10 aa, Artificial Sequence
  Quasi-synthetic sequence derived from human genome
ILLLALRLRR

SEQ ID NO: 2246 - protein, 10 aa, Artificial Sequence
  Quasi-synthetic sequence derived from human genome
LRFLRALRLI

SEQ ID NO: 2247 - protein, 10 aa, Artificial Sequence
  Quasi-synthetic sequence derived from human genome
LLFLILRHRR

SEQ ID NO: 2248 - protein, 10 aa, Artificial Sequence
  Quasi-synthetic sequence derived from human genome
RFFHFRRLIF

SEQ ID NO: 2249 - protein, 10 aa, Artificial Sequence
  Quasi-synthetic sequence derived from human genome
LLIRKRIHLR

SEQ ID NO: 2250 - protein, 10 aa, Artificial Sequence
  Quasi-synthetic sequence derived from human genome
RIFRILKLAR

SEQ ID NO: 2251 - protein, 10 aa, Artificial Sequence
  Quasi-synthetic sequence derived from human genome
RMKFFFKRYL

SEQ ID NO: 2252 - protein, 10 aa, Artificial Sequence
  Quasi-synthetic sequence derived from human genome
KLYKLMLRRF

SEQ ID NO: 2253 - protein, 10 aa, Artificial Sequence
  Quasi-synthetic sequence derived from human genome
RYKIIKLLLL

SEQ ID NO: 2254 - protein, 10 aa, Artificial Sequence
  Quasi-synthetic sequence derived from human genome
KVLMWRLLKL

SEQ ID NO: 2255 - protein, 10 aa, Artificial Sequence
  Quasi-synthetic sequence derived from human genome
RWKLVIMLKK

SEQ ID NO: 2256 - protein, 10 aa, Artificial Sequence
  Quasi-synthetic sequence derived from human genome
LKIIILKRKY

SEQ ID NO: 2257 - protein, 10 aa, Artificial Sequence
  Quasi-synthetic sequence derived from human genome
RWLLLKLLLL

SEQ ID NO: 2258 - protein, 10 aa, Artificial Sequence
  Quasi-synthetic sequence derived from human genome
LLLKRFLLAR

SEQ ID NO: 2259 - protein, 10 aa, Artificial Sequence
  Quasi-synthetic sequence derived from human genome
AFLRLKRKFI

SEQ ID NO: 2260 - protein, 10 aa, Artificial Sequence
  Quasi-synthetic sequence derived from human genome
LLKRKHRFIL

SEQ ID NO: 2261 - protein, 10 aa, Artificial Sequence
  Quasi-synthetic sequence derived from human genome
ILKLPFLKRR

SEQ ID NO: 2262 - protein, 10 aa, Artificial Sequence
  Quasi-synthetic sequence derived from human genome
LRCIRLLRIF

SEQ ID NO: 2263 - protein, 10 aa, Artificial Sequence
  Quasi-synthetic sequence derived from human genome
IWIHILRKRR

SEQ ID NO: 2264 - protein, 10 aa, Artificial Sequence
  Quasi-synthetic sequence derived from human genome
IRIFKRKKRI

SEQ ID NO: 2265 - protein, 10 aa, Artificial Sequence
  Quasi-synthetic sequence derived from human genome
ILLLLLFLRR

SEQ ID NO: 2266 - protein, 10 aa, Artificial Sequence
  Quasi-synthetic sequence derived from human genome
LLLLILRLLR

SEQ ID NO: 2267 - protein, 10 aa, Artificial Sequence
  Quasi-synthetic sequence derived from human genome
KYRFWKKRII

SEQ ID NO: 2268 - protein, 10 aa, Artificial Sequence
  Quasi-synthetic sequence derived from human genome
ILKFWAFLRR

SEQ ID NO: 2269 - protein, 10 aa, Artificial Sequence
  Quasi-synthetic sequence derived from human genome
LVLFKYKRLR

SEQ ID NO: 2270 - protein, 10 aa, Artificial Sequence
  Quasi-synthetic sequence derived from human genome
LRRKLYVLKL

SEQ ID NO: 2271 - protein, 10 aa, Artificial Sequence
  Quasi-synthetic sequence derived from human genome
ILLRVRRRRK

SEQ ID NO: 2272 - protein, 10 aa, Artificial Sequence
  Quasi-synthetic sequence derived from human genome
LKKFLRKLHL

SEQ ID NO: 2273 - protein, 10 aa, Artificial Sequence
  Quasi-synthetic sequence derived from human genome
KKLLAKLRFL

SEQ ID NO: 2274 - protein, 10 aa, Artificial Sequence
  Quasi-synthetic sequence derived from human genome
RLCKLLFFRI

SEQ ID NO: 2275 - protein, 10 aa, Artificial Sequence
  Quasi-synthetic sequence derived from human genome
PLKLRFKRRW

SEQ ID NO: 2276 - protein, 10 aa, Artificial Sequence
  Quasi-synthetic sequence derived from human genome
RRAWKKILIL

SEQ ID NO: 2277 - protein, 10 aa, Artificial Sequence
  Quasi-synthetic sequence derived from human genome
RRPWKKILIL

SEQ ID NO: 2278 - protein, 10 aa, Artificial Sequence
  Quasi-synthetic sequence derived from human genome
IIWLARRLKK

SEQ ID NO: 2279 - protein, 10 aa, Artificial Sequence
  Quasi-synthetic sequence derived from human genome
LRIIRLVRVF

SEQ ID NO: 2280 - protein, 10 aa, Artificial Sequence
  Quasi-synthetic sequence derived from human genome
KRLLLLFLFF

SEQ ID NO: 2281 - protein, 10 aa, Artificial Sequence
  Quasi-synthetic sequence derived from human genome
MRVVRLLRLR

SEQ ID NO: 2282 - protein, 10 aa, Artificial Sequence
  Quasi-synthetic sequence derived from human genome
KQILRLRWRW

SEQ ID NO: 2283 - protein, 10 aa, Artificial Sequence
  Quasi-synthetic sequence derived from human genome
LRKYWVRFLL

SEQ ID NO: 2284 - protein, 10 aa, Artificial Sequence
  Quasi-synthetic sequence derived from human genome
WIKRLIRMVF

SEQ ID NO: 2285 - protein, 10 aa, Artificial Sequence
  Quasi-synthetic sequence derived from human genome
IRWKCRRLRI

SEQ ID NO: 2286 - protein, 10 aa, Artificial Sequence
  Quasi-synthetic sequence derived from human genome
LILRRRRHRI

SEQ ID NO: 2287 - protein, 10 aa, Artificial Sequence
  Quasi-synthetic sequence derived from human genome
RQILRLLRLR

SEQ ID NO: 2288 - protein, 10 aa, Artificial Sequence
  Quasi-synthetic sequence derived from human genome
RLLRLSRLIR

SEQ ID NO: 2289 - protein, 10 aa, Artificial Sequence
  Quasi-synthetic sequence derived from human genome
ILRGRLLFRR

SEQ ID NO: 2290 - protein, 10 aa, Artificial Sequence
  Quasi-synthetic sequence derived from human genome
CRFFLKFFLK

SEQ ID NO: 2291 - protein, 10 aa, Artificial Sequence
  Quasi-synthetic sequence derived from human genome
FFLFRLCKKL

SEQ ID NO: 2292 - protein, 10 aa, Artificial Sequence
  Quasi-synthetic sequence derived from human genome
ILKKKKLRRI

SEQ ID NO: 2293 - protein, 10 aa, Artificial Sequence
  Quasi-synthetic sequence derived from human genome
LVLIFVLRKR

SEQ ID NO: 2294 - protein, 10 aa, Artificial Sequence
  Quasi-synthetic sequence derived from human genome
VFRVFRIFKF

SEQ ID NO: 2295 - protein, 10 aa, Artificial Sequence
  Quasi-synthetic sequence derived from human genome
VRRLVKILLL

SEQ ID NO: 2296 - protein, 10 aa, Artificial Sequence
  Quasi-synthetic sequence derived from human genome
LRRRKRFKVL

SEQ ID NO: 2297 - protein, 10 aa, Artificial Sequence
  Quasi-synthetic sequence derived from human genome
WRTIKLLLRR

SEQ ID NO: 2298 - protein, 10 aa, Artificial Sequence
  Quasi-synthetic sequence derived from human genome
KRLWIRTLRL

SEQ ID NO: 2299 - protein, 10 aa, Artificial Sequence
  Quasi-synthetic sequence derived from human genome
KRKVIIFLKK

SEQ ID NO: 2300 - protein, 10 aa, Artificial Sequence
  Quasi-synthetic sequence derived from human genome
WWLKLRPILK

SEQ ID NO: 2301 - protein, 10 aa, Artificial Sequence
  Quasi-synthetic sequence derived from human genome
RIIRKVVKLF

SEQ ID NO: 2302 - protein, 10 aa, Artificial Sequence
  Quasi-synthetic sequence derived from human genome
FRKLRLLRSL

SEQ ID NO: 2303 - protein, 10 aa, Artificial Sequence
  Quasi-synthetic sequence derived from human genome
KFLRFRRSLL

SEQ ID NO: 2304 - protein, 10 aa, Artificial Sequence
  Quasi-synthetic sequence derived from human genome
FFRLQKFLRR

SEQ ID NO: 2305 - protein, 10 aa, Artificial Sequence
  Quasi-synthetic sequence derived from human genome
LRLLRYIVRL

SEQ ID NO: 2306 - protein, 10 aa, Artificial Sequence
  Quasi-synthetic sequence derived from human genome
FKAFLIRLLR

SEQ ID NO: 2307 - protein, 10 aa, Artificial Sequence
  Quasi-synthetic sequence derived from human genome
LKLIHLLLRR

SEQ ID NO: 2308 - protein, 10 aa, Artificial Sequence
  Quasi-synthetic sequence derived from human genome
LRRKALLIFL

SEQ ID NO: 2309 - protein, 10 aa, Artificial Sequence
  Quasi-synthetic sequence derived from human genome
IARKLLFLFR

SEQ ID NO: 2310 - protein, 10 aa, Artificial Sequence
  Quasi-synthetic sequence derived from human genome
FLKRILPLRF

SEQ ID NO: 2311 - protein, 10 aa, Artificial Sequence
  Quasi-synthetic sequence derived from human genome
ILHLLFLKRR

SEQ ID NO: 2312 - protein, 10 aa, Artificial Sequence
  Quasi-synthetic sequence derived from human genome
RLLWNWWKLR

SEQ ID NO: 2313 - protein, 10 aa, Artificial Sequence
  Quasi-synthetic sequence derived from human genome
KVLVRLRKRL

SEQ ID NO: 2314 - protein, 10 aa, Artificial Sequence
  Quasi-synthetic sequence derived from human genome
RIPLLRKRRF

SEQ ID NO: 2315 - protein, 10 aa, Artificial Sequence
  Quasi-synthetic sequence derived from human genome
FKHILFRRRR

SEQ ID NO: 2316 - protein, 10 aa, Artificial Sequence
  Quasi-synthetic sequence derived from human genome
FFPRILRRRK

SEQ ID NO: 2317 - protein, 10 aa, Artificial Sequence
  Quasi-synthetic sequence derived from human genome
LRLKRPILRR

SEQ ID NO: 2318 - protein, 10 aa, Artificial Sequence
  Quasi-synthetic sequence derived from human genome
RYILYWRKRF

SEQ ID NO: 2319 - protein, 10 aa, Artificial Sequence
  Quasi-synthetic sequence derived from human genome
LLRLGRLWLR

SEQ ID NO: 2320 - protein, 10 aa, Artificial Sequence
  Quasi-synthetic sequence derived from human genome
GRRRLRWRLL

SEQ ID NO: 2321 - protein, 10 aa, Artificial Sequence
  Quasi-synthetic sequence derived from human genome
RKFLYLWIRM

SEQ ID NO: 2322 - protein, 10 aa, Artificial Sequence
  Quasi-synthetic sequence derived from human genome
VMKFFRWVRR

SEQ ID NO: 2323 - protein, 10 aa, Artificial Sequence
  Quasi-synthetic sequence derived from human genome
LMKLWRRRVV

SEQ ID NO: 2324 - protein, 10 aa, Artificial Sequence
  Quasi-synthetic sequence derived from human genome
IRVRRYIFFK

SEQ ID NO: 2325 - protein, 10 aa, Artificial Sequence
  Quasi-synthetic sequence derived from human genome
MRIFRPWRLR

SEQ ID NO: 2326 - protein, 10 aa, Artificial Sequence
  Quasi-synthetic sequence derived from human genome
KKRFRYIILK

SEQ ID NO: 2327 - protein, 10 aa, Artificial Sequence
  Quasi-synthetic sequence derived from human genome
LFLALKLLKR

SEQ ID NO: 2328 - protein, 10 aa, Artificial Sequence
  Quasi-synthetic sequence derived from human genome
LLKVIRKKLV

SEQ ID NO: 2329 - protein, 10 aa, Artificial Sequence
  Quasi-synthetic sequence derived from human genome
IARLRLKKIF

SEQ ID NO: 2330 - protein, 10 aa, Artificial Sequence
  Quasi-synthetic sequence derived from human genome
IAILLFKRKR

SEQ ID NO: 2331 - protein, 10 aa, Artificial Sequence
  Quasi-synthetic sequence derived from human genome
KRRILLLIPK

SEQ ID NO: 2332 - protein, 10 aa, Artificial Sequence
  Quasi-synthetic sequence derived from human genome
KRIIRPFFLK

SEQ ID NO: 2333 - protein, 10 aa, Artificial Sequence
  Quasi-synthetic sequence derived from human genome
LKKPRRIILL

SEQ ID NO: 2334 - protein, 10 aa, Artificial Sequence
  Quasi-synthetic sequence derived from human genome
ILLIFRLIWR

SEQ ID NO: 2335 - protein, 10 aa, Artificial Sequence
  Quasi-synthetic sequence derived from human genome
RRLLPRVRLL

SEQ ID NO: 2336 - protein, 10 aa, Artificial Sequence
  Quasi-synthetic sequence derived from human genome
RLLRALRLVR

SEQ ID NO: 2337 - protein, 10 aa, Artificial Sequence
  Quasi-synthetic sequence derived from human genome
IWLRLRGLRK

SEQ ID NO: 2338 - protein, 10 aa, Artificial Sequence
  Quasi-synthetic sequence derived from human genome
LYLRMFKLKK

SEQ ID NO: 2339 - protein, 10 aa, Artificial Sequence
  Quasi-synthetic sequence derived from human genome
LRPLFRKLRK

SEQ ID NO: 2340 - protein, 10 aa, Artificial Sequence
  Quasi-synthetic sequence derived from human genome
ARLRFLKLKR

SEQ ID NO: 2341 - protein, 10 aa, Artificial Sequence
  Quasi-synthetic sequence derived from human genome
TFRRRLRLLR

SEQ ID NO: 2342 - protein, 10 aa, Artificial Sequence
  Quasi-synthetic sequence derived from human genome
LIVFYKLRKR

SEQ ID NO: 2343 - protein, 10 aa, Artificial Sequence
  Quasi-synthetic sequence derived from human genome
LMLWRLHWRR

SEQ ID NO: 2344 - protein, 10 aa, Artificial Sequence
  Quasi-synthetic sequence derived from human genome
KLRRLYFIWV

SEQ ID NO: 2345 - protein, 10 aa, Artificial Sequence
  Quasi-synthetic sequence derived from human genome
FRVLMKLFIK

SEQ ID NO: 2346 - protein, 10 aa, Artificial Sequence
  Quasi-synthetic sequence derived from human genome
KKLIRYLKLK

SEQ ID NO: 2347 - protein, 10 aa, Artificial Sequence
  Quasi-synthetic sequence derived from human genome
RLIMKRIVKI

SEQ ID NO: 2348 - protein, 10 aa, Artificial Sequence
  Quasi-synthetic sequence derived from human genome
LRRCFFWRFM

SEQ ID NO: 2349 - protein, 10 aa, Artificial Sequence
  Quasi-synthetic sequence derived from human genome
FFRRTIRLKL

SEQ ID NO: 2350 - protein, 10 aa, Artificial Sequence
  Quasi-synthetic sequence derived from human genome
LFKLLRKCIL

SEQ ID NO: 2351 - protein, 10 aa, Artificial Sequence
  Quasi-synthetic sequence derived from human genome
LKCILKFFLR

SEQ ID NO: 2352 - protein, 10 aa, Artificial Sequence
  Quasi-synthetic sequence derived from human genome
LRRRYLRLRY

SEQ ID NO: 2353 - protein, 10 aa, Artificial Sequence
  Quasi-synthetic sequence derived from human genome
LLLLLLSRRR

SEQ ID NO: 2354 - protein, 10 aa, Artificial Sequence
  Quasi-synthetic sequence derived from human genome
RLLRRLGLLL

SEQ ID NO: 2355 - protein, 10 aa, Artificial Sequence
  Quasi-synthetic sequence derived from human genome
LLMYKRILLR

SEQ ID NO: 2356 - protein, 10 aa, Artificial Sequence
  Quasi-synthetic sequence derived from human genome
RIFYKLMLRL

SEQ ID NO: 2357 - protein, 10 aa, Artificial Sequence
  Quasi-synthetic sequence derived from human genome
FYVKLRWLLK

SEQ ID NO: 2358 - protein, 10 aa, Artificial Sequence
  Quasi-synthetic sequence derived from human genome
KKMKLLLFLV

SEQ ID NO: 2359 - protein, 10 aa, Artificial Sequence
  Quasi-synthetic sequence derived from human genome
KFWRTRFLLL

SEQ ID NO: 2360 - protein, 10 aa, Artificial Sequence
  Quasi-synthetic sequence derived from human genome
RLTWKLLLLR

SEQ ID NO: 2361 - protein, 10 aa, Artificial Sequence
  Quasi-synthetic sequence derived from human genome
RFLKRLLLTW

SEQ ID NO: 2362 - protein, 10 aa, Artificial Sequence
  Quasi-synthetic sequence derived from human genome
RRKLLLFKTF

SEQ ID NO: 2363 - protein, 10 aa, Artificial Sequence
  Quasi-synthetic sequence derived from human genome
VKRLVKILLL

SEQ ID NO: 2364 - protein, 10 aa, Artificial Sequence
  Quasi-synthetic sequence derived from human genome
LIILPFKRRL

SEQ ID NO: 2365 - protein, 10 aa, Artificial Sequence
  Quasi-synthetic sequence derived from human genome
LKFHIRRFIF

SEQ ID NO: 2366 - protein, 10 aa, Artificial Sequence
  Quasi-synthetic sequence derived from human genome
RPRVLLRWWL

SEQ ID NO: 2367 - protein, 10 aa, Artificial Sequence
  Quasi-synthetic sequence derived from human genome
RIIRFLPLFK

SEQ ID NO: 2368 - protein, 10 aa, Artificial Sequence
  Quasi-synthetic sequence derived from human genome
IIRIMRVLRI

SEQ ID NO: 2369 - protein, 10 aa, Artificial Sequence
  Quasi-synthetic sequence derived from human genome
RLFRVMRLVK

SEQ ID NO: 2370 - protein, 10 aa, Artificial Sequence
  Quasi-synthetic sequence derived from human genome
LWMWWRRNRR

SEQ ID NO: 2371 - protein, 10 aa, Artificial Sequence
  Quasi-synthetic sequence derived from human genome
LLRSFFRRRR

SEQ ID NO: 2372 - protein, 10 aa, Artificial Sequence
  Quasi-synthetic sequence derived from human genome
RGLLLRRLRR

SEQ ID NO: 2373 - protein, 10 aa, Artificial Sequence
  Quasi-synthetic sequence derived from human genome
FRRLRQLLRR

SEQ ID NO: 2374 - protein, 10 aa, Artificial Sequence
  Quasi-synthetic sequence derived from human genome
SRLIFLLRRW

SEQ ID NO: 2375 - protein, 10 aa, Artificial Sequence
  Quasi-synthetic sequence derived from human genome
FWLVRWLLFR

SEQ ID NO: 2376 - protein, 10 aa, Artificial Sequence
  Quasi-synthetic sequence derived from human genome
FFLLIIRKLL

SEQ ID NO: 2377 - protein, 10 aa, Artificial Sequence
  Quasi-synthetic sequence derived from human genome
RLLILILKLF

SEQ ID NO: 2378 - protein, 10 aa, Artificial Sequence
  Quasi-synthetic sequence derived from human genome
KKRKLFRRFM

SEQ ID NO: 2379 - protein, 10 aa, Artificial Sequence
  Quasi-synthetic sequence derived from human genome
RMKKKRLLLR

SEQ ID NO: 2380 - protein, 10 aa, Artificial Sequence
  Quasi-synthetic sequence derived from human genome
IYLIKLKKLI

SEQ ID NO: 2381 - protein, 10 aa, Artificial Sequence
  Quasi-synthetic sequence derived from human genome
LFKRFLRIQR

SEQ ID NO: 2382 - protein, 10 aa, Artificial Sequence
  Quasi-synthetic sequence derived from human genome
LRFVKCFLRR

SEQ ID NO: 2383 - protein, 10 aa, Artificial Sequence
  Quasi-synthetic sequence derived from human genome
LRGFFIKRRF

SEQ ID NO: 2384 - protein, 10 aa, Artificial Sequence
  Quasi-synthetic sequence derived from human genome
SFFRKLRLIR

SEQ ID NO: 2385 - protein, 10 aa, Artificial Sequence
  Quasi-synthetic sequence derived from human genome
LRKWLKARKF

SEQ ID NO: 2386 - protein, 10 aa, Artificial Sequence
  Quasi-synthetic sequence derived from human genome
RRLMRPLWLL

SEQ ID NO: 2387 - protein, 10 aa, Artificial Sequence
  Quasi-synthetic sequence derived from human genome
RVVRFVRILR

SEQ ID NO: 2388 - protein, 10 aa, Artificial Sequence
  Quasi-synthetic sequence derived from human genome
RLIFKAFLLK

SEQ ID NO: 2389 - protein, 10 aa, Artificial Sequence
  Quasi-synthetic sequence derived from human genome
ILLLLLAKRK

SEQ ID NO: 2390 - protein, 10 aa, Artificial Sequence
  Quasi-synthetic sequence derived from human genome
KRLLKFLHIF

SEQ ID NO: 2391 - protein, 10 aa, Artificial Sequence
  Quasi-synthetic sequence derived from human genome
FLMKVLKKKI

SEQ ID NO: 2392 - protein, 10 aa, Artificial Sequence
  Quasi-synthetic sequence derived from human genome
RKAIFIFIRW

SEQ ID NO: 2393 - protein, 10 aa, Artificial Sequence
  Quasi-synthetic sequence derived from human genome
VWKIVRKLLI

SEQ ID NO: 2394 - protein, 10 aa, Artificial Sequence
  Quasi-synthetic sequence derived from human genome
LQLLLWRLKR

SEQ ID NO: 2395 - protein, 10 aa, Artificial Sequence
  Quasi-synthetic sequence derived from human genome
LKALLLRMRR

SEQ ID NO: 2396 - protein, 10 aa, Artificial Sequence
  Quasi-synthetic sequence derived from human genome
LHRLLRKMLR

SEQ ID NO: 2397 - protein, 10 aa, Artificial Sequence
  Quasi-synthetic sequence derived from human genome
KRRLLPMLRL

SEQ ID NO: 2398 - protein, 10 aa, Artificial Sequence
  Quasi-synthetic sequence derived from human genome
RFRLKHLLRM

SEQ ID NO: 2399 - protein, 10 aa, Artificial Sequence
  Quasi-synthetic sequence derived from human genome
KIILPRLIRK

SEQ ID NO: 2400 - protein, 10 aa, Artificial Sequence
  Quasi-synthetic sequence derived from human genome
CLRLLRRYRL

SEQ ID NO: 2401 - protein, 10 aa, Artificial Sequence
  Quasi-synthetic sequence derived from human genome
RKKVLLKVII

SEQ ID NO: 2402 - protein, 10 aa, Artificial Sequence
  Quasi-synthetic sequence derived from human genome
YRRLCLRLRL

SEQ ID NO: 2403 - protein, 10 aa, Artificial Sequence
  Quasi-synthetic sequence derived from human genome
RQLFFRKKLL

SEQ ID NO: 2404 - protein, 10 aa, Artificial Sequence
  Quasi-synthetic sequence derived from human genome
LRILRYFRFY

SEQ ID NO: 2405 - protein, 10 aa, Artificial Sequence
  Quasi-synthetic sequence derived from human genome
LYFRIRFYFR

SEQ ID NO: 2406 - protein, 10 aa, Artificial Sequence
  Quasi-synthetic sequence derived from human genome
KVRFKFFYLL

SEQ ID NO: 2407 - protein, 10 aa, Artificial Sequence
  Quasi-synthetic sequence derived from human genome
KKLLLFLKAF

SEQ ID NO: 2408 - protein, 10 aa, Artificial Sequence
  Quasi-synthetic sequence derived from human genome
LLRKKYLRMR

SEQ ID NO: 2409 - protein, 10 aa, Artificial Sequence
  Quasi-synthetic sequence derived from human genome
RVLRMMRIFW

SEQ ID NO: 2410 - protein, 10 aa, Artificial Sequence
  Quasi-synthetic sequence derived from human genome
PLVLRRILRR

SEQ ID NO: 2411 - protein, 10 aa, Artificial Sequence
  Quasi-synthetic sequence derived from human genome
YIFWKRYRFK

SEQ ID NO: 2412 - protein, 10 aa, Artificial Sequence
  Quasi-synthetic sequence derived from human genome
MKKLIRYLKL

SEQ ID NO: 2413 - protein, 10 aa, Artificial Sequence
  Quasi-synthetic sequence derived from human genome
ILLKKYLMKR

SEQ ID NO: 2414 - protein, 10 aa, Artificial Sequence
  Quasi-synthetic sequence derived from human genome
LFFWLVLRRL

SEQ ID NO: 2415 - protein, 10 aa, Artificial Sequence
  Quasi-synthetic sequence derived from human genome
VALLLLWRRR

SEQ ID NO: 2416 - protein, 10 aa, Artificial Sequence
  Quasi-synthetic sequence derived from human genome
LLRLIILIRI

SEQ ID NO: 2417 - protein, 10 aa, Artificial Sequence
  Quasi-synthetic sequence derived from human genome
RFNFLRFLIR

SEQ ID NO: 2418 - protein, 10 aa, Artificial Sequence
  Quasi-synthetic sequence derived from human genome
LLILLSRRFR

SEQ ID NO: 2419 - protein, 10 aa, Artificial Sequence
  Quasi-synthetic sequence derived from human genome
FRIYKRKVLI

SEQ ID NO: 2420 - protein, 10 aa, Artificial Sequence
  Quasi-synthetic sequence derived from human genome
RWFLHRMKRI

SEQ ID NO: 2421 - protein, 10 aa, Artificial Sequence
  Quasi-synthetic sequence derived from human genome
LPRKLKRILR

SEQ ID NO: 2422 - protein, 10 aa, Artificial Sequence
  Quasi-synthetic sequence derived from human genome
IKRFRKLLPR

SEQ ID NO: 2423 - protein, 10 aa, Artificial Sequence
  Quasi-synthetic sequence derived from human genome
WLKKCLKRIR

SEQ ID NO: 2424 - protein, 10 aa, Artificial Sequence
  Quasi-synthetic sequence derived from human genome
FKHKLFRIKI

SEQ ID NO: 2425 - protein, 10 aa, Artificial Sequence
  Quasi-synthetic sequence derived from human genome
KRKVAWLLRW

SEQ ID NO: 2426 - protein, 10 aa, Artificial Sequence
  Quasi-synthetic sequence derived from human genome
FRRKLFKRVK

SEQ ID NO: 2427 - protein, 10 aa, Artificial Sequence
  Quasi-synthetic sequence derived from human genome
LLFVMWMKRR

SEQ ID NO: 2428 - protein, 10 aa, Artificial Sequence
  Quasi-synthetic sequence derived from human genome
IYLIMLRRFK

SEQ ID NO: 2429 - protein, 10 aa, Artificial Sequence
  Quasi-synthetic sequence derived from human genome
LCRLKIRRLM

SEQ ID NO: 2430 - protein, 10 aa, Artificial Sequence
  Quasi-synthetic sequence derived from human genome
RILRIFKLTR

SEQ ID NO: 2431 - protein, 10 aa, Artificial Sequence
  Quasi-synthetic sequence derived from human genome
RLLRIFKITR

SEQ ID NO: 2432 - protein, 10 aa, Artificial Sequence
  Quasi-synthetic sequence derived from human genome
LILKTIRRRL

SEQ ID NO: 2433 - protein, 10 aa, Artificial Sequence
  Quasi-synthetic sequence derived from human genome
IRLWRRCYLR

SEQ ID NO: 2434 - protein, 10 aa, Artificial Sequence
  Quasi-synthetic sequence derived from human genome
LLRPVKLLRR

SEQ ID NO: 2435 - protein, 10 aa, Artificial Sequence
  Quasi-synthetic sequence derived from human genome
LRKLNWKRIL

SEQ ID NO: 2436 - protein, 10 aa, Artificial Sequence
  Quasi-synthetic sequence derived from human genome
FRRCWLVFKK

SEQ ID NO: 2437 - protein, 10 aa, Artificial Sequence
  Quasi-synthetic sequence derived from human genome
RKRLFPVRFL

SEQ ID NO: 2438 - protein, 10 aa, Artificial Sequence
  Quasi-synthetic sequence derived from human genome
RVRKFLALLR

SEQ ID NO: 2439 - protein, 10 aa, Artificial Sequence
  Quasi-synthetic sequence derived from human genome
KVLRPFLLRR

SEQ ID NO: 2440 - protein, 10 aa, Artificial Sequence
  Quasi-synthetic sequence derived from human genome
RLPLLRRVLK

SEQ ID NO: 2441 - protein, 10 aa, Artificial Sequence
  Quasi-synthetic sequence derived from human genome
RHKVLLRRLL

SEQ ID NO: 2442 - protein, 10 aa, Artificial Sequence
  Quasi-synthetic sequence derived from human genome
LLWKKRSILR

SEQ ID NO: 2443 - protein, 10 aa, Artificial Sequence
  Quasi-synthetic sequence derived from human genome
LWKNFILKRR

SEQ ID NO: 2444 - protein, 10 aa, Artificial Sequence
  Quasi-synthetic sequence derived from human genome
RKHFRLVLRL

SEQ ID NO: 2445 - protein, 10 aa, Artificial Sequence
  Quasi-synthetic sequence derived from human genome
HLLLKLRRRV

SEQ ID NO: 2446 - protein, 10 aa, Artificial Sequence
  Quasi-synthetic sequence derived from human genome
LFLHLKRRVR

SEQ ID NO: 2447 - protein, 10 aa, Artificial Sequence
  Quasi-synthetic sequence derived from human genome
RVLLAFRRLK

SEQ ID NO: 2448 - protein, 10 aa, Artificial Sequence
  Quasi-synthetic sequence derived from human genome
FRRGRLRWLK

SEQ ID NO: 2449 - protein, 10 aa, Artificial Sequence
  Quasi-synthetic sequence derived from human genome
LARFLRMLLR

SEQ ID NO: 2450 - protein, 10 aa, Artificial Sequence
  Quasi-synthetic sequence derived from human genome
RFLPLLRMRL

SEQ ID NO: 2451 - protein, 10 aa, Artificial Sequence
  Quasi-synthetic sequence derived from human genome
LRLLRALRML

SEQ ID NO: 2452 - protein, 10 aa, Artificial Sequence
  Quasi-synthetic sequence derived from human genome
LLRRFPRMLL

SEQ ID NO: 2453 - protein, 10 aa, Artificial Sequence
  Quasi-synthetic sequence derived from human genome
LWLWKQFLKR

SEQ ID NO: 2454 - protein, 10 aa, Artificial Sequence
  Quasi-synthetic sequence derived from human genome
RWVHILRRRI

SEQ ID NO: 2455 - protein, 10 aa, Artificial Sequence
  Quasi-synthetic sequence derived from human genome
ILRKRPLIFI

SEQ ID NO: 2456 - protein, 10 aa, Artificial Sequence
  Quasi-synthetic sequence derived from human genome
FILKVVLRIK

SEQ ID NO: 2457 - protein, 10 aa, Artificial Sequence
  Quasi-synthetic sequence derived from human genome
RLRNLKFLFL

SEQ ID NO: 2458 - protein, 10 aa, Artificial Sequence
  Quasi-synthetic sequence derived from human genome
FFRLLNLRKL

SEQ ID NO: 2459 - protein, 10 aa, Artificial Sequence
  Quasi-synthetic sequence derived from human genome
RLNFLRFLLK

SEQ ID NO: 2460 - protein, 10 aa, Artificial Sequence
  Quasi-synthetic sequence derived from human genome
WKRWKKRYFV

SEQ ID NO: 2461 - protein, 10 aa, Artificial Sequence
  Quasi-synthetic sequence derived from human genome
RIGRILRLIR

SEQ ID NO: 2462 - protein, 10 aa, Artificial Sequence
  Quasi-synthetic sequence derived from human genome
RKWLKMFKKR

SEQ ID NO: 2463 - protein, 10 aa, Artificial Sequence
  Quasi-synthetic sequence derived from human genome
LKKFRYVKLI

SEQ ID NO: 2464 - protein, 10 aa, Artificial Sequence
  Quasi-synthetic sequence derived from human genome
FRKFLMFIYK

SEQ ID NO: 2465 - protein, 10 aa, Artificial Sequence
  Quasi-synthetic sequence derived from human genome
YKLRRLYFIW

SEQ ID NO: 2466 - protein, 10 aa, Artificial Sequence
  Quasi-synthetic sequence derived from human genome
IKLLPFLKKK

SEQ ID NO: 2467 - protein, 10 aa, Artificial Sequence
  Quasi-synthetic sequence derived from human genome
KWYLKKLLFV

SEQ ID NO: 2468 - protein, 10 aa, Artificial Sequence
  Quasi-synthetic sequence derived from human genome
KRRFRKFLVY

SEQ ID NO: 2469 - protein, 10 aa, Artificial Sequence
  Quasi-synthetic sequence derived from human genome
LLLCRWKKKK

SEQ ID NO: 2470 - protein, 10 aa, Artificial Sequence
  Quasi-synthetic sequence derived from human genome
LRRFFKAKKL

SEQ ID NO: 2471 - protein, 10 aa, Artificial Sequence
  Quasi-synthetic sequence derived from human genome
RLLLLFLVLR

SEQ ID NO: 2472 - protein, 10 aa, Artificial Sequence
  Quasi-synthetic sequence derived from human genome
KIKIFIIYLK

SEQ ID NO: 2473 - protein, 10 aa, Artificial Sequence
  Quasi-synthetic sequence derived from human genome
LRAIIKKIWK

SEQ ID NO: 2474 - protein, 10 aa, Artificial Sequence
  Quasi-synthetic sequence derived from human genome
LLLIRRFKKT

SEQ ID NO: 2475 - protein, 10 aa, Artificial Sequence
  Quasi-synthetic sequence derived from human genome
YRRLALLRRL

SEQ ID NO: 2476 - protein, 10 aa, Artificial Sequence
  Quasi-synthetic sequence derived from human genome
LKRKTLIRLL

SEQ ID NO: 2477 - protein, 10 aa, Artificial Sequence
  Quasi-synthetic sequence derived from human genome
LWKLGFFKRK

SEQ ID NO: 2478 - protein, 10 aa, Artificial Sequence
  Quasi-synthetic sequence derived from human genome
WLKRGLKFLK

SEQ ID NO: 2479 - protein, 10 aa, Artificial Sequence
  Quasi-synthetic sequence derived from human genome
GFFLWLKKRK

SEQ ID NO: 2480 - protein, 10 aa, Artificial Sequence
  Quasi-synthetic sequence derived from human genome
FLRRRKRFKR

SEQ ID NO: 2481 - protein, 10 aa, Artificial Sequence
  Quasi-synthetic sequence derived from human genome
FLRRRRRFKK

SEQ ID NO: 2482 - protein, 10 aa, Artificial Sequence
  Quasi-synthetic sequence derived from human genome
VIPFLKRRWR

SEQ ID NO: 2483 - protein, 10 aa, Artificial Sequence
  Quasi-synthetic sequence derived from human genome
KQILKIRWRW

SEQ ID NO: 2484 - protein, 10 aa, Artificial Sequence
  Quasi-synthetic sequence derived from human genome
RRWCWRWPWR

SEQ ID NO: 2485 - protein, 10 aa, Artificial Sequence
  Quasi-synthetic sequence derived from human genome
KPLRRRVIWL

SEQ ID NO: 2486 - protein, 10 aa, Artificial Sequence
  Quasi-synthetic sequence derived from human genome
LVLRLLRALR

SEQ ID NO: 2487 - protein, 10 aa, Artificial Sequence
  Quasi-synthetic sequence derived from human genome
LVLLALRLRR

SEQ ID NO: 2488 - protein, 10 aa, Artificial Sequence
  Quasi-synthetic sequence derived from human genome
LLILLRQWKR

SEQ ID NO: 2489 - protein, 10 aa, Artificial Sequence
  Quasi-synthetic sequence derived from human genome
RLLPLRRLFV

SEQ ID NO: 2490 - protein, 10 aa, Artificial Sequence
  Quasi-synthetic sequence derived from human genome
RVFLFFRPFR

SEQ ID NO: 2491 - protein, 10 aa, Artificial Sequence
  Quasi-synthetic sequence derived from human genome
WRLRALRRVR

SEQ ID NO: 2492 - protein, 10 aa, Artificial Sequence
  Quasi-synthetic sequence derived from human genome
RRLWPFVRRR

SEQ ID NO: 2493 - protein, 10 aa, Artificial Sequence
  Quasi-synthetic sequence derived from human genome
IILLLLKIWK

SEQ ID NO: 2494 - protein, 10 aa, Artificial Sequence
  Quasi-synthetic sequence derived from human genome
RRRIKLLGIL

SEQ ID NO: 2495 - protein, 10 aa, Artificial Sequence
  Quasi-synthetic sequence derived from human genome
RRSRKLILFI

SEQ ID NO: 2496 - protein, 10 aa, Artificial Sequence
  Quasi-synthetic sequence derived from human genome
RRIRKLISFL

SEQ ID NO: 2497 - protein, 10 aa, Artificial Sequence
  Quasi-synthetic sequence derived from human genome
RCVRLLRIFK

SEQ ID NO: 2498 - protein, 10 aa, Artificial Sequence
  Quasi-synthetic sequence derived from human genome
FYFFRKKYRI

SEQ ID NO: 2499 - protein, 10 aa, Artificial Sequence
  Quasi-synthetic sequence derived from human genome
LRQRRRRLLI

SEQ ID NO: 2500 - protein, 10 aa, Artificial Sequence
  Quasi-synthetic sequence derived from human genome
LWKIARKWMR

SEQ ID NO: 2501 - protein, 10 aa, Artificial Sequence
  Quasi-synthetic sequence derived from human genome
FLRKKLFFKT

SEQ ID NO: 2502 - protein, 10 aa, Artificial Sequence
  Quasi-synthetic sequence derived from human genome
KLTRLKKLFL

SEQ ID NO: 2503 - protein, 10 aa, Artificial Sequence
  Quasi-synthetic sequence derived from human genome
RLKLWFPRFM

SEQ ID NO: 2504 - protein, 10 aa, Artificial Sequence
  Quasi-synthetic sequence derived from human genome
LKIFLPKKLL

SEQ ID NO: 2505 - protein, 10 aa, Artificial Sequence
  Quasi-synthetic sequence derived from human genome
RRLLRRCRLR

SEQ ID NO: 2506 - protein, 10 aa, Artificial Sequence
  Quasi-synthetic sequence derived from human genome
IFRRPRKLFM

SEQ ID NO: 2507 - protein, 10 aa, Artificial Sequence
  Quasi-synthetic sequence derived from human genome
LTLLLIKLRR

SEQ ID NO: 2508 - protein, 10 aa, Artificial Sequence
  Quasi-synthetic sequence derived from human genome
RRLLLTKLFI

SEQ ID NO: 2509 - protein, 10 aa, Artificial Sequence
  Quasi-synthetic sequence derived from human genome
RLWKARVLKL

SEQ ID NO: 2510 - protein, 10 aa, Artificial Sequence
  Quasi-synthetic sequence derived from human genome
LKRFLVWKPR

SEQ ID NO: 2511 - protein, 10 aa, Artificial Sequence
  Quasi-synthetic sequence derived from human genome
FLWFFSKRFK

SEQ ID NO: 2512 - protein, 10 aa, Artificial Sequence
  Quasi-synthetic sequence derived from human genome
LLFLLWVRLK

SEQ ID NO: 2513 - protein, 10 aa, Artificial Sequence
  Quasi-synthetic sequence derived from human genome
WLLKLLFRVF

SEQ ID NO: 2514 - protein, 10 aa, Artificial Sequence
  Quasi-synthetic sequence derived from human genome
IFRWWKISLR

SEQ ID NO: 2515 - protein, 10 aa, Artificial Sequence
  Quasi-synthetic sequence derived from human genome
LLRLWRVARI

SEQ ID NO: 2516 - protein, 10 aa, Artificial Sequence
  Quasi-synthetic sequence derived from human genome
FFRKRKCFVF

SEQ ID NO: 2517 - protein, 10 aa, Artificial Sequence
  Quasi-synthetic sequence derived from human genome
LIFFLKRRNK

SEQ ID NO: 2518 - protein, 10 aa, Artificial Sequence
  Quasi-synthetic sequence derived from human genome
FLFRRCFKVK

SEQ ID NO: 2519 - protein, 10 aa, Artificial Sequence
  Quasi-synthetic sequence derived from human genome
KLSLIRKFRL

SEQ ID NO: 2520 - protein, 10 aa, Artificial Sequence
  Quasi-synthetic sequence derived from human genome
LKRLILNFRK

SEQ ID NO: 2521 - protein, 10 aa, Artificial Sequence
  Quasi-synthetic sequence derived from human genome
SLLKKRIRFL

SEQ ID NO: 2522 - protein, 10 aa, Artificial Sequence
  Quasi-synthetic sequence derived from human genome
KLILFFKRRN

SEQ ID NO: 2523 - protein, 10 aa, Artificial Sequence
  Quasi-synthetic sequence derived from human genome
RIRFSKLLLK

SEQ ID NO: 2524 - protein, 10 aa, Artificial Sequence
  Quasi-synthetic sequence derived from human genome
WLRTKFIRRR

SEQ ID NO: 2525 - protein, 10 aa, Artificial Sequence
  Quasi-synthetic sequence derived from human genome
IRLIFRRLSL

SEQ ID NO: 2526 - protein, 10 aa, Artificial Sequence
  Quasi-synthetic sequence derived from human genome
ILRLLRILGR

SEQ ID NO: 2527 - protein, 10 aa, Artificial Sequence
  Quasi-synthetic sequence derived from human genome
KRIGWRFIRI

SEQ ID NO: 2528 - protein, 10 aa, Artificial Sequence
  Quasi-synthetic sequence derived from human genome
LFKKVYLLLK

SEQ ID NO: 2529 - protein, 10 aa, Artificial Sequence
  Quasi-synthetic sequence derived from human genome
IRKKYFLMKI

SEQ ID NO: 2530 - protein, 10 aa, Artificial Sequence
  Quasi-synthetic sequence derived from human genome
LRRPKRIIIR

SEQ ID NO: 2531 - protein, 10 aa, Artificial Sequence
  Quasi-synthetic sequence derived from human genome
VRKRVIKILR

SEQ ID NO: 2532 - protein, 10 aa, Artificial Sequence
  Quasi-synthetic sequence derived from human genome
RLKQRFLLRR

SEQ ID NO: 2533 - protein, 10 aa, Artificial Sequence
  Quasi-synthetic sequence derived from human genome
RRKFLNLRFR

SEQ ID NO: 2534 - protein, 10 aa, Artificial Sequence
  Quasi-synthetic sequence derived from human genome
NFRLLKRRLR

SEQ ID NO: 2535 - protein, 10 aa, Artificial Sequence
  Quasi-synthetic sequence derived from human genome
LLLRRGRLKR

SEQ ID NO: 2536 - protein, 10 aa, Artificial Sequence
  Quasi-synthetic sequence derived from human genome
LWYLRLLRLL

SEQ ID NO: 2537 - protein, 10 aa, Artificial Sequence
  Quasi-synthetic sequence derived from human genome
HWRKMLWRFI

SEQ ID NO: 2538 - protein, 10 aa, Artificial Sequence
  Quasi-synthetic sequence derived from human genome
FMKILKLIVK

SEQ ID NO: 2539 - protein, 10 aa, Artificial Sequence
  Quasi-synthetic sequence derived from human genome
FRRIKMPWLW

SEQ ID NO: 2540 - protein, 10 aa, Artificial Sequence
  Quasi-synthetic sequence derived from human genome
FKFLFTLFRK

SEQ ID NO: 2541 - protein, 10 aa, Artificial Sequence
  Quasi-synthetic sequence derived from human genome
FRWLIFRIML

SEQ ID NO: 2542 - protein, 10 aa, Artificial Sequence
  Quasi-synthetic sequence derived from human genome
LVMRKRLRLY

SEQ ID NO: 2543 - protein, 10 aa, Artificial Sequence
  Quasi-synthetic sequence derived from human genome
LILILLIKKL

SEQ ID NO: 2544 - protein, 10 aa, Artificial Sequence
  Quasi-synthetic sequence derived from human genome
RWKRFYRAFL

SEQ ID NO: 2545 - protein, 10 aa, Artificial Sequence
  Quasi-synthetic sequence derived from human genome
LRVLKLVRFM

SEQ ID NO: 2546 - protein, 10 aa, Artificial Sequence
  Quasi-synthetic sequence derived from human genome
LMRVLKLVRF

SEQ ID NO: 2547 - protein, 10 aa, Artificial Sequence
  Quasi-synthetic sequence derived from human genome
MRWRWWQRLL

SEQ ID NO: 2548 - protein, 10 aa, Artificial Sequence
  Quasi-synthetic sequence derived from human genome
LRRLFRAIFM

SEQ ID NO: 2549 - protein, 10 aa, Artificial Sequence
  Quasi-synthetic sequence derived from human genome
RLWVLHLKRL

SEQ ID NO: 2550 - protein, 10 aa, Artificial Sequence
  Quasi-synthetic sequence derived from human genome
KARLFRLWLV

SEQ ID NO: 2551 - protein, 10 aa, Artificial Sequence
  Quasi-synthetic sequence derived from human genome
KRWSKIWLLF

SEQ ID NO: 2552 - protein, 10 aa, Artificial Sequence
  Quasi-synthetic sequence derived from human genome
RRLVPFLWLK

SEQ ID NO: 2553 - protein, 10 aa, Artificial Sequence
  Quasi-synthetic sequence derived from human genome
KRLAVLRLFW

SEQ ID NO: 2554 - protein, 10 aa, Artificial Sequence
  Quasi-synthetic sequence derived from human genome
LLRKRWVLAL

SEQ ID NO: 2555 - protein, 10 aa, Artificial Sequence
  Quasi-synthetic sequence derived from human genome
LLKKRKWPLK

SEQ ID NO: 2556 - protein, 10 aa, Artificial Sequence
  Quasi-synthetic sequence derived from human genome
LKPKLWKKLR

SEQ ID NO: 2557 - protein, 10 aa, Artificial Sequence
  Quasi-synthetic sequence derived from human genome
KKLKRIILAI

SEQ ID NO: 2558 - protein, 10 aa, Artificial Sequence
  Quasi-synthetic sequence derived from human genome
LIRRIAIKIL

SEQ ID NO: 2559 - protein, 10 aa, Artificial Sequence
  Quasi-synthetic sequence derived from human genome
LFKKLNFKRL

SEQ ID NO: 2560 - protein, 10 aa, Artificial Sequence
  Quasi-synthetic sequence derived from human genome
KKFGLKLFRL

SEQ ID NO: 2561 - protein, 10 aa, Artificial Sequence
  Quasi-synthetic sequence derived from human genome
KLFQFLKLRK

SEQ ID NO: 2562 - protein, 10 aa, Artificial Sequence
  Quasi-synthetic sequence derived from human genome
LLRFKILRSL

SEQ ID NO: 2563 - protein, 10 aa, Artificial Sequence
  Quasi-synthetic sequence derived from human genome
NFFKFFLRRI

SEQ ID NO: 2564 - protein, 10 aa, Artificial Sequence
  Quasi-synthetic sequence derived from human genome
KILSLLRLLR

SEQ ID NO: 2565 - protein, 10 aa, Artificial Sequence
  Quasi-synthetic sequence derived from human genome
QRLIFRLLKL

SEQ ID NO: 2566 - protein, 10 aa, Artificial Sequence
  Quasi-synthetic sequence derived from human genome
RKILRLITIR

SEQ ID NO: 2567 - protein, 10 aa, Artificial Sequence
  Quasi-synthetic sequence derived from human genome
RIFFYVRRRV

SEQ ID NO: 2568 - protein, 10 aa, Artificial Sequence
  Quasi-synthetic sequence derived from human genome
LRVIRLVRVF

SEQ ID NO: 2569 - protein, 10 aa, Artificial Sequence
  Quasi-synthetic sequence derived from human genome
VLKRRLVKLV

SEQ ID NO: 2570 - protein, 10 aa, Artificial Sequence
  Quasi-synthetic sequence derived from human genome
ILHKFVLRRR

SEQ ID NO: 2571 - protein, 10 aa, Artificial Sequence
  Quasi-synthetic sequence derived from human genome
KWSRRFFIIK

SEQ ID NO: 2572 - protein, 10 aa, Artificial Sequence
  Quasi-synthetic sequence derived from human genome
RLALIRFRVK

SEQ ID NO: 2573 - protein, 10 aa, Artificial Sequence
  Quasi-synthetic sequence derived from human genome
PVIRLRFKRL

SEQ ID NO: 2574 - protein, 10 aa, Artificial Sequence
  Quasi-synthetic sequence derived from human genome
RIFRVLKLAR

SEQ ID NO: 2575 - protein, 10 aa, Artificial Sequence
  Quasi-synthetic sequence derived from human genome
WWLKLRPLMK

SEQ ID NO: 2576 - protein, 10 aa, Artificial Sequence
  Quasi-synthetic sequence derived from human genome
RWKKRYFKLR

SEQ ID NO: 2577 - protein, 10 aa, Artificial Sequence
  Quasi-synthetic sequence derived from human genome
RLLLLLLLKV

SEQ ID NO: 2578 - protein, 10 aa, Artificial Sequence
  Quasi-synthetic sequence derived from human genome
RFRGWLVRRL

SEQ ID NO: 2579 - protein, 10 aa, Artificial Sequence
  Quasi-synthetic sequence derived from human genome
LVRRLRRWGL

SEQ ID NO: 2580 - protein, 10 aa, Artificial Sequence
  Quasi-synthetic sequence derived from human genome
RLLVGLRWRR

SEQ ID NO: 2581 - protein, 10 aa, Artificial Sequence
  Quasi-synthetic sequence derived from human genome
FFFRVRSRRW

SEQ ID NO: 2582 - protein, 10 aa, Artificial Sequence
  Quasi-synthetic sequence derived from human genome
RRLWPRYLLL

SEQ ID NO: 2583 - protein, 10 aa, Artificial Sequence
  Quasi-synthetic sequence derived from human genome
WKKKALIIIW

SEQ ID NO: 2584 - protein, 10 aa, Artificial Sequence
  Quasi-synthetic sequence derived from human genome
WPRRLLLRYL

SEQ ID NO: 2585 - protein, 10 aa, Artificial Sequence
  Quasi-synthetic sequence derived from human genome
WRLYLLRHFR

SEQ ID NO: 2586 - protein, 10 aa, Artificial Sequence
  Quasi-synthetic sequence derived from human genome
WLIKLLTRLK

SEQ ID NO: 2587 - protein, 10 aa, Artificial Sequence
  Quasi-synthetic sequence derived from human genome
WLTKKFLLKK

SEQ ID NO: 2588 - protein, 10 aa, Artificial Sequence
  Quasi-synthetic sequence derived from human genome
IRRCRRLIVI

SEQ ID NO: 2589 - protein, 10 aa, Artificial Sequence
  Quasi-synthetic sequence derived from human genome
FIRKPFIKFI

SEQ ID NO: 2590 - protein, 10 aa, Artificial Sequence
  Quasi-synthetic sequence derived from human genome
KRPKLLIFII

SEQ ID NO: 2591 - protein, 10 aa, Artificial Sequence
  Quasi-synthetic sequence derived from human genome
KFRKIIIPFL

SEQ ID NO: 2592 - protein, 10 aa, Artificial Sequence
  Quasi-synthetic sequence derived from human genome
RRILIRYYIK

SEQ ID NO: 2593 - protein, 10 aa, Artificial Sequence
  Quasi-synthetic sequence derived from human genome
RFKFLSKLLF

SEQ ID NO: 2594 - protein, 10 aa, Artificial Sequence
  Quasi-synthetic sequence derived from human genome
FKKLLRLFSL

SEQ ID NO: 2595 - protein, 10 aa, Artificial Sequence
  Quasi-synthetic sequence derived from human genome
LQLLRLFKLK

SEQ ID NO: 2596 - protein, 10 aa, Artificial Sequence
  Quasi-synthetic sequence derived from human genome
RKRWFILRRG

SEQ ID NO: 2597 - protein, 10 aa, Artificial Sequence
  Quasi-synthetic sequence derived from human genome
RRLLRVLRAR

SEQ ID NO: 2598 - protein, 10 aa, Artificial Sequence
  Quasi-synthetic sequence derived from human genome
VWLRFHKKKW

SEQ ID NO: 2599 - protein, 10 aa, Artificial Sequence
  Quasi-synthetic sequence derived from human genome
LPLLKIIKKK

SEQ ID NO: 2600 - protein, 10 aa, Artificial Sequence
  Quasi-synthetic sequence derived from human genome
IFIFRGRKFW

SEQ ID NO: 2601 - protein, 10 aa, Artificial Sequence
  Quasi-synthetic sequence derived from human genome
IVLLALRLRR

SEQ ID NO: 2602 - protein, 10 aa, Artificial Sequence
  Quasi-synthetic sequence derived from human genome
LRRVKVLLVL

SEQ ID NO: 2603 - protein, 10 aa, Artificial Sequence
  Quasi-synthetic sequence derived from human genome
LRVLRALRIL

SEQ ID NO: 2604 - protein, 10 aa, Artificial Sequence
  Quasi-synthetic sequence derived from human genome
VLRLPRLIRL

SEQ ID NO: 2605 - protein, 10 aa, Artificial Sequence
  Quasi-synthetic sequence derived from human genome
RLRMVWRRKR

SEQ ID NO: 2606 - protein, 10 aa, Artificial Sequence
  Quasi-synthetic sequence derived from human genome
VVLLLKYRRR

SEQ ID NO: 2607 - protein, 10 aa, Artificial Sequence
  Quasi-synthetic sequence derived from human genome
LVYVLLRRRK

SEQ ID NO: 2608 - protein, 10 aa, Artificial Sequence
  Quasi-synthetic sequence derived from human genome
TWKRRWFVLR

SEQ ID NO: 2609 - protein, 10 aa, Artificial Sequence
  Quasi-synthetic sequence derived from human genome
LIRIRKLTLK

SEQ ID NO: 2610 - protein, 10 aa, Artificial Sequence
  Quasi-synthetic sequence derived from human genome
LYRRILRRLA

SEQ ID NO: 2611 - protein, 10 aa, Artificial Sequence
  Quasi-synthetic sequence derived from human genome
KHKVLLRRLL

SEQ ID NO: 2612 - protein, 10 aa, Artificial Sequence
  Quasi-synthetic sequence derived from human genome
KAFLRLVRKL

SEQ ID NO: 2613 - protein, 10 aa, Artificial Sequence
  Quasi-synthetic sequence derived from human genome
KLRKFWNLIK

SEQ ID NO: 2614 - protein, 10 aa, Artificial Sequence
  Quasi-synthetic sequence derived from human genome
RLLRVFKLAK

SEQ ID NO: 2615 - protein, 10 aa, Artificial Sequence
  Quasi-synthetic sequence derived from human genome
WKGFILRKKL

SEQ ID NO: 2616 - protein, 10 aa, Artificial Sequence
  Quasi-synthetic sequence derived from human genome
IKLWRKLLKG

SEQ ID NO: 2617 - protein, 10 aa, Artificial Sequence
  Quasi-synthetic sequence derived from human genome
LKKWKNRLIL

SEQ ID NO: 2618 - protein, 10 aa, Artificial Sequence
  Quasi-synthetic sequence derived from human genome
WKKRFFILSK

SEQ ID NO: 2619 - protein, 10 aa, Artificial Sequence
  Quasi-synthetic sequence derived from human genome
KLWRKLFKGI

SEQ ID NO: 2620 - protein, 10 aa, Artificial Sequence
  Quasi-synthetic sequence derived from human genome
RILLWKLVLL

SEQ ID NO: 2621 - protein, 10 aa, Artificial Sequence
  Quasi-synthetic sequence derived from human genome
RLLWKLVILL

SEQ ID NO: 2622 - protein, 10 aa, Artificial Sequence
  Quasi-synthetic sequence derived from human genome
KIFKPWKWRK

SEQ ID NO: 2623 - protein, 10 aa, Artificial Sequence
  Quasi-synthetic sequence derived from human genome
MVRRVLKIIR

SEQ ID NO: 2624 - protein, 10 aa, Artificial Sequence
  Quasi-synthetic sequence derived from human genome
RVLRLLRTLR

SEQ ID NO: 2625 - protein, 10 aa, Artificial Sequence
  Quasi-synthetic sequence derived from human genome
LMLRGLRRLR

SEQ ID NO: 2626 - protein, 10 aa, Artificial Sequence
  Quasi-synthetic sequence derived from human genome
LSRMLRRLLR

SEQ ID NO: 2627 - protein, 10 aa, Artificial Sequence
  Quasi-synthetic sequence derived from human genome
FLIMLVMRKR

SEQ ID NO: 2628 - protein, 10 aa, Artificial Sequence
  Quasi-synthetic sequence derived from human genome
LVLIYLIKKR

SEQ ID NO: 2629 - protein, 10 aa, Artificial Sequence
  Quasi-synthetic sequence derived from human genome
IFWKTWIFRK

SEQ ID NO: 2630 - protein, 10 aa, Artificial Sequence
  Quasi-synthetic sequence derived from human genome
KIYFLLVRIK

SEQ ID NO: 2631 - protein, 10 aa, Artificial Sequence
  Quasi-synthetic sequence derived from human genome
FIRRKMLLWA

SEQ ID NO: 2632 - protein, 10 aa, Artificial Sequence
  Quasi-synthetic sequence derived from human genome
RYKFIIKVLF

SEQ ID NO: 2633 - protein, 10 aa, Artificial Sequence
  Quasi-synthetic sequence derived from human genome
MKLLRRAWRR

SEQ ID NO: 2634 - protein, 10 aa, Artificial Sequence
  Quasi-synthetic sequence derived from human genome
RIKTWRKRWF

SEQ ID NO: 2635 - protein, 10 aa, Artificial Sequence
  Quasi-synthetic sequence derived from human genome
ILKALILKLK

SEQ ID NO: 2636 - protein, 10 aa, Artificial Sequence
  Quasi-synthetic sequence derived from human genome
IKPFKRFLRK

SEQ ID NO: 2637 - protein, 10 aa, Artificial Sequence
  Quasi-synthetic sequence derived from human genome
FKKLKIRRLA

SEQ ID NO: 2638 - protein, 10 aa, Artificial Sequence
  Quasi-synthetic sequence derived from human genome
KRKLILPKRL

SEQ ID NO: 2639 - protein, 10 aa, Artificial Sequence
  Quasi-synthetic sequence derived from human genome
RLRKLKFAIK

SEQ ID NO: 2640 - protein, 10 aa, Artificial Sequence
  Quasi-synthetic sequence derived from human genome
KFYFRRIMRM

SEQ ID NO: 2641 - protein, 10 aa, Artificial Sequence
  Quasi-synthetic sequence derived from human genome
LKIVICLRRR

SEQ ID NO: 2642 - protein, 10 aa, Artificial Sequence
  Quasi-synthetic sequence derived from human genome
RIGRILRLIK

SEQ ID NO: 2643 - protein, 10 aa, Artificial Sequence
  Quasi-synthetic sequence derived from human genome
KFLKKILKYV

SEQ ID NO: 2644 - protein, 10 aa, Artificial Sequence
  Quasi-synthetic sequence derived from human genome
WLLKRLKAKM

SEQ ID NO: 2645 - protein, 10 aa, Artificial Sequence
  Quasi-synthetic sequence derived from human genome
FMLKKRKWPL

SEQ ID NO: 2646 - protein, 10 aa, Artificial Sequence
  Quasi-synthetic sequence derived from human genome
LLFKPLVLRR

SEQ ID NO: 2647 - protein, 10 aa, Artificial Sequence
  Quasi-synthetic sequence derived from human genome
LKLLSLWRIK

SEQ ID NO: 2648 - protein, 10 aa, Artificial Sequence
  Quasi-synthetic sequence derived from human genome
KNFILKRLFW

SEQ ID NO: 2649 - protein, 10 aa, Artificial Sequence
  Quasi-synthetic sequence derived from human genome
LRLLRLLVKH

SEQ ID NO: 2650 - protein, 10 aa, Artificial Sequence
  Quasi-synthetic sequence derived from human genome
WRLLFKKISL

SEQ ID NO: 2651 - protein, 10 aa, Artificial Sequence
  Quasi-synthetic sequence derived from human genome
KFLWRCLKFV

SEQ ID NO: 2652 - protein, 10 aa, Artificial Sequence
  Quasi-synthetic sequence derived from human genome
LRVFRLKLPF

SEQ ID NO: 2653 - protein, 10 aa, Artificial Sequence
  Quasi-synthetic sequence derived from human genome
MIVKIKRIRR

SEQ ID NO: 2654 - protein, 10 aa, Artificial Sequence
  Quasi-synthetic sequence derived from human genome
LIFRFKFLML

SEQ ID NO: 2655 - protein, 10 aa, Artificial Sequence
  Quasi-synthetic sequence derived from human genome
RKLRRRTLFI

SEQ ID NO: 2656 - protein, 10 aa, Artificial Sequence
  Quasi-synthetic sequence derived from human genome
LLLRIRKRTR

SEQ ID NO: 2657 - protein, 10 aa, Artificial Sequence
  Quasi-synthetic sequence derived from human genome
RGLWRLFRKK

SEQ ID NO: 2658 - protein, 10 aa, Artificial Sequence
  Quasi-synthetic sequence derived from human genome
LFWMFRIRII

SEQ ID NO: 2659 - protein, 10 aa, Artificial Sequence
  Quasi-synthetic sequence derived from human genome
KIRRVLWLVV

SEQ ID NO: 2660 - protein, 10 aa, Artificial Sequence
  Quasi-synthetic sequence derived from human genome
RTLKKFIKLL

SEQ ID NO: 2661 - protein, 10 aa, Artificial Sequence
  Quasi-synthetic sequence derived from human genome
MLYMRRIRFF

SEQ ID NO: 2662 - protein, 10 aa, Artificial Sequence
  Quasi-synthetic sequence derived from human genome
LLRRIIRILN

SEQ ID NO: 2663 - protein, 10 aa, Artificial Sequence
  Quasi-synthetic sequence derived from human genome
MKLVRFLMKL

SEQ ID NO: 2664 - protein, 10 aa, Artificial Sequence
  Quasi-synthetic sequence derived from human genome
RIMKRHLRLI

SEQ ID NO: 2665 - protein, 10 aa, Artificial Sequence
  Quasi-synthetic sequence derived from human genome
FLKRVFKRKK

SEQ ID NO: 2666 - protein, 10 aa, Artificial Sequence
  Quasi-synthetic sequence derived from human genome
LYFLKLLWLR

SEQ ID NO: 2667 - protein, 10 aa, Artificial Sequence
  Quasi-synthetic sequence derived from human genome
RYKWLIIKIV

SEQ ID NO: 2668 - protein, 10 aa, Artificial Sequence
  Quasi-synthetic sequence derived from human genome
RLLHYRLLLR

SEQ ID NO: 2669 - protein, 10 aa, Artificial Sequence
  Quasi-synthetic sequence derived from human genome
IFLTKFRKFL

SEQ ID NO: 2670 - protein, 10 aa, Artificial Sequence
  Quasi-synthetic sequence derived from human genome
FKGLIRIFRK

SEQ ID NO: 2671 - protein, 10 aa, Artificial Sequence
  Quasi-synthetic sequence derived from human genome
RKRLFQLIKI

SEQ ID NO: 2672 - protein, 10 aa, Artificial Sequence
  Quasi-synthetic sequence derived from human genome
MKMRRYKLFL

SEQ ID NO: 2673 - protein, 10 aa, Artificial Sequence
  Quasi-synthetic sequence derived from human genome
LRFRQILKKI

SEQ ID NO: 2674 - protein, 10 aa, Artificial Sequence
  Quasi-synthetic sequence derived from human genome
LRIRKQILKF

SEQ ID NO: 2675 - protein, 10 aa, Artificial Sequence
  Quasi-synthetic sequence derived from human genome
KKILCRLFRV

SEQ ID NO: 2676 - protein, 10 aa, Artificial Sequence
  Quasi-synthetic sequence derived from human genome
FKGRWFWRVR

SEQ ID NO: 2677 - protein, 10 aa, Artificial Sequence
  Quasi-synthetic sequence derived from human genome
LRYIVRLVWR

SEQ ID NO: 2678 - protein, 10 aa, Artificial Sequence
  Quasi-synthetic sequence derived from human genome
KLILWRVLRP

SEQ ID NO: 2679 - protein, 10 aa, Artificial Sequence
  Quasi-synthetic sequence derived from human genome
WIKILRWKLS

SEQ ID NO: 2680 - protein, 10 aa, Artificial Sequence
  Quasi-synthetic sequence derived from human genome
RKLFIVLLLL

SEQ ID NO: 2681 - protein, 10 aa, Artificial Sequence
  Quasi-synthetic sequence derived from human genome
RFRLRLLGVR

SEQ ID NO: 2682 - protein, 10 aa, Artificial Sequence
  Quasi-synthetic sequence derived from human genome
RFRLRRLLQV

SEQ ID NO: 2683 - protein, 10 aa, Artificial Sequence
  Quasi-synthetic sequence derived from human genome
LRRLRGLLRV

SEQ ID NO: 2684 - protein, 10 aa, Artificial Sequence
  Quasi-synthetic sequence derived from human genome
LLRRWLCRRC

SEQ ID NO: 2685 - protein, 10 aa, Artificial Sequence
  Quasi-synthetic sequence derived from human genome
LRLRNVFRRF

SEQ ID NO: 2686 - protein, 10 aa, Artificial Sequence
  Quasi-synthetic sequence derived from human genome
LVLSLRRRLR

SEQ ID NO: 2687 - protein, 10 aa, Artificial Sequence
  Quasi-synthetic sequence derived from human genome
LIIFLRNRLK

SEQ ID NO: 2688 - protein, 10 aa, Artificial Sequence
  Quasi-synthetic sequence derived from human genome
FLNRKILLIR

SEQ ID NO: 2689 - protein, 10 aa, Artificial Sequence
  Quasi-synthetic sequence derived from human genome
LRLRKILFCV

SEQ ID NO: 2690 - protein, 10 aa, Artificial Sequence
  Quasi-synthetic sequence derived from human genome
LKKKLFLTLK

SEQ ID NO: 2691 - protein, 10 aa, Artificial Sequence
  Quasi-synthetic sequence derived from human genome
KKRFMILLPR

SEQ ID NO: 2692 - protein, 10 aa, Artificial Sequence
  Quasi-synthetic sequence derived from human genome
ALMKLLRRKI

SEQ ID NO: 2693 - protein, 10 aa, Artificial Sequence
  Quasi-synthetic sequence derived from human genome
HIKKRLFMFR

SEQ ID NO: 2694 - protein, 10 aa, Artificial Sequence
  Quasi-synthetic sequence derived from human genome
LKPFMLRRIK

SEQ ID NO: 2695 - protein, 10 aa, Artificial Sequence
  Quasi-synthetic sequence derived from human genome
HRVRLRRWKL

SEQ ID NO: 2696 - protein, 10 aa, Artificial Sequence
  Quasi-synthetic sequence derived from human genome
RVPWRRLFRK

SEQ ID NO: 2697 - protein, 10 aa, Artificial Sequence
  Quasi-synthetic sequence derived from human genome
FKKKLFWRAV

SEQ ID NO: 2698 - protein, 10 aa, Artificial Sequence
  Quasi-synthetic sequence derived from human genome
RMVILRLLRY

SEQ ID NO: 2699 - protein, 10 aa, Artificial Sequence
  Quasi-synthetic sequence derived from human genome
LMKRLRFALI

SEQ ID NO: 2700 - protein, 10 aa, Artificial Sequence
  Quasi-synthetic sequence derived from human genome
ILLLKIWKTR

SEQ ID NO: 2701 - protein, 10 aa, Artificial Sequence
  Quasi-synthetic sequence derived from human genome
FKRLMPRIFF

SEQ ID NO: 2702 - protein, 10 aa, Artificial Sequence
  Quasi-synthetic sequence derived from human genome
LRKVVWRYLL

SEQ ID NO: 2703 - protein, 10 aa, Artificial Sequence
  Quasi-synthetic sequence derived from human genome
LMGKLRFRWR

SEQ ID NO: 2704 - protein, 10 aa, Artificial Sequence
  Quasi-synthetic sequence derived from human genome
RLIRKLRCYL

SEQ ID NO: 2705 - protein, 10 aa, Artificial Sequence
  Quasi-synthetic sequence derived from human genome
RRFRSLKMWF

SEQ ID NO: 2706 - protein, 10 aa, Artificial Sequence
  Quasi-synthetic sequence derived from human genome
LWKMGFFRRR

SEQ ID NO: 2707 - protein, 10 aa, Artificial Sequence
  Quasi-synthetic sequence derived from human genome
KLFRMRSLRW

SEQ ID NO: 2708 - protein, 10 aa, Artificial Sequence
  Quasi-synthetic sequence derived from human genome
LFKKLLNKIR

SEQ ID NO: 2709 - protein, 10 aa, Artificial Sequence
  Quasi-synthetic sequence derived from human genome
RLLINLLKKK

SEQ ID NO: 2710 - protein, 10 aa, Artificial Sequence
  Quasi-synthetic sequence derived from human genome
LKKIFGRKLF

SEQ ID NO: 2711 - protein, 10 aa, Artificial Sequence
  Quasi-synthetic sequence derived from human genome
LRNRLIRKRF

SEQ ID NO: 2712 - protein, 10 aa, Artificial Sequence
  Quasi-synthetic sequence derived from human genome
LRKRRRLLSI

SEQ ID NO: 2713 - protein, 10 aa, Artificial Sequence
  Quasi-synthetic sequence derived from human genome
YKRLRYKRLL

SEQ ID NO: 2714 - protein, 10 aa, Artificial Sequence
  Quasi-synthetic sequence derived from human genome
LWLLGFRMRR

SEQ ID NO: 2715 - protein, 10 aa, Artificial Sequence
  Quasi-synthetic sequence derived from human genome
RRWMIRKRMR

SEQ ID NO: 2716 - protein, 10 aa, Artificial Sequence
  Quasi-synthetic sequence derived from human genome
FFNFRKIFKL

SEQ ID NO: 2717 - protein, 10 aa, Artificial Sequence
  Quasi-synthetic sequence derived from human genome
IFLLNKKFLR

SEQ ID NO: 2718 - protein, 10 aa, Artificial Sequence
  Quasi-synthetic sequence derived from human genome
RLFLLIKKQF

SEQ ID NO: 2719 - protein, 10 aa, Artificial Sequence
  Quasi-synthetic sequence derived from human genome
LFKLLRKSIL

SEQ ID NO: 2720 - protein, 10 aa, Artificial Sequence
  Quasi-synthetic sequence derived from human genome
YLKLLFLKKY

SEQ ID NO: 2721 - protein, 10 aa, Artificial Sequence
  Quasi-synthetic sequence derived from human genome
LFRVIRLARI

SEQ ID NO: 2722 - protein, 10 aa, Artificial Sequence
  Quasi-synthetic sequence derived from human genome
RMVKFLIKKK

SEQ ID NO: 2723 - protein, 10 aa, Artificial Sequence
  Quasi-synthetic sequence derived from human genome
LKRFKVMKIK

SEQ ID NO: 2724 - protein, 10 aa, Artificial Sequence
  Quasi-synthetic sequence derived from human genome
LIYYWRIKKF

SEQ ID NO: 2725 - protein, 10 aa, Artificial Sequence
  Quasi-synthetic sequence derived from human genome
WKAFKKFIRK

SEQ ID NO: 2726 - protein, 10 aa, Artificial Sequence
  Quasi-synthetic sequence derived from human genome
KCKWLKKWIK

SEQ ID NO: 2727 - protein, 10 aa, Artificial Sequence
  Quasi-synthetic sequence derived from human genome
LWAFRKWKWY

SEQ ID NO: 2728 - protein, 10 aa, Artificial Sequence
  Quasi-synthetic sequence derived from human genome
RWRLSRIVFR

SEQ ID NO: 2729 - protein, 10 aa, Artificial Sequence
  Quasi-synthetic sequence derived from human genome
LLLVYRMRKK

SEQ ID NO: 2730 - protein, 10 aa, Artificial Sequence
  Quasi-synthetic sequence derived from human genome
LKMLALLKRK

SEQ ID NO: 2731 - protein, 10 aa, Artificial Sequence
  Quasi-synthetic sequence derived from human genome
LLAMLLKKKR

SEQ ID NO: 2732 - protein, 10 aa, Artificial Sequence
  Quasi-synthetic sequence derived from human genome
KMLRKALKLL

SEQ ID NO: 2733 - protein, 10 aa, Artificial Sequence
  Quasi-synthetic sequence derived from human genome
FFVWIKLFKF

SEQ ID NO: 2734 - protein, 10 aa, Artificial Sequence
  Quasi-synthetic sequence derived from human genome
LFFKMKPLLR

SEQ ID NO: 2735 - protein, 10 aa, Artificial Sequence
  Quasi-synthetic sequence derived from human genome
RLKLLLMPLK

SEQ ID NO: 2736 - protein, 10 aa, Artificial Sequence
  Quasi-synthetic sequence derived from human genome
YFWKRFCFWK

SEQ ID NO: 2737 - protein, 10 aa, Artificial Sequence
  Quasi-synthetic sequence derived from human genome
IHKLMRWIRK

SEQ ID NO: 2738 - protein, 10 aa, Artificial Sequence
  Quasi-synthetic sequence derived from human genome
RFMKLLLTRR

SEQ ID NO: 2739 - protein, 10 aa, Artificial Sequence
  Quasi-synthetic sequence derived from human genome
WKRALRIFIM

SEQ ID NO: 2740 - protein, 10 aa, Artificial Sequence
  Quasi-synthetic sequence derived from human genome
KKFLSLKLKL

SEQ ID NO: 2741 - protein, 10 aa, Artificial Sequence
  Quasi-synthetic sequence derived from human genome
FLKKLLGKKL

SEQ ID NO: 2742 - protein, 10 aa, Artificial Sequence
  Quasi-synthetic sequence derived from human genome
FIKKPFIKFI

SEQ ID NO: 2743 - protein, 10 aa, Artificial Sequence
  Quasi-synthetic sequence derived from human genome
LLLFLYRRCK

SEQ ID NO: 2744 - protein, 10 aa, Artificial Sequence
  Quasi-synthetic sequence derived from human genome
KKLLLFLKGF

SEQ ID NO: 2745 - protein, 10 aa, Artificial Sequence
  Quasi-synthetic sequence derived from human genome
KRLVKVKVLL

SEQ ID NO: 2746 - protein, 10 aa, Artificial Sequence
  Quasi-synthetic sequence derived from human genome
FFLIVKARRK

SEQ ID NO: 2747 - protein, 10 aa, Artificial Sequence
  Quasi-synthetic sequence derived from human genome
IARVRLLKLK

SEQ ID NO: 2748 - protein, 10 aa, Artificial Sequence
  Quasi-synthetic sequence derived from human genome
FRALKKVRIF

SEQ ID NO: 2749 - protein, 10 aa, Artificial Sequence
  Quasi-synthetic sequence derived from human genome
RIARVLKLLK

SEQ ID NO: 2750 - protein, 10 aa, Artificial Sequence
  Quasi-synthetic sequence derived from human genome
RILKFLVAKR

SEQ ID NO: 2751 - protein, 10 aa, Artificial Sequence
  Quasi-synthetic sequence derived from human genome
RKKLVRALFI

SEQ ID NO: 2752 - protein, 10 aa, Artificial Sequence
  Quasi-synthetic sequence derived from human genome
LRPLRIFKLV

SEQ ID NO: 2753 - protein, 10 aa, Artificial Sequence
  Quasi-synthetic sequence derived from human genome
IIKRWSLLFK

SEQ ID NO: 2754 - protein, 10 aa, Artificial Sequence
  Quasi-synthetic sequence derived from human genome
LLRVIHRKLF

SEQ ID NO: 2755 - protein, 10 aa, Artificial Sequence
  Quasi-synthetic sequence derived from human genome
WRLILSKILK

SEQ ID NO: 2756 - protein, 10 aa, Artificial Sequence
  Quasi-synthetic sequence derived from human genome
FILRAVLRLK

SEQ ID NO: 2757 - protein, 10 aa, Artificial Sequence
  Quasi-synthetic sequence derived from human genome
FILRAVLRFK

SEQ ID NO: 2758 - protein, 10 aa, Artificial Sequence
  Quasi-synthetic sequence derived from human genome
AILRLRFLVK

SEQ ID NO: 2759 - protein, 10 aa, Artificial Sequence
  Quasi-synthetic sequence derived from human genome
VRLIHLRLKL

SEQ ID NO: 2760 - protein, 10 aa, Artificial Sequence
  Quasi-synthetic sequence derived from human genome
WKYKLYLLKI

SEQ ID NO: 2761 - protein, 10 aa, Artificial Sequence
  Quasi-synthetic sequence derived from human genome
KLKKIYFYWL

SEQ ID NO: 2762 - protein, 10 aa, Artificial Sequence
  Quasi-synthetic sequence derived from human genome
RIRARRLRVL

SEQ ID NO: 2763 - protein, 10 aa, Artificial Sequence
  Quasi-synthetic sequence derived from human genome
RRFLVTLRIR

SEQ ID NO: 2764 - protein, 10 aa, Artificial Sequence
  Quasi-synthetic sequence derived from human genome
LRWVRLLFGR

SEQ ID NO: 2765 - protein, 10 aa, Artificial Sequence
  Quasi-synthetic sequence derived from human genome
LLSLLRRVRW

SEQ ID NO: 2766 - protein, 10 aa, Artificial Sequence
  Quasi-synthetic sequence derived from human genome
LLRVRWLRLS

SEQ ID NO: 2767 - protein, 10 aa, Artificial Sequence
  Quasi-synthetic sequence derived from human genome
LFGWLFRRVR

SEQ ID NO: 2768 - protein, 10 aa, Artificial Sequence
  Quasi-synthetic sequence derived from human genome
RRFRSVKLWF

SEQ ID NO: 2769 - protein, 10 aa, Artificial Sequence
  Quasi-synthetic sequence derived from human genome
VWFRNRRFKL

SEQ ID NO: 2770 - protein, 10 aa, Artificial Sequence
  Quasi-synthetic sequence derived from human genome
RWVFKRRLGL

SEQ ID NO: 2771 - protein, 10 aa, Artificial Sequence
  Quasi-synthetic sequence derived from human genome
GVRWKRLRLL

SEQ ID NO: 2772 - protein, 10 aa, Artificial Sequence
  Quasi-synthetic sequence derived from human genome
VLLQRKLWRR

SEQ ID NO: 2773 - protein, 10 aa, Artificial Sequence
  Quasi-synthetic sequence derived from human genome
RLLKILFVIF

SEQ ID NO: 2774 - protein, 10 aa, Artificial Sequence
  Quasi-synthetic sequence derived from human genome
IIFKLFVFRL

SEQ ID NO: 2775 - protein, 10 aa, Artificial Sequence
  Quasi-synthetic sequence derived from human genome
RRRRWVRLRR

SEQ ID NO: 2776 - protein, 10 aa, Artificial Sequence
  Quasi-synthetic sequence derived from human genome
LVKRIYRLWM

SEQ ID NO: 2777 - protein, 10 aa, Artificial Sequence
  Quasi-synthetic sequence derived from human genome
LLLWKKIHRM

SEQ ID NO: 2778 - protein, 10 aa, Artificial Sequence
  Quasi-synthetic sequence derived from human genome
FAWLRRYIKW

SEQ ID NO: 2779 - protein, 10 aa, Artificial Sequence
  Quasi-synthetic sequence derived from human genome
LRFKKTWKLR

SEQ ID NO: 2780 - protein, 10 aa, Artificial Sequence
  Quasi-synthetic sequence derived from human genome
LYRVVLLRLK

SEQ ID NO: 2781 - protein, 10 aa, Artificial Sequence
  Quasi-synthetic sequence derived from human genome
RLRLWTKWVF

SEQ ID NO: 2782 - protein, 10 aa, Artificial Sequence
  Quasi-synthetic sequence derived from human genome
IALRFYRRLL

SEQ ID NO: 2783 - protein, 10 aa, Artificial Sequence
  Quasi-synthetic sequence derived from human genome
FFKRKTILFI

SEQ ID NO: 2784 - protein, 10 aa, Artificial Sequence
  Quasi-synthetic sequence derived from human genome
IFRRLYFPFR

SEQ ID NO: 2785 - protein, 10 aa, Artificial Sequence
  Quasi-synthetic sequence derived from human genome
LRRKLQMWLW

SEQ ID NO: 2786 - protein, 10 aa, Artificial Sequence
  Quasi-synthetic sequence derived from human genome
RLLRYLIHLR

SEQ ID NO: 2787 - protein, 10 aa, Artificial Sequence
  Quasi-synthetic sequence derived from human genome
FFRFHRYIFR

SEQ ID NO: 2788 - protein, 10 aa, Artificial Sequence
  Quasi-synthetic sequence derived from human genome
TIIKKLFFFR

SEQ ID NO: 2789 - protein, 10 aa, Artificial Sequence
  Quasi-synthetic sequence derived from human genome
FFWLKLKINK

SEQ ID NO: 2790 - protein, 10 aa, Artificial Sequence
  Quasi-synthetic sequence derived from human genome
LRKKVAFLLL

SEQ ID NO: 2791 - protein, 10 aa, Artificial Sequence
  Quasi-synthetic sequence derived from human genome
LFKLFRLVHK

SEQ ID NO: 2792 - protein, 10 aa, Artificial Sequence
  Quasi-synthetic sequence derived from human genome
ITRMWKLLRR

SEQ ID NO: 2793 - protein, 10 aa, Artificial Sequence
  Quasi-synthetic sequence derived from human genome
LLIYRRLRKP

SEQ ID NO: 2794 - protein, 10 aa, Artificial Sequence
  Quasi-synthetic sequence derived from human genome
KFVALLKRFK

SEQ ID NO: 2795 - protein, 10 aa, Artificial Sequence
  Quasi-synthetic sequence derived from human genome
KLFHKRKLFV

SEQ ID NO: 2796 - protein, 10 aa, Artificial Sequence
  Quasi-synthetic sequence derived from human genome
LRIMRIARIF

SEQ ID NO: 2797 - protein, 10 aa, Artificial Sequence
  Quasi-synthetic sequence derived from human genome
LAKILKKRRI

SEQ ID NO: 2798 - protein, 10 aa, Artificial Sequence
  Quasi-synthetic sequence derived from human genome
LRKKILKIRH

SEQ ID NO: 2799 - protein, 10 aa, Artificial Sequence
  Quasi-synthetic sequence derived from human genome
RIFWVIKLAR

SEQ ID NO: 2800 - protein, 10 aa, Artificial Sequence
  Quasi-synthetic sequence derived from human genome
FFRLLSRRLM

SEQ ID NO: 2801 - protein, 10 aa, Artificial Sequence
  Quasi-synthetic sequence derived from human genome
LRTFRLLRVL

SEQ ID NO: 2802 - protein, 10 aa, Artificial Sequence
  Quasi-synthetic sequence derived from human genome
RLLRRLQLLM

SEQ ID NO: 2803 - protein, 10 aa, Artificial Sequence
  Quasi-synthetic sequence derived from human genome
FFFKLLIKVF

SEQ ID NO: 2804 - protein, 10 aa, Artificial Sequence
  Quasi-synthetic sequence derived from human genome
VRIFRKKKRI

SEQ ID NO: 2805 - protein, 10 aa, Artificial Sequence
  Quasi-synthetic sequence derived from human genome
RKMLFLRGFR

SEQ ID NO: 2806 - protein, 10 aa, Artificial Sequence
  Quasi-synthetic sequence derived from human genome
KWAVRIIRKF

SEQ ID NO: 2807 - protein, 10 aa, Artificial Sequence
  Quasi-synthetic sequence derived from human genome
GLLFYRWRRR

SEQ ID NO: 2808 - protein, 10 aa, Artificial Sequence
  Quasi-synthetic sequence derived from human genome
RRRRLYWGFF

SEQ ID NO: 2809 - protein, 10 aa, Artificial Sequence
  Quasi-synthetic sequence derived from human genome
SLWYLLRRRR

SEQ ID NO: 2810 - protein, 10 aa, Artificial Sequence
  Quasi-synthetic sequence derived from human genome
RKRICILVFL

SEQ ID NO: 2811 - protein, 10 aa, Artificial Sequence
  Quasi-synthetic sequence derived from human genome
IIRILLQKLR

SEQ ID NO: 2812 - protein, 10 aa, Artificial Sequence
  Quasi-synthetic sequence derived from human genome
RKIMRFLRRC

SEQ ID NO: 2813 - protein, 10 aa, Artificial Sequence
  Quasi-synthetic sequence derived from human genome
LRRLRTIIRK

SEQ ID NO: 2814 - protein, 10 aa, Artificial Sequence
  Quasi-synthetic sequence derived from human genome
KKMKHLWFFL

SEQ ID NO: 2815 - protein, 10 aa, Artificial Sequence
  Quasi-synthetic sequence derived from human genome
LRGLKRKWIR

SEQ ID NO: 2816 - protein, 10 aa, Artificial Sequence
  Quasi-synthetic sequence derived from human genome
WRKKRRLNIL

SEQ ID NO: 2817 - protein, 10 aa, Artificial Sequence
  Quasi-synthetic sequence derived from human genome
LRFARLRRVK

SEQ ID NO: 2818 - protein, 10 aa, Artificial Sequence
  Quasi-synthetic sequence derived from human genome
LGKWLRKRRI

SEQ ID NO: 2819 - protein, 10 aa, Artificial Sequence
  Quasi-synthetic sequence derived from human genome
KKSRRLIIIL

SEQ ID NO: 2820 - protein, 10 aa, Artificial Sequence
  Quasi-synthetic sequence derived from human genome
RFVRRLLYFY

SEQ ID NO: 2821 - protein, 10 aa, Artificial Sequence
  Quasi-synthetic sequence derived from human genome
HLLFLRFYKR

SEQ ID NO: 2822 - protein, 10 aa, Artificial Sequence
  Quasi-synthetic sequence derived from human genome
LPLLFYLRKR

SEQ ID NO: 2823 - protein, 10 aa, Artificial Sequence
  Quasi-synthetic sequence derived from human genome
RLLYAKRLFF

SEQ ID NO: 2824 - protein, 10 aa, Artificial Sequence
  Quasi-synthetic sequence derived from human genome
VRLLRRCRVL

SEQ ID NO: 2825 - protein, 10 aa, Artificial Sequence
  Quasi-synthetic sequence derived from human genome
RRLIRGFVLR

SEQ ID NO: 2826 - protein, 10 aa, Artificial Sequence
  Quasi-synthetic sequence derived from human genome
FILRVRRSRL

SEQ ID NO: 2827 - protein, 10 aa, Artificial Sequence
  Quasi-synthetic sequence derived from human genome
RSLLVRRRFI

SEQ ID NO: 2828 - protein, 10 aa, Artificial Sequence
  Quasi-synthetic sequence derived from human genome
IRRLRGVRLL

SEQ ID NO: 2829 - protein, 10 aa, Artificial Sequence
  Quasi-synthetic sequence derived from human genome
LRLRRRVCVL

SEQ ID NO: 2830 - protein, 10 aa, Artificial Sequence
  Quasi-synthetic sequence derived from human genome
RVFGRIRRFF

SEQ ID NO: 2831 - protein, 10 aa, Artificial Sequence
  Quasi-synthetic sequence derived from human genome
RFAIRKIMLL

SEQ ID NO: 2832 - protein, 10 aa, Artificial Sequence
  Quasi-synthetic sequence derived from human genome
VMRILLKKVF

SEQ ID NO: 2833 - protein, 10 aa, Artificial Sequence
  Quasi-synthetic sequence derived from human genome
YVLKYLRRRF

SEQ ID NO: 2834 - protein, 10 aa, Artificial Sequence
  Quasi-synthetic sequence derived from human genome
WRKRMLLTLK

SEQ ID NO: 2835 - protein, 10 aa, Artificial Sequence
  Quasi-synthetic sequence derived from human genome
FKLPKYRRLL

SEQ ID NO: 2836 - protein, 10 aa, Artificial Sequence
  Quasi-synthetic sequence derived from human genome
RRKYLLKALF

SEQ ID NO: 2837 - protein, 10 aa, Artificial Sequence
  Quasi-synthetic sequence derived from human genome
KLPLYLRLKR

SEQ ID NO: 2838 - protein, 10 aa, Artificial Sequence
  Quasi-synthetic sequence derived from human genome
LLPYLRKKLR

SEQ ID NO: 2839 - protein, 10 aa, Artificial Sequence
  Quasi-synthetic sequence derived from human genome
RLFRWILTRV

SEQ ID NO: 2840 - protein, 10 aa, Artificial Sequence
  Quasi-synthetic sequence derived from human genome
MRFLLRVRCW

SEQ ID NO: 2841 - protein, 10 aa, Artificial Sequence
  Quasi-synthetic sequence derived from human genome
ILRKQKLIFL

SEQ ID NO: 2842 - protein, 10 aa, Artificial Sequence
  Quasi-synthetic sequence derived from human genome
LSFIKILLKR

SEQ ID NO: 2843 - protein, 10 aa, Artificial Sequence
  Quasi-synthetic sequence derived from human genome
FLWLKWRVSR

SEQ ID NO: 2844 - protein, 10 aa, Artificial Sequence
  Quasi-synthetic sequence derived from human genome
FVKRNRWWLL

SEQ ID NO: 2845 - protein, 10 aa, Artificial Sequence
  Quasi-synthetic sequence derived from human genome
IIRLFLKKGL

SEQ ID NO: 2846 - protein, 10 aa, Artificial Sequence
  Quasi-synthetic sequence derived from human genome
RWKFIKRWKT

SEQ ID NO: 2847 - protein, 10 aa, Artificial Sequence
  Quasi-synthetic sequence derived from human genome
VLYIRKKKRL

SEQ ID NO: 2848 - protein, 10 aa, Artificial Sequence
  Quasi-synthetic sequence derived from human genome
KRLIKRYVLK

SEQ ID NO: 2849 - protein, 10 aa, Artificial Sequence
  Quasi-synthetic sequence derived from human genome
WYWRRRPKRL

SEQ ID NO: 2850 - protein, 10 aa, Artificial Sequence
  Quasi-synthetic sequence derived from human genome
RKVVKMILKL

SEQ ID NO: 2851 - protein, 10 aa, Artificial Sequence
  Quasi-synthetic sequence derived from human genome
KARRKLMFII

SEQ ID NO: 2852 - protein, 10 aa, Artificial Sequence
  Quasi-synthetic sequence derived from human genome
LKRIRKHMIL

SEQ ID NO: 2853 - protein, 10 aa, Artificial Sequence
  Quasi-synthetic sequence derived from human genome
KKIKAKLRLL

SEQ ID NO: 2854 - protein, 10 aa, Artificial Sequence
  Quasi-synthetic sequence derived from human genome
RKKLILAKKF

SEQ ID NO: 2855 - protein, 10 aa, Artificial Sequence
  Quasi-synthetic sequence derived from human genome
KKLKVWFRIP

SEQ ID NO: 2856 - protein, 10 aa, Artificial Sequence
  Quasi-synthetic sequence derived from human genome
RIIAIVFFRR

SEQ ID NO: 2857 - protein, 10 aa, Artificial Sequence
  Quasi-synthetic sequence derived from human genome
VLRVVRLIKI

SEQ ID NO: 2858 - protein, 10 aa, Artificial Sequence
  Quasi-synthetic sequence derived from human genome
LRRLNFVRLL

SEQ ID NO: 2859 - protein, 10 aa, Artificial Sequence
  Quasi-synthetic sequence derived from human genome
LLRSVLRFRL

SEQ ID NO: 2860 - protein, 10 aa, Artificial Sequence
  Quasi-synthetic sequence derived from human genome
LRSFRLLRVF

SEQ ID NO: 2861 - protein, 10 aa, Artificial Sequence
  Quasi-synthetic sequence derived from human genome
IRRWGFMFKR

SEQ ID NO: 2862 - protein, 10 aa, Artificial Sequence
  Quasi-synthetic sequence derived from human genome
FTKILRRKRL

SEQ ID NO: 2863 - protein, 10 aa, Artificial Sequence
  Quasi-synthetic sequence derived from human genome
KARRKKWIII

SEQ ID NO: 2864 - protein, 10 aa, Artificial Sequence
  Quasi-synthetic sequence derived from human genome
RARARRLWLL

SEQ ID NO: 2865 - protein, 10 aa, Artificial Sequence
  Quasi-synthetic sequence derived from human genome
LRKILLKIKS

SEQ ID NO: 2866 - protein, 10 aa, Artificial Sequence
  Quasi-synthetic sequence derived from human genome
KSWKRRWFVL

SEQ ID NO: 2867 - protein, 10 aa, Artificial Sequence
  Quasi-synthetic sequence derived from human genome
ISFKRKKFFI

SEQ ID NO: 2868 - protein, 10 aa, Artificial Sequence
  Quasi-synthetic sequence derived from human genome
KFVRFCFIKK

SEQ ID NO: 2869 - protein, 10 aa, Artificial Sequence
  Quasi-synthetic sequence derived from human genome
WFCKRRRAFW

SEQ ID NO: 2870 - protein, 10 aa, Artificial Sequence
  Quasi-synthetic sequence derived from human genome
WRALRLLARR

SEQ ID NO: 2871 - protein, 10 aa, Artificial Sequence
  Quasi-synthetic sequence derived from human genome
LLLMYRMKKK

SEQ ID NO: 2872 - protein, 10 aa, Artificial Sequence
  Quasi-synthetic sequence derived from human genome
LLRRRRWAAL

SEQ ID NO: 2873 - protein, 10 aa, Artificial Sequence
  Quasi-synthetic sequence derived from human genome
LLRRWLPRPR

SEQ ID NO: 2874 - protein, 10 aa, Artificial Sequence
  Quasi-synthetic sequence derived from human genome
KWKSRWLVLR

SEQ ID NO: 2875 - protein, 10 aa, Artificial Sequence
  Quasi-synthetic sequence derived from human genome
LRHPWLRRRL

SEQ ID NO: 2876 - protein, 10 aa, Artificial Sequence
  Quasi-synthetic sequence derived from human genome
LRKLCVFKKI

SEQ ID NO: 2877 - protein, 10 aa, Artificial Sequence
  Quasi-synthetic sequence derived from human genome
HFRARFRRLW

SEQ ID NO: 2878 - protein, 10 aa, Artificial Sequence
  Quasi-synthetic sequence derived from human genome
KRLGKRWKLL

SEQ ID NO: 2879 - protein, 10 aa, Artificial Sequence
  Quasi-synthetic sequence derived from human genome
KNFKKRWFRL

SEQ ID NO: 2880 - protein, 10 aa, Artificial Sequence
  Quasi-synthetic sequence derived from human genome
FWWWFLHKFR

SEQ ID NO: 2881 - protein, 10 aa, Artificial Sequence
  Quasi-synthetic sequence derived from human genome
FLLYKYKIKK

SEQ ID NO: 2882 - protein, 10 aa, Artificial Sequence
  Quasi-synthetic sequence derived from human genome
FLPKIFFRKM

SEQ ID NO: 2883 - protein, 10 aa, Artificial Sequence
  Quasi-synthetic sequence derived from human genome
LRKMKIPFLL

SEQ ID NO: 2884 - protein, 10 aa, Artificial Sequence
  Quasi-synthetic sequence derived from human genome
RLRLLLLLWA

SEQ ID NO: 2885 - protein, 10 aa, Artificial Sequence
  Quasi-synthetic sequence derived from human genome
RRLLPLLWLF

SEQ ID NO: 2886 - protein, 10 aa, Artificial Sequence
  Quasi-synthetic sequence derived from human genome
FRCRFPRLLR

SEQ ID NO: 2887 - protein, 10 aa, Artificial Sequence
  Quasi-synthetic sequence derived from human genome
RKLLVQLRRL

SEQ ID NO: 2888 - protein, 10 aa, Artificial Sequence
  Quasi-synthetic sequence derived from human genome
LLCRLRRLRA

SEQ ID NO: 2889 - protein, 10 aa, Artificial Sequence
  Quasi-synthetic sequence derived from human genome
RRQVRKLLLF

SEQ ID NO: 2890 - protein, 10 aa, Artificial Sequence
  Quasi-synthetic sequence derived from human genome
LRLRRCHRFL

SEQ ID NO: 2891 - protein, 10 aa, Artificial Sequence
  Quasi-synthetic sequence derived from human genome
VSLLRLRLRK

SEQ ID NO: 2892 - protein, 10 aa, Artificial Sequence
  Quasi-synthetic sequence derived from human genome
LRRRLPCRLL

SEQ ID NO: 2893 - protein, 10 aa, Artificial Sequence
  Quasi-synthetic sequence derived from human genome
RLRLLCALRR

SEQ ID NO: 2894 - protein, 10 aa, Artificial Sequence
  Quasi-synthetic sequence derived from human genome
RVLLRFQRKL

SEQ ID NO: 2895 - protein, 10 aa, Artificial Sequence
  Quasi-synthetic sequence derived from human genome
RKVLQLLRLR

SEQ ID NO: 2896 - protein, 10 aa, Artificial Sequence
  Quasi-synthetic sequence derived from human genome
KIILLKPIIK

SEQ ID NO: 2897 - protein, 10 aa, Artificial Sequence
  Quasi-synthetic sequence derived from human genome
LMWLKRGLRF

SEQ ID NO: 2898 - protein, 10 aa, Artificial Sequence
  Quasi-synthetic sequence derived from human genome
RICKFLRYFF

SEQ ID NO: 2899 - protein, 10 aa, Artificial Sequence
  Quasi-synthetic sequence derived from human genome
KTRLFWLLRV

SEQ ID NO: 2900 - protein, 10 aa, Artificial Sequence
  Quasi-synthetic sequence derived from human genome
LFKWLRLRTV

SEQ ID NO: 2901 - protein, 10 aa, Artificial Sequence
  Quasi-synthetic sequence derived from human genome
RSLWMLLKLR

SEQ ID NO: 2902 - protein, 10 aa, Artificial Sequence
  Quasi-synthetic sequence derived from human genome
WRSMRKLFLL

SEQ ID NO: 2903 - protein, 10 aa, Artificial Sequence
  Quasi-synthetic sequence derived from human genome
LLWKMRLFQR

SEQ ID NO: 2904 - protein, 10 aa, Artificial Sequence
  Quasi-synthetic sequence derived from human genome
MRLFRWLLKQ

SEQ ID NO: 2905 - protein, 10 aa, Artificial Sequence
  Quasi-synthetic sequence derived from human genome
ILRKILILVL

SEQ ID NO: 2906 - protein, 10 aa, Artificial Sequence
  Quasi-synthetic sequence derived from human genome
LCLRLLLFFR

SEQ ID NO: 2907 - protein, 10 aa, Artificial Sequence
  Quasi-synthetic sequence derived from human genome
RLCLRLLLLL

SEQ ID NO: 2908 - protein, 10 aa, Artificial Sequence
  Quasi-synthetic sequence derived from human genome
LFKNLLLKKI

SEQ ID NO: 2909 - protein, 10 aa, Artificial Sequence
  Quasi-synthetic sequence derived from human genome
KNIFLLFKKL

SEQ ID NO: 2910 - protein, 10 aa, Artificial Sequence
  Quasi-synthetic sequence derived from human genome
KRWFKFRKRK

SEQ ID NO: 2911 - protein, 10 aa, Artificial Sequence
  Quasi-synthetic sequence derived from human genome
KRIALRVLLI

SEQ ID NO: 2912 - protein, 10 aa, Artificial Sequence
  Quasi-synthetic sequence derived from human genome
IRNLLIWIKK

SEQ ID NO: 2913 - protein, 10 aa, Artificial Sequence
  Quasi-synthetic sequence derived from human genome
LIIRRLHKVL

SEQ ID NO: 2914 - protein, 10 aa, Artificial Sequence
  Quasi-synthetic sequence derived from human genome
VVLFIVFRKK

SEQ ID NO: 2915 - protein, 10 aa, Artificial Sequence
  Quasi-synthetic sequence derived from human genome
KVIRALLRIL

SEQ ID NO: 2916 - protein, 10 aa, Artificial Sequence
  Quasi-synthetic sequence derived from human genome
IKVVKLLVRL

SEQ ID NO: 2917 - protein, 10 aa, Artificial Sequence
  Quasi-synthetic sequence derived from human genome
IIVLWKCLRK

SEQ ID NO: 2918 - protein, 10 aa, Artificial Sequence
  Quasi-synthetic sequence derived from human genome
RLKKVVKWYL

SEQ ID NO: 2919 - protein, 10 aa, Artificial Sequence
  Quasi-synthetic sequence derived from human genome
KRMLILKKAL

SEQ ID NO: 2920 - protein, 10 aa, Artificial Sequence
  Quasi-synthetic sequence derived from human genome
LPMKLLRKKI

SEQ ID NO: 2921 - protein, 10 aa, Artificial Sequence
  Quasi-synthetic sequence derived from human genome
FRNRRKILIR

SEQ ID NO: 2922 - protein, 10 aa, Artificial Sequence
  Quasi-synthetic sequence derived from human genome
YIRKRYRKFL

SEQ ID NO: 2923 - protein, 10 aa, Artificial Sequence
  Quasi-synthetic sequence derived from human genome
RLRKRTFILM

SEQ ID NO: 2924 - protein, 10 aa, Artificial Sequence
  Quasi-synthetic sequence derived from human genome
FFRRTIRMKL

SEQ ID NO: 2925 - protein, 10 aa, Artificial Sequence
  Quasi-synthetic sequence derived from human genome
KLTVWKRLFR

SEQ ID NO: 2926 - protein, 10 aa, Artificial Sequence
  Quasi-synthetic sequence derived from human genome
WKKRIKPIVW

SEQ ID NO: 2927 - protein, 10 aa, Artificial Sequence
  Quasi-synthetic sequence derived from human genome
LIRKLRCYLK

SEQ ID NO: 2928 - protein, 10 aa, Artificial Sequence
  Quasi-synthetic sequence derived from human genome
LKKAKLMFFF

SEQ ID NO: 2929 - protein, 10 aa, Artificial Sequence
  Quasi-synthetic sequence derived from human genome
LLFWKPLRYK

SEQ ID NO: 2930 - protein, 10 aa, Artificial Sequence
  Quasi-synthetic sequence derived from human genome
KVLILFKLIL

SEQ ID NO: 2931 - protein, 10 aa, Artificial Sequence
  Quasi-synthetic sequence derived from human genome
WLFIFRLRPW

SEQ ID NO: 2932 - protein, 10 aa, Artificial Sequence
  Quasi-synthetic sequence derived from human genome
IPRLWRLLLW

SEQ ID NO: 2933 - protein, 10 aa, Artificial Sequence
  Quasi-synthetic sequence derived from human genome
KLKKVKLRKL

SEQ ID NO: 2934 - protein, 10 aa, Artificial Sequence
  Quasi-synthetic sequence derived from human genome
FLLFFVLRVR

SEQ ID NO: 2935 - protein, 10 aa, Artificial Sequence
  Quasi-synthetic sequence derived from human genome
LIRPKKRLIV

SEQ ID NO: 2936 - protein, 10 aa, Artificial Sequence
  Quasi-synthetic sequence derived from human genome
LIKRLAKIVR

SEQ ID NO: 2937 - protein, 10 aa, Artificial Sequence
  Quasi-synthetic sequence derived from human genome
RKIPKLVLRI

SEQ ID NO: 2938 - protein, 10 aa, Artificial Sequence
  Quasi-synthetic sequence derived from human genome
YLRRRQLLLR

SEQ ID NO: 2939 - protein, 10 aa, Artificial Sequence
  Quasi-synthetic sequence derived from human genome
LYLRRQRLLR

SEQ ID NO: 2940 - protein, 10 aa, Artificial Sequence
  Quasi-synthetic sequence derived from human genome
WRRKRRWRRV

SEQ ID NO: 2941 - protein, 10 aa, Artificial Sequence
  Quasi-synthetic sequence derived from human genome
KILKILITFR

SEQ ID NO: 2942 - protein, 10 aa, Artificial Sequence
  Quasi-synthetic sequence derived from human genome
IRAFRIYFRF

SEQ ID NO: 2943 - protein, 10 aa, Artificial Sequence
  Quasi-synthetic sequence derived from human genome
RLMKIILLCK

SEQ ID NO: 2944 - protein, 10 aa, Artificial Sequence
  Quasi-synthetic sequence derived from human genome
IIRKLKTFIF

SEQ ID NO: 2945 - protein, 10 aa, Artificial Sequence
  Quasi-synthetic sequence derived from human genome
RLKKKKIFCI

SEQ ID NO: 2946 - protein, 10 aa, Artificial Sequence
  Quasi-synthetic sequence derived from human genome
VLKFKHIFFR

SEQ ID NO: 2947 - protein, 10 aa, Artificial Sequence
  Quasi-synthetic sequence derived from human genome
KILVLHLKRF

SEQ ID NO: 2948 - protein, 10 aa, Artificial Sequence
  Quasi-synthetic sequence derived from human genome
LRALFFKVIK

SEQ ID NO: 2949 - protein, 10 aa, Artificial Sequence
  Quasi-synthetic sequence derived from human genome
ICWVLLKKFK

SEQ ID NO: 2950 - protein, 10 aa, Artificial Sequence
  Quasi-synthetic sequence derived from human genome
FKKRPILLLV

SEQ ID NO: 2951 - protein, 10 aa, Artificial Sequence
  Quasi-synthetic sequence derived from human genome
LLLVKRFIPK

SEQ ID NO: 2952 - protein, 10 aa, Artificial Sequence
  Quasi-synthetic sequence derived from human genome
RLFFKIKPLV

SEQ ID NO: 2953 - protein, 10 aa, Artificial Sequence
  Quasi-synthetic sequence derived from human genome
RKLLKVIPLL

SEQ ID NO: 2954 - protein, 10 aa, Artificial Sequence
  Quasi-synthetic sequence derived from human genome
RALWPLRRFW

SEQ ID NO: 2955 - protein, 10 aa, Artificial Sequence
  Quasi-synthetic sequence derived from human genome
IKLLSLIKWK

SEQ ID NO: 2956 - protein, 10 aa, Artificial Sequence
  Quasi-synthetic sequence derived from human genome
IGIMRRLLRR

SEQ ID NO: 2957 - protein, 10 aa, Artificial Sequence
  Quasi-synthetic sequence derived from human genome
ISIMRRLLRR

SEQ ID NO: 2958 - protein, 10 aa, Artificial Sequence
  Quasi-synthetic sequence derived from human genome
VFWKLIRSRR

SEQ ID NO: 2959 - protein, 10 aa, Artificial Sequence
  Quasi-synthetic sequence derived from human genome
RLLRLVRVAR

SEQ ID NO: 2960 - protein, 10 aa, Artificial Sequence
  Quasi-synthetic sequence derived from human genome
LRLRVRRVLA

SEQ ID NO: 2961 - protein, 10 aa, Artificial Sequence
  Quasi-synthetic sequence derived from human genome
RVLRVLRPLR

SEQ ID NO: 2962 - protein, 10 aa, Artificial Sequence
  Quasi-synthetic sequence derived from human genome
RKVFRIFRQW

SEQ ID NO: 2963 - protein, 10 aa, Artificial Sequence
  Quasi-synthetic sequence derived from human genome
IMFLMLLRRF

SEQ ID NO: 2964 - protein, 10 aa, Artificial Sequence
  Quasi-synthetic sequence derived from human genome
KFKHLKKMLL

SEQ ID NO: 2965 - protein, 10 aa, Artificial Sequence
  Quasi-synthetic sequence derived from human genome
KRLKYFAKLW

SEQ ID NO: 2966 - protein, 10 aa, Artificial Sequence
  Quasi-synthetic sequence derived from human genome
LMLGLRFIRR

SEQ ID NO: 2967 - protein, 10 aa, Artificial Sequence
  Quasi-synthetic sequence derived from human genome
RFLQILRMLR

SEQ ID NO: 2968 - protein, 10 aa, Artificial Sequence
  Quasi-synthetic sequence derived from human genome
LRRRVRRLRR

SEQ ID NO: 2969 - protein, 10 aa, Artificial Sequence
  Quasi-synthetic sequence derived from human genome
LLLFRWKPLW

SEQ ID NO: 2970 - protein, 10 aa, Artificial Sequence
  Quasi-synthetic sequence derived from human genome
RLLLRRCPLW

SEQ ID NO: 2971 - protein, 10 aa, Artificial Sequence
  Quasi-synthetic sequence derived from human genome
FRRGRLRWMR

SEQ ID NO: 2972 - protein, 10 aa, Artificial Sequence
  Quasi-synthetic sequence derived from human genome
RRLIKRFSFK

SEQ ID NO: 2973 - protein, 10 aa, Artificial Sequence
  Quasi-synthetic sequence derived from human genome
RIFGLKKRRL

SEQ ID NO: 2974 - protein, 10 aa, Artificial Sequence
  Quasi-synthetic sequence derived from human genome
RRSIKKLRFL

SEQ ID NO: 2975 - protein, 10 aa, Artificial Sequence
  Quasi-synthetic sequence derived from human genome
RLWFTYRRKF

SEQ ID NO: 2976 - protein, 10 aa, Artificial Sequence
  Quasi-synthetic sequence derived from human genome
LRPRLLLLLL

SEQ ID NO: 2977 - protein, 10 aa, Artificial Sequence
  Quasi-synthetic sequence derived from human genome
LFFFLRLHRL

SEQ ID NO: 2978 - protein, 10 aa, Artificial Sequence
  Quasi-synthetic sequence derived from human genome
RRLLPLLLLL

SEQ ID NO: 2979 - protein, 10 aa, Artificial Sequence
  Quasi-synthetic sequence derived from human genome
LRLLRPLLLL

SEQ ID NO: 2980 - protein, 10 aa, Artificial Sequence
  Quasi-synthetic sequence derived from human genome
LLLRLLALLR

SEQ ID NO: 2981 - protein, 10 aa, Artificial Sequence
  Quasi-synthetic sequence derived from human genome
RLLPRLLLLL

SEQ ID NO: 2982 - protein, 10 aa, Artificial Sequence
  Quasi-synthetic sequence derived from human genome
RLFFPRFFFL

SEQ ID NO: 2983 - protein, 10 aa, Artificial Sequence
  Quasi-synthetic sequence derived from human genome
LLLLLLLRRA

SEQ ID NO: 2984 - protein, 10 aa, Artificial Sequence
  Quasi-synthetic sequence derived from human genome
RYKMIRLLIM

SEQ ID NO: 2985 - protein, 10 aa, Artificial Sequence
  Quasi-synthetic sequence derived from human genome
RQRIILRVWW

SEQ ID NO: 2986 - protein, 10 aa, Artificial Sequence
  Quasi-synthetic sequence derived from human genome
FKKIMLLHWK

SEQ ID NO: 2987 - protein, 10 aa, Artificial Sequence
  Quasi-synthetic sequence derived from human genome
PWMKLFFKIK

SEQ ID NO: 2988 - protein, 10 aa, Artificial Sequence
  Quasi-synthetic sequence derived from human genome
RVLRYRIIYR

SEQ ID NO: 2989 - protein, 10 aa, Artificial Sequence
  Quasi-synthetic sequence derived from human genome
ILRRKLYIHR

SEQ ID NO: 2990 - protein, 10 aa, Artificial Sequence
  Quasi-synthetic sequence derived from human genome
KRRKGLIWWM

SEQ ID NO: 2991 - protein, 10 aa, Artificial Sequence
  Quasi-synthetic sequence derived from human genome
KIFIRPLRYR

SEQ ID NO: 2992 - protein, 10 aa, Artificial Sequence
  Quasi-synthetic sequence derived from human genome
RMKFLVRRWH

SEQ ID NO: 2993 - protein, 10 aa, Artificial Sequence
  Quasi-synthetic sequence derived from human genome
AMVWRRLLRK

SEQ ID NO: 2994 - protein, 10 aa, Artificial Sequence
  Quasi-synthetic sequence derived from human genome
IAKVRFLKLK

SEQ ID NO: 2995 - protein, 10 aa, Artificial Sequence
  Quasi-synthetic sequence derived from human genome
KLFLKKKVVV

SEQ ID NO: 2996 - protein, 10 aa, Artificial Sequence
  Quasi-synthetic sequence derived from human genome
KVALKKLLIR

SEQ ID NO: 2997 - protein, 10 aa, Artificial Sequence
  Quasi-synthetic sequence derived from human genome
KIRLKPKVLL

SEQ ID NO: 2998 - protein, 10 aa, Artificial Sequence
  Quasi-synthetic sequence derived from human genome
LKRLVKLHIK

SEQ ID NO: 2999 - protein, 10 aa, Artificial Sequence
  Quasi-synthetic sequence derived from human genome
SKLKKWIKIL

SEQ ID NO: 3000 - protein, 10 aa, Artificial Sequence
  Quasi-synthetic sequence derived from human genome
KLLKFRAIKV

SEQ ID NO: 3001 - protein, 11 aa, Artificial Sequence
  Quasi-synthetic sequence derived from human genome
KLLRRRFRLLL

SEQ ID NO: 3002 - protein, 11 aa, Artificial Sequence
  Quasi-synthetic sequence derived from human genome
IRKRFLLRRIL

SEQ ID NO: 3003 - protein, 11 aa, Artificial Sequence
  Quasi-synthetic sequence derived from human genome
LLWVFRRRWRL

SEQ ID NO: 3004 - protein, 11 aa, Artificial Sequence
  Quasi-synthetic sequence derived from human genome
LIKKLRLFFRK

SEQ ID NO: 3005 - protein, 11 aa, Artificial Sequence
  Quasi-synthetic sequence derived from human genome
RFRWRRRLLVI

SEQ ID NO: 3006 - protein, 11 aa, Artificial Sequence
  Quasi-synthetic sequence derived from human genome
MKLRWFLKRWR

SEQ ID NO: 3007 - protein, 11 aa, Artificial Sequence
  Quasi-synthetic sequence derived from human genome
MKFILWRRFRW

SEQ ID NO: 3008 - protein, 11 aa, Artificial Sequence
  Quasi-synthetic sequence derived from human genome
RRRRRRRLLFW

SEQ ID NO: 3009 - protein, 11 aa, Artificial Sequence
  Quasi-synthetic sequence derived from human genome
KRILKFLKLFI

SEQ ID NO: 3010 - protein, 11 aa, Artificial Sequence
  Quasi-synthetic sequence derived from human genome
FLWLRWRILRL

SEQ ID NO: 3011 - protein, 11 aa, Artificial Sequence
  Quasi-synthetic sequence derived from human genome
FLFRLLLRFLR

SEQ ID NO: 3012 - protein, 11 aa, Artificial Sequence
  Quasi-synthetic sequence derived from human genome
RRYLRRLLLLL

SEQ ID NO: 3013 - protein, 11 aa, Artificial Sequence
  Quasi-synthetic sequence derived from human genome
WKRWKKRFFVL

SEQ ID NO: 3014 - protein, 11 aa, Artificial Sequence
  Quasi-synthetic sequence derived from human genome
ILKKKKKLLLL

SEQ ID NO: 3015 - protein, 11 aa, Artificial Sequence
  Quasi-synthetic sequence derived from human genome
ILLLLVLRKRR

SEQ ID NO: 3016 - protein, 11 aa, Artificial Sequence
  Quasi-synthetic sequence derived from human genome
RRMRILRRLLR

SEQ ID NO: 3017 - protein, 11 aa, Artificial Sequence
  Quasi-synthetic sequence derived from human genome
KLRLVRWLLKK

SEQ ID NO: 3018 - protein, 11 aa, Artificial Sequence
  Quasi-synthetic sequence derived from human genome
RLRKWIIFRLV

SEQ ID NO: 3019 - protein, 11 aa, Artificial Sequence
  Quasi-synthetic sequence derived from human genome
FWRFKLFLLRI

SEQ ID NO: 3020 - protein, 11 aa, Artificial Sequence
  Quasi-synthetic sequence derived from human genome
KLLLRILRRMI

SEQ ID NO: 3021 - protein, 11 aa, Artificial Sequence
  Quasi-synthetic sequence derived from human genome
LRLMRIFRILK

SEQ ID NO: 3022 - protein, 11 aa, Artificial Sequence
  Quasi-synthetic sequence derived from human genome
RLMRIFRILKL

SEQ ID NO: 3023 - protein, 11 aa, Artificial Sequence
  Quasi-synthetic sequence derived from human genome
LLVILKRKWWK

SEQ ID NO: 3024 - protein, 11 aa, Artificial Sequence
  Quasi-synthetic sequence derived from human genome
LILWKWKKKKR

SEQ ID NO: 3025 - protein, 11 aa, Artificial Sequence
  Quasi-synthetic sequence derived from human genome
RKFIKKRIIII

SEQ ID NO: 3026 - protein, 11 aa, Artificial Sequence
  Quasi-synthetic sequence derived from human genome
RRFLKLLRFYI

SEQ ID NO: 3027 - protein, 11 aa, Artificial Sequence
  Quasi-synthetic sequence derived from human genome
RLLRLIILLRI

SEQ ID NO: 3028 - protein, 11 aa, Artificial Sequence
  Quasi-synthetic sequence derived from human genome
FFWIRLYKIRR

SEQ ID NO: 3029 - protein, 11 aa, Artificial Sequence
  Quasi-synthetic sequence derived from human genome
CLLLLWWRRRK

SEQ ID NO: 3030 - protein, 11 aa, Artificial Sequence
  Quasi-synthetic sequence derived from human genome
LLILLKYRWRK

SEQ ID NO: 3031 - protein, 11 aa, Artificial Sequence
  Quasi-synthetic sequence derived from human genome
IKKLIIFILKK

SEQ ID NO: 3032 - protein, 11 aa, Artificial Sequence
  Quasi-synthetic sequence derived from human genome
FILLRVRRRRK

SEQ ID NO: 3033 - protein, 11 aa, Artificial Sequence
  Quasi-synthetic sequence derived from human genome
LRLFAWRKRWF

SEQ ID NO: 3034 - protein, 11 aa, Artificial Sequence
  Quasi-synthetic sequence derived from human genome
RLLRLIILIRI

SEQ ID NO: 3035 - protein, 11 aa, Artificial Sequence
  Quasi-synthetic sequence derived from human genome
ALRRRRLLLLL

SEQ ID NO: 3036 - protein, 11 aa, Artificial Sequence
  Quasi-synthetic sequence derived from human genome
LWKRFFCFLRR

SEQ ID NO: 3037 - protein, 11 aa, Artificial Sequence
  Quasi-synthetic sequence derived from human genome
FFRFWMKWLLR

SEQ ID NO: 3038 - protein, 11 aa, Artificial Sequence
  Quasi-synthetic sequence derived from human genome
LRKLIFIKKKR

SEQ ID NO: 3039 - protein, 11 aa, Artificial Sequence
  Quasi-synthetic sequence derived from human genome
FFRILRIFKLI

SEQ ID NO: 3040 - protein, 11 aa, Artificial Sequence
  Quasi-synthetic sequence derived from human genome
WKLWRCRLRLK

SEQ ID NO: 3041 - protein, 11 aa, Artificial Sequence
  Quasi-synthetic sequence derived from human genome
LRLFCFRLRKR

SEQ ID NO: 3042 - protein, 11 aa, Artificial Sequence
  Quasi-synthetic sequence derived from human genome
RLLLKFIKIMK

SEQ ID NO: 3043 - protein, 11 aa, Artificial Sequence
  Quasi-synthetic sequence derived from human genome
IWVFRLKRRKR

SEQ ID NO: 3044 - protein, 11 aa, Artificial Sequence
  Quasi-synthetic sequence derived from human genome
LLAILRRRWWK

SEQ ID NO: 3045 - protein, 11 aa, Artificial Sequence
  Quasi-synthetic sequence derived from human genome
LLRLFRMLRIF

SEQ ID NO: 3046 - protein, 11 aa, Artificial Sequence
  Quasi-synthetic sequence derived from human genome
RFWLLKLLFRV

SEQ ID NO: 3047 - protein, 11 aa, Artificial Sequence
  Quasi-synthetic sequence derived from human genome
IRRLLILILKI

SEQ ID NO: 3048 - protein, 11 aa, Artificial Sequence
  Quasi-synthetic sequence derived from human genome
LLRLAIRLLRR

SEQ ID NO: 3049 - protein, 11 aa, Artificial Sequence
  Quasi-synthetic sequence derived from human genome
CFRWLLIRFKR

SEQ ID NO: 3050 - protein, 11 aa, Artificial Sequence
  Quasi-synthetic sequence derived from human genome
RIRRLLRPFFL

SEQ ID NO: 3051 - protein, 11 aa, Artificial Sequence
  Quasi-synthetic sequence derived from human genome
FRLLRVLKLVR

SEQ ID NO: 3052 - protein, 11 aa, Artificial Sequence
  Quasi-synthetic sequence derived from human genome
LRIVIKKIWKR

SEQ ID NO: 3053 - protein, 11 aa, Artificial Sequence
  Quasi-synthetic sequence derived from human genome
FLYWRLRRLLL

SEQ ID NO: 3054 - protein, 11 aa, Artificial Sequence
  Quasi-synthetic sequence derived from human genome
FFYWRLRRLLL

SEQ ID NO: 3055 - protein, 11 aa, Artificial Sequence
  Quasi-synthetic sequence derived from human genome
RRFLLFRRAFK

SEQ ID NO: 3056 - protein, 11 aa, Artificial Sequence
  Quasi-synthetic sequence derived from human genome
LARRFLLRRKF

SEQ ID NO: 3057 - protein, 11 aa, Artificial Sequence
  Quasi-synthetic sequence derived from human genome
LLRFRYRLRLV

SEQ ID NO: 3058 - protein, 11 aa, Artificial Sequence
  Quasi-synthetic sequence derived from human genome
FLLRRRFLHLK

SEQ ID NO: 3059 - protein, 11 aa, Artificial Sequence
  Quasi-synthetic sequence derived from human genome
LLLKRFLLARR

SEQ ID NO: 3060 - protein, 11 aa, Artificial Sequence
  Quasi-synthetic sequence derived from human genome
MRRLVRRLRRW

SEQ ID NO: 3061 - protein, 11 aa, Artificial Sequence
  Quasi-synthetic sequence derived from human genome
MKFIVWRRFKW

SEQ ID NO: 3062 - protein, 11 aa, Artificial Sequence
  Quasi-synthetic sequence derived from human genome
RLFRVMRLIKL

SEQ ID NO: 3063 - protein, 11 aa, Artificial Sequence
  Quasi-synthetic sequence derived from human genome
RLLWRRLKPLI

SEQ ID NO: 3064 - protein, 11 aa, Artificial Sequence
  Quasi-synthetic sequence derived from human genome
RLCKLLFFRIR

SEQ ID NO: 3065 - protein, 11 aa, Artificial Sequence
  Quasi-synthetic sequence derived from human genome
RKIMKLLLKIK

SEQ ID NO: 3066 - protein, 11 aa, Artificial Sequence
  Quasi-synthetic sequence derived from human genome
KKIIRRLYLKW

SEQ ID NO: 3067 - protein, 11 aa, Artificial Sequence
  Quasi-synthetic sequence derived from human genome
KKLIRKMKLIL

SEQ ID NO: 3068 - protein, 11 aa, Artificial Sequence
  Quasi-synthetic sequence derived from human genome
LRIIRLVRVFR

SEQ ID NO: 3069 - protein, 11 aa, Artificial Sequence
  Quasi-synthetic sequence derived from human genome
FLRILFRMLIR

SEQ ID NO: 3070 - protein, 11 aa, Artificial Sequence
  Quasi-synthetic sequence derived from human genome
MKLWKKRWFVL

SEQ ID NO: 3071 - protein, 11 aa, Artificial Sequence
  Quasi-synthetic sequence derived from human genome
FLLVWLLIRRK

SEQ ID NO: 3072 - protein, 11 aa, Artificial Sequence
  Quasi-synthetic sequence derived from human genome
LKKLVLRKLRR

SEQ ID NO: 3073 - protein, 11 aa, Artificial Sequence
  Quasi-synthetic sequence derived from human genome
LRVFRVFRIFK

SEQ ID NO: 3074 - protein, 11 aa, Artificial Sequence
  Quasi-synthetic sequence derived from human genome
RLVRVFRIFKL

SEQ ID NO: 3075 - protein, 11 aa, Artificial Sequence
  Quasi-synthetic sequence derived from human genome
FRKLMRWILIL

SEQ ID NO: 3076 - protein, 11 aa, Artificial Sequence
  Quasi-synthetic sequence derived from human genome
LRALRLLRIFK

SEQ ID NO: 3077 - protein, 11 aa, Artificial Sequence
  Quasi-synthetic sequence derived from human genome
FILRFLRARKF

SEQ ID NO: 3078 - protein, 11 aa, Artificial Sequence
  Quasi-synthetic sequence derived from human genome
KRRFRKFLVFV

SEQ ID NO: 3079 - protein, 11 aa, Artificial Sequence
  Quasi-synthetic sequence derived from human genome
RRLLRRCRLRL

SEQ ID NO: 3080 - protein, 11 aa, Artificial Sequence
  Quasi-synthetic sequence derived from human genome
RFLLRKLYVFR

SEQ ID NO: 3081 - protein, 11 aa, Artificial Sequence
  Quasi-synthetic sequence derived from human genome
KKRLFFPRFFF

SEQ ID NO: 3082 - protein, 11 aa, Artificial Sequence
  Quasi-synthetic sequence derived from human genome
KKRLLFPRFFF

SEQ ID NO: 3083 - protein, 11 aa, Artificial Sequence
  Quasi-synthetic sequence derived from human genome
LRPFLLRRLKK

SEQ ID NO: 3084 - protein, 11 aa, Artificial Sequence
  Quasi-synthetic sequence derived from human genome
LRCIRLLRIFK

SEQ ID NO: 3085 - protein, 11 aa, Artificial Sequence
  Quasi-synthetic sequence derived from human genome
RLRRFLRTLRL

SEQ ID NO: 3086 - protein, 11 aa, Artificial Sequence
  Quasi-synthetic sequence derived from human genome
LLKLFYIKKLK

SEQ ID NO: 3087 - protein, 11 aa, Artificial Sequence
  Quasi-synthetic sequence derived from human genome
ILWKFALLRKR

SEQ ID NO: 3088 - protein, 11 aa, Artificial Sequence
  Quasi-synthetic sequence derived from human genome
KHILRLRWKLF

SEQ ID NO: 3089 - protein, 11 aa, Artificial Sequence
  Quasi-synthetic sequence derived from human genome
IIMLRIWRVKR

SEQ ID NO: 3090 - protein, 11 aa, Artificial Sequence
  Quasi-synthetic sequence derived from human genome
FLRRIRPKLKW

SEQ ID NO: 3091 - protein, 11 aa, Artificial Sequence
  Quasi-synthetic sequence derived from human genome
LRRLLKYMFIR

SEQ ID NO: 3092 - protein, 11 aa, Artificial Sequence
  Quasi-synthetic sequence derived from human genome
FKRWKLRYFLV

SEQ ID NO: 3093 - protein, 11 aa, Artificial Sequence
  Quasi-synthetic sequence derived from human genome
LILRRRRHRII

SEQ ID NO: 3094 - protein, 11 aa, Artificial Sequence
  Quasi-synthetic sequence derived from human genome
RRRRLLGLLRF

SEQ ID NO: 3095 - protein, 11 aa, Artificial Sequence
  Quasi-synthetic sequence derived from human genome
RLTWKLLLLRR

SEQ ID NO: 3096 - protein, 11 aa, Artificial Sequence
  Quasi-synthetic sequence derived from human genome
ARRRRLVFLWW

SEQ ID NO: 3097 - protein, 11 aa, Artificial Sequence
  Quasi-synthetic sequence derived from human genome
IWLYWRRKKRK

SEQ ID NO: 3098 - protein, 11 aa, Artificial Sequence
  Quasi-synthetic sequence derived from human genome
LRRRVRRLRRL

SEQ ID NO: 3099 - protein, 11 aa, Artificial Sequence
  Quasi-synthetic sequence derived from human genome
LRLKRPILRRI

SEQ ID NO: 3100 - protein, 11 aa, Artificial Sequence
  Quasi-synthetic sequence derived from human genome
IKVLVRLRKRL

SEQ ID NO: 3101 - protein, 11 aa, Artificial Sequence
  Quasi-synthetic sequence derived from human genome
ARKLLFLFRIK

SEQ ID NO: 3102 - protein, 11 aa, Artificial Sequence
  Quasi-synthetic sequence derived from human genome
KILHLLFLKRR

SEQ ID NO: 3103 - protein, 11 aa, Artificial Sequence
  Quasi-synthetic sequence derived from human genome
FCLWKRLIKLK

SEQ ID NO: 3104 - protein, 11 aa, Artificial Sequence
  Quasi-synthetic sequence derived from human genome
LLKRKHRFILL

SEQ ID NO: 3105 - protein, 11 aa, Artificial Sequence
  Quasi-synthetic sequence derived from human genome
FYFFKILLRLR

SEQ ID NO: 3106 - protein, 11 aa, Artificial Sequence
  Quasi-synthetic sequence derived from human genome
FILVFWILKRK

SEQ ID NO: 3107 - protein, 11 aa, Artificial Sequence
  Quasi-synthetic sequence derived from human genome
KRIKRRALLFL

SEQ ID NO: 3108 - protein, 11 aa, Artificial Sequence
  Quasi-synthetic sequence derived from human genome
KRRILLLIPKW

SEQ ID NO: 3109 - protein, 11 aa, Artificial Sequence
  Quasi-synthetic sequence derived from human genome
FIIWLARRLKK

SEQ ID NO: 3110 - protein, 11 aa, Artificial Sequence
  Quasi-synthetic sequence derived from human genome
LKFFFLRTRRF

SEQ ID NO: 3111 - protein, 11 aa, Artificial Sequence
  Quasi-synthetic sequence derived from human genome
RLLILWRILYK

SEQ ID NO: 3112 - protein, 11 aa, Artificial Sequence
  Quasi-synthetic sequence derived from human genome
RFFKRKIMIKR

SEQ ID NO: 3113 - protein, 11 aa, Artificial Sequence
  Quasi-synthetic sequence derived from human genome
KQILRLRWRWF

SEQ ID NO: 3114 - protein, 11 aa, Artificial Sequence
  Quasi-synthetic sequence derived from human genome
VLLRRRLRWAL

SEQ ID NO: 3115 - protein, 11 aa, Artificial Sequence
  Quasi-synthetic sequence derived from human genome
LLWLLRLRRHL

SEQ ID NO: 3116 - protein, 11 aa, Artificial Sequence
  Quasi-synthetic sequence derived from human genome
WKRWKKRYFVL

SEQ ID NO: 3117 - protein, 11 aa, Artificial Sequence
  Quasi-synthetic sequence derived from human genome
LRLLRLSRLIR

SEQ ID NO: 3118 - protein, 11 aa, Artificial Sequence
  Quasi-synthetic sequence derived from human genome
RLSRLIFLLRR

SEQ ID NO: 3119 - protein, 11 aa, Artificial Sequence
  Quasi-synthetic sequence derived from human genome
LRRKLYVLKLR

SEQ ID NO: 3120 - protein, 11 aa, Artificial Sequence
  Quasi-synthetic sequence derived from human genome
LRPLKKFLRKL

SEQ ID NO: 3121 - protein, 11 aa, Artificial Sequence
  Quasi-synthetic sequence derived from human genome
KVMRRLLRKII

SEQ ID NO: 3122 - protein, 11 aa, Artificial Sequence
  Quasi-synthetic sequence derived from human genome
KIFFLFRLCKK

SEQ ID NO: 3123 - protein, 11 aa, Artificial Sequence
  Quasi-synthetic sequence derived from human genome
RIPRLWRLLLW

SEQ ID NO: 3124 - protein, 11 aa, Artificial Sequence
  Quasi-synthetic sequence derived from human genome
LLKKYLMKRRW

SEQ ID NO: 3125 - protein, 11 aa, Artificial Sequence
  Quasi-synthetic sequence derived from human genome
LRLRKRFLNFF

SEQ ID NO: 3126 - protein, 11 aa, Artificial Sequence
  Quasi-synthetic sequence derived from human genome
KFLRFRRSLLL

SEQ ID NO: 3127 - protein, 11 aa, Artificial Sequence
  Quasi-synthetic sequence derived from human genome
KFLLRLLRGRL

SEQ ID NO: 3128 - protein, 11 aa, Artificial Sequence
  Quasi-synthetic sequence derived from human genome
RLLRLLRLLQK

SEQ ID NO: 3129 - protein, 11 aa, Artificial Sequence
  Quasi-synthetic sequence derived from human genome
ILRGRLLFRRR

SEQ ID NO: 3130 - protein, 11 aa, Artificial Sequence
  Quasi-synthetic sequence derived from human genome
FVLLLVVRRRR

SEQ ID NO: 3131 - protein, 11 aa, Artificial Sequence
  Quasi-synthetic sequence derived from human genome
RRIILLQRWFR

SEQ ID NO: 3132 - protein, 11 aa, Artificial Sequence
  Quasi-synthetic sequence derived from human genome
WLIRRRRSILF

SEQ ID NO: 3133 - protein, 11 aa, Artificial Sequence
  Quasi-synthetic sequence derived from human genome
YKYLRRLFRFR

SEQ ID NO: 3134 - protein, 11 aa, Artificial Sequence
  Quasi-synthetic sequence derived from human genome
IMFLMLLRRFR

SEQ ID NO: 3135 - protein, 11 aa, Artificial Sequence
  Quasi-synthetic sequence derived from human genome
WWRWLTFWRRL

SEQ ID NO: 3136 - protein, 11 aa, Artificial Sequence
  Quasi-synthetic sequence derived from human genome
LLRRWKHWLLL

SEQ ID NO: 3137 - protein, 11 aa, Artificial Sequence
  Quasi-synthetic sequence derived from human genome
LVRIFRKKKRI

SEQ ID NO: 3138 - protein, 11 aa, Artificial Sequence
  Quasi-synthetic sequence derived from human genome
RLRLRLLALLL

SEQ ID NO: 3139 - protein, 11 aa, Artificial Sequence
  Quasi-synthetic sequence derived from human genome
ALRRRLLLLLL

SEQ ID NO: 3140 - protein, 11 aa, Artificial Sequence
  Quasi-synthetic sequence derived from human genome
LLRLLRLLPRL

SEQ ID NO: 3141 - protein, 11 aa, Artificial Sequence
  Quasi-synthetic sequence derived from human genome
RLWKRRWFVLA

SEQ ID NO: 3142 - protein, 11 aa, Artificial Sequence
  Quasi-synthetic sequence derived from human genome
VKIKVFRLFKF

SEQ ID NO: 3143 - protein, 11 aa, Artificial Sequence
  Quasi-synthetic sequence derived from human genome
IVLLVLRLRRW

SEQ ID NO: 3144 - protein, 11 aa, Artificial Sequence
  Quasi-synthetic sequence derived from human genome
LLRALRLVRRL

SEQ ID NO: 3145 - protein, 11 aa, Artificial Sequence
  Quasi-synthetic sequence derived from human genome
LLYLRMFKLKK

SEQ ID NO: 3146 - protein, 11 aa, Artificial Sequence
  Quasi-synthetic sequence derived from human genome
KRFNLFLRRRL

SEQ ID NO: 3147 - protein, 11 aa, Artificial Sequence
  Quasi-synthetic sequence derived from human genome
KRIKLYMRRLL

SEQ ID NO: 3148 - protein, 11 aa, Artificial Sequence
  Quasi-synthetic sequence derived from human genome
RYKLRILRMKL

SEQ ID NO: 3149 - protein, 11 aa, Artificial Sequence
  Quasi-synthetic sequence derived from human genome
VLILFMFRRLR

SEQ ID NO: 3150 - protein, 11 aa, Artificial Sequence
  Quasi-synthetic sequence derived from human genome
FLLKKRKWPLK

SEQ ID NO: 3151 - protein, 11 aa, Artificial Sequence
  Quasi-synthetic sequence derived from human genome
ILLLALRLRRW

SEQ ID NO: 3152 - protein, 11 aa, Artificial Sequence
  Quasi-synthetic sequence derived from human genome
CFRWLLIWFKR

SEQ ID NO: 3153 - protein, 11 aa, Artificial Sequence
  Quasi-synthetic sequence derived from human genome
RRLLLTKLFIR

SEQ ID NO: 3154 - protein, 11 aa, Artificial Sequence
  Quasi-synthetic sequence derived from human genome
KFLLLFYLKKL

SEQ ID NO: 3155 - protein, 11 aa, Artificial Sequence
  Quasi-synthetic sequence derived from human genome
LLRKKRRIFIH

SEQ ID NO: 3156 - protein, 11 aa, Artificial Sequence
  Quasi-synthetic sequence derived from human genome
AWRKRWFVLRR

SEQ ID NO: 3157 - protein, 11 aa, Artificial Sequence
  Quasi-synthetic sequence derived from human genome
RVLWRRRKWPF

SEQ ID NO: 3158 - protein, 11 aa, Artificial Sequence
  Quasi-synthetic sequence derived from human genome
RILRLLRILGR

SEQ ID NO: 3159 - protein, 11 aa, Artificial Sequence
  Quasi-synthetic sequence derived from human genome
FVLIRIFILKK

SEQ ID NO: 3160 - protein, 11 aa, Artificial Sequence
  Quasi-synthetic sequence derived from human genome
KRRFLLCLLLF

SEQ ID NO: 3161 - protein, 11 aa, Artificial Sequence
  Quasi-synthetic sequence derived from human genome
ILIKYRRLRIM

SEQ ID NO: 3162 - protein, 11 aa, Artificial Sequence
  Quasi-synthetic sequence derived from human genome
FYLLLKLKKWI

SEQ ID NO: 3163 - protein, 11 aa, Artificial Sequence
  Quasi-synthetic sequence derived from human genome
LLWMWWRRNRR

SEQ ID NO: 3164 - protein, 11 aa, Artificial Sequence
  Quasi-synthetic sequence derived from human genome
RLFRVMRLVKL

SEQ ID NO: 3165 - protein, 11 aa, Artificial Sequence
  Quasi-synthetic sequence derived from human genome
VLRLHLKRFRW

SEQ ID NO: 3166 - protein, 11 aa, Artificial Sequence
  Quasi-synthetic sequence derived from human genome
WLFKHRRVRFL

SEQ ID NO: 3167 - protein, 11 aa, Artificial Sequence
  Quasi-synthetic sequence derived from human genome
LRRFFKAKKLI

SEQ ID NO: 3168 - protein, 11 aa, Artificial Sequence
  Quasi-synthetic sequence derived from human genome
KAFLRLKRKFI

SEQ ID NO: 3169 - protein, 11 aa, Artificial Sequence
  Quasi-synthetic sequence derived from human genome
FVFFIWRRYWR

SEQ ID NO: 3170 - protein, 11 aa, Artificial Sequence
  Quasi-synthetic sequence derived from human genome
LSFFRKLRLIR

SEQ ID NO: 3171 - protein, 11 aa, Artificial Sequence
  Quasi-synthetic sequence derived from human genome
FLFKRFLRIQR

SEQ ID NO: 3172 - protein, 11 aa, Artificial Sequence
  Quasi-synthetic sequence derived from human genome
RRLIMKRIVKI

SEQ ID NO: 3173 - protein, 11 aa, Artificial Sequence
  Quasi-synthetic sequence derived from human genome
LLLFLILRHRR

SEQ ID NO: 3174 - protein, 11 aa, Artificial Sequence
  Quasi-synthetic sequence derived from human genome
FLLLVVRKLLR

SEQ ID NO: 3175 - protein, 11 aa, Artificial Sequence
  Quasi-synthetic sequence derived from human genome
LRVIRLVRVFR

SEQ ID NO: 3176 - protein, 11 aa, Artificial Sequence
  Quasi-synthetic sequence derived from human genome
LRVVRFVRILR

SEQ ID NO: 3177 - protein, 11 aa, Artificial Sequence
  Quasi-synthetic sequence derived from human genome
WRIRKKYFLMK

SEQ ID NO: 3178 - protein, 11 aa, Artificial Sequence
  Quasi-synthetic sequence derived from human genome
LRFRLKHLLRM

SEQ ID NO: 3179 - protein, 11 aa, Artificial Sequence
  Quasi-synthetic sequence derived from human genome
LRLLRALRMLK

SEQ ID NO: 3180 - protein, 11 aa, Artificial Sequence
  Quasi-synthetic sequence derived from human genome
RFLMRKRLLFP

SEQ ID NO: 3181 - protein, 11 aa, Artificial Sequence
  Quasi-synthetic sequence derived from human genome
LLLYLKRLKII

SEQ ID NO: 3182 - protein, 11 aa, Artificial Sequence
  Quasi-synthetic sequence derived from human genome
WRRWCWRWPWR

SEQ ID NO: 3183 - protein, 11 aa, Artificial Sequence
  Quasi-synthetic sequence derived from human genome
RKKVLLKVIIL

SEQ ID NO: 3184 - protein, 11 aa, Artificial Sequence
  Quasi-synthetic sequence derived from human genome
LVWKRRILFFV

SEQ ID NO: 3185 - protein, 11 aa, Artificial Sequence
  Quasi-synthetic sequence derived from human genome
WLGKWLRKRRI

SEQ ID NO: 3186 - protein, 11 aa, Artificial Sequence
  Quasi-synthetic sequence derived from human genome
MFRFFIRRMVK

SEQ ID NO: 3187 - protein, 11 aa, Artificial Sequence
  Quasi-synthetic sequence derived from human genome
FRIYKRKVLIL

SEQ ID NO: 3188 - protein, 11 aa, Artificial Sequence
  Quasi-synthetic sequence derived from human genome
VKLRWLLKHWR

SEQ ID NO: 3189 - protein, 11 aa, Artificial Sequence
  Quasi-synthetic sequence derived from human genome
WLKRFLVWKPR

SEQ ID NO: 3190 - protein, 11 aa, Artificial Sequence
  Quasi-synthetic sequence derived from human genome
LRNRLIRKRFL

SEQ ID NO: 3191 - protein, 11 aa, Artificial Sequence
  Quasi-synthetic sequence derived from human genome
LRFVKCFLRRR

SEQ ID NO: 3192 - protein, 11 aa, Artificial Sequence
  Quasi-synthetic sequence derived from human genome
LRGFFIKRRFR

SEQ ID NO: 3193 - protein, 11 aa, Artificial Sequence
  Quasi-synthetic sequence derived from human genome
RSFRRRLLKFI

SEQ ID NO: 3194 - protein, 11 aa, Artificial Sequence
  Quasi-synthetic sequence derived from human genome
LIFLRRRLRKQ

SEQ ID NO: 3195 - protein, 11 aa, Artificial Sequence
  Quasi-synthetic sequence derived from human genome
FFRRTIRLKLI

SEQ ID NO: 3196 - protein, 11 aa, Artificial Sequence
  Quasi-synthetic sequence derived from human genome
LLLRPVKLLRR

SEQ ID NO: 3197 - protein, 11 aa, Artificial Sequence
  Quasi-synthetic sequence derived from human genome
LLWKKRSILRF

SEQ ID NO: 3198 - protein, 11 aa, Artificial Sequence
  Quasi-synthetic sequence derived from human genome
LLWKNFILKRR

SEQ ID NO: 3199 - protein, 11 aa, Artificial Sequence
  Quasi-synthetic sequence derived from human genome
LLRLRLRKVAL

SEQ ID NO: 3200 - protein, 11 aa, Artificial Sequence
  Quasi-synthetic sequence derived from human genome
LRVLLAFRRLK

SEQ ID NO: 3201 - protein, 11 aa, Artificial Sequence
  Quasi-synthetic sequence derived from human genome
KKKLRKLLKRL

SEQ ID NO: 3202 - protein, 11 aa, Artificial Sequence
  Quasi-synthetic sequence derived from human genome
RKRWRTIKLLL

SEQ ID NO: 3203 - protein, 11 aa, Artificial Sequence
  Quasi-synthetic sequence derived from human genome
KLFFKIKPLLK

SEQ ID NO: 3204 - protein, 11 aa, Artificial Sequence
  Quasi-synthetic sequence derived from human genome
RILFIKRFIIY

SEQ ID NO: 3205 - protein, 11 aa, Artificial Sequence
  Quasi-synthetic sequence derived from human genome
LKRKTLIRLLF

SEQ ID NO: 3206 - protein, 11 aa, Artificial Sequence
  Quasi-synthetic sequence derived from human genome
LGFFLWLKKRK

SEQ ID NO: 3207 - protein, 11 aa, Artificial Sequence
  Quasi-synthetic sequence derived from human genome
LLVLIFVLRKR

SEQ ID NO: 3208 - protein, 11 aa, Artificial Sequence
  Quasi-synthetic sequence derived from human genome
LRRILRRAVRF

SEQ ID NO: 3209 - protein, 11 aa, Artificial Sequence
  Quasi-synthetic sequence derived from human genome
KQILKIRWRWF

SEQ ID NO: 3210 - protein, 11 aa, Artificial Sequence
  Quasi-synthetic sequence derived from human genome
WLGRWRRKRRW

SEQ ID NO: 3211 - protein, 11 aa, Artificial Sequence
  Quasi-synthetic sequence derived from human genome
RRPLILKRRRL

SEQ ID NO: 3212 - protein, 11 aa, Artificial Sequence
  Quasi-synthetic sequence derived from human genome
LRCVRLLRIFK

SEQ ID NO: 3213 - protein, 11 aa, Artificial Sequence
  Quasi-synthetic sequence derived from human genome
RRGLRRLRRLW

SEQ ID NO: 3214 - protein, 11 aa, Artificial Sequence
  Quasi-synthetic sequence derived from human genome
LLVLLLLVRKK

SEQ ID NO: 3215 - protein, 11 aa, Artificial Sequence
  Quasi-synthetic sequence derived from human genome
FLKLIHLLLRR

SEQ ID NO: 3216 - protein, 11 aa, Artificial Sequence
  Quasi-synthetic sequence derived from human genome
KLLKVIRKKLV

SEQ ID NO: 3217 - protein, 11 aa, Artificial Sequence
  Quasi-synthetic sequence derived from human genome
KLKKPRRIILL

SEQ ID NO: 3218 - protein, 11 aa, Artificial Sequence
  Quasi-synthetic sequence derived from human genome
RRFRWAIILFI

SEQ ID NO: 3219 - protein, 11 aa, Artificial Sequence
  Quasi-synthetic sequence derived from human genome
KLRKVWPFLLR

SEQ ID NO: 3220 - protein, 11 aa, Artificial Sequence
  Quasi-synthetic sequence derived from human genome
KRLWVLHLKRL

SEQ ID NO: 3221 - protein, 11 aa, Artificial Sequence
  Quasi-synthetic sequence derived from human genome
KLVRLKLWFPR

SEQ ID NO: 3222 - protein, 11 aa, Artificial Sequence
  Quasi-synthetic sequence derived from human genome
IRTRLIRKRFL

SEQ ID NO: 3223 - protein, 11 aa, Artificial Sequence
  Quasi-synthetic sequence derived from human genome
FRRKRRLHLVF

SEQ ID NO: 3224 - protein, 11 aa, Artificial Sequence
  Quasi-synthetic sequence derived from human genome
RLRKLNWKRIL

SEQ ID NO: 3225 - protein, 11 aa, Artificial Sequence
  Quasi-synthetic sequence derived from human genome
KRRLLPRVRLL

SEQ ID NO: 3226 - protein, 11 aa, Artificial Sequence
  Quasi-synthetic sequence derived from human genome
KLSLIRKFRLF

SEQ ID NO: 3227 - protein, 11 aa, Artificial Sequence
  Quasi-synthetic sequence derived from human genome
LLIFFLKRRNK

SEQ ID NO: 3228 - protein, 11 aa, Artificial Sequence
  Quasi-synthetic sequence derived from human genome
KWMIKIRKRYL

SEQ ID NO: 3229 - protein, 11 aa, Artificial Sequence
  Quasi-synthetic sequence derived from human genome
HLRKLRKRLLR

SEQ ID NO: 3230 - protein, 11 aa, Artificial Sequence
  Quasi-synthetic sequence derived from human genome
LLRRLPKLRKR

SEQ ID NO: 3231 - protein, 11 aa, Artificial Sequence
  Quasi-synthetic sequence derived from human genome
MPLKLRFKRRW

SEQ ID NO: 3232 - protein, 11 aa, Artificial Sequence
  Quasi-synthetic sequence derived from human genome
LVLYIRKKKRL

SEQ ID NO: 3233 - protein, 11 aa, Artificial Sequence
  Quasi-synthetic sequence derived from human genome
WRLYLLRHFRK

SEQ ID NO: 3234 - protein, 11 aa, Artificial Sequence
  Quasi-synthetic sequence derived from human genome
RWFLHRMKRII

SEQ ID NO: 3235 - protein, 11 aa, Artificial Sequence
  Quasi-synthetic sequence derived from human genome
MLRTLLRRRLF

SEQ ID NO: 3236 - protein, 11 aa, Artificial Sequence
  Quasi-synthetic sequence derived from human genome
LRAIIKKIWKR

SEQ ID NO: 3237 - protein, 11 aa, Artificial Sequence
  Quasi-synthetic sequence derived from human genome
LMLWRLHWRRL

SEQ ID NO: 3238 - protein, 11 aa, Artificial Sequence
  Quasi-synthetic sequence derived from human genome
IFRRCWLVFKK

SEQ ID NO: 3239 - protein, 11 aa, Artificial Sequence
  Quasi-synthetic sequence derived from human genome
IRKRLFPVRFL

SEQ ID NO: 3240 - protein, 11 aa, Artificial Sequence
  Quasi-synthetic sequence derived from human genome
VLRPFLLRRIK

SEQ ID NO: 3241 - protein, 11 aa, Artificial Sequence
  Quasi-synthetic sequence derived from human genome
LRRCFFWRFMF

SEQ ID NO: 3242 - protein, 11 aa, Artificial Sequence
  Quasi-synthetic sequence derived from human genome
LLWFLCFRMRR

SEQ ID NO: 3243 - protein, 11 aa, Artificial Sequence
  Quasi-synthetic sequence derived from human genome
WLQLLLWRLKR

SEQ ID NO: 3244 - protein, 11 aa, Artificial Sequence
  Quasi-synthetic sequence derived from human genome
RVLLGRLWRRL

SEQ ID NO: 3245 - protein, 11 aa, Artificial Sequence
  Quasi-synthetic sequence derived from human genome
LRKRRRLLSII

SEQ ID NO: 3246 - protein, 11 aa, Artificial Sequence
  Quasi-synthetic sequence derived from human genome
LLRKRLRRCIV

SEQ ID NO: 3247 - protein, 11 aa, Artificial Sequence
  Quasi-synthetic sequence derived from human genome
LLLLLLLSRRR

SEQ ID NO: 3248 - protein, 11 aa, Artificial Sequence
  Quasi-synthetic sequence derived from human genome
RLLRRLGLLLL

SEQ ID NO: 3249 - protein, 11 aa, Artificial Sequence
  Quasi-synthetic sequence derived from human genome
LLLFLLLRRQR

SEQ ID NO: 3250 - protein, 11 aa, Artificial Sequence
  Quasi-synthetic sequence derived from human genome
LRRILIRYYIK

SEQ ID NO: 3251 - protein, 11 aa, Artificial Sequence
  Quasi-synthetic sequence derived from human genome
WLVWLRFHKKK

SEQ ID NO: 3252 - protein, 11 aa, Artificial Sequence
  Quasi-synthetic sequence derived from human genome
IIKLLPFLKKK

SEQ ID NO: 3253 - protein, 11 aa, Artificial Sequence
  Quasi-synthetic sequence derived from human genome
LWKIARKWMRR

SEQ ID NO: 3254 - protein, 11 aa, Artificial Sequence
  Quasi-synthetic sequence derived from human genome
KLAKLLKLLLW

SEQ ID NO: 3255 - protein, 11 aa, Artificial Sequence
  Quasi-synthetic sequence derived from human genome
LRRRKRFKVLR

SEQ ID NO: 3256 - protein, 11 aa, Artificial Sequence
  Quasi-synthetic sequence derived from human genome
RLRFWLLIWLL

SEQ ID NO: 3257 - protein, 11 aa, Artificial Sequence
  Quasi-synthetic sequence derived from human genome
LLLIRRFKKTI

SEQ ID NO: 3258 - protein, 11 aa, Artificial Sequence
  Quasi-synthetic sequence derived from human genome
LVVLLLKYRRR

SEQ ID NO: 3259 - protein, 11 aa, Artificial Sequence
  Quasi-synthetic sequence derived from human genome
WLMGKLRFRWR

SEQ ID NO: 3260 - protein, 11 aa, Artificial Sequence
  Quasi-synthetic sequence derived from human genome
ILWKLGFFKRK

SEQ ID NO: 3261 - protein, 11 aa, Artificial Sequence
  Quasi-synthetic sequence derived from human genome
FRLLRVFKLAK

SEQ ID NO: 3262 - protein, 11 aa, Artificial Sequence
  Quasi-synthetic sequence derived from human genome
KYKWYLKKLLF

SEQ ID NO: 3263 - protein, 11 aa, Artificial Sequence
  Quasi-synthetic sequence derived from human genome
WWLKLRPILKI

SEQ ID NO: 3264 - protein, 11 aa, Artificial Sequence
  Quasi-synthetic sequence derived from human genome
LRVLRLLRTLR

SEQ ID NO: 3265 - protein, 11 aa, Artificial Sequence
  Quasi-synthetic sequence derived from human genome
KPLRRRVIWLI

SEQ ID NO: 3266 - protein, 11 aa, Artificial Sequence
  Quasi-synthetic sequence derived from human genome
LFMFRRLRQFR

SEQ ID NO: 3267 - protein, 11 aa, Artificial Sequence
  Quasi-synthetic sequence derived from human genome
ILRLLRYIVRL

SEQ ID NO: 3268 - protein, 11 aa, Artificial Sequence
  Quasi-synthetic sequence derived from human genome
IFLKRILPLRF

SEQ ID NO: 3269 - protein, 11 aa, Artificial Sequence
  Quasi-synthetic sequence derived from human genome
LRIIRFLPLFK

SEQ ID NO: 3270 - protein, 11 aa, Artificial Sequence
  Quasi-synthetic sequence derived from human genome
LKFHIRRFIFL

SEQ ID NO: 3271 - protein, 11 aa, Artificial Sequence
  Quasi-synthetic sequence derived from human genome
RALKLIIRLFL

SEQ ID NO: 3272 - protein, 11 aa, Artificial Sequence
  Quasi-synthetic sequence derived from human genome
FRRLRQLLRRR

SEQ ID NO: 3273 - protein, 11 aa, Artificial Sequence
  Quasi-synthetic sequence derived from human genome
LRLRQRRRRLL

SEQ ID NO: 3274 - protein, 11 aa, Artificial Sequence
  Quasi-synthetic sequence derived from human genome
RGLLLRRLRRR

SEQ ID NO: 3275 - protein, 11 aa, Artificial Sequence
  Quasi-synthetic sequence derived from human genome
KRKLIRLFGRL

SEQ ID NO: 3276 - protein, 11 aa, Artificial Sequence
  Quasi-synthetic sequence derived from human genome
RKRICILVFLR

SEQ ID NO: 3277 - protein, 11 aa, Artificial Sequence
  Quasi-synthetic sequence derived from human genome
LSRLIFLLRRW

SEQ ID NO: 3278 - protein, 11 aa, Artificial Sequence
  Quasi-synthetic sequence derived from human genome
ILGLLLLRWRR

SEQ ID NO: 3279 - protein, 11 aa, Artificial Sequence
  Quasi-synthetic sequence derived from human genome
LLRLLLRLLLF

SEQ ID NO: 3280 - protein, 11 aa, Artificial Sequence
  Quasi-synthetic sequence derived from human genome
FLMKVLKKKIK

SEQ ID NO: 3281 - protein, 11 aa, Artificial Sequence
  Quasi-synthetic sequence derived from human genome
LKFFLRALKIL

SEQ ID NO: 3282 - protein, 11 aa, Artificial Sequence
  Quasi-synthetic sequence derived from human genome
FFIAFFLRKFK

SEQ ID NO: 3283 - protein, 11 aa, Artificial Sequence
  Quasi-synthetic sequence derived from human genome
RLIFKAFLLKF

SEQ ID NO: 3284 - protein, 11 aa, Artificial Sequence
  Quasi-synthetic sequence derived from human genome
MRILRILKLAR

SEQ ID NO: 3285 - protein, 11 aa, Artificial Sequence
  Quasi-synthetic sequence derived from human genome
LVMRKRLRLYR

SEQ ID NO: 3286 - protein, 11 aa, Artificial Sequence
  Quasi-synthetic sequence derived from human genome
MARLRFLKLKR

SEQ ID NO: 3287 - protein, 11 aa, Artificial Sequence
  Quasi-synthetic sequence derived from human genome
RKAIFIFIRWL

SEQ ID NO: 3288 - protein, 11 aa, Artificial Sequence
  Quasi-synthetic sequence derived from human genome
RRCLRRWFHFW

SEQ ID NO: 3289 - protein, 11 aa, Artificial Sequence
  Quasi-synthetic sequence derived from human genome
KMRRYKLFLMF

SEQ ID NO: 3290 - protein, 11 aa, Artificial Sequence
  Quasi-synthetic sequence derived from human genome
LRIRKQILKFL

SEQ ID NO: 3291 - protein, 11 aa, Artificial Sequence
  Quasi-synthetic sequence derived from human genome
RLWKRRWFVLS

SEQ ID NO: 3292 - protein, 11 aa, Artificial Sequence
  Quasi-synthetic sequence derived from human genome
KKILCRLFRVF

SEQ ID NO: 3293 - protein, 11 aa, Artificial Sequence
  Quasi-synthetic sequence derived from human genome
RIRFSKLLLKI

SEQ ID NO: 3294 - protein, 11 aa, Artificial Sequence
  Quasi-synthetic sequence derived from human genome
ILKRLILNFRK

SEQ ID NO: 3295 - protein, 11 aa, Artificial Sequence
  Quasi-synthetic sequence derived from human genome
RIRVLVIRKLV

SEQ ID NO: 3296 - protein, 11 aa, Artificial Sequence
  Quasi-synthetic sequence derived from human genome
LRRLRGLLRVL

SEQ ID NO: 3297 - protein, 11 aa, Artificial Sequence
  Quasi-synthetic sequence derived from human genome
LLVLSLRRRLR

SEQ ID NO: 3298 - protein, 11 aa, Artificial Sequence
  Quasi-synthetic sequence derived from human genome
QRRIRRWLRRF

SEQ ID NO: 3299 - protein, 11 aa, Artificial Sequence
  Quasi-synthetic sequence derived from human genome
LFFLMKRKIIV

SEQ ID NO: 3300 - protein, 11 aa, Artificial Sequence
  Quasi-synthetic sequence derived from human genome
KIRFFKIMLVL

SEQ ID NO: 3301 - protein, 11 aa, Artificial Sequence
  Quasi-synthetic sequence derived from human genome
HIKKRLFMFRF

SEQ ID NO: 3302 - protein, 11 aa, Artificial Sequence
  Quasi-synthetic sequence derived from human genome
FMFRKFKILRP

SEQ ID NO: 3303 - protein, 11 aa, Artificial Sequence
  Quasi-synthetic sequence derived from human genome
RWLLLKLLLLL

SEQ ID NO: 3304 - protein, 11 aa, Artificial Sequence
  Quasi-synthetic sequence derived from human genome
WVLLKKFKLPR

SEQ ID NO: 3305 - protein, 11 aa, Artificial Sequence
  Quasi-synthetic sequence derived from human genome
LVALLLLWRRR

SEQ ID NO: 3306 - protein, 11 aa, Artificial Sequence
  Quasi-synthetic sequence derived from human genome
LVLLALRLRRW

SEQ ID NO: 3307 - protein, 11 aa, Artificial Sequence
  Quasi-synthetic sequence derived from human genome
IRVWFIKVRKM

SEQ ID NO: 3308 - protein, 11 aa, Artificial Sequence
  Quasi-synthetic sequence derived from human genome
LKLFRMRSLRW

SEQ ID NO: 3309 - protein, 11 aa, Artificial Sequence
  Quasi-synthetic sequence derived from human genome
LLWKMGFFRRR

SEQ ID NO: 3310 - protein, 11 aa, Artificial Sequence
  Quasi-synthetic sequence derived from human genome
LLVLLLCRLRR

SEQ ID NO: 3311 - protein, 11 aa, Artificial Sequence
  Quasi-synthetic sequence derived from human genome
KRKVAWLLRWK

SEQ ID NO: 3312 - protein, 11 aa, Artificial Sequence
  Quasi-synthetic sequence derived from human genome
LIIRRLHKVLR

SEQ ID NO: 3313 - protein, 11 aa, Artificial Sequence
  Quasi-synthetic sequence derived from human genome
FRLARRRKKIL

SEQ ID NO: 3314 - protein, 11 aa, Artificial Sequence
  Quasi-synthetic sequence derived from human genome
ILRRKRLLPKR

SEQ ID NO: 3315 - protein, 11 aa, Artificial Sequence
  Quasi-synthetic sequence derived from human genome
FIYLIMLRRFK

SEQ ID NO: 3316 - protein, 11 aa, Artificial Sequence
  Quasi-synthetic sequence derived from human genome
LIRIRKLTLKR

SEQ ID NO: 3317 - protein, 11 aa, Artificial Sequence
  Quasi-synthetic sequence derived from human genome
FLRRLIYRRRP

SEQ ID NO: 3318 - protein, 11 aa, Artificial Sequence
  Quasi-synthetic sequence derived from human genome
YLLRLRRIHRR

SEQ ID NO: 3319 - protein, 11 aa, Artificial Sequence
  Quasi-synthetic sequence derived from human genome
VLLLKLRKRHR

SEQ ID NO: 3320 - protein, 11 aa, Artificial Sequence
  Quasi-synthetic sequence derived from human genome
AFKLLKKLMRL

SEQ ID NO: 3321 - protein, 11 aa, Artificial Sequence
  Quasi-synthetic sequence derived from human genome
KLFFKMKPLLR

SEQ ID NO: 3322 - protein, 11 aa, Artificial Sequence
  Quasi-synthetic sequence derived from human genome
WRRKKLYLLFA

SEQ ID NO: 3323 - protein, 11 aa, Artificial Sequence
  Quasi-synthetic sequence derived from human genome
LARFLRMLLRL

SEQ ID NO: 3324 - protein, 11 aa, Artificial Sequence
  Quasi-synthetic sequence derived from human genome
LILLLLLFLRR

SEQ ID NO: 3325 - protein, 11 aa, Artificial Sequence
  Quasi-synthetic sequence derived from human genome
FFLLLRFFLRI

SEQ ID NO: 3326 - protein, 11 aa, Artificial Sequence
  Quasi-synthetic sequence derived from human genome
RPWIKRMIFKL

SEQ ID NO: 3327 - protein, 11 aa, Artificial Sequence
  Quasi-synthetic sequence derived from human genome
LIFLRKRILIA

SEQ ID NO: 3328 - protein, 11 aa, Artificial Sequence
  Quasi-synthetic sequence derived from human genome
FRIFFHKIFIR

SEQ ID NO: 3329 - protein, 11 aa, Artificial Sequence
  Quasi-synthetic sequence derived from human genome
KILRLITIRKL

SEQ ID NO: 3330 - protein, 11 aa, Artificial Sequence
  Quasi-synthetic sequence derived from human genome
MRKFYFRRIMR

SEQ ID NO: 3331 - protein, 11 aa, Artificial Sequence
  Quasi-synthetic sequence derived from human genome
LVRLRKLKFAI

SEQ ID NO: 3332 - protein, 11 aa, Artificial Sequence
  Quasi-synthetic sequence derived from human genome
WLLRRRRWAAL

SEQ ID NO: 3333 - protein, 11 aa, Artificial Sequence
  Quasi-synthetic sequence derived from human genome
RLLIKKLPRVL

SEQ ID NO: 3334 - protein, 11 aa, Artificial Sequence
  Quasi-synthetic sequence derived from human genome
WRLILSKILKK

SEQ ID NO: 3335 - protein, 11 aa, Artificial Sequence
  Quasi-synthetic sequence derived from human genome
AILRLRFLVKK

SEQ ID NO: 3336 - protein, 11 aa, Artificial Sequence
  Quasi-synthetic sequence derived from human genome
VLKPFLLRRIK

SEQ ID NO: 3337 - protein, 11 aa, Artificial Sequence
  Quasi-synthetic sequence derived from human genome
RALWPLRRFWR

SEQ ID NO: 3338 - protein, 11 aa, Artificial Sequence
  Quasi-synthetic sequence derived from human genome
YFKIYIRLKRR

SEQ ID NO: 3339 - protein, 11 aa, Artificial Sequence
  Quasi-synthetic sequence derived from human genome
LRRYAWKKRWF

SEQ ID NO: 3340 - protein, 11 aa, Artificial Sequence
  Quasi-synthetic sequence derived from human genome
MKKIVWLKLLI

SEQ ID NO: 3341 - protein, 11 aa, Artificial Sequence
  Quasi-synthetic sequence derived from human genome
RRLKLLWRVSL

SEQ ID NO: 3342 - protein, 11 aa, Artificial Sequence
  Quasi-synthetic sequence derived from human genome
RWVFKRRLGLL

SEQ ID NO: 3343 - protein, 11 aa, Artificial Sequence
  Quasi-synthetic sequence derived from human genome
LVLLQRKLWRR

SEQ ID NO: 3344 - protein, 11 aa, Artificial Sequence
  Quasi-synthetic sequence derived from human genome
GVRWKRLRLLL

SEQ ID NO: 3345 - protein, 11 aa, Artificial Sequence
  Quasi-synthetic sequence derived from human genome
RRLVPFLWLKW

SEQ ID NO: 3346 - protein, 11 aa, Artificial Sequence
  Quasi-synthetic sequence derived from human genome
WQRLLLRFKIL

SEQ ID NO: 3347 - protein, 11 aa, Artificial Sequence
  Quasi-synthetic sequence derived from human genome
RLLPLRRLFVL

SEQ ID NO: 3348 - protein, 11 aa, Artificial Sequence
  Quasi-synthetic sequence derived from human genome
LRVFLFFRPFR

SEQ ID NO: 3349 - protein, 11 aa, Artificial Sequence
  Quasi-synthetic sequence derived from human genome
VLLLLLRALRR

SEQ ID NO: 3350 - protein, 11 aa, Artificial Sequence
  Quasi-synthetic sequence derived from human genome
LLLILLRQWKR

SEQ ID NO: 3351 - protein, 11 aa, Artificial Sequence
  Quasi-synthetic sequence derived from human genome
RRMKKKRLLLR

SEQ ID NO: 3352 - protein, 11 aa, Artificial Sequence
  Quasi-synthetic sequence derived from human genome
MKRLWIRTLRL

SEQ ID NO: 3353 - protein, 11 aa, Artificial Sequence
  Quasi-synthetic sequence derived from human genome
LITRMWKLLRR

SEQ ID NO: 3354 - protein, 11 aa, Artificial Sequence
  Quasi-synthetic sequence derived from human genome
LWWMLRRSLKK

SEQ ID NO: 3355 - protein, 11 aa, Artificial Sequence
  Quasi-synthetic sequence derived from human genome
VLVLFKYKRLR

SEQ ID NO: 3356 - protein, 11 aa, Artificial Sequence
  Quasi-synthetic sequence derived from human genome
RRPWKKILILV

SEQ ID NO: 3357 - protein, 11 aa, Artificial Sequence
  Quasi-synthetic sequence derived from human genome
RRAWKKILILV

SEQ ID NO: 3358 - protein, 11 aa, Artificial Sequence
  Quasi-synthetic sequence derived from human genome
LRTFRLLRVLK

SEQ ID NO: 3359 - protein, 11 aa, Artificial Sequence
  Quasi-synthetic sequence derived from human genome
LKRRLFRSMFL

SEQ ID NO: 3360 - protein, 11 aa, Artificial Sequence
  Quasi-synthetic sequence derived from human genome
LSLWYLLRRRR

SEQ ID NO: 3361 - protein, 11 aa, Artificial Sequence
  Quasi-synthetic sequence derived from human genome
RFRSLLVRRRF

SEQ ID NO: 3362 - protein, 11 aa, Artificial Sequence
  Quasi-synthetic sequence derived from human genome
RKRLFQLIKII

SEQ ID NO: 3363 - protein, 11 aa, Artificial Sequence
  Quasi-synthetic sequence derived from human genome
LRFRQILKKII

SEQ ID NO: 3364 - protein, 11 aa, Artificial Sequence
  Quasi-synthetic sequence derived from human genome
ILFRRRRRGFR

SEQ ID NO: 3365 - protein, 11 aa, Artificial Sequence
  Quasi-synthetic sequence derived from human genome
YRLLWFKVKKM

SEQ ID NO: 3366 - protein, 11 aa, Artificial Sequence
  Quasi-synthetic sequence derived from human genome
LVRRFRVLILM

SEQ ID NO: 3367 - protein, 11 aa, Artificial Sequence
  Quasi-synthetic sequence derived from human genome
IKLWRRNLWIF

SEQ ID NO: 3368 - protein, 11 aa, Artificial Sequence
  Quasi-synthetic sequence derived from human genome
IVLLALRLRRW

SEQ ID NO: 3369 - protein, 11 aa, Artificial Sequence
  Quasi-synthetic sequence derived from human genome
LILLRLWRVAR

SEQ ID NO: 3370 - protein, 11 aa, Artificial Sequence
  Quasi-synthetic sequence derived from human genome
LLVLQLIRRRR

SEQ ID NO: 3371 - protein, 11 aa, Artificial Sequence
  Quasi-synthetic sequence derived from human genome
IRMWLKKCLKR

SEQ ID NO: 3372 - protein, 11 aa, Artificial Sequence
  Quasi-synthetic sequence derived from human genome
LYVLKYLRRRF

SEQ ID NO: 3373 - protein, 11 aa, Artificial Sequence
  Quasi-synthetic sequence derived from human genome
RFVRRLLYFYK

SEQ ID NO: 3374 - protein, 11 aa, Artificial Sequence
  Quasi-synthetic sequence derived from human genome
VRKHFLRKWLK

SEQ ID NO: 3375 - protein, 11 aa, Artificial Sequence
  Quasi-synthetic sequence derived from human genome
LLLLILRLLRI

SEQ ID NO: 3376 - protein, 11 aa, Artificial Sequence
  Quasi-synthetic sequence derived from human genome
IYVFMIRKFRR

SEQ ID NO: 3377 - protein, 11 aa, Artificial Sequence
  Quasi-synthetic sequence derived from human genome
LVRMWRVRWRY

SEQ ID NO: 3378 - protein, 11 aa, Artificial Sequence
  Quasi-synthetic sequence derived from human genome
MKFFRWVRRAW

SEQ ID NO: 3379 - protein, 11 aa, Artificial Sequence
  Quasi-synthetic sequence derived from human genome
RLRVRLLKRTW

SEQ ID NO: 3380 - protein, 11 aa, Artificial Sequence
  Quasi-synthetic sequence derived from human genome
KILLLKKPRVW

SEQ ID NO: 3381 - protein, 11 aa, Artificial Sequence
  Quasi-synthetic sequence derived from human genome
RNLKRKLKFLI

SEQ ID NO: 3382 - protein, 11 aa, Artificial Sequence
  Quasi-synthetic sequence derived from human genome
IRLLLQRKKKL

SEQ ID NO: 3383 - protein, 11 aa, Artificial Sequence
  Quasi-synthetic sequence derived from human genome
LFMKILKLIVK

SEQ ID NO: 3384 - protein, 11 aa, Artificial Sequence
  Quasi-synthetic sequence derived from human genome
WIFWKTWIFRK

SEQ ID NO: 3385 - protein, 11 aa, Artificial Sequence
  Quasi-synthetic sequence derived from human genome
FRRIKMPWLWL

SEQ ID NO: 3386 - protein, 11 aa, Artificial Sequence
  Quasi-synthetic sequence derived from human genome
KRFLLLFTFLK

SEQ ID NO: 3387 - protein, 11 aa, Artificial Sequence
  Quasi-synthetic sequence derived from human genome
WLGKLRRKRRW

SEQ ID NO: 3388 - protein, 11 aa, Artificial Sequence
  Quasi-synthetic sequence derived from human genome
RWLWRQRIRLY

SEQ ID NO: 3389 - protein, 11 aa, Artificial Sequence
  Quasi-synthetic sequence derived from human genome
RARARRLWLLL

SEQ ID NO: 3390 - protein, 11 aa, Artificial Sequence
  Quasi-synthetic sequence derived from human genome
ARLWRLLPFRR

SEQ ID NO: 3391 - protein, 11 aa, Artificial Sequence
  Quasi-synthetic sequence derived from human genome
RLCWKWARLLR

SEQ ID NO: 3392 - protein, 11 aa, Artificial Sequence
  Quasi-synthetic sequence derived from human genome
KKRIGWRFIRI

SEQ ID NO: 3393 - protein, 11 aa, Artificial Sequence
  Quasi-synthetic sequence derived from human genome
LMRVLKLVRFL

SEQ ID NO: 3394 - protein, 11 aa, Artificial Sequence
  Quasi-synthetic sequence derived from human genome
KRLLLLFLFFI

SEQ ID NO: 3395 - protein, 11 aa, Artificial Sequence
  Quasi-synthetic sequence derived from human genome
KARLFRLWLVL

SEQ ID NO: 3396 - protein, 11 aa, Artificial Sequence
  Quasi-synthetic sequence derived from human genome
KRWSKIWLLFF

SEQ ID NO: 3397 - protein, 11 aa, Artificial Sequence
  Quasi-synthetic sequence derived from human genome
KILKKKKLRRI

SEQ ID NO: 3398 - protein, 11 aa, Artificial Sequence
  Quasi-synthetic sequence derived from human genome
SVFLFRLFKRR

SEQ ID NO: 3399 - protein, 11 aa, Artificial Sequence
  Quasi-synthetic sequence derived from human genome
LRSFRLLRVFK

SEQ ID NO: 3400 - protein, 11 aa, Artificial Sequence
  Quasi-synthetic sequence derived from human genome
RRILFIKHFII

SEQ ID NO: 3401 - protein, 11 aa, Artificial Sequence
  Quasi-synthetic sequence derived from human genome
RRRKFLNLRFR

SEQ ID NO: 3402 - protein, 11 aa, Artificial Sequence
  Quasi-synthetic sequence derived from human genome
KILSLLRLLRL

SEQ ID NO: 3403 - protein, 11 aa, Artificial Sequence
  Quasi-synthetic sequence derived from human genome
RRWRLSRIVFR

SEQ ID NO: 3404 - protein, 11 aa, Artificial Sequence
  Quasi-synthetic sequence derived from human genome
MLLLCRWKKKK

SEQ ID NO: 3405 - protein, 11 aa, Artificial Sequence
  Quasi-synthetic sequence derived from human genome
LRRRKRFKVLK

SEQ ID NO: 3406 - protein, 11 aa, Artificial Sequence
  Quasi-synthetic sequence derived from human genome
ILLLVYRMRKK

SEQ ID NO: 3407 - protein, 11 aa, Artificial Sequence
  Quasi-synthetic sequence derived from human genome
LRKKRLKKFPW

SEQ ID NO: 3408 - protein, 11 aa, Artificial Sequence
  Quasi-synthetic sequence derived from human genome
WPRRLLLRYLF

SEQ ID NO: 3409 - protein, 11 aa, Artificial Sequence
  Quasi-synthetic sequence derived from human genome
LFKNLLLKKIK

SEQ ID NO: 3410 - protein, 11 aa, Artificial Sequence
  Quasi-synthetic sequence derived from human genome
IKKFLSLKLKL

SEQ ID NO: 3411 - protein, 11 aa, Artificial Sequence
  Quasi-synthetic sequence derived from human genome
LFIRKPFIKFI

SEQ ID NO: 3412 - protein, 11 aa, Artificial Sequence
  Quasi-synthetic sequence derived from human genome
RKILRLITIRK

SEQ ID NO: 3413 - protein, 11 aa, Artificial Sequence
  Quasi-synthetic sequence derived from human genome
LIKRLAKIVRL

SEQ ID NO: 3414 - protein, 11 aa, Artificial Sequence
  Quasi-synthetic sequence derived from human genome
IRILKFLVAKR

SEQ ID NO: 3415 - protein, 11 aa, Artificial Sequence
  Quasi-synthetic sequence derived from human genome
VIAILLFKRKR

SEQ ID NO: 3416 - protein, 11 aa, Artificial Sequence
  Quasi-synthetic sequence derived from human genome
IFFLIVKARRK

SEQ ID NO: 3417 - protein, 11 aa, Artificial Sequence
  Quasi-synthetic sequence derived from human genome
RRLLGLLRRYL

SEQ ID NO: 3418 - protein, 11 aa, Artificial Sequence
  Quasi-synthetic sequence derived from human genome
FRIIKPRKVFF

SEQ ID NO: 3419 - protein, 11 aa, Artificial Sequence
  Quasi-synthetic sequence derived from human genome
VWLRLRKILFC

SEQ ID NO: 3420 - protein, 11 aa, Artificial Sequence
  Quasi-synthetic sequence derived from human genome
RVLLRWWLGWR

SEQ ID NO: 3421 - protein, 11 aa, Artificial Sequence
  Quasi-synthetic sequence derived from human genome
RRFLVTLRIRR

SEQ ID NO: 3422 - protein, 11 aa, Artificial Sequence
  Quasi-synthetic sequence derived from human genome
FFFRVRSRRWK

SEQ ID NO: 3423 - protein, 11 aa, Artificial Sequence
  Quasi-synthetic sequence derived from human genome
WCRRRRPLLRL

SEQ ID NO: 3424 - protein, 11 aa, Artificial Sequence
  Quasi-synthetic sequence derived from human genome
FRIVLKRRLNW

SEQ ID NO: 3425 - protein, 11 aa, Artificial Sequence
  Quasi-synthetic sequence derived from human genome
ARRLLRLVVRF

SEQ ID NO: 3426 - protein, 11 aa, Artificial Sequence
  Quasi-synthetic sequence derived from human genome
LVFWKLIRSRR

SEQ ID NO: 3427 - protein, 11 aa, Artificial Sequence
  Quasi-synthetic sequence derived from human genome
LRVLRVLRPLR

SEQ ID NO: 3428 - protein, 11 aa, Artificial Sequence
  Quasi-synthetic sequence derived from human genome
LFLIMLVMRKR

SEQ ID NO: 3429 - protein, 11 aa, Artificial Sequence
  Quasi-synthetic sequence derived from human genome
KLKLIKFLALI

SEQ ID NO: 3430 - protein, 11 aa, Artificial Sequence
  Quasi-synthetic sequence derived from human genome
RKLLKAFWWLV

SEQ ID NO: 3431 - protein, 11 aa, Artificial Sequence
  Quasi-synthetic sequence derived from human genome
LIGRKLWRRRR

SEQ ID NO: 3432 - protein, 11 aa, Artificial Sequence
  Quasi-synthetic sequence derived from human genome
LLRKKYLRMRK

SEQ ID NO: 3433 - protein, 11 aa, Artificial Sequence
  Quasi-synthetic sequence derived from human genome
VKTWKRRWFIL

SEQ ID NO: 3434 - protein, 11 aa, Artificial Sequence
  Quasi-synthetic sequence derived from human genome
LKLFLKKKVVV

SEQ ID NO: 3435 - protein, 11 aa, Artificial Sequence
  Quasi-synthetic sequence derived from human genome
KRRFRKFLVYV

SEQ ID NO: 3436 - protein, 11 aa, Artificial Sequence
  Quasi-synthetic sequence derived from human genome
FKRIRLRPRYL

SEQ ID NO: 3437 - protein, 11 aa, Artificial Sequence
  Quasi-synthetic sequence derived from human genome
LKKWKNRLILK

SEQ ID NO: 3438 - protein, 11 aa, Artificial Sequence
  Quasi-synthetic sequence derived from human genome
KLRKFWNLIKK

SEQ ID NO: 3439 - protein, 11 aa, Artificial Sequence
  Quasi-synthetic sequence derived from human genome
KKRVIRMLIVI

SEQ ID NO: 3440 - protein, 11 aa, Artificial Sequence
  Quasi-synthetic sequence derived from human genome
FFRRTIRLKLV

SEQ ID NO: 3441 - protein, 11 aa, Artificial Sequence
  Quasi-synthetic sequence derived from human genome
KWAVRIIRKFI

SEQ ID NO: 3442 - protein, 11 aa, Artificial Sequence
  Quasi-synthetic sequence derived from human genome
RIFKPWKWRKK

SEQ ID NO: 3443 - protein, 11 aa, Artificial Sequence
  Quasi-synthetic sequence derived from human genome
FRKFFQVWKRF

SEQ ID NO: 3444 - protein, 11 aa, Artificial Sequence
  Quasi-synthetic sequence derived from human genome
RRRRPLFALLL

SEQ ID NO: 3445 - protein, 11 aa, Artificial Sequence
  Quasi-synthetic sequence derived from human genome
RRLLLALHRRL

SEQ ID NO: 3446 - protein, 11 aa, Artificial Sequence
  Quasi-synthetic sequence derived from human genome
LPALLLRRLRR

SEQ ID NO: 3447 - protein, 11 aa, Artificial Sequence
  Quasi-synthetic sequence derived from human genome
FLRRFPRPLLR

SEQ ID NO: 3448 - protein, 11 aa, Artificial Sequence
  Quasi-synthetic sequence derived from human genome
FWLVRWLLFRL

SEQ ID NO: 3449 - protein, 11 aa, Artificial Sequence
  Quasi-synthetic sequence derived from human genome
IILLIFRLIWR

SEQ ID NO: 3450 - protein, 11 aa, Artificial Sequence
  Quasi-synthetic sequence derived from human genome
KLKVLKILLYL

SEQ ID NO: 3451 - protein, 11 aa, Artificial Sequence
  Quasi-synthetic sequence derived from human genome
VVLWIRWKCRR

SEQ ID NO: 3452 - protein, 11 aa, Artificial Sequence
  Quasi-synthetic sequence derived from human genome
MKLLRRAWRRR

SEQ ID NO: 3453 - protein, 11 aa, Artificial Sequence
  Quasi-synthetic sequence derived from human genome
IKKKRALRRFL

SEQ ID NO: 3454 - protein, 11 aa, Artificial Sequence
  Quasi-synthetic sequence derived from human genome
LRMMRIFWVIK

SEQ ID NO: 3455 - protein, 11 aa, Artificial Sequence
  Quasi-synthetic sequence derived from human genome
RYKWLIIKIVL

SEQ ID NO: 3456 - protein, 11 aa, Artificial Sequence
  Quasi-synthetic sequence derived from human genome
KKCIFRLRIRV

SEQ ID NO: 3457 - protein, 11 aa, Artificial Sequence
  Quasi-synthetic sequence derived from human genome
RHRLLLLLLRY

SEQ ID NO: 3458 - protein, 11 aa, Artificial Sequence
  Quasi-synthetic sequence derived from human genome
LFSKKFKLWLL

SEQ ID NO: 3459 - protein, 11 aa, Artificial Sequence
  Quasi-synthetic sequence derived from human genome
FMLKKRKWPLK

SEQ ID NO: 3460 - protein, 11 aa, Artificial Sequence
  Quasi-synthetic sequence derived from human genome
KWKRYRPLWKL

SEQ ID NO: 3461 - protein, 11 aa, Artificial Sequence
  Quasi-synthetic sequence derived from human genome
ARYIFKRLKFL

SEQ ID NO: 3462 - protein, 11 aa, Artificial Sequence
  Quasi-synthetic sequence derived from human genome
YFLIRAFRLKK

SEQ ID NO: 3463 - protein, 11 aa, Artificial Sequence
  Quasi-synthetic sequence derived from human genome
RLLRYIVRLVW

SEQ ID NO: 3464 - protein, 11 aa, Artificial Sequence
  Quasi-synthetic sequence derived from human genome
LLLRIRKRTRR

SEQ ID NO: 3465 - protein, 11 aa, Artificial Sequence
  Quasi-synthetic sequence derived from human genome
RFILRVRRSRL

SEQ ID NO: 3466 - protein, 11 aa, Artificial Sequence
  Quasi-synthetic sequence derived from human genome
RRVFGRIRRFF

SEQ ID NO: 3467 - protein, 11 aa, Artificial Sequence
  Quasi-synthetic sequence derived from human genome
LIIMKILPKRR

SEQ ID NO: 3468 - protein, 11 aa, Artificial Sequence
  Quasi-synthetic sequence derived from human genome
LAKRLKLRFYR

SEQ ID NO: 3469 - protein, 11 aa, Artificial Sequence
  Quasi-synthetic sequence derived from human genome
LIRRIAIKILI

SEQ ID NO: 3470 - protein, 11 aa, Artificial Sequence
  Quasi-synthetic sequence derived from human genome
FKLWNRLYRLR

SEQ ID NO: 3471 - protein, 11 aa, Artificial Sequence
  Quasi-synthetic sequence derived from human genome
LWFKFQRYFRR

SEQ ID NO: 3472 - protein, 11 aa, Artificial Sequence
  Quasi-synthetic sequence derived from human genome
RICFLLRKLVL

SEQ ID NO: 3473 - protein, 11 aa, Artificial Sequence
  Quasi-synthetic sequence derived from human genome
ILRVIRLVRVF

SEQ ID NO: 3474 - protein, 11 aa, Artificial Sequence
  Quasi-synthetic sequence derived from human genome
RFKVMKIKVLR

SEQ ID NO: 3475 - protein, 11 aa, Artificial Sequence
  Quasi-synthetic sequence derived from human genome
RKVIIFLKKCL

SEQ ID NO: 3476 - protein, 11 aa, Artificial Sequence
  Quasi-synthetic sequence derived from human genome
WLRIARRALRF

SEQ ID NO: 3477 - protein, 11 aa, Artificial Sequence
  Quasi-synthetic sequence derived from human genome
ILLLMYRMKKK

SEQ ID NO: 3478 - protein, 11 aa, Artificial Sequence
  Quasi-synthetic sequence derived from human genome
WWLKLRPLMKI

SEQ ID NO: 3479 - protein, 11 aa, Artificial Sequence
  Quasi-synthetic sequence derived from human genome
WPWMRLFFKIK

SEQ ID NO: 3480 - protein, 11 aa, Artificial Sequence
  Quasi-synthetic sequence derived from human genome
WYLKPKLWKKL

SEQ ID NO: 3481 - protein, 11 aa, Artificial Sequence
  Quasi-synthetic sequence derived from human genome
RIWPLYLRFLR

SEQ ID NO: 3482 - protein, 11 aa, Artificial Sequence
  Quasi-synthetic sequence derived from human genome
RKILSRLFRVF

SEQ ID NO: 3483 - protein, 11 aa, Artificial Sequence
  Quasi-synthetic sequence derived from human genome
RRQVRKLLLFI

SEQ ID NO: 3484 - protein, 11 aa, Artificial Sequence
  Quasi-synthetic sequence derived from human genome
LRRKLYVLKYL

SEQ ID NO: 3485 - protein, 11 aa, Artificial Sequence
  Quasi-synthetic sequence derived from human genome
LYVLKYLRRKL

SEQ ID NO: 3486 - protein, 11 aa, Artificial Sequence
  Quasi-synthetic sequence derived from human genome
RHFRARFRRLW

SEQ ID NO: 3487 - protein, 11 aa, Artificial Sequence
  Quasi-synthetic sequence derived from human genome
LALLRARWRRR

SEQ ID NO: 3488 - protein, 11 aa, Artificial Sequence
  Quasi-synthetic sequence derived from human genome
LRFKRKIIGLK

SEQ ID NO: 3489 - protein, 11 aa, Artificial Sequence
  Quasi-synthetic sequence derived from human genome
FKRKLPKYLLF

SEQ ID NO: 3490 - protein, 11 aa, Artificial Sequence
  Quasi-synthetic sequence derived from human genome
LIFLLNKKFLR

SEQ ID NO: 3491 - protein, 11 aa, Artificial Sequence
  Quasi-synthetic sequence derived from human genome
LLRLIILIRIF

SEQ ID NO: 3492 - protein, 11 aa, Artificial Sequence
  Quasi-synthetic sequence derived from human genome
LFRRCPRLRRL

SEQ ID NO: 3493 - protein, 11 aa, Artificial Sequence
  Quasi-synthetic sequence derived from human genome
RLRRRLPCRLL

SEQ ID NO: 3494 - protein, 11 aa, Artificial Sequence
  Quasi-synthetic sequence derived from human genome
LRLRLRRCHRF

SEQ ID NO: 3495 - protein, 11 aa, Artificial Sequence
  Quasi-synthetic sequence derived from human genome
KRRLLPMLRLV

SEQ ID NO: 3496 - protein, 11 aa, Artificial Sequence
  Quasi-synthetic sequence derived from human genome
LWRCLKFVMRK

SEQ ID NO: 3497 - protein, 11 aa, Artificial Sequence
  Quasi-synthetic sequence derived from human genome
RWLVRFKTIFK

SEQ ID NO: 3498 - protein, 11 aa, Artificial Sequence
  Quasi-synthetic sequence derived from human genome
KILKLLISKLK

SEQ ID NO: 3499 - protein, 11 aa, Artificial Sequence
  Quasi-synthetic sequence derived from human genome
KKFKRLMLHRI

SEQ ID NO: 3500 - protein, 11 aa, Artificial Sequence
  Quasi-synthetic sequence derived from human genome
IIKPFILRRVK

SEQ ID NO: 3501 - protein, 11 aa, Artificial Sequence
  Quasi-synthetic sequence derived from human genome
RLLRLSRLIRY

SEQ ID NO: 3502 - protein, 11 aa, Artificial Sequence
  Quasi-synthetic sequence derived from human genome
RYKFIIKVLFI

SEQ ID NO: 3503 - protein, 11 aa, Artificial Sequence
  Quasi-synthetic sequence derived from human genome
FKRAFLRLLRC

SEQ ID NO: 3504 - protein, 11 aa, Artificial Sequence
  Quasi-synthetic sequence derived from human genome
FRRKLCLLRHL

SEQ ID NO: 3505 - protein, 11 aa, Artificial Sequence
  Quasi-synthetic sequence derived from human genome
LLLCLLHKRRR

SEQ ID NO: 3506 - protein, 11 aa, Artificial Sequence
  Quasi-synthetic sequence derived from human genome
LFIKKPFIKFI

SEQ ID NO: 3507 - protein, 11 aa, Artificial Sequence
  Quasi-synthetic sequence derived from human genome
FLLLFLYRRCK

SEQ ID NO: 3508 - protein, 11 aa, Artificial Sequence
  Quasi-synthetic sequence derived from human genome
RLIRKLRCYLK

SEQ ID NO: 3509 - protein, 11 aa, Artificial Sequence
  Quasi-synthetic sequence derived from human genome
LKKIFGRKLFK

SEQ ID NO: 3510 - protein, 11 aa, Artificial Sequence
  Quasi-synthetic sequence derived from human genome
KIFRWRVNFIR

SEQ ID NO: 3511 - protein, 11 aa, Artificial Sequence
  Quasi-synthetic sequence derived from human genome
ILKLLSLWRIK

SEQ ID NO: 3512 - protein, 11 aa, Artificial Sequence
  Quasi-synthetic sequence derived from human genome
LRVRKLLLLIP

SEQ ID NO: 3513 - protein, 11 aa, Artificial Sequence
  Quasi-synthetic sequence derived from human genome
VLRRKALLIFL

SEQ ID NO: 3514 - protein, 11 aa, Artificial Sequence
  Quasi-synthetic sequence derived from human genome
IRLKRFLHVFF

SEQ ID NO: 3515 - protein, 11 aa, Artificial Sequence
  Quasi-synthetic sequence derived from human genome
LKLKKIYFYWL

SEQ ID NO: 3516 - protein, 11 aa, Artificial Sequence
  Quasi-synthetic sequence derived from human genome
WKYKLYLLKIL

SEQ ID NO: 3517 - protein, 11 aa, Artificial Sequence
  Quasi-synthetic sequence derived from human genome
LFGWLFRRVRF

SEQ ID NO: 3518 - protein, 11 aa, Artificial Sequence
  Quasi-synthetic sequence derived from human genome
RLFRWLVLRLN

SEQ ID NO: 3519 - protein, 11 aa, Artificial Sequence
  Quasi-synthetic sequence derived from human genome
LKLKKRWFVLT

SEQ ID NO: 3520 - protein, 11 aa, Artificial Sequence
  Quasi-synthetic sequence derived from human genome
WLRRYIKWPLL

SEQ ID NO: 3521 - protein, 11 aa, Artificial Sequence
  Quasi-synthetic sequence derived from human genome
LIKIRLKPKVL

SEQ ID NO: 3522 - protein, 11 aa, Artificial Sequence
  Quasi-synthetic sequence derived from human genome
WRRKHWVVKLL

SEQ ID NO: 3523 - protein, 11 aa, Artificial Sequence
  Quasi-synthetic sequence derived from human genome
LLRKLLSRYRL

SEQ ID NO: 3524 - protein, 11 aa, Artificial Sequence
  Quasi-synthetic sequence derived from human genome
IWKIKKLIKSL

SEQ ID NO: 3525 - protein, 11 aa, Artificial Sequence
  Quasi-synthetic sequence derived from human genome
RKRLKYFAKLW

SEQ ID NO: 3526 - protein, 11 aa, Artificial Sequence
  Quasi-synthetic sequence derived from human genome
KKMLRKALKLL

SEQ ID NO: 3527 - protein, 11 aa, Artificial Sequence
  Quasi-synthetic sequence derived from human genome
LLKRMLKCLIF

SEQ ID NO: 3528 - protein, 11 aa, Artificial Sequence
  Quasi-synthetic sequence derived from human genome
LYRVVLLRLKL

SEQ ID NO: 3529 - protein, 11 aa, Artificial Sequence
  Quasi-synthetic sequence derived from human genome
LFKLFRLVHKL

SEQ ID NO: 3530 - protein, 11 aa, Artificial Sequence
  Quasi-synthetic sequence derived from human genome
KLRLALLKVLL

SEQ ID NO: 3531 - protein, 11 aa, Artificial Sequence
  Quasi-synthetic sequence derived from human genome
RRRIKLLGILM

SEQ ID NO: 3532 - protein, 11 aa, Artificial Sequence
  Quasi-synthetic sequence derived from human genome
LVLILKTIRRR

SEQ ID NO: 3533 - protein, 11 aa, Artificial Sequence
  Quasi-synthetic sequence derived from human genome
RRIFIQLMKRF

SEQ ID NO: 3534 - protein, 11 aa, Artificial Sequence
  Quasi-synthetic sequence derived from human genome
VRILRIFKLTR

SEQ ID NO: 3535 - protein, 11 aa, Artificial Sequence
  Quasi-synthetic sequence derived from human genome
LRFMRRIIGLK

SEQ ID NO: 3536 - protein, 11 aa, Artificial Sequence
  Quasi-synthetic sequence derived from human genome
WWRMLRQVLRR

SEQ ID NO: 3537 - protein, 11 aa, Artificial Sequence
  Quasi-synthetic sequence derived from human genome
KVLRPFLLRRV

SEQ ID NO: 3538 - protein, 11 aa, Artificial Sequence
  Quasi-synthetic sequence derived from human genome
RKHFRLVLRLV

SEQ ID NO: 3539 - protein, 11 aa, Artificial Sequence
  Quasi-synthetic sequence derived from human genome
LRVLRVLRPLK

SEQ ID NO: 3540 - protein, 11 aa, Artificial Sequence
  Quasi-synthetic sequence derived from human genome
LRIARFRFRAF

SEQ ID NO: 3541 - protein, 11 aa, Artificial Sequence
  Quasi-synthetic sequence derived from human genome
WFIRCRLPFRK

SEQ ID NO: 3542 - protein, 11 aa, Artificial Sequence
  Quasi-synthetic sequence derived from human genome
KIRRLKGWVLL

SEQ ID NO: 3543 - protein, 11 aa, Artificial Sequence
  Quasi-synthetic sequence derived from human genome
LLRLVRVARKL

SEQ ID NO: 3544 - protein, 11 aa, Artificial Sequence
  Quasi-synthetic sequence derived from human genome
FFRLLSRRLMF

SEQ ID NO: 3545 - protein, 11 aa, Artificial Sequence
  Quasi-synthetic sequence derived from human genome
MQLRLFRRLLL

SEQ ID NO: 3546 - protein, 11 aa, Artificial Sequence
  Quasi-synthetic sequence derived from human genome
LFRCRRLRGWW

SEQ ID NO: 3547 - protein, 11 aa, Artificial Sequence
  Quasi-synthetic sequence derived from human genome
IFLNRKILLIR

SEQ ID NO: 3548 - protein, 11 aa, Artificial Sequence
  Quasi-synthetic sequence derived from human genome
RMKFLVRRWHR

SEQ ID NO: 3549 - protein, 11 aa, Artificial Sequence
  Quasi-synthetic sequence derived from human genome
RALMKLWRRRV

SEQ ID NO: 3550 - protein, 11 aa, Artificial Sequence
  Quasi-synthetic sequence derived from human genome
RYRVLIKVFRK

SEQ ID NO: 3551 - protein, 11 aa, Artificial Sequence
  Quasi-synthetic sequence derived from human genome
AMVWRRLLRKR

SEQ ID NO: 3552 - protein, 11 aa, Artificial Sequence
  Quasi-synthetic sequence derived from human genome
MLLKLWKFLKP

SEQ ID NO: 3553 - protein, 11 aa, Artificial Sequence
  Quasi-synthetic sequence derived from human genome
KKMKHLWFFLL

SEQ ID NO: 3554 - protein, 11 aa, Artificial Sequence
  Quasi-synthetic sequence derived from human genome
LKRLVKLHIKR

SEQ ID NO: 3555 - protein, 11 aa, Artificial Sequence
  Quasi-synthetic sequence derived from human genome
IKLLKALRVRK

SEQ ID NO: 3556 - protein, 11 aa, Artificial Sequence
  Quasi-synthetic sequence derived from human genome
IPLRRKVKKLL

SEQ ID NO: 3557 - protein, 11 aa, Artificial Sequence
  Quasi-synthetic sequence derived from human genome
KVRVLLMLRKM

SEQ ID NO: 3558 - protein, 11 aa, Artificial Sequence
  Quasi-synthetic sequence derived from human genome
IKTWKKRWFVF

SEQ ID NO: 3559 - protein, 11 aa, Artificial Sequence
  Quasi-synthetic sequence derived from human genome
RYAWKRRWFVL

SEQ ID NO: 3560 - protein, 11 aa, Artificial Sequence
  Quasi-synthetic sequence derived from human genome
YKRIIRPFFLK

SEQ ID NO: 3561 - protein, 11 aa, Artificial Sequence
  Quasi-synthetic sequence derived from human genome
MRLWKARVLKL

SEQ ID NO: 3562 - protein, 11 aa, Artificial Sequence
  Quasi-synthetic sequence derived from human genome
IVRKRTLRRLL

SEQ ID NO: 3563 - protein, 11 aa, Artificial Sequence
  Quasi-synthetic sequence derived from human genome
RRRRRLALFLA

SEQ ID NO: 3564 - protein, 11 aa, Artificial Sequence
  Quasi-synthetic sequence derived from human genome
KVWFRNRRFKL

SEQ ID NO: 3565 - protein, 11 aa, Artificial Sequence
  Quasi-synthetic sequence derived from human genome
LRLLLRRRARP

SEQ ID NO: 3566 - protein, 11 aa, Artificial Sequence
  Quasi-synthetic sequence derived from human genome
FRVLMKLFIKV

SEQ ID NO: 3567 - protein, 11 aa, Artificial Sequence
  Quasi-synthetic sequence derived from human genome
RTFIIKLIKWL

SEQ ID NO: 3568 - protein, 11 aa, Artificial Sequence
  Quasi-synthetic sequence derived from human genome
VLWKLLKVVKF

SEQ ID NO: 3569 - protein, 11 aa, Artificial Sequence
  Quasi-synthetic sequence derived from human genome
LMKLLRRKISL

SEQ ID NO: 3570 - protein, 11 aa, Artificial Sequence
  Quasi-synthetic sequence derived from human genome
RKWQRRFFILY

SEQ ID NO: 3571 - protein, 11 aa, Artificial Sequence
  Quasi-synthetic sequence derived from human genome
RKYWFLNRRLI

SEQ ID NO: 3572 - protein, 11 aa, Artificial Sequence
  Quasi-synthetic sequence derived from human genome
FRLIRKMFSFK

SEQ ID NO: 3573 - protein, 11 aa, Artificial Sequence
  Quasi-synthetic sequence derived from human genome
TRIKLLVRKFL

SEQ ID NO: 3574 - protein, 11 aa, Artificial Sequence
  Quasi-synthetic sequence derived from human genome
FRRKNWRYLIL

SEQ ID NO: 3575 - protein, 11 aa, Artificial Sequence
  Quasi-synthetic sequence derived from human genome
LMLFRISKLRK

SEQ ID NO: 3576 - protein, 11 aa, Artificial Sequence
  Quasi-synthetic sequence derived from human genome
IWLRLRGLRKY

SEQ ID NO: 3577 - protein, 11 aa, Artificial Sequence
  Quasi-synthetic sequence derived from human genome
LKFRKNFWKLV

SEQ ID NO: 3578 - protein, 11 aa, Artificial Sequence
  Quasi-synthetic sequence derived from human genome
LRKVLNWLKFK

SEQ ID NO: 3579 - protein, 11 aa, Artificial Sequence
  Quasi-synthetic sequence derived from human genome
LIVRPVRRWRR

SEQ ID NO: 3580 - protein, 11 aa, Artificial Sequence
  Quasi-synthetic sequence derived from human genome
RCRRCLLLKRL

SEQ ID NO: 3581 - protein, 11 aa, Artificial Sequence
  Quasi-synthetic sequence derived from human genome
VLLLLLICKKR

SEQ ID NO: 3582 - protein, 11 aa, Artificial Sequence
  Quasi-synthetic sequence derived from human genome
LKFRKKKLKFC

SEQ ID NO: 3583 - protein, 11 aa, Artificial Sequence
  Quasi-synthetic sequence derived from human genome
LKKKLFKRRRV

SEQ ID NO: 3584 - protein, 11 aa, Artificial Sequence
  Quasi-synthetic sequence derived from human genome
IVIFALRRILR

SEQ ID NO: 3585 - protein, 11 aa, Artificial Sequence
  Quasi-synthetic sequence derived from human genome
SLRRLLRLLVL

SEQ ID NO: 3586 - protein, 11 aa, Artificial Sequence
  Quasi-synthetic sequence derived from human genome
MKRTLIKLWRR

SEQ ID NO: 3587 - protein, 11 aa, Artificial Sequence
  Quasi-synthetic sequence derived from human genome
LLIYRRLRKPK

SEQ ID NO: 3588 - protein, 11 aa, Artificial Sequence
  Quasi-synthetic sequence derived from human genome
ILYKLFKRRPR

SEQ ID NO: 3589 - protein, 11 aa, Artificial Sequence
  Quasi-synthetic sequence derived from human genome
IKKYRRHFLRF

SEQ ID NO: 3590 - protein, 11 aa, Artificial Sequence
  Quasi-synthetic sequence derived from human genome
LARRRKKILFY

SEQ ID NO: 3591 - protein, 11 aa, Artificial Sequence
  Quasi-synthetic sequence derived from human genome
RCVRLLRIFKV

SEQ ID NO: 3592 - protein, 11 aa, Artificial Sequence
  Quasi-synthetic sequence derived from human genome
RRSRKLILFIV

SEQ ID NO: 3593 - protein, 11 aa, Artificial Sequence
  Quasi-synthetic sequence derived from human genome
RARRFFLRCII

SEQ ID NO: 3594 - protein, 11 aa, Artificial Sequence
  Quasi-synthetic sequence derived from human genome
RRVFFRNIKIL

SEQ ID NO: 3595 - protein, 11 aa, Artificial Sequence
  Quasi-synthetic sequence derived from human genome
LKVIRKKLVRK

SEQ ID NO: 3596 - protein, 11 aa, Artificial Sequence
  Quasi-synthetic sequence derived from human genome
RFAYKFLKKIL

SEQ ID NO: 3597 - protein, 11 aa, Artificial Sequence
  Quasi-synthetic sequence derived from human genome
ILKYLKFHLKR

SEQ ID NO: 3598 - protein, 11 aa, Artificial Sequence
  Quasi-synthetic sequence derived from human genome
LRKMKIPFLLL

SEQ ID NO: 3599 - protein, 11 aa, Artificial Sequence
  Quasi-synthetic sequence derived from human genome
IKLWKLCYFRW

SEQ ID NO: 3600 - protein, 11 aa, Artificial Sequence
  Quasi-synthetic sequence derived from human genome
FRTLMMRRRFL

SEQ ID NO: 3601 - protein, 11 aa, Artificial Sequence
  Quasi-synthetic sequence derived from human genome
LLILILLIKKL

SEQ ID NO: 3602 - protein, 11 aa, Artificial Sequence
  Quasi-synthetic sequence derived from human genome
RKIMRFLRRCR

SEQ ID NO: 3603 - protein, 11 aa, Artificial Sequence
  Quasi-synthetic sequence derived from human genome
KKIMAILIKRF

SEQ ID NO: 3604 - protein, 11 aa, Artificial Sequence
  Quasi-synthetic sequence derived from human genome
LKRMKIIKHFI

SEQ ID NO: 3605 - protein, 11 aa, Artificial Sequence
  Quasi-synthetic sequence derived from human genome
IWAKFKRRPWW

SEQ ID NO: 3606 - protein, 11 aa, Artificial Sequence
  Quasi-synthetic sequence derived from human genome
LLLWKMRLFQR

SEQ ID NO: 3607 - protein, 11 aa, Artificial Sequence
  Quasi-synthetic sequence derived from human genome
WRSMRKLFLLL

SEQ ID NO: 3608 - protein, 11 aa, Artificial Sequence
  Quasi-synthetic sequence derived from human genome
PLVRRRKRRFF

SEQ ID NO: 3609 - protein, 11 aa, Artificial Sequence
  Quasi-synthetic sequence derived from human genome
FLFFRVLLLRI

SEQ ID NO: 3610 - protein, 11 aa, Artificial Sequence
  Quasi-synthetic sequence derived from human genome
MRIFRVLKLAR

SEQ ID NO: 3611 - protein, 11 aa, Artificial Sequence
  Quasi-synthetic sequence derived from human genome
LVVLFIVFRKK

SEQ ID NO: 3612 - protein, 11 aa, Artificial Sequence
  Quasi-synthetic sequence derived from human genome
NRWWRWRRARW

SEQ ID NO: 3613 - protein, 11 aa, Artificial Sequence
  Quasi-synthetic sequence derived from human genome
LARRRIRLWHR

SEQ ID NO: 3614 - protein, 11 aa, Artificial Sequence
  Quasi-synthetic sequence derived from human genome
LKLKKLKCVII

SEQ ID NO: 3615 - protein, 11 aa, Artificial Sequence
  Quasi-synthetic sequence derived from human genome
VWKRLFRKVLP

SEQ ID NO: 3616 - protein, 11 aa, Artificial Sequence
  Quasi-synthetic sequence derived from human genome
IKSWKKRWFVF

SEQ ID NO: 3617 - protein, 11 aa, Artificial Sequence
  Quasi-synthetic sequence derived from human genome
RICAFLWRKKW

SEQ ID NO: 3618 - protein, 11 aa, Artificial Sequence
  Quasi-synthetic sequence derived from human genome
KIFKPWKWRKK

SEQ ID NO: 3619 - protein, 11 aa, Artificial Sequence
  Quasi-synthetic sequence derived from human genome
LLPKKMKLLLF

SEQ ID NO: 3620 - protein, 11 aa, Artificial Sequence
  Quasi-synthetic sequence derived from human genome
LLKRVLVRKLC

SEQ ID NO: 3621 - protein, 11 aa, Artificial Sequence
  Quasi-synthetic sequence derived from human genome
LLKLRRNIVKL

SEQ ID NO: 3622 - protein, 11 aa, Artificial Sequence
  Quasi-synthetic sequence derived from human genome
FRILKVFKSLR

SEQ ID NO: 3623 - protein, 11 aa, Artificial Sequence
  Quasi-synthetic sequence derived from human genome
LRCLRPLRIFK

SEQ ID NO: 3624 - protein, 11 aa, Artificial Sequence
  Quasi-synthetic sequence derived from human genome
FWWRRLRASLR

SEQ ID NO: 3625 - protein, 11 aa, Artificial Sequence
  Quasi-synthetic sequence derived from human genome
RVCVLRKRRLL

SEQ ID NO: 3626 - protein, 11 aa, Artificial Sequence
  Quasi-synthetic sequence derived from human genome
LRNRRLLRKVI

SEQ ID NO: 3627 - protein, 11 aa, Artificial Sequence
  Quasi-synthetic sequence derived from human genome
LFRRCRRRLIP

SEQ ID NO: 3628 - protein, 11 aa, Artificial Sequence
  Quasi-synthetic sequence derived from human genome
FRRAFRRILCR

SEQ ID NO: 3629 - protein, 11 aa, Artificial Sequence
  Quasi-synthetic sequence derived from human genome
FFKRSVRRRLI

SEQ ID NO: 3630 - protein, 11 aa, Artificial Sequence
  Quasi-synthetic sequence derived from human genome
LKKYFPLLLKK

SEQ ID NO: 3631 - protein, 11 aa, Artificial Sequence
  Quasi-synthetic sequence derived from human genome
KLKYLAFLRKR

SEQ ID NO: 3632 - protein, 11 aa, Artificial Sequence
  Quasi-synthetic sequence derived from human genome
RLLWVYMIRIK

SEQ ID NO: 3633 - protein, 11 aa, Artificial Sequence
  Quasi-synthetic sequence derived from human genome
RRKKLILAKKF

SEQ ID NO: 3634 - protein, 11 aa, Artificial Sequence
  Quasi-synthetic sequence derived from human genome
IKPFKRFLRKK

SEQ ID NO: 3635 - protein, 11 aa, Artificial Sequence
  Quasi-synthetic sequence derived from human genome
KKRKLILPKRL

SEQ ID NO: 3636 - protein, 11 aa, Artificial Sequence
  Quasi-synthetic sequence derived from human genome
LIARRKKIMKL

SEQ ID NO: 3637 - protein, 11 aa, Artificial Sequence
  Quasi-synthetic sequence derived from human genome
IFFRFHRYIFR

SEQ ID NO: 3638 - protein, 11 aa, Artificial Sequence
  Quasi-synthetic sequence derived from human genome
FRHKVLILFKL

SEQ ID NO: 3639 - protein, 11 aa, Artificial Sequence
  Quasi-synthetic sequence derived from human genome
KLLKQMRILWK

SEQ ID NO: 3640 - protein, 11 aa, Artificial Sequence
  Quasi-synthetic sequence derived from human genome
RKYWVRFLLAR

SEQ ID NO: 3641 - protein, 11 aa, Artificial Sequence
  Quasi-synthetic sequence derived from human genome
RVFRLKLPFMK

SEQ ID NO: 3642 - protein, 11 aa, Artificial Sequence
  Quasi-synthetic sequence derived from human genome
KHRLLVYLWRR

SEQ ID NO: 3643 - protein, 11 aa, Artificial Sequence
  Quasi-synthetic sequence derived from human genome
LLKQMRILWKK

SEQ ID NO: 3644 - protein, 11 aa, Artificial Sequence
  Quasi-synthetic sequence derived from human genome
IVLRFKKTWKL

SEQ ID NO: 3645 - protein, 11 aa, Artificial Sequence
  Quasi-synthetic sequence derived from human genome
LRFLQILRMLR

SEQ ID NO: 3646 - protein, 11 aa, Artificial Sequence
  Quasi-synthetic sequence derived from human genome
LLMLGLRFIRR

SEQ ID NO: 3647 - protein, 11 aa, Artificial Sequence
  Quasi-synthetic sequence derived from human genome
RFLRAHWKFLK

SEQ ID NO: 3648 - protein, 11 aa, Artificial Sequence
  Quasi-synthetic sequence derived from human genome
RLLCLLRRWLP

SEQ ID NO: 3649 - protein, 11 aa, Artificial Sequence
  Quasi-synthetic sequence derived from human genome
KSWKRRWFVLK

SEQ ID NO: 3650 - protein, 11 aa, Artificial Sequence
  Quasi-synthetic sequence derived from human genome
IKRIKKKLSLL

SEQ ID NO: 3651 - protein, 11 aa, Artificial Sequence
  Quasi-synthetic sequence derived from human genome
RKIPIIIRRYL

SEQ ID NO: 3652 - protein, 11 aa, Artificial Sequence
  Quasi-synthetic sequence derived from human genome
IGILFIILRKR

SEQ ID NO: 3653 - protein, 11 aa, Artificial Sequence
  Quasi-synthetic sequence derived from human genome
RLRKYLFQILR

SEQ ID NO: 3654 - protein, 11 aa, Artificial Sequence
  Quasi-synthetic sequence derived from human genome
LLGIKRLRRLY

SEQ ID NO: 3655 - protein, 11 aa, Artificial Sequence
  Quasi-synthetic sequence derived from human genome
IKLYLRRQRLL

SEQ ID NO: 3656 - protein, 11 aa, Artificial Sequence
  Quasi-synthetic sequence derived from human genome
LLLRLLRMIIL

SEQ ID NO: 3657 - protein, 11 aa, Artificial Sequence
  Quasi-synthetic sequence derived from human genome
KFRKLIYYIIF

SEQ ID NO: 3658 - protein, 11 aa, Artificial Sequence
  Quasi-synthetic sequence derived from human genome
FRKFFKFQVLK

SEQ ID NO: 3659 - protein, 11 aa, Artificial Sequence
  Quasi-synthetic sequence derived from human genome
RWLRRKLRARR

SEQ ID NO: 3660 - protein, 11 aa, Artificial Sequence
  Quasi-synthetic sequence derived from human genome
FLLQRRFVKKR

SEQ ID NO: 3661 - protein, 11 aa, Artificial Sequence
  Quasi-synthetic sequence derived from human genome
RRKLFGVLRLK

SEQ ID NO: 3662 - protein, 11 aa, Artificial Sequence
  Quasi-synthetic sequence derived from human genome
RFIRVFIKTIR

SEQ ID NO: 3663 - protein, 11 aa, Artificial Sequence
  Quasi-synthetic sequence derived from human genome
RLLKVVKRVLV

SEQ ID NO: 3664 - protein, 11 aa, Artificial Sequence
  Quasi-synthetic sequence derived from human genome
LVLKRIQIWKR

SEQ ID NO: 3665 - protein, 11 aa, Artificial Sequence
  Quasi-synthetic sequence derived from human genome
RAVRRLVKILL

SEQ ID NO: 3666 - protein, 11 aa, Artificial Sequence
  Quasi-synthetic sequence derived from human genome
RVLRIARVLKL

SEQ ID NO: 3667 - protein, 11 aa, Artificial Sequence
  Quasi-synthetic sequence derived from human genome
VLKRRLVKLVV

SEQ ID NO: 3668 - protein, 11 aa, Artificial Sequence
  Quasi-synthetic sequence derived from human genome
LLRLRLAILKY

SEQ ID NO: 3669 - protein, 11 aa, Artificial Sequence
  Quasi-synthetic sequence derived from human genome
ILPLLFYLRKR

SEQ ID NO: 3670 - protein, 11 aa, Artificial Sequence
  Quasi-synthetic sequence derived from human genome
KRLIFPRFYFL

SEQ ID NO: 3671 - protein, 11 aa, Artificial Sequence
  Quasi-synthetic sequence derived from human genome
KFFLRYRPLIL

SEQ ID NO: 3672 - protein, 11 aa, Artificial Sequence
  Quasi-synthetic sequence derived from human genome
RLIRLLLYHFK

SEQ ID NO: 3673 - protein, 11 aa, Artificial Sequence
  Quasi-synthetic sequence derived from human genome
LLLFKKVKALL

SEQ ID NO: 3674 - protein, 11 aa, Artificial Sequence
  Quasi-synthetic sequence derived from human genome
RLLWVYVIRIK

SEQ ID NO: 3675 - protein, 11 aa, Artificial Sequence
  Quasi-synthetic sequence derived from human genome
LRFRRQLLYWF

SEQ ID NO: 3676 - protein, 11 aa, Artificial Sequence
  Quasi-synthetic sequence derived from human genome
LLKTVRLLRLL

SEQ ID NO: 3677 - protein, 11 aa, Artificial Sequence
  Quasi-synthetic sequence derived from human genome
KLKKHRILLMK

SEQ ID NO: 3678 - protein, 11 aa, Artificial Sequence
  Quasi-synthetic sequence derived from human genome
VFVIYKFKRKI

SEQ ID NO: 3679 - protein, 11 aa, Artificial Sequence
  Quasi-synthetic sequence derived from human genome
KKLRRKLQMWL

SEQ ID NO: 3680 - protein, 11 aa, Artificial Sequence
  Quasi-synthetic sequence derived from human genome
KKVLPLLKIIK

SEQ ID NO: 3681 - protein, 11 aa, Artificial Sequence
  Quasi-synthetic sequence derived from human genome
RRYLLKKLLQL

SEQ ID NO: 3682 - protein, 11 aa, Artificial Sequence
  Quasi-synthetic sequence derived from human genome
LKRYLLKRLNL

SEQ ID NO: 3683 - protein, 11 aa, Artificial Sequence
  Quasi-synthetic sequence derived from human genome
FLLGFLRIRVR

SEQ ID NO: 3684 - protein, 11 aa, Artificial Sequence
  Quasi-synthetic sequence derived from human genome
FVLFLRLRSIR

SEQ ID NO: 3685 - protein, 11 aa, Artificial Sequence
  Quasi-synthetic sequence derived from human genome
IYRRCWLVFRK

SEQ ID NO: 3686 - protein, 11 aa, Artificial Sequence
  Quasi-synthetic sequence derived from human genome
FRRLPLRPLIK

SEQ ID NO: 3687 - protein, 11 aa, Artificial Sequence
  Quasi-synthetic sequence derived from human genome
LRLFRAARLIK

SEQ ID NO: 3688 - protein, 11 aa, Artificial Sequence
  Quasi-synthetic sequence derived from human genome
FFRLALPRIRK

SEQ ID NO: 3689 - protein, 11 aa, Artificial Sequence
  Quasi-synthetic sequence derived from human genome
CVLLVKRWKKL

SEQ ID NO: 3690 - protein, 11 aa, Artificial Sequence
  Quasi-synthetic sequence derived from human genome
WLRHRLQWWRK

SEQ ID NO: 3691 - protein, 11 aa, Artificial Sequence
  Quasi-synthetic sequence derived from human genome
LQKKLKVWFRI

SEQ ID NO: 3692 - protein, 11 aa, Artificial Sequence
  Quasi-synthetic sequence derived from human genome
KKLVVFRPRLF

SEQ ID NO: 3693 - protein, 11 aa, Artificial Sequence
  Quasi-synthetic sequence derived from human genome
LLKKKILGRVW

SEQ ID NO: 3694 - protein, 11 aa, Artificial Sequence
  Quasi-synthetic sequence derived from human genome
LKRIFHLWRCK

SEQ ID NO: 3695 - protein, 11 aa, Artificial Sequence
  Quasi-synthetic sequence derived from human genome
FRVLRVFKLAK

SEQ ID NO: 3696 - protein, 11 aa, Artificial Sequence
  Quasi-synthetic sequence derived from human genome
VKHKVLLRRLL

SEQ ID NO: 3697 - protein, 11 aa, Artificial Sequence
  Quasi-synthetic sequence derived from human genome
RRWKRNWFALW

SEQ ID NO: 3698 - protein, 11 aa, Artificial Sequence
  Quasi-synthetic sequence derived from human genome
VWKGFILRKKL

SEQ ID NO: 3699 - protein, 11 aa, Artificial Sequence
  Quasi-synthetic sequence derived from human genome
VLLFVMWMKRR

SEQ ID NO: 3700 - protein, 11 aa, Artificial Sequence
  Quasi-synthetic sequence derived from human genome
LLRKRRFQLYR

SEQ ID NO: 3701 - protein, 11 aa, Artificial Sequence
  Quasi-synthetic sequence derived from human genome
PRRVRVKWWKL

SEQ ID NO: 3702 - protein, 11 aa, Artificial Sequence
  Quasi-synthetic sequence derived from human genome
IRKKNKWLIKI

SEQ ID NO: 3703 - protein, 11 aa, Artificial Sequence
  Quasi-synthetic sequence derived from human genome
KRKIPKLVLRI

SEQ ID NO: 3704 - protein, 11 aa, Artificial Sequence
  Quasi-synthetic sequence derived from human genome
IAKLKMILLRL

SEQ ID NO: 3705 - protein, 11 aa, Artificial Sequence
  Quasi-synthetic sequence derived from human genome
KILRLMLLHIK

SEQ ID NO: 3706 - protein, 11 aa, Artificial Sequence
  Quasi-synthetic sequence derived from human genome
PIKKVLLLLWK

SEQ ID NO: 3707 - protein, 11 aa, Artificial Sequence
  Quasi-synthetic sequence derived from human genome
MRVRRRLSLFL

SEQ ID NO: 3708 - protein, 11 aa, Artificial Sequence
  Quasi-synthetic sequence derived from human genome
RVLRQMRRLLL

SEQ ID NO: 3709 - protein, 11 aa, Artificial Sequence
  Quasi-synthetic sequence derived from human genome
FLRGWLCRRKW

SEQ ID NO: 3710 - protein, 11 aa, Artificial Sequence
  Quasi-synthetic sequence derived from human genome
KKLLLCIRCFR

SEQ ID NO: 3711 - protein, 11 aa, Artificial Sequence
  Quasi-synthetic sequence derived from human genome
RALLLWGRRLR

SEQ ID NO: 3712 - protein, 11 aa, Artificial Sequence
  Quasi-synthetic sequence derived from human genome
LLLLAMLVRRR

SEQ ID NO: 3713 - protein, 11 aa, Artificial Sequence
  Quasi-synthetic sequence derived from human genome
LLRRFPRMLLV

SEQ ID NO: 3714 - protein, 11 aa, Artificial Sequence
  Quasi-synthetic sequence derived from human genome
LMWLKRGLRFI

SEQ ID NO: 3715 - protein, 11 aa, Artificial Sequence
  Quasi-synthetic sequence derived from human genome
RMLRFFVRHLL

SEQ ID NO: 3716 - protein, 11 aa, Artificial Sequence
  Quasi-synthetic sequence derived from human genome
RKMLWRFISLF

SEQ ID NO: 3717 - protein, 11 aa, Artificial Sequence
  Quasi-synthetic sequence derived from human genome
RRRILMGKIFR

SEQ ID NO: 3718 - protein, 11 aa, Artificial Sequence
  Quasi-synthetic sequence derived from human genome
LTYWFLFRKKK

SEQ ID NO: 3719 - protein, 11 aa, Artificial Sequence
  Quasi-synthetic sequence derived from human genome
LLSLWKLWRVK

SEQ ID NO: 3720 - protein, 11 aa, Artificial Sequence
  Quasi-synthetic sequence derived from human genome
RLAWAFRLRLL

SEQ ID NO: 3721 - protein, 11 aa, Artificial Sequence
  Quasi-synthetic sequence derived from human genome
RLLRLVRVARK

SEQ ID NO: 3722 - protein, 11 aa, Artificial Sequence
  Quasi-synthetic sequence derived from human genome
LFKRRVVRRLA

SEQ ID NO: 3723 - protein, 11 aa, Artificial Sequence
  Quasi-synthetic sequence derived from human genome
RKLFIVLLLLL

SEQ ID NO: 3724 - protein, 11 aa, Artificial Sequence
  Quasi-synthetic sequence derived from human genome
AFLMKKKKFKF

SEQ ID NO: 3725 - protein, 11 aa, Artificial Sequence
  Quasi-synthetic sequence derived from human genome
RIFGLKKRRLR

SEQ ID NO: 3726 - protein, 11 aa, Artificial Sequence
  Quasi-synthetic sequence derived from human genome
KSRRLIIILVR

SEQ ID NO: 3727 - protein, 11 aa, Artificial Sequence
  Quasi-synthetic sequence derived from human genome
IKVLRSRIRFI

SEQ ID NO: 3728 - protein, 11 aa, Artificial Sequence
  Quasi-synthetic sequence derived from human genome
ILKPMMLRRLK

SEQ ID NO: 3729 - protein, 11 aa, Artificial Sequence
  Quasi-synthetic sequence derived from human genome
WFWTKWVRMRK

SEQ ID NO: 3730 - protein, 11 aa, Artificial Sequence
  Quasi-synthetic sequence derived from human genome
RLLMMHRIKKL

SEQ ID NO: 3731 - protein, 11 aa, Artificial Sequence
  Quasi-synthetic sequence derived from human genome
RLLLPRLLRCL

SEQ ID NO: 3732 - protein, 11 aa, Artificial Sequence
  Quasi-synthetic sequence derived from human genome
FKFVFFLRLSR

SEQ ID NO: 3733 - protein, 11 aa, Artificial Sequence
  Quasi-synthetic sequence derived from human genome
LLKLRQRVLFL

SEQ ID NO: 3734 - protein, 11 aa, Artificial Sequence
  Quasi-synthetic sequence derived from human genome
LRWCGRRRLRW

SEQ ID NO: 3735 - protein, 11 aa, Artificial Sequence
  Quasi-synthetic sequence derived from human genome
IMKKKKKVLVW

SEQ ID NO: 3736 - protein, 11 aa, Artificial Sequence
  Quasi-synthetic sequence derived from human genome
YKLRRLYFIWV

SEQ ID NO: 3737 - protein, 11 aa, Artificial Sequence
  Quasi-synthetic sequence derived from human genome
RKLFYFKIWAF

SEQ ID NO: 3738 - protein, 11 aa, Artificial Sequence
  Quasi-synthetic sequence derived from human genome
ILLFWKPLRYK

SEQ ID NO: 3739 - protein, 11 aa, Artificial Sequence
  Quasi-synthetic sequence derived from human genome
FKRRWMVRKMK

SEQ ID NO: 3740 - protein, 11 aa, Artificial Sequence
  Quasi-synthetic sequence derived from human genome
SWKKIYFFLRR

SEQ ID NO: 3741 - protein, 11 aa, Artificial Sequence
  Quasi-synthetic sequence derived from human genome
LVKLYRFLARR

SEQ ID NO: 3742 - protein, 11 aa, Artificial Sequence
  Quasi-synthetic sequence derived from human genome
RWLLRTKRLHW

SEQ ID NO: 3743 - protein, 11 aa, Artificial Sequence
  Quasi-synthetic sequence derived from human genome
ALVFFLYRRRK

SEQ ID NO: 3744 - protein, 11 aa, Artificial Sequence
  Quasi-synthetic sequence derived from human genome
KFVLLILKRKT

SEQ ID NO: 3745 - protein, 11 aa, Artificial Sequence
  Quasi-synthetic sequence derived from human genome
VRTLKKFIKLL

SEQ ID NO: 3746 - protein, 11 aa, Artificial Sequence
  Quasi-synthetic sequence derived from human genome
FRHLHLKLKRL

SEQ ID NO: 3747 - protein, 11 aa, Artificial Sequence
  Quasi-synthetic sequence derived from human genome
KLLKRLRLLPA

SEQ ID NO: 3748 - protein, 11 aa, Artificial Sequence
  Quasi-synthetic sequence derived from human genome
LRFLFPLRPKK

SEQ ID NO: 3749 - protein, 11 aa, Artificial Sequence
  Quasi-synthetic sequence derived from human genome
LKPALKLRLRF

SEQ ID NO: 3750 - protein, 11 aa, Artificial Sequence
  Quasi-synthetic sequence derived from human genome
RRMRFYIRRMV

SEQ ID NO: 3751 - protein, 11 aa, Artificial Sequence
  Quasi-synthetic sequence derived from human genome
IYKLKLRPRIR

SEQ ID NO: 3752 - protein, 11 aa, Artificial Sequence
  Quasi-synthetic sequence derived from human genome
FYLFKLLRKCI

SEQ ID NO: 3753 - protein, 11 aa, Artificial Sequence
  Quasi-synthetic sequence derived from human genome
LLFFWVTKRKL

SEQ ID NO: 3754 - protein, 11 aa, Artificial Sequence
  Quasi-synthetic sequence derived from human genome
IAKVRFLKLKK

SEQ ID NO: 3755 - protein, 11 aa, Artificial Sequence
  Quasi-synthetic sequence derived from human genome
KFALKIFVKKR

SEQ ID NO: 3756 - protein, 11 aa, Artificial Sequence
  Quasi-synthetic sequence derived from human genome
KKRVVRMLLVI

SEQ ID NO: 3757 - protein, 11 aa, Artificial Sequence
  Quasi-synthetic sequence derived from human genome
WIARLRHIKRL

SEQ ID NO: 3758 - protein, 11 aa, Artificial Sequence
  Quasi-synthetic sequence derived from human genome
AFWIIKLPRRR

SEQ ID NO: 3759 - protein, 11 aa, Artificial Sequence
  Quasi-synthetic sequence derived from human genome
LKWRVKKVVLV

SEQ ID NO: 3760 - protein, 11 aa, Artificial Sequence
  Quasi-synthetic sequence derived from human genome
KLKKSIKIIFI

SEQ ID NO: 3761 - protein, 11 aa, Artificial Sequence
  Quasi-synthetic sequence derived from human genome
RLMKIILLCKI

SEQ ID NO: 3762 - protein, 11 aa, Artificial Sequence
  Quasi-synthetic sequence derived from human genome
KILKILITFRI

SEQ ID NO: 3763 - protein, 11 aa, Artificial Sequence
  Quasi-synthetic sequence derived from human genome
LLRKKARRMLR

SEQ ID NO: 3764 - protein, 11 aa, Artificial Sequence
  Quasi-synthetic sequence derived from human genome
RRFFWWARFIA

SEQ ID NO: 3765 - protein, 11 aa, Artificial Sequence
  Quasi-synthetic sequence derived from human genome
YRRLLRVLRAR

SEQ ID NO: 3766 - protein, 11 aa, Artificial Sequence
  Quasi-synthetic sequence derived from human genome
LRRRLVPRYRL

SEQ ID NO: 3767 - protein, 11 aa, Artificial Sequence
  Quasi-synthetic sequence derived from human genome
RPLKLPRRLLR

SEQ ID NO: 3768 - protein, 11 aa, Artificial Sequence
  Quasi-synthetic sequence derived from human genome
RWILQFRRWAR

SEQ ID NO: 3769 - protein, 11 aa, Artificial Sequence
  Quasi-synthetic sequence derived from human genome
VFKGRWFWRVR

SEQ ID NO: 3770 - protein, 11 aa, Artificial Sequence
  Quasi-synthetic sequence derived from human genome
LKMLMKRALKF

SEQ ID NO: 3771 - protein, 11 aa, Artificial Sequence
  Quasi-synthetic sequence derived from human genome
RVLICLRLLMR

SEQ ID NO: 3772 - protein, 11 aa, Artificial Sequence
  Quasi-synthetic sequence derived from human genome
LILCVLRFMRR

SEQ ID NO: 3773 - protein, 11 aa, Artificial Sequence
  Quasi-synthetic sequence derived from human genome
LRFLQILRMIR

SEQ ID NO: 3774 - protein, 11 aa, Artificial Sequence
  Quasi-synthetic sequence derived from human genome
LMLIFLRNRIR

SEQ ID NO: 3775 - protein, 11 aa, Artificial Sequence
  Quasi-synthetic sequence derived from human genome
KLYFKIKPLLK

SEQ ID NO: 3776 - protein, 11 aa, Artificial Sequence
  Quasi-synthetic sequence derived from human genome
AFKIFLKYLKK

SEQ ID NO: 3777 - protein, 11 aa, Artificial Sequence
  Quasi-synthetic sequence derived from human genome
LVLRLLRALRV

SEQ ID NO: 3778 - protein, 11 aa, Artificial Sequence
  Quasi-synthetic sequence derived from human genome
RCILLRWARLL

SEQ ID NO: 3779 - protein, 11 aa, Artificial Sequence
  Quasi-synthetic sequence derived from human genome
FLRRRRRFKKK

SEQ ID NO: 3780 - protein, 11 aa, Artificial Sequence
  Quasi-synthetic sequence derived from human genome
RKLSFKRKRFL

SEQ ID NO: 3781 - protein, 11 aa, Artificial Sequence
  Quasi-synthetic sequence derived from human genome
LRVRRGLLVLR

SEQ ID NO: 3782 - protein, 11 aa, Artificial Sequence
  Quasi-synthetic sequence derived from human genome
LRVLVLRRNRF

SEQ ID NO: 3783 - protein, 11 aa, Artificial Sequence
  Quasi-synthetic sequence derived from human genome
RCCLRKLLRKL

SEQ ID NO: 3784 - protein, 11 aa, Artificial Sequence
  Quasi-synthetic sequence derived from human genome
LIFRFKFLMLI

SEQ ID NO: 3785 - protein, 11 aa, Artificial Sequence
  Quasi-synthetic sequence derived from human genome
LLWFRRLYIIF

SEQ ID NO: 3786 - protein, 11 aa, Artificial Sequence
  Quasi-synthetic sequence derived from human genome
RLRMVWRRKRK

SEQ ID NO: 3787 - protein, 11 aa, Artificial Sequence
  Quasi-synthetic sequence derived from human genome
RILKLIVRRRN

SEQ ID NO: 3788 - protein, 11 aa, Artificial Sequence
  Quasi-synthetic sequence derived from human genome
FKLKFLAKVIL

SEQ ID NO: 3789 - protein, 11 aa, Artificial Sequence
  Quasi-synthetic sequence derived from human genome
KFILALKVLFK

SEQ ID NO: 3790 - protein, 11 aa, Artificial Sequence
  Quasi-synthetic sequence derived from human genome
RWRTMKKLKLI

SEQ ID NO: 3791 - protein, 11 aa, Artificial Sequence
  Quasi-synthetic sequence derived from human genome
FKKKLFWRAVV

SEQ ID NO: 3792 - protein, 11 aa, Artificial Sequence
  Quasi-synthetic sequence derived from human genome
KKRAWAIFLRL

SEQ ID NO: 3793 - protein, 11 aa, Artificial Sequence
  Quasi-synthetic sequence derived from human genome
WKKRWLYWKNR

SEQ ID NO: 3794 - protein, 11 aa, Artificial Sequence
  Quasi-synthetic sequence derived from human genome
FILYKFKRKRP

SEQ ID NO: 3795 - protein, 11 aa, Artificial Sequence
  Quasi-synthetic sequence derived from human genome
LIFRFVRTLFK

SEQ ID NO: 3796 - protein, 11 aa, Artificial Sequence
  Quasi-synthetic sequence derived from human genome
RSIFRKFLLML

SEQ ID NO: 3797 - protein, 11 aa, Artificial Sequence
  Quasi-synthetic sequence derived from human genome
FRLKMILRLLQ

SEQ ID NO: 3798 - protein, 11 aa, Artificial Sequence
  Quasi-synthetic sequence derived from human genome
RLLLRLPALRL

SEQ ID NO: 3799 - protein, 11 aa, Artificial Sequence
  Quasi-synthetic sequence derived from human genome
RHRRLLLLPLL

SEQ ID NO: 3800 - protein, 11 aa, Artificial Sequence
  Quasi-synthetic sequence derived from human genome
LAPRLLLRLLR

SEQ ID NO: 3801 - protein, 11 aa, Artificial Sequence
  Quasi-synthetic sequence derived from human genome
MLFVSRKWRFR

SEQ ID NO: 3802 - protein, 11 aa, Artificial Sequence
  Quasi-synthetic sequence derived from human genome
MLVLWLKRRRN

SEQ ID NO: 3803 - protein, 11 aa, Artificial Sequence
  Quasi-synthetic sequence derived from human genome
YRLLKRRNLII

SEQ ID NO: 3804 - protein, 11 aa, Artificial Sequence
  Quasi-synthetic sequence derived from human genome
KKLKLIRVLGL

SEQ ID NO: 3805 - protein, 11 aa, Artificial Sequence
  Quasi-synthetic sequence derived from human genome
LKNLVFRILKK

SEQ ID NO: 3806 - protein, 11 aa, Artificial Sequence
  Quasi-synthetic sequence derived from human genome
ILKKKGLLRLV

SEQ ID NO: 3807 - protein, 11 aa, Artificial Sequence
  Quasi-synthetic sequence derived from human genome
WRRRKSLWLAL

SEQ ID NO: 3808 - protein, 11 aa, Artificial Sequence
  Quasi-synthetic sequence derived from human genome
RLWRWHKSRLL

SEQ ID NO: 3809 - protein, 11 aa, Artificial Sequence
  Quasi-synthetic sequence derived from human genome
KVLKKRILNFL

SEQ ID NO: 3810 - protein, 11 aa, Artificial Sequence
  Quasi-synthetic sequence derived from human genome
ICAFLLRKKRF

SEQ ID NO: 3811 - protein, 11 aa, Artificial Sequence
  Quasi-synthetic sequence derived from human genome
RRRRWVRLRRR

SEQ ID NO: 3812 - protein, 11 aa, Artificial Sequence
  Quasi-synthetic sequence derived from human genome
VLRWLRSRRRR

SEQ ID NO: 3813 - protein, 11 aa, Artificial Sequence
  Quasi-synthetic sequence derived from human genome
LRAVIKKIWKK

SEQ ID NO: 3814 - protein, 11 aa, Artificial Sequence
  Quasi-synthetic sequence derived from human genome
KSWKRRYFLLR

SEQ ID NO: 3815 - protein, 11 aa, Artificial Sequence
  Quasi-synthetic sequence derived from human genome
VIFRWWKISLR

SEQ ID NO: 3816 - protein, 11 aa, Artificial Sequence
  Quasi-synthetic sequence derived from human genome
IIKRIFNILKF

SEQ ID NO: 3817 - protein, 11 aa, Artificial Sequence
  Quasi-synthetic sequence derived from human genome
LIRIYYWYWRR

SEQ ID NO: 3818 - protein, 11 aa, Artificial Sequence
  Quasi-synthetic sequence derived from human genome
LIKGIILRKIF

SEQ ID NO: 3819 - protein, 11 aa, Artificial Sequence
  Quasi-synthetic sequence derived from human genome
IRRILVIITRK

SEQ ID NO: 3820 - protein, 11 aa, Artificial Sequence
  Quasi-synthetic sequence derived from human genome
LLGLLRPLRRR

SEQ ID NO: 3821 - protein, 11 aa, Artificial Sequence
  Quasi-synthetic sequence derived from human genome
ALRSRFRLRLL

SEQ ID NO: 3822 - protein, 11 aa, Artificial Sequence
  Quasi-synthetic sequence derived from human genome
LHRRLLNRRLL

SEQ ID NO: 3823 - protein, 11 aa, Artificial Sequence
  Quasi-synthetic sequence derived from human genome
RGRLPRRLLLL

SEQ ID NO: 3824 - protein, 11 aa, Artificial Sequence
  Quasi-synthetic sequence derived from human genome
RRRPLLLSLLR

SEQ ID NO: 3825 - protein, 11 aa, Artificial Sequence
  Quasi-synthetic sequence derived from human genome
LARLRFRRSLL

SEQ ID NO: 3826 - protein, 11 aa, Artificial Sequence
  Quasi-synthetic sequence derived from human genome
RRALLRFLFRQ

SEQ ID NO: 3827 - protein, 11 aa, Artificial Sequence
  Quasi-synthetic sequence derived from human genome
WKKRFIGIRMR

SEQ ID NO: 3828 - protein, 11 aa, Artificial Sequence
  Quasi-synthetic sequence derived from human genome
LFMRRRHIVRK

SEQ ID NO: 3829 - protein, 11 aa, Artificial Sequence
  Quasi-synthetic sequence derived from human genome
KVWRKCRMRIF

SEQ ID NO: 3830 - protein, 11 aa, Artificial Sequence
  Quasi-synthetic sequence derived from human genome
RRLLLRIQVFI

SEQ ID NO: 3831 - protein, 11 aa, Artificial Sequence
  Quasi-synthetic sequence derived from human genome
FRKVLFILILF

SEQ ID NO: 3832 - protein, 11 aa, Artificial Sequence
  Quasi-synthetic sequence derived from human genome
KQVRWKFIKRW

SEQ ID NO: 3833 - protein, 11 aa, Artificial Sequence
  Quasi-synthetic sequence derived from human genome
LKALKYLFRFI

SEQ ID NO: 3834 - protein, 11 aa, Artificial Sequence
  Quasi-synthetic sequence derived from human genome
KLAKILKKRRI

SEQ ID NO: 3835 - protein, 11 aa, Artificial Sequence
  Quasi-synthetic sequence derived from human genome
RMLLKRMVIVW

SEQ ID NO: 3836 - protein, 11 aa, Artificial Sequence
  Quasi-synthetic sequence derived from human genome
LKKLVPRMLKF

SEQ ID NO: 3837 - protein, 11 aa, Artificial Sequence
  Quasi-synthetic sequence derived from human genome
FFWKNMKFIKK

SEQ ID NO: 3838 - protein, 11 aa, Artificial Sequence
  Quasi-synthetic sequence derived from human genome
IIPKKLMIFLR

SEQ ID NO: 3839 - protein, 11 aa, Artificial Sequence
  Quasi-synthetic sequence derived from human genome
YRKAIFIFIRW

SEQ ID NO: 3840 - protein, 11 aa, Artificial Sequence
  Quasi-synthetic sequence derived from human genome
LLRLLYWNRKL

SEQ ID NO: 3841 - protein, 11 aa, Artificial Sequence
  Quasi-synthetic sequence derived from human genome
RYIRLRLQRIR

SEQ ID NO: 3842 - protein, 11 aa, Artificial Sequence
  Quasi-synthetic sequence derived from human genome
LWRRQWRPRRF

SEQ ID NO: 3843 - protein, 11 aa, Artificial Sequence
  Quasi-synthetic sequence derived from human genome
IRNRKKRFVFL

SEQ ID NO: 3844 - protein, 11 aa, Artificial Sequence
  Quasi-synthetic sequence derived from human genome
RPRRWLQLWRR

SEQ ID NO: 3845 - protein, 11 aa, Artificial Sequence
  Quasi-synthetic sequence derived from human genome
IVRIMKMRKVL

SEQ ID NO: 3846 - protein, 11 aa, Artificial Sequence
  Quasi-synthetic sequence derived from human genome
LRRLRTIIRKK

SEQ ID NO: 3847 - protein, 11 aa, Artificial Sequence
  Quasi-synthetic sequence derived from human genome
FFKRRLMNLMR

SEQ ID NO: 3848 - protein, 11 aa, Artificial Sequence
  Quasi-synthetic sequence derived from human genome
VLRRRRKKLPF

SEQ ID NO: 3849 - protein, 11 aa, Artificial Sequence
  Quasi-synthetic sequence derived from human genome
KLRGLKRKWIR

SEQ ID NO: 3850 - protein, 11 aa, Artificial Sequence
  Quasi-synthetic sequence derived from human genome
KFSIFRYFLRK

SEQ ID NO: 3851 - protein, 11 aa, Artificial Sequence
  Quasi-synthetic sequence derived from human genome
RWRWWQRLLPW

SEQ ID NO: 3852 - protein, 11 aa, Artificial Sequence
  Quasi-synthetic sequence derived from human genome
FWIKCRRWLLA

SEQ ID NO: 3853 - protein, 11 aa, Artificial Sequence
  Quasi-synthetic sequence derived from human genome
LLRKRWVLALV

SEQ ID NO: 3854 - protein, 11 aa, Artificial Sequence
  Quasi-synthetic sequence derived from human genome
FRWAILRAFFR

SEQ ID NO: 3855 - protein, 11 aa, Artificial Sequence
  Quasi-synthetic sequence derived from human genome
KRLAVLRLFWV

SEQ ID NO: 3856 - protein, 11 aa, Artificial Sequence
  Quasi-synthetic sequence derived from human genome
FFFFKLLIKVF

SEQ ID NO: 3857 - protein, 11 aa, Artificial Sequence
  Quasi-synthetic sequence derived from human genome
PKYRFWKKRII

SEQ ID NO: 3858 - protein, 11 aa, Artificial Sequence
  Quasi-synthetic sequence derived from human genome
RFGYRIKWRII

SEQ ID NO: 3859 - protein, 11 aa, Artificial Sequence
  Quasi-synthetic sequence derived from human genome
CRFFHFRRLIF

SEQ ID NO: 3860 - protein, 11 aa, Artificial Sequence
  Quasi-synthetic sequence derived from human genome
FLRRLVGKLFI

SEQ ID NO: 3861 - protein, 11 aa, Artificial Sequence
  Quasi-synthetic sequence derived from human genome
LRLVINRLKLL

SEQ ID NO: 3862 - protein, 11 aa, Artificial Sequence
  Quasi-synthetic sequence derived from human genome
RFLRKVLSILL

SEQ ID NO: 3863 - protein, 11 aa, Artificial Sequence
  Quasi-synthetic sequence derived from human genome
FLIRKRIHLRP

SEQ ID NO: 3864 - protein, 11 aa, Artificial Sequence
  Quasi-synthetic sequence derived from human genome
FLIRKRIHLRA

SEQ ID NO: 3865 - protein, 11 aa, Artificial Sequence
  Quasi-synthetic sequence derived from human genome
KRLVARVFLIK

SEQ ID NO: 3866 - protein, 11 aa, Artificial Sequence
  Quasi-synthetic sequence derived from human genome
FLRKLVKARVI

SEQ ID NO: 3867 - protein, 11 aa, Artificial Sequence
  Quasi-synthetic sequence derived from human genome
LLIRKRIHLRP

SEQ ID NO: 3868 - protein, 11 aa, Artificial Sequence
  Quasi-synthetic sequence derived from human genome
RKKLVRALFIV

SEQ ID NO: 3869 - protein, 11 aa, Artificial Sequence
  Quasi-synthetic sequence derived from human genome
RKRLAKIVLVF

SEQ ID NO: 3870 - protein, 11 aa, Artificial Sequence
  Quasi-synthetic sequence derived from human genome
VKKALKKILWK

SEQ ID NO: 3871 - protein, 11 aa, Artificial Sequence
  Quasi-synthetic sequence derived from human genome
FRMNFRRRRRL

SEQ ID NO: 3872 - protein, 11 aa, Artificial Sequence
  Quasi-synthetic sequence derived from human genome
VYFYLFKLLRK

SEQ ID NO: 3873 - protein, 11 aa, Artificial Sequence
  Quasi-synthetic sequence derived from human genome
IIRRLWNIFVR

SEQ ID NO: 3874 - protein, 11 aa, Artificial Sequence
  Quasi-synthetic sequence derived from human genome
IIVLYMLRFKK

SEQ ID NO: 3875 - protein, 11 aa, Artificial Sequence
  Quasi-synthetic sequence derived from human genome
FIRRKMLLWAM

SEQ ID NO: 3876 - protein, 11 aa, Artificial Sequence
  Quasi-synthetic sequence derived from human genome
RRYVRKFVLMR

SEQ ID NO: 3877 - protein, 11 aa, Artificial Sequence
  Quasi-synthetic sequence derived from human genome
LMIRRLRGVRL

SEQ ID NO: 3878 - protein, 11 aa, Artificial Sequence
  Quasi-synthetic sequence derived from human genome
LVRGWLVRKRF

SEQ ID NO: 3879 - protein, 11 aa, Artificial Sequence
  Quasi-synthetic sequence derived from human genome
RRFRSVKLWFV

SEQ ID NO: 3880 - protein, 11 aa, Artificial Sequence
  Quasi-synthetic sequence derived from human genome
VRLRRWKLQVL

SEQ ID NO: 3881 - protein, 11 aa, Artificial Sequence
  Quasi-synthetic sequence derived from human genome
FKKILKLKNIK

SEQ ID NO: 3882 - protein, 11 aa, Artificial Sequence
  Quasi-synthetic sequence derived from human genome
MLLFKPLVLRR

SEQ ID NO: 3883 - protein, 11 aa, Artificial Sequence
  Quasi-synthetic sequence derived from human genome
VWLIKLLTRLK

SEQ ID NO: 3884 - protein, 11 aa, Artificial Sequence
  Quasi-synthetic sequence derived from human genome
LLRARKFALLW

SEQ ID NO: 3885 - protein, 11 aa, Artificial Sequence
  Quasi-synthetic sequence derived from human genome
RQILRLLRLRC

SEQ ID NO: 3886 - protein, 11 aa, Artificial Sequence
  Quasi-synthetic sequence derived from human genome
LFWILWRLWPR

SEQ ID NO: 3887 - protein, 11 aa, Artificial Sequence
  Quasi-synthetic sequence derived from human genome
FFVWIKLFKFI

SEQ ID NO: 3888 - protein, 11 aa, Artificial Sequence
  Quasi-synthetic sequence derived from human genome
KRYFIHIKKIF

SEQ ID NO: 3889 - protein, 11 aa, Artificial Sequence
  Quasi-synthetic sequence derived from human genome
KLFQFLKLRKY

SEQ ID NO: 3890 - protein, 11 aa, Artificial Sequence
  Quasi-synthetic sequence derived from human genome
KKYFFLLNLKR

SEQ ID NO: 3891 - protein, 11 aa, Artificial Sequence
  Quasi-synthetic sequence derived from human genome
KKFKRYFLQLL

SEQ ID NO: 3892 - protein, 11 aa, Artificial Sequence
  Quasi-synthetic sequence derived from human genome
LRKLQKRKVLL

SEQ ID NO: 3893 - protein, 11 aa, Artificial Sequence
  Quasi-synthetic sequence derived from human genome
FRRLKKLCRPL

SEQ ID NO: 3894 - protein, 11 aa, Artificial Sequence
  Quasi-synthetic sequence derived from human genome
LYLLIGLRLRR

SEQ ID NO: 3895 - protein, 11 aa, Artificial Sequence
  Quasi-synthetic sequence derived from human genome
VKRPKLLIFII

SEQ ID NO: 3896 - protein, 11 aa, Artificial Sequence
  Quasi-synthetic sequence derived from human genome
RRNLLRLYFIL

SEQ ID NO: 3897 - protein, 11 aa, Artificial Sequence
  Quasi-synthetic sequence derived from human genome
LVIKHFLRKII

SEQ ID NO: 3898 - protein, 11 aa, Artificial Sequence
  Quasi-synthetic sequence derived from human genome
LLSRLKLFLVK

SEQ ID NO: 3899 - protein, 11 aa, Artificial Sequence
  Quasi-synthetic sequence derived from human genome
VFKKLLRLFSL

SEQ ID NO: 3900 - protein, 11 aa, Artificial Sequence
  Quasi-synthetic sequence derived from human genome
LFFWLVLRRLV

SEQ ID NO: 3901 - protein, 11 aa, Artificial Sequence
  Quasi-synthetic sequence derived from human genome
FRRTFKRKFKI

SEQ ID NO: 3902 - protein, 11 aa, Artificial Sequence
  Quasi-synthetic sequence derived from human genome
LLGKKKMRILI

SEQ ID NO: 3903 - protein, 11 aa, Artificial Sequence
  Quasi-synthetic sequence derived from human genome
RARRLMRPLWL

SEQ ID NO: 3904 - protein, 11 aa, Artificial Sequence
  Quasi-synthetic sequence derived from human genome
RRLVKRLYIPL

SEQ ID NO: 3905 - protein, 11 aa, Artificial Sequence
  Quasi-synthetic sequence derived from human genome
ILLMIGILRRR

SEQ ID NO: 3906 - protein, 11 aa, Artificial Sequence
  Quasi-synthetic sequence derived from human genome
RLRPIILRRAR

SEQ ID NO: 3907 - protein, 11 aa, Artificial Sequence
  Quasi-synthetic sequence derived from human genome
RIFRAARFRIR

SEQ ID NO: 3908 - protein, 11 aa, Artificial Sequence
  Quasi-synthetic sequence derived from human genome
KRLGKRWKLLK

SEQ ID NO: 3909 - protein, 11 aa, Artificial Sequence
  Quasi-synthetic sequence derived from human genome
ILLFRRPLPKK

SEQ ID NO: 3910 - protein, 11 aa, Artificial Sequence
  Quasi-synthetic sequence derived from human genome
KFVALLKRFKV

SEQ ID NO: 3911 - protein, 11 aa, Artificial Sequence
  Quasi-synthetic sequence derived from human genome
LKLFRAARLIK

SEQ ID NO: 3912 - protein, 11 aa, Artificial Sequence
  Quasi-synthetic sequence derived from human genome
VLRVLRALRIL

SEQ ID NO: 3913 - protein, 11 aa, Artificial Sequence
  Quasi-synthetic sequence derived from human genome
RRFKWVIIGLL

SEQ ID NO: 3914 - protein, 11 aa, Artificial Sequence
  Quasi-synthetic sequence derived from human genome
LKKHRWYKKIL

SEQ ID NO: 3915 - protein, 11 aa, Artificial Sequence
  Quasi-synthetic sequence derived from human genome
RLRTLWLKICR

SEQ ID NO: 3916 - protein, 11 aa, Artificial Sequence
  Quasi-synthetic sequence derived from human genome
LRLCCKKLKIF

SEQ ID NO: 3917 - protein, 11 aa, Artificial Sequence
  Quasi-synthetic sequence derived from human genome
HLKLFLSRRRW

SEQ ID NO: 3918 - protein, 11 aa, Artificial Sequence
  Quasi-synthetic sequence derived from human genome
LWRRFNRPLLK

SEQ ID NO: 3919 - protein, 11 aa, Artificial Sequence
  Quasi-synthetic sequence derived from human genome
KFWPRRRFNFF

SEQ ID NO: 3920 - protein, 11 aa, Artificial Sequence
  Quasi-synthetic sequence derived from human genome
LLLTLFIRKMK

SEQ ID NO: 3921 - protein, 11 aa, Artificial Sequence
  Quasi-synthetic sequence derived from human genome
KLWKLLFLMKS

SEQ ID NO: 3922 - protein, 11 aa, Artificial Sequence
  Quasi-synthetic sequence derived from human genome
LIFMKKRTKRL

SEQ ID NO: 3923 - protein, 11 aa, Artificial Sequence
  Quasi-synthetic sequence derived from human genome
KWLKMFKKRQL

SEQ ID NO: 3924 - protein, 11 aa, Artificial Sequence
  Quasi-synthetic sequence derived from human genome
LALWLRLFLRF

SEQ ID NO: 3925 - protein, 11 aa, Artificial Sequence
  Quasi-synthetic sequence derived from human genome
RLLWLLRLLFP

SEQ ID NO: 3926 - protein, 11 aa, Artificial Sequence
  Quasi-synthetic sequence derived from human genome
RLMFRIAMRIL

SEQ ID NO: 3927 - protein, 11 aa, Artificial Sequence
  Quasi-synthetic sequence derived from human genome
IRRIFAFICRK

SEQ ID NO: 3928 - protein, 11 aa, Artificial Sequence
  Quasi-synthetic sequence derived from human genome
WLLVRMKIRPF

SEQ ID NO: 3929 - protein, 11 aa, Artificial Sequence
  Quasi-synthetic sequence derived from human genome
CLIRIWKLYIK

SEQ ID NO: 3930 - protein, 11 aa, Artificial Sequence
  Quasi-synthetic sequence derived from human genome
LIIRRKPLFYI

SEQ ID NO: 3931 - protein, 11 aa, Artificial Sequence
  Quasi-synthetic sequence derived from human genome
WKIKLRRAMYL

SEQ ID NO: 3932 - protein, 11 aa, Artificial Sequence
  Quasi-synthetic sequence derived from human genome
PLYKKIIKKLL

SEQ ID NO: 3933 - protein, 11 aa, Artificial Sequence
  Quasi-synthetic sequence derived from human genome
LCLRLLLFFRF

SEQ ID NO: 3934 - protein, 11 aa, Artificial Sequence
  Quasi-synthetic sequence derived from human genome
LPIIKKKVRKL

SEQ ID NO: 3935 - protein, 11 aa, Artificial Sequence
  Quasi-synthetic sequence derived from human genome
IVKKILAKLKR

SEQ ID NO: 3936 - protein, 11 aa, Artificial Sequence
  Quasi-synthetic sequence derived from human genome
RLKMILRLLQI

SEQ ID NO: 3937 - protein, 11 aa, Artificial Sequence
  Quasi-synthetic sequence derived from human genome
RKVLKLLYRAF

SEQ ID NO: 3938 - protein, 11 aa, Artificial Sequence
  Quasi-synthetic sequence derived from human genome
RKKYLRHVFLF

SEQ ID NO: 3939 - protein, 11 aa, Artificial Sequence
  Quasi-synthetic sequence derived from human genome
KVRYKRALLLL

SEQ ID NO: 3940 - protein, 11 aa, Artificial Sequence
  Quasi-synthetic sequence derived from human genome
RPKPLLLKLLK

SEQ ID NO: 3941 - protein, 11 aa, Artificial Sequence
  Quasi-synthetic sequence derived from human genome
LAKKLLAKLRF

SEQ ID NO: 3942 - protein, 11 aa, Artificial Sequence
  Quasi-synthetic sequence derived from human genome
LLKALFKALKR

SEQ ID NO: 3943 - protein, 11 aa, Artificial Sequence
  Quasi-synthetic sequence derived from human genome
LLLLLAKRKHK

SEQ ID NO: 3944 - protein, 11 aa, Artificial Sequence
  Quasi-synthetic sequence derived from human genome
KIRRVLWLVVV

SEQ ID NO: 3945 - protein, 11 aa, Artificial Sequence
  Quasi-synthetic sequence derived from human genome
MISFIFRKRRK

SEQ ID NO: 3946 - protein, 11 aa, Artificial Sequence
  Quasi-synthetic sequence derived from human genome
RLYVRRRRPIL

SEQ ID NO: 3947 - protein, 11 aa, Artificial Sequence
  Quasi-synthetic sequence derived from human genome
IIMRFRKRKNF

SEQ ID NO: 3948 - protein, 11 aa, Artificial Sequence
  Quasi-synthetic sequence derived from human genome
KNWKVRKFILR

SEQ ID NO: 3949 - protein, 11 aa, Artificial Sequence
  Quasi-synthetic sequence derived from human genome
LRRVKAFVKRL

SEQ ID NO: 3950 - protein, 11 aa, Artificial Sequence
  Quasi-synthetic sequence derived from human genome
VVRLAKLLRKR

SEQ ID NO: 3951 - protein, 11 aa, Artificial Sequence
  Quasi-synthetic sequence derived from human genome
PFFPRILRRRK

SEQ ID NO: 3952 - protein, 11 aa, Artificial Sequence
  Quasi-synthetic sequence derived from human genome
FRRLLKLPRTL

SEQ ID NO: 3953 - protein, 11 aa, Artificial Sequence
  Quasi-synthetic sequence derived from human genome
LFRKLTHRLFR

SEQ ID NO: 3954 - protein, 11 aa, Artificial Sequence
  Quasi-synthetic sequence derived from human genome
LRFRLLKHTRL

SEQ ID NO: 3955 - protein, 11 aa, Artificial Sequence
  Quasi-synthetic sequence derived from human genome
KKWMLTLLRII

SEQ ID NO: 3956 - protein, 11 aa, Artificial Sequence
  Quasi-synthetic sequence derived from human genome
RYKIIKLLLLH

SEQ ID NO: 3957 - protein, 11 aa, Artificial Sequence
  Quasi-synthetic sequence derived from human genome
LRRSLVRRRML

SEQ ID NO: 3958 - protein, 11 aa, Artificial Sequence
  Quasi-synthetic sequence derived from human genome
YLKIVICLRRR

SEQ ID NO: 3959 - protein, 11 aa, Artificial Sequence
  Quasi-synthetic sequence derived from human genome
MRVVRLLRLRA

SEQ ID NO: 3960 - protein, 11 aa, Artificial Sequence
  Quasi-synthetic sequence derived from human genome
MRIFRPWRLRC

SEQ ID NO: 3961 - protein, 11 aa, Artificial Sequence
  Quasi-synthetic sequence derived from human genome
LLRRAGRLRWR

SEQ ID NO: 3962 - protein, 11 aa, Artificial Sequence
  Quasi-synthetic sequence derived from human genome
RPGLRLLWRRR

SEQ ID NO: 3963 - protein, 11 aa, Artificial Sequence
  Quasi-synthetic sequence derived from human genome
LRRLWSLPRRR

SEQ ID NO: 3964 - protein, 11 aa, Artificial Sequence
  Quasi-synthetic sequence derived from human genome
RLRRSFLAWRR

SEQ ID NO: 3965 - protein, 11 aa, Artificial Sequence
  Quasi-synthetic sequence derived from human genome
LFLLFFVLRVR

SEQ ID NO: 3966 - protein, 11 aa, Artificial Sequence
  Quasi-synthetic sequence derived from human genome
RVQLLKKFIKI

SEQ ID NO: 3967 - protein, 11 aa, Artificial Sequence
  Quasi-synthetic sequence derived from human genome
RLRRVLRALAW

SEQ ID NO: 3968 - protein, 11 aa, Artificial Sequence
  Quasi-synthetic sequence derived from human genome
GLRAWKRIFWR

SEQ ID NO: 3969 - protein, 11 aa, Artificial Sequence
  Quasi-synthetic sequence derived from human genome
LIFKVKKRSIL

SEQ ID NO: 3970 - protein, 11 aa, Artificial Sequence
  Quasi-synthetic sequence derived from human genome
LRRVLLRLYHL

SEQ ID NO: 3971 - protein, 11 aa, Artificial Sequence
  Quasi-synthetic sequence derived from human genome
LIKKFQFLMFR

SEQ ID NO: 3972 - protein, 11 aa, Artificial Sequence
  Quasi-synthetic sequence derived from human genome
FTVKLRLLIKL

SEQ ID NO: 3973 - protein, 11 aa, Artificial Sequence
  Quasi-synthetic sequence derived from human genome
WRKRCLYFFVL

SEQ ID NO: 3974 - protein, 11 aa, Artificial Sequence
  Quasi-synthetic sequence derived from human genome
RILVKLLTLKF

SEQ ID NO: 3975 - protein, 11 aa, Artificial Sequence
  Quasi-synthetic sequence derived from human genome
WRKRCLYLFVL

SEQ ID NO: 3976 - protein, 11 aa, Artificial Sequence
  Quasi-synthetic sequence derived from human genome
KRLKKKKIFCI

SEQ ID NO: 3977 - protein, 11 aa, Artificial Sequence
  Quasi-synthetic sequence derived from human genome
FKLLLHRPFFR

SEQ ID NO: 3978 - protein, 11 aa, Artificial Sequence
  Quasi-synthetic sequence derived from human genome
RPRKAFLLLLL

SEQ ID NO: 3979 - protein, 11 aa, Artificial Sequence
  Quasi-synthetic sequence derived from human genome
IRRYILKFCII

SEQ ID NO: 3980 - protein, 11 aa, Artificial Sequence
  Quasi-synthetic sequence derived from human genome
RGVRKVFLRLL

SEQ ID NO: 3981 - protein, 11 aa, Artificial Sequence
  Quasi-synthetic sequence derived from human genome
VRKLLVQLRRL

SEQ ID NO: 3982 - protein, 11 aa, Artificial Sequence
  Quasi-synthetic sequence derived from human genome
VRLRLLCALRR

SEQ ID NO: 3983 - protein, 11 aa, Artificial Sequence
  Quasi-synthetic sequence derived from human genome
VRVLLRFQRKL

SEQ ID NO: 3984 - protein, 11 aa, Artificial Sequence
  Quasi-synthetic sequence derived from human genome
VRKVLQLLRLR

SEQ ID NO: 3985 - protein, 11 aa, Artificial Sequence
  Quasi-synthetic sequence derived from human genome
LKVVRLLRLGR

SEQ ID NO: 3986 - protein, 11 aa, Artificial Sequence
  Quasi-synthetic sequence derived from human genome
FRRRLRLLRSC

SEQ ID NO: 3987 - protein, 11 aa, Artificial Sequence
  Quasi-synthetic sequence derived from human genome
KRKWVLAMKRL

SEQ ID NO: 3988 - protein, 11 aa, Artificial Sequence
  Quasi-synthetic sequence derived from human genome
RFHLKKKMRVW

SEQ ID NO: 3989 - protein, 11 aa, Artificial Sequence
  Quasi-synthetic sequence derived from human genome
RLLILILKLFY

SEQ ID NO: 3990 - protein, 11 aa, Artificial Sequence
  Quasi-synthetic sequence derived from human genome
LKKLIVKKFHK

SEQ ID NO: 3991 - protein, 11 aa, Artificial Sequence
  Quasi-synthetic sequence derived from human genome
MWGRRRKLRRL

SEQ ID NO: 3992 - protein, 11 aa, Artificial Sequence
  Quasi-synthetic sequence derived from human genome
RIRVIKKKKVI

SEQ ID NO: 3993 - protein, 11 aa, Artificial Sequence
  Quasi-synthetic sequence derived from human genome
FRRKLFKRVKC

SEQ ID NO: 3994 - protein, 11 aa, Artificial Sequence
  Quasi-synthetic sequence derived from human genome
IIILKIVHRRI

SEQ ID NO: 3995 - protein, 11 aa, Artificial Sequence
  Quasi-synthetic sequence derived from human genome
YRIMKRHLRLI

SEQ ID NO: 3996 - protein, 11 aa, Artificial Sequence
  Quasi-synthetic sequence derived from human genome
RELRRLRRLLW

SEQ ID NO: 3997 - protein, 11 aa, Artificial Sequence
  Quasi-synthetic sequence derived from human genome
LFFFLRLHRLL

SEQ ID NO: 3998 - protein, 11 aa, Artificial Sequence
  Quasi-synthetic sequence derived from human genome
FLLLFLLLRHR

SEQ ID NO: 3999 - protein, 11 aa, Artificial Sequence
  Quasi-synthetic sequence derived from human genome
LRPRLLLLLLL

SEQ ID NO: 4000 - protein, 11 aa, Artificial Sequence
  Quasi-synthetic sequence derived from human genome
RLLPRLLLLLL

SEQ ID NO: 4001 - protein, 12 aa, Artificial Sequence
  Quasi-synthetic sequence derived from human genome
RLLWVFRRRWRL

SEQ ID NO: 4002 - protein, 12 aa, Artificial Sequence
  Quasi-synthetic sequence derived from human genome
LIKKLRLFFRKF

SEQ ID NO: 4003 - protein, 12 aa, Artificial Sequence
  Quasi-synthetic sequence derived from human genome
FMKLRWFLKRWR

SEQ ID NO: 4004 - protein, 12 aa, Artificial Sequence
  Quasi-synthetic sequence derived from human genome
VKLLRRRFRLLL

SEQ ID NO: 4005 - protein, 12 aa, Artificial Sequence
  Quasi-synthetic sequence derived from human genome
RRYLRRLLLLLL

SEQ ID NO: 4006 - protein, 12 aa, Artificial Sequence
  Quasi-synthetic sequence derived from human genome
WMRRMRILRRLL

SEQ ID NO: 4007 - protein, 12 aa, Artificial Sequence
  Quasi-synthetic sequence derived from human genome
LLRLFRMLRIFK

SEQ ID NO: 4008 - protein, 12 aa, Artificial Sequence
  Quasi-synthetic sequence derived from human genome
LMRRLVRRLRRW

SEQ ID NO: 4009 - protein, 12 aa, Artificial Sequence
  Quasi-synthetic sequence derived from human genome
IWVFRLKRRKRI

SEQ ID NO: 4010 - protein, 12 aa, Artificial Sequence
  Quasi-synthetic sequence derived from human genome
LRLMRIFRILKL

SEQ ID NO: 4011 - protein, 12 aa, Artificial Sequence
  Quasi-synthetic sequence derived from human genome
FLWLRWRILRLF

SEQ ID NO: 4012 - protein, 12 aa, Artificial Sequence
  Quasi-synthetic sequence derived from human genome
FKILWKKLKKWM

SEQ ID NO: 4013 - protein, 12 aa, Artificial Sequence
  Quasi-synthetic sequence derived from human genome
LWKLWRVKKFLI

SEQ ID NO: 4014 - protein, 12 aa, Artificial Sequence
  Quasi-synthetic sequence derived from human genome
MRKKLILFFKRR

SEQ ID NO: 4015 - protein, 12 aa, Artificial Sequence
  Quasi-synthetic sequence derived from human genome
FRIMRILRILKL

SEQ ID NO: 4016 - protein, 12 aa, Artificial Sequence
  Quasi-synthetic sequence derived from human genome
KLRLFAWRKRWF

SEQ ID NO: 4017 - protein, 12 aa, Artificial Sequence
  Quasi-synthetic sequence derived from human genome
LCLLLLWWRRRK

SEQ ID NO: 4018 - protein, 12 aa, Artificial Sequence
  Quasi-synthetic sequence derived from human genome
LIKKLIIFILKK

SEQ ID NO: 4019 - protein, 12 aa, Artificial Sequence
  Quasi-synthetic sequence derived from human genome
FWRFKLFLLRIL

SEQ ID NO: 4020 - protein, 12 aa, Artificial Sequence
  Quasi-synthetic sequence derived from human genome
WKRWKKRFFVLV

SEQ ID NO: 4021 - protein, 12 aa, Artificial Sequence
  Quasi-synthetic sequence derived from human genome
LLRLLRLIILLR

SEQ ID NO: 4022 - protein, 12 aa, Artificial Sequence
  Quasi-synthetic sequence derived from human genome
CLRLLLFFRFKR

SEQ ID NO: 4023 - protein, 12 aa, Artificial Sequence
  Quasi-synthetic sequence derived from human genome
LLLLVRKKRKIK

SEQ ID NO: 4024 - protein, 12 aa, Artificial Sequence
  Quasi-synthetic sequence derived from human genome
FRLLRVLKLVRF

SEQ ID NO: 4025 - protein, 12 aa, Artificial Sequence
  Quasi-synthetic sequence derived from human genome
ILKRKWWKYILL

SEQ ID NO: 4026 - protein, 12 aa, Artificial Sequence
  Quasi-synthetic sequence derived from human genome
FLRRRKRFKVLR

SEQ ID NO: 4027 - protein, 12 aa, Artificial Sequence
  Quasi-synthetic sequence derived from human genome
KKIMFFLLIIRK

SEQ ID NO: 4028 - protein, 12 aa, Artificial Sequence
  Quasi-synthetic sequence derived from human genome
RLFRVMRLIKLL

SEQ ID NO: 4029 - protein, 12 aa, Artificial Sequence
  Quasi-synthetic sequence derived from human genome
FRLMRIFRVLKL

SEQ ID NO: 4030 - protein, 12 aa, Artificial Sequence
  Quasi-synthetic sequence derived from human genome
RLLWRRLKPLIL

SEQ ID NO: 4031 - protein, 12 aa, Artificial Sequence
  Quasi-synthetic sequence derived from human genome
LRLVRWLLKKVF

SEQ ID NO: 4032 - protein, 12 aa, Artificial Sequence
  Quasi-synthetic sequence derived from human genome
RKKLIRKMKLIL

SEQ ID NO: 4033 - protein, 12 aa, Artificial Sequence
  Quasi-synthetic sequence derived from human genome
LLKRKHRFILLR

SEQ ID NO: 4034 - protein, 12 aa, Artificial Sequence
  Quasi-synthetic sequence derived from human genome
RRILFIKRFIIY

SEQ ID NO: 4035 - protein, 12 aa, Artificial Sequence
  Quasi-synthetic sequence derived from human genome
RLLRLIILIRIF

SEQ ID NO: 4036 - protein, 12 aa, Artificial Sequence
  Quasi-synthetic sequence derived from human genome
MVWRRLLRKRWV

SEQ ID NO: 4037 - protein, 12 aa, Artificial Sequence
  Quasi-synthetic sequence derived from human genome
MRLMRIFRILKL

SEQ ID NO: 4038 - protein, 12 aa, Artificial Sequence
  Quasi-synthetic sequence derived from human genome
ILLLIFLRKRIL

SEQ ID NO: 4039 - protein, 12 aa, Artificial Sequence
  Quasi-synthetic sequence derived from human genome
KLLKLFYIKKLK

SEQ ID NO: 4040 - protein, 12 aa, Artificial Sequence
  Quasi-synthetic sequence derived from human genome
RFFRFLLRKLYV

SEQ ID NO: 4041 - protein, 12 aa, Artificial Sequence
  Quasi-synthetic sequence derived from human genome
LRRRLLLLLLVL

SEQ ID NO: 4042 - protein, 12 aa, Artificial Sequence
  Quasi-synthetic sequence derived from human genome
KKRLFFPRFFFL

SEQ ID NO: 4043 - protein, 12 aa, Artificial Sequence
  Quasi-synthetic sequence derived from human genome
KLRRLLKYMFIR

SEQ ID NO: 4044 - protein, 12 aa, Artificial Sequence
  Quasi-synthetic sequence derived from human genome
ILRIIRLVRVFR

SEQ ID NO: 4045 - protein, 12 aa, Artificial Sequence
  Quasi-synthetic sequence derived from human genome
ILRRRWWKYMIL

SEQ ID NO: 4046 - protein, 12 aa, Artificial Sequence
  Quasi-synthetic sequence derived from human genome
LILWKFALLRKR

SEQ ID NO: 4047 - protein, 12 aa, Artificial Sequence
  Quasi-synthetic sequence derived from human genome
LIIMLRIWRVKR

SEQ ID NO: 4048 - protein, 12 aa, Artificial Sequence
  Quasi-synthetic sequence derived from human genome
KFIVWRRFKWVI

SEQ ID NO: 4049 - protein, 12 aa, Artificial Sequence
  Quasi-synthetic sequence derived from human genome
LLLRKILLRKFC

SEQ ID NO: 4050 - protein, 12 aa, Artificial Sequence
  Quasi-synthetic sequence derived from human genome
VRFVRILRIFKL

SEQ ID NO: 4051 - protein, 12 aa, Artificial Sequence
  Quasi-synthetic sequence derived from human genome
IRLVRVFRIFKL

SEQ ID NO: 4052 - protein, 12 aa, Artificial Sequence
  Quasi-synthetic sequence derived from human genome
RFWLLKLLFRVF

SEQ ID NO: 4053 - protein, 12 aa, Artificial Sequence
  Quasi-synthetic sequence derived from human genome
FLRRRKRFKVLK

SEQ ID NO: 4054 - protein, 12 aa, Artificial Sequence
  Quasi-synthetic sequence derived from human genome
KKILHLLFLKRR

SEQ ID NO: 4055 - protein, 12 aa, Artificial Sequence
  Quasi-synthetic sequence derived from human genome
LRALRLLRIFKI

SEQ ID NO: 4056 - protein, 12 aa, Artificial Sequence
  Quasi-synthetic sequence derived from human genome
RLSRLIFLLRRW

SEQ ID NO: 4057 - protein, 12 aa, Artificial Sequence
  Quasi-synthetic sequence derived from human genome
ILLKKYLMKRRW

SEQ ID NO: 4058 - protein, 12 aa, Artificial Sequence
  Quasi-synthetic sequence derived from human genome
FKIARKLLFLFR

SEQ ID NO: 4059 - protein, 12 aa, Artificial Sequence
  Quasi-synthetic sequence derived from human genome
PRRRRRRRLLFW

SEQ ID NO: 4060 - protein, 12 aa, Artificial Sequence
  Quasi-synthetic sequence derived from human genome
KRRILLLIPKWL

SEQ ID NO: 4061 - protein, 12 aa, Artificial Sequence
  Quasi-synthetic sequence derived from human genome
FRLARRRKKILF

SEQ ID NO: 4062 - protein, 12 aa, Artificial Sequence
  Quasi-synthetic sequence derived from human genome
LVLLLCRLRRLR

SEQ ID NO: 4063 - protein, 12 aa, Artificial Sequence
  Quasi-synthetic sequence derived from human genome
LLLLWRRRQKRR

SEQ ID NO: 4064 - protein, 12 aa, Artificial Sequence
  Quasi-synthetic sequence derived from human genome
VFKRKLKMWLKR

SEQ ID NO: 4065 - protein, 12 aa, Artificial Sequence
  Quasi-synthetic sequence derived from human genome
LAFILLRVRRRR

SEQ ID NO: 4066 - protein, 12 aa, Artificial Sequence
  Quasi-synthetic sequence derived from human genome
LVLIFVLRKRIK

SEQ ID NO: 4067 - protein, 12 aa, Artificial Sequence
  Quasi-synthetic sequence derived from human genome
RLLRLLRLLQKL

SEQ ID NO: 4068 - protein, 12 aa, Artificial Sequence
  Quasi-synthetic sequence derived from human genome
KFLRFRRSLLLL

SEQ ID NO: 4069 - protein, 12 aa, Artificial Sequence
  Quasi-synthetic sequence derived from human genome
RWKRWFKFRKRK

SEQ ID NO: 4070 - protein, 12 aa, Artificial Sequence
  Quasi-synthetic sequence derived from human genome
LRRIILLQRWFR

SEQ ID NO: 4071 - protein, 12 aa, Artificial Sequence
  Quasi-synthetic sequence derived from human genome
RFRIYKRKVLIL

SEQ ID NO: 4072 - protein, 12 aa, Artificial Sequence
  Quasi-synthetic sequence derived from human genome
KILLRLRLAILK

SEQ ID NO: 4073 - protein, 12 aa, Artificial Sequence
  Quasi-synthetic sequence derived from human genome
RKRIRYRFRRFI

SEQ ID NO: 4074 - protein, 12 aa, Artificial Sequence
  Quasi-synthetic sequence derived from human genome
WRIRKKYFLMKI

SEQ ID NO: 4075 - protein, 12 aa, Artificial Sequence
  Quasi-synthetic sequence derived from human genome
RRLLRRCRLRLV

SEQ ID NO: 4076 - protein, 12 aa, Artificial Sequence
  Quasi-synthetic sequence derived from human genome
WQRLLLRFKILR

SEQ ID NO: 4077 - protein, 12 aa, Artificial Sequence
  Quasi-synthetic sequence derived from human genome
WIKRRILLLIPK

SEQ ID NO: 4078 - protein, 12 aa, Artificial Sequence
  Quasi-synthetic sequence derived from human genome
LKKLVLRKLRRK

SEQ ID NO: 4079 - protein, 12 aa, Artificial Sequence
  Quasi-synthetic sequence derived from human genome
LKKKLFKRRRVL

SEQ ID NO: 4080 - protein, 12 aa, Artificial Sequence
  Quasi-synthetic sequence derived from human genome
LVRLLRLIILIR

SEQ ID NO: 4081 - protein, 12 aa, Artificial Sequence
  Quasi-synthetic sequence derived from human genome
RYKLRILRMKLR

SEQ ID NO: 4082 - protein, 12 aa, Artificial Sequence
  Quasi-synthetic sequence derived from human genome
FRLFRVMRLVKL

SEQ ID NO: 4083 - protein, 12 aa, Artificial Sequence
  Quasi-synthetic sequence derived from human genome
RLFRVMRLVKLL

SEQ ID NO: 4084 - protein, 12 aa, Artificial Sequence
  Quasi-synthetic sequence derived from human genome
FFRLFRVMRLVK

SEQ ID NO: 4085 - protein, 12 aa, Artificial Sequence
  Quasi-synthetic sequence derived from human genome
LKRKLIRLFGRL

SEQ ID NO: 4086 - protein, 12 aa, Artificial Sequence
  Quasi-synthetic sequence derived from human genome
LRLLRALRMLKL

SEQ ID NO: 4087 - protein, 12 aa, Artificial Sequence
  Quasi-synthetic sequence derived from human genome
FVKRKVIIFLKK

SEQ ID NO: 4088 - protein, 12 aa, Artificial Sequence
  Quasi-synthetic sequence derived from human genome
KKRIKRRALLFL

SEQ ID NO: 4089 - protein, 12 aa, Artificial Sequence
  Quasi-synthetic sequence derived from human genome
FKRKRFLIKLRP

SEQ ID NO: 4090 - protein, 12 aa, Artificial Sequence
  Quasi-synthetic sequence derived from human genome
RRVLLGRLWRRL

SEQ ID NO: 4091 - protein, 12 aa, Artificial Sequence
  Quasi-synthetic sequence derived from human genome
IKWMIKIRKRYL

SEQ ID NO: 4092 - protein, 12 aa, Artificial Sequence
  Quasi-synthetic sequence derived from human genome
LSRFRWRRRLLV

SEQ ID NO: 4093 - protein, 12 aa, Artificial Sequence
  Quasi-synthetic sequence derived from human genome
FILVFWILKRKL

SEQ ID NO: 4094 - protein, 12 aa, Artificial Sequence
  Quasi-synthetic sequence derived from human genome
KMFRFFIRRMVK

SEQ ID NO: 4095 - protein, 12 aa, Artificial Sequence
  Quasi-synthetic sequence derived from human genome
KVLRPFLLRRLK

SEQ ID NO: 4096 - protein, 12 aa, Artificial Sequence
  Quasi-synthetic sequence derived from human genome
RLLWLLRLLFPR

SEQ ID NO: 4097 - protein, 12 aa, Artificial Sequence
  Quasi-synthetic sequence derived from human genome
RLLHYRLLLRRL

SEQ ID NO: 4098 - protein, 12 aa, Artificial Sequence
  Quasi-synthetic sequence derived from human genome
LLWLKRGLKFLK

SEQ ID NO: 4099 - protein, 12 aa, Artificial Sequence
  Quasi-synthetic sequence derived from human genome
RLLRYIVRLVWR

SEQ ID NO: 4100 - protein, 12 aa, Artificial Sequence
  Quasi-synthetic sequence derived from human genome
MLRLKRPILRRI

SEQ ID NO: 4101 - protein, 12 aa, Artificial Sequence
  Quasi-synthetic sequence derived from human genome
ILRVIRLVRVFR

SEQ ID NO: 4102 - protein, 12 aa, Artificial Sequence
  Quasi-synthetic sequence derived from human genome
KRFLLLFTFLKK

SEQ ID NO: 4103 - protein, 12 aa, Artificial Sequence
  Quasi-synthetic sequence derived from human genome
RKRWRTIKLLLR

SEQ ID NO: 4104 - protein, 12 aa, Artificial Sequence
  Quasi-synthetic sequence derived from human genome
LRRLRGLLRVLR

SEQ ID NO: 4105 - protein, 12 aa, Artificial Sequence
  Quasi-synthetic sequence derived from human genome
RLRLRNVFRRFL

SEQ ID NO: 4106 - protein, 12 aa, Artificial Sequence
  Quasi-synthetic sequence derived from human genome
RLRLRLLALLLL

SEQ ID NO: 4107 - protein, 12 aa, Artificial Sequence
  Quasi-synthetic sequence derived from human genome
YIFWKRYRFKLI

SEQ ID NO: 4108 - protein, 12 aa, Artificial Sequence
  Quasi-synthetic sequence derived from human genome
LKIFRRPRKLFM

SEQ ID NO: 4109 - protein, 12 aa, Artificial Sequence
  Quasi-synthetic sequence derived from human genome
RLVFKMRFYRLL

SEQ ID NO: 4110 - protein, 12 aa, Artificial Sequence
  Quasi-synthetic sequence derived from human genome
MRKKLILYFKRR

SEQ ID NO: 4111 - protein, 12 aa, Artificial Sequence
  Quasi-synthetic sequence derived from human genome
WKLLLLRRPLYR

SEQ ID NO: 4112 - protein, 12 aa, Artificial Sequence
  Quasi-synthetic sequence derived from human genome
LSFKRKRFLIKL

SEQ ID NO: 4113 - protein, 12 aa, Artificial Sequence
  Quasi-synthetic sequence derived from human genome
LRALRLLRIFKV

SEQ ID NO: 4114 - protein, 12 aa, Artificial Sequence
  Quasi-synthetic sequence derived from human genome
VLRALRLLRIFK

SEQ ID NO: 4115 - protein, 12 aa, Artificial Sequence
  Quasi-synthetic sequence derived from human genome
RLFRWLVLRLNR

SEQ ID NO: 4116 - protein, 12 aa, Artificial Sequence
  Quasi-synthetic sequence derived from human genome
LWRKLLKAFWWL

SEQ ID NO: 4117 - protein, 12 aa, Artificial Sequence
  Quasi-synthetic sequence derived from human genome
RKILRLITIRKL

SEQ ID NO: 4118 - protein, 12 aa, Artificial Sequence
  Quasi-synthetic sequence derived from human genome
WRLILSKILKKR

SEQ ID NO: 4119 - protein, 12 aa, Artificial Sequence
  Quasi-synthetic sequence derived from human genome
LWRRFRWAIILF

SEQ ID NO: 4120 - protein, 12 aa, Artificial Sequence
  Quasi-synthetic sequence derived from human genome
KKRLLFPRFFFV

SEQ ID NO: 4121 - protein, 12 aa, Artificial Sequence
  Quasi-synthetic sequence derived from human genome
RFNLFLRRRLMF

SEQ ID NO: 4122 - protein, 12 aa, Artificial Sequence
  Quasi-synthetic sequence derived from human genome
RRLLILILKIGR

SEQ ID NO: 4123 - protein, 12 aa, Artificial Sequence
  Quasi-synthetic sequence derived from human genome
KFKRLMLHRIKW

SEQ ID NO: 4124 - protein, 12 aa, Artificial Sequence
  Quasi-synthetic sequence derived from human genome
LITRMWKLLRRR

SEQ ID NO: 4125 - protein, 12 aa, Artificial Sequence
  Quasi-synthetic sequence derived from human genome
LLLLFLILRHRR

SEQ ID NO: 4126 - protein, 12 aa, Artificial Sequence
  Quasi-synthetic sequence derived from human genome
LFVKLRKRHLLK

SEQ ID NO: 4127 - protein, 12 aa, Artificial Sequence
  Quasi-synthetic sequence derived from human genome
FFLWLKKRKQIK

SEQ ID NO: 4128 - protein, 12 aa, Artificial Sequence
  Quasi-synthetic sequence derived from human genome
LMRIFRILKLAR

SEQ ID NO: 4129 - protein, 12 aa, Artificial Sequence
  Quasi-synthetic sequence derived from human genome
AILRLRFLVKKW

SEQ ID NO: 4130 - protein, 12 aa, Artificial Sequence
  Quasi-synthetic sequence derived from human genome
RSKRWLKIIWRR

SEQ ID NO: 4131 - protein, 12 aa, Artificial Sequence
  Quasi-synthetic sequence derived from human genome
RIRFSKLLLKIL

SEQ ID NO: 4132 - protein, 12 aa, Artificial Sequence
  Quasi-synthetic sequence derived from human genome
LILKRLILNFRK

SEQ ID NO: 4133 - protein, 12 aa, Artificial Sequence
  Quasi-synthetic sequence derived from human genome
LLLVLSLRRRLR

SEQ ID NO: 4134 - protein, 12 aa, Artificial Sequence
  Quasi-synthetic sequence derived from human genome
RFRSLLVRRRFI

SEQ ID NO: 4135 - protein, 12 aa, Artificial Sequence
  Quasi-synthetic sequence derived from human genome
WKRRLIRLLLYH

SEQ ID NO: 4136 - protein, 12 aa, Artificial Sequence
  Quasi-synthetic sequence derived from human genome
WKGVRWKRLRLL

SEQ ID NO: 4137 - protein, 12 aa, Artificial Sequence
  Quasi-synthetic sequence derived from human genome
RVKFLLRLLRGR

SEQ ID NO: 4138 - protein, 12 aa, Artificial Sequence
  Quasi-synthetic sequence derived from human genome
RWLGRWRRKRRW

SEQ ID NO: 4139 - protein, 12 aa, Artificial Sequence
  Quasi-synthetic sequence derived from human genome
FLMKVLKKKIKR

SEQ ID NO: 4140 - protein, 12 aa, Artificial Sequence
  Quasi-synthetic sequence derived from human genome
KIYFLLVRIKIK

SEQ ID NO: 4141 - protein, 12 aa, Artificial Sequence
  Quasi-synthetic sequence derived from human genome
RTFFYWRLRRLL

SEQ ID NO: 4142 - protein, 12 aa, Artificial Sequence
  Quasi-synthetic sequence derived from human genome
RTFLYWRLRRLL

SEQ ID NO: 4143 - protein, 12 aa, Artificial Sequence
  Quasi-synthetic sequence derived from human genome
LLRRLPKLRKRM

SEQ ID NO: 4144 - protein, 12 aa, Artificial Sequence
  Quasi-synthetic sequence derived from human genome
IRVWFIKVRKMK

SEQ ID NO: 4145 - protein, 12 aa, Artificial Sequence
  Quasi-synthetic sequence derived from human genome
LFKNLLLKKIKR

SEQ ID NO: 4146 - protein, 12 aa, Artificial Sequence
  Quasi-synthetic sequence derived from human genome
ILFMFRRLRQFR

SEQ ID NO: 4147 - protein, 12 aa, Artificial Sequence
  Quasi-synthetic sequence derived from human genome
RLLCLLRRWLPR

SEQ ID NO: 4148 - protein, 12 aa, Artificial Sequence
  Quasi-synthetic sequence derived from human genome
RIRWVFKRRLGL

SEQ ID NO: 4149 - protein, 12 aa, Artificial Sequence
  Quasi-synthetic sequence derived from human genome
RRFLKLLRFYIA

SEQ ID NO: 4150 - protein, 12 aa, Artificial Sequence
  Quasi-synthetic sequence derived from human genome
LLYLKRLKIIIF

SEQ ID NO: 4151 - protein, 12 aa, Artificial Sequence
  Quasi-synthetic sequence derived from human genome
KAFKLLKKLMRL

SEQ ID NO: 4152 - protein, 12 aa, Artificial Sequence
  Quasi-synthetic sequence derived from human genome
LLKTVRLLRLLR

SEQ ID NO: 4153 - protein, 12 aa, Artificial Sequence
  Quasi-synthetic sequence derived from human genome
LIKLWRRKVILH

SEQ ID NO: 4154 - protein, 12 aa, Artificial Sequence
  Quasi-synthetic sequence derived from human genome
RKKKLRKLLKRL

SEQ ID NO: 4155 - protein, 12 aa, Artificial Sequence
  Quasi-synthetic sequence derived from human genome
RVKTWKRRWFIL

SEQ ID NO: 4156 - protein, 12 aa, Artificial Sequence
  Quasi-synthetic sequence derived from human genome
VRRLIMKRIVKI

SEQ ID NO: 4157 - protein, 12 aa, Artificial Sequence
  Quasi-synthetic sequence derived from human genome
KIRTRLIRKRFL

SEQ ID NO: 4158 - protein, 12 aa, Artificial Sequence
  Quasi-synthetic sequence derived from human genome
RWLWRQRIRLYL

SEQ ID NO: 4159 - protein, 12 aa, Artificial Sequence
  Quasi-synthetic sequence derived from human genome
LRSFRLLRVFKL

SEQ ID NO: 4160 - protein, 12 aa, Artificial Sequence
  Quasi-synthetic sequence derived from human genome
LILLLVYRMRKK

SEQ ID NO: 4161 - protein, 12 aa, Artificial Sequence
  Quasi-synthetic sequence derived from human genome
RKLMRWILILVI

SEQ ID NO: 4162 - protein, 12 aa, Artificial Sequence
  Quasi-synthetic sequence derived from human genome
RYKRALLLLRRR

SEQ ID NO: 4163 - protein, 12 aa, Artificial Sequence
  Quasi-synthetic sequence derived from human genome
FWLQLLLWRLKR

SEQ ID NO: 4164 - protein, 12 aa, Artificial Sequence
  Quasi-synthetic sequence derived from human genome
WYLKPKLWKKLR

SEQ ID NO: 4165 - protein, 12 aa, Artificial Sequence
  Quasi-synthetic sequence derived from human genome
FLLLFLLLRRQR

SEQ ID NO: 4166 - protein, 12 aa, Artificial Sequence
  Quasi-synthetic sequence derived from human genome
VIPFLKRRWRKR

SEQ ID NO: 4167 - protein, 12 aa, Artificial Sequence
  Quasi-synthetic sequence derived from human genome
LRLLLLLGYRRR

SEQ ID NO: 4168 - protein, 12 aa, Artificial Sequence
  Quasi-synthetic sequence derived from human genome
FLFYVKLRWLLK

SEQ ID NO: 4169 - protein, 12 aa, Artificial Sequence
  Quasi-synthetic sequence derived from human genome
FYLRRFFKAKKL

SEQ ID NO: 4170 - protein, 12 aa, Artificial Sequence
  Quasi-synthetic sequence derived from human genome
RFKRKLPKYLLF

SEQ ID NO: 4171 - protein, 12 aa, Artificial Sequence
  Quasi-synthetic sequence derived from human genome
WRKRWFVLRRGR

SEQ ID NO: 4172 - protein, 12 aa, Artificial Sequence
  Quasi-synthetic sequence derived from human genome
MILIKYRRLRIM

SEQ ID NO: 4173 - protein, 12 aa, Artificial Sequence
  Quasi-synthetic sequence derived from human genome
KIFRTLWRVKRL

SEQ ID NO: 4174 - protein, 12 aa, Artificial Sequence
  Quasi-synthetic sequence derived from human genome
FLRRFPRPLLRL

SEQ ID NO: 4175 - protein, 12 aa, Artificial Sequence
  Quasi-synthetic sequence derived from human genome
RRRRPLFALLLL

SEQ ID NO: 4176 - protein, 12 aa, Artificial Sequence
  Quasi-synthetic sequence derived from human genome
LLPLLRRLARRL

SEQ ID NO: 4177 - protein, 12 aa, Artificial Sequence
  Quasi-synthetic sequence derived from human genome
LVLRRILRRAVR

SEQ ID NO: 4178 - protein, 12 aa, Artificial Sequence
  Quasi-synthetic sequence derived from human genome
LVVLWIRWKCRR

SEQ ID NO: 4179 - protein, 12 aa, Artificial Sequence
  Quasi-synthetic sequence derived from human genome
FWKKIVFVIFLR

SEQ ID NO: 4180 - protein, 12 aa, Artificial Sequence
  Quasi-synthetic sequence derived from human genome
VRILRLLRILGR

SEQ ID NO: 4181 - protein, 12 aa, Artificial Sequence
  Quasi-synthetic sequence derived from human genome
FLTVLLLKLRKR

SEQ ID NO: 4182 - protein, 12 aa, Artificial Sequence
  Quasi-synthetic sequence derived from human genome
IRILKFLVAKRK

SEQ ID NO: 4183 - protein, 12 aa, Artificial Sequence
  Quasi-synthetic sequence derived from human genome
FLKRFLRLRYGR

SEQ ID NO: 4184 - protein, 12 aa, Artificial Sequence
  Quasi-synthetic sequence derived from human genome
RLLRKLLSRYRL

SEQ ID NO: 4185 - protein, 12 aa, Artificial Sequence
  Quasi-synthetic sequence derived from human genome
VKILKKKKLRRI

SEQ ID NO: 4186 - protein, 12 aa, Artificial Sequence
  Quasi-synthetic sequence derived from human genome
LFFLMKRKIIVL

SEQ ID NO: 4187 - protein, 12 aa, Artificial Sequence
  Quasi-synthetic sequence derived from human genome
RWRWWQRLLPWR

SEQ ID NO: 4188 - protein, 12 aa, Artificial Sequence
  Quasi-synthetic sequence derived from human genome
VLLVLRLRRWHK

SEQ ID NO: 4189 - protein, 12 aa, Artificial Sequence
  Quasi-synthetic sequence derived from human genome
LILLLMYRMKKK

SEQ ID NO: 4190 - protein, 12 aa, Artificial Sequence
  Quasi-synthetic sequence derived from human genome
FQFFKKRVRRWI

SEQ ID NO: 4191 - protein, 12 aa, Artificial Sequence
  Quasi-synthetic sequence derived from human genome
RLLRLVRVARKL

SEQ ID NO: 4192 - protein, 12 aa, Artificial Sequence
  Quasi-synthetic sequence derived from human genome
WPRIIMRFRKRK

SEQ ID NO: 4193 - protein, 12 aa, Artificial Sequence
  Quasi-synthetic sequence derived from human genome
IFLYLKWRVKKV

SEQ ID NO: 4194 - protein, 12 aa, Artificial Sequence
  Quasi-synthetic sequence derived from human genome
MLFLRFRYIILK

SEQ ID NO: 4195 - protein, 12 aa, Artificial Sequence
  Quasi-synthetic sequence derived from human genome
IIVIFLNRRRRR

SEQ ID NO: 4196 - protein, 12 aa, Artificial Sequence
  Quasi-synthetic sequence derived from human genome
LLIYRRLRKPKI

SEQ ID NO: 4197 - protein, 12 aa, Artificial Sequence
  Quasi-synthetic sequence derived from human genome
LKILKLLISKLK

SEQ ID NO: 4198 - protein, 12 aa, Artificial Sequence
  Quasi-synthetic sequence derived from human genome
LLLALRLRRWHK

SEQ ID NO: 4199 - protein, 12 aa, Artificial Sequence
  Quasi-synthetic sequence derived from human genome
RRKYWFLNRRLI

SEQ ID NO: 4200 - protein, 12 aa, Artificial Sequence
  Quasi-synthetic sequence derived from human genome
FLRLKRKFIQMR

SEQ ID NO: 4201 - protein, 12 aa, Artificial Sequence
  Quasi-synthetic sequence derived from human genome
FFRILRIFKLIA

SEQ ID NO: 4202 - protein, 12 aa, Artificial Sequence
  Quasi-synthetic sequence derived from human genome
LRIIRFLPLFKI

SEQ ID NO: 4203 - protein, 12 aa, Artificial Sequence
  Quasi-synthetic sequence derived from human genome
HRRFLLFRRAFK

SEQ ID NO: 4204 - protein, 12 aa, Artificial Sequence
  Quasi-synthetic sequence derived from human genome
FLLLCLLHKRRR

SEQ ID NO: 4205 - protein, 12 aa, Artificial Sequence
  Quasi-synthetic sequence derived from human genome
KLLLVRKRLLGL

SEQ ID NO: 4206 - protein, 12 aa, Artificial Sequence
  Quasi-synthetic sequence derived from human genome
KFKFVFFLRLSR

SEQ ID NO: 4207 - protein, 12 aa, Artificial Sequence
  Quasi-synthetic sequence derived from human genome
ILRILFWFGRRF

SEQ ID NO: 4208 - protein, 12 aa, Artificial Sequence
  Quasi-synthetic sequence derived from human genome
RARRFFLRCIIW

SEQ ID NO: 4209 - protein, 12 aa, Artificial Sequence
  Quasi-synthetic sequence derived from human genome
ILRVLRVLRPLR

SEQ ID NO: 4210 - protein, 12 aa, Artificial Sequence
  Quasi-synthetic sequence derived from human genome
MKLFFKIKPLLK

SEQ ID NO: 4211 - protein, 12 aa, Artificial Sequence
  Quasi-synthetic sequence derived from human genome
LKRKILIKHKKL

SEQ ID NO: 4212 - protein, 12 aa, Artificial Sequence
  Quasi-synthetic sequence derived from human genome
SFRILKLIVRRR

SEQ ID NO: 4213 - protein, 12 aa, Artificial Sequence
  Quasi-synthetic sequence derived from human genome
LLLTLFIRKMKR

SEQ ID NO: 4214 - protein, 12 aa, Artificial Sequence
  Quasi-synthetic sequence derived from human genome
VIMFLMLLRRFR

SEQ ID NO: 4215 - protein, 12 aa, Artificial Sequence
  Quasi-synthetic sequence derived from human genome
LKYLKFHLKRIR

SEQ ID NO: 4216 - protein, 12 aa, Artificial Sequence
  Quasi-synthetic sequence derived from human genome
FKRIRLRPRYLR

SEQ ID NO: 4217 - protein, 12 aa, Artificial Sequence
  Quasi-synthetic sequence derived from human genome
ILKFFLRALKIL

SEQ ID NO: 4218 - protein, 12 aa, Artificial Sequence
  Quasi-synthetic sequence derived from human genome
LKKWKNRLILKR

SEQ ID NO: 4219 - protein, 12 aa, Artificial Sequence
  Quasi-synthetic sequence derived from human genome
KMMLVRRFRVLI

SEQ ID NO: 4220 - protein, 12 aa, Artificial Sequence
  Quasi-synthetic sequence derived from human genome
RFRTLMMRRRFL

SEQ ID NO: 4221 - protein, 12 aa, Artificial Sequence
  Quasi-synthetic sequence derived from human genome
LISKLKKWIKIL

SEQ ID NO: 4222 - protein, 12 aa, Artificial Sequence
  Quasi-synthetic sequence derived from human genome
KLWFKFQRYFRR

SEQ ID NO: 4223 - protein, 12 aa, Artificial Sequence
  Quasi-synthetic sequence derived from human genome
LVLILKTIRRRL

SEQ ID NO: 4224 - protein, 12 aa, Artificial Sequence
  Quasi-synthetic sequence derived from human genome
IARRALLRFLFR

SEQ ID NO: 4225 - protein, 12 aa, Artificial Sequence
  Quasi-synthetic sequence derived from human genome
KHFRLVLRLVLR

SEQ ID NO: 4226 - protein, 12 aa, Artificial Sequence
  Quasi-synthetic sequence derived from human genome
KMRKFYFRRIMR

SEQ ID NO: 4227 - protein, 12 aa, Artificial Sequence
  Quasi-synthetic sequence derived from human genome
IKIRFFKIMLVL

SEQ ID NO: 4228 - protein, 12 aa, Artificial Sequence
  Quasi-synthetic sequence derived from human genome
YLRPLFRKLRKR

SEQ ID NO: 4229 - protein, 12 aa, Artificial Sequence
  Quasi-synthetic sequence derived from human genome
IMKRLIKRYVLK

SEQ ID NO: 4230 - protein, 12 aa, Artificial Sequence
  Quasi-synthetic sequence derived from human genome
KFIKIMKHLRKL

SEQ ID NO: 4231 - protein, 12 aa, Artificial Sequence
  Quasi-synthetic sequence derived from human genome
AFLLRFLRARKF

SEQ ID NO: 4232 - protein, 12 aa, Artificial Sequence
  Quasi-synthetic sequence derived from human genome
PFLLWLRKCLRK

SEQ ID NO: 4233 - protein, 12 aa, Artificial Sequence
  Quasi-synthetic sequence derived from human genome
VKFLLLFYLKKL

SEQ ID NO: 4234 - protein, 12 aa, Artificial Sequence
  Quasi-synthetic sequence derived from human genome
FLRRLIYRRRPM

SEQ ID NO: 4235 - protein, 12 aa, Artificial Sequence
  Quasi-synthetic sequence derived from human genome
IFRLIWRSVKKW

SEQ ID NO: 4236 - protein, 12 aa, Artificial Sequence
  Quasi-synthetic sequence derived from human genome
IKLTVWKRLFRK

SEQ ID NO: 4237 - protein, 12 aa, Artificial Sequence
  Quasi-synthetic sequence derived from human genome
KKMWIKLRSLLR

SEQ ID NO: 4238 - protein, 12 aa, Artificial Sequence
  Quasi-synthetic sequence derived from human genome
RWLGKLRRKRRW

SEQ ID NO: 4239 - protein, 12 aa, Artificial Sequence
  Quasi-synthetic sequence derived from human genome
RRSRKLILFIVF

SEQ ID NO: 4240 - protein, 12 aa, Artificial Sequence
  Quasi-synthetic sequence derived from human genome
ALLYWRMFRLKR

SEQ ID NO: 4241 - protein, 12 aa, Artificial Sequence
  Quasi-synthetic sequence derived from human genome
FRRKLFKRVKCI

SEQ ID NO: 4242 - protein, 12 aa, Artificial Sequence
  Quasi-synthetic sequence derived from human genome
YRSFRRRLLKFI

SEQ ID NO: 4243 - protein, 12 aa, Artificial Sequence
  Quasi-synthetic sequence derived from human genome
VKCLRLLRRYRL

SEQ ID NO: 4244 - protein, 12 aa, Artificial Sequence
  Quasi-synthetic sequence derived from human genome
KFRRLRQLLRRR

SEQ ID NO: 4245 - protein, 12 aa, Artificial Sequence
  Quasi-synthetic sequence derived from human genome
WKKVLPLLKIIK

SEQ ID NO: 4246 - protein, 12 aa, Artificial Sequence
  Quasi-synthetic sequence derived from human genome
KKIVWLKLLIPK

SEQ ID NO: 4247 - protein, 12 aa, Artificial Sequence
  Quasi-synthetic sequence derived from human genome
RRAVRRLVKILL

SEQ ID NO: 4248 - protein, 12 aa, Artificial Sequence
  Quasi-synthetic sequence derived from human genome
LVRRRKRRFFGL

SEQ ID NO: 4249 - protein, 12 aa, Artificial Sequence
  Quasi-synthetic sequence derived from human genome
KRRLLPMLRLVI

SEQ ID NO: 4250 - protein, 12 aa, Artificial Sequence
  Quasi-synthetic sequence derived from human genome
MVLRPFLLRRIK

SEQ ID NO: 4251 - protein, 12 aa, Artificial Sequence
  Quasi-synthetic sequence derived from human genome
LLKKKILGRVWW

SEQ ID NO: 4252 - protein, 12 aa, Artificial Sequence
  Quasi-synthetic sequence derived from human genome
HIFWRRLRKALL

SEQ ID NO: 4253 - protein, 12 aa, Artificial Sequence
  Quasi-synthetic sequence derived from human genome
ALLWKRLLIARR

SEQ ID NO: 4254 - protein, 12 aa, Artificial Sequence
  Quasi-synthetic sequence derived from human genome
RLWKARVLKLVL

SEQ ID NO: 4255 - protein, 12 aa, Artificial Sequence
  Quasi-synthetic sequence derived from human genome
RLCKLLFFRIRP

SEQ ID NO: 4256 - protein, 12 aa, Artificial Sequence
  Quasi-synthetic sequence derived from human genome
FWWRRLRASLRL

SEQ ID NO: 4257 - protein, 12 aa, Artificial Sequence
  Quasi-synthetic sequence derived from human genome
LRCLRPLRIFKL

SEQ ID NO: 4258 - protein, 12 aa, Artificial Sequence
  Quasi-synthetic sequence derived from human genome
WLRLRKILFCVL

SEQ ID NO: 4259 - protein, 12 aa, Artificial Sequence
  Quasi-synthetic sequence derived from human genome
FWIRLYKIRRGR

SEQ ID NO: 4260 - protein, 12 aa, Artificial Sequence
  Quasi-synthetic sequence derived from human genome
RPLILKRRRLPL

SEQ ID NO: 4261 - protein, 12 aa, Artificial Sequence
  Quasi-synthetic sequence derived from human genome
KRRFRKFLVFVA

SEQ ID NO: 4262 - protein, 12 aa, Artificial Sequence
  Quasi-synthetic sequence derived from human genome
ARRFLLRRKFIP

SEQ ID NO: 4263 - protein, 12 aa, Artificial Sequence
  Quasi-synthetic sequence derived from human genome
KVLRPFLLRRVK

SEQ ID NO: 4264 - protein, 12 aa, Artificial Sequence
  Quasi-synthetic sequence derived from human genome
RLLRIFKITRYW

SEQ ID NO: 4265 - protein, 12 aa, Artificial Sequence
  Quasi-synthetic sequence derived from human genome
LKHRLLVYLWRR

SEQ ID NO: 4266 - protein, 12 aa, Artificial Sequence
  Quasi-synthetic sequence derived from human genome
LRVFRLKLPFMK

SEQ ID NO: 4267 - protein, 12 aa, Artificial Sequence
  Quasi-synthetic sequence derived from human genome
LRKYWVRFLLAR

SEQ ID NO: 4268 - protein, 12 aa, Artificial Sequence
  Quasi-synthetic sequence derived from human genome
RLRFWLLIWLLL

SEQ ID NO: 4269 - protein, 12 aa, Artificial Sequence
  Quasi-synthetic sequence derived from human genome
INILRILMRKLR

SEQ ID NO: 4270 - protein, 12 aa, Artificial Sequence
  Quasi-synthetic sequence derived from human genome
IWWRMLRQVLRR

SEQ ID NO: 4271 - protein, 12 aa, Artificial Sequence
  Quasi-synthetic sequence derived from human genome
KMLLLCRWKKKK

SEQ ID NO: 4272 - protein, 12 aa, Artificial Sequence
  Quasi-synthetic sequence derived from human genome
RVLRIARVLKLL

SEQ ID NO: 4273 - protein, 12 aa, Artificial Sequence
  Quasi-synthetic sequence derived from human genome
KIKTWKKRWFVF

SEQ ID NO: 4274 - protein, 12 aa, Artificial Sequence
  Quasi-synthetic sequence derived from human genome
MRLRVRLLKRTW

SEQ ID NO: 4275 - protein, 12 aa, Artificial Sequence
  Quasi-synthetic sequence derived from human genome
RRKWKRYLLIGL

SEQ ID NO: 4276 - protein, 12 aa, Artificial Sequence
  Quasi-synthetic sequence derived from human genome
IRGWLLRKKYLR

SEQ ID NO: 4277 - protein, 12 aa, Artificial Sequence
  Quasi-synthetic sequence derived from human genome
LLRLLLRLLLFL

SEQ ID NO: 4278 - protein, 12 aa, Artificial Sequence
  Quasi-synthetic sequence derived from human genome
FLLFFLFRLLLR

SEQ ID NO: 4279 - protein, 12 aa, Artificial Sequence
  Quasi-synthetic sequence derived from human genome
LRMMRIFWVIKL

SEQ ID NO: 4280 - protein, 12 aa, Artificial Sequence
  Quasi-synthetic sequence derived from human genome
IFRRIKMPWLWL

SEQ ID NO: 4281 - protein, 12 aa, Artificial Sequence
  Quasi-synthetic sequence derived from human genome
WIARLRHIKRLR

SEQ ID NO: 4282 - protein, 12 aa, Artificial Sequence
  Quasi-synthetic sequence derived from human genome
RHRLLLLLLRYL

SEQ ID NO: 4283 - protein, 12 aa, Artificial Sequence
  Quasi-synthetic sequence derived from human genome
ITRIKLLVRKFL

SEQ ID NO: 4284 - protein, 12 aa, Artificial Sequence
  Quasi-synthetic sequence derived from human genome
MKMRRYKLFLMF

SEQ ID NO: 4285 - protein, 12 aa, Artificial Sequence
  Quasi-synthetic sequence derived from human genome
KLRRLYFIWVCR

SEQ ID NO: 4286 - protein, 12 aa, Artificial Sequence
  Quasi-synthetic sequence derived from human genome
KILRRKRLLPKR

SEQ ID NO: 4287 - protein, 12 aa, Artificial Sequence
  Quasi-synthetic sequence derived from human genome
RLFRAARLIKLL

SEQ ID NO: 4288 - protein, 12 aa, Artificial Sequence
  Quasi-synthetic sequence derived from human genome
LRRWKRNWFALW

SEQ ID NO: 4289 - protein, 12 aa, Artificial Sequence
  Quasi-synthetic sequence derived from human genome
LFRAARLIKLLR

SEQ ID NO: 4290 - protein, 12 aa, Artificial Sequence
  Quasi-synthetic sequence derived from human genome
RLWVLHLKRLIL

SEQ ID NO: 4291 - protein, 12 aa, Artificial Sequence
  Quasi-synthetic sequence derived from human genome
WGVRKLLRWVRR

SEQ ID NO: 4292 - protein, 12 aa, Artificial Sequence
  Quasi-synthetic sequence derived from human genome
KRRVFFRNIKIL

SEQ ID NO: 4293 - protein, 12 aa, Artificial Sequence
  Quasi-synthetic sequence derived from human genome
LIFLRIKRRVKS

SEQ ID NO: 4294 - protein, 12 aa, Artificial Sequence
  Quasi-synthetic sequence derived from human genome
LRRLNKRWRKLV

SEQ ID NO: 4295 - protein, 12 aa, Artificial Sequence
  Quasi-synthetic sequence derived from human genome
RRRRRLALFLAR

SEQ ID NO: 4296 - protein, 12 aa, Artificial Sequence
  Quasi-synthetic sequence derived from human genome
RFAYKFLKKILK

SEQ ID NO: 4297 - protein, 12 aa, Artificial Sequence
  Quasi-synthetic sequence derived from human genome
VLRVLRLLRTLR

SEQ ID NO: 4298 - protein, 12 aa, Artificial Sequence
  Quasi-synthetic sequence derived from human genome
LRALLLWGRRLR

SEQ ID NO: 4299 - protein, 12 aa, Artificial Sequence
  Quasi-synthetic sequence derived from human genome
LKRMKIIKHFIK

SEQ ID NO: 4300 - protein, 12 aa, Artificial Sequence
  Quasi-synthetic sequence derived from human genome
LKYLLLGRWRKK

SEQ ID NO: 4301 - protein, 12 aa, Artificial Sequence
  Quasi-synthetic sequence derived from human genome
RLLLRFLRLCRS

SEQ ID NO: 4302 - protein, 12 aa, Artificial Sequence
  Quasi-synthetic sequence derived from human genome
WLIAVLYRRRRK

SEQ ID NO: 4303 - protein, 12 aa, Artificial Sequence
  Quasi-synthetic sequence derived from human genome
FFRRTIRLKLIY

SEQ ID NO: 4304 - protein, 12 aa, Artificial Sequence
  Quasi-synthetic sequence derived from human genome
RIKLYMRRLLCL

SEQ ID NO: 4305 - protein, 12 aa, Artificial Sequence
  Quasi-synthetic sequence derived from human genome
GLLILLKYRWRK

SEQ ID NO: 4306 - protein, 12 aa, Artificial Sequence
  Quasi-synthetic sequence derived from human genome
KRYLLKRLNLIW

SEQ ID NO: 4307 - protein, 12 aa, Artificial Sequence
  Quasi-synthetic sequence derived from human genome
RLLVKLYRFLAR

SEQ ID NO: 4308 - protein, 12 aa, Artificial Sequence
  Quasi-synthetic sequence derived from human genome
RWLLLKLLLLLL

SEQ ID NO: 4309 - protein, 12 aa, Artificial Sequence
  Quasi-synthetic sequence derived from human genome
LFLRRLRLWMGL

SEQ ID NO: 4310 - protein, 12 aa, Artificial Sequence
  Quasi-synthetic sequence derived from human genome
LKHLCRLKIRRL

SEQ ID NO: 4311 - protein, 12 aa, Artificial Sequence
  Quasi-synthetic sequence derived from human genome
KLLKLRRNIVKL

SEQ ID NO: 4312 - protein, 12 aa, Artificial Sequence
  Quasi-synthetic sequence derived from human genome
IRLLLQRKKKLV

SEQ ID NO: 4313 - protein, 12 aa, Artificial Sequence
  Quasi-synthetic sequence derived from human genome
RRRPLLLSLLRR

SEQ ID NO: 4314 - protein, 12 aa, Artificial Sequence
  Quasi-synthetic sequence derived from human genome
PRRRRLLGLLRF

SEQ ID NO: 4315 - protein, 12 aa, Artificial Sequence
  Quasi-synthetic sequence derived from human genome
LGLICLLRWRRR

SEQ ID NO: 4316 - protein, 12 aa, Artificial Sequence
  Quasi-synthetic sequence derived from human genome
LRVRRGLLVLRL

SEQ ID NO: 4317 - protein, 12 aa, Artificial Sequence
  Quasi-synthetic sequence derived from human genome
RFGRRFILRWCL

SEQ ID NO: 4318 - protein, 12 aa, Artificial Sequence
  Quasi-synthetic sequence derived from human genome
LIYKFKRKIPWI

SEQ ID NO: 4319 - protein, 12 aa, Artificial Sequence
  Quasi-synthetic sequence derived from human genome
YLKRKTLIRLLF

SEQ ID NO: 4320 - protein, 12 aa, Artificial Sequence
  Quasi-synthetic sequence derived from human genome
LRIARVLKLLKM

SEQ ID NO: 4321 - protein, 12 aa, Artificial Sequence
  Quasi-synthetic sequence derived from human genome
VAFMFRKFKILR

SEQ ID NO: 4322 - protein, 12 aa, Artificial Sequence
  Quasi-synthetic sequence derived from human genome
LKKRAWAIFLRL

SEQ ID NO: 4323 - protein, 12 aa, Artificial Sequence
  Quasi-synthetic sequence derived from human genome
KRLRKYLFQILR

SEQ ID NO: 4324 - protein, 12 aa, Artificial Sequence
  Quasi-synthetic sequence derived from human genome
RRLLRLLVLGLW

SEQ ID NO: 4325 - protein, 12 aa, Artificial Sequence
  Quasi-synthetic sequence derived from human genome
RRFRSLKMWFVF

SEQ ID NO: 4326 - protein, 12 aa, Artificial Sequence
  Quasi-synthetic sequence derived from human genome
LLKKSRKLLILV

SEQ ID NO: 4327 - protein, 12 aa, Artificial Sequence
  Quasi-synthetic sequence derived from human genome
RLRQRRRRLLIK

SEQ ID NO: 4328 - protein, 12 aa, Artificial Sequence
  Quasi-synthetic sequence derived from human genome
LWKRFFCFLRRS

SEQ ID NO: 4329 - protein, 12 aa, Artificial Sequence
  Quasi-synthetic sequence derived from human genome
RGRLPRRLLLLL

SEQ ID NO: 4330 - protein, 12 aa, Artificial Sequence
  Quasi-synthetic sequence derived from human genome
FFRFWMKWLLRQ

SEQ ID NO: 4331 - protein, 12 aa, Artificial Sequence
  Quasi-synthetic sequence derived from human genome
LAIFLYLLRLRR

SEQ ID NO: 4332 - protein, 12 aa, Artificial Sequence
  Quasi-synthetic sequence derived from human genome
LAILLYLLRLRR

SEQ ID NO: 4333 - protein, 12 aa, Artificial Sequence
  Quasi-synthetic sequence derived from human genome
VRRFLVTLRIRR

SEQ ID NO: 4334 - protein, 12 aa, Artificial Sequence
  Quasi-synthetic sequence derived from human genome
GLRKLIFIKKKR

SEQ ID NO: 4335 - protein, 12 aa, Artificial Sequence
  Quasi-synthetic sequence derived from human genome
RLLRIFKITKYW

SEQ ID NO: 4336 - protein, 12 aa, Artificial Sequence
  Quasi-synthetic sequence derived from human genome
LRRYFMKRLLIP

SEQ ID NO: 4337 - protein, 12 aa, Artificial Sequence
  Quasi-synthetic sequence derived from human genome
LKKLVPRMLKFL

SEQ ID NO: 4338 - protein, 12 aa, Artificial Sequence
  Quasi-synthetic sequence derived from human genome
LRTFRLMRVLKL

SEQ ID NO: 4339 - protein, 12 aa, Artificial Sequence
  Quasi-synthetic sequence derived from human genome
KKMKHLWFFLLL

SEQ ID NO: 4340 - protein, 12 aa, Artificial Sequence
  Quasi-synthetic sequence derived from human genome
VKTWKRRWFVLR

SEQ ID NO: 4341 - protein, 12 aa, Artificial Sequence
  Quasi-synthetic sequence derived from human genome
KKLLPVVFRRKL

SEQ ID NO: 4342 - protein, 12 aa, Artificial Sequence
  Quasi-synthetic sequence derived from human genome
ALALILLRKRRK

SEQ ID NO: 4343 - protein, 12 aa, Artificial Sequence
  Quasi-synthetic sequence derived from human genome
LKRIFHLWRCKK

SEQ ID NO: 4344 - protein, 12 aa, Artificial Sequence
  Quasi-synthetic sequence derived from human genome
KLRLLARHLRKI

SEQ ID NO: 4345 - protein, 12 aa, Artificial Sequence
  Quasi-synthetic sequence derived from human genome
IIRIMRVLRIAR

SEQ ID NO: 4346 - protein, 12 aa, Artificial Sequence
  Quasi-synthetic sequence derived from human genome
FKKRPILLLVFW

SEQ ID NO: 4347 - protein, 12 aa, Artificial Sequence
  Quasi-synthetic sequence derived from human genome
MLLPYLRKKLRL

SEQ ID NO: 4348 - protein, 12 aa, Artificial Sequence
  Quasi-synthetic sequence derived from human genome
LRRAWKRLQLRL

SEQ ID NO: 4349 - protein, 12 aa, Artificial Sequence
  Quasi-synthetic sequence derived from human genome
LLLLLILRLLRI

SEQ ID NO: 4350 - protein, 12 aa, Artificial Sequence
  Quasi-synthetic sequence derived from human genome
KKSRRLIIILVR

SEQ ID NO: 4351 - protein, 12 aa, Artificial Sequence
  Quasi-synthetic sequence derived from human genome
IALVFFLYRRRK

SEQ ID NO: 4352 - protein, 12 aa, Artificial Sequence
  Quasi-synthetic sequence derived from human genome
RARRLMRPLWLL

SEQ ID NO: 4353 - protein, 12 aa, Artificial Sequence
  Quasi-synthetic sequence derived from human genome
VVLVLFKYKRLR

SEQ ID NO: 4354 - protein, 12 aa, Artificial Sequence
  Quasi-synthetic sequence derived from human genome
LKPALKLRLRFI

SEQ ID NO: 4355 - protein, 12 aa, Artificial Sequence
  Quasi-synthetic sequence derived from human genome
LRKMKIPFLLLF

SEQ ID NO: 4356 - protein, 12 aa, Artificial Sequence
  Quasi-synthetic sequence derived from human genome
RFILRVRRSRLV

SEQ ID NO: 4357 - protein, 12 aa, Artificial Sequence
  Quasi-synthetic sequence derived from human genome
VRRVFGRIRRFF

SEQ ID NO: 4358 - protein, 12 aa, Artificial Sequence
  Quasi-synthetic sequence derived from human genome
YLIRIRKLTLKR

SEQ ID NO: 4359 - protein, 12 aa, Artificial Sequence
  Quasi-synthetic sequence derived from human genome
KKIRKQMKLLLL

SEQ ID NO: 4360 - protein, 12 aa, Artificial Sequence
  Quasi-synthetic sequence derived from human genome
KVRTLKKFIKLL

SEQ ID NO: 4361 - protein, 12 aa, Artificial Sequence
  Quasi-synthetic sequence derived from human genome
KSWKKIYFFLRR

SEQ ID NO: 4362 - protein, 12 aa, Artificial Sequence
  Quasi-synthetic sequence derived from human genome
FRHLHLKLKRLK

SEQ ID NO: 4363 - protein, 12 aa, Artificial Sequence
  Quasi-synthetic sequence derived from human genome
KRKRLKYFAKLW

SEQ ID NO: 4364 - protein, 12 aa, Artificial Sequence
  Quasi-synthetic sequence derived from human genome
RPKLKKLKKLLM

SEQ ID NO: 4365 - protein, 12 aa, Artificial Sequence
  Quasi-synthetic sequence derived from human genome
IFLKRILPLRFV

SEQ ID NO: 4366 - protein, 12 aa, Artificial Sequence
  Quasi-synthetic sequence derived from human genome
RALKLIIRLFLV

SEQ ID NO: 4367 - protein, 12 aa, Artificial Sequence
  Quasi-synthetic sequence derived from human genome
RRFLRTLRLKLA

SEQ ID NO: 4368 - protein, 12 aa, Artificial Sequence
  Quasi-synthetic sequence derived from human genome
LMLYFRIRFYFR

SEQ ID NO: 4369 - protein, 12 aa, Artificial Sequence
  Quasi-synthetic sequence derived from human genome
LLPKKMKLLLFL

SEQ ID NO: 4370 - protein, 12 aa, Artificial Sequence
  Quasi-synthetic sequence derived from human genome
ILWKLGFFKRKY

SEQ ID NO: 4371 - protein, 12 aa, Artificial Sequence
  Quasi-synthetic sequence derived from human genome
LKKKKKLLLLQK

SEQ ID NO: 4372 - protein, 12 aa, Artificial Sequence
  Quasi-synthetic sequence derived from human genome
LLKALFKALKRL

SEQ ID NO: 4373 - protein, 12 aa, Artificial Sequence
  Quasi-synthetic sequence derived from human genome
VMKFFRWVRRAW

SEQ ID NO: 4374 - protein, 12 aa, Artificial Sequence
  Quasi-synthetic sequence derived from human genome
VRLRRRLPCRLL

SEQ ID NO: 4375 - protein, 12 aa, Artificial Sequence
  Quasi-synthetic sequence derived from human genome
IKLLKALRVRKK

SEQ ID NO: 4376 - protein, 12 aa, Artificial Sequence
  Quasi-synthetic sequence derived from human genome
RMFRWLVLRINK

SEQ ID NO: 4377 - protein, 12 aa, Artificial Sequence
  Quasi-synthetic sequence derived from human genome
RLRRVLRALAWL

SEQ ID NO: 4378 - protein, 12 aa, Artificial Sequence
  Quasi-synthetic sequence derived from human genome
RFPPLLWVRLRR

SEQ ID NO: 4379 - protein, 12 aa, Artificial Sequence
  Quasi-synthetic sequence derived from human genome
KVWFRNRRFKLK

SEQ ID NO: 4380 - protein, 12 aa, Artificial Sequence
  Quasi-synthetic sequence derived from human genome
RIFKPWKWRKKK

SEQ ID NO: 4381 - protein, 12 aa, Artificial Sequence
  Quasi-synthetic sequence derived from human genome
VLRSFRLLRVFK

SEQ ID NO: 4382 - protein, 12 aa, Artificial Sequence
  Quasi-synthetic sequence derived from human genome
FVRRQVRKLLLF

SEQ ID NO: 4383 - protein, 12 aa, Artificial Sequence
  Quasi-synthetic sequence derived from human genome
FLRSFRVLRVFK

SEQ ID NO: 4384 - protein, 12 aa, Artificial Sequence
  Quasi-synthetic sequence derived from human genome
RLIRKRFLCLGW

SEQ ID NO: 4385 - protein, 12 aa, Artificial Sequence
  Quasi-synthetic sequence derived from human genome
GLLRLAIRLLRR

SEQ ID NO: 4386 - protein, 12 aa, Artificial Sequence
  Quasi-synthetic sequence derived from human genome
LRKRLLVLQRVF

SEQ ID NO: 4387 - protein, 12 aa, Artificial Sequence
  Quasi-synthetic sequence derived from human genome
RLLRRRHMPLRL

SEQ ID NO: 4388 - protein, 12 aa, Artificial Sequence
  Quasi-synthetic sequence derived from human genome
LAWLGKWLRKRR

SEQ ID NO: 4389 - protein, 12 aa, Artificial Sequence
  Quasi-synthetic sequence derived from human genome
MRLFFKIKPLVK

SEQ ID NO: 4390 - protein, 12 aa, Artificial Sequence
  Quasi-synthetic sequence derived from human genome
LRVLRMMRIFWV

SEQ ID NO: 4391 - protein, 12 aa, Artificial Sequence
  Quasi-synthetic sequence derived from human genome
IKKVLLLLWKVV

SEQ ID NO: 4392 - protein, 12 aa, Artificial Sequence
  Quasi-synthetic sequence derived from human genome
RLNRYKIIKLLL

SEQ ID NO: 4393 - protein, 12 aa, Artificial Sequence
  Quasi-synthetic sequence derived from human genome
VLWKKRIKPIVW

SEQ ID NO: 4394 - protein, 12 aa, Artificial Sequence
  Quasi-synthetic sequence derived from human genome
RALLRRFPRMLL

SEQ ID NO: 4395 - protein, 12 aa, Artificial Sequence
  Quasi-synthetic sequence derived from human genome
KVLMWRLLKLSR

SEQ ID NO: 4396 - protein, 12 aa, Artificial Sequence
  Quasi-synthetic sequence derived from human genome
RFFHWFSKWRKL

SEQ ID NO: 4397 - protein, 12 aa, Artificial Sequence
  Quasi-synthetic sequence derived from human genome
VLVLLALRLRRW

SEQ ID NO: 4398 - protein, 12 aa, Artificial Sequence
  Quasi-synthetic sequence derived from human genome
FIILRKQKLIFL

SEQ ID NO: 4399 - protein, 12 aa, Artificial Sequence
  Quasi-synthetic sequence derived from human genome
VLFRIIKPRKVF

SEQ ID NO: 4400 - protein, 12 aa, Artificial Sequence
  Quasi-synthetic sequence derived from human genome
KVKPLLMKLKRL

SEQ ID NO: 4401 - protein, 12 aa, Artificial Sequence
  Quasi-synthetic sequence derived from human genome
RWFLRKKVLAKY

SEQ ID NO: 4402 - protein, 12 aa, Artificial Sequence
  Quasi-synthetic sequence derived from human genome
IVRIMKMRKVLK

SEQ ID NO: 4403 - protein, 12 aa, Artificial Sequence
  Quasi-synthetic sequence derived from human genome
RRFRSVKLWFVI

SEQ ID NO: 4404 - protein, 12 aa, Artificial Sequence
  Quasi-synthetic sequence derived from human genome
WLIRRRRSILFP

SEQ ID NO: 4405 - protein, 12 aa, Artificial Sequence
  Quasi-synthetic sequence derived from human genome
YRNLKRKLKFLI

SEQ ID NO: 4406 - protein, 12 aa, Artificial Sequence
  Quasi-synthetic sequence derived from human genome
VFKSLLLLKKKK

SEQ ID NO: 4407 - protein, 12 aa, Artificial Sequence
  Quasi-synthetic sequence derived from human genome
RALMKLWRRRVV

SEQ ID NO: 4408 - protein, 12 aa, Artificial Sequence
  Quasi-synthetic sequence derived from human genome
RMKFLVRRWHRV

SEQ ID NO: 4409 - protein, 12 aa, Artificial Sequence
  Quasi-synthetic sequence derived from human genome
LRKLLRVLTLMK

SEQ ID NO: 4410 - protein, 12 aa, Artificial Sequence
  Quasi-synthetic sequence derived from human genome
WRFYLSFRKLMR

SEQ ID NO: 4411 - protein, 12 aa, Artificial Sequence
  Quasi-synthetic sequence derived from human genome
LLRRWLRALALL

SEQ ID NO: 4412 - protein, 12 aa, Artificial Sequence
  Quasi-synthetic sequence derived from human genome
KLRLKLRKKLKA

SEQ ID NO: 4413 - protein, 12 aa, Artificial Sequence
  Quasi-synthetic sequence derived from human genome
ILVVLFIVFRKK

SEQ ID NO: 4414 - protein, 12 aa, Artificial Sequence
  Quasi-synthetic sequence derived from human genome
HFRFCLLLRLLR

SEQ ID NO: 4415 - protein, 12 aa, Artificial Sequence
  Quasi-synthetic sequence derived from human genome
IIFRKILKKLSM

SEQ ID NO: 4416 - protein, 12 aa, Artificial Sequence
  Quasi-synthetic sequence derived from human genome
TLRKWLKMFKKR

SEQ ID NO: 4417 - protein, 12 aa, Artificial Sequence
  Quasi-synthetic sequence derived from human genome
KHLIILPFKRRL

SEQ ID NO: 4418 - protein, 12 aa, Artificial Sequence
  Quasi-synthetic sequence derived from human genome
IRRRLPFSKWRL

SEQ ID NO: 4419 - protein, 12 aa, Artificial Sequence
  Quasi-synthetic sequence derived from human genome
RSRIPLLRKRWF

SEQ ID NO: 4420 - protein, 12 aa, Artificial Sequence
  Quasi-synthetic sequence derived from human genome
RKLFYFKIWAFL

SEQ ID NO: 4421 - protein, 12 aa, Artificial Sequence
  Quasi-synthetic sequence derived from human genome
LRAFRVLRPLRL

SEQ ID NO: 4422 - protein, 12 aa, Artificial Sequence
  Quasi-synthetic sequence derived from human genome
RVRLRALRLALL

SEQ ID NO: 4423 - protein, 12 aa, Artificial Sequence
  Quasi-synthetic sequence derived from human genome
RRLRRLAHLVLF

SEQ ID NO: 4424 - protein, 12 aa, Artificial Sequence
  Quasi-synthetic sequence derived from human genome
MRKFIKAKKRLI

SEQ ID NO: 4425 - protein, 12 aa, Artificial Sequence
  Quasi-synthetic sequence derived from human genome
RCLRGFFIKRRF

SEQ ID NO: 4426 - protein, 12 aa, Artificial Sequence
  Quasi-synthetic sequence derived from human genome
RLLRGLWQRWRR

SEQ ID NO: 4427 - protein, 12 aa, Artificial Sequence
  Quasi-synthetic sequence derived from human genome
KKFKRYFLQLLK

SEQ ID NO: 4428 - protein, 12 aa, Artificial Sequence
  Quasi-synthetic sequence derived from human genome
VRIIRKFIKGFI

SEQ ID NO: 4429 - protein, 12 aa, Artificial Sequence
  Quasi-synthetic sequence derived from human genome
KSLFYLLLKLKK

SEQ ID NO: 4430 - protein, 12 aa, Artificial Sequence
  Quasi-synthetic sequence derived from human genome
RHKVLILFKLIL

SEQ ID NO: 4431 - protein, 12 aa, Artificial Sequence
  Quasi-synthetic sequence derived from human genome
KKWKSRWLVLRK

SEQ ID NO: 4432 - protein, 12 aa, Artificial Sequence
  Quasi-synthetic sequence derived from human genome
LRKLPRIKKHLL

SEQ ID NO: 4433 - protein, 12 aa, Artificial Sequence
  Quasi-synthetic sequence derived from human genome
FIFIFTFVKKKK

SEQ ID NO: 4434 - protein, 12 aa, Artificial Sequence
  Quasi-synthetic sequence derived from human genome
FLSLVWKRRILF

SEQ ID NO: 4435 - protein, 12 aa, Artificial Sequence
  Quasi-synthetic sequence derived from human genome
LVLRLLRALRVL

SEQ ID NO: 4436 - protein, 12 aa, Artificial Sequence
  Quasi-synthetic sequence derived from human genome
FRMNFRRRRRLM

SEQ ID NO: 4437 - protein, 12 aa, Artificial Sequence
  Quasi-synthetic sequence derived from human genome
LLRLRQHWKLRK

SEQ ID NO: 4438 - protein, 12 aa, Artificial Sequence
  Quasi-synthetic sequence derived from human genome
WAKIILPRLIRK

SEQ ID NO: 4439 - protein, 12 aa, Artificial Sequence
  Quasi-synthetic sequence derived from human genome
FRRLLKLPRTLI

SEQ ID NO: 4440 - protein, 12 aa, Artificial Sequence
  Quasi-synthetic sequence derived from human genome
RKLLVQLRRLYW

SEQ ID NO: 4441 - protein, 12 aa, Artificial Sequence
  Quasi-synthetic sequence derived from human genome
WRKLFPNFLKLR

SEQ ID NO: 4442 - protein, 12 aa, Artificial Sequence
  Quasi-synthetic sequence derived from human genome
WLRAKFQRLLFK

SEQ ID NO: 4443 - protein, 12 aa, Artificial Sequence
  Quasi-synthetic sequence derived from human genome
LRAWKRIFWRQI

SEQ ID NO: 4444 - protein, 12 aa, Artificial Sequence
  Quasi-synthetic sequence derived from human genome
RLKKHRWYKKIL

SEQ ID NO: 4445 - protein, 12 aa, Artificial Sequence
  Quasi-synthetic sequence derived from human genome
RHRRLLLLPLLL

SEQ ID NO: 4446 - protein, 12 aa, Artificial Sequence
  Quasi-synthetic sequence derived from human genome
LRLFRRLLLAAL

SEQ ID NO: 4447 - protein, 12 aa, Artificial Sequence
  Quasi-synthetic sequence derived from human genome
VRKILSRLFRVF

SEQ ID NO: 4448 - protein, 12 aa, Artificial Sequence
  Quasi-synthetic sequence derived from human genome
LVFFVSRKRRIL

SEQ ID NO: 4449 - protein, 12 aa, Artificial Sequence
  Quasi-synthetic sequence derived from human genome
LLILSLRRHIRR

SEQ ID NO: 4450 - protein, 12 aa, Artificial Sequence
  Quasi-synthetic sequence derived from human genome
LVRVFRIFKLSR

SEQ ID NO: 4451 - protein, 12 aa, Artificial Sequence
  Quasi-synthetic sequence derived from human genome
VFRVFRIFKFSR

SEQ ID NO: 4452 - protein, 12 aa, Artificial Sequence
  Quasi-synthetic sequence derived from human genome
RVRFLRKVLSIL

SEQ ID NO: 4453 - protein, 12 aa, Artificial Sequence
  Quasi-synthetic sequence derived from human genome
VIVLLALRLRRW

SEQ ID NO: 4454 - protein, 12 aa, Artificial Sequence
  Quasi-synthetic sequence derived from human genome
LKLFRPKKLLPK

SEQ ID NO: 4455 - protein, 12 aa, Artificial Sequence
  Quasi-synthetic sequence derived from human genome
RRFWFLMYPFRF

SEQ ID NO: 4456 - protein, 12 aa, Artificial Sequence
  Quasi-synthetic sequence derived from human genome
RRRIKLLGILMM

SEQ ID NO: 4457 - protein, 12 aa, Artificial Sequence
  Quasi-synthetic sequence derived from human genome
KKRKIPKLVLRI

SEQ ID NO: 4458 - protein, 12 aa, Artificial Sequence
  Quasi-synthetic sequence derived from human genome
ILLVRYRKCIKL

SEQ ID NO: 4459 - protein, 12 aa, Artificial Sequence
  Quasi-synthetic sequence derived from human genome
IRLYQRRRWMIR

SEQ ID NO: 4460 - protein, 12 aa, Artificial Sequence
  Quasi-synthetic sequence derived from human genome
WKRRVPLLPFLR

SEQ ID NO: 4461 - protein, 12 aa, Artificial Sequence
  Quasi-synthetic sequence derived from human genome
AFRKKRLCIKFI

SEQ ID NO: 4462 - protein, 12 aa, Artificial Sequence
  Quasi-synthetic sequence derived from human genome
VKSWKRRWFVLK

SEQ ID NO: 4463 - protein, 12 aa, Artificial Sequence
  Quasi-synthetic sequence derived from human genome
MAFLMKKKKFKF

SEQ ID NO: 4464 - protein, 12 aa, Artificial Sequence
  Quasi-synthetic sequence derived from human genome
KRLAVLRLFWVL

SEQ ID NO: 4465 - protein, 12 aa, Artificial Sequence
  Quasi-synthetic sequence derived from human genome
LIKLLFLPRRSR

SEQ ID NO: 4466 - protein, 12 aa, Artificial Sequence
  Quasi-synthetic sequence derived from human genome
LSLIRKFRLFPR

SEQ ID NO: 4467 - protein, 12 aa, Artificial Sequence
  Quasi-synthetic sequence derived from human genome
ILWRLLRKLQKC

SEQ ID NO: 4468 - protein, 12 aa, Artificial Sequence
  Quasi-synthetic sequence derived from human genome
RIPLLRKRRFQL

SEQ ID NO: 4469 - protein, 12 aa, Artificial Sequence
  Quasi-synthetic sequence derived from human genome
KVRKVLQLLRLR

SEQ ID NO: 4470 - protein, 12 aa, Artificial Sequence
  Quasi-synthetic sequence derived from human genome
IVLGFLFKRFLR

SEQ ID NO: 4471 - protein, 12 aa, Artificial Sequence
  Quasi-synthetic sequence derived from human genome
LVGLLIFFLKRR

SEQ ID NO: 4472 - protein, 12 aa, Artificial Sequence
  Quasi-synthetic sequence derived from human genome
RRGLRRLRRLWA

SEQ ID NO: 4473 - protein, 12 aa, Artificial Sequence
  Quasi-synthetic sequence derived from human genome
LLRRAGRLRWRR

SEQ ID NO: 4474 - protein, 12 aa, Artificial Sequence
  Quasi-synthetic sequence derived from human genome
RRRLGRLWNRLF

SEQ ID NO: 4475 - protein, 12 aa, Artificial Sequence
  Quasi-synthetic sequence derived from human genome
RLLWLRGRGRLR

SEQ ID NO: 4476 - protein, 12 aa, Artificial Sequence
  Quasi-synthetic sequence derived from human genome
IILLFWKPLRYK

SEQ ID NO: 4477 - protein, 12 aa, Artificial Sequence
  Quasi-synthetic sequence derived from human genome
RFLMRKRLLFPA

SEQ ID NO: 4478 - protein, 12 aa, Artificial Sequence
  Quasi-synthetic sequence derived from human genome
CKPFLFLLKKKI

SEQ ID NO: 4479 - protein, 12 aa, Artificial Sequence
  Quasi-synthetic sequence derived from human genome
RRMRFYIRRMVK

SEQ ID NO: 4480 - protein, 12 aa, Artificial Sequence
  Quasi-synthetic sequence derived from human genome
LKFRKKKLKFCK

SEQ ID NO: 4481 - protein, 12 aa, Artificial Sequence
  Quasi-synthetic sequence derived from human genome
RFHLKKKMRVWR

SEQ ID NO: 4482 - protein, 12 aa, Artificial Sequence
  Quasi-synthetic sequence derived from human genome
RIYIKIKQWILR

SEQ ID NO: 4483 - protein, 12 aa, Artificial Sequence
  Quasi-synthetic sequence derived from human genome
PAWLRRRYLRLR

SEQ ID NO: 4484 - protein, 12 aa, Artificial Sequence
  Quasi-synthetic sequence derived from human genome
RWRKKHLTFRIL

SEQ ID NO: 4485 - protein, 12 aa, Artificial Sequence
  Quasi-synthetic sequence derived from human genome
FVRYLLKRIKKC

SEQ ID NO: 4486 - protein, 12 aa, Artificial Sequence
  Quasi-synthetic sequence derived from human genome
LRLVKRLYFGLR

SEQ ID NO: 4487 - protein, 12 aa, Artificial Sequence
  Quasi-synthetic sequence derived from human genome
LFLKRPKRSLFF

SEQ ID NO: 4488 - protein, 12 aa, Artificial Sequence
  Quasi-synthetic sequence derived from human genome
LRAKFQRLLFKL

SEQ ID NO: 4489 - protein, 12 aa, Artificial Sequence
  Quasi-synthetic sequence derived from human genome
RPLQLLRLFKLK

SEQ ID NO: 4490 - protein, 12 aa, Artificial Sequence
  Quasi-synthetic sequence derived from human genome
KPFFRLLNLRKL

SEQ ID NO: 4491 - protein, 12 aa, Artificial Sequence
  Quasi-synthetic sequence derived from human genome
RRFFWWARFIAI

SEQ ID NO: 4492 - protein, 12 aa, Artificial Sequence
  Quasi-synthetic sequence derived from human genome
ILMLIFLRNRIR

SEQ ID NO: 4493 - protein, 12 aa, Artificial Sequence
  Quasi-synthetic sequence derived from human genome
LLLLLLSRRRTR

SEQ ID NO: 4494 - protein, 12 aa, Artificial Sequence
  Quasi-synthetic sequence derived from human genome
IIFLHWRKNLRR

SEQ ID NO: 4495 - protein, 12 aa, Artificial Sequence
  Quasi-synthetic sequence derived from human genome
KRLKRTLIRKVF

SEQ ID NO: 4496 - protein, 12 aa, Artificial Sequence
  Quasi-synthetic sequence derived from human genome
LLALLRKRFRQK

SEQ ID NO: 4497 - protein, 12 aa, Artificial Sequence
  Quasi-synthetic sequence derived from human genome
LLKRLLGPKLRR

SEQ ID NO: 4498 - protein, 12 aa, Artificial Sequence
  Quasi-synthetic sequence derived from human genome
KPFFRLQKFLRR

SEQ ID NO: 4499 - protein, 12 aa, Artificial Sequence
  Quasi-synthetic sequence derived from human genome
VLRRRRKKLPFR

SEQ ID NO: 4500 - protein, 12 aa, Artificial Sequence
  Quasi-synthetic sequence derived from human genome
KIKIFIIYLKKP

SEQ ID NO: 4501 - protein, 12 aa, Artificial Sequence
  Quasi-synthetic sequence derived from human genome
KLMLLQKMLRKL

SEQ ID NO: 4502 - protein, 12 aa, Artificial Sequence
  Quasi-synthetic sequence derived from human genome
RICKFLRYFFYK

SEQ ID NO: 4503 - protein, 12 aa, Artificial Sequence
  Quasi-synthetic sequence derived from human genome
LMLLQKMLKKLR

SEQ ID NO: 4504 - protein, 12 aa, Artificial Sequence
  Quasi-synthetic sequence derived from human genome
LNRFKYMWKLLR

SEQ ID NO: 4505 - protein, 12 aa, Artificial Sequence
  Quasi-synthetic sequence derived from human genome
RLMFRIAMRILL

SEQ ID NO: 4506 - protein, 12 aa, Artificial Sequence
  Quasi-synthetic sequence derived from human genome
IFYLIIRRKPLF

SEQ ID NO: 4507 - protein, 12 aa, Artificial Sequence
  Quasi-synthetic sequence derived from human genome
WLKRFLVWKPRP

SEQ ID NO: 4508 - protein, 12 aa, Artificial Sequence
  Quasi-synthetic sequence derived from human genome
LKLRPILKILAK

SEQ ID NO: 4509 - protein, 12 aa, Artificial Sequence
  Quasi-synthetic sequence derived from human genome
FLKRGIRLRCIR

SEQ ID NO: 4510 - protein, 12 aa, Artificial Sequence
  Quasi-synthetic sequence derived from human genome
LLRKRLRRCIVC

SEQ ID NO: 4511 - protein, 12 aa, Artificial Sequence
  Quasi-synthetic sequence derived from human genome
LWFRRLYIIFSR

SEQ ID NO: 4512 - protein, 12 aa, Artificial Sequence
  Quasi-synthetic sequence derived from human genome
RLRLLPALLILR

SEQ ID NO: 4513 - protein, 12 aa, Artificial Sequence
  Quasi-synthetic sequence derived from human genome
KLVVFRPRLFLL

SEQ ID NO: 4514 - protein, 12 aa, Artificial Sequence
  Quasi-synthetic sequence derived from human genome
KIFKPWKWRKKK

SEQ ID NO: 4515 - protein, 12 aa, Artificial Sequence
  Quasi-synthetic sequence derived from human genome
FRLIRKMFSFKV

SEQ ID NO: 4516 - protein, 12 aa, Artificial Sequence
  Quasi-synthetic sequence derived from human genome
LIVFWKYRRFQR

SEQ ID NO: 4517 - protein, 12 aa, Artificial Sequence
  Quasi-synthetic sequence derived from human genome
IVLSMLLLRRKK

SEQ ID NO: 4518 - protein, 12 aa, Artificial Sequence
  Quasi-synthetic sequence derived from human genome
IRKWLKQLFHRL

SEQ ID NO: 4519 - protein, 12 aa, Artificial Sequence
  Quasi-synthetic sequence derived from human genome
LWRKLFKGIPRL

SEQ ID NO: 4520 - protein, 12 aa, Artificial Sequence
  Quasi-synthetic sequence derived from human genome
KLLWRKFQIPRF

SEQ ID NO: 4521 - protein, 12 aa, Artificial Sequence
  Quasi-synthetic sequence derived from human genome
KRLLLPRHLRVF

SEQ ID NO: 4522 - protein, 12 aa, Artificial Sequence
  Quasi-synthetic sequence derived from human genome
KYRFWKKRIISI

SEQ ID NO: 4523 - protein, 12 aa, Artificial Sequence
  Quasi-synthetic sequence derived from human genome
RKKQKIIKMLLI

SEQ ID NO: 4524 - protein, 12 aa, Artificial Sequence
  Quasi-synthetic sequence derived from human genome
HKLLKVIRKKLV

SEQ ID NO: 4525 - protein, 12 aa, Artificial Sequence
  Quasi-synthetic sequence derived from human genome
WIWACIRKRRLV

SEQ ID NO: 4526 - protein, 12 aa, Artificial Sequence
  Quasi-synthetic sequence derived from human genome
RLRLLLRTWISR

SEQ ID NO: 4527 - protein, 12 aa, Artificial Sequence
  Quasi-synthetic sequence derived from human genome
LLLLGGWKRWRR

SEQ ID NO: 4528 - protein, 12 aa, Artificial Sequence
  Quasi-synthetic sequence derived from human genome
FLILVFSIIRRR

SEQ ID NO: 4529 - protein, 12 aa, Artificial Sequence
  Quasi-synthetic sequence derived from human genome
KKSWKRRYFLLR

SEQ ID NO: 4530 - protein, 12 aa, Artificial Sequence
  Quasi-synthetic sequence derived from human genome
FQRWKKRYFKLR

SEQ ID NO: 4531 - protein, 12 aa, Artificial Sequence
  Quasi-synthetic sequence derived from human genome
PMLKLVRLKLWF

SEQ ID NO: 4532 - protein, 12 aa, Artificial Sequence
  Quasi-synthetic sequence derived from human genome
LKALKYLFRFII

SEQ ID NO: 4533 - protein, 12 aa, Artificial Sequence
  Quasi-synthetic sequence derived from human genome
GFLRRIRPKLKW

SEQ ID NO: 4534 - protein, 12 aa, Artificial Sequence
  Quasi-synthetic sequence derived from human genome
ILLIVLKNVRRR

SEQ ID NO: 4535 - protein, 12 aa, Artificial Sequence
  Quasi-synthetic sequence derived from human genome
KRRRLLSIIVVL

SEQ ID NO: 4536 - protein, 12 aa, Artificial Sequence
  Quasi-synthetic sequence derived from human genome
IRLARIGRILRL

SEQ ID NO: 4537 - protein, 12 aa, Artificial Sequence
  Quasi-synthetic sequence derived from human genome
LLRLLGLRRGLR

SEQ ID NO: 4538 - protein, 12 aa, Artificial Sequence
  Quasi-synthetic sequence derived from human genome
LIKKFQFLMFRL

SEQ ID NO: 4539 - protein, 12 aa, Artificial Sequence
  Quasi-synthetic sequence derived from human genome
WRKRCLYLFVLL

SEQ ID NO: 4540 - protein, 12 aa, Artificial Sequence
  Quasi-synthetic sequence derived from human genome
WRKRCLYFFVLL

SEQ ID NO: 4541 - protein, 12 aa, Artificial Sequence
  Quasi-synthetic sequence derived from human genome
KLWSFFIYLLRR

SEQ ID NO: 4542 - protein, 12 aa, Artificial Sequence
  Quasi-synthetic sequence derived from human genome
RPRKAFLLLLLL

SEQ ID NO: 4543 - protein, 12 aa, Artificial Sequence
  Quasi-synthetic sequence derived from human genome
LRKRKKRKFSLW

SEQ ID NO: 4544 - protein, 12 aa, Artificial Sequence
  Quasi-synthetic sequence derived from human genome
IVVFILKMKVKK

SEQ ID NO: 4545 - protein, 12 aa, Artificial Sequence
  Quasi-synthetic sequence derived from human genome
FFRRTIRLKLVY

SEQ ID NO: 4546 - protein, 12 aa, Artificial Sequence
  Quasi-synthetic sequence derived from human genome
VSWRRKKLYLLF

SEQ ID NO: 4547 - protein, 12 aa, Artificial Sequence
  Quasi-synthetic sequence derived from human genome
LKSLKALLRWKL

SEQ ID NO: 4548 - protein, 12 aa, Artificial Sequence
  Quasi-synthetic sequence derived from human genome
FILFKNKIVIKK

SEQ ID NO: 4549 - protein, 12 aa, Artificial Sequence
  Quasi-synthetic sequence derived from human genome
KYFKKIMLLHWK

SEQ ID NO: 4550 - protein, 12 aa, Artificial Sequence
  Quasi-synthetic sequence derived from human genome
LKHIRHKFFLKK

SEQ ID NO: 4551 - protein, 12 aa, Artificial Sequence
  Quasi-synthetic sequence derived from human genome
IIIVLYMLRFKK

SEQ ID NO: 4552 - protein, 12 aa, Artificial Sequence
  Quasi-synthetic sequence derived from human genome
KFRIYLTLLRFL

SEQ ID NO: 4553 - protein, 12 aa, Artificial Sequence
  Quasi-synthetic sequence derived from human genome
ARGLLLRRLRRR

SEQ ID NO: 4554 - protein, 12 aa, Artificial Sequence
  Quasi-synthetic sequence derived from human genome
LLRSFFRRRRPR

SEQ ID NO: 4555 - protein, 12 aa, Artificial Sequence
  Quasi-synthetic sequence derived from human genome
RRRGLWWLVPRL

SEQ ID NO: 4556 - protein, 12 aa, Artificial Sequence
  Quasi-synthetic sequence derived from human genome
RFRSLRHKIILL

SEQ ID NO: 4557 - protein, 12 aa, Artificial Sequence
  Quasi-synthetic sequence derived from human genome
RRRRLVFLWWPG

SEQ ID NO: 4558 - protein, 12 aa, Artificial Sequence
  Quasi-synthetic sequence derived from human genome
RPRWSLWRRVFL

SEQ ID NO: 4559 - protein, 12 aa, Artificial Sequence
  Quasi-synthetic sequence derived from human genome
KLKKIYFYWLCR

SEQ ID NO: 4560 - protein, 12 aa, Artificial Sequence
  Quasi-synthetic sequence derived from human genome
LRIFRPRKLTLK

SEQ ID NO: 4561 - protein, 12 aa, Artificial Sequence
  Quasi-synthetic sequence derived from human genome
LFKKTHRILRRL

SEQ ID NO: 4562 - protein, 12 aa, Artificial Sequence
  Quasi-synthetic sequence derived from human genome
LKLGALRKLRKW

SEQ ID NO: 4563 - protein, 12 aa, Artificial Sequence
  Quasi-synthetic sequence derived from human genome
LRRLFVFKLIPM

SEQ ID NO: 4564 - protein, 12 aa, Artificial Sequence
  Quasi-synthetic sequence derived from human genome
LFIWLKMRISKL

SEQ ID NO: 4565 - protein, 12 aa, Artificial Sequence
  Quasi-synthetic sequence derived from human genome
LIWLRRVYLLRA

SEQ ID NO: 4566 - protein, 12 aa, Artificial Sequence
  Quasi-synthetic sequence derived from human genome
KLVFLPLRLVWK

SEQ ID NO: 4567 - protein, 12 aa, Artificial Sequence
  Quasi-synthetic sequence derived from human genome
MKRLLLLFLFFI

SEQ ID NO: 4568 - protein, 12 aa, Artificial Sequence
  Quasi-synthetic sequence derived from human genome
KRMFRRIYRHLR

SEQ ID NO: 4569 - protein, 12 aa, Artificial Sequence
  Quasi-synthetic sequence derived from human genome
KLKFCLFTKWLK

SEQ ID NO: 4570 - protein, 12 aa, Artificial Sequence
  Quasi-synthetic sequence derived from human genome
FVLWLLGFRMRR

SEQ ID NO: 4571 - protein, 12 aa, Artificial Sequence
  Quasi-synthetic sequence derived from human genome
RLFLSLRLWAWR

SEQ ID NO: 4572 - protein, 12 aa, Artificial Sequence
  Quasi-synthetic sequence derived from human genome
LRGWFLWKRFCW

SEQ ID NO: 4573 - protein, 12 aa, Artificial Sequence
  Quasi-synthetic sequence derived from human genome
LNKVRIFLFLKL

SEQ ID NO: 4574 - protein, 12 aa, Artificial Sequence
  Quasi-synthetic sequence derived from human genome
RRRLWLGLAWLL

SEQ ID NO: 4575 - protein, 12 aa, Artificial Sequence
  Quasi-synthetic sequence derived from human genome
SLRRRVRRLRRL

SEQ ID NO: 4576 - protein, 12 aa, Artificial Sequence
  Quasi-synthetic sequence derived from human genome
KKLMIFLRTVIR

SEQ ID NO: 4577 - protein, 12 aa, Artificial Sequence
  Quasi-synthetic sequence derived from human genome
FRRLPLRPLIKM

SEQ ID NO: 4578 - protein, 12 aa, Artificial Sequence
  Quasi-synthetic sequence derived from human genome
RKMKRVLVLLLA

SEQ ID NO: 4579 - protein, 12 aa, Artificial Sequence
  Quasi-synthetic sequence derived from human genome
VLLALKLRRWHK

SEQ ID NO: 4580 - protein, 12 aa, Artificial Sequence
  Quasi-synthetic sequence derived from human genome
WLLKAFWGKKRI

SEQ ID NO: 4581 - protein, 12 aa, Artificial Sequence
  Quasi-synthetic sequence derived from human genome
KRPPLRKWLLVF

SEQ ID NO: 4582 - protein, 12 aa, Artificial Sequence
  Quasi-synthetic sequence derived from human genome
ARRIRKLISFLR

SEQ ID NO: 4583 - protein, 12 aa, Artificial Sequence
  Quasi-synthetic sequence derived from human genome
WKNFILKRRRCI

SEQ ID NO: 4584 - protein, 12 aa, Artificial Sequence
  Quasi-synthetic sequence derived from human genome
LRLLHRRQKRII

SEQ ID NO: 4585 - protein, 12 aa, Artificial Sequence
  Quasi-synthetic sequence derived from human genome
FRKRMMLAYRFR

SEQ ID NO: 4586 - protein, 12 aa, Artificial Sequence
  Quasi-synthetic sequence derived from human genome
FLRLKRRVKSVI

SEQ ID NO: 4587 - protein, 12 aa, Artificial Sequence
  Quasi-synthetic sequence derived from human genome
RMRTRLVRKRFL

SEQ ID NO: 4588 - protein, 12 aa, Artificial Sequence
  Quasi-synthetic sequence derived from human genome
LRTWKKFVKFMK

SEQ ID NO: 4589 - protein, 12 aa, Artificial Sequence
  Quasi-synthetic sequence derived from human genome
RKRILIAIALIK

SEQ ID NO: 4590 - protein, 12 aa, Artificial Sequence
  Quasi-synthetic sequence derived from human genome
LFVRKLYLWPRF

SEQ ID NO: 4591 - protein, 12 aa, Artificial Sequence
  Quasi-synthetic sequence derived from human genome
LRKALKLLNRIF

SEQ ID NO: 4592 - protein, 12 aa, Artificial Sequence
  Quasi-synthetic sequence derived from human genome
RRILFIKHFIIY

SEQ ID NO: 4593 - protein, 12 aa, Artificial Sequence
  Quasi-synthetic sequence derived from human genome
LIIRRKPLFYII

SEQ ID NO: 4594 - protein, 12 aa, Artificial Sequence
  Quasi-synthetic sequence derived from human genome
RLMKIGIVRRIL

SEQ ID NO: 4595 - protein, 12 aa, Artificial Sequence
  Quasi-synthetic sequence derived from human genome
RIFRAARFRIRK

SEQ ID NO: 4596 - protein, 12 aa, Artificial Sequence
  Quasi-synthetic sequence derived from human genome
LRIFRIPRRPRK

SEQ ID NO: 4597 - protein, 12 aa, Artificial Sequence
  Quasi-synthetic sequence derived from human genome
LRLWKRLGSLRL

SEQ ID NO: 4598 - protein, 12 aa, Artificial Sequence
  Quasi-synthetic sequence derived from human genome
KVLFILFRVLRA

SEQ ID NO: 4599 - protein, 12 aa, Artificial Sequence
  Quasi-synthetic sequence derived from human genome
VLRRKALLIFLV

SEQ ID NO: 4600 - protein, 12 aa, Artificial Sequence
  Quasi-synthetic sequence derived from human genome
LKFKILVKNKKI

SEQ ID NO: 4601 - protein, 12 aa, Artificial Sequence
  Quasi-synthetic sequence derived from human genome
FRKMKIFMKNLL

SEQ ID NO: 4602 - protein, 12 aa, Artificial Sequence
  Quasi-synthetic sequence derived from human genome
KIFQRKMRYWLL

SEQ ID NO: 4603 - protein, 12 aa, Artificial Sequence
  Quasi-synthetic sequence derived from human genome
KLLRRLHLMPFK

SEQ ID NO: 4604 - protein, 12 aa, Artificial Sequence
  Quasi-synthetic sequence derived from human genome
AWRLYLLRHFRK

SEQ ID NO: 4605 - protein, 12 aa, Artificial Sequence
  Quasi-synthetic sequence derived from human genome
WKKKALIIIWAK

SEQ ID NO: 4606 - protein, 12 aa, Artificial Sequence
  Quasi-synthetic sequence derived from human genome
LFKMRAKLFRFA

SEQ ID NO: 4607 - protein, 12 aa, Artificial Sequence
  Quasi-synthetic sequence derived from human genome
VFRRFVWNFFRL

SEQ ID NO: 4608 - protein, 12 aa, Artificial Sequence
  Quasi-synthetic sequence derived from human genome
IKFRYLWLFWFL

SEQ ID NO: 4609 - protein, 12 aa, Artificial Sequence
  Quasi-synthetic sequence derived from human genome
LKARKIPIIIRR

SEQ ID NO: 4610 - protein, 12 aa, Artificial Sequence
  Quasi-synthetic sequence derived from human genome
RWFLHRMKRIIA

SEQ ID NO: 4611 - protein, 12 aa, Artificial Sequence
  Quasi-synthetic sequence derived from human genome
RRLLFYKYVYKR

SEQ ID NO: 4612 - protein, 12 aa, Artificial Sequence
  Quasi-synthetic sequence derived from human genome
FVKCFLRRRKPF

SEQ ID NO: 4613 - protein, 12 aa, Artificial Sequence
  Quasi-synthetic sequence derived from human genome
RHKQLIRFLKRL

SEQ ID NO: 4614 - protein, 12 aa, Artificial Sequence
  Quasi-synthetic sequence derived from human genome
RRFFPKRKCFVF

SEQ ID NO: 4615 - protein, 12 aa, Artificial Sequence
  Quasi-synthetic sequence derived from human genome
IRRVPFAFKWWK

SEQ ID NO: 4616 - protein, 12 aa, Artificial Sequence
  Quasi-synthetic sequence derived from human genome
LKVKGRRFYFLL

SEQ ID NO: 4617 - protein, 12 aa, Artificial Sequence
  Quasi-synthetic sequence derived from human genome
RTFIIKLIKWLM

SEQ ID NO: 4618 - protein, 12 aa, Artificial Sequence
  Quasi-synthetic sequence derived from human genome
KLPIIKKKVRKL

SEQ ID NO: 4619 - protein, 12 aa, Artificial Sequence
  Quasi-synthetic sequence derived from human genome
KILWVRQLYRRI

SEQ ID NO: 4620 - protein, 12 aa, Artificial Sequence
  Quasi-synthetic sequence derived from human genome
IFRRCWLVFKKA

SEQ ID NO: 4621 - protein, 12 aa, Artificial Sequence
  Quasi-synthetic sequence derived from human genome
RWHRWRLGKVLW

SEQ ID NO: 4622 - protein, 12 aa, Artificial Sequence
  Quasi-synthetic sequence derived from human genome
FLRAKVFVKRFV

SEQ ID NO: 4623 - protein, 12 aa, Artificial Sequence
  Quasi-synthetic sequence derived from human genome
IVLYMLRFKKYK

SEQ ID NO: 4624 - protein, 12 aa, Artificial Sequence
  Quasi-synthetic sequence derived from human genome
VRKPPLILRRLL

SEQ ID NO: 4625 - protein, 12 aa, Artificial Sequence
  Quasi-synthetic sequence derived from human genome
LLLVTLIILRKK

SEQ ID NO: 4626 - protein, 12 aa, Artificial Sequence
  Quasi-synthetic sequence derived from human genome
LKLFLSRRRWQR

SEQ ID NO: 4627 - protein, 12 aa, Artificial Sequence
  Quasi-synthetic sequence derived from human genome
MKLYFKIKPLLK

SEQ ID NO: 4628 - protein, 12 aa, Artificial Sequence
  Quasi-synthetic sequence derived from human genome
LKLRHWQWWRLF

SEQ ID NO: 4629 - protein, 12 aa, Artificial Sequence
  Quasi-synthetic sequence derived from human genome
FFFWLKLKINKV

SEQ ID NO: 4630 - protein, 12 aa, Artificial Sequence
  Quasi-synthetic sequence derived from human genome
RMIKKRKGLRLI

SEQ ID NO: 4631 - protein, 12 aa, Artificial Sequence
  Quasi-synthetic sequence derived from human genome
WKFINFQLRRWR

SEQ ID NO: 4632 - protein, 12 aa, Artificial Sequence
  Quasi-synthetic sequence derived from human genome
LRRRLAFLSFFW

SEQ ID NO: 4633 - protein, 12 aa, Artificial Sequence
  Quasi-synthetic sequence derived from human genome
WLGLRFLRALRL

SEQ ID NO: 4634 - protein, 12 aa, Artificial Sequence
  Quasi-synthetic sequence derived from human genome
CYFKIYIRLKRR

SEQ ID NO: 4635 - protein, 12 aa, Artificial Sequence
  Quasi-synthetic sequence derived from human genome
KKRLKKFPWSLW

SEQ ID NO: 4636 - protein, 12 aa, Artificial Sequence
  Quasi-synthetic sequence derived from human genome
LLKKRKWPLKGW

SEQ ID NO: 4637 - protein, 12 aa, Artificial Sequence
  Quasi-synthetic sequence derived from human genome
VIFLNRKILLIR

SEQ ID NO: 4638 - protein, 12 aa, Artificial Sequence
  Quasi-synthetic sequence derived from human genome
LFLNIIRILVRK

SEQ ID NO: 4639 - protein, 12 aa, Artificial Sequence
  Quasi-synthetic sequence derived from human genome
ILWRILYKKTLW

SEQ ID NO: 4640 - protein, 12 aa, Artificial Sequence
  Quasi-synthetic sequence derived from human genome
IKLLKTILKWLM

SEQ ID NO: 4641 - protein, 12 aa, Artificial Sequence
  Quasi-synthetic sequence derived from human genome
RFFLLRGRCLLL

SEQ ID NO: 4642 - protein, 12 aa, Artificial Sequence
  Quasi-synthetic sequence derived from human genome
FRLLKRRLREIL

SEQ ID NO: 4643 - protein, 12 aa, Artificial Sequence
  Quasi-synthetic sequence derived from human genome
FWLVRWLLFRLM

SEQ ID NO: 4644 - protein, 12 aa, Artificial Sequence
  Quasi-synthetic sequence derived from human genome
FPMKKVLLLLWK

SEQ ID NO: 4645 - protein, 12 aa, Artificial Sequence
  Quasi-synthetic sequence derived from human genome
LKFRKKKLRFGR

SEQ ID NO: 4646 - protein, 12 aa, Artificial Sequence
  Quasi-synthetic sequence derived from human genome
IKPILRKLPRIK

SEQ ID NO: 4647 - protein, 12 aa, Artificial Sequence
  Quasi-synthetic sequence derived from human genome
KFRRYLSVFFRK

SEQ ID NO: 4648 - protein, 12 aa, Artificial Sequence
  Quasi-synthetic sequence derived from human genome
ITRYLIKLLLLR

SEQ ID NO: 4649 - protein, 12 aa, Artificial Sequence
  Quasi-synthetic sequence derived from human genome
RMLKQMLFRFWL

SEQ ID NO: 4650 - protein, 12 aa, Artificial Sequence
  Quasi-synthetic sequence derived from human genome
KRQLFFRKKLLH

SEQ ID NO: 4651 - protein, 12 aa, Artificial Sequence
  Quasi-synthetic sequence derived from human genome
RKSLLKPKLLRL

SEQ ID NO: 4652 - protein, 12 aa, Artificial Sequence
  Quasi-synthetic sequence derived from human genome
RRILWITLRTWK

SEQ ID NO: 4653 - protein, 12 aa, Artificial Sequence
  Quasi-synthetic sequence derived from human genome
LVVLLLKYRRRH

SEQ ID NO: 4654 - protein, 12 aa, Artificial Sequence
  Quasi-synthetic sequence derived from human genome
LRLPKRLRVVYF

SEQ ID NO: 4655 - protein, 12 aa, Artificial Sequence
  Quasi-synthetic sequence derived from human genome
YVLSFIFRKWRK

SEQ ID NO: 4656 - protein, 12 aa, Artificial Sequence
  Quasi-synthetic sequence derived from human genome
IRRFIFLFFILV

SEQ ID NO: 4657 - protein, 12 aa, Artificial Sequence
  Quasi-synthetic sequence derived from human genome
LWKIGFFKRPLK

SEQ ID NO: 4658 - protein, 12 aa, Artificial Sequence
  Quasi-synthetic sequence derived from human genome
CWVLLKKFKLPR

SEQ ID NO: 4659 - protein, 12 aa, Artificial Sequence
  Quasi-synthetic sequence derived from human genome
QKVKIRRRIRIL

SEQ ID NO: 4660 - protein, 12 aa, Artificial Sequence
  Quasi-synthetic sequence derived from human genome
VLRRILRRAVRY

SEQ ID NO: 4661 - protein, 12 aa, Artificial Sequence
  Quasi-synthetic sequence derived from human genome
WRRAWPRRRRRL

SEQ ID NO: 4662 - protein, 12 aa, Artificial Sequence
  Quasi-synthetic sequence derived from human genome
GAKRWIFWLWWR

SEQ ID NO: 4663 - protein, 12 aa, Artificial Sequence
  Quasi-synthetic sequence derived from human genome
LRTFLRFLLLHR

SEQ ID NO: 4664 - protein, 12 aa, Artificial Sequence
  Quasi-synthetic sequence derived from human genome
KKARWVLLVLIL

SEQ ID NO: 4665 - protein, 12 aa, Artificial Sequence
  Quasi-synthetic sequence derived from human genome
LRAKVFVKRFVR

SEQ ID NO: 4666 - protein, 12 aa, Artificial Sequence
  Quasi-synthetic sequence derived from human genome
RKGRTLFRRLLF

SEQ ID NO: 4667 - protein, 12 aa, Artificial Sequence
  Quasi-synthetic sequence derived from human genome
IRRILVIITRKM

SEQ ID NO: 4668 - protein, 12 aa, Artificial Sequence
  Quasi-synthetic sequence derived from human genome
KKRVVRMLLVIV

SEQ ID NO: 4669 - protein, 12 aa, Artificial Sequence
  Quasi-synthetic sequence derived from human genome
RWLRRKLRARRK

SEQ ID NO: 4670 - protein, 12 aa, Artificial Sequence
  Quasi-synthetic sequence derived from human genome
LRLLRTLRPLRV

SEQ ID NO: 4671 - protein, 12 aa, Artificial Sequence
  Quasi-synthetic sequence derived from human genome
RVRPLVLVIKKW

SEQ ID NO: 4672 - protein, 12 aa, Artificial Sequence
  Quasi-synthetic sequence derived from human genome
IRGKTRLFWLLR

SEQ ID NO: 4673 - protein, 12 aa, Artificial Sequence
  Quasi-synthetic sequence derived from human genome
FMKKTFYKRLLL

SEQ ID NO: 4674 - protein, 12 aa, Artificial Sequence
  Quasi-synthetic sequence derived from human genome
VVLLLLLICKKR

SEQ ID NO: 4675 - protein, 12 aa, Artificial Sequence
  Quasi-synthetic sequence derived from human genome
RPGLRLLWRRRV

SEQ ID NO: 4676 - protein, 12 aa, Artificial Sequence
  Quasi-synthetic sequence derived from human genome
RFLKIIRPLRNI

SEQ ID NO: 4677 - protein, 12 aa, Artificial Sequence
  Quasi-synthetic sequence derived from human genome
AILRIIRLVRVF

SEQ ID NO: 4678 - protein, 12 aa, Artificial Sequence
  Quasi-synthetic sequence derived from human genome
LFLLLQRKNLRR

SEQ ID NO: 4679 - protein, 12 aa, Artificial Sequence
  Quasi-synthetic sequence derived from human genome
KRQLGRLLLLLR

SEQ ID NO: 4680 - protein, 12 aa, Artificial Sequence
  Quasi-synthetic sequence derived from human genome
RFNRLLKFSRLF

SEQ ID NO: 4681 - protein, 12 aa, Artificial Sequence
  Quasi-synthetic sequence derived from human genome
LFRKSFLRNRLF

SEQ ID NO: 4682 - protein, 12 aa, Artificial Sequence
  Quasi-synthetic sequence derived from human genome
KAFRALLLKKRR

SEQ ID NO: 4683 - protein, 12 aa, Artificial Sequence
  Quasi-synthetic sequence derived from human genome
IRKLFIVLLLLL

SEQ ID NO: 4684 - protein, 12 aa, Artificial Sequence
  Quasi-synthetic sequence derived from human genome
RLKTYFKFFIVR

SEQ ID NO: 4685 - protein, 12 aa, Artificial Sequence
  Quasi-synthetic sequence derived from human genome
LAFKLKRKLFTI

SEQ ID NO: 4686 - protein, 12 aa, Artificial Sequence
  Quasi-synthetic sequence derived from human genome
KLLKKFSLLKPW

SEQ ID NO: 4687 - protein, 12 aa, Artificial Sequence
  Quasi-synthetic sequence derived from human genome
KIILLKPIIKVL

SEQ ID NO: 4688 - protein, 12 aa, Artificial Sequence
  Quasi-synthetic sequence derived from human genome
WWRWLTFWRRLQ

SEQ ID NO: 4689 - protein, 12 aa, Artificial Sequence
  Quasi-synthetic sequence derived from human genome
FLLQRKRLWLWA

SEQ ID NO: 4690 - protein, 12 aa, Artificial Sequence
  Quasi-synthetic sequence derived from human genome
LRRWKHWLLLLG

SEQ ID NO: 4691 - protein, 12 aa, Artificial Sequence
  Quasi-synthetic sequence derived from human genome
PRRLRVLLRYKV

SEQ ID NO: 4692 - protein, 12 aa, Artificial Sequence
  Quasi-synthetic sequence derived from human genome
RTIARLRLKKIF

SEQ ID NO: 4693 - protein, 12 aa, Artificial Sequence
  Quasi-synthetic sequence derived from human genome
KIIFRVALVLLR

SEQ ID NO: 4694 - protein, 12 aa, Artificial Sequence
  Quasi-synthetic sequence derived from human genome
MKPMLKKRKLFR

SEQ ID NO: 4695 - protein, 12 aa, Artificial Sequence
  Quasi-synthetic sequence derived from human genome
RLLRRLGLLLLP

SEQ ID NO: 4696 - protein, 12 aa, Artificial Sequence
  Quasi-synthetic sequence derived from human genome
RLPFRLLSLFLR

SEQ ID NO: 4697 - protein, 12 aa, Artificial Sequence
  Quasi-synthetic sequence derived from human genome
LRRLFSRFLLAL

SEQ ID NO: 4698 - protein, 12 aa, Artificial Sequence
  Quasi-synthetic sequence derived from human genome
LLLRLLGPRLLR

SEQ ID NO: 4699 - protein, 12 aa, Artificial Sequence
  Quasi-synthetic sequence derived from human genome
RFLWLLKILVII

SEQ ID NO: 4700 - protein, 12 aa, Artificial Sequence
  Quasi-synthetic sequence derived from human genome
LLLKRSRIPIFK

SEQ ID NO: 4701 - protein, 12 aa, Artificial Sequence
  Quasi-synthetic sequence derived from human genome
KGLRKLIILHLR

SEQ ID NO: 4702 - protein, 12 aa, Artificial Sequence
  Quasi-synthetic sequence derived from human genome
FRWKPLWGVRLR

SEQ ID NO: 4703 - protein, 12 aa, Artificial Sequence
  Quasi-synthetic sequence derived from human genome
RPLSRMLRRLLR

SEQ ID NO: 4704 - protein, 12 aa, Artificial Sequence
  Quasi-synthetic sequence derived from human genome
LRLRAQMRLRRL

SEQ ID NO: 4705 - protein, 12 aa, Artificial Sequence
  Quasi-synthetic sequence derived from human genome
FWSRLRKLNWKR

SEQ ID NO: 4706 - protein, 12 aa, Artificial Sequence
  Quasi-synthetic sequence derived from human genome
FRRSLRHIFRRR

SEQ ID NO: 4707 - protein, 12 aa, Artificial Sequence
  Quasi-synthetic sequence derived from human genome
HILFRRRRRGFR

SEQ ID NO: 4708 - protein, 12 aa, Artificial Sequence
  Quasi-synthetic sequence derived from human genome
KLAKLLKLLLWA

SEQ ID NO: 4709 - protein, 12 aa, Artificial Sequence
  Quasi-synthetic sequence derived from human genome
RFWPIIQIRIKR

SEQ ID NO: 4710 - protein, 12 aa, Artificial Sequence
  Quasi-synthetic sequence derived from human genome
LRRVPLFSLRFR

SEQ ID NO: 4711 - protein, 12 aa, Artificial Sequence
  Quasi-synthetic sequence derived from human genome
RRLLNRRLLLAV

SEQ ID NO: 4712 - protein, 12 aa, Artificial Sequence
  Quasi-synthetic sequence derived from human genome
LKRFSFRSFIWR

SEQ ID NO: 4713 - protein, 12 aa, Artificial Sequence
  Quasi-synthetic sequence derived from human genome
KKSWKKRYFLLR

SEQ ID NO: 4714 - protein, 12 aa, Artificial Sequence
  Quasi-synthetic sequence derived from human genome
LLLWKKIHRMVI

SEQ ID NO: 4715 - protein, 12 aa, Artificial Sequence
  Quasi-synthetic sequence derived from human genome
RRYWRTLVLLLL

SEQ ID NO: 4716 - protein, 12 aa, Artificial Sequence
  Quasi-synthetic sequence derived from human genome
RWRRYKYRFVPW

SEQ ID NO: 4717 - protein, 12 aa, Artificial Sequence
  Quasi-synthetic sequence derived from human genome
LLLRRGRLKRNL

SEQ ID NO: 4718 - protein, 12 aa, Artificial Sequence
  Quasi-synthetic sequence derived from human genome
RRGLLKSFLRFR

SEQ ID NO: 4719 - protein, 12 aa, Artificial Sequence
  Quasi-synthetic sequence derived from human genome
KKFPLKIFKKPL

SEQ ID NO: 4720 - protein, 12 aa, Artificial Sequence
  Quasi-synthetic sequence derived from human genome
WFPRRYLPKIFR

SEQ ID NO: 4721 - protein, 12 aa, Artificial Sequence
  Quasi-synthetic sequence derived from human genome
KKKWGILLIVLL

SEQ ID NO: 4722 - protein, 12 aa, Artificial Sequence
  Quasi-synthetic sequence derived from human genome
RRISWRQRIFLR

SEQ ID NO: 4723 - protein, 12 aa, Artificial Sequence
  Quasi-synthetic sequence derived from human genome
KVAIKKIMKRIF

SEQ ID NO: 4724 - protein, 12 aa, Artificial Sequence
  Quasi-synthetic sequence derived from human genome
YLRRRLVPRYRL

SEQ ID NO: 4725 - protein, 12 aa, Artificial Sequence
  Quasi-synthetic sequence derived from human genome
ILGMLRVLRLLR

SEQ ID NO: 4726 - protein, 12 aa, Artificial Sequence
  Quasi-synthetic sequence derived from human genome
FIKARVIVIRWL

SEQ ID NO: 4727 - protein, 12 aa, Artificial Sequence
  Quasi-synthetic sequence derived from human genome
RLIRRNPLLWLL

SEQ ID NO: 4728 - protein, 12 aa, Artificial Sequence
  Quasi-synthetic sequence derived from human genome
RAVFLLTRWRKF

SEQ ID NO: 4729 - protein, 12 aa, Artificial Sequence
  Quasi-synthetic sequence derived from human genome
FYNKRLKRIVFF

SEQ ID NO: 4730 - protein, 12 aa, Artificial Sequence
  Quasi-synthetic sequence derived from human genome
LLLRKYRVKGLI

SEQ ID NO: 4731 - protein, 12 aa, Artificial Sequence
  Quasi-synthetic sequence derived from human genome
KRWTHLVRLLRL

SEQ ID NO: 4732 - protein, 12 aa, Artificial Sequence
  Quasi-synthetic sequence derived from human genome
LSFKRKHFLIKL

SEQ ID NO: 4733 - protein, 12 aa, Artificial Sequence
  Quasi-synthetic sequence derived from human genome
FKKVFKFVGFKF

SEQ ID NO: 4734 - protein, 12 aa, Artificial Sequence
  Quasi-synthetic sequence derived from human genome
FARLLINLLKKK

SEQ ID NO: 4735 - protein, 12 aa, Artificial Sequence
  Quasi-synthetic sequence derived from human genome
LVKVLKRRTWRR

SEQ ID NO: 4736 - protein, 12 aa, Artificial Sequence
  Quasi-synthetic sequence derived from human genome
KLRQFVILRKKK

SEQ ID NO: 4737 - protein, 12 aa, Artificial Sequence
  Quasi-synthetic sequence derived from human genome
RLCIRKFFPKRK

SEQ ID NO: 4738 - protein, 12 aa, Artificial Sequence
  Quasi-synthetic sequence derived from human genome
IWRFAWRKSIKK

SEQ ID NO: 4739 - protein, 12 aa, Artificial Sequence
  Quasi-synthetic sequence derived from human genome
VFRLKKWIQKVI

SEQ ID NO: 4740 - protein, 12 aa, Artificial Sequence
  Quasi-synthetic sequence derived from human genome
TFVFFIWRRYWR

SEQ ID NO: 4741 - protein, 12 aa, Artificial Sequence
  Quasi-synthetic sequence derived from human genome
LPLRLRLLLLLW

SEQ ID NO: 4742 - protein, 12 aa, Artificial Sequence
  Quasi-synthetic sequence derived from human genome
RLRRPMPWLLLL

SEQ ID NO: 4743 - protein, 12 aa, Artificial Sequence
  Quasi-synthetic sequence derived from human genome
VKRLIFPRFYFL

SEQ ID NO: 4744 - protein, 12 aa, Artificial Sequence
  Quasi-synthetic sequence derived from human genome
LLARLLKRRRRS

SEQ ID NO: 4745 - protein, 12 aa, Artificial Sequence
  Quasi-synthetic sequence derived from human genome
RLPLRLQRRLKR

SEQ ID NO: 4746 - protein, 12 aa, Artificial Sequence
  Quasi-synthetic sequence derived from human genome
LKIFPSKRILRR

SEQ ID NO: 4747 - protein, 12 aa, Artificial Sequence
  Quasi-synthetic sequence derived from human genome
RIRFIRKNKPFL

SEQ ID NO: 4748 - protein, 12 aa, Artificial Sequence
  Quasi-synthetic sequence derived from human genome
GPRWRRRWFVLK

SEQ ID NO: 4749 - protein, 12 aa, Artificial Sequence
  Quasi-synthetic sequence derived from human genome
QLLRKKRRIFIH

SEQ ID NO: 4750 - protein, 12 aa, Artificial Sequence
  Quasi-synthetic sequence derived from human genome
RWRLSRIVFRHL

SEQ ID NO: 4751 - protein, 12 aa, Artificial Sequence
  Quasi-synthetic sequence derived from human genome
LVALLMLRKYRK

SEQ ID NO: 4752 - protein, 12 aa, Artificial Sequence
  Quasi-synthetic sequence derived from human genome
RLMLKYQKILWK

SEQ ID NO: 4753 - protein, 12 aa, Artificial Sequence
  Quasi-synthetic sequence derived from human genome
RMIKPRIVLLIF

SEQ ID NO: 4754 - protein, 12 aa, Artificial Sequence
  Quasi-synthetic sequence derived from human genome
KLMILWIGIRKI

SEQ ID NO: 4755 - protein, 12 aa, Artificial Sequence
  Quasi-synthetic sequence derived from human genome
QWVRLLYRLRFL

SEQ ID NO: 4756 - protein, 12 aa, Artificial Sequence
  Quasi-synthetic sequence derived from human genome
FLLLVVRKLLRT

SEQ ID NO: 4757 - protein, 12 aa, Artificial Sequence
  Quasi-synthetic sequence derived from human genome
FFGFHRLLLKWR

SEQ ID NO: 4758 - protein, 12 aa, Artificial Sequence
  Quasi-synthetic sequence derived from human genome
RLLLWFKRGLAL

SEQ ID NO: 4759 - protein, 12 aa, Artificial Sequence
  Quasi-synthetic sequence derived from human genome
SLFHLRLLWRKL

SEQ ID NO: 4760 - protein, 12 aa, Artificial Sequence
  Quasi-synthetic sequence derived from human genome
RRRCCRLCIWLL

SEQ ID NO: 4761 - protein, 12 aa, Artificial Sequence
  Quasi-synthetic sequence derived from human genome
LMAKKRVIRMLI

SEQ ID NO: 4762 - protein, 12 aa, Artificial Sequence
  Quasi-synthetic sequence derived from human genome
ILRLRRKFERIL

SEQ ID NO: 4763 - protein, 12 aa, Artificial Sequence
  Quasi-synthetic sequence derived from human genome
RLIFRRLSLGRI

SEQ ID NO: 4764 - protein, 12 aa, Artificial Sequence
  Quasi-synthetic sequence derived from human genome
RRVRKRWLPKIK

SEQ ID NO: 4765 - protein, 12 aa, Artificial Sequence
  Quasi-synthetic sequence derived from human genome
RALRLVRRLRGL

SEQ ID NO: 4766 - protein, 12 aa, Artificial Sequence
  Quasi-synthetic sequence derived from human genome
RWISFKSFFRRR

SEQ ID NO: 4767 - protein, 12 aa, Artificial Sequence
  Quasi-synthetic sequence derived from human genome
KIKLHKIIYRLV

SEQ ID NO: 4768 - protein, 12 aa, Artificial Sequence
  Quasi-synthetic sequence derived from human genome
KKYKAIRLIFVI

SEQ ID NO: 4769 - protein, 12 aa, Artificial Sequence
  Quasi-synthetic sequence derived from human genome
WKRARIFPMIFK

SEQ ID NO: 4770 - protein, 12 aa, Artificial Sequence
  Quasi-synthetic sequence derived from human genome
RNLFKKVYLLLK

SEQ ID NO: 4771 - protein, 12 aa, Artificial Sequence
  Quasi-synthetic sequence derived from human genome
KKIWKRMKQKLL

SEQ ID NO: 4772 - protein, 12 aa, Artificial Sequence
  Quasi-synthetic sequence derived from human genome
RMRKIFSRLIYI

SEQ ID NO: 4773 - protein, 12 aa, Artificial Sequence
  Quasi-synthetic sequence derived from human genome
LVRMWRVRWRYC

SEQ ID NO: 4774 - protein, 12 aa, Artificial Sequence
  Quasi-synthetic sequence derived from human genome
IYMISFIFRKRR

SEQ ID NO: 4775 - protein, 12 aa, Artificial Sequence
  Quasi-synthetic sequence derived from human genome
LRRFFLRIGVVF

SEQ ID NO: 4776 - protein, 12 aa, Artificial Sequence
  Quasi-synthetic sequence derived from human genome
ILGVLRVLRLLR

SEQ ID NO: 4777 - protein, 12 aa, Artificial Sequence
  Quasi-synthetic sequence derived from human genome
RITIKKRFKVLM

SEQ ID NO: 4778 - protein, 12 aa, Artificial Sequence
  Quasi-synthetic sequence derived from human genome
RMRHLKIVYRRF

SEQ ID NO: 4779 - protein, 12 aa, Artificial Sequence
  Quasi-synthetic sequence derived from human genome
KIPIFSLFRKWK

SEQ ID NO: 4780 - protein, 12 aa, Artificial Sequence
  Quasi-synthetic sequence derived from human genome
RFPKILVLHLKR

SEQ ID NO: 4781 - protein, 12 aa, Artificial Sequence
  Quasi-synthetic sequence derived from human genome
LIRRFAHLLVKK

SEQ ID NO: 4782 - protein, 12 aa, Artificial Sequence
  Quasi-synthetic sequence derived from human genome
ARALWPLRRFWR

SEQ ID NO: 4783 - protein, 12 aa, Artificial Sequence
  Quasi-synthetic sequence derived from human genome
KKLWFVIKGKVL

SEQ ID NO: 4784 - protein, 12 aa, Artificial Sequence
  Quasi-synthetic sequence derived from human genome
KYFKKMMLLHWR

SEQ ID NO: 4785 - protein, 12 aa, Artificial Sequence
  Quasi-synthetic sequence derived from human genome
AVLKPFLLRRIK

SEQ ID NO: 4786 - protein, 12 aa, Artificial Sequence
  Quasi-synthetic sequence derived from human genome
ITKLLILKLRYF

SEQ ID NO: 4787 - protein, 12 aa, Artificial Sequence
  Quasi-synthetic sequence derived from human genome
HLLRFIKRAMKR

SEQ ID NO: 4788 - protein, 12 aa, Artificial Sequence
  Quasi-synthetic sequence derived from human genome
LRGMLKRLKRMR

SEQ ID NO: 4789 - protein, 12 aa, Artificial Sequence
  Quasi-synthetic sequence derived from human genome
LRKKVLLKNKKL

SEQ ID NO: 4790 - protein, 12 aa, Artificial Sequence
  Quasi-synthetic sequence derived from human genome
LIMIRAFRIYFR

SEQ ID NO: 4791 - protein, 12 aa, Artificial Sequence
  Quasi-synthetic sequence derived from human genome
LIMRIKMCLIKL

SEQ ID NO: 4792 - protein, 12 aa, Artificial Sequence
  Quasi-synthetic sequence derived from human genome
LRVFNFLWRAKR

SEQ ID NO: 4793 - protein, 12 aa, Artificial Sequence
  Quasi-synthetic sequence derived from human genome
KVFLSFRRPFWR

SEQ ID NO: 4794 - protein, 12 aa, Artificial Sequence
  Quasi-synthetic sequence derived from human genome
KFWPRRRFNFFV

SEQ ID NO: 4795 - protein, 12 aa, Artificial Sequence
  Quasi-synthetic sequence derived from human genome
LMKKITLLKYFR

SEQ ID NO: 4796 - protein, 12 aa, Artificial Sequence
  Quasi-synthetic sequence derived from human genome
QVLRLHLKRFRW

SEQ ID NO: 4797 - protein, 12 aa, Artificial Sequence
  Quasi-synthetic sequence derived from human genome
VLLGLRLRRWHK

SEQ ID NO: 4798 - protein, 12 aa, Artificial Sequence
  Quasi-synthetic sequence derived from human genome
IRRRPTRFLRMF

SEQ ID NO: 4799 - protein, 12 aa, Artificial Sequence
  Quasi-synthetic sequence derived from human genome
FMRGWLCRRKWK

SEQ ID NO: 4800 - protein, 12 aa, Artificial Sequence
  Quasi-synthetic sequence derived from human genome
LLTHRVRLRRWK

SEQ ID NO: 4801 - protein, 12 aa, Artificial Sequence
  Quasi-synthetic sequence derived from human genome
RSLRLKIKFPKL

SEQ ID NO: 4802 - protein, 12 aa, Artificial Sequence
  Quasi-synthetic sequence derived from human genome
KKALRKLIGRLF

SEQ ID NO: 4803 - protein, 12 aa, Artificial Sequence
  Quasi-synthetic sequence derived from human genome
KRLLFYKYVYKR

SEQ ID NO: 4804 - protein, 12 aa, Artificial Sequence
  Quasi-synthetic sequence derived from human genome
ILKKKGLLRLAR

SEQ ID NO: 4805 - protein, 12 aa, Artificial Sequence
  Quasi-synthetic sequence derived from human genome
LRFLQILRMIRM

SEQ ID NO: 4806 - protein, 12 aa, Artificial Sequence
  Quasi-synthetic sequence derived from human genome
ALKRKIFPRRRI

SEQ ID NO: 4807 - protein, 12 aa, Artificial Sequence
  Quasi-synthetic sequence derived from human genome
FYNIIFRRLLKI

SEQ ID NO: 4808 - protein, 12 aa, Artificial Sequence
  Quasi-synthetic sequence derived from human genome
VLLLLAMLVRRR

SEQ ID NO: 4809 - protein, 12 aa, Artificial Sequence
  Quasi-synthetic sequence derived from human genome
LSFFRKLRLIRG

SEQ ID NO: 4810 - protein, 12 aa, Artificial Sequence
  Quasi-synthetic sequence derived from human genome
IRKFRRSLLQLL

SEQ ID NO: 4811 - protein, 12 aa, Artificial Sequence
  Quasi-synthetic sequence derived from human genome
RCLRLCALLLRR

SEQ ID NO: 4812 - protein, 12 aa, Artificial Sequence
  Quasi-synthetic sequence derived from human genome
LFILKLGRRSRL

SEQ ID NO: 4813 - protein, 12 aa, Artificial Sequence
  Quasi-synthetic sequence derived from human genome
RRVLLLCKTRRL

SEQ ID NO: 4814 - protein, 12 aa, Artificial Sequence
  Quasi-synthetic sequence derived from human genome
MLMAKKWVKFKR

SEQ ID NO: 4815 - protein, 12 aa, Artificial Sequence
  Quasi-synthetic sequence derived from human genome
FIRFRFFQPLRL

SEQ ID NO: 4816 - protein, 12 aa, Artificial Sequence
  Quasi-synthetic sequence derived from human genome
RLRKCLFLFIGW

SEQ ID NO: 4817 - protein, 12 aa, Artificial Sequence
  Quasi-synthetic sequence derived from human genome
LRFLRALRLIQF

SEQ ID NO: 4818 - protein, 12 aa, Artificial Sequence
  Quasi-synthetic sequence derived from human genome
RLLPRLLLLLLL

SEQ ID NO: 4819 - protein, 12 aa, Artificial Sequence
  Quasi-synthetic sequence derived from human genome
LRPRLLLLLLLL

SEQ ID NO: 4820 - protein, 12 aa, Artificial Sequence
  Quasi-synthetic sequence derived from human genome
LFLLLFLLLRHR

SEQ ID NO: 4821 - protein, 12 aa, Artificial Sequence
  Quasi-synthetic sequence derived from human genome
LFFFLRLHRLLL

SEQ ID NO: 4822 - protein, 12 aa, Artificial Sequence
  Quasi-synthetic sequence derived from human genome
LRLLRPLLLLLL

SEQ ID NO: 4823 - protein, 12 aa, Artificial Sequence
  Quasi-synthetic sequence derived from human genome
FFRVRSRRWKVK

SEQ ID NO: 4824 - protein, 12 aa, Artificial Sequence
  Quasi-synthetic sequence derived from human genome
RKNWKVRRFVLR

SEQ ID NO: 4825 - protein, 12 aa, Artificial Sequence
  Quasi-synthetic sequence derived from human genome
LVLRFLAKLHKK

SEQ ID NO: 4826 - protein, 12 aa, Artificial Sequence
  Quasi-synthetic sequence derived from human genome
VRPKPLLLKLLK

SEQ ID NO: 4827 - protein, 12 aa, Artificial Sequence
  Quasi-synthetic sequence derived from human genome
WRLRLCIFLIWL

SEQ ID NO: 4828 - protein, 12 aa, Artificial Sequence
  Quasi-synthetic sequence derived from human genome
LVLMVLYLIKKR

SEQ ID NO: 4829 - protein, 12 aa, Artificial Sequence
  Quasi-synthetic sequence derived from human genome
AKLAFLKLIFKW

SEQ ID NO: 4830 - protein, 12 aa, Artificial Sequence
  Quasi-synthetic sequence derived from human genome
IKKLLKKSKYFI

SEQ ID NO: 4831 - protein, 12 aa, Artificial Sequence
  Quasi-synthetic sequence derived from human genome
KWPLRFVIIHKR

SEQ ID NO: 4832 - protein, 12 aa, Artificial Sequence
  Quasi-synthetic sequence derived from human genome
RRKFLLLGMRPF

SEQ ID NO: 4833 - protein, 12 aa, Artificial Sequence
  Quasi-synthetic sequence derived from human genome
FRRKPVRFFTFL

SEQ ID NO: 4834 - protein, 12 aa, Artificial Sequence
  Quasi-synthetic sequence derived from human genome
WLRRGKTLKLIF

SEQ ID NO: 4835 - protein, 12 aa, Artificial Sequence
  Quasi-synthetic sequence derived from human genome
RLWLSKTLRILK

SEQ ID NO: 4836 - protein, 12 aa, Artificial Sequence
  Quasi-synthetic sequence derived from human genome
KKNIFLLFKKLC

SEQ ID NO: 4837 - protein, 12 aa, Artificial Sequence
  Quasi-synthetic sequence derived from human genome
RRLLKTVLMILL

SEQ ID NO: 4838 - protein, 12 aa, Artificial Sequence
  Quasi-synthetic sequence derived from human genome
HLARFLRMLLRL

SEQ ID NO: 4839 - protein, 12 aa, Artificial Sequence
  Quasi-synthetic sequence derived from human genome
RLLLRLPALRLM

SEQ ID NO: 4840 - protein, 12 aa, Artificial Sequence
  Quasi-synthetic sequence derived from human genome
VLLLWKMGFFKR

SEQ ID NO: 4841 - protein, 12 aa, Artificial Sequence
  Quasi-synthetic sequence derived from human genome
RLTWRKMCRKLL

SEQ ID NO: 4842 - protein, 12 aa, Artificial Sequence
  Quasi-synthetic sequence derived from human genome
LLLRITKRTWRK

SEQ ID NO: 4843 - protein, 12 aa, Artificial Sequence
  Quasi-synthetic sequence derived from human genome
SRKKVLLKVIIL

SEQ ID NO: 4844 - protein, 12 aa, Artificial Sequence
  Quasi-synthetic sequence derived from human genome
RRRRLCLQLYFL

SEQ ID NO: 4845 - protein, 12 aa, Artificial Sequence
  Quasi-synthetic sequence derived from human genome
LYMKPRMKIFLR

SEQ ID NO: 4846 - protein, 12 aa, Artificial Sequence
  Quasi-synthetic sequence derived from human genome
RLFQLIKIIKIM

SEQ ID NO: 4847 - protein, 12 aa, Artificial Sequence
  Quasi-synthetic sequence derived from human genome
MVIFRWWKISLR

SEQ ID NO: 4848 - protein, 12 aa, Artificial Sequence
  Quasi-synthetic sequence derived from human genome
IFVLIYVRVFRK

SEQ ID NO: 4849 - protein, 12 aa, Artificial Sequence
  Quasi-synthetic sequence derived from human genome
AFIILRKRPLIF

SEQ ID NO: 4850 - protein, 12 aa, Artificial Sequence
  Quasi-synthetic sequence derived from human genome
FFLRKFKNSRFF

SEQ ID NO: 4851 - protein, 12 aa, Artificial Sequence
  Quasi-synthetic sequence derived from human genome
FGLRSRKLKLFL

SEQ ID NO: 4852 - protein, 12 aa, Artificial Sequence
  Quasi-synthetic sequence derived from human genome
KRLFFPRFFFLS

SEQ ID NO: 4853 - protein, 12 aa, Artificial Sequence
  Quasi-synthetic sequence derived from human genome
KWKKFAKHMFFL

SEQ ID NO: 4854 - protein, 12 aa, Artificial Sequence
  Quasi-synthetic sequence derived from human genome
MKLLRRAWRRRA

SEQ ID NO: 4855 - protein, 12 aa, Artificial Sequence
  Quasi-synthetic sequence derived from human genome
FRCIALRWVRLL

SEQ ID NO: 4856 - protein, 12 aa, Artificial Sequence
  Quasi-synthetic sequence derived from human genome
VVSLLRLRLRKV

SEQ ID NO: 4857 - protein, 12 aa, Artificial Sequence
  Quasi-synthetic sequence derived from human genome
RFGRRRPFILVL

SEQ ID NO: 4858 - protein, 12 aa, Artificial Sequence
  Quasi-synthetic sequence derived from human genome
ILFRRAVLRRLQ

SEQ ID NO: 4859 - protein, 12 aa, Artificial Sequence
  Quasi-synthetic sequence derived from human genome
LKVVRLLRLGRV

SEQ ID NO: 4860 - protein, 12 aa, Artificial Sequence
  Quasi-synthetic sequence derived from human genome
RLFSIVRPRRLL

SEQ ID NO: 4861 - protein, 12 aa, Artificial Sequence
  Quasi-synthetic sequence derived from human genome
AFRKFLMFIYKL

SEQ ID NO: 4862 - protein, 12 aa, Artificial Sequence
  Quasi-synthetic sequence derived from human genome
KFVLLILKRKTY

SEQ ID NO: 4863 - protein, 12 aa, Artificial Sequence
  Quasi-synthetic sequence derived from human genome
RKLYMKSLLKIF

SEQ ID NO: 4864 - protein, 12 aa, Artificial Sequence
  Quasi-synthetic sequence derived from human genome
LRKKILKIRHGW

SEQ ID NO: 4865 - protein, 12 aa, Artificial Sequence
  Quasi-synthetic sequence derived from human genome
LFRTKSKRRFFF

SEQ ID NO: 4866 - protein, 12 aa, Artificial Sequence
  Quasi-synthetic sequence derived from human genome
LKTNFRLLKRRL

SEQ ID NO: 4867 - protein, 12 aa, Artificial Sequence
  Quasi-synthetic sequence derived from human genome
RLWMWSWKHIRK

SEQ ID NO: 4868 - protein, 12 aa, Artificial Sequence
  Quasi-synthetic sequence derived from human genome
KKVWIGIKKLLM

SEQ ID NO: 4869 - protein, 12 aa, Artificial Sequence
  Quasi-synthetic sequence derived from human genome
RFKLKCIFCKKR

SEQ ID NO: 4870 - protein, 12 aa, Artificial Sequence
  Quasi-synthetic sequence derived from human genome
LLRLLNKLTKWK

SEQ ID NO: 4871 - protein, 12 aa, Artificial Sequence
  Quasi-synthetic sequence derived from human genome
RLWVSRLLRHRK

SEQ ID NO: 4872 - protein, 12 aa, Artificial Sequence
  Quasi-synthetic sequence derived from human genome
KIILRCKRKLGL

SEQ ID NO: 4873 - protein, 12 aa, Artificial Sequence
  Quasi-synthetic sequence derived from human genome
WCRRRRPLLRLP

SEQ ID NO: 4874 - protein, 12 aa, Artificial Sequence
  Quasi-synthetic sequence derived from human genome
WKKRWFILRSGR

SEQ ID NO: 4875 - protein, 12 aa, Artificial Sequence
  Quasi-synthetic sequence derived from human genome
LLVHLWRRVMLK

SEQ ID NO: 4876 - protein, 12 aa, Artificial Sequence
  Quasi-synthetic sequence derived from human genome
RRLVPFLWLKWP

SEQ ID NO: 4877 - protein, 12 aa, Artificial Sequence
  Quasi-synthetic sequence derived from human genome
VLLALRLWRWHK

SEQ ID NO: 4878 - protein, 12 aa, Artificial Sequence
  Quasi-synthetic sequence derived from human genome
LKFVVVTRWRFK

SEQ ID NO: 4879 - protein, 12 aa, Artificial Sequence
  Quasi-synthetic sequence derived from human genome
LKILRIRGYVFK

SEQ ID NO: 4880 - protein, 12 aa, Artificial Sequence
  Quasi-synthetic sequence derived from human genome
RLLRIFKVTRHW

SEQ ID NO: 4881 - protein, 12 aa, Artificial Sequence
  Quasi-synthetic sequence derived from human genome
IKYFFQKVILRR

SEQ ID NO: 4882 - protein, 12 aa, Artificial Sequence
  Quasi-synthetic sequence derived from human genome
IRRWGFMFKRHL

SEQ ID NO: 4883 - protein, 12 aa, Artificial Sequence
  Quasi-synthetic sequence derived from human genome
RKRMISLRFLAW

SEQ ID NO: 4884 - protein, 12 aa, Artificial Sequence
  Quasi-synthetic sequence derived from human genome
RFRPRWKVILTF

SEQ ID NO: 4885 - protein, 12 aa, Artificial Sequence
  Quasi-synthetic sequence derived from human genome
WRMYVVRRRYKI

SEQ ID NO: 4886 - protein, 12 aa, Artificial Sequence
  Quasi-synthetic sequence derived from human genome
KFLSHFKRKFII

SEQ ID NO: 4887 - protein, 12 aa, Artificial Sequence
  Quasi-synthetic sequence derived from human genome
LLLRWRRPALHR

SEQ ID NO: 4888 - protein, 12 aa, Artificial Sequence
  Quasi-synthetic sequence derived from human genome
AARLWRLLPFRR

SEQ ID NO: 4889 - protein, 12 aa, Artificial Sequence
  Quasi-synthetic sequence derived from human genome
KRLFFRFMNVLI

SEQ ID NO: 4890 - protein, 12 aa, Artificial Sequence
  Quasi-synthetic sequence derived from human genome
AVLLLLLRALRR

SEQ ID NO: 4891 - protein, 12 aa, Artificial Sequence
  Quasi-synthetic sequence derived from human genome
RLLPRVRLLPLL

SEQ ID NO: 4892 - protein, 12 aa, Artificial Sequence
  Quasi-synthetic sequence derived from human genome
RLRLARLALVLL

SEQ ID NO: 4893 - protein, 12 aa, Artificial Sequence
  Quasi-synthetic sequence derived from human genome
KRIGHFLFWFLR

SEQ ID NO: 4894 - protein, 12 aa, Artificial Sequence
  Quasi-synthetic sequence derived from human genome
WLRFIQCLRRYR

SEQ ID NO: 4895 - protein, 12 aa, Artificial Sequence
  Quasi-synthetic sequence derived from human genome
RKIMCQLLFRRF

SEQ ID NO: 4896 - protein, 12 aa, Artificial Sequence
  Quasi-synthetic sequence derived from human genome
NLLFLHLKRRVR

SEQ ID NO: 4897 - protein, 12 aa, Artificial Sequence
  Quasi-synthetic sequence derived from human genome
RSFRLLRVFKLA

SEQ ID NO: 4898 - protein, 12 aa, Artificial Sequence
  Quasi-synthetic sequence derived from human genome
RLHLRRFLVSKL

SEQ ID NO: 4899 - protein, 12 aa, Artificial Sequence
  Quasi-synthetic sequence derived from human genome
RLPLLRRVLKGL

SEQ ID NO: 4900 - protein, 12 aa, Artificial Sequence
  Quasi-synthetic sequence derived from human genome
QFLRRKFVLLAR

SEQ ID NO: 4901 - protein, 12 aa, Artificial Sequence
  Quasi-synthetic sequence derived from human genome
LARRLQKRVLLL

SEQ ID NO: 4902 - protein, 12 aa, Artificial Sequence
  Quasi-synthetic sequence derived from human genome
RVFKLFRALGLR

SEQ ID NO: 4903 - protein, 12 aa, Artificial Sequence
  Quasi-synthetic sequence derived from human genome
FPFRCRFPRLLR

SEQ ID NO: 4904 - protein, 12 aa, Artificial Sequence
  Quasi-synthetic sequence derived from human genome
KNFWRFIFRKNL

SEQ ID NO: 4905 - protein, 12 aa, Artificial Sequence
  Quasi-synthetic sequence derived from human genome
YRLLWVYMIRIK

SEQ ID NO: 4906 - protein, 12 aa, Artificial Sequence
  Quasi-synthetic sequence derived from human genome
KRKSLLFRLKKK

SEQ ID NO: 4907 - protein, 12 aa, Artificial Sequence
  Quasi-synthetic sequence derived from human genome
KRRFRKFLVYVA

SEQ ID NO: 4908 - protein, 12 aa, Artificial Sequence
  Quasi-synthetic sequence derived from human genome
RGRPRKWWLLMK

SEQ ID NO: 4909 - protein, 12 aa, Artificial Sequence
  Quasi-synthetic sequence derived from human genome
PKLRKFWNLIKK

SEQ ID NO: 4910 - protein, 12 aa, Artificial Sequence
  Quasi-synthetic sequence derived from human genome
KAFLRLVRKLHK

SEQ ID NO: 4911 - protein, 12 aa, Artificial Sequence
  Quasi-synthetic sequence derived from human genome
RLHVLKALKKLR

SEQ ID NO: 4912 - protein, 12 aa, Artificial Sequence
  Quasi-synthetic sequence derived from human genome
RRLHVLKALKKL

SEQ ID NO: 4913 - protein, 12 aa, Artificial Sequence
  Quasi-synthetic sequence derived from human genome
RSKIRRVLWLVV

SEQ ID NO: 4914 - protein, 12 aa, Artificial Sequence
  Quasi-synthetic sequence derived from human genome
RRRALRILGIVW

SEQ ID NO: 4915 - protein, 12 aa, Artificial Sequence
  Quasi-synthetic sequence derived from human genome
KKKLKRHLALFR

SEQ ID NO: 4916 - protein, 12 aa, Artificial Sequence
  Quasi-synthetic sequence derived from human genome
LKLRPLMKILAK

SEQ ID NO: 4917 - protein, 12 aa, Artificial Sequence
  Quasi-synthetic sequence derived from human genome
IIKFLLGYKWFK

SEQ ID NO: 4918 - protein, 12 aa, Artificial Sequence
  Quasi-synthetic sequence derived from human genome
RMRLVNRFYRRL

SEQ ID NO: 4919 - protein, 12 aa, Artificial Sequence
  Quasi-synthetic sequence derived from human genome
IVRIMKARKVLR

SEQ ID NO: 4920 - protein, 12 aa, Artificial Sequence
  Quasi-synthetic sequence derived from human genome
LRRSYWRHLRRL

SEQ ID NO: 4921 - protein, 12 aa, Artificial Sequence
  Quasi-synthetic sequence derived from human genome
RRRLPTVLLKLR

SEQ ID NO: 4922 - protein, 12 aa, Artificial Sequence
  Quasi-synthetic sequence derived from human genome
YMRLRQLKRFRR

SEQ ID NO: 4923 - protein, 12 aa, Artificial Sequence
  Quasi-synthetic sequence derived from human genome
LVIKHFLRKIIM

SEQ ID NO: 4924 - protein, 12 aa, Artificial Sequence
  Quasi-synthetic sequence derived from human genome
MYLRQLFRILFR

SEQ ID NO: 4925 - protein, 12 aa, Artificial Sequence
  Quasi-synthetic sequence derived from human genome
FRRQLLYWFLKV

SEQ ID NO: 4926 - protein, 12 aa, Artificial Sequence
  Quasi-synthetic sequence derived from human genome
KFRTWRQLWLWL

SEQ ID NO: 4927 - protein, 12 aa, Artificial Sequence
  Quasi-synthetic sequence derived from human genome
KLILTPFLLRRL

SEQ ID NO: 4928 - protein, 12 aa, Artificial Sequence
  Quasi-synthetic sequence derived from human genome
TFFIAFFLRKFR

SEQ ID NO: 4929 - protein, 12 aa, Artificial Sequence
  Quasi-synthetic sequence derived from human genome
KRLLINLYKLVK

SEQ ID NO: 4930 - protein, 12 aa, Artificial Sequence
  Quasi-synthetic sequence derived from human genome
IGWWKLTFLRKK

SEQ ID NO: 4931 - protein, 12 aa, Artificial Sequence
  Quasi-synthetic sequence derived from human genome
LRRLRQRRRLRR

SEQ ID NO: 4932 - protein, 12 aa, Artificial Sequence
  Quasi-synthetic sequence derived from human genome
LGWIKRLIRMVF

SEQ ID NO: 4933 - protein, 12 aa, Artificial Sequence
  Quasi-synthetic sequence derived from human genome
VCLILLVKIKLK

SEQ ID NO: 4934 - protein, 12 aa, Artificial Sequence
  Quasi-synthetic sequence derived from human genome
WKILWFIPFRQR

SEQ ID NO: 4935 - protein, 12 aa, Artificial Sequence
  Quasi-synthetic sequence derived from human genome
VFRWAILRAFFR

SEQ ID NO: 4936 - protein, 12 aa, Artificial Sequence
  Quasi-synthetic sequence derived from human genome
LLRKRLQQLRLK

SEQ ID NO: 4937 - protein, 12 aa, Artificial Sequence
  Quasi-synthetic sequence derived from human genome
LLHRHRRRLRRR

SEQ ID NO: 4938 - protein, 12 aa, Artificial Sequence
  Quasi-synthetic sequence derived from human genome
LRNLFTKFIRKF

SEQ ID NO: 4939 - protein, 12 aa, Artificial Sequence
  Quasi-synthetic sequence derived from human genome
RWLPRPRAWFIR

SEQ ID NO: 4940 - protein, 12 aa, Artificial Sequence
  Quasi-synthetic sequence derived from human genome
LRQRLRYALRLL

SEQ ID NO: 4941 - protein, 12 aa, Artificial Sequence
  Quasi-synthetic sequence derived from human genome
NYRAFLLRRRFL

SEQ ID NO: 4942 - protein, 12 aa, Artificial Sequence
  Quasi-synthetic sequence derived from human genome
LLRVRKLLLVVC

SEQ ID NO: 4943 - protein, 12 aa, Artificial Sequence
  Quasi-synthetic sequence derived from human genome
KLLLLLLLLPLR

SEQ ID NO: 4944 - protein, 12 aa, Artificial Sequence
  Quasi-synthetic sequence derived from human genome
LLLVAMICRRRR

SEQ ID NO: 4945 - protein, 12 aa, Artificial Sequence
  Quasi-synthetic sequence derived from human genome
ARRLLRLVVRFA

SEQ ID NO: 4946 - protein, 12 aa, Artificial Sequence
  Quasi-synthetic sequence derived from human genome
RLFRWLVHRINK

SEQ ID NO: 4947 - protein, 12 aa, Artificial Sequence
  Quasi-synthetic sequence derived from human genome
RVVRLLRLRAAL

SEQ ID NO: 4948 - protein, 12 aa, Artificial Sequence
  Quasi-synthetic sequence derived from human genome
YFFWKNMKFIKK

SEQ ID NO: 4949 - protein, 12 aa, Artificial Sequence
  Quasi-synthetic sequence derived from human genome
YRLLWVYVIRIK

SEQ ID NO: 4950 - protein, 12 aa, Artificial Sequence
  Quasi-synthetic sequence derived from human genome
RSPRIRKRFLLR

SEQ ID NO: 4951 - protein, 12 aa, Artificial Sequence
  Quasi-synthetic sequence derived from human genome
ILRKPFRSRRLR

SEQ ID NO: 4952 - protein, 12 aa, Artificial Sequence
  Quasi-synthetic sequence derived from human genome
RCWRKKRRLNIL

SEQ ID NO: 4953 - protein, 12 aa, Artificial Sequence
  Quasi-synthetic sequence derived from human genome
IKILVKTMIRKR

SEQ ID NO: 4954 - protein, 12 aa, Artificial Sequence
  Quasi-synthetic sequence derived from human genome
RLFMILWLKGVK

SEQ ID NO: 4955 - protein, 12 aa, Artificial Sequence
  Quasi-synthetic sequence derived from human genome
KVKRTIVFLLWL

SEQ ID NO: 4956 - protein, 12 aa, Artificial Sequence
  Quasi-synthetic sequence derived from human genome
KKRVTLLILLVW

SEQ ID NO: 4957 - protein, 12 aa, Artificial Sequence
  Quasi-synthetic sequence derived from human genome
LAVFVIYKFKRR

SEQ ID NO: 4958 - protein, 12 aa, Artificial Sequence
  Quasi-synthetic sequence derived from human genome
WWFMSVKVKLKR

SEQ ID NO: 4959 - protein, 12 aa, Artificial Sequence
  Quasi-synthetic sequence derived from human genome
LGLWKIARKWMR

SEQ ID NO: 4960 - protein, 12 aa, Artificial Sequence
  Quasi-synthetic sequence derived from human genome
IMRFLRRCRHRM

SEQ ID NO: 4961 - protein, 12 aa, Artificial Sequence
  Quasi-synthetic sequence derived from human genome
VLYLLIGLRLRR

SEQ ID NO: 4962 - protein, 12 aa, Artificial Sequence
  Quasi-synthetic sequence derived from human genome
RIRFQFRFFLVY

SEQ ID NO: 4963 - protein, 12 aa, Artificial Sequence
  Quasi-synthetic sequence derived from human genome
RKFLLLGLRPFI

SEQ ID NO: 4964 - protein, 12 aa, Artificial Sequence
  Quasi-synthetic sequence derived from human genome
RLLWNWWKLRSL

SEQ ID NO: 4965 - protein, 12 aa, Artificial Sequence
  Quasi-synthetic sequence derived from human genome
GFLKLIHLLLRR

SEQ ID NO: 4966 - protein, 12 aa, Artificial Sequence
  Quasi-synthetic sequence derived from human genome
LVLMARRRLARR

SEQ ID NO: 4967 - protein, 12 aa, Artificial Sequence
  Quasi-synthetic sequence derived from human genome
SKLKKPRRIILL

SEQ ID NO: 4968 - protein, 12 aa, Artificial Sequence
  Quasi-synthetic sequence derived from human genome
RRWRHALHRRLL

SEQ ID NO: 4969 - protein, 12 aa, Artificial Sequence
  Quasi-synthetic sequence derived from human genome
RLKALRKIQKLI

SEQ ID NO: 4970 - protein, 12 aa, Artificial Sequence
  Quasi-synthetic sequence derived from human genome
KLKYKYKARIFL

SEQ ID NO: 4971 - protein, 12 aa, Artificial Sequence
  Quasi-synthetic sequence derived from human genome
IRIVLFLQKVWR

SEQ ID NO: 4972 - protein, 12 aa, Artificial Sequence
  Quasi-synthetic sequence derived from human genome
RRRMKLLLGIAL

SEQ ID NO: 4973 - protein, 12 aa, Artificial Sequence
  Quasi-synthetic sequence derived from human genome
MRSFKRRFFHLI

SEQ ID NO: 4974 - protein, 12 aa, Artificial Sequence
  Quasi-synthetic sequence derived from human genome
LIRKLPFQRLMR

SEQ ID NO: 4975 - protein, 12 aa, Artificial Sequence
  Quasi-synthetic sequence derived from human genome
LHYRFLNWRRRI

SEQ ID NO: 4976 - protein, 12 aa, Artificial Sequence
  Quasi-synthetic sequence derived from human genome
ALPALLLRRLRR

SEQ ID NO: 4977 - protein, 12 aa, Artificial Sequence
  Quasi-synthetic sequence derived from human genome
RLLRVFKLAKSW

SEQ ID NO: 4978 - protein, 12 aa, Artificial Sequence
  Quasi-synthetic sequence derived from human genome
RRIRPWINKKII

SEQ ID NO: 4979 - protein, 12 aa, Artificial Sequence
  Quasi-synthetic sequence derived from human genome
RLCIRKFFPKKK

SEQ ID NO: 4980 - protein, 12 aa, Artificial Sequence
  Quasi-synthetic sequence derived from human genome
LPLFRRCPRLRR

SEQ ID NO: 4981 - protein, 12 aa, Artificial Sequence
  Quasi-synthetic sequence derived from human genome
LRWVTFLLKIYR

SEQ ID NO: 4982 - protein, 12 aa, Artificial Sequence
  Quasi-synthetic sequence derived from human genome
WPRRLLLRYLFP

SEQ ID NO: 4983 - protein, 12 aa, Artificial Sequence
  Quasi-synthetic sequence derived from human genome
KKVLLLLWKTVL

SEQ ID NO: 4984 - protein, 12 aa, Artificial Sequence
  Quasi-synthetic sequence derived from human genome
WWARKRLNIRVI

SEQ ID NO: 4985 - protein, 12 aa, Artificial Sequence
  Quasi-synthetic sequence derived from human genome
RRRVRALIAVLW

SEQ ID NO: 4986 - protein, 12 aa, Artificial Sequence
  Quasi-synthetic sequence derived from human genome
WWFFLGPKFKKL

SEQ ID NO: 4987 - protein, 12 aa, Artificial Sequence
  Quasi-synthetic sequence derived from human genome
LFKLLRKSILQR

SEQ ID NO: 4988 - protein, 12 aa, Artificial Sequence
  Quasi-synthetic sequence derived from human genome
RLLKILQLQRFK

SEQ ID NO: 4989 - protein, 12 aa, Artificial Sequence
  Quasi-synthetic sequence derived from human genome
LRDLKLRKFIFK

SEQ ID NO: 4990 - protein, 12 aa, Artificial Sequence
  Quasi-synthetic sequence derived from human genome
RLKLLLQNILKR

SEQ ID NO: 4991 - protein, 12 aa, Artificial Sequence
  Quasi-synthetic sequence derived from human genome
KFCVGLLRLKRL

SEQ ID NO: 4992 - protein, 12 aa, Artificial Sequence
  Quasi-synthetic sequence derived from human genome
IRLPRIRRWRSV

SEQ ID NO: 4993 - protein, 12 aa, Artificial Sequence
  Quasi-synthetic sequence derived from human genome
ILRRHLMVWKVF

SEQ ID NO: 4994 - protein, 12 aa, Artificial Sequence
  Quasi-synthetic sequence derived from human genome
RKRFHLLSRLRK

SEQ ID NO: 4995 - protein, 12 aa, Artificial Sequence
  Quasi-synthetic sequence derived from human genome
SHLRKLRKRLLR

SEQ ID NO: 4996 - protein, 12 aa, Artificial Sequence
  Quasi-synthetic sequence derived from human genome
LKRFKVMKPKVL

SEQ ID NO: 4997 - protein, 12 aa, Artificial Sequence
  Quasi-synthetic sequence derived from human genome
LARIGRVLRLIR

SEQ ID NO: 4998 - protein, 12 aa, Artificial Sequence
  Quasi-synthetic sequence derived from human genome
LIRSLRRRAVLI

SEQ ID NO: 4999 - protein, 12 aa, Artificial Sequence
  Quasi-synthetic sequence derived from human genome
LFRIVRLARIGR

SEQ ID NO: 5000 - protein, 12 aa, Artificial Sequence
  Quasi-synthetic sequence derived from human genome
RRVFIVFRKGFV

SEQ ID NO: 5001 - protein, 13 aa, Artificial Sequence
  Quasi-synthetic sequence derived from human genome
LKRKFIKKRIIII

SEQ ID NO: 5002 - protein, 13 aa, Artificial Sequence
  Quasi-synthetic sequence derived from human genome
RRYLRRLLLLLLL

SEQ ID NO: 5003 - protein, 13 aa, Artificial Sequence
  Quasi-synthetic sequence derived from human genome
RLFAWRKRWFILR

SEQ ID NO: 5004 - protein, 13 aa, Artificial Sequence
  Quasi-synthetic sequence derived from human genome
RLMRRLVRRLRRW

SEQ ID NO: 5005 - protein, 13 aa, Artificial Sequence
  Quasi-synthetic sequence derived from human genome
LLRLFRMLRIFKL

SEQ ID NO: 5006 - protein, 13 aa, Artificial Sequence
  Quasi-synthetic sequence derived from human genome
KLLRRRFRLLLAL

SEQ ID NO: 5007 - protein, 13 aa, Artificial Sequence
  Quasi-synthetic sequence derived from human genome
LLARRFLLRRKFI

SEQ ID NO: 5008 - protein, 13 aa, Artificial Sequence
  Quasi-synthetic sequence derived from human genome
FRFLLRKLYVFRR

SEQ ID NO: 5009 - protein, 13 aa, Artificial Sequence
  Quasi-synthetic sequence derived from human genome
LLCLLLLWWRRRK

SEQ ID NO: 5010 - protein, 13 aa, Artificial Sequence
  Quasi-synthetic sequence derived from human genome
LLIKKLIIFILKK

SEQ ID NO: 5011 - protein, 13 aa, Artificial Sequence
  Quasi-synthetic sequence derived from human genome
LLVLLLLVRKKRK

SEQ ID NO: 5012 - protein, 13 aa, Artificial Sequence
  Quasi-synthetic sequence derived from human genome
IFRIMRILRILKL

SEQ ID NO: 5013 - protein, 13 aa, Artificial Sequence
  Quasi-synthetic sequence derived from human genome
MVWRRLLRKRWVL

SEQ ID NO: 5014 - protein, 13 aa, Artificial Sequence
  Quasi-synthetic sequence derived from human genome
KVILKKKKKLLLL

SEQ ID NO: 5015 - protein, 13 aa, Artificial Sequence
  Quasi-synthetic sequence derived from human genome
LCLRLLLFFRFKR

SEQ ID NO: 5016 - protein, 13 aa, Artificial Sequence
  Quasi-synthetic sequence derived from human genome
LFVLLLVVRRRRR

SEQ ID NO: 5017 - protein, 13 aa, Artificial Sequence
  Quasi-synthetic sequence derived from human genome
VMRKKLILFFKRR

SEQ ID NO: 5018 - protein, 13 aa, Artificial Sequence
  Quasi-synthetic sequence derived from human genome
LRIRRLLRPFFLL

SEQ ID NO: 5019 - protein, 13 aa, Artificial Sequence
  Quasi-synthetic sequence derived from human genome
KKIMFFLLIIRKL

SEQ ID NO: 5020 - protein, 13 aa, Artificial Sequence
  Quasi-synthetic sequence derived from human genome
RRMRILRRLLRRY

SEQ ID NO: 5021 - protein, 13 aa, Artificial Sequence
  Quasi-synthetic sequence derived from human genome
KIARKLLFLFRIK

SEQ ID NO: 5022 - protein, 13 aa, Artificial Sequence
  Quasi-synthetic sequence derived from human genome
ILILLLLLFLRRR

SEQ ID NO: 5023 - protein, 13 aa, Artificial Sequence
  Quasi-synthetic sequence derived from human genome
ITLLIFLRRRLRK

SEQ ID NO: 5024 - protein, 13 aa, Artificial Sequence
  Quasi-synthetic sequence derived from human genome
KKLRRLLKYMFIR

SEQ ID NO: 5025 - protein, 13 aa, Artificial Sequence
  Quasi-synthetic sequence derived from human genome
KFILWRRFRWAII

SEQ ID NO: 5026 - protein, 13 aa, Artificial Sequence
  Quasi-synthetic sequence derived from human genome
LRLLRLIILLRIF

SEQ ID NO: 5027 - protein, 13 aa, Artificial Sequence
  Quasi-synthetic sequence derived from human genome
ILLKKYLMKRRWK

SEQ ID NO: 5028 - protein, 13 aa, Artificial Sequence
  Quasi-synthetic sequence derived from human genome
VWKRWKKRFFVLV

SEQ ID NO: 5029 - protein, 13 aa, Artificial Sequence
  Quasi-synthetic sequence derived from human genome
FLSRFRWRRRLLV

SEQ ID NO: 5030 - protein, 13 aa, Artificial Sequence
  Quasi-synthetic sequence derived from human genome
LILWKFALLRKRI

SEQ ID NO: 5031 - protein, 13 aa, Artificial Sequence
  Quasi-synthetic sequence derived from human genome
KFIVWRRFKWVII

SEQ ID NO: 5032 - protein, 13 aa, Artificial Sequence
  Quasi-synthetic sequence derived from human genome
LLYLLRLRRIHRR

SEQ ID NO: 5033 - protein, 13 aa, Artificial Sequence
  Quasi-synthetic sequence derived from human genome
RLKRKLIRLFGRL

SEQ ID NO: 5034 - protein, 13 aa, Artificial Sequence
  Quasi-synthetic sequence derived from human genome
IIRLVRVFRIFKL

SEQ ID NO: 5035 - protein, 13 aa, Artificial Sequence
  Quasi-synthetic sequence derived from human genome
LLVLLLCRLRRLR

SEQ ID NO: 5036 - protein, 13 aa, Artificial Sequence
  Quasi-synthetic sequence derived from human genome
RAVFRLRKWIIFR

SEQ ID NO: 5037 - protein, 13 aa, Artificial Sequence
  Quasi-synthetic sequence derived from human genome
WVYLLLRKILLRK

SEQ ID NO: 5038 - protein, 13 aa, Artificial Sequence
  Quasi-synthetic sequence derived from human genome
RRLLILILKIGRR

SEQ ID NO: 5039 - protein, 13 aa, Artificial Sequence
  Quasi-synthetic sequence derived from human genome
WIKRRILLLIPKW

SEQ ID NO: 5040 - protein, 13 aa, Artificial Sequence
  Quasi-synthetic sequence derived from human genome
LLVLIFVLRKRIK

SEQ ID NO: 5041 - protein, 13 aa, Artificial Sequence
  Quasi-synthetic sequence derived from human genome
RLMRIFRILKLAR

SEQ ID NO: 5042 - protein, 13 aa, Artificial Sequence
  Quasi-synthetic sequence derived from human genome
WWRLILSKILKKR

SEQ ID NO: 5043 - protein, 13 aa, Artificial Sequence
  Quasi-synthetic sequence derived from human genome
RLRKLNWKRILIR

SEQ ID NO: 5044 - protein, 13 aa, Artificial Sequence
  Quasi-synthetic sequence derived from human genome
RVVRFVRILRIFK

SEQ ID NO: 5045 - protein, 13 aa, Artificial Sequence
  Quasi-synthetic sequence derived from human genome
RVIRLVRVFRIFK

SEQ ID NO: 5046 - protein, 13 aa, Artificial Sequence
  Quasi-synthetic sequence derived from human genome
LRRRLLLLLLVLL

SEQ ID NO: 5047 - protein, 13 aa, Artificial Sequence
  Quasi-synthetic sequence derived from human genome
LIKKLRLFFRKFN

SEQ ID NO: 5048 - protein, 13 aa, Artificial Sequence
  Quasi-synthetic sequence derived from human genome
MWKLRPLLKKWLK

SEQ ID NO: 5049 - protein, 13 aa, Artificial Sequence
  Quasi-synthetic sequence derived from human genome
RKILRLITIRKLF

SEQ ID NO: 5050 - protein, 13 aa, Artificial Sequence
  Quasi-synthetic sequence derived from human genome
IILLLIFLRKRIL

SEQ ID NO: 5051 - protein, 13 aa, Artificial Sequence
  Quasi-synthetic sequence derived from human genome
FRLFRVMRLVKLL

SEQ ID NO: 5052 - protein, 13 aa, Artificial Sequence
  Quasi-synthetic sequence derived from human genome
FFRLFRVMRLVKL

SEQ ID NO: 5053 - protein, 13 aa, Artificial Sequence
  Quasi-synthetic sequence derived from human genome
RLRLRNVFRRFLR

SEQ ID NO: 5054 - protein, 13 aa, Artificial Sequence
  Quasi-synthetic sequence derived from human genome
FMKLRWFLKRWRQ

SEQ ID NO: 5055 - protein, 13 aa, Artificial Sequence
  Quasi-synthetic sequence derived from human genome
KRFNLFLRRRLMF

SEQ ID NO: 5056 - protein, 13 aa, Artificial Sequence
  Quasi-synthetic sequence derived from human genome
LSFKRKRFLIKLR

SEQ ID NO: 5057 - protein, 13 aa, Artificial Sequence
  Quasi-synthetic sequence derived from human genome
RKKRIKRRALLFL

SEQ ID NO: 5058 - protein, 13 aa, Artificial Sequence
  Quasi-synthetic sequence derived from human genome
WKGVRWKRLRLLL

SEQ ID NO: 5059 - protein, 13 aa, Artificial Sequence
  Quasi-synthetic sequence derived from human genome
FRVKFLLRLLRGR

SEQ ID NO: 5060 - protein, 13 aa, Artificial Sequence
  Quasi-synthetic sequence derived from human genome
VFRLMRIFRVLKL

SEQ ID NO: 5061 - protein, 13 aa, Artificial Sequence
  Quasi-synthetic sequence derived from human genome
LRLLRYIVRLVWR

SEQ ID NO: 5062 - protein, 13 aa, Artificial Sequence
  Quasi-synthetic sequence derived from human genome
VLFIVFRKKVFRK

SEQ ID NO: 5063 - protein, 13 aa, Artificial Sequence
  Quasi-synthetic sequence derived from human genome
LLWVFRRRWRLNF

SEQ ID NO: 5064 - protein, 13 aa, Artificial Sequence
  Quasi-synthetic sequence derived from human genome
KYFYFFKILLRLR

SEQ ID NO: 5065 - protein, 13 aa, Artificial Sequence
  Quasi-synthetic sequence derived from human genome
LRVIRLVRVFRIF

SEQ ID NO: 5066 - protein, 13 aa, Artificial Sequence
  Quasi-synthetic sequence derived from human genome
RIRWVFKRRLGLL

SEQ ID NO: 5067 - protein, 13 aa, Artificial Sequence
  Quasi-synthetic sequence derived from human genome
KVLRPFLLRRLKK

SEQ ID NO: 5068 - protein, 13 aa, Artificial Sequence
  Quasi-synthetic sequence derived from human genome
IWVFRLKRRKRIA

SEQ ID NO: 5069 - protein, 13 aa, Artificial Sequence
  Quasi-synthetic sequence derived from human genome
KRYKYLRRLFRFR

SEQ ID NO: 5070 - protein, 13 aa, Artificial Sequence
  Quasi-synthetic sequence derived from human genome
LIFLLVWLLIRRK

SEQ ID NO: 5071 - protein, 13 aa, Artificial Sequence
  Quasi-synthetic sequence derived from human genome
RRKRWRTIKLLLR

SEQ ID NO: 5072 - protein, 13 aa, Artificial Sequence
  Quasi-synthetic sequence derived from human genome
KRRLIRLLLYHFK

SEQ ID NO: 5073 - protein, 13 aa, Artificial Sequence
  Quasi-synthetic sequence derived from human genome
FWRFKLFLLRILY

SEQ ID NO: 5074 - protein, 13 aa, Artificial Sequence
  Quasi-synthetic sequence derived from human genome
MRFRIYKRKVLIL

SEQ ID NO: 5075 - protein, 13 aa, Artificial Sequence
  Quasi-synthetic sequence derived from human genome
KLSFKRKRFLIKL

SEQ ID NO: 5076 - protein, 13 aa, Artificial Sequence
  Quasi-synthetic sequence derived from human genome
ILRVIRLVRVFRI

SEQ ID NO: 5077 - protein, 13 aa, Artificial Sequence
  Quasi-synthetic sequence derived from human genome
LVLRRILRRAVRF

SEQ ID NO: 5078 - protein, 13 aa, Artificial Sequence
  Quasi-synthetic sequence derived from human genome
LILWKWKKKKRPR

SEQ ID NO: 5079 - protein, 13 aa, Artificial Sequence
  Quasi-synthetic sequence derived from human genome
LLLLVLSLRRRLR

SEQ ID NO: 5080 - protein, 13 aa, Artificial Sequence
  Quasi-synthetic sequence derived from human genome
IRILKFLVAKRKF

SEQ ID NO: 5081 - protein, 13 aa, Artificial Sequence
  Quasi-synthetic sequence derived from human genome
KFLIKRLAKIVRL

SEQ ID NO: 5082 - protein, 13 aa, Artificial Sequence
  Quasi-synthetic sequence derived from human genome
RKGVWLRLRKILF

SEQ ID NO: 5083 - protein, 13 aa, Artificial Sequence
  Quasi-synthetic sequence derived from human genome
VLRALRLLRIFKI

SEQ ID NO: 5084 - protein, 13 aa, Artificial Sequence
  Quasi-synthetic sequence derived from human genome
VRLLRLIILIRIF

SEQ ID NO: 5085 - protein, 13 aa, Artificial Sequence
  Quasi-synthetic sequence derived from human genome
LVRLLRLIILIRI

SEQ ID NO: 5086 - protein, 13 aa, Artificial Sequence
  Quasi-synthetic sequence derived from human genome
KKFKRLMLHRIKW

SEQ ID NO: 5087 - protein, 13 aa, Artificial Sequence
  Quasi-synthetic sequence derived from human genome
KLITRMWKLLRRR

SEQ ID NO: 5088 - protein, 13 aa, Artificial Sequence
  Quasi-synthetic sequence derived from human genome
RTFLYWRLRRLLL

SEQ ID NO: 5089 - protein, 13 aa, Artificial Sequence
  Quasi-synthetic sequence derived from human genome
RTFFYWRLRRLLL

SEQ ID NO: 5090 - protein, 13 aa, Artificial Sequence
  Quasi-synthetic sequence derived from human genome
FRLARRRKKILFY

SEQ ID NO: 5091 - protein, 13 aa, Artificial Sequence
  Quasi-synthetic sequence derived from human genome
LKMLRFVKCFLRR

SEQ ID NO: 5092 - protein, 13 aa, Artificial Sequence
  Quasi-synthetic sequence derived from human genome
LKKVRRLIMKRIV

SEQ ID NO: 5093 - protein, 13 aa, Artificial Sequence
  Quasi-synthetic sequence derived from human genome
LILFMFRRLRQFR

SEQ ID NO: 5094 - protein, 13 aa, Artificial Sequence
  Quasi-synthetic sequence derived from human genome
RKRLFQLIKIIKI

SEQ ID NO: 5095 - protein, 13 aa, Artificial Sequence
  Quasi-synthetic sequence derived from human genome
FYLRRFFKAKKLI

SEQ ID NO: 5096 - protein, 13 aa, Artificial Sequence
  Quasi-synthetic sequence derived from human genome
RRFLKLLRFYIAL

SEQ ID NO: 5097 - protein, 13 aa, Artificial Sequence
  Quasi-synthetic sequence derived from human genome
IAILRLRFLVKKW

SEQ ID NO: 5098 - protein, 13 aa, Artificial Sequence
  Quasi-synthetic sequence derived from human genome
LLKTVRLLRLLRL

SEQ ID NO: 5099 - protein, 13 aa, Artificial Sequence
  Quasi-synthetic sequence derived from human genome
KRKVIIFLKKCLL

SEQ ID NO: 5100 - protein, 13 aa, Artificial Sequence
  Quasi-synthetic sequence derived from human genome
LFHLRLLWRKLLW

SEQ ID NO: 5101 - protein, 13 aa, Artificial Sequence
  Quasi-synthetic sequence derived from human genome
WLRWRILRLFPWI

SEQ ID NO: 5102 - protein, 13 aa, Artificial Sequence
  Quasi-synthetic sequence derived from human genome
RLRLRLLALLLLL

SEQ ID NO: 5103 - protein, 13 aa, Artificial Sequence
  Quasi-synthetic sequence derived from human genome
LLRRLPKLRKRMR

SEQ ID NO: 5104 - protein, 13 aa, Artificial Sequence
  Quasi-synthetic sequence derived from human genome
KFLRFRRSLLLLV

SEQ ID NO: 5105 - protein, 13 aa, Artificial Sequence
  Quasi-synthetic sequence derived from human genome
VRLLRLLRLLQKL

SEQ ID NO: 5106 - protein, 13 aa, Artificial Sequence
  Quasi-synthetic sequence derived from human genome
LVKCLRLLRRYRL

SEQ ID NO: 5107 - protein, 13 aa, Artificial Sequence
  Quasi-synthetic sequence derived from human genome
VLRRIILLQRWFR

SEQ ID NO: 5108 - protein, 13 aa, Artificial Sequence
  Quasi-synthetic sequence derived from human genome
FLILLLVYRMRKK

SEQ ID NO: 5109 - protein, 13 aa, Artificial Sequence
  Quasi-synthetic sequence derived from human genome
IRKIRRLKGWVLL

SEQ ID NO: 5110 - protein, 13 aa, Artificial Sequence
  Quasi-synthetic sequence derived from human genome
KILRVLRVLRPLR

SEQ ID NO: 5111 - protein, 13 aa, Artificial Sequence
  Quasi-synthetic sequence derived from human genome
KLLKVIRKKLVRK

SEQ ID NO: 5112 - protein, 13 aa, Artificial Sequence
  Quasi-synthetic sequence derived from human genome
LLFVLIRIFILKK

SEQ ID NO: 5113 - protein, 13 aa, Artificial Sequence
  Quasi-synthetic sequence derived from human genome
FFWIRLYKIRRGR

SEQ ID NO: 5114 - protein, 13 aa, Artificial Sequence
  Quasi-synthetic sequence derived from human genome
RLFRAARLIKLLR

SEQ ID NO: 5115 - protein, 13 aa, Artificial Sequence
  Quasi-synthetic sequence derived from human genome
FLRRRKRFKVLRA

SEQ ID NO: 5116 - protein, 13 aa, Artificial Sequence
  Quasi-synthetic sequence derived from human genome
FLRLKRKFIQMRR

SEQ ID NO: 5117 - protein, 13 aa, Artificial Sequence
  Quasi-synthetic sequence derived from human genome
KSRFWLLKLLFRV

SEQ ID NO: 5118 - protein, 13 aa, Artificial Sequence
  Quasi-synthetic sequence derived from human genome
ILKYLKFHLKRIR

SEQ ID NO: 5119 - protein, 13 aa, Artificial Sequence
  Quasi-synthetic sequence derived from human genome
LLLLLFLILRHRR

SEQ ID NO: 5120 - protein, 13 aa, Artificial Sequence
  Quasi-synthetic sequence derived from human genome
LVVLWIRWKCRRL

SEQ ID NO: 5121 - protein, 13 aa, Artificial Sequence
  Quasi-synthetic sequence derived from human genome
WMKLFFKIKPLLK

SEQ ID NO: 5122 - protein, 13 aa, Artificial Sequence
  Quasi-synthetic sequence derived from human genome
RLLVKLYRFLARR

SEQ ID NO: 5123 - protein, 13 aa, Artificial Sequence
  Quasi-synthetic sequence derived from human genome
RWLGRWRRKRRWR

SEQ ID NO: 5124 - protein, 13 aa, Artificial Sequence
  Quasi-synthetic sequence derived from human genome
WLLLTLFIRKMKR

SEQ ID NO: 5125 - protein, 13 aa, Artificial Sequence
  Quasi-synthetic sequence derived from human genome
LRFRRQLLYWFLK

SEQ ID NO: 5126 - protein, 13 aa, Artificial Sequence
  Quasi-synthetic sequence derived from human genome
RRFRTLMMRRRFL

SEQ ID NO: 5127 - protein, 13 aa, Artificial Sequence
  Quasi-synthetic sequence derived from human genome
RWRWWQRLLPWRL

SEQ ID NO: 5128 - protein, 13 aa, Artificial Sequence
  Quasi-synthetic sequence derived from human genome
WKKVLPLLKIIKK

SEQ ID NO: 5129 - protein, 13 aa, Artificial Sequence
  Quasi-synthetic sequence derived from human genome
FLRRLIYRRRPMI

SEQ ID NO: 5130 - protein, 13 aa, Artificial Sequence
  Quasi-synthetic sequence derived from human genome
IFWKRYRFKLIAF

SEQ ID NO: 5131 - protein, 13 aa, Artificial Sequence
  Quasi-synthetic sequence derived from human genome
RLWKARVLKLVLK

SEQ ID NO: 5132 - protein, 13 aa, Artificial Sequence
  Quasi-synthetic sequence derived from human genome
RRFRSLKMWFVFR

SEQ ID NO: 5133 - protein, 13 aa, Artificial Sequence
  Quasi-synthetic sequence derived from human genome
VLRLLRALRMLKL

SEQ ID NO: 5134 - protein, 13 aa, Artificial Sequence
  Quasi-synthetic sequence derived from human genome
FLKILKLLISKLK

SEQ ID NO: 5135 - protein, 13 aa, Artificial Sequence
  Quasi-synthetic sequence derived from human genome
LLLSLWKLWRVKK

SEQ ID NO: 5136 - protein, 13 aa, Artificial Sequence
  Quasi-synthetic sequence derived from human genome
LLRLLRLSRLIRY

SEQ ID NO: 5137 - protein, 13 aa, Artificial Sequence
  Quasi-synthetic sequence derived from human genome
RKKIIRRLYLKWH

SEQ ID NO: 5138 - protein, 13 aa, Artificial Sequence
  Quasi-synthetic sequence derived from human genome
RRSRHRLLLLLLR

SEQ ID NO: 5139 - protein, 13 aa, Artificial Sequence
  Quasi-synthetic sequence derived from human genome
KMMLVRRFRVLIL

SEQ ID NO: 5140 - protein, 13 aa, Artificial Sequence
  Quasi-synthetic sequence derived from human genome
RVLRIARVLKLLK

SEQ ID NO: 5141 - protein, 13 aa, Artificial Sequence
  Quasi-synthetic sequence derived from human genome
RITLRVRKLLLLI

SEQ ID NO: 5142 - protein, 13 aa, Artificial Sequence
  Quasi-synthetic sequence derived from human genome
LRKWLKMFKKRQL

SEQ ID NO: 5143 - protein, 13 aa, Artificial Sequence
  Quasi-synthetic sequence derived from human genome
VWKRWKKRYFVLV

SEQ ID NO: 5144 - protein, 13 aa, Artificial Sequence
  Quasi-synthetic sequence derived from human genome
KLKKPRRIILLVK

SEQ ID NO: 5145 - protein, 13 aa, Artificial Sequence
  Quasi-synthetic sequence derived from human genome
IFLTVLLLKLRKR

SEQ ID NO: 5146 - protein, 13 aa, Artificial Sequence
  Quasi-synthetic sequence derived from human genome
LRALLKRKHRFIL

SEQ ID NO: 5147 - protein, 13 aa, Artificial Sequence
  Quasi-synthetic sequence derived from human genome
WRKRWFVLRRGRM

SEQ ID NO: 5148 - protein, 13 aa, Artificial Sequence
  Quasi-synthetic sequence derived from human genome
WIWWRMLRQVLRR

SEQ ID NO: 5149 - protein, 13 aa, Artificial Sequence
  Quasi-synthetic sequence derived from human genome
RRPLILKRRRLPL

SEQ ID NO: 5150 - protein, 13 aa, Artificial Sequence
  Quasi-synthetic sequence derived from human genome
FQFFKKRVRRWIK

SEQ ID NO: 5151 - protein, 13 aa, Artificial Sequence
  Quasi-synthetic sequence derived from human genome
RTFRLLRVLKLVR

SEQ ID NO: 5152 - protein, 13 aa, Artificial Sequence
  Quasi-synthetic sequence derived from human genome
WKLWRCRLRLKSF

SEQ ID NO: 5153 - protein, 13 aa, Artificial Sequence
  Quasi-synthetic sequence derived from human genome
RRSRKLILFIVFL

SEQ ID NO: 5154 - protein, 13 aa, Artificial Sequence
  Quasi-synthetic sequence derived from human genome
LALLYWRMFRLKR

SEQ ID NO: 5155 - protein, 13 aa, Artificial Sequence
  Quasi-synthetic sequence derived from human genome
KRRVFFRNIKILI

SEQ ID NO: 5156 - protein, 13 aa, Artificial Sequence
  Quasi-synthetic sequence derived from human genome
LLLKKIMAILIKR

SEQ ID NO: 5157 - protein, 13 aa, Artificial Sequence
  Quasi-synthetic sequence derived from human genome
LKRMKIIKHFIKI

SEQ ID NO: 5158 - protein, 13 aa, Artificial Sequence
  Quasi-synthetic sequence derived from human genome
KRIKLYMRRLLCL

SEQ ID NO: 5159 - protein, 13 aa, Artificial Sequence
  Quasi-synthetic sequence derived from human genome
KKIRKQMKLLLLL

SEQ ID NO: 5160 - protein, 13 aa, Artificial Sequence
  Quasi-synthetic sequence derived from human genome
FRHLHLKLKRLKL

SEQ ID NO: 5161 - protein, 13 aa, Artificial Sequence
  Quasi-synthetic sequence derived from human genome
LRPLKKFLRKLHL

SEQ ID NO: 5162 - protein, 13 aa, Artificial Sequence
  Quasi-synthetic sequence derived from human genome
LLKKKILGRVWWL

SEQ ID NO: 5163 - protein, 13 aa, Artificial Sequence
  Quasi-synthetic sequence derived from human genome
FWLQLLLWRLKRL

SEQ ID NO: 5164 - protein, 13 aa, Artificial Sequence
  Quasi-synthetic sequence derived from human genome
VRYKRALLLLRRR

SEQ ID NO: 5165 - protein, 13 aa, Artificial Sequence
  Quasi-synthetic sequence derived from human genome
FHRLCKLLFFRIR

SEQ ID NO: 5166 - protein, 13 aa, Artificial Sequence
  Quasi-synthetic sequence derived from human genome
WGLLILLKYRWRK

SEQ ID NO: 5167 - protein, 13 aa, Artificial Sequence
  Quasi-synthetic sequence derived from human genome
RWKFIKRWKTRYF

SEQ ID NO: 5168 - protein, 13 aa, Artificial Sequence
  Quasi-synthetic sequence derived from human genome
PRRILFIKRFIIY

SEQ ID NO: 5169 - protein, 13 aa, Artificial Sequence
  Quasi-synthetic sequence derived from human genome
FINILRILMRKLR

SEQ ID NO: 5170 - protein, 13 aa, Artificial Sequence
  Quasi-synthetic sequence derived from human genome
VLRALRLLRIFKV

SEQ ID NO: 5171 - protein, 13 aa, Artificial Sequence
  Quasi-synthetic sequence derived from human genome
KLWFKFQRYFRRK

SEQ ID NO: 5172 - protein, 13 aa, Artificial Sequence
  Quasi-synthetic sequence derived from human genome
FRRTFKRKFKILK

SEQ ID NO: 5173 - protein, 13 aa, Artificial Sequence
  Quasi-synthetic sequence derived from human genome
WLRVRRGLLVLRL

SEQ ID NO: 5174 - protein, 13 aa, Artificial Sequence
  Quasi-synthetic sequence derived from human genome
RRFLLFRRAFKQL

SEQ ID NO: 5175 - protein, 13 aa, Artificial Sequence
  Quasi-synthetic sequence derived from human genome
LLLKRFLLARRSR

SEQ ID NO: 5176 - protein, 13 aa, Artificial Sequence
  Quasi-synthetic sequence derived from human genome
VIPFLKRRWRKRK

SEQ ID NO: 5177 - protein, 13 aa, Artificial Sequence
  Quasi-synthetic sequence derived from human genome
FWKKIVFVIFLRL

SEQ ID NO: 5178 - protein, 13 aa, Artificial Sequence
  Quasi-synthetic sequence derived from human genome
RRFRSVKLWFVIR

SEQ ID NO: 5179 - protein, 13 aa, Artificial Sequence
  Quasi-synthetic sequence derived from human genome
LRRWKRNWFALWL

SEQ ID NO: 5180 - protein, 13 aa, Artificial Sequence
  Quasi-synthetic sequence derived from human genome
KRLRLLPALLILR

SEQ ID NO: 5181 - protein, 13 aa, Artificial Sequence
  Quasi-synthetic sequence derived from human genome
FWLRHRLQWWRKF

SEQ ID NO: 5182 - protein, 13 aa, Artificial Sequence
  Quasi-synthetic sequence derived from human genome
PPRRRRRRRLLFW

SEQ ID NO: 5183 - protein, 13 aa, Artificial Sequence
  Quasi-synthetic sequence derived from human genome
LLRSFFRRRRPRL

SEQ ID NO: 5184 - protein, 13 aa, Artificial Sequence
  Quasi-synthetic sequence derived from human genome
KIMKRLIKRYVLK

SEQ ID NO: 5185 - protein, 13 aa, Artificial Sequence
  Quasi-synthetic sequence derived from human genome
RIIILKIVHRRII

SEQ ID NO: 5186 - protein, 13 aa, Artificial Sequence
  Quasi-synthetic sequence derived from human genome
RVIFLNRKILLIR

SEQ ID NO: 5187 - protein, 13 aa, Artificial Sequence
  Quasi-synthetic sequence derived from human genome
LKRMFRRIYRHLR

SEQ ID NO: 5188 - protein, 13 aa, Artificial Sequence
  Quasi-synthetic sequence derived from human genome
FRLLLRFLRLCRS

SEQ ID NO: 5189 - protein, 13 aa, Artificial Sequence
  Quasi-synthetic sequence derived from human genome
FSIWLYWRRKKRK

SEQ ID NO: 5190 - protein, 13 aa, Artificial Sequence
  Quasi-synthetic sequence derived from human genome
KKIVWLKLLIPKI

SEQ ID NO: 5191 - protein, 13 aa, Artificial Sequence
  Quasi-synthetic sequence derived from human genome
LKRYLLKRLNLIW

SEQ ID NO: 5192 - protein, 13 aa, Artificial Sequence
  Quasi-synthetic sequence derived from human genome
RLLRLIILIRIFH

SEQ ID NO: 5193 - protein, 13 aa, Artificial Sequence
  Quasi-synthetic sequence derived from human genome
LLWKRLLIARRSR

SEQ ID NO: 5194 - protein, 13 aa, Artificial Sequence
  Quasi-synthetic sequence derived from human genome
LRNRLIRKRFLCL

SEQ ID NO: 5195 - protein, 13 aa, Artificial Sequence
  Quasi-synthetic sequence derived from human genome
KMRKFYFRRIMRM

SEQ ID NO: 5196 - protein, 13 aa, Artificial Sequence
  Quasi-synthetic sequence derived from human genome
LRIFRIPRRPRKL

SEQ ID NO: 5197 - protein, 13 aa, Artificial Sequence
  Quasi-synthetic sequence derived from human genome
LLKLFYIKKLKPL

SEQ ID NO: 5198 - protein, 13 aa, Artificial Sequence
  Quasi-synthetic sequence derived from human genome
KFHIRRFIFLFFI

SEQ ID NO: 5199 - protein, 13 aa, Artificial Sequence
  Quasi-synthetic sequence derived from human genome
AKKILHLLFLKRR

SEQ ID NO: 5200 - protein, 13 aa, Artificial Sequence
  Quasi-synthetic sequence derived from human genome
LAILRRRWWKYMI

SEQ ID NO: 5201 - protein, 13 aa, Artificial Sequence
  Quasi-synthetic sequence derived from human genome
RFGRRFILRWCLL

SEQ ID NO: 5202 - protein, 13 aa, Artificial Sequence
  Quasi-synthetic sequence derived from human genome
FLIYKFKRKIPWI

SEQ ID NO: 5203 - protein, 13 aa, Artificial Sequence
  Quasi-synthetic sequence derived from human genome
RLVRVFRIFKLSR

SEQ ID NO: 5204 - protein, 13 aa, Artificial Sequence
  Quasi-synthetic sequence derived from human genome
RVFRVFRIFKFSR

SEQ ID NO: 5205 - protein, 13 aa, Artificial Sequence
  Quasi-synthetic sequence derived from human genome
RRALLRFLFRQLL

SEQ ID NO: 5206 - protein, 13 aa, Artificial Sequence
  Quasi-synthetic sequence derived from human genome
ALLLLWRRRQKRR

SEQ ID NO: 5207 - protein, 13 aa, Artificial Sequence
  Quasi-synthetic sequence derived from human genome
LKRKWWKYILLGL

SEQ ID NO: 5208 - protein, 13 aa, Artificial Sequence
  Quasi-synthetic sequence derived from human genome
FLMLLRRFRSRYW

SEQ ID NO: 5209 - protein, 13 aa, Artificial Sequence
  Quasi-synthetic sequence derived from human genome
RLTWKLLLLRRPL

SEQ ID NO: 5210 - protein, 13 aa, Artificial Sequence
  Quasi-synthetic sequence derived from human genome
LAWLGKWLRKRRI

SEQ ID NO: 5211 - protein, 13 aa, Artificial Sequence
  Quasi-synthetic sequence derived from human genome
RWLRWKASLIKLR

SEQ ID NO: 5212 - protein, 13 aa, Artificial Sequence
  Quasi-synthetic sequence derived from human genome
RWLGKLRRKRRWR

SEQ ID NO: 5213 - protein, 13 aa, Artificial Sequence
  Quasi-synthetic sequence derived from human genome
IRTRLIRKRFLCL

SEQ ID NO: 5214 - protein, 13 aa, Artificial Sequence
  Quasi-synthetic sequence derived from human genome
IWLRLRGLRKYKK

SEQ ID NO: 5215 - protein, 13 aa, Artificial Sequence
  Quasi-synthetic sequence derived from human genome
LLWLRKCLRKAKK

SEQ ID NO: 5216 - protein, 13 aa, Artificial Sequence
  Quasi-synthetic sequence derived from human genome
RLSRLIFLLRRWA

SEQ ID NO: 5217 - protein, 13 aa, Artificial Sequence
  Quasi-synthetic sequence derived from human genome
KLTVWKRLFRKVL

SEQ ID NO: 5218 - protein, 13 aa, Artificial Sequence
  Quasi-synthetic sequence derived from human genome
KRFRYIILKQKFL

SEQ ID NO: 5219 - protein, 13 aa, Artificial Sequence
  Quasi-synthetic sequence derived from human genome
RARRLMRPLWLLL

SEQ ID NO: 5220 - protein, 13 aa, Artificial Sequence
  Quasi-synthetic sequence derived from human genome
FIALVFFLYRRRK

SEQ ID NO: 5221 - protein, 13 aa, Artificial Sequence
  Quasi-synthetic sequence derived from human genome
LKKLVLRKLRRKA

SEQ ID NO: 5222 - protein, 13 aa, Artificial Sequence
  Quasi-synthetic sequence derived from human genome
KRFAYKFLKKILK

SEQ ID NO: 5223 - protein, 13 aa, Artificial Sequence
  Quasi-synthetic sequence derived from human genome
LRIIRFLPLFKII

SEQ ID NO: 5224 - protein, 13 aa, Artificial Sequence
  Quasi-synthetic sequence derived from human genome
LLKRLLGPKLRRF

SEQ ID NO: 5225 - protein, 13 aa, Artificial Sequence
  Quasi-synthetic sequence derived from human genome
LLLLLLSRRRTRR

SEQ ID NO: 5226 - protein, 13 aa, Artificial Sequence
  Quasi-synthetic sequence derived from human genome
WRFYLSFRKLMRW

SEQ ID NO: 5227 - protein, 13 aa, Artificial Sequence
  Quasi-synthetic sequence derived from human genome
ILKFFLRALKILI

SEQ ID NO: 5228 - protein, 13 aa, Artificial Sequence
  Quasi-synthetic sequence derived from human genome
KKLKRYAWKRRWF

SEQ ID NO: 5229 - protein, 13 aa, Artificial Sequence
  Quasi-synthetic sequence derived from human genome
LRFPPLLWVRLRR

SEQ ID NO: 5230 - protein, 13 aa, Artificial Sequence
  Quasi-synthetic sequence derived from human genome
VLRSFRLLRVFKL

SEQ ID NO: 5231 - protein, 13 aa, Artificial Sequence
  Quasi-synthetic sequence derived from human genome
IKIRFFKIMLVLI

SEQ ID NO: 5232 - protein, 13 aa, Artificial Sequence
  Quasi-synthetic sequence derived from human genome
IRLLRIFKITKYW

SEQ ID NO: 5233 - protein, 13 aa, Artificial Sequence
  Quasi-synthetic sequence derived from human genome
FLYLKWRVKKVVL

SEQ ID NO: 5234 - protein, 13 aa, Artificial Sequence
  Quasi-synthetic sequence derived from human genome
LRKRRRLLSIIVV

SEQ ID NO: 5235 - protein, 13 aa, Artificial Sequence
  Quasi-synthetic sequence derived from human genome
RLARIGRILRLIR

SEQ ID NO: 5236 - protein, 13 aa, Artificial Sequence
  Quasi-synthetic sequence derived from human genome
LLRLLGLRRGLRR

SEQ ID NO: 5237 - protein, 13 aa, Artificial Sequence
  Quasi-synthetic sequence derived from human genome
RIFFHKIFIRPLR

SEQ ID NO: 5238 - protein, 13 aa, Artificial Sequence
  Quasi-synthetic sequence derived from human genome
ALRLRKRFLNFFL

SEQ ID NO: 5239 - protein, 13 aa, Artificial Sequence
  Quasi-synthetic sequence derived from human genome
LFKKTHRILRRLF

SEQ ID NO: 5240 - protein, 13 aa, Artificial Sequence
  Quasi-synthetic sequence derived from human genome
RLRQLLRRRKKRW

SEQ ID NO: 5241 - protein, 13 aa, Artificial Sequence
  Quasi-synthetic sequence derived from human genome
VMILIKYRRLRIM

SEQ ID NO: 5242 - protein, 13 aa, Artificial Sequence
  Quasi-synthetic sequence derived from human genome
FFFRVRSRRWKVK

SEQ ID NO: 5243 - protein, 13 aa, Artificial Sequence
  Quasi-synthetic sequence derived from human genome
LRKLLRVLTLMKF

SEQ ID NO: 5244 - protein, 13 aa, Artificial Sequence
  Quasi-synthetic sequence derived from human genome
LIFLRLKRRVKSV

SEQ ID NO: 5245 - protein, 13 aa, Artificial Sequence
  Quasi-synthetic sequence derived from human genome
RRFRSLRHKIILL

SEQ ID NO: 5246 - protein, 13 aa, Artificial Sequence
  Quasi-synthetic sequence derived from human genome
RCLRGFFIKRRFR

SEQ ID NO: 5247 - protein, 13 aa, Artificial Sequence
  Quasi-synthetic sequence derived from human genome
RLFRVMRLIKLLS

SEQ ID NO: 5248 - protein, 13 aa, Artificial Sequence
  Quasi-synthetic sequence derived from human genome
RLFFRFMNVLIKR

SEQ ID NO: 5249 - protein, 13 aa, Artificial Sequence
  Quasi-synthetic sequence derived from human genome
KILGMLRVLRLLR

SEQ ID NO: 5250 - protein, 13 aa, Artificial Sequence
  Quasi-synthetic sequence derived from human genome
WRLKVLVRLSKFL

SEQ ID NO: 5251 - protein, 13 aa, Artificial Sequence
  Quasi-synthetic sequence derived from human genome
WILWRLLRKLQKC

SEQ ID NO: 5252 - protein, 13 aa, Artificial Sequence
  Quasi-synthetic sequence derived from human genome
FLRRFPRPLLRLV

SEQ ID NO: 5253 - protein, 13 aa, Artificial Sequence
  Quasi-synthetic sequence derived from human genome
PWQRLLLRFKILR

SEQ ID NO: 5254 - protein, 13 aa, Artificial Sequence
  Quasi-synthetic sequence derived from human genome
LSRLLWRRLKPLI

SEQ ID NO: 5255 - protein, 13 aa, Artificial Sequence
  Quasi-synthetic sequence derived from human genome
RRLLPRVRLLPLL

SEQ ID NO: 5256 - protein, 13 aa, Artificial Sequence
  Quasi-synthetic sequence derived from human genome
LRLVRWLLKKVFQ

SEQ ID NO: 5257 - protein, 13 aa, Artificial Sequence
  Quasi-synthetic sequence derived from human genome
RLFIGRPRWKLLF

SEQ ID NO: 5258 - protein, 13 aa, Artificial Sequence
  Quasi-synthetic sequence derived from human genome
RKKLIRKMKLILS

SEQ ID NO: 5259 - protein, 13 aa, Artificial Sequence
  Quasi-synthetic sequence derived from human genome
LILLIVTMRRRKK

SEQ ID NO: 5260 - protein, 13 aa, Artificial Sequence
  Quasi-synthetic sequence derived from human genome
ILLVRYRKCIKLK

SEQ ID NO: 5261 - protein, 13 aa, Artificial Sequence
  Quasi-synthetic sequence derived from human genome
LLKRKHRFILLRS

SEQ ID NO: 5262 - protein, 13 aa, Artificial Sequence
  Quasi-synthetic sequence derived from human genome
RRPKLKKLKKLLM

SEQ ID NO: 5263 - protein, 13 aa, Artificial Sequence
  Quasi-synthetic sequence derived from human genome
KLMILWIGIRKIK

SEQ ID NO: 5264 - protein, 13 aa, Artificial Sequence
  Quasi-synthetic sequence derived from human genome
FRRLLKLPRTLIL

SEQ ID NO: 5265 - protein, 13 aa, Artificial Sequence
  Quasi-synthetic sequence derived from human genome
LWLRAKFQRLLFK

SEQ ID NO: 5266 - protein, 13 aa, Artificial Sequence
  Quasi-synthetic sequence derived from human genome
LRAWKRIFWRQIL

SEQ ID NO: 5267 - protein, 13 aa, Artificial Sequence
  Quasi-synthetic sequence derived from human genome
VFNIIFRKILKKL

SEQ ID NO: 5268 - protein, 13 aa, Artificial Sequence
  Quasi-synthetic sequence derived from human genome
RFILRVRRSRLVK

SEQ ID NO: 5269 - protein, 13 aa, Artificial Sequence
  Quasi-synthetic sequence derived from human genome
IRGWLLRKKYLRM

SEQ ID NO: 5270 - protein, 13 aa, Artificial Sequence
  Quasi-synthetic sequence derived from human genome
LRRLLRLLVLGLW

SEQ ID NO: 5271 - protein, 13 aa, Artificial Sequence
  Quasi-synthetic sequence derived from human genome
RVFLQRLLWLLRL

SEQ ID NO: 5272 - protein, 13 aa, Artificial Sequence
  Quasi-synthetic sequence derived from human genome
FLLKKRKWPLKGW

SEQ ID NO: 5273 - protein, 13 aa, Artificial Sequence
  Quasi-synthetic sequence derived from human genome
RVRFLRKVLSILL

SEQ ID NO: 5274 - protein, 13 aa, Artificial Sequence
  Quasi-synthetic sequence derived from human genome
KILGVLRVLRLLR

SEQ ID NO: 5275 - protein, 13 aa, Artificial Sequence
  Quasi-synthetic sequence derived from human genome
FLLILSLRRHIRR

SEQ ID NO: 5276 - protein, 13 aa, Artificial Sequence
  Quasi-synthetic sequence derived from human genome
KLSIKWMIKIRKR

SEQ ID NO: 5277 - protein, 13 aa, Artificial Sequence
  Quasi-synthetic sequence derived from human genome
LRQRRRRLLIKKM

SEQ ID NO: 5278 - protein, 13 aa, Artificial Sequence
  Quasi-synthetic sequence derived from human genome
LLAIFLYLLRLRR

SEQ ID NO: 5279 - protein, 13 aa, Artificial Sequence
  Quasi-synthetic sequence derived from human genome
RRRRRLALFLARK

SEQ ID NO: 5280 - protein, 13 aa, Artificial Sequence
  Quasi-synthetic sequence derived from human genome
RRWHRWRLGKVLW

SEQ ID NO: 5281 - protein, 13 aa, Artificial Sequence
  Quasi-synthetic sequence derived from human genome
KVLRPFLLRRVKV

SEQ ID NO: 5282 - protein, 13 aa, Artificial Sequence
  Quasi-synthetic sequence derived from human genome
FRKKRLCIKFIPR

SEQ ID NO: 5283 - protein, 13 aa, Artificial Sequence
  Quasi-synthetic sequence derived from human genome
RRVLLGRLWRRLH

SEQ ID NO: 5284 - protein, 13 aa, Artificial Sequence
  Quasi-synthetic sequence derived from human genome
RWLKIIWRRHGIW

SEQ ID NO: 5285 - protein, 13 aa, Artificial Sequence
  Quasi-synthetic sequence derived from human genome
KLMLLQKMLKKLR

SEQ ID NO: 5286 - protein, 13 aa, Artificial Sequence
  Quasi-synthetic sequence derived from human genome
FRRSFKHILFRRR

SEQ ID NO: 5287 - protein, 13 aa, Artificial Sequence
  Quasi-synthetic sequence derived from human genome
KFRRLRQLLRRRK

SEQ ID NO: 5288 - protein, 13 aa, Artificial Sequence
  Quasi-synthetic sequence derived from human genome
LKHLCRLKIRRLM

SEQ ID NO: 5289 - protein, 13 aa, Artificial Sequence
  Quasi-synthetic sequence derived from human genome
MKLLKLRRNIVKL

SEQ ID NO: 5290 - protein, 13 aa, Artificial Sequence
  Quasi-synthetic sequence derived from human genome
KLWRKLFKGIPRL

SEQ ID NO: 5291 - protein, 13 aa, Artificial Sequence
  Quasi-synthetic sequence derived from human genome
FRILRIFKLIAPK

SEQ ID NO: 5292 - protein, 13 aa, Artificial Sequence
  Quasi-synthetic sequence derived from human genome
RLLHYRLLLRRLC

SEQ ID NO: 5293 - protein, 13 aa, Artificial Sequence
  Quasi-synthetic sequence derived from human genome
KKRLFFPRFFFLS

SEQ ID NO: 5294 - protein, 13 aa, Artificial Sequence
  Quasi-synthetic sequence derived from human genome
LRPLQLLRLFKLK

SEQ ID NO: 5295 - protein, 13 aa, Artificial Sequence
  Quasi-synthetic sequence derived from human genome
RVAFWIIKLPRRR

SEQ ID NO: 5296 - protein, 13 aa, Artificial Sequence
  Quasi-synthetic sequence derived from human genome
RVRLRALRLALLI

SEQ ID NO: 5297 - protein, 13 aa, Artificial Sequence
  Quasi-synthetic sequence derived from human genome
RPRVLLRWWLGWR

SEQ ID NO: 5298 - protein, 13 aa, Artificial Sequence
  Quasi-synthetic sequence derived from human genome
KKKKCIFRLRIRV

SEQ ID NO: 5299 - protein, 13 aa, Artificial Sequence
  Quasi-synthetic sequence derived from human genome
LRKMKIPFLLLFF

SEQ ID NO: 5300 - protein, 13 aa, Artificial Sequence
  Quasi-synthetic sequence derived from human genome
LIFLRIKRRVKSV

SEQ ID NO: 5301 - protein, 13 aa, Artificial Sequence
  Quasi-synthetic sequence derived from human genome
RLARIGRILRLIK

SEQ ID NO: 5302 - protein, 13 aa, Artificial Sequence
  Quasi-synthetic sequence derived from human genome
LRPLFRKLRKRNL

SEQ ID NO: 5303 - protein, 13 aa, Artificial Sequence
  Quasi-synthetic sequence derived from human genome
VRIFGLKKRRLRR

SEQ ID NO: 5304 - protein, 13 aa, Artificial Sequence
  Quasi-synthetic sequence derived from human genome
LRARIRARRLRVL

SEQ ID NO: 5305 - protein, 13 aa, Artificial Sequence
  Quasi-synthetic sequence derived from human genome
AMRKKLILYFKRR

SEQ ID NO: 5306 - protein, 13 aa, Artificial Sequence
  Quasi-synthetic sequence derived from human genome
KVKPLLMKLKRLK

SEQ ID NO: 5307 - protein, 13 aa, Artificial Sequence
  Quasi-synthetic sequence derived from human genome
LIVLSMLLLRRKK

SEQ ID NO: 5308 - protein, 13 aa, Artificial Sequence
  Quasi-synthetic sequence derived from human genome
RILQFRLYKKKFK

SEQ ID NO: 5309 - protein, 13 aa, Artificial Sequence
  Quasi-synthetic sequence derived from human genome
KYRNLKRKLKFLI

SEQ ID NO: 5310 - protein, 13 aa, Artificial Sequence
  Quasi-synthetic sequence derived from human genome
LFFLMKRKIIVLM

SEQ ID NO: 5311 - protein, 13 aa, Artificial Sequence
  Quasi-synthetic sequence derived from human genome
MVRRFLVTLRIRR

SEQ ID NO: 5312 - protein, 13 aa, Artificial Sequence
  Quasi-synthetic sequence derived from human genome
IRRFFPKRKCFVF

SEQ ID NO: 5313 - protein, 13 aa, Artificial Sequence
  Quasi-synthetic sequence derived from human genome
RWKPLWGVRLRLR

SEQ ID NO: 5314 - protein, 13 aa, Artificial Sequence
  Quasi-synthetic sequence derived from human genome
IRHFFRKRKCFVF

SEQ ID NO: 5315 - protein, 13 aa, Artificial Sequence
  Quasi-synthetic sequence derived from human genome
LKRKILIKNKRLK

SEQ ID NO: 5316 - protein, 13 aa, Artificial Sequence
  Quasi-synthetic sequence derived from human genome
VLRCVRLLRIFKV

SEQ ID NO: 5317 - protein, 13 aa, Artificial Sequence
  Quasi-synthetic sequence derived from human genome
LVFFVSRKRRILI

SEQ ID NO: 5318 - protein, 13 aa, Artificial Sequence
  Quasi-synthetic sequence derived from human genome
LLRALRLVRRLRG

SEQ ID NO: 5319 - protein, 13 aa, Artificial Sequence
  Quasi-synthetic sequence derived from human genome
VKVWFRNRRFKLK

SEQ ID NO: 5320 - protein, 13 aa, Artificial Sequence
  Quasi-synthetic sequence derived from human genome
LFIGILFIILRKR

SEQ ID NO: 5321 - protein, 13 aa, Artificial Sequence
  Quasi-synthetic sequence derived from human genome
RIVLWGFRWLIFR

SEQ ID NO: 5322 - protein, 13 aa, Artificial Sequence
  Quasi-synthetic sequence derived from human genome
RMMRIFWVIKLAR

SEQ ID NO: 5323 - protein, 13 aa, Artificial Sequence
  Quasi-synthetic sequence derived from human genome
SFLRRRKRFKVLK

SEQ ID NO: 5324 - protein, 13 aa, Artificial Sequence
  Quasi-synthetic sequence derived from human genome
KLILTPFLLRRLK

SEQ ID NO: 5325 - protein, 13 aa, Artificial Sequence
  Quasi-synthetic sequence derived from human genome
YLLPLLRRLARRL

SEQ ID NO: 5326 - protein, 13 aa, Artificial Sequence
  Quasi-synthetic sequence derived from human genome
ALLWLKRGLKFLK

SEQ ID NO: 5327 - protein, 13 aa, Artificial Sequence
  Quasi-synthetic sequence derived from human genome
LLRFIKRAMKRHL

SEQ ID NO: 5328 - protein, 13 aa, Artificial Sequence
  Quasi-synthetic sequence derived from human genome
LLRLRLAILKYLF

SEQ ID NO: 5329 - protein, 13 aa, Artificial Sequence
  Quasi-synthetic sequence derived from human genome
LIRKKFRMMKIPK

SEQ ID NO: 5330 - protein, 13 aa, Artificial Sequence
  Quasi-synthetic sequence derived from human genome
VKRRLLPMLRLVI

SEQ ID NO: 5331 - protein, 13 aa, Artificial Sequence
  Quasi-synthetic sequence derived from human genome
FILFKNKIVIKKL

SEQ ID NO: 5332 - protein, 13 aa, Artificial Sequence
  Quasi-synthetic sequence derived from human genome
LRLLLWKNLTFRR

SEQ ID NO: 5333 - protein, 13 aa, Artificial Sequence
  Quasi-synthetic sequence derived from human genome
WMKLYFKIKPLLK

SEQ ID NO: 5334 - protein, 13 aa, Artificial Sequence
  Quasi-synthetic sequence derived from human genome
RTFRLMRVLKLVR

SEQ ID NO: 5335 - protein, 13 aa, Artificial Sequence
  Quasi-synthetic sequence derived from human genome
LLTHRVRLRRWKL

SEQ ID NO: 5336 - protein, 13 aa, Artificial Sequence
  Quasi-synthetic sequence derived from human genome
RLRVRLLKRTWPL

SEQ ID NO: 5337 - protein, 13 aa, Artificial Sequence
  Quasi-synthetic sequence derived from human genome
IKNKFLARRFKLL

SEQ ID NO: 5338 - protein, 13 aa, Artificial Sequence
  Quasi-synthetic sequence derived from human genome
VLRCLRPLRIFKL

SEQ ID NO: 5339 - protein, 13 aa, Artificial Sequence
  Quasi-synthetic sequence derived from human genome
LKLKKIYFYWLCR

SEQ ID NO: 5340 - protein, 13 aa, Artificial Sequence
  Quasi-synthetic sequence derived from human genome
RRRTILLLYYLLR

SEQ ID NO: 5341 - protein, 13 aa, Artificial Sequence
  Quasi-synthetic sequence derived from human genome
LFFLLGFLRIRVR

SEQ ID NO: 5342 - protein, 13 aa, Artificial Sequence
  Quasi-synthetic sequence derived from human genome
LFLLFFLFRLLLR

SEQ ID NO: 5343 - protein, 13 aa, Artificial Sequence
  Quasi-synthetic sequence derived from human genome
KKMWIKLRSLLRY

SEQ ID NO: 5344 - protein, 13 aa, Artificial Sequence
  Quasi-synthetic sequence derived from human genome
RKKRKIPKLVLRI

SEQ ID NO: 5345 - protein, 13 aa, Artificial Sequence
  Quasi-synthetic sequence derived from human genome
LRKRILIAIALIK

SEQ ID NO: 5346 - protein, 13 aa, Artificial Sequence
  Quasi-synthetic sequence derived from human genome
MRLKKHRWYKKIL

SEQ ID NO: 5347 - protein, 13 aa, Artificial Sequence
  Quasi-synthetic sequence derived from human genome
VRLALIRFRVKVF

SEQ ID NO: 5348 - protein, 13 aa, Artificial Sequence
  Quasi-synthetic sequence derived from human genome
VFKRKLKMWLKRT

SEQ ID NO: 5349 - protein, 13 aa, Artificial Sequence
  Quasi-synthetic sequence derived from human genome
LVLRLRRWHKSRL

SEQ ID NO: 5350 - protein, 13 aa, Artificial Sequence
  Quasi-synthetic sequence derived from human genome
LVYIKIYIVLRRR

SEQ ID NO: 5351 - protein, 13 aa, Artificial Sequence
  Quasi-synthetic sequence derived from human genome
RHKVLILFKLILL

SEQ ID NO: 5352 - protein, 13 aa, Artificial Sequence
  Quasi-synthetic sequence derived from human genome
RWRRYKYRFVPWI

SEQ ID NO: 5353 - protein, 13 aa, Artificial Sequence
  Quasi-synthetic sequence derived from human genome
LFRLFKRRQGRIF

SEQ ID NO: 5354 - protein, 13 aa, Artificial Sequence
  Quasi-synthetic sequence derived from human genome
LLLMLIFLRQRIR

SEQ ID NO: 5355 - protein, 13 aa, Artificial Sequence
  Quasi-synthetic sequence derived from human genome
MFVFKGRWFWRVR

SEQ ID NO: 5356 - protein, 13 aa, Artificial Sequence
  Quasi-synthetic sequence derived from human genome
FLSLVWKRRILFF

SEQ ID NO: 5357 - protein, 13 aa, Artificial Sequence
  Quasi-synthetic sequence derived from human genome
VVRRVFGRIRRFF

SEQ ID NO: 5358 - protein, 13 aa, Artificial Sequence
  Quasi-synthetic sequence derived from human genome
RRILWITLRTWKK

SEQ ID NO: 5359 - protein, 13 aa, Artificial Sequence
  Quasi-synthetic sequence derived from human genome
MRLLRRRHMPLRL

SEQ ID NO: 5360 - protein, 13 aa, Artificial Sequence
  Quasi-synthetic sequence derived from human genome
LWKIGFFKRPLKK

SEQ ID NO: 5361 - protein, 13 aa, Artificial Sequence
  Quasi-synthetic sequence derived from human genome
RLFRWLVLRLNRA

SEQ ID NO: 5362 - protein, 13 aa, Artificial Sequence
  Quasi-synthetic sequence derived from human genome
TRKRIRYRFRRFI

SEQ ID NO: 5363 - protein, 13 aa, Artificial Sequence
  Quasi-synthetic sequence derived from human genome
LRKRKKRKFSLWV

SEQ ID NO: 5364 - protein, 13 aa, Artificial Sequence
  Quasi-synthetic sequence derived from human genome
KSKIFFLFRLCKK

SEQ ID NO: 5365 - protein, 13 aa, Artificial Sequence
  Quasi-synthetic sequence derived from human genome
LLLLLLLILRLLR

SEQ ID NO: 5366 - protein, 13 aa, Artificial Sequence
  Quasi-synthetic sequence derived from human genome
RHRRLLLLPLLLF

SEQ ID NO: 5367 - protein, 13 aa, Artificial Sequence
  Quasi-synthetic sequence derived from human genome
LRLFRRLLLAALL

SEQ ID NO: 5368 - protein, 13 aa, Artificial Sequence
  Quasi-synthetic sequence derived from human genome
KFFRWVRRAWQRI

SEQ ID NO: 5369 - protein, 13 aa, Artificial Sequence
  Quasi-synthetic sequence derived from human genome
IRIRFIRKNKPFL

SEQ ID NO: 5370 - protein, 13 aa, Artificial Sequence
  Quasi-synthetic sequence derived from human genome
MLWRLHWRRLLSK

SEQ ID NO: 5371 - protein, 13 aa, Artificial Sequence
  Quasi-synthetic sequence derived from human genome
RAVFLLTRWRKFW

SEQ ID NO: 5372 - protein, 13 aa, Artificial Sequence
  Quasi-synthetic sequence derived from human genome
KKLKLIRVLGLFM

SEQ ID NO: 5373 - protein, 13 aa, Artificial Sequence
  Quasi-synthetic sequence derived from human genome
PLLFVKLRKRHLL

SEQ ID NO: 5374 - protein, 13 aa, Artificial Sequence
  Quasi-synthetic sequence derived from human genome
ALLVLQLIRRRRR

SEQ ID NO: 5375 - protein, 13 aa, Artificial Sequence
  Quasi-synthetic sequence derived from human genome
RKKRLKKFPWSLW

SEQ ID NO: 5376 - protein, 13 aa, Artificial Sequence
  Quasi-synthetic sequence derived from human genome
RKRICILVFLRFA

SEQ ID NO: 5377 - protein, 13 aa, Artificial Sequence
  Quasi-synthetic sequence derived from human genome
RFLKIIRPLRNIF

SEQ ID NO: 5378 - protein, 13 aa, Artificial Sequence
  Quasi-synthetic sequence derived from human genome
LFIIPKKLMIFLR

SEQ ID NO: 5379 - protein, 13 aa, Artificial Sequence
  Quasi-synthetic sequence derived from human genome
WRKLLKAFWWLVV

SEQ ID NO: 5380 - protein, 13 aa, Artificial Sequence
  Quasi-synthetic sequence derived from human genome
RRKSLLKPKLLRL

SEQ ID NO: 5381 - protein, 13 aa, Artificial Sequence
  Quasi-synthetic sequence derived from human genome
RWKRWFKFRKRKG

SEQ ID NO: 5382 - protein, 13 aa, Artificial Sequence
  Quasi-synthetic sequence derived from human genome
VYLKRKTLIRLLF

SEQ ID NO: 5383 - protein, 13 aa, Artificial Sequence
  Quasi-synthetic sequence derived from human genome
IRKFFPKRKCFVF

SEQ ID NO: 5384 - protein, 13 aa, Artificial Sequence
  Quasi-synthetic sequence derived from human genome
LMRIFRILKLARH

SEQ ID NO: 5385 - protein, 13 aa, Artificial Sequence
  Quasi-synthetic sequence derived from human genome
RRVLLLCKTRRLI

SEQ ID NO: 5386 - protein, 13 aa, Artificial Sequence
  Quasi-synthetic sequence derived from human genome
LPLFRRCPRLRRL

SEQ ID NO: 5387 - protein, 13 aa, Artificial Sequence
  Quasi-synthetic sequence derived from human genome
LRFKKTWKLRALK

SEQ ID NO: 5388 - protein, 13 aa, Artificial Sequence
  Quasi-synthetic sequence derived from human genome
LLLLKRSRIPIFK

SEQ ID NO: 5389 - protein, 13 aa, Artificial Sequence
  Quasi-synthetic sequence derived from human genome
IRPLLRLVCKKFF

SEQ ID NO: 5390 - protein, 13 aa, Artificial Sequence
  Quasi-synthetic sequence derived from human genome
IRVWFIKVRKMKA

SEQ ID NO: 5391 - protein, 13 aa, Artificial Sequence
  Quasi-synthetic sequence derived from human genome
RVLHFWTLKKRRL

SEQ ID NO: 5392 - protein, 13 aa, Artificial Sequence
  Quasi-synthetic sequence derived from human genome
VRIRVIKKKKVIM

SEQ ID NO: 5393 - protein, 13 aa, Artificial Sequence
  Quasi-synthetic sequence derived from human genome
RLVYKWFLLIYKL

SEQ ID NO: 5394 - protein, 13 aa, Artificial Sequence
  Quasi-synthetic sequence derived from human genome
KLSFKRKHFLIKL

SEQ ID NO: 5395 - protein, 13 aa, Artificial Sequence
  Quasi-synthetic sequence derived from human genome
MIFRRIKMPWLWL

SEQ ID NO: 5396 - protein, 13 aa, Artificial Sequence
  Quasi-synthetic sequence derived from human genome
LRILRYFRFYGRI

SEQ ID NO: 5397 - protein, 13 aa, Artificial Sequence
  Quasi-synthetic sequence derived from human genome
RRWLPRPRAWFIR

SEQ ID NO: 5398 - protein, 13 aa, Artificial Sequence
  Quasi-synthetic sequence derived from human genome
LRQRLRYALRLLR

SEQ ID NO: 5399 - protein, 13 aa, Artificial Sequence
  Quasi-synthetic sequence derived from human genome
FFYNKRLKRIVFF

SEQ ID NO: 5400 - protein, 13 aa, Artificial Sequence
  Quasi-synthetic sequence derived from human genome
LLLVAMICRRRRR

SEQ ID NO: 5401 - protein, 13 aa, Artificial Sequence
  Quasi-synthetic sequence derived from human genome
IIVLYMLRFKKYK

SEQ ID NO: 5402 - protein, 13 aa, Artificial Sequence
  Quasi-synthetic sequence derived from human genome
RRRRLCLQLYFLW

SEQ ID NO: 5403 - protein, 13 aa, Artificial Sequence
  Quasi-synthetic sequence derived from human genome
LLWFRRLYIIFSR

SEQ ID NO: 5404 - protein, 13 aa, Artificial Sequence
  Quasi-synthetic sequence derived from human genome
LAKKMLRKALKLL

SEQ ID NO: 5405 - protein, 13 aa, Artificial Sequence
  Quasi-synthetic sequence derived from human genome
PKAFKLLKKLMRL

SEQ ID NO: 5406 - protein, 13 aa, Artificial Sequence
  Quasi-synthetic sequence derived from human genome
WMRKLAFRYRRVK

SEQ ID NO: 5407 - protein, 13 aa, Artificial Sequence
  Quasi-synthetic sequence derived from human genome
LLVALLMLRKYRK

SEQ ID NO: 5408 - protein, 13 aa, Artificial Sequence
  Quasi-synthetic sequence derived from human genome
IPLKRKRKYFKVF

SEQ ID NO: 5409 - protein, 13 aa, Artificial Sequence
  Quasi-synthetic sequence derived from human genome
RLIFRRLSLGRIK

SEQ ID NO: 5410 - protein, 13 aa, Artificial Sequence
  Quasi-synthetic sequence derived from human genome
LKKKLFKRRRVLN

SEQ ID NO: 5411 - protein, 13 aa, Artificial Sequence
  Quasi-synthetic sequence derived from human genome
KLRYPPWLLLLKR

SEQ ID NO: 5412 - protein, 13 aa, Artificial Sequence
  Quasi-synthetic sequence derived from human genome
RKKFPLKIFKKPL

SEQ ID NO: 5413 - protein, 13 aa, Artificial Sequence
  Quasi-synthetic sequence derived from human genome
WKRARIFPMIFKK

SEQ ID NO: 5414 - protein, 13 aa, Artificial Sequence
  Quasi-synthetic sequence derived from human genome
RKTFKMLLLCRWK

SEQ ID NO: 5415 - protein, 13 aa, Artificial Sequence
  Quasi-synthetic sequence derived from human genome
KKKYKAIRLIFVI

SEQ ID NO: 5416 - protein, 13 aa, Artificial Sequence
  Quasi-synthetic sequence derived from human genome
VLFLRLRSIRCLR

SEQ ID NO: 5417 - protein, 13 aa, Artificial Sequence
  Quasi-synthetic sequence derived from human genome
FLILVFSIIRRRF

SEQ ID NO: 5418 - protein, 13 aa, Artificial Sequence
  Quasi-synthetic sequence derived from human genome
KIYFLLVRIKIKH

SEQ ID NO: 5419 - protein, 13 aa, Artificial Sequence
  Quasi-synthetic sequence derived from human genome
RYLRRRLVPRYRL

SEQ ID NO: 5420 - protein, 13 aa, Artificial Sequence
  Quasi-synthetic sequence derived from human genome
KAVLRMLLLLWFK

SEQ ID NO: 5421 - protein, 13 aa, Artificial Sequence
  Quasi-synthetic sequence derived from human genome
IYMISFIFRKRRK

SEQ ID NO: 5422 - protein, 13 aa, Artificial Sequence
  Quasi-synthetic sequence derived from human genome
FTKILRRKRLLPK

SEQ ID NO: 5423 - protein, 13 aa, Artificial Sequence
  Quasi-synthetic sequence derived from human genome
LGLWKIARKWMRR

SEQ ID NO: 5424 - protein, 13 aa, Artificial Sequence
  Quasi-synthetic sequence derived from human genome
LKLGALRKLRKWK

SEQ ID NO: 5425 - protein, 13 aa, Artificial Sequence
  Quasi-synthetic sequence derived from human genome
RLHVLKALKKLRI

SEQ ID NO: 5426 - protein, 13 aa, Artificial Sequence
  Quasi-synthetic sequence derived from human genome
LAIPLRRKVKKLL

SEQ ID NO: 5427 - protein, 13 aa, Artificial Sequence
  Quasi-synthetic sequence derived from human genome
VVVLVLFKYKRLR

SEQ ID NO: 5428 - protein, 13 aa, Artificial Sequence
  Quasi-synthetic sequence derived from human genome
WRKRCLYFFVLLL

SEQ ID NO: 5429 - protein, 13 aa, Artificial Sequence
  Quasi-synthetic sequence derived from human genome
WRKRCLYLFVLLL

SEQ ID NO: 5430 - protein, 13 aa, Artificial Sequence
  Quasi-synthetic sequence derived from human genome
LIKKFQFLMFRLF

SEQ ID NO: 5431 - protein, 13 aa, Artificial Sequence
  Quasi-synthetic sequence derived from human genome
RFLLLFTFLKKNR

SEQ ID NO: 5432 - protein, 13 aa, Artificial Sequence
  Quasi-synthetic sequence derived from human genome
RFPKILVLHLKRF

SEQ ID NO: 5433 - protein, 13 aa, Artificial Sequence
  Quasi-synthetic sequence derived from human genome
ICWVLLKKFKLPR

SEQ ID NO: 5434 - protein, 13 aa, Artificial Sequence
  Quasi-synthetic sequence derived from human genome
LILALFLVHRRKK

SEQ ID NO: 5435 - protein, 13 aa, Artificial Sequence
  Quasi-synthetic sequence derived from human genome
IRMRLVNRFYRRL

SEQ ID NO: 5436 - protein, 13 aa, Artificial Sequence
  Quasi-synthetic sequence derived from human genome
LHYRFLNWRRRIR

SEQ ID NO: 5437 - protein, 13 aa, Artificial Sequence
  Quasi-synthetic sequence derived from human genome
LLWMWWRRNRRGK

SEQ ID NO: 5438 - protein, 13 aa, Artificial Sequence
  Quasi-synthetic sequence derived from human genome
WKRKGRTLFRRLL

SEQ ID NO: 5439 - protein, 13 aa, Artificial Sequence
  Quasi-synthetic sequence derived from human genome
LLRLRQHWKLRKV

SEQ ID NO: 5440 - protein, 13 aa, Artificial Sequence
  Quasi-synthetic sequence derived from human genome
RARRRRPLFALLL

SEQ ID NO: 5441 - protein, 13 aa, Artificial Sequence
  Quasi-synthetic sequence derived from human genome
LRLLRTLRPLRVI

SEQ ID NO: 5442 - protein, 13 aa, Artificial Sequence
  Quasi-synthetic sequence derived from human genome
KFWPRRRFNFFVL

SEQ ID NO: 5443 - protein, 13 aa, Artificial Sequence
  Quasi-synthetic sequence derived from human genome
IVLGFLFKRFLRI

SEQ ID NO: 5444 - protein, 13 aa, Artificial Sequence
  Quasi-synthetic sequence derived from human genome
RSKLSLIRKFRLF

SEQ ID NO: 5445 - protein, 13 aa, Artificial Sequence
  Quasi-synthetic sequence derived from human genome
LFILKLGRRSRLK

SEQ ID NO: 5446 - protein, 13 aa, Artificial Sequence
  Quasi-synthetic sequence derived from human genome
VKILKKKKLRRIP

SEQ ID NO: 5447 - protein, 13 aa, Artificial Sequence
  Quasi-synthetic sequence derived from human genome
RLARIGRVLRLIR

SEQ ID NO: 5448 - protein, 13 aa, Artificial Sequence
  Quasi-synthetic sequence derived from human genome
KAMKRLWIRTLRL

SEQ ID NO: 5449 - protein, 13 aa, Artificial Sequence
  Quasi-synthetic sequence derived from human genome
YKLRRLYFIWVCR

SEQ ID NO: 5450 - protein, 13 aa, Artificial Sequence
  Quasi-synthetic sequence derived from human genome
LKRIFHLWRCKKY

SEQ ID NO: 5451 - protein, 13 aa, Artificial Sequence
  Quasi-synthetic sequence derived from human genome
LVRPKPLLLKLLK

SEQ ID NO: 5452 - protein, 13 aa, Artificial Sequence
  Quasi-synthetic sequence derived from human genome
LRRLFVFKLIPML

SEQ ID NO: 5453 - protein, 13 aa, Artificial Sequence
  Quasi-synthetic sequence derived from human genome
LKWPLRFVIIHKR

SEQ ID NO: 5454 - protein, 13 aa, Artificial Sequence
  Quasi-synthetic sequence derived from human genome
FRCLKRLKMSWFL

SEQ ID NO: 5455 - protein, 13 aa, Artificial Sequence
  Quasi-synthetic sequence derived from human genome
RRRLWLGLAWLLL

SEQ ID NO: 5456 - protein, 13 aa, Artificial Sequence
  Quasi-synthetic sequence derived from human genome
RMRHLKIVYRRFR

SEQ ID NO: 5457 - protein, 13 aa, Artificial Sequence
  Quasi-synthetic sequence derived from human genome
LGRIFKPWKWRKK

SEQ ID NO: 5458 - protein, 13 aa, Artificial Sequence
  Quasi-synthetic sequence derived from human genome
CLRLLLLLGYRRR

SEQ ID NO: 5459 - protein, 13 aa, Artificial Sequence
  Quasi-synthetic sequence derived from human genome
WHRRRILMGKIFR

SEQ ID NO: 5460 - protein, 13 aa, Artificial Sequence
  Quasi-synthetic sequence derived from human genome
LSKRQLFFRKKLL

SEQ ID NO: 5461 - protein, 13 aa, Artificial Sequence
  Quasi-synthetic sequence derived from human genome
AWYLKPKLWKKLR

SEQ ID NO: 5462 - protein, 13 aa, Artificial Sequence
  Quasi-synthetic sequence derived from human genome
IFRKVKRRSLRLY

SEQ ID NO: 5463 - protein, 13 aa, Artificial Sequence
  Quasi-synthetic sequence derived from human genome
RKLGIFRRCWLVF

SEQ ID NO: 5464 - protein, 13 aa, Artificial Sequence
  Quasi-synthetic sequence derived from human genome
VGLLRLAIRLLRR

SEQ ID NO: 5465 - protein, 13 aa, Artificial Sequence
  Quasi-synthetic sequence derived from human genome
KSLKIFRRPRKLF

SEQ ID NO: 5466 - protein, 13 aa, Artificial Sequence
  Quasi-synthetic sequence derived from human genome
FLLYKFKMKQRIL

SEQ ID NO: 5467 - protein, 13 aa, Artificial Sequence
  Quasi-synthetic sequence derived from human genome
RLGILHKFVLRRR

SEQ ID NO: 5468 - protein, 13 aa, Artificial Sequence
  Quasi-synthetic sequence derived from human genome
RRKYLLKALFKAL

SEQ ID NO: 5469 - protein, 13 aa, Artificial Sequence
  Quasi-synthetic sequence derived from human genome
KKVWIGIKKLLML

SEQ ID NO: 5470 - protein, 13 aa, Artificial Sequence
  Quasi-synthetic sequence derived from human genome
FLQRNLKKFRRRW

SEQ ID NO: 5471 - protein, 13 aa, Artificial Sequence
  Quasi-synthetic sequence derived from human genome
FILVFWILKRKLS

SEQ ID NO: 5472 - protein, 13 aa, Artificial Sequence
  Quasi-synthetic sequence derived from human genome
FLFLRRRCFLLTF

SEQ ID NO: 5473 - protein, 13 aa, Artificial Sequence
  Quasi-synthetic sequence derived from human genome
RALLRRFPRMLLV

SEQ ID NO: 5474 - protein, 13 aa, Artificial Sequence
  Quasi-synthetic sequence derived from human genome
KRWTHLVRLLRLI

SEQ ID NO: 5475 - protein, 13 aa, Artificial Sequence
  Quasi-synthetic sequence derived from human genome
RLHMVLRPFLLRR

SEQ ID NO: 5476 - protein, 13 aa, Artificial Sequence
  Quasi-synthetic sequence derived from human genome
MRRLRRLAHLVLF

SEQ ID NO: 5477 - protein, 13 aa, Artificial Sequence
  Quasi-synthetic sequence derived from human genome
RFRPRWKVILTFF

SEQ ID NO: 5478 - protein, 13 aa, Artificial Sequence
  Quasi-synthetic sequence derived from human genome
LLLLRWRRPALHR

SEQ ID NO: 5479 - protein, 13 aa, Artificial Sequence
  Quasi-synthetic sequence derived from human genome
LAARLWRLLPFRR

SEQ ID NO: 5480 - protein, 13 aa, Artificial Sequence
  Quasi-synthetic sequence derived from human genome
YVLRRRRKKLPFR

SEQ ID NO: 5481 - protein, 13 aa, Artificial Sequence
  Quasi-synthetic sequence derived from human genome
LKFVVVTRWRFKK

SEQ ID NO: 5482 - protein, 13 aa, Artificial Sequence
  Quasi-synthetic sequence derived from human genome
KHIVIFALRRILR

SEQ ID NO: 5483 - protein, 13 aa, Artificial Sequence
  Quasi-synthetic sequence derived from human genome
IRKFFPKKKCFVF

SEQ ID NO: 5484 - protein, 13 aa, Artificial Sequence
  Quasi-synthetic sequence derived from human genome
LLLRKLPFQRLVR

SEQ ID NO: 5485 - protein, 13 aa, Artificial Sequence
  Quasi-synthetic sequence derived from human genome
FRPGKVLRFLRLF

SEQ ID NO: 5486 - protein, 13 aa, Artificial Sequence
  Quasi-synthetic sequence derived from human genome
LRSFRLLRVFKLA

SEQ ID NO: 5487 - protein, 13 aa, Artificial Sequence
  Quasi-synthetic sequence derived from human genome
LLYLKRLKIIIFP

SEQ ID NO: 5488 - protein, 13 aa, Artificial Sequence
  Quasi-synthetic sequence derived from human genome
KKVLLLLWKVVMF

SEQ ID NO: 5489 - protein, 13 aa, Artificial Sequence
  Quasi-synthetic sequence derived from human genome
KHWPWMKLFFKIK

SEQ ID NO: 5490 - protein, 13 aa, Artificial Sequence
  Quasi-synthetic sequence derived from human genome
MRLRFWLLIWLLL

SEQ ID NO: 5491 - protein, 13 aa, Artificial Sequence
  Quasi-synthetic sequence derived from human genome
RLLLRITKRTWRK

SEQ ID NO: 5492 - protein, 13 aa, Artificial Sequence
  Quasi-synthetic sequence derived from human genome
KGFFRRTIRLKLI

SEQ ID NO: 5493 - protein, 13 aa, Artificial Sequence
  Quasi-synthetic sequence derived from human genome
IKPILRKLPRIKK

SEQ ID NO: 5494 - protein, 13 aa, Artificial Sequence
  Quasi-synthetic sequence derived from human genome
KTWIFWKTWIFRK

SEQ ID NO: 5495 - protein, 13 aa, Artificial Sequence
  Quasi-synthetic sequence derived from human genome
IRLMLKYQKILWK

SEQ ID NO: 5496 - protein, 13 aa, Artificial Sequence
  Quasi-synthetic sequence derived from human genome
RSFRLLRVFKLAK

SEQ ID NO: 5497 - protein, 13 aa, Artificial Sequence
  Quasi-synthetic sequence derived from human genome
FLRRRLAFLSFFW

SEQ ID NO: 5498 - protein, 13 aa, Artificial Sequence
  Quasi-synthetic sequence derived from human genome
RRLARQLLLLLWL

SEQ ID NO: 5499 - protein, 13 aa, Artificial Sequence
  Quasi-synthetic sequence derived from human genome
LFRTKSKRRFFFR

SEQ ID NO: 5500 - protein, 13 aa, Artificial Sequence
  Quasi-synthetic sequence derived from human genome
LKILGLIIVRRLL

SEQ ID NO: 5501 - protein, 13 aa, Artificial Sequence
  Quasi-synthetic sequence derived from human genome
LILWRILYKKTLW

SEQ ID NO: 5502 - protein, 13 aa, Artificial Sequence
  Quasi-synthetic sequence derived from human genome
RFFLLRGRCLLLL

SEQ ID NO: 5503 - protein, 13 aa, Artificial Sequence
  Quasi-synthetic sequence derived from human genome
RFCLLLRLLRQLL

SEQ ID NO: 5504 - protein, 13 aa, Artificial Sequence
  Quasi-synthetic sequence derived from human genome
KKMKHLWFFLLLV

SEQ ID NO: 5505 - protein, 13 aa, Artificial Sequence
  Quasi-synthetic sequence derived from human genome
LRRIIRILNLSKR

SEQ ID NO: 5506 - protein, 13 aa, Artificial Sequence
  Quasi-synthetic sequence derived from human genome
IGWWKLTFLRKKK

SEQ ID NO: 5507 - protein, 13 aa, Artificial Sequence
  Quasi-synthetic sequence derived from human genome
RKIILRCKRKLGL

SEQ ID NO: 5508 - protein, 13 aa, Artificial Sequence
  Quasi-synthetic sequence derived from human genome
WCRRRRPLLRLPR

SEQ ID NO: 5509 - protein, 13 aa, Artificial Sequence
  Quasi-synthetic sequence derived from human genome
RMLKQMLFRFWLL

SEQ ID NO: 5510 - protein, 13 aa, Artificial Sequence
  Quasi-synthetic sequence derived from human genome
LRAFRVLRPLRLV

SEQ ID NO: 5511 - protein, 13 aa, Artificial Sequence
  Quasi-synthetic sequence derived from human genome
RKKQKIIKMLLIV

SEQ ID NO: 5512 - protein, 13 aa, Artificial Sequence
  Quasi-synthetic sequence derived from human genome
LLRTFLRFLLLHR

SEQ ID NO: 5513 - protein, 13 aa, Artificial Sequence
  Quasi-synthetic sequence derived from human genome
KLRNLFTKFIRKF

SEQ ID NO: 5514 - protein, 13 aa, Artificial Sequence
  Quasi-synthetic sequence derived from human genome
HRLLRKLLSRYRL

SEQ ID NO: 5515 - protein, 13 aa, Artificial Sequence
  Quasi-synthetic sequence derived from human genome
KNYRAFLLRRRFL

SEQ ID NO: 5516 - protein, 13 aa, Artificial Sequence
  Quasi-synthetic sequence derived from human genome
LVRRRKRRFFGLC

SEQ ID NO: 5517 - protein, 13 aa, Artificial Sequence
  Quasi-synthetic sequence derived from human genome
YIRKKNKWLIKIK

SEQ ID NO: 5518 - protein, 13 aa, Artificial Sequence
  Quasi-synthetic sequence derived from human genome
WPLKKRPKWKRVL

SEQ ID NO: 5519 - protein, 13 aa, Artificial Sequence
  Quasi-synthetic sequence derived from human genome
LKRKILIKHKKLA

SEQ ID NO: 5520 - protein, 13 aa, Artificial Sequence
  Quasi-synthetic sequence derived from human genome
MLLPKKMKLLLFL

SEQ ID NO: 5521 - protein, 13 aa, Artificial Sequence
  Quasi-synthetic sequence derived from human genome
MLRLKRPILRRIS

SEQ ID NO: 5522 - protein, 13 aa, Artificial Sequence
  Quasi-synthetic sequence derived from human genome
IKRIKKKLSLLCI

SEQ ID NO: 5523 - protein, 13 aa, Artificial Sequence
  Quasi-synthetic sequence derived from human genome
LRPILAARLRRRL

SEQ ID NO: 5524 - protein, 13 aa, Artificial Sequence
  Quasi-synthetic sequence derived from human genome
ARLLRLVRVARKL

SEQ ID NO: 5525 - protein, 13 aa, Artificial Sequence
  Quasi-synthetic sequence derived from human genome
FAILRIIRLVRVF

SEQ ID NO: 5526 - protein, 13 aa, Artificial Sequence
  Quasi-synthetic sequence derived from human genome
KLRHIWNLKLMRW

SEQ ID NO: 5527 - protein, 13 aa, Artificial Sequence
  Quasi-synthetic sequence derived from human genome
VVLLLKYRRRHRK

SEQ ID NO: 5528 - protein, 13 aa, Artificial Sequence
  Quasi-synthetic sequence derived from human genome
AFKRIRLRPRYLR

SEQ ID NO: 5529 - protein, 13 aa, Artificial Sequence
  Quasi-synthetic sequence derived from human genome
LKKWKNRLILKRA

SEQ ID NO: 5530 - protein, 13 aa, Artificial Sequence
  Quasi-synthetic sequence derived from human genome
LRKHFPVFKRKRL

SEQ ID NO: 5531 - protein, 13 aa, Artificial Sequence
  Quasi-synthetic sequence derived from human genome
WKRRWFVLRSGRL

SEQ ID NO: 5532 - protein, 13 aa, Artificial Sequence
  Quasi-synthetic sequence derived from human genome
RRRMKLLLGIALL

SEQ ID NO: 5533 - protein, 13 aa, Artificial Sequence
  Quasi-synthetic sequence derived from human genome
RRKFLLLGMRPFI

SEQ ID NO: 5534 - protein, 13 aa, Artificial Sequence
  Quasi-synthetic sequence derived from human genome
LLIRKLPFQRLMR

SEQ ID NO: 5535 - protein, 13 aa, Artificial Sequence
  Quasi-synthetic sequence derived from human genome
VFKSLLLLKKKKY

SEQ ID NO: 5536 - protein, 13 aa, Artificial Sequence
  Quasi-synthetic sequence derived from human genome
LFRKAVFQRLKLW

SEQ ID NO: 5537 - protein, 13 aa, Artificial Sequence
  Quasi-synthetic sequence derived from human genome
FRLLRVFKLAKSW

SEQ ID NO: 5538 - protein, 13 aa, Artificial Sequence
  Quasi-synthetic sequence derived from human genome
LLMAFYFFRKKYR

SEQ ID NO: 5539 - protein, 13 aa, Artificial Sequence
  Quasi-synthetic sequence derived from human genome
RRARLRFMKQLRL

SEQ ID NO: 5540 - protein, 13 aa, Artificial Sequence
  Quasi-synthetic sequence derived from human genome
RKLMRWILILVIA

SEQ ID NO: 5541 - protein, 13 aa, Artificial Sequence
  Quasi-synthetic sequence derived from human genome
RIVRLARIGRILR

SEQ ID NO: 5542 - protein, 13 aa, Artificial Sequence
  Quasi-synthetic sequence derived from human genome
RVIRLARIGRILR

SEQ ID NO: 5543 - protein, 13 aa, Artificial Sequence
  Quasi-synthetic sequence derived from human genome
LRSRFRLRLLGVR

SEQ ID NO: 5544 - protein, 13 aa, Artificial Sequence
  Quasi-synthetic sequence derived from human genome
QLRRLRGLLRVLR

SEQ ID NO: 5545 - protein, 13 aa, Artificial Sequence
  Quasi-synthetic sequence derived from human genome
LLRRWKHWLLLLG

SEQ ID NO: 5546 - protein, 13 aa, Artificial Sequence
  Quasi-synthetic sequence derived from human genome
ILYMKPRMKIFLR

SEQ ID NO: 5547 - protein, 13 aa, Artificial Sequence
  Quasi-synthetic sequence derived from human genome
WWFMSVKVKLKRK

SEQ ID NO: 5548 - protein, 13 aa, Artificial Sequence
  Quasi-synthetic sequence derived from human genome
RLGLPLRLRLLLL

SEQ ID NO: 5549 - protein, 13 aa, Artificial Sequence
  Quasi-synthetic sequence derived from human genome
LLLLLGLLRPLRR

SEQ ID NO: 5550 - protein, 13 aa, Artificial Sequence
  Quasi-synthetic sequence derived from human genome
VRKILSRLFRVFV

SEQ ID NO: 5551 - protein, 13 aa, Artificial Sequence
  Quasi-synthetic sequence derived from human genome
RLRYFLKVTIVRR

SEQ ID NO: 5552 - protein, 13 aa, Artificial Sequence
  Quasi-synthetic sequence derived from human genome
RYLRVKLTVRFRI

SEQ ID NO: 5553 - protein, 13 aa, Artificial Sequence
  Quasi-synthetic sequence derived from human genome
LMKMARLLARFLR

SEQ ID NO: 5554 - protein, 13 aa, Artificial Sequence
  Quasi-synthetic sequence derived from human genome
IRKLYMKSLLKIF

SEQ ID NO: 5555 - protein, 13 aa, Artificial Sequence
  Quasi-synthetic sequence derived from human genome
KLRILRMKLRSLA

SEQ ID NO: 5556 - protein, 13 aa, Artificial Sequence
  Quasi-synthetic sequence derived from human genome
LRVLRPLKTIKRL

SEQ ID NO: 5557 - protein, 13 aa, Artificial Sequence
  Quasi-synthetic sequence derived from human genome
WRSFYRHKLLKWW

SEQ ID NO: 5558 - protein, 13 aa, Artificial Sequence
  Quasi-synthetic sequence derived from human genome
LRRKALAPRLLLR

SEQ ID NO: 5559 - protein, 13 aa, Artificial Sequence
  Quasi-synthetic sequence derived from human genome
LLFFAVKYLLRWK

SEQ ID NO: 5560 - protein, 13 aa, Artificial Sequence
  Quasi-synthetic sequence derived from human genome
RLVFKMRFYRLLQ

SEQ ID NO: 5561 - protein, 13 aa, Artificial Sequence
  Quasi-synthetic sequence derived from human genome
RLLRGLWQRWRRY

SEQ ID NO: 5562 - protein, 13 aa, Artificial Sequence
  Quasi-synthetic sequence derived from human genome
LLLWKKIHRMVIL

SEQ ID NO: 5563 - protein, 13 aa, Artificial Sequence
  Quasi-synthetic sequence derived from human genome
FLKKNRKKKLMVF

SEQ ID NO: 5564 - protein, 13 aa, Artificial Sequence
  Quasi-synthetic sequence derived from human genome
LRGMLKRLKRMRR

SEQ ID NO: 5565 - protein, 13 aa, Artificial Sequence
  Quasi-synthetic sequence derived from human genome
FVKIRWARWSKLL

SEQ ID NO: 5566 - protein, 13 aa, Artificial Sequence
  Quasi-synthetic sequence derived from human genome
FRILKLIVRRRNA

SEQ ID NO: 5567 - protein, 13 aa, Artificial Sequence
  Quasi-synthetic sequence derived from human genome
LKKRAYLARFLIK

SEQ ID NO: 5568 - protein, 13 aa, Artificial Sequence
  Quasi-synthetic sequence derived from human genome
LKLHKMWKGWLRK

SEQ ID NO: 5569 - protein, 13 aa, Artificial Sequence
  Quasi-synthetic sequence derived from human genome
FMLKKRKWPLKGW

SEQ ID NO: 5570 - protein, 13 aa, Artificial Sequence
  Quasi-synthetic sequence derived from human genome
IRKIMCQLLFRRF

SEQ ID NO: 5571 - protein, 13 aa, Artificial Sequence
  Quasi-synthetic sequence derived from human genome
FRTGIKRRILLLI

SEQ ID NO: 5572 - protein, 13 aa, Artificial Sequence
  Quasi-synthetic sequence derived from human genome
RARWLRGILLFLF

SEQ ID NO: 5573 - protein, 13 aa, Artificial Sequence
  Quasi-synthetic sequence derived from human genome
WLGLRFLRALRLI

SEQ ID NO: 5574 - protein, 13 aa, Artificial Sequence
  Quasi-synthetic sequence derived from human genome
WLLRLLFPRVLCR

SEQ ID NO: 5575 - protein, 13 aa, Artificial Sequence
  Quasi-synthetic sequence derived from human genome
KIKIFIIYLKKPM

SEQ ID NO: 5576 - protein, 13 aa, Artificial Sequence
  Quasi-synthetic sequence derived from human genome
IRMCKFLRYFFYK

SEQ ID NO: 5577 - protein, 13 aa, Artificial Sequence
  Quasi-synthetic sequence derived from human genome
LLIRKLPFQRLVR

SEQ ID NO: 5578 - protein, 13 aa, Artificial Sequence
  Quasi-synthetic sequence derived from human genome
LYLRYRPKVKFLF

SEQ ID NO: 5579 - protein, 13 aa, Artificial Sequence
  Quasi-synthetic sequence derived from human genome
IMRFLRRCRHRMR

SEQ ID NO: 5580 - protein, 13 aa, Artificial Sequence
  Quasi-synthetic sequence derived from human genome
LLRRLKLVKMYRS

SEQ ID NO: 5581 - protein, 13 aa, Artificial Sequence
  Quasi-synthetic sequence derived from human genome
KRLITYRLRHLLR

SEQ ID NO: 5582 - protein, 13 aa, Artificial Sequence
  Quasi-synthetic sequence derived from human genome
LLCKNFLKKWRMK

SEQ ID NO: 5583 - protein, 13 aa, Artificial Sequence
  Quasi-synthetic sequence derived from human genome
MKNKFLARRFKLL

SEQ ID NO: 5584 - protein, 13 aa, Artificial Sequence
  Quasi-synthetic sequence derived from human genome
RRISLRKKLKLPI

SEQ ID NO: 5585 - protein, 13 aa, Artificial Sequence
  Quasi-synthetic sequence derived from human genome
KLKRKYWWKNLKM

SEQ ID NO: 5586 - protein, 13 aa, Artificial Sequence
  Quasi-synthetic sequence derived from human genome
RQLFGWLFRRVRF

SEQ ID NO: 5587 - protein, 13 aa, Artificial Sequence
  Quasi-synthetic sequence derived from human genome
FVFFIWRRYWRTL

SEQ ID NO: 5588 - protein, 13 aa, Artificial Sequence
  Quasi-synthetic sequence derived from human genome
RTRRPWKKILILV

SEQ ID NO: 5589 - protein, 13 aa, Artificial Sequence
  Quasi-synthetic sequence derived from human genome
RTRRAWKKILILV

SEQ ID NO: 5590 - protein, 13 aa, Artificial Sequence
  Quasi-synthetic sequence derived from human genome
RLLRALRVLYVMR

SEQ ID NO: 5591 - protein, 13 aa, Artificial Sequence
  Quasi-synthetic sequence derived from human genome
LLMVLLRYVPRRR

SEQ ID NO: 5592 - protein, 13 aa, Artificial Sequence
  Quasi-synthetic sequence derived from human genome
KRWISFKSFFRRR

SEQ ID NO: 5593 - protein, 13 aa, Artificial Sequence
  Quasi-synthetic sequence derived from human genome
KKFGLKLFRLSFK

SEQ ID NO: 5594 - protein, 13 aa, Artificial Sequence
  Quasi-synthetic sequence derived from human genome
RLRRVLRALAWLY

SEQ ID NO: 5595 - protein, 13 aa, Artificial Sequence
  Quasi-synthetic sequence derived from human genome
KLLWRKFQIPRFM

SEQ ID NO: 5596 - protein, 13 aa, Artificial Sequence
  Quasi-synthetic sequence derived from human genome
VCKPFLFLLKKKI

SEQ ID NO: 5597 - protein, 13 aa, Artificial Sequence
  Quasi-synthetic sequence derived from human genome
LWPKRLLLPRHLR

SEQ ID NO: 5598 - protein, 13 aa, Artificial Sequence
  Quasi-synthetic sequence derived from human genome
LLVRRRFISLKKA

SEQ ID NO: 5599 - protein, 13 aa, Artificial Sequence
  Quasi-synthetic sequence derived from human genome
FHLWRRQWRPRRF

SEQ ID NO: 5600 - protein, 13 aa, Artificial Sequence
  Quasi-synthetic sequence derived from human genome
RSLLKRMLKCLIF

SEQ ID NO: 5601 - protein, 13 aa, Artificial Sequence
  Quasi-synthetic sequence derived from human genome
LRKRLLVLQRVFY

SEQ ID NO: 5602 - protein, 13 aa, Artificial Sequence
  Quasi-synthetic sequence derived from human genome
WLMGKLRFRWRQL

SEQ ID NO: 5603 - protein, 13 aa, Artificial Sequence
  Quasi-synthetic sequence derived from human genome
AFLLLCLLHKRRR

SEQ ID NO: 5604 - protein, 13 aa, Artificial Sequence
  Quasi-synthetic sequence derived from human genome
KKRLLFPRFFFVS

SEQ ID NO: 5605 - protein, 13 aa, Artificial Sequence
  Quasi-synthetic sequence derived from human genome
LKLVAFGLRRFFK

SEQ ID NO: 5606 - protein, 13 aa, Artificial Sequence
  Quasi-synthetic sequence derived from human genome
KFKFVFFLRLSRA

SEQ ID NO: 5607 - protein, 13 aa, Artificial Sequence
  Quasi-synthetic sequence derived from human genome
KKTFYKRLLLYFI

SEQ ID NO: 5608 - protein, 13 aa, Artificial Sequence
  Quasi-synthetic sequence derived from human genome
LKRFKVMKPKVLR

SEQ ID NO: 5609 - protein, 13 aa, Artificial Sequence
  Quasi-synthetic sequence derived from human genome
FGKIFKPWKWRKK

SEQ ID NO: 5610 - protein, 13 aa, Artificial Sequence
  Quasi-synthetic sequence derived from human genome
IMKRLIKRYVLKA

SEQ ID NO: 5611 - protein, 13 aa, Artificial Sequence
  Quasi-synthetic sequence derived from human genome
RLARRRKKILFYC

SEQ ID NO: 5612 - protein, 13 aa, Artificial Sequence
  Quasi-synthetic sequence derived from human genome
IIMRFRKRKNFKK

SEQ ID NO: 5613 - protein, 13 aa, Artificial Sequence
  Quasi-synthetic sequence derived from human genome
VRICKFLRYFFYK

SEQ ID NO: 5614 - protein, 13 aa, Artificial Sequence
  Quasi-synthetic sequence derived from human genome
IFLIIKSYRKYRR

SEQ ID NO: 5615 - protein, 13 aa, Artificial Sequence
  Quasi-synthetic sequence derived from human genome
LLLWKMGFFKRAK

SEQ ID NO: 5616 - protein, 13 aa, Artificial Sequence
  Quasi-synthetic sequence derived from human genome
LWAVRKHLRRLYR

SEQ ID NO: 5617 - protein, 13 aa, Artificial Sequence
  Quasi-synthetic sequence derived from human genome
LRRKRKALWAHLF

SEQ ID NO: 5618 - protein, 13 aa, Artificial Sequence
  Quasi-synthetic sequence derived from human genome
LKHLKLKKLKCVI

SEQ ID NO: 5619 - protein, 13 aa, Artificial Sequence
  Quasi-synthetic sequence derived from human genome
LVLLLLAMLVRRR

SEQ ID NO: 5620 - protein, 13 aa, Artificial Sequence
  Quasi-synthetic sequence derived from human genome
LLRKFCQMRKRRL

SEQ ID NO: 5621 - protein, 13 aa, Artificial Sequence
  Quasi-synthetic sequence derived from human genome
KMLMAKKWVKFKR

SEQ ID NO: 5622 - protein, 13 aa, Artificial Sequence
  Quasi-synthetic sequence derived from human genome
LLVLVFIKKVAKK

SEQ ID NO: 5623 - protein, 13 aa, Artificial Sequence
  Quasi-synthetic sequence derived from human genome
RIPLLRKRRFQLY

SEQ ID NO: 5624 - protein, 13 aa, Artificial Sequence
  Quasi-synthetic sequence derived from human genome
RFKLKCIFCKKRR

SEQ ID NO: 5625 - protein, 13 aa, Artificial Sequence
  Quasi-synthetic sequence derived from human genome
LLLLFLILRHRRQ

SEQ ID NO: 5626 - protein, 13 aa, Artificial Sequence
  Quasi-synthetic sequence derived from human genome
GFFLWLKKRKQIK

SEQ ID NO: 5627 - protein, 13 aa, Artificial Sequence
  Quasi-synthetic sequence derived from human genome
LKKSRKWLKSILL

SEQ ID NO: 5628 - protein, 13 aa, Artificial Sequence
  Quasi-synthetic sequence derived from human genome
RPRWSLWRRVFLM

SEQ ID NO: 5629 - protein, 13 aa, Artificial Sequence
  Quasi-synthetic sequence derived from human genome
FMGPRWRRRWFVL

SEQ ID NO: 5630 - protein, 13 aa, Artificial Sequence
  Quasi-synthetic sequence derived from human genome
LVLILKTIRRRLP

SEQ ID NO: 5631 - protein, 13 aa, Artificial Sequence
  Quasi-synthetic sequence derived from human genome
WGWLLRRRRWAAL

SEQ ID NO: 5632 - protein, 13 aa, Artificial Sequence
  Quasi-synthetic sequence derived from human genome
VLKLVRFLPALRR

SEQ ID NO: 5633 - protein, 13 aa, Artificial Sequence
  Quasi-synthetic sequence derived from human genome
KRRLRKVVWVSLR

SEQ ID NO: 5634 - protein, 13 aa, Artificial Sequence
  Quasi-synthetic sequence derived from human genome
RWKRHIVRQLRLR

SEQ ID NO: 5635 - protein, 13 aa, Artificial Sequence
  Quasi-synthetic sequence derived from human genome
LVLMVLYLIKKRL

SEQ ID NO: 5636 - protein, 13 aa, Artificial Sequence
  Quasi-synthetic sequence derived from human genome
MKKTKKIFLFKRV

SEQ ID NO: 5637 - protein, 13 aa, Artificial Sequence
  Quasi-synthetic sequence derived from human genome
RLLWLRGRGRLRY

SEQ ID NO: 5638 - protein, 13 aa, Artificial Sequence
  Quasi-synthetic sequence derived from human genome
LLLGLIIRQKLKR

SEQ ID NO: 5639 - protein, 13 aa, Artificial Sequence
  Quasi-synthetic sequence derived from human genome
LILKRLILNFRKG

SEQ ID NO: 5640 - protein, 13 aa, Artificial Sequence
  Quasi-synthetic sequence derived from human genome
LSLRIRKQILKFL

SEQ ID NO: 5641 - protein, 13 aa, Artificial Sequence
  Quasi-synthetic sequence derived from human genome
IRFSKLLLKILFY

SEQ ID NO: 5642 - protein, 13 aa, Artificial Sequence
  Quasi-synthetic sequence derived from human genome
RRIRKLISFLRSR

SEQ ID NO: 5643 - protein, 13 aa, Artificial Sequence
  Quasi-synthetic sequence derived from human genome
LQKWKRYRPLWKL

SEQ ID NO: 5644 - protein, 13 aa, Artificial Sequence
  Quasi-synthetic sequence derived from human genome
RLHMILKPFMLRR

SEQ ID NO: 5645 - protein, 13 aa, Artificial Sequence
  Quasi-synthetic sequence derived from human genome
RKMLHRHMLIFRL

SEQ ID NO: 5646 - protein, 13 aa, Artificial Sequence
  Quasi-synthetic sequence derived from human genome
KNWPWMRLFFKIK

SEQ ID NO: 5647 - protein, 13 aa, Artificial Sequence
  Quasi-synthetic sequence derived from human genome
ILKRTKRFIFTLI

SEQ ID NO: 5648 - protein, 13 aa, Artificial Sequence
  Quasi-synthetic sequence derived from human genome
KFKFFFRRNPYFR

SEQ ID NO: 5649 - protein, 13 aa, Artificial Sequence
  Quasi-synthetic sequence derived from human genome
RRKLLLFKTFSRK

SEQ ID NO: 5650 - protein, 13 aa, Artificial Sequence
  Quasi-synthetic sequence derived from human genome
LAKRLKPLKVRRI

SEQ ID NO: 5651 - protein, 13 aa, Artificial Sequence
  Quasi-synthetic sequence derived from human genome
RLWVLYKGVLKRL

SEQ ID NO: 5652 - protein, 13 aa, Artificial Sequence
  Quasi-synthetic sequence derived from human genome
MLRKALKLLNRIF

SEQ ID NO: 5653 - protein, 13 aa, Artificial Sequence
  Quasi-synthetic sequence derived from human genome
MGLRKLILRLHKL

SEQ ID NO: 5654 - protein, 13 aa, Artificial Sequence
  Quasi-synthetic sequence derived from human genome
IRRPRLYLLQWLK

SEQ ID NO: 5655 - protein, 13 aa, Artificial Sequence
  Quasi-synthetic sequence derived from human genome
KMHQRLIFRLLKL

SEQ ID NO: 5656 - protein, 13 aa, Artificial Sequence
  Quasi-synthetic sequence derived from human genome
RRLRAYLAFLFVR

SEQ ID NO: 5657 - protein, 13 aa, Artificial Sequence
  Quasi-synthetic sequence derived from human genome
LLIPYLLGRKRRW

SEQ ID NO: 5658 - protein, 13 aa, Artificial Sequence
  Quasi-synthetic sequence derived from human genome
KLIFRFVRTLFKA

SEQ ID NO: 5659 - protein, 13 aa, Artificial Sequence
  Quasi-synthetic sequence derived from human genome
RFAKLLLRLPALR

SEQ ID NO: 5660 - protein, 13 aa, Artificial Sequence
  Quasi-synthetic sequence derived from human genome
WVKRLFLQKLPKL

SEQ ID NO: 5661 - protein, 13 aa, Artificial Sequence
  Quasi-synthetic sequence derived from human genome
FLKKYHKKKKIML

SEQ ID NO: 5662 - protein, 13 aa, Artificial Sequence
  Quasi-synthetic sequence derived from human genome
LKPRMRKIFSRLI

SEQ ID NO: 5663 - protein, 13 aa, Artificial Sequence
  Quasi-synthetic sequence derived from human genome
FKRIFLKRMPSIR

SEQ ID NO: 5664 - protein, 13 aa, Artificial Sequence
  Quasi-synthetic sequence derived from human genome
CWLIAVLYRRRRK

SEQ ID NO: 5665 - protein, 13 aa, Artificial Sequence
  Quasi-synthetic sequence derived from human genome
KMLLFSGRRLWRF

SEQ ID NO: 5666 - protein, 13 aa, Artificial Sequence
  Quasi-synthetic sequence derived from human genome
KLFRMRSLRWQLL

SEQ ID NO: 5667 - protein, 13 aa, Artificial Sequence
  Quasi-synthetic sequence derived from human genome
RSLWMLLKLRQRL

SEQ ID NO: 5668 - protein, 13 aa, Artificial Sequence
  Quasi-synthetic sequence derived from human genome
FLRRLRLWMGLSK

SEQ ID NO: 5669 - protein, 13 aa, Artificial Sequence
  Quasi-synthetic sequence derived from human genome
RHIVRKRTLRRLL

SEQ ID NO: 5670 - protein, 13 aa, Artificial Sequence
  Quasi-synthetic sequence derived from human genome
VKYFKKIMLLHWK

SEQ ID NO: 5671 - protein, 13 aa, Artificial Sequence
  Quasi-synthetic sequence derived from human genome
LHLLHRHRRRLRR

SEQ ID NO: 5672 - protein, 13 aa, Artificial Sequence
  Quasi-synthetic sequence derived from human genome
RRAVLLQRFIKIL

SEQ ID NO: 5673 - protein, 13 aa, Artificial Sequence
  Quasi-synthetic sequence derived from human genome
MKIFQRKMRYWLL

SEQ ID NO: 5674 - protein, 13 aa, Artificial Sequence
  Quasi-synthetic sequence derived from human genome
KIRALRNRLIVLL

SEQ ID NO: 5675 - protein, 13 aa, Artificial Sequence
  Quasi-synthetic sequence derived from human genome
YFLKRGIRLRCIR

SEQ ID NO: 5676 - protein, 13 aa, Artificial Sequence
  Quasi-synthetic sequence derived from human genome
RWISRGRMLKRLF

SEQ ID NO: 5677 - protein, 13 aa, Artificial Sequence
  Quasi-synthetic sequence derived from human genome
LSRRNWKKRWFVL

SEQ ID NO: 5678 - protein, 13 aa, Artificial Sequence
  Quasi-synthetic sequence derived from human genome
WKKRWFVFDRLKR

SEQ ID NO: 5679 - protein, 13 aa, Artificial Sequence
  Quasi-synthetic sequence derived from human genome
WRLFRGKKWNVLR

SEQ ID NO: 5680 - protein, 13 aa, Artificial Sequence
  Quasi-synthetic sequence derived from human genome
IILRKRPLIFIHW

SEQ ID NO: 5681 - protein, 13 aa, Artificial Sequence
  Quasi-synthetic sequence derived from human genome
KIYFRSYKLLLKK

SEQ ID NO: 5682 - protein, 13 aa, Artificial Sequence
  Quasi-synthetic sequence derived from human genome
HFLRVFLFFRPFR

SEQ ID NO: 5683 - protein, 13 aa, Artificial Sequence
  Quasi-synthetic sequence derived from human genome
LLLIGLALWFRKR

SEQ ID NO: 5684 - protein, 13 aa, Artificial Sequence
  Quasi-synthetic sequence derived from human genome
RFLLKRGLRNKRI

SEQ ID NO: 5685 - protein, 13 aa, Artificial Sequence
  Quasi-synthetic sequence derived from human genome
RRGISRLWLRVLL

SEQ ID NO: 5686 - protein, 13 aa, Artificial Sequence
  Quasi-synthetic sequence derived from human genome
IRRVPFAFKWWKM

SEQ ID NO: 5687 - protein, 13 aa, Artificial Sequence
  Quasi-synthetic sequence derived from human genome
RYKFRTWRQLWLW

SEQ ID NO: 5688 - protein, 13 aa, Artificial Sequence
  Quasi-synthetic sequence derived from human genome
RLATRLLKLRYLI

SEQ ID NO: 5689 - protein, 13 aa, Artificial Sequence
  Quasi-synthetic sequence derived from human genome
FKKRLFLLTVHKL

SEQ ID NO: 5690 - protein, 13 aa, Artificial Sequence
  Quasi-synthetic sequence derived from human genome
LIWAKFKRRPWWP

SEQ ID NO: 5691 - protein, 13 aa, Artificial Sequence
  Quasi-synthetic sequence derived from human genome
KKKKFCYLCILLL

SEQ ID NO: 5692 - protein, 13 aa, Artificial Sequence
  Quasi-synthetic sequence derived from human genome
LRLLLRQLCRRPR

SEQ ID NO: 5693 - protein, 13 aa, Artificial Sequence
  Quasi-synthetic sequence derived from human genome
RSPRIRKRFLLRR

SEQ ID NO: 5694 - protein, 13 aa, Artificial Sequence
  Quasi-synthetic sequence derived from human genome
YRMIKKRKGLRLI

SEQ ID NO: 5695 - protein, 13 aa, Artificial Sequence
  Quasi-synthetic sequence derived from human genome
LRRILIRYYIKSI

SEQ ID NO: 5696 - protein, 13 aa, Artificial Sequence
  Quasi-synthetic sequence derived from human genome
RVLRALRILYVMR

SEQ ID NO: 5697 - protein, 13 aa, Artificial Sequence
  Quasi-synthetic sequence derived from human genome
KWLIMRKSLIRHL

SEQ ID NO: 5698 - protein, 13 aa, Artificial Sequence
  Quasi-synthetic sequence derived from human genome
TLIKLWRRKVILH

SEQ ID NO: 5699 - protein, 13 aa, Artificial Sequence
  Quasi-synthetic sequence derived from human genome
RKMKRVLVLLLAV

SEQ ID NO: 5700 - protein, 13 aa, Artificial Sequence
  Quasi-synthetic sequence derived from human genome
FLLFKKLCSFRYR

SEQ ID NO: 5701 - protein, 13 aa, Artificial Sequence
  Quasi-synthetic sequence derived from human genome
WPFRRLPLRPLIK

SEQ ID NO: 5702 - protein, 13 aa, Artificial Sequence
  Quasi-synthetic sequence derived from human genome
SKILLLKKPRVWW

SEQ ID NO: 5703 - protein, 13 aa, Artificial Sequence
  Quasi-synthetic sequence derived from human genome
RRISWRQRIFLRV

SEQ ID NO: 5704 - protein, 13 aa, Artificial Sequence
  Quasi-synthetic sequence derived from human genome
RVKTWKRRWFILT

SEQ ID NO: 5705 - protein, 13 aa, Artificial Sequence
  Quasi-synthetic sequence derived from human genome
RRKWKRYLLIGLA

SEQ ID NO: 5706 - protein, 13 aa, Artificial Sequence
  Quasi-synthetic sequence derived from human genome
KRLVLRTKLHKLI

SEQ ID NO: 5707 - protein, 13 aa, Artificial Sequence
  Quasi-synthetic sequence derived from human genome
ILVLMFVVWMKRR

SEQ ID NO: 5708 - protein, 13 aa, Artificial Sequence
  Quasi-synthetic sequence derived from human genome
RLAAFALLRRKLK

SEQ ID NO: 5709 - protein, 13 aa, Artificial Sequence
  Quasi-synthetic sequence derived from human genome
LKLLKSHRVLKWK

SEQ ID NO: 5710 - protein, 13 aa, Artificial Sequence
  Quasi-synthetic sequence derived from human genome
FYPWRFRLLCLLR

SEQ ID NO: 5711 - protein, 13 aa, Artificial Sequence
  Quasi-synthetic sequence derived from human genome
LTLRFRQILKKII

SEQ ID NO: 5712 - protein, 13 aa, Artificial Sequence
  Quasi-synthetic sequence derived from human genome
MWKFINFQLRRWR

SEQ ID NO: 5713 - protein, 13 aa, Artificial Sequence
  Quasi-synthetic sequence derived from human genome
MKMRRYKLFLMFC

SEQ ID NO: 5714 - protein, 13 aa, Artificial Sequence
  Quasi-synthetic sequence derived from human genome
LLFKLSPRVKRIF

SEQ ID NO: 5715 - protein, 13 aa, Artificial Sequence
  Quasi-synthetic sequence derived from human genome
LLGSKWFIKILKR

SEQ ID NO: 5716 - protein, 13 aa, Artificial Sequence
  Quasi-synthetic sequence derived from human genome
LKRSIKLLSLIKW

SEQ ID NO: 5717 - protein, 13 aa, Artificial Sequence
  Quasi-synthetic sequence derived from human genome
LLKRFLVLNPIKR

SEQ ID NO: 5718 - protein, 13 aa, Artificial Sequence
  Quasi-synthetic sequence derived from human genome
RNLLIWIKKNLLK

SEQ ID NO: 5719 - protein, 13 aa, Artificial Sequence
  Quasi-synthetic sequence derived from human genome
MRTRLVRKRFLCL

SEQ ID NO: 5720 - protein, 13 aa, Artificial Sequence
  Quasi-synthetic sequence derived from human genome
WLLLVIILRTVKR

SEQ ID NO: 5721 - protein, 13 aa, Artificial Sequence
  Quasi-synthetic sequence derived from human genome
LVCLILLVKIKLK

SEQ ID NO: 5722 - protein, 13 aa, Artificial Sequence
  Quasi-synthetic sequence derived from human genome
RSLRFLQILRMLR

SEQ ID NO: 5723 - protein, 13 aa, Artificial Sequence
  Quasi-synthetic sequence derived from human genome
MLLIILVYKAKKR

SEQ ID NO: 5724 - protein, 13 aa, Artificial Sequence
  Quasi-synthetic sequence derived from human genome
RPIKQKRKLRIFI

SEQ ID NO: 5725 - protein, 13 aa, Artificial Sequence
  Quasi-synthetic sequence derived from human genome
LLRKRLQQLRLKK

SEQ ID NO: 5726 - protein, 13 aa, Artificial Sequence
  Quasi-synthetic sequence derived from human genome
LLRKKRRIFIHSV

SEQ ID NO: 5727 - protein, 13 aa, Artificial Sequence
  Quasi-synthetic sequence derived from human genome
PWGVRKLLRWVRR

SEQ ID NO: 5728 - protein, 13 aa, Artificial Sequence
  Quasi-synthetic sequence derived from human genome
WGNRWWRWRRARW

SEQ ID NO: 5729 - protein, 13 aa, Artificial Sequence
  Quasi-synthetic sequence derived from human genome
FWLVRWLLFRLMF

SEQ ID NO: 5730 - protein, 13 aa, Artificial Sequence
  Quasi-synthetic sequence derived from human genome
RIYHKLKHFKFKL

SEQ ID NO: 5731 - protein, 13 aa, Artificial Sequence
  Quasi-synthetic sequence derived from human genome
LLLIFSMWKHRKK

SEQ ID NO: 5732 - protein, 13 aa, Artificial Sequence
  Quasi-synthetic sequence derived from human genome
LKHRLLVYLWRRA

SEQ ID NO: 5733 - protein, 13 aa, Artificial Sequence
  Quasi-synthetic sequence derived from human genome
LRFRRQLLYWFFY

SEQ ID NO: 5734 - protein, 13 aa, Artificial Sequence
  Quasi-synthetic sequence derived from human genome
AFILLRVRRRRKS

SEQ ID NO: 5735 - protein, 13 aa, Artificial Sequence
  Quasi-synthetic sequence derived from human genome
IPLVRKRRFQLRR

SEQ ID NO: 5736 - protein, 13 aa, Artificial Sequence
  Quasi-synthetic sequence derived from human genome
RVLVLRRNRFARL

SEQ ID NO: 5737 - protein, 13 aa, Artificial Sequence
  Quasi-synthetic sequence derived from human genome
IIYLRRFKCLRTL

SEQ ID NO: 5738 - protein, 13 aa, Artificial Sequence
  Quasi-synthetic sequence derived from human genome
LVKNLRLVKRLYF

SEQ ID NO: 5739 - protein, 13 aa, Artificial Sequence
  Quasi-synthetic sequence derived from human genome
KVKRTIVFLLWLL

SEQ ID NO: 5740 - protein, 13 aa, Artificial Sequence
  Quasi-synthetic sequence derived from human genome
RLFMILWLKGVKF

SEQ ID NO: 5741 - protein, 13 aa, Artificial Sequence
  Quasi-synthetic sequence derived from human genome
LKYLLLGRWRKKH

SEQ ID NO: 5742 - protein, 13 aa, Artificial Sequence
  Quasi-synthetic sequence derived from human genome
RRALLLKKWSLYK

SEQ ID NO: 5743 - protein, 13 aa, Artificial Sequence
  Quasi-synthetic sequence derived from human genome
IPRRIFIQLMKRF

SEQ ID NO: 5744 - protein, 13 aa, Artificial Sequence
  Quasi-synthetic sequence derived from human genome
TILIIRRLHKVLR

SEQ ID NO: 5745 - protein, 13 aa, Artificial Sequence
  Quasi-synthetic sequence derived from human genome
RLFGQLLRLKMFR

SEQ ID NO: 5746 - protein, 13 aa, Artificial Sequence
  Quasi-synthetic sequence derived from human genome
FLGFTKVRLLRLR

SEQ ID NO: 5747 - protein, 13 aa, Artificial Sequence
  Quasi-synthetic sequence derived from human genome
MKRQLGRLLLLLR

SEQ ID NO: 5748 - protein, 13 aa, Artificial Sequence
  Quasi-synthetic sequence derived from human genome
LGFLKLIHLLLRR

SEQ ID NO: 5749 - protein, 13 aa, Artificial Sequence
  Quasi-synthetic sequence derived from human genome
LRMAKKRVIVKKL

SEQ ID NO: 5750 - protein, 13 aa, Artificial Sequence
  Quasi-synthetic sequence derived from human genome
VILMLIFLRNRIR

SEQ ID NO: 5751 - protein, 13 aa, Artificial Sequence
  Quasi-synthetic sequence derived from human genome
LIRIVLFLQKVWR

SEQ ID NO: 5752 - protein, 13 aa, Artificial Sequence
  Quasi-synthetic sequence derived from human genome
FRIRRGMWRLCLV

SEQ ID NO: 5753 - protein, 13 aa, Artificial Sequence
  Quasi-synthetic sequence derived from human genome
LRRVVWIFCRTRL

SEQ ID NO: 5754 - protein, 13 aa, Artificial Sequence
  Quasi-synthetic sequence derived from human genome
RKKKLRKLLKRLQ

SEQ ID NO: 5755 - protein, 13 aa, Artificial Sequence
  Quasi-synthetic sequence derived from human genome
WKKRWFILRSGRM

SEQ ID NO: 5756 - protein, 13 aa, Artificial Sequence
  Quasi-synthetic sequence derived from human genome
LGRYRVLIKVFRK

SEQ ID NO: 5757 - protein, 13 aa, Artificial Sequence
  Quasi-synthetic sequence derived from human genome
WRLKISNLKKILK

SEQ ID NO: 5758 - protein, 13 aa, Artificial Sequence
  Quasi-synthetic sequence derived from human genome
LVVKKKRCFLFPR

SEQ ID NO: 5759 - protein, 13 aa, Artificial Sequence
  Quasi-synthetic sequence derived from human genome
IKKKKHLFGLRIR

SEQ ID NO: 5760 - protein, 13 aa, Artificial Sequence
  Quasi-synthetic sequence derived from human genome
KLLRRAWRRRAAL

SEQ ID NO: 5761 - protein, 13 aa, Artificial Sequence
  Quasi-synthetic sequence derived from human genome
LNKLAKILKKRRI

SEQ ID NO: 5762 - protein, 13 aa, Artificial Sequence
  Quasi-synthetic sequence derived from human genome
LKALKKALLLYKK

SEQ ID NO: 5763 - protein, 13 aa, Artificial Sequence
  Quasi-synthetic sequence derived from human genome
MRPRKAFLLLLLL

SEQ ID NO: 5764 - protein, 13 aa, Artificial Sequence
  Quasi-synthetic sequence derived from human genome
LLRVRLGRFISRL

SEQ ID NO: 5765 - protein, 13 aa, Artificial Sequence
  Quasi-synthetic sequence derived from human genome
LRRRNVQFLFIRF

SEQ ID NO: 5766 - protein, 13 aa, Artificial Sequence
  Quasi-synthetic sequence derived from human genome
LAVFVIYKFKRKI

SEQ ID NO: 5767 - protein, 13 aa, Artificial Sequence
  Quasi-synthetic sequence derived from human genome
FRRLIFTRKGVLR

SEQ ID NO: 5768 - protein, 13 aa, Artificial Sequence
  Quasi-synthetic sequence derived from human genome
FRRKEKMFRFFIR

SEQ ID NO: 5769 - protein, 13 aa, Artificial Sequence
  Quasi-synthetic sequence derived from human genome
VIFYLIIRRKPLF

SEQ ID NO: 5770 - protein, 13 aa, Artificial Sequence
  Quasi-synthetic sequence derived from human genome
RLARLRFRRSLLP

SEQ ID NO: 5771 - protein, 13 aa, Artificial Sequence
  Quasi-synthetic sequence derived from human genome
RRLLLALHRRLRG

SEQ ID NO: 5772 - protein, 13 aa, Artificial Sequence
  Quasi-synthetic sequence derived from human genome
LIRIRKLTLKRQR

SEQ ID NO: 5773 - protein, 13 aa, Artificial Sequence
  Quasi-synthetic sequence derived from human genome
RFKRKLPKYLLFT

SEQ ID NO: 5774 - protein, 13 aa, Artificial Sequence
  Quasi-synthetic sequence derived from human genome
FKKRRLRSPRVLF

SEQ ID NO: 5775 - protein, 13 aa, Artificial Sequence
  Quasi-synthetic sequence derived from human genome
RIRCVARKFLYLW

SEQ ID NO: 5776 - protein, 13 aa, Artificial Sequence
  Quasi-synthetic sequence derived from human genome
ITALVRKLILLKR

SEQ ID NO: 5777 - protein, 13 aa, Artificial Sequence
  Quasi-synthetic sequence derived from human genome
LKKRAWAIFLRLC

SEQ ID NO: 5778 - protein, 13 aa, Artificial Sequence
  Quasi-synthetic sequence derived from human genome
VAILWKLGFFKRK

SEQ ID NO: 5779 - protein, 13 aa, Artificial Sequence
  Quasi-synthetic sequence derived from human genome
LAKVLIKNWKRLL

SEQ ID NO: 5780 - protein, 13 aa, Artificial Sequence
  Quasi-synthetic sequence derived from human genome
ILRFLRARKFHHF

SEQ ID NO: 5781 - protein, 13 aa, Artificial Sequence
  Quasi-synthetic sequence derived from human genome
LLFIFVKRQIMRF

SEQ ID NO: 5782 - protein, 13 aa, Artificial Sequence
  Quasi-synthetic sequence derived from human genome
FIRRRINKIQLIK

SEQ ID NO: 5783 - protein, 13 aa, Artificial Sequence
  Quasi-synthetic sequence derived from human genome
RIIRKFIKGFISR

SEQ ID NO: 5784 - protein, 13 aa, Artificial Sequence
  Quasi-synthetic sequence derived from human genome
TPKKLMFRRLKII

SEQ ID NO: 5785 - protein, 13 aa, Artificial Sequence
  Quasi-synthetic sequence derived from human genome
LIYRRLRKPKITW

SEQ ID NO: 5786 - protein, 13 aa, Artificial Sequence
  Quasi-synthetic sequence derived from human genome
LKRKIFPRRRIHK

SEQ ID NO: 5787 - protein, 13 aa, Artificial Sequence
  Quasi-synthetic sequence derived from human genome
RFLWLLKILVIIL

SEQ ID NO: 5788 - protein, 13 aa, Artificial Sequence
  Quasi-synthetic sequence derived from human genome
LKIKYRHCLIKKF

SEQ ID NO: 5789 - protein, 13 aa, Artificial Sequence
  Quasi-synthetic sequence derived from human genome
KKRVVRMLLVIVV

SEQ ID NO: 5790 - protein, 13 aa, Artificial Sequence
  Quasi-synthetic sequence derived from human genome
LTLVFWKLIRSRR

SEQ ID NO: 5791 - protein, 13 aa, Artificial Sequence
  Quasi-synthetic sequence derived from human genome
RMLRFFVRHLLQR

SEQ ID NO: 5792 - protein, 13 aa, Artificial Sequence
  Quasi-synthetic sequence derived from human genome
IRGKTRLFWLLRV

SEQ ID NO: 5793 - protein, 13 aa, Artificial Sequence
  Quasi-synthetic sequence derived from human genome
LRALLLWGRRLRP

SEQ ID NO: 5794 - protein, 13 aa, Artificial Sequence
  Quasi-synthetic sequence derived from human genome
LVILFKCGFFKRK

SEQ ID NO: 5795 - protein, 13 aa, Artificial Sequence
  Quasi-synthetic sequence derived from human genome
FLPPWLFSRRRRL

SEQ ID NO: 5796 - protein, 13 aa, Artificial Sequence
  Quasi-synthetic sequence derived from human genome
RIPKKRWRLYPFK

SEQ ID NO: 5797 - protein, 13 aa, Artificial Sequence
  Quasi-synthetic sequence derived from human genome
FVRKVKMLKKPKF

SEQ ID NO: 5798 - protein, 13 aa, Artificial Sequence
  Quasi-synthetic sequence derived from human genome
LVRRIRGLLRISR

SEQ ID NO: 5799 - protein, 13 aa, Artificial Sequence
  Quasi-synthetic sequence derived from human genome
RRRLPTVLLKLRM

SEQ ID NO: 5800 - protein, 13 aa, Artificial Sequence
  Quasi-synthetic sequence derived from human genome
LKARKIPIIIRRY

SEQ ID NO: 5801 - protein, 13 aa, Artificial Sequence
  Quasi-synthetic sequence derived from human genome
TKIFRTLWRVKRL

SEQ ID NO: 5802 - protein, 13 aa, Artificial Sequence
  Quasi-synthetic sequence derived from human genome
RKIMRFLRRCRHR

SEQ ID NO: 5803 - protein, 13 aa, Artificial Sequence
  Quasi-synthetic sequence derived from human genome
FKCKKRVKLFCML

SEQ ID NO: 5804 - protein, 13 aa, Artificial Sequence
  Quasi-synthetic sequence derived from human genome
RLLFYKYVYKRYR

SEQ ID NO: 5805 - protein, 13 aa, Artificial Sequence
  Quasi-synthetic sequence derived from human genome
FILKRRRCIALVV

SEQ ID NO: 5806 - protein, 13 aa, Artificial Sequence
  Quasi-synthetic sequence derived from human genome
LRNRIRVAIILLK

SEQ ID NO: 5807 - protein, 13 aa, Artificial Sequence
  Quasi-synthetic sequence derived from human genome
MWFPRRYLPKIFR

SEQ ID NO: 5808 - protein, 13 aa, Artificial Sequence
  Quasi-synthetic sequence derived from human genome
RKQLVLRRGLLLL

SEQ ID NO: 5809 - protein, 13 aa, Artificial Sequence
  Quasi-synthetic sequence derived from human genome
VRFNRLLKFSRLF

SEQ ID NO: 5810 - protein, 13 aa, Artificial Sequence
  Quasi-synthetic sequence derived from human genome
LRQLSVLFRKLRL

SEQ ID NO: 5811 - protein, 13 aa, Artificial Sequence
  Quasi-synthetic sequence derived from human genome
RKLSVLLLLLGRR

SEQ ID NO: 5812 - protein, 13 aa, Artificial Sequence
  Quasi-synthetic sequence derived from human genome
KKFKLKLLSVPLR

SEQ ID NO: 5813 - protein, 13 aa, Artificial Sequence
  Quasi-synthetic sequence derived from human genome
KRKNWKVRRFVLR

SEQ ID NO: 5814 - protein, 13 aa, Artificial Sequence
  Quasi-synthetic sequence derived from human genome
IIIKFLLGYKWFK

SEQ ID NO: 5815 - protein, 13 aa, Artificial Sequence
  Quasi-synthetic sequence derived from human genome
MLFKKKKTRKLKI

SEQ ID NO: 5816 - protein, 13 aa, Artificial Sequence
  Quasi-synthetic sequence derived from human genome
YLVKVLKRRTWRR

SEQ ID NO: 5817 - protein, 13 aa, Artificial Sequence
  Quasi-synthetic sequence derived from human genome
RKLQRYAWRKRWF

SEQ ID NO: 5818 - protein, 13 aa, Artificial Sequence
  Quasi-synthetic sequence derived from human genome
LRLKIKFPKLGKK

SEQ ID NO: 5819 - protein, 13 aa, Artificial Sequence
  Quasi-synthetic sequence derived from human genome
WRRMPRWGLLLLL

SEQ ID NO: 5820 - protein, 13 aa, Artificial Sequence
  Quasi-synthetic sequence derived from human genome
KALVLKRIQIWKR

SEQ ID NO: 5821 - protein, 13 aa, Artificial Sequence
  Quasi-synthetic sequence derived from human genome
RKKLVRALFIVPR

SEQ ID NO: 5822 - protein, 13 aa, Artificial Sequence
  Quasi-synthetic sequence derived from human genome
FVFKLLLHRPFFR

SEQ ID NO: 5823 - protein, 13 aa, Artificial Sequence
  Quasi-synthetic sequence derived from human genome
WFRRALKYILLGK

SEQ ID NO: 5824 - protein, 13 aa, Artificial Sequence
  Quasi-synthetic sequence derived from human genome
FLLKIKRTRKGFR

SEQ ID NO: 5825 - protein, 13 aa, Artificial Sequence
  Quasi-synthetic sequence derived from human genome
RFRKYLRQLFHRR

SEQ ID NO: 5826 - protein, 13 aa, Artificial Sequence
  Quasi-synthetic sequence derived from human genome
KRKWKPKFWRKPI

SEQ ID NO: 5827 - protein, 13 aa, Artificial Sequence
  Quasi-synthetic sequence derived from human genome
RIIKKFQFIKSLR

SEQ ID NO: 5828 - protein, 13 aa, Artificial Sequence
  Quasi-synthetic sequence derived from human genome
FRKTLLLWQVRLK

SEQ ID NO: 5829 - protein, 13 aa, Artificial Sequence
  Quasi-synthetic sequence derived from human genome
LWTFLLQRRFVKK

SEQ ID NO: 5830 - protein, 13 aa, Artificial Sequence
  Quasi-synthetic sequence derived from human genome
RWLNKLMKLLQRL

SEQ ID NO: 5831 - protein, 13 aa, Artificial Sequence
  Quasi-synthetic sequence derived from human genome
KLLKFQLLQIKFK

SEQ ID NO: 5832 - protein, 13 aa, Artificial Sequence
  Quasi-synthetic sequence derived from human genome
RRRRSLRRLFSRF

SEQ ID NO: 5833 - protein, 13 aa, Artificial Sequence
  Quasi-synthetic sequence derived from human genome
IFCKKCILRWLAR

SEQ ID NO: 5834 - protein, 13 aa, Artificial Sequence
  Quasi-synthetic sequence derived from human genome
RVRRFDLLKRILK

SEQ ID NO: 5835 - protein, 13 aa, Artificial Sequence
  Quasi-synthetic sequence derived from human genome
RRLLLRYLFPALL

SEQ ID NO: 5836 - protein, 13 aa, Artificial Sequence
  Quasi-synthetic sequence derived from human genome
RFYFLFHRPLRLL

SEQ ID NO: 5837 - protein, 13 aa, Artificial Sequence
  Quasi-synthetic sequence derived from human genome
RRKLLWAIHHWKK

SEQ ID NO: 5838 - protein, 13 aa, Artificial Sequence
  Quasi-synthetic sequence derived from human genome
RSLRFLQILRMIR

SEQ ID NO: 5839 - protein, 13 aa, Artificial Sequence
  Quasi-synthetic sequence derived from human genome
KFFHTRFLMRMRL

SEQ ID NO: 5840 - protein, 13 aa, Artificial Sequence
  Quasi-synthetic sequence derived from human genome
WLPGRCLIRRLRL

SEQ ID NO: 5841 - protein, 13 aa, Artificial Sequence
  Quasi-synthetic sequence derived from human genome
KIRIILLYIFLKN

SEQ ID NO: 5842 - protein, 13 aa, Artificial Sequence
  Quasi-synthetic sequence derived from human genome
LFIWLKMRISKLV

SEQ ID NO: 5843 - protein, 13 aa, Artificial Sequence
  Quasi-synthetic sequence derived from human genome
YVSWRRKKLYLLF

SEQ ID NO: 5844 - protein, 13 aa, Artificial Sequence
  Quasi-synthetic sequence derived from human genome
YVLRRILRRAVRY

SEQ ID NO: 5845 - protein, 13 aa, Artificial Sequence
  Quasi-synthetic sequence derived from human genome
LSRFKKLKYLWLH

SEQ ID NO: 5846 - protein, 13 aa, Artificial Sequence
  Quasi-synthetic sequence derived from human genome
FGLIARRKKIMKL

SEQ ID NO: 5847 - protein, 13 aa, Artificial Sequence
  Quasi-synthetic sequence derived from human genome
RRRLVKRLYIPLP

SEQ ID NO: 5848 - protein, 13 aa, Artificial Sequence
  Quasi-synthetic sequence derived from human genome
LRRRFLHLKKAAI

SEQ ID NO: 5849 - protein, 13 aa, Artificial Sequence
  Quasi-synthetic sequence derived from human genome
AALALILLRKRRK

SEQ ID NO: 5850 - protein, 13 aa, Artificial Sequence
  Quasi-synthetic sequence derived from human genome
LLLLASLIKIRRL

SEQ ID NO: 5851 - protein, 13 aa, Artificial Sequence
  Quasi-synthetic sequence derived from human genome
MKYFKKMMLLHWR

SEQ ID NO: 5852 - protein, 13 aa, Artificial Sequence
  Quasi-synthetic sequence derived from human genome
VAFMFRKFKILRP

SEQ ID NO: 5853 - protein, 13 aa, Artificial Sequence
  Quasi-synthetic sequence derived from human genome
LRRSYWRHLRRLV

SEQ ID NO: 5854 - protein, 13 aa, Artificial Sequence
  Quasi-synthetic sequence derived from human genome
LRRHRLTRKLVVL

SEQ ID NO: 5855 - protein, 13 aa, Artificial Sequence
  Quasi-synthetic sequence derived from human genome
RLRLPNLKMVRLR

SEQ ID NO: 5856 - protein, 13 aa, Artificial Sequence
  Quasi-synthetic sequence derived from human genome
RLLVLGRKHMLRR

SEQ ID NO: 5857 - protein, 13 aa, Artificial Sequence
  Quasi-synthetic sequence derived from human genome
RPGLRLLWRRRVY

SEQ ID NO: 5858 - protein, 13 aa, Artificial Sequence
  Quasi-synthetic sequence derived from human genome
LALRLRRWHKSRL

SEQ ID NO: 5859 - protein, 13 aa, Artificial Sequence
  Quasi-synthetic sequence derived from human genome
RRRLPFSKWRLAF

SEQ ID NO: 5860 - protein, 13 aa, Artificial Sequence
  Quasi-synthetic sequence derived from human genome
WRRRLKSLALRLA

SEQ ID NO: 5861 - protein, 13 aa, Artificial Sequence
  Quasi-synthetic sequence derived from human genome
RAKFWPRRRFNFF

SEQ ID NO: 5862 - protein, 13 aa, Artificial Sequence
  Quasi-synthetic sequence derived from human genome
LRRAWKRLQLRLH

SEQ ID NO: 5863 - protein, 13 aa, Artificial Sequence
  Quasi-synthetic sequence derived from human genome
KKKSLIQKLILLR

SEQ ID NO: 5864 - protein, 13 aa, Artificial Sequence
  Quasi-synthetic sequence derived from human genome
FFKKKLTSLRLKR

SEQ ID NO: 5865 - protein, 13 aa, Artificial Sequence
  Quasi-synthetic sequence derived from human genome
LRVFNFLWRAKRM

SEQ ID NO: 5866 - protein, 13 aa, Artificial Sequence
  Quasi-synthetic sequence derived from human genome
LLIRKYIPRRSFF

SEQ ID NO: 5867 - protein, 13 aa, Artificial Sequence
  Quasi-synthetic sequence derived from human genome
LRKFFLRIGVVYK

SEQ ID NO: 5868 - protein, 13 aa, Artificial Sequence
  Quasi-synthetic sequence derived from human genome
LALRLWRWHKSRL

SEQ ID NO: 5869 - protein, 13 aa, Artificial Sequence
  Quasi-synthetic sequence derived from human genome
LLKKLLVLNPIKR

SEQ ID NO: 5870 - protein, 13 aa, Artificial Sequence
  Quasi-synthetic sequence derived from human genome
LKFKHIFFRSFVK

SEQ ID NO: 5871 - protein, 13 aa, Artificial Sequence
  Quasi-synthetic sequence derived from human genome
RRIFAFICRKHRI

SEQ ID NO: 5872 - protein, 13 aa, Artificial Sequence
  Quasi-synthetic sequence derived from human genome
RLGIHLIRRKIVK

SEQ ID NO: 5873 - protein, 13 aa, Artificial Sequence
  Quasi-synthetic sequence derived from human genome
FFFWLKLKINKVM

SEQ ID NO: 5874 - protein, 13 aa, Artificial Sequence
  Quasi-synthetic sequence derived from human genome
RQFLRKKVLLRGF

SEQ ID NO: 5875 - protein, 13 aa, Artificial Sequence
  Quasi-synthetic sequence derived from human genome
LLLRVFRSGKRLK

SEQ ID NO: 5876 - protein, 13 aa, Artificial Sequence
  Quasi-synthetic sequence derived from human genome
LKMKLKRRRVSLV

SEQ ID NO: 5877 - protein, 13 aa, Artificial Sequence
  Quasi-synthetic sequence derived from human genome
WRRAWPTRRRRLL

SEQ ID NO: 5878 - protein, 13 aa, Artificial Sequence
  Quasi-synthetic sequence derived from human genome
RFGRRFVLRWCYL

SEQ ID NO: 5879 - protein, 13 aa, Artificial Sequence
  Quasi-synthetic sequence derived from human genome
CRLRTLWLKICRL

SEQ ID NO: 5880 - protein, 13 aa, Artificial Sequence
  Quasi-synthetic sequence derived from human genome
KLRRSFRTLIVLL

SEQ ID NO: 5881 - protein, 13 aa, Artificial Sequence
  Quasi-synthetic sequence derived from human genome
FMIRKFRRSLLQL

SEQ ID NO: 5882 - protein, 13 aa, Artificial Sequence
  Quasi-synthetic sequence derived from human genome
RNLLRLITVRKLF

SEQ ID NO: 5883 - protein, 13 aa, Artificial Sequence
  Quasi-synthetic sequence derived from human genome
IIVRALKKGRFWI

SEQ ID NO: 5884 - protein, 13 aa, Artificial Sequence
  Quasi-synthetic sequence derived from human genome
RPRVWRWLVHLRV

SEQ ID NO: 5885 - protein, 13 aa, Artificial Sequence
  Quasi-synthetic sequence derived from human genome
KWFWKLVPARYRK

SEQ ID NO: 5886 - protein, 13 aa, Artificial Sequence
  Quasi-synthetic sequence derived from human genome
RLSRLLLRLPALR

SEQ ID NO: 5887 - protein, 13 aa, Artificial Sequence
  Quasi-synthetic sequence derived from human genome
RFRFRAFHFLNRF

SEQ ID NO: 5888 - protein, 13 aa, Artificial Sequence
  Quasi-synthetic sequence derived from human genome
KWLSRGLVLKRFF

SEQ ID NO: 5889 - protein, 13 aa, Artificial Sequence
  Quasi-synthetic sequence derived from human genome
LLLRSALRRLALR

SEQ ID NO: 5890 - protein, 13 aa, Artificial Sequence
  Quasi-synthetic sequence derived from human genome
RFGRLLLRLPALR

SEQ ID NO: 5891 - protein, 13 aa, Artificial Sequence
  Quasi-synthetic sequence derived from human genome
LHRRLLNRRLLLA

SEQ ID NO: 5892 - protein, 13 aa, Artificial Sequence
  Quasi-synthetic sequence derived from human genome
RRLPRALLLQLRL

SEQ ID NO: 5893 - protein, 13 aa, Artificial Sequence
  Quasi-synthetic sequence derived from human genome
LRLNRFLRAPRLF

SEQ ID NO: 5894 - protein, 13 aa, Artificial Sequence
  Quasi-synthetic sequence derived from human genome
RGRLPRRLLLLLA

SEQ ID NO: 5895 - protein, 13 aa, Artificial Sequence
  Quasi-synthetic sequence derived from human genome
TIIVIFLNRRRRR

SEQ ID NO: 5896 - protein, 13 aa, Artificial Sequence
  Quasi-synthetic sequence derived from human genome
RLRNIRRAVVRLL

SEQ ID NO: 5897 - protein, 13 aa, Artificial Sequence
  Quasi-synthetic sequence derived from human genome
RAVLRLRRRVCVL

SEQ ID NO: 5898 - protein, 13 aa, Artificial Sequence
  Quasi-synthetic sequence derived from human genome
RIVLKRRLNWIQW

SEQ ID NO: 5899 - protein, 13 aa, Artificial Sequence
  Quasi-synthetic sequence derived from human genome
HKLRLKLRKKLKA

SEQ ID NO: 5900 - protein, 13 aa, Artificial Sequence
  Quasi-synthetic sequence derived from human genome
IKYLRKSLKIIYL

SEQ ID NO: 5901 - protein, 13 aa, Artificial Sequence
  Quasi-synthetic sequence derived from human genome
KVLRLYKRALRHL

SEQ ID NO: 5902 - protein, 13 aa, Artificial Sequence
  Quasi-synthetic sequence derived from human genome
MALKKIFGRKLFK

SEQ ID NO: 5903 - protein, 13 aa, Artificial Sequence
  Quasi-synthetic sequence derived from human genome
RLFKLKPPVWYLR

SEQ ID NO: 5904 - protein, 13 aa, Artificial Sequence
  Quasi-synthetic sequence derived from human genome
HLKKLVPRMLKFL

SEQ ID NO: 5905 - protein, 13 aa, Artificial Sequence
  Quasi-synthetic sequence derived from human genome
LKVLLALKLHKMR

SEQ ID NO: 5906 - protein, 13 aa, Artificial Sequence
  Quasi-synthetic sequence derived from human genome
KMLVLRFLAKLHK

SEQ ID NO: 5907 - protein, 13 aa, Artificial Sequence
  Quasi-synthetic sequence derived from human genome
LFCFWKFARKAKK

SEQ ID NO: 5908 - protein, 13 aa, Artificial Sequence
  Quasi-synthetic sequence derived from human genome
RKLILFLVFPVVR

SEQ ID NO: 5909 - protein, 13 aa, Artificial Sequence
  Quasi-synthetic sequence derived from human genome
FIVLFNIWRKVKF

SEQ ID NO: 5910 - protein, 13 aa, Artificial Sequence
  Quasi-synthetic sequence derived from human genome
KLLPRWPLAKLKL

SEQ ID NO: 5911 - protein, 13 aa, Artificial Sequence
  Quasi-synthetic sequence derived from human genome
ILHKKRYIYRKIK

SEQ ID NO: 5912 - protein, 13 aa, Artificial Sequence
  Quasi-synthetic sequence derived from human genome
SRWLFLFLFQKLR

SEQ ID NO: 5913 - protein, 13 aa, Artificial Sequence
  Quasi-synthetic sequence derived from human genome
LFFFLRLHRLLLL

SEQ ID NO: 5914 - protein, 13 aa, Artificial Sequence
  Quasi-synthetic sequence derived from human genome
LRLLRPLLLLLLL

SEQ ID NO: 5915 - protein, 13 aa, Artificial Sequence
  Quasi-synthetic sequence derived from human genome
LLFLLLFLLLRHR

SEQ ID NO: 5916 - protein, 13 aa, Artificial Sequence
  Quasi-synthetic sequence derived from human genome
LMAKKRVIRMLIV

SEQ ID NO: 5917 - protein, 13 aa, Artificial Sequence
  Quasi-synthetic sequence derived from human genome
QVRILRLLRILGR

SEQ ID NO: 5918 - protein, 13 aa, Artificial Sequence
  Quasi-synthetic sequence derived from human genome
IMKIMVYKIFRIL

SEQ ID NO: 5919 - protein, 13 aa, Artificial Sequence
  Quasi-synthetic sequence derived from human genome
KTINRFLMRKRLL

SEQ ID NO: 5920 - protein, 13 aa, Artificial Sequence
  Quasi-synthetic sequence derived from human genome
VKIKLHKIIYRLV

SEQ ID NO: 5921 - protein, 13 aa, Artificial Sequence
  Quasi-synthetic sequence derived from human genome
LWRCLKFVMRKLT

SEQ ID NO: 5922 - protein, 13 aa, Artificial Sequence
  Quasi-synthetic sequence derived from human genome
RRFLRTLRLKLAA

SEQ ID NO: 5923 - protein, 13 aa, Artificial Sequence
  Quasi-synthetic sequence derived from human genome
FGMKNFKKRWFRL

SEQ ID NO: 5924 - protein, 13 aa, Artificial Sequence
  Quasi-synthetic sequence derived from human genome
LIFCILLYFYKRK

SEQ ID NO: 5925 - protein, 13 aa, Artificial Sequence
  Quasi-synthetic sequence derived from human genome
KLLKKVALFSKLL

SEQ ID NO: 5926 - protein, 13 aa, Artificial Sequence
  Quasi-synthetic sequence derived from human genome
FLRQAIKIRRRRV

SEQ ID NO: 5927 - protein, 13 aa, Artificial Sequence
  Quasi-synthetic sequence derived from human genome
IFLVIITKRRLHK

SEQ ID NO: 5928 - protein, 13 aa, Artificial Sequence
  Quasi-synthetic sequence derived from human genome
FISLKRIRKHMIL

SEQ ID NO: 5929 - protein, 13 aa, Artificial Sequence
  Quasi-synthetic sequence derived from human genome
RRRMKCCRAWWIL

SEQ ID NO: 5930 - protein, 13 aa, Artificial Sequence
  Quasi-synthetic sequence derived from human genome
WIVARLRMRNFKR

SEQ ID NO: 5931 - protein, 13 aa, Artificial Sequence
  Quasi-synthetic sequence derived from human genome
RRRRRRRPLWRVY

SEQ ID NO: 5932 - protein, 13 aa, Artificial Sequence
  Quasi-synthetic sequence derived from human genome
MKWKKFAKHMFFL

SEQ ID NO: 5933 - protein, 13 aa, Artificial Sequence
  Quasi-synthetic sequence derived from human genome
RRLRGWWPVVKLK

SEQ ID NO: 5934 - protein, 13 aa, Artificial Sequence
  Quasi-synthetic sequence derived from human genome
LVALKIIRNKKRF

SEQ ID NO: 5935 - protein, 13 aa, Artificial Sequence
  Quasi-synthetic sequence derived from human genome
LRIKGKRRRKKLI

SEQ ID NO: 5936 - protein, 13 aa, Artificial Sequence
  Quasi-synthetic sequence derived from human genome
LVKLKYKYKARIF

SEQ ID NO: 5937 - protein, 13 aa, Artificial Sequence
  Quasi-synthetic sequence derived from human genome
RIIRRGFIMLTRL

SEQ ID NO: 5938 - protein, 13 aa, Artificial Sequence
  Quasi-synthetic sequence derived from human genome
RRWRGYRVRKYLF

SEQ ID NO: 5939 - protein, 13 aa, Artificial Sequence
  Quasi-synthetic sequence derived from human genome
RRAIRVFFMLRSL

SEQ ID NO: 5940 - protein, 13 aa, Artificial Sequence
  Quasi-synthetic sequence derived from human genome
KFLRRTQFLLFFL

SEQ ID NO: 5941 - protein, 13 aa, Artificial Sequence
  Quasi-synthetic sequence derived from human genome
LCLIFKVKKRSIL

SEQ ID NO: 5942 - protein, 13 aa, Artificial Sequence
  Quasi-synthetic sequence derived from human genome
RVLCLLRPWRPLR

SEQ ID NO: 5943 - protein, 13 aa, Artificial Sequence
  Quasi-synthetic sequence derived from human genome
KLWRRNLWIFVSK

SEQ ID NO: 5944 - protein, 13 aa, Artificial Sequence
  Quasi-synthetic sequence derived from human genome
ALVRGWLVRKRFL

SEQ ID NO: 5945 - protein, 13 aa, Artificial Sequence
  Quasi-synthetic sequence derived from human genome
RCVRLLRIFKVTR

SEQ ID NO: 5946 - protein, 13 aa, Artificial Sequence
  Quasi-synthetic sequence derived from human genome
RRLAGLLRRALIR

SEQ ID NO: 5947 - protein, 13 aa, Artificial Sequence
  Quasi-synthetic sequence derived from human genome
LFKRRVVRRLASL

SEQ ID NO: 5948 - protein, 13 aa, Artificial Sequence
  Quasi-synthetic sequence derived from human genome
RKIFLLVQSRKWR

SEQ ID NO: 5949 - protein, 13 aa, Artificial Sequence
  Quasi-synthetic sequence derived from human genome
ILRLPNRRALRLR

SEQ ID NO: 5950 - protein, 13 aa, Artificial Sequence
  Quasi-synthetic sequence derived from human genome
FRNLRLPKRLRVV

SEQ ID NO: 5951 - protein, 13 aa, Artificial Sequence
  Quasi-synthetic sequence derived from human genome
VRLLRLGRVARKL

SEQ ID NO: 5952 - protein, 13 aa, Artificial Sequence
  Quasi-synthetic sequence derived from human genome
LWLRIRSLTLRLI

SEQ ID NO: 5953 - protein, 13 aa, Artificial Sequence
  Quasi-synthetic sequence derived from human genome
GILLWFLCFRMRR

SEQ ID NO: 5954 - protein, 13 aa, Artificial Sequence
  Quasi-synthetic sequence derived from human genome
RWRVPGRLLLLLL

SEQ ID NO: 5955 - protein, 13 aa, Artificial Sequence
  Quasi-synthetic sequence derived from human genome
RRLLRARKKGRIL

SEQ ID NO: 5956 - protein, 13 aa, Artificial Sequence
  Quasi-synthetic sequence derived from human genome
VSLSFFRKLRLIR

SEQ ID NO: 5957 - protein, 13 aa, Artificial Sequence
  Quasi-synthetic sequence derived from human genome
RRRLLLLLCAVCR

SEQ ID NO: 5958 - protein, 13 aa, Artificial Sequence
  Quasi-synthetic sequence derived from human genome
HFWLPVLKMIRKK

SEQ ID NO: 5959 - protein, 13 aa, Artificial Sequence
  Quasi-synthetic sequence derived from human genome
KILKVIRKNLVKK

SEQ ID NO: 5960 - protein, 13 aa, Artificial Sequence
  Quasi-synthetic sequence derived from human genome
IKKALIIKLRRGK

SEQ ID NO: 5961 - protein, 13 aa, Artificial Sequence
  Quasi-synthetic sequence derived from human genome
LNQLKFRKKKLRF

SEQ ID NO: 5962 - protein, 13 aa, Artificial Sequence
  Quasi-synthetic sequence derived from human genome
IWRFAWRKSIKKY

SEQ ID NO: 5963 - protein, 13 aa, Artificial Sequence
  Quasi-synthetic sequence derived from human genome
IPRLKRKKPFHWL

SEQ ID NO: 5964 - protein, 13 aa, Artificial Sequence
  Quasi-synthetic sequence derived from human genome
LKRLFVVKAPKLF

SEQ ID NO: 5965 - protein, 13 aa, Artificial Sequence
  Quasi-synthetic sequence derived from human genome
VRRRKWIRYRRYK

SEQ ID NO: 5966 - protein, 13 aa, Artificial Sequence
  Quasi-synthetic sequence derived from human genome
FTRRLVPFLWLKW

SEQ ID NO: 5967 - protein, 13 aa, Artificial Sequence
  Quasi-synthetic sequence derived from human genome
LIRSRLRKVPRFK

SEQ ID NO: 5968 - protein, 13 aa, Artificial Sequence
  Quasi-synthetic sequence derived from human genome
ILQLVRRYKKLKV

SEQ ID NO: 5969 - protein, 13 aa, Artificial Sequence
  Quasi-synthetic sequence derived from human genome
RKKVLSWPFLMRR

SEQ ID NO: 5970 - protein, 13 aa, Artificial Sequence
  Quasi-synthetic sequence derived from human genome
RLRRKFPLPRTIW

SEQ ID NO: 5971 - protein, 13 aa, Artificial Sequence
  Quasi-synthetic sequence derived from human genome
TLKMIFYKMKRKL

SEQ ID NO: 5972 - protein, 13 aa, Artificial Sequence
  Quasi-synthetic sequence derived from human genome
IGVPKLKKLFRKL

SEQ ID NO: 5973 - protein, 13 aa, Artificial Sequence
  Quasi-synthetic sequence derived from human genome
HLKRQPKRRWLFW

SEQ ID NO: 5974 - protein, 13 aa, Artificial Sequence
  Quasi-synthetic sequence derived from human genome
FMGRLPLLRRVLK

SEQ ID NO: 5975 - protein, 13 aa, Artificial Sequence
  Quasi-synthetic sequence derived from human genome
RRLLRPLQMLLVK

SEQ ID NO: 5976 - protein, 13 aa, Artificial Sequence
  Quasi-synthetic sequence derived from human genome
FLFSRMLLVAKRR

SEQ ID NO: 5977 - protein, 13 aa, Artificial Sequence
  Quasi-synthetic sequence derived from human genome
CVLWKKRIKPIVW

SEQ ID NO: 5978 - protein, 13 aa, Artificial Sequence
  Quasi-synthetic sequence derived from human genome
RLKAFLLQALRWR

SEQ ID NO: 5979 - protein, 13 aa, Artificial Sequence
  Quasi-synthetic sequence derived from human genome
WGLRKVLNWLKFK

SEQ ID NO: 5980 - protein, 13 aa, Artificial Sequence
  Quasi-synthetic sequence derived from human genome
RYIRLRLQRIRTL

SEQ ID NO: 5981 - protein, 13 aa, Artificial Sequence
  Quasi-synthetic sequence derived from human genome
RYIRLRFQRIRTL

SEQ ID NO: 5982 - protein, 13 aa, Artificial Sequence
  Quasi-synthetic sequence derived from human genome
RLKRTLIRKVFNL

SEQ ID NO: 5983 - protein, 13 aa, Artificial Sequence
  Quasi-synthetic sequence derived from human genome
KGFFRRTIRLKLV

SEQ ID NO: 5984 - protein, 13 aa, Artificial Sequence
  Quasi-synthetic sequence derived from human genome
KQLLLRNFIRMKR

SEQ ID NO: 5985 - protein, 13 aa, Artificial Sequence
  Quasi-synthetic sequence derived from human genome
MRRKLFGVLRLKC

SEQ ID NO: 5986 - protein, 13 aa, Artificial Sequence
  Quasi-synthetic sequence derived from human genome
LSVRRFFWWARFI

SEQ ID NO: 5987 - protein, 13 aa, Artificial Sequence
  Quasi-synthetic sequence derived from human genome
INRALKLIIRLFL

SEQ ID NO: 5988 - protein, 13 aa, Artificial Sequence
  Quasi-synthetic sequence derived from human genome
WSFRRLKKLCRPL

SEQ ID NO: 5989 - protein, 13 aa, Artificial Sequence
  Quasi-synthetic sequence derived from human genome
RRRLLAGFCKLLL

SEQ ID NO: 5990 - protein, 13 aa, Artificial Sequence
  Quasi-synthetic sequence derived from human genome
KKKIYPTIWWLFR

SEQ ID NO: 5991 - protein, 13 aa, Artificial Sequence
  Quasi-synthetic sequence derived from human genome
NILRILFWFGRRF

SEQ ID NO: 5992 - protein, 13 aa, Artificial Sequence
  Quasi-synthetic sequence derived from human genome
RRRIRSINKLIRI

SEQ ID NO: 5993 - protein, 13 aa, Artificial Sequence
  Quasi-synthetic sequence derived from human genome
WRLRKNFFYFYIL

SEQ ID NO: 5994 - protein, 13 aa, Artificial Sequence
  Quasi-synthetic sequence derived from human genome
RAVLRRFFLRIGV

SEQ ID NO: 5995 - protein, 13 aa, Artificial Sequence
  Quasi-synthetic sequence derived from human genome
FIIFWVRSKRSRL

SEQ ID NO: 5996 - protein, 13 aa, Artificial Sequence
  Quasi-synthetic sequence derived from human genome
KIKKKYLRTWFVV

SEQ ID NO: 5997 - protein, 13 aa, Artificial Sequence
  Quasi-synthetic sequence derived from human genome
RRVYRRKRSKFLL

SEQ ID NO: 5998 - protein, 13 aa, Artificial Sequence
  Quasi-synthetic sequence derived from human genome
KLVHFLLLKYRAR

SEQ ID NO: 5999 - protein, 13 aa, Artificial Sequence
  Quasi-synthetic sequence derived from human genome
LIPFLLSLKKKMK

SEQ ID NO: 6000 - protein, 13 aa, Artificial Sequence
  Quasi-synthetic sequence derived from human genome
LAPYRLKLRVKFF

SEQ ID NO: 6001 - protein, 14 aa, Artificial Sequence
  Quasi-synthetic sequence derived from human genome
LLFMKLRWFLKRWR

SEQ ID NO: 6002 - protein, 14 aa, Artificial Sequence
  Quasi-synthetic sequence derived from human genome
RLFAWRKRWFILRR

SEQ ID NO: 6003 - protein, 14 aa, Artificial Sequence
  Quasi-synthetic sequence derived from human genome
RFFRFLLRKLYVFR

SEQ ID NO: 6004 - protein, 14 aa, Artificial Sequence
  Quasi-synthetic sequence derived from human genome
LRIIRLVRVFRIFK

SEQ ID NO: 6005 - protein, 14 aa, Artificial Sequence
  Quasi-synthetic sequence derived from human genome
FKIARKLLFLFRIK

SEQ ID NO: 6006 - protein, 14 aa, Artificial Sequence
  Quasi-synthetic sequence derived from human genome
VKLLRRRFRLLLAL

SEQ ID NO: 6007 - protein, 14 aa, Artificial Sequence
  Quasi-synthetic sequence derived from human genome
RRLLILILKIGRRW

SEQ ID NO: 6008 - protein, 14 aa, Artificial Sequence
  Quasi-synthetic sequence derived from human genome
KKIMFFLLIIRKLL

SEQ ID NO: 6009 - protein, 14 aa, Artificial Sequence
  Quasi-synthetic sequence derived from human genome
LRVMRLMRIFRILK

SEQ ID NO: 6010 - protein, 14 aa, Artificial Sequence
  Quasi-synthetic sequence derived from human genome
FFRLFRVMRLIKLL

SEQ ID NO: 6011 - protein, 14 aa, Artificial Sequence
  Quasi-synthetic sequence derived from human genome
RAVFRLRKWIIFRL

SEQ ID NO: 6012 - protein, 14 aa, Artificial Sequence
  Quasi-synthetic sequence derived from human genome
LRLMRIFRILKLAR

SEQ ID NO: 6013 - protein, 14 aa, Artificial Sequence
  Quasi-synthetic sequence derived from human genome
LRRYAWKKRWFILR

SEQ ID NO: 6014 - protein, 14 aa, Artificial Sequence
  Quasi-synthetic sequence derived from human genome
LRVIRLVRVFRIFK

SEQ ID NO: 6015 - protein, 14 aa, Artificial Sequence
  Quasi-synthetic sequence derived from human genome
LRRLLLLLLLLLLR

SEQ ID NO: 6016 - protein, 14 aa, Artificial Sequence
  Quasi-synthetic sequence derived from human genome
LLFFLFRLLLRFLR

SEQ ID NO: 6017 - protein, 14 aa, Artificial Sequence
  Quasi-synthetic sequence derived from human genome
KFILWRRFRWAIIL

SEQ ID NO: 6018 - protein, 14 aa, Artificial Sequence
  Quasi-synthetic sequence derived from human genome
ILLYLLRLRRIHRR

SEQ ID NO: 6019 - protein, 14 aa, Artificial Sequence
  Quasi-synthetic sequence derived from human genome
KKKLRRLLKYMFIR

SEQ ID NO: 6020 - protein, 14 aa, Artificial Sequence
  Quasi-synthetic sequence derived from human genome
RFRLLCLLRRWLPR

SEQ ID NO: 6021 - protein, 14 aa, Artificial Sequence
  Quasi-synthetic sequence derived from human genome
LILWKFALLRKRIL

SEQ ID NO: 6022 - protein, 14 aa, Artificial Sequence
  Quasi-synthetic sequence derived from human genome
FRVKFLLRLLRGRL

SEQ ID NO: 6023 - protein, 14 aa, Artificial Sequence
  Quasi-synthetic sequence derived from human genome
WKRRLIRLLLYHFK

SEQ ID NO: 6024 - protein, 14 aa, Artificial Sequence
  Quasi-synthetic sequence derived from human genome
FLKKVRRLIMKRIV

SEQ ID NO: 6025 - protein, 14 aa, Artificial Sequence
  Quasi-synthetic sequence derived from human genome
FWIKRRILLLIPKW

SEQ ID NO: 6026 - protein, 14 aa, Artificial Sequence
  Quasi-synthetic sequence derived from human genome
VWRRLLRKRWVLAL

SEQ ID NO: 6027 - protein, 14 aa, Artificial Sequence
  Quasi-synthetic sequence derived from human genome
LILILLLLLFLRRR

SEQ ID NO: 6028 - protein, 14 aa, Artificial Sequence
  Quasi-synthetic sequence derived from human genome
FFKILLRLRLAILK

SEQ ID NO: 6029 - protein, 14 aa, Artificial Sequence
  Quasi-synthetic sequence derived from human genome
VFCLILWKWKKKKR

SEQ ID NO: 6030 - protein, 14 aa, Artificial Sequence
  Quasi-synthetic sequence derived from human genome
LMKLRQILRLLRLR

SEQ ID NO: 6031 - protein, 14 aa, Artificial Sequence
  Quasi-synthetic sequence derived from human genome
KWKGVRWKRLRLLL

SEQ ID NO: 6032 - protein, 14 aa, Artificial Sequence
  Quasi-synthetic sequence derived from human genome
IKWMIKIRKRYLKR

SEQ ID NO: 6033 - protein, 14 aa, Artificial Sequence
  Quasi-synthetic sequence derived from human genome
RRKGVWLRLRKILF

SEQ ID NO: 6034 - protein, 14 aa, Artificial Sequence
  Quasi-synthetic sequence derived from human genome
FFRLFRVMRLVKLL

SEQ ID NO: 6035 - protein, 14 aa, Artificial Sequence
  Quasi-synthetic sequence derived from human genome
RLLLKFIKIMKHLR

SEQ ID NO: 6036 - protein, 14 aa, Artificial Sequence
  Quasi-synthetic sequence derived from human genome
RIWVFRLKRRKRIA

SEQ ID NO: 6037 - protein, 14 aa, Artificial Sequence
  Quasi-synthetic sequence derived from human genome
LLVILKRKWWKYIL

SEQ ID NO: 6038 - protein, 14 aa, Artificial Sequence
  Quasi-synthetic sequence derived from human genome
VITLLIFLRRRLRK

SEQ ID NO: 6039 - protein, 14 aa, Artificial Sequence
  Quasi-synthetic sequence derived from human genome
LMRRLVRRLRRWGL

SEQ ID NO: 6040 - protein, 14 aa, Artificial Sequence
  Quasi-synthetic sequence derived from human genome
LLLLGFFLWLKKRK

SEQ ID NO: 6041 - protein, 14 aa, Artificial Sequence
  Quasi-synthetic sequence derived from human genome
IRILKFLVAKRKFK

SEQ ID NO: 6042 - protein, 14 aa, Artificial Sequence
  Quasi-synthetic sequence derived from human genome
RLRLRQRRRRLLIK

SEQ ID NO: 6043 - protein, 14 aa, Artificial Sequence
  Quasi-synthetic sequence derived from human genome
LKRYAWKRRWFVLR

SEQ ID NO: 6044 - protein, 14 aa, Artificial Sequence
  Quasi-synthetic sequence derived from human genome
LYFCFRWLLIRFKR

SEQ ID NO: 6045 - protein, 14 aa, Artificial Sequence
  Quasi-synthetic sequence derived from human genome
ILRLLRYIVRLVWR

SEQ ID NO: 6046 - protein, 14 aa, Artificial Sequence
  Quasi-synthetic sequence derived from human genome
LRLFRAARLIKLLR

SEQ ID NO: 6047 - protein, 14 aa, Artificial Sequence
  Quasi-synthetic sequence derived from human genome
LLARRFLLRRKFIP

SEQ ID NO: 6048 - protein, 14 aa, Artificial Sequence
  Quasi-synthetic sequence derived from human genome
ILRVIRLVRVFRIF

SEQ ID NO: 6049 - protein, 14 aa, Artificial Sequence
  Quasi-synthetic sequence derived from human genome
LRRRVCVLRKRRLL

SEQ ID NO: 6050 - protein, 14 aa, Artificial Sequence
  Quasi-synthetic sequence derived from human genome
LRRRLLLLLLVLLI

SEQ ID NO: 6051 - protein, 14 aa, Artificial Sequence
  Quasi-synthetic sequence derived from human genome
LRLLVKLYRFLARR

SEQ ID NO: 6052 - protein, 14 aa, Artificial Sequence
  Quasi-synthetic sequence derived from human genome
FKRKKRIKRRALLF

SEQ ID NO: 6053 - protein, 14 aa, Artificial Sequence
  Quasi-synthetic sequence derived from human genome
LLKTVRLLRLLRLL

SEQ ID NO: 6054 - protein, 14 aa, Artificial Sequence
  Quasi-synthetic sequence derived from human genome
RALLKRKHRFILLR

SEQ ID NO: 6055 - protein, 14 aa, Artificial Sequence
  Quasi-synthetic sequence derived from human genome
INLKRKFIKKRIII

SEQ ID NO: 6056 - protein, 14 aa, Artificial Sequence
  Quasi-synthetic sequence derived from human genome
LRTFRLLRVLKLVR

SEQ ID NO: 6057 - protein, 14 aa, Artificial Sequence
  Quasi-synthetic sequence derived from human genome
RTFRLLRVLKLVRF

SEQ ID NO: 6058 - protein, 14 aa, Artificial Sequence
  Quasi-synthetic sequence derived from human genome
LLIFLLVWLLIRRK

SEQ ID NO: 6059 - protein, 14 aa, Artificial Sequence
  Quasi-synthetic sequence derived from human genome
LLWLRKCLRKAKKF

SEQ ID NO: 6060 - protein, 14 aa, Artificial Sequence
  Quasi-synthetic sequence derived from human genome
LRRIILLQRWFRVL

SEQ ID NO: 6061 - protein, 14 aa, Artificial Sequence
  Quasi-synthetic sequence derived from human genome
KKIRKQMKLLLLLL

SEQ ID NO: 6062 - protein, 14 aa, Artificial Sequence
  Quasi-synthetic sequence derived from human genome
WKKVLPLLKIIKKK

SEQ ID NO: 6063 - protein, 14 aa, Artificial Sequence
  Quasi-synthetic sequence derived from human genome
KLLKLFYIKKLKPL

SEQ ID NO: 6064 - protein, 14 aa, Artificial Sequence
  Quasi-synthetic sequence derived from human genome
WLGRWRRKRRWRRV

SEQ ID NO: 6065 - protein, 14 aa, Artificial Sequence
  Quasi-synthetic sequence derived from human genome
KSRFWLLKLLFRVF

SEQ ID NO: 6066 - protein, 14 aa, Artificial Sequence
  Quasi-synthetic sequence derived from human genome
GRKLWKRFFCFLRR

SEQ ID NO: 6067 - protein, 14 aa, Artificial Sequence
  Quasi-synthetic sequence derived from human genome
VVLFIVFRKKVFRK

SEQ ID NO: 6068 - protein, 14 aa, Artificial Sequence
  Quasi-synthetic sequence derived from human genome
IKIYIVLRRRRKRV

SEQ ID NO: 6069 - protein, 14 aa, Artificial Sequence
  Quasi-synthetic sequence derived from human genome
RWRWWQRLLPWRLL

SEQ ID NO: 6070 - protein, 14 aa, Artificial Sequence
  Quasi-synthetic sequence derived from human genome
FLWLRWRILRLFPW

SEQ ID NO: 6071 - protein, 14 aa, Artificial Sequence
  Quasi-synthetic sequence derived from human genome
RARLLRALRLVRRL

SEQ ID NO: 6072 - protein, 14 aa, Artificial Sequence
  Quasi-synthetic sequence derived from human genome
IFLILLLVYRMRKK

SEQ ID NO: 6073 - protein, 14 aa, Artificial Sequence
  Quasi-synthetic sequence derived from human genome
KVWKRWKKRYFVLV

SEQ ID NO: 6074 - protein, 14 aa, Artificial Sequence
  Quasi-synthetic sequence derived from human genome
LRKKLIRKMKLILS

SEQ ID NO: 6075 - protein, 14 aa, Artificial Sequence
  Quasi-synthetic sequence derived from human genome
VFRLARRRKKILFY

SEQ ID NO: 6076 - protein, 14 aa, Artificial Sequence
  Quasi-synthetic sequence derived from human genome
LLFRIVLKRRLNWI

SEQ ID NO: 6077 - protein, 14 aa, Artificial Sequence
  Quasi-synthetic sequence derived from human genome
ILGLICLLRWRRRK

SEQ ID NO: 6078 - protein, 14 aa, Artificial Sequence
  Quasi-synthetic sequence derived from human genome
LRVFRVFRIFKFSR

SEQ ID NO: 6079 - protein, 14 aa, Artificial Sequence
  Quasi-synthetic sequence derived from human genome
ILTRKRIRYRFRRF

SEQ ID NO: 6080 - protein, 14 aa, Artificial Sequence
  Quasi-synthetic sequence derived from human genome
IWKFRKVLFILILF

SEQ ID NO: 6081 - protein, 14 aa, Artificial Sequence
  Quasi-synthetic sequence derived from human genome
RLRLRLLALLLLLL

SEQ ID NO: 6082 - protein, 14 aa, Artificial Sequence
  Quasi-synthetic sequence derived from human genome
GFIILLLLVLRKRR

SEQ ID NO: 6083 - protein, 14 aa, Artificial Sequence
  Quasi-synthetic sequence derived from human genome
LLKRLLGPKLRRFL

SEQ ID NO: 6084 - protein, 14 aa, Artificial Sequence
  Quasi-synthetic sequence derived from human genome
ILIVIAILLFKRKR

SEQ ID NO: 6085 - protein, 14 aa, Artificial Sequence
  Quasi-synthetic sequence derived from human genome
LLRLLRLSRLIRYI

SEQ ID NO: 6086 - protein, 14 aa, Artificial Sequence
  Quasi-synthetic sequence derived from human genome
VRFVRILRIFKLTR

SEQ ID NO: 6087 - protein, 14 aa, Artificial Sequence
  Quasi-synthetic sequence derived from human genome
LIALKRKIFPRRRI

SEQ ID NO: 6088 - protein, 14 aa, Artificial Sequence
  Quasi-synthetic sequence derived from human genome
LFHRLCKLLFFRIR

SEQ ID NO: 6089 - protein, 14 aa, Artificial Sequence
  Quasi-synthetic sequence derived from human genome
FLMKVLKKKIKRVK

SEQ ID NO: 6090 - protein, 14 aa, Artificial Sequence
  Quasi-synthetic sequence derived from human genome
KRLFFRFMNVLIKR

SEQ ID NO: 6091 - protein, 14 aa, Artificial Sequence
  Quasi-synthetic sequence derived from human genome
LFINILRILMRKLR

SEQ ID NO: 6092 - protein, 14 aa, Artificial Sequence
  Quasi-synthetic sequence derived from human genome
RLLWRRLKPLILGK

SEQ ID NO: 6093 - protein, 14 aa, Artificial Sequence
  Quasi-synthetic sequence derived from human genome
LLWKRLLIARRSRK

SEQ ID NO: 6094 - protein, 14 aa, Artificial Sequence
  Quasi-synthetic sequence derived from human genome
IIFLTVLLLKLRKR

SEQ ID NO: 6095 - protein, 14 aa, Artificial Sequence
  Quasi-synthetic sequence derived from human genome
RRRSLRRLFSRFLL

SEQ ID NO: 6096 - protein, 14 aa, Artificial Sequence
  Quasi-synthetic sequence derived from human genome
GLLCLLLLWWRRRK

SEQ ID NO: 6097 - protein, 14 aa, Artificial Sequence
  Quasi-synthetic sequence derived from human genome
LRLLLWKNLTFRRR

SEQ ID NO: 6098 - protein, 14 aa, Artificial Sequence
  Quasi-synthetic sequence derived from human genome
VKRKVIIFLKKCLL

SEQ ID NO: 6099 - protein, 14 aa, Artificial Sequence
  Quasi-synthetic sequence derived from human genome
ILKKKKKLLLLQKK

SEQ ID NO: 6100 - protein, 14 aa, Artificial Sequence
  Quasi-synthetic sequence derived from human genome
LFYVKLRWLLKHWR

SEQ ID NO: 6101 - protein, 14 aa, Artificial Sequence
  Quasi-synthetic sequence derived from human genome
VIIILLLIFLRKRI

SEQ ID NO: 6102 - protein, 14 aa, Artificial Sequence
  Quasi-synthetic sequence derived from human genome
ILYRRLLLTKLFIR

SEQ ID NO: 6103 - protein, 14 aa, Artificial Sequence
  Quasi-synthetic sequence derived from human genome
LKWRVKKVVLVLLL

SEQ ID NO: 6104 - protein, 14 aa, Artificial Sequence
  Quasi-synthetic sequence derived from human genome
GRRARRRRLVFLWW

SEQ ID NO: 6105 - protein, 14 aa, Artificial Sequence
  Quasi-synthetic sequence derived from human genome
VWLIKLLTRLKVRK

SEQ ID NO: 6106 - protein, 14 aa, Artificial Sequence
  Quasi-synthetic sequence derived from human genome
IKLTVWKRLFRKVL

SEQ ID NO: 6107 - protein, 14 aa, Artificial Sequence
  Quasi-synthetic sequence derived from human genome
FAILRIIRLVRVFR

SEQ ID NO: 6108 - protein, 14 aa, Artificial Sequence
  Quasi-synthetic sequence derived from human genome
VLLLLVLSLRRRLR

SEQ ID NO: 6109 - protein, 14 aa, Artificial Sequence
  Quasi-synthetic sequence derived from human genome
KRWLKIIWRRHGIW

SEQ ID NO: 6110 - protein, 14 aa, Artificial Sequence
  Quasi-synthetic sequence derived from human genome
KNVWKRWKKRFFVL

SEQ ID NO: 6111 - protein, 14 aa, Artificial Sequence
  Quasi-synthetic sequence derived from human genome
KIRTRLIRKRFLCL

SEQ ID NO: 6112 - protein, 14 aa, Artificial Sequence
  Quasi-synthetic sequence derived from human genome
ILLIFRLIWRSVKK

SEQ ID NO: 6113 - protein, 14 aa, Artificial Sequence
  Quasi-synthetic sequence derived from human genome
LRFVKCFLRRRKPF

SEQ ID NO: 6114 - protein, 14 aa, Artificial Sequence
  Quasi-synthetic sequence derived from human genome
RRALLRFLFRQLLL

SEQ ID NO: 6115 - protein, 14 aa, Artificial Sequence
  Quasi-synthetic sequence derived from human genome
YLKRFKVMKIKVLR

SEQ ID NO: 6116 - protein, 14 aa, Artificial Sequence
  Quasi-synthetic sequence derived from human genome
KRKIIVLMPWLLRL

SEQ ID NO: 6117 - protein, 14 aa, Artificial Sequence
  Quasi-synthetic sequence derived from human genome
KKRFRYIILKQKFL

SEQ ID NO: 6118 - protein, 14 aa, Artificial Sequence
  Quasi-synthetic sequence derived from human genome
RRPLLLSLLRRVRW

SEQ ID NO: 6119 - protein, 14 aa, Artificial Sequence
  Quasi-synthetic sequence derived from human genome
LCLRLLLFFRFKRT

SEQ ID NO: 6120 - protein, 14 aa, Artificial Sequence
  Quasi-synthetic sequence derived from human genome
ILRRWKRNWFALWL

SEQ ID NO: 6121 - protein, 14 aa, Artificial Sequence
  Quasi-synthetic sequence derived from human genome
MRLWKARVLKLVLK

SEQ ID NO: 6122 - protein, 14 aa, Artificial Sequence
  Quasi-synthetic sequence derived from human genome
RRFRSLKMWFVFRM

SEQ ID NO: 6123 - protein, 14 aa, Artificial Sequence
  Quasi-synthetic sequence derived from human genome
RLRKLNWKRILIRH

SEQ ID NO: 6124 - protein, 14 aa, Artificial Sequence
  Quasi-synthetic sequence derived from human genome
RRRWHRWRLGKVLW

SEQ ID NO: 6125 - protein, 14 aa, Artificial Sequence
  Quasi-synthetic sequence derived from human genome
LRALRLLRIFKITK

SEQ ID NO: 6126 - protein, 14 aa, Artificial Sequence
  Quasi-synthetic sequence derived from human genome
RIMRVLRIARVLKL

SEQ ID NO: 6127 - protein, 14 aa, Artificial Sequence
  Quasi-synthetic sequence derived from human genome
LRVLRLLRTLRPLR

SEQ ID NO: 6128 - protein, 14 aa, Artificial Sequence
  Quasi-synthetic sequence derived from human genome
KVRKLSFKRKRFLI

SEQ ID NO: 6129 - protein, 14 aa, Artificial Sequence
  Quasi-synthetic sequence derived from human genome
VIAILRLRFLVKKW

SEQ ID NO: 6130 - protein, 14 aa, Artificial Sequence
  Quasi-synthetic sequence derived from human genome
LIFLRLKRRVKSVI

SEQ ID NO: 6131 - protein, 14 aa, Artificial Sequence
  Quasi-synthetic sequence derived from human genome
LRCIRLLRIFKITK

SEQ ID NO: 6132 - protein, 14 aa, Artificial Sequence
  Quasi-synthetic sequence derived from human genome
FRWKPLWGVRLRLR

SEQ ID NO: 6133 - protein, 14 aa, Artificial Sequence
  Quasi-synthetic sequence derived from human genome
VRWKFIKRWKTRYF

SEQ ID NO: 6134 - protein, 14 aa, Artificial Sequence
  Quasi-synthetic sequence derived from human genome
LRIRRLLRPFFLLQ

SEQ ID NO: 6135 - protein, 14 aa, Artificial Sequence
  Quasi-synthetic sequence derived from human genome
RYKLRILRMKLRSL

SEQ ID NO: 6136 - protein, 14 aa, Artificial Sequence
  Quasi-synthetic sequence derived from human genome
ILKRKWWKYILLGL

SEQ ID NO: 6137 - protein, 14 aa, Artificial Sequence
  Quasi-synthetic sequence derived from human genome
RTFRLMRVLKLVRF

SEQ ID NO: 6138 - protein, 14 aa, Artificial Sequence
  Quasi-synthetic sequence derived from human genome
WKRKGRTLFRRLLF

SEQ ID NO: 6139 - protein, 14 aa, Artificial Sequence
  Quasi-synthetic sequence derived from human genome
FRIFFHKIFIRPLR

SEQ ID NO: 6140 - protein, 14 aa, Artificial Sequence
  Quasi-synthetic sequence derived from human genome
KRRFRSLRHKIILL

SEQ ID NO: 6141 - protein, 14 aa, Artificial Sequence
  Quasi-synthetic sequence derived from human genome
WWLKLRPILKILAK

SEQ ID NO: 6142 - protein, 14 aa, Artificial Sequence
  Quasi-synthetic sequence derived from human genome
RRLLPRVRLLPLLL

SEQ ID NO: 6143 - protein, 14 aa, Artificial Sequence
  Quasi-synthetic sequence derived from human genome
RLLRLIILIRIFHL

SEQ ID NO: 6144 - protein, 14 aa, Artificial Sequence
  Quasi-synthetic sequence derived from human genome
IFWKRYRFKLIAFM

SEQ ID NO: 6145 - protein, 14 aa, Artificial Sequence
  Quasi-synthetic sequence derived from human genome
RLFRVMRLVKLLSR

SEQ ID NO: 6146 - protein, 14 aa, Artificial Sequence
  Quasi-synthetic sequence derived from human genome
LLVLRLRRWHKSRL

SEQ ID NO: 6147 - protein, 14 aa, Artificial Sequence
  Quasi-synthetic sequence derived from human genome
WRFYLSFRKLMRWI

SEQ ID NO: 6148 - protein, 14 aa, Artificial Sequence
  Quasi-synthetic sequence derived from human genome
LKTFVFFIWRRYWR

SEQ ID NO: 6149 - protein, 14 aa, Artificial Sequence
  Quasi-synthetic sequence derived from human genome
FLFRLFKRRQGRIF

SEQ ID NO: 6150 - protein, 14 aa, Artificial Sequence
  Quasi-synthetic sequence derived from human genome
KIWLRLRGLRKYKK

SEQ ID NO: 6151 - protein, 14 aa, Artificial Sequence
  Quasi-synthetic sequence derived from human genome
LKFHIRRFIFLFFI

SEQ ID NO: 6152 - protein, 14 aa, Artificial Sequence
  Quasi-synthetic sequence derived from human genome
LRFRRQLLYWFLKV

SEQ ID NO: 6153 - protein, 14 aa, Artificial Sequence
  Quasi-synthetic sequence derived from human genome
RRLLKLPRTLILLL

SEQ ID NO: 6154 - protein, 14 aa, Artificial Sequence
  Quasi-synthetic sequence derived from human genome
LWLRAKFQRLLFKL

SEQ ID NO: 6155 - protein, 14 aa, Artificial Sequence
  Quasi-synthetic sequence derived from human genome
RRILWITLRTWKKF

SEQ ID NO: 6156 - protein, 14 aa, Artificial Sequence
  Quasi-synthetic sequence derived from human genome
RFRIYKRKVLILTL

SEQ ID NO: 6157 - protein, 14 aa, Artificial Sequence
  Quasi-synthetic sequence derived from human genome
YFWRFKLFLLRILY

SEQ ID NO: 6158 - protein, 14 aa, Artificial Sequence
  Quasi-synthetic sequence derived from human genome
LRAWKRIFWRQILL

SEQ ID NO: 6159 - protein, 14 aa, Artificial Sequence
  Quasi-synthetic sequence derived from human genome
RWLGKLRRKRRWRR

SEQ ID NO: 6160 - protein, 14 aa, Artificial Sequence
  Quasi-synthetic sequence derived from human genome
LRLLRALRMLKLGR

SEQ ID NO: 6161 - protein, 14 aa, Artificial Sequence
  Quasi-synthetic sequence derived from human genome
RLRKRTFILMYLWF

SEQ ID NO: 6162 - protein, 14 aa, Artificial Sequence
  Quasi-synthetic sequence derived from human genome
KSKIFFLFRLCKKL

SEQ ID NO: 6163 - protein, 14 aa, Artificial Sequence
  Quasi-synthetic sequence derived from human genome
LLVIMFLMLLRRFR

SEQ ID NO: 6164 - protein, 14 aa, Artificial Sequence
  Quasi-synthetic sequence derived from human genome
KSLFYLLLKLKKWI

SEQ ID NO: 6165 - protein, 14 aa, Artificial Sequence
  Quasi-synthetic sequence derived from human genome
LRIKGKRRRKKLIL

SEQ ID NO: 6166 - protein, 14 aa, Artificial Sequence
  Quasi-synthetic sequence derived from human genome
MKMMLVRRFRVLIL

SEQ ID NO: 6167 - protein, 14 aa, Artificial Sequence
  Quasi-synthetic sequence derived from human genome
LRLHRLLLLFLVLR

SEQ ID NO: 6168 - protein, 14 aa, Artificial Sequence
  Quasi-synthetic sequence derived from human genome
AKRYKYLRRLFRFR

SEQ ID NO: 6169 - protein, 14 aa, Artificial Sequence
  Quasi-synthetic sequence derived from human genome
LKCILKFFLRALKI

SEQ ID NO: 6170 - protein, 14 aa, Artificial Sequence
  Quasi-synthetic sequence derived from human genome
FLFKRFLRIQRLFP

SEQ ID NO: 6171 - protein, 14 aa, Artificial Sequence
  Quasi-synthetic sequence derived from human genome
RWRRLRLQQLRRLR

SEQ ID NO: 6172 - protein, 14 aa, Artificial Sequence
  Quasi-synthetic sequence derived from human genome
LVVLLLKYRRRHRK

SEQ ID NO: 6173 - protein, 14 aa, Artificial Sequence
  Quasi-synthetic sequence derived from human genome
LLKVIRKKLVRKTL

SEQ ID NO: 6174 - protein, 14 aa, Artificial Sequence
  Quasi-synthetic sequence derived from human genome
YWKKVLPLLKIIKK

SEQ ID NO: 6175 - protein, 14 aa, Artificial Sequence
  Quasi-synthetic sequence derived from human genome
FLRRLIYRRRPMIY

SEQ ID NO: 6176 - protein, 14 aa, Artificial Sequence
  Quasi-synthetic sequence derived from human genome
RVRLRALRLALLIL

SEQ ID NO: 6177 - protein, 14 aa, Artificial Sequence
  Quasi-synthetic sequence derived from human genome
IKFLKKLQKLLLAR

SEQ ID NO: 6178 - protein, 14 aa, Artificial Sequence
  Quasi-synthetic sequence derived from human genome
RRRPKLKKLKKLLM

SEQ ID NO: 6179 - protein, 14 aa, Artificial Sequence
  Quasi-synthetic sequence derived from human genome
ILRRRWWKYMILGL

SEQ ID NO: 6180 - protein, 14 aa, Artificial Sequence
  Quasi-synthetic sequence derived from human genome
LLKKKILGRVWWLM

SEQ ID NO: 6181 - protein, 14 aa, Artificial Sequence
  Quasi-synthetic sequence derived from human genome
RRSRHRLLLLLLRY

SEQ ID NO: 6182 - protein, 14 aa, Artificial Sequence
  Quasi-synthetic sequence derived from human genome
RRILFIKRFIIYSI

SEQ ID NO: 6183 - protein, 14 aa, Artificial Sequence
  Quasi-synthetic sequence derived from human genome
LWVFRRRWRLNFNR

SEQ ID NO: 6184 - protein, 14 aa, Artificial Sequence
  Quasi-synthetic sequence derived from human genome
FRKTFKMLLLCRWK

SEQ ID NO: 6185 - protein, 14 aa, Artificial Sequence
  Quasi-synthetic sequence derived from human genome
FIYMISFIFRKRRK

SEQ ID NO: 6186 - protein, 14 aa, Artificial Sequence
  Quasi-synthetic sequence derived from human genome
RFLLLFTFLKKNRK

SEQ ID NO: 6187 - protein, 14 aa, Artificial Sequence
  Quasi-synthetic sequence derived from human genome
LRMMRIFWVIKLAR

SEQ ID NO: 6188 - protein, 14 aa, Artificial Sequence
  Quasi-synthetic sequence derived from human genome
RRLRQLLRRRKKRW

SEQ ID NO: 6189 - protein, 14 aa, Artificial Sequence
  Quasi-synthetic sequence derived from human genome
RARRRRPLFALLLL

SEQ ID NO: 6190 - protein, 14 aa, Artificial Sequence
  Quasi-synthetic sequence derived from human genome
KFFRWVRRAWQRII

SEQ ID NO: 6191 - protein, 14 aa, Artificial Sequence
  Quasi-synthetic sequence derived from human genome
FILKKKGLLRLARK

SEQ ID NO: 6192 - protein, 14 aa, Artificial Sequence
  Quasi-synthetic sequence derived from human genome
LAILRVIRLVRVFR

SEQ ID NO: 6193 - protein, 14 aa, Artificial Sequence
  Quasi-synthetic sequence derived from human genome
RLMKMARLLARFLR

SEQ ID NO: 6194 - protein, 14 aa, Artificial Sequence
  Quasi-synthetic sequence derived from human genome
IPKMKKLIRYLKLK

SEQ ID NO: 6195 - protein, 14 aa, Artificial Sequence
  Quasi-synthetic sequence derived from human genome
KFMVLLWKNFILKR

SEQ ID NO: 6196 - protein, 14 aa, Artificial Sequence
  Quasi-synthetic sequence derived from human genome
LLLVAMICRRRRRR

SEQ ID NO: 6197 - protein, 14 aa, Artificial Sequence
  Quasi-synthetic sequence derived from human genome
KRRWRLSRIVFRHL

SEQ ID NO: 6198 - protein, 14 aa, Artificial Sequence
  Quasi-synthetic sequence derived from human genome
FLRKRILIAIALIK

SEQ ID NO: 6199 - protein, 14 aa, Artificial Sequence
  Quasi-synthetic sequence derived from human genome
VRWLRWKASLIKLR

SEQ ID NO: 6200 - protein, 14 aa, Artificial Sequence
  Quasi-synthetic sequence derived from human genome
LAWLGKWLRKRRIV

SEQ ID NO: 6201 - protein, 14 aa, Artificial Sequence
  Quasi-synthetic sequence derived from human genome
LKIIRPLRNIFLKK

SEQ ID NO: 6202 - protein, 14 aa, Artificial Sequence
  Quasi-synthetic sequence derived from human genome
WVLRWLRSRRRRPR

SEQ ID NO: 6203 - protein, 14 aa, Artificial Sequence
  Quasi-synthetic sequence derived from human genome
RSIVLALRLRKRFL

SEQ ID NO: 6204 - protein, 14 aa, Artificial Sequence
  Quasi-synthetic sequence derived from human genome
RKLGIFRRCWLVFK

SEQ ID NO: 6205 - protein, 14 aa, Artificial Sequence
  Quasi-synthetic sequence derived from human genome
AFRFKRKLPKYLLF

SEQ ID NO: 6206 - protein, 14 aa, Artificial Sequence
  Quasi-synthetic sequence derived from human genome
RRVVQIFRIMRILR

SEQ ID NO: 6207 - protein, 14 aa, Artificial Sequence
  Quasi-synthetic sequence derived from human genome
IGWRIRKKYFLMKI

SEQ ID NO: 6208 - protein, 14 aa, Artificial Sequence
  Quasi-synthetic sequence derived from human genome
KKPRTFIIKLIKWL

SEQ ID NO: 6209 - protein, 14 aa, Artificial Sequence
  Quasi-synthetic sequence derived from human genome
RRLHVLKALKKLRI

SEQ ID NO: 6210 - protein, 14 aa, Artificial Sequence
  Quasi-synthetic sequence derived from human genome
VLLLYLKRLKIIIF

SEQ ID NO: 6211 - protein, 14 aa, Artificial Sequence
  Quasi-synthetic sequence derived from human genome
KFIVWRRFKWVIIG

SEQ ID NO: 6212 - protein, 14 aa, Artificial Sequence
  Quasi-synthetic sequence derived from human genome
FLRLRWSRFARVLL

SEQ ID NO: 6213 - protein, 14 aa, Artificial Sequence
  Quasi-synthetic sequence derived from human genome
RLFRWLVLRLNRAL

SEQ ID NO: 6214 - protein, 14 aa, Artificial Sequence
  Quasi-synthetic sequence derived from human genome
LWGIRLLLQRKKKL

SEQ ID NO: 6215 - protein, 14 aa, Artificial Sequence
  Quasi-synthetic sequence derived from human genome
IKIRFFKIMLVLII

SEQ ID NO: 6216 - protein, 14 aa, Artificial Sequence
  Quasi-synthetic sequence derived from human genome
LTRLRLRNVFRRFL

SEQ ID NO: 6217 - protein, 14 aa, Artificial Sequence
  Quasi-synthetic sequence derived from human genome
PLVLRRILRRAVRF

SEQ ID NO: 6218 - protein, 14 aa, Artificial Sequence
  Quasi-synthetic sequence derived from human genome
LRRLLRLLVLGLWL

SEQ ID NO: 6219 - protein, 14 aa, Artificial Sequence
  Quasi-synthetic sequence derived from human genome
LKRIFHLWRCKKYR

SEQ ID NO: 6220 - protein, 14 aa, Artificial Sequence
  Quasi-synthetic sequence derived from human genome
LWKIGFFKRPLKKK

SEQ ID NO: 6221 - protein, 14 aa, Artificial Sequence
  Quasi-synthetic sequence derived from human genome
LMLWRLHWRRLLSK

SEQ ID NO: 6222 - protein, 14 aa, Artificial Sequence
  Quasi-synthetic sequence derived from human genome
LRRIIRILNLSKRL

SEQ ID NO: 6223 - protein, 14 aa, Artificial Sequence
  Quasi-synthetic sequence derived from human genome
VLLWKMGFFRRRYK

SEQ ID NO: 6224 - protein, 14 aa, Artificial Sequence
  Quasi-synthetic sequence derived from human genome
RKMKIPFLLLFFLW

SEQ ID NO: 6225 - protein, 14 aa, Artificial Sequence
  Quasi-synthetic sequence derived from human genome
KVVQFFRILRIFKL

SEQ ID NO: 6226 - protein, 14 aa, Artificial Sequence
  Quasi-synthetic sequence derived from human genome
FRRLRQLLRRRKKR

SEQ ID NO: 6227 - protein, 14 aa, Artificial Sequence
  Quasi-synthetic sequence derived from human genome
VFLIYKFKRKIPWI

SEQ ID NO: 6228 - protein, 14 aa, Artificial Sequence
  Quasi-synthetic sequence derived from human genome
FRVIRLARIGRILR

SEQ ID NO: 6229 - protein, 14 aa, Artificial Sequence
  Quasi-synthetic sequence derived from human genome
RVFRLFQRRLLQLR

SEQ ID NO: 6230 - protein, 14 aa, Artificial Sequence
  Quasi-synthetic sequence derived from human genome
RLRYFLKVTIVRRL

SEQ ID NO: 6231 - protein, 14 aa, Artificial Sequence
  Quasi-synthetic sequence derived from human genome
RKILRLITIRKLFT

SEQ ID NO: 6232 - protein, 14 aa, Artificial Sequence
  Quasi-synthetic sequence derived from human genome
WQRLLLRFKILRSL

SEQ ID NO: 6233 - protein, 14 aa, Artificial Sequence
  Quasi-synthetic sequence derived from human genome
LLLRRVPLFSLRFR

SEQ ID NO: 6234 - protein, 14 aa, Artificial Sequence
  Quasi-synthetic sequence derived from human genome
VLFKKTHRILRRLF

SEQ ID NO: 6235 - protein, 14 aa, Artificial Sequence
  Quasi-synthetic sequence derived from human genome
LRALRLLRIFKVTK

SEQ ID NO: 6236 - protein, 14 aa, Artificial Sequence
  Quasi-synthetic sequence derived from human genome
LRRKALAPRLLLRL

SEQ ID NO: 6237 - protein, 14 aa, Artificial Sequence
  Quasi-synthetic sequence derived from human genome
LIKKLRLFFRKFNS

SEQ ID NO: 6238 - protein, 14 aa, Artificial Sequence
  Quasi-synthetic sequence derived from human genome
ILLRKFCQMRKRRL

SEQ ID NO: 6239 - protein, 14 aa, Artificial Sequence
  Quasi-synthetic sequence derived from human genome
KRWIFWLWWRACWF

SEQ ID NO: 6240 - protein, 14 aa, Artificial Sequence
  Quasi-synthetic sequence derived from human genome
LLKLAKFKIGFLRL

SEQ ID NO: 6241 - protein, 14 aa, Artificial Sequence
  Quasi-synthetic sequence derived from human genome
WRIRKKYFLMKIKN

SEQ ID NO: 6242 - protein, 14 aa, Artificial Sequence
  Quasi-synthetic sequence derived from human genome
LIIRRLHKVLRPFL

SEQ ID NO: 6243 - protein, 14 aa, Artificial Sequence
  Quasi-synthetic sequence derived from human genome
RRRRLCLQLYFLWL

SEQ ID NO: 6244 - protein, 14 aa, Artificial Sequence
  Quasi-synthetic sequence derived from human genome
RRGISRLWLRVLLR

SEQ ID NO: 6245 - protein, 14 aa, Artificial Sequence
  Quasi-synthetic sequence derived from human genome
KLRYPPWLLLLKRL

SEQ ID NO: 6246 - protein, 14 aa, Artificial Sequence
  Quasi-synthetic sequence derived from human genome
VLILLIVTMRRRKK

SEQ ID NO: 6247 - protein, 14 aa, Artificial Sequence
  Quasi-synthetic sequence derived from human genome
KRRLLPMLRLVIPR

SEQ ID NO: 6248 - protein, 14 aa, Artificial Sequence
  Quasi-synthetic sequence derived from human genome
FVLFLRLRSIRCLR

SEQ ID NO: 6249 - protein, 14 aa, Artificial Sequence
  Quasi-synthetic sequence derived from human genome
LKFFFLRTRRFALM

SEQ ID NO: 6250 - protein, 14 aa, Artificial Sequence
  Quasi-synthetic sequence derived from human genome
ARTFLYWRLRRLLL

SEQ ID NO: 6251 - protein, 14 aa, Artificial Sequence
  Quasi-synthetic sequence derived from human genome
LKQFTKILRRKRLL

SEQ ID NO: 6252 - protein, 14 aa, Artificial Sequence
  Quasi-synthetic sequence derived from human genome
LLKIKRTRKGFRLL

SEQ ID NO: 6253 - protein, 14 aa, Artificial Sequence
  Quasi-synthetic sequence derived from human genome
LRRTRLILFVLLLF

SEQ ID NO: 6254 - protein, 14 aa, Artificial Sequence
  Quasi-synthetic sequence derived from human genome
FRILKVFKSLRALR

SEQ ID NO: 6255 - protein, 14 aa, Artificial Sequence
  Quasi-synthetic sequence derived from human genome
IFLYLLRLRRIHHR

SEQ ID NO: 6256 - protein, 14 aa, Artificial Sequence
  Quasi-synthetic sequence derived from human genome
KYLLKALFKALKRL

SEQ ID NO: 6257 - protein, 14 aa, Artificial Sequence
  Quasi-synthetic sequence derived from human genome
LRKRKKRKFSLWVR

SEQ ID NO: 6258 - protein, 14 aa, Artificial Sequence
  Quasi-synthetic sequence derived from human genome
WKLLPLLRSVLRFR

SEQ ID NO: 6259 - protein, 14 aa, Artificial Sequence
  Quasi-synthetic sequence derived from human genome
VFAMARLRFLKLKR

SEQ ID NO: 6260 - protein, 14 aa, Artificial Sequence
  Quasi-synthetic sequence derived from human genome
LRRLRGLLRVLRGR

SEQ ID NO: 6261 - protein, 14 aa, Artificial Sequence
  Quasi-synthetic sequence derived from human genome
FFKKKLTSLRLKRF

SEQ ID NO: 6262 - protein, 14 aa, Artificial Sequence
  Quasi-synthetic sequence derived from human genome
LLFFLLGFLRIRVR

SEQ ID NO: 6263 - protein, 14 aa, Artificial Sequence
  Quasi-synthetic sequence derived from human genome
LLKWPLRFVIIHKR

SEQ ID NO: 6264 - protein, 14 aa, Artificial Sequence
  Quasi-synthetic sequence derived from human genome
FLRLKRKFIQMRRP

SEQ ID NO: 6265 - protein, 14 aa, Artificial Sequence
  Quasi-synthetic sequence derived from human genome
LKMKLKRRRVSLVL

SEQ ID NO: 6266 - protein, 14 aa, Artificial Sequence
  Quasi-synthetic sequence derived from human genome
LMLLLWKNFMYRRR

SEQ ID NO: 6267 - protein, 14 aa, Artificial Sequence
  Quasi-synthetic sequence derived from human genome
RFRSLLVRRRFISL

SEQ ID NO: 6268 - protein, 14 aa, Artificial Sequence
  Quasi-synthetic sequence derived from human genome
KVRIFGLKKRRLRR

SEQ ID NO: 6269 - protein, 14 aa, Artificial Sequence
  Quasi-synthetic sequence derived from human genome
LLCKNFLKKWRMKR

SEQ ID NO: 6270 - protein, 14 aa, Artificial Sequence
  Quasi-synthetic sequence derived from human genome
IIIVLYMLRFKKYK

SEQ ID NO: 6271 - protein, 14 aa, Artificial Sequence
  Quasi-synthetic sequence derived from human genome
FLRFRRSLLLLVKH

SEQ ID NO: 6272 - protein, 14 aa, Artificial Sequence
  Quasi-synthetic sequence derived from human genome
LWRLFRGKKWNVLR

SEQ ID NO: 6273 - protein, 14 aa, Artificial Sequence
  Quasi-synthetic sequence derived from human genome
IRLARIGRILRLVK

SEQ ID NO: 6274 - protein, 14 aa, Artificial Sequence
  Quasi-synthetic sequence derived from human genome
RIKVLRSRIRFIHL

SEQ ID NO: 6275 - protein, 14 aa, Artificial Sequence
  Quasi-synthetic sequence derived from human genome
KLSKRQLFFRKKLL

SEQ ID NO: 6276 - protein, 14 aa, Artificial Sequence
  Quasi-synthetic sequence derived from human genome
RIVLWGFRWLIFRI

SEQ ID NO: 6277 - protein, 14 aa, Artificial Sequence
  Quasi-synthetic sequence derived from human genome
ILFIGILFIILRKR

SEQ ID NO: 6278 - protein, 14 aa, Artificial Sequence
  Quasi-synthetic sequence derived from human genome
VVMILIKYRRLRIM

SEQ ID NO: 6279 - protein, 14 aa, Artificial Sequence
  Quasi-synthetic sequence derived from human genome
MRLRVRLLKRTWPL

SEQ ID NO: 6280 - protein, 14 aa, Artificial Sequence
  Quasi-synthetic sequence derived from human genome
LFHLRLLWRKLLWH

SEQ ID NO: 6281 - protein, 14 aa, Artificial Sequence
  Quasi-synthetic sequence derived from human genome
LLLLRRPLYRNLLR

SEQ ID NO: 6282 - protein, 14 aa, Artificial Sequence
  Quasi-synthetic sequence derived from human genome
RHRRLLLLPLLLFL

SEQ ID NO: 6283 - protein, 14 aa, Artificial Sequence
  Quasi-synthetic sequence derived from human genome
LRLFRRLLLAALLL

SEQ ID NO: 6284 - protein, 14 aa, Artificial Sequence
  Quasi-synthetic sequence derived from human genome
LWTFLLQRRFVKKR

SEQ ID NO: 6285 - protein, 14 aa, Artificial Sequence
  Quasi-synthetic sequence derived from human genome
KKRVIRMLIVIVVL

SEQ ID NO: 6286 - protein, 14 aa, Artificial Sequence
  Quasi-synthetic sequence derived from human genome
RVRFLRKVLSILLM

SEQ ID NO: 6287 - protein, 14 aa, Artificial Sequence
  Quasi-synthetic sequence derived from human genome
FVTLRVFRVFRIFK

SEQ ID NO: 6288 - protein, 14 aa, Artificial Sequence
  Quasi-synthetic sequence derived from human genome
LKKKLFKRRRVLNR

SEQ ID NO: 6289 - protein, 14 aa, Artificial Sequence
  Quasi-synthetic sequence derived from human genome
RIRKRFLLRRILEM

SEQ ID NO: 6290 - protein, 14 aa, Artificial Sequence
  Quasi-synthetic sequence derived from human genome
LLFIIPKKLMIFLR

SEQ ID NO: 6291 - protein, 14 aa, Artificial Sequence
  Quasi-synthetic sequence derived from human genome
IRWVFKRRLGLLGR

SEQ ID NO: 6292 - protein, 14 aa, Artificial Sequence
  Quasi-synthetic sequence derived from human genome
LRVLVLRRNRFARL

SEQ ID NO: 6293 - protein, 14 aa, Artificial Sequence
  Quasi-synthetic sequence derived from human genome
LWRKLLKAFWWLVV

SEQ ID NO: 6294 - protein, 14 aa, Artificial Sequence
  Quasi-synthetic sequence derived from human genome
KHWRKMLWRFISLF

SEQ ID NO: 6295 - protein, 14 aa, Artificial Sequence
  Quasi-synthetic sequence derived from human genome
RYVSWRRKKLYLLF

SEQ ID NO: 6296 - protein, 14 aa, Artificial Sequence
  Quasi-synthetic sequence derived from human genome
LKYLLLGRWRKKHL

SEQ ID NO: 6297 - protein, 14 aa, Artificial Sequence
  Quasi-synthetic sequence derived from human genome
LRIIRFLPLFKIIV

SEQ ID NO: 6298 - protein, 14 aa, Artificial Sequence
  Quasi-synthetic sequence derived from human genome
KFRRLRQLLRRRKK

SEQ ID NO: 6299 - protein, 14 aa, Artificial Sequence
  Quasi-synthetic sequence derived from human genome
PWMKLFFKIKPLLK

SEQ ID NO: 6300 - protein, 14 aa, Artificial Sequence
  Quasi-synthetic sequence derived from human genome
LKRSIKLLSLIKWK

SEQ ID NO: 6301 - protein, 14 aa, Artificial Sequence
  Quasi-synthetic sequence derived from human genome
WKKKSLIQKLILLR

SEQ ID NO: 6302 - protein, 14 aa, Artificial Sequence
  Quasi-synthetic sequence derived from human genome
RRFKLKFLAKVILG

SEQ ID NO: 6303 - protein, 14 aa, Artificial Sequence
  Quasi-synthetic sequence derived from human genome
VLRFKKTWKLRALK

SEQ ID NO: 6304 - protein, 14 aa, Artificial Sequence
  Quasi-synthetic sequence derived from human genome
RAVKILKKKKLRRI

SEQ ID NO: 6305 - protein, 14 aa, Artificial Sequence
  Quasi-synthetic sequence derived from human genome
RRLLLALHRRLRGL

SEQ ID NO: 6306 - protein, 14 aa, Artificial Sequence
  Quasi-synthetic sequence derived from human genome
KKVWIGIKKLLMLI

SEQ ID NO: 6307 - protein, 14 aa, Artificial Sequence
  Quasi-synthetic sequence derived from human genome
KLKKPRRIILLVKA

SEQ ID NO: 6308 - protein, 14 aa, Artificial Sequence
  Quasi-synthetic sequence derived from human genome
YLRPLFRKLRKRNL

SEQ ID NO: 6309 - protein, 14 aa, Artificial Sequence
  Quasi-synthetic sequence derived from human genome
LLIYRRLRKPKITW

SEQ ID NO: 6310 - protein, 14 aa, Artificial Sequence
  Quasi-synthetic sequence derived from human genome
RRRARLRFMKQLRL

SEQ ID NO: 6311 - protein, 14 aa, Artificial Sequence
  Quasi-synthetic sequence derived from human genome
PRRPLILKRRRLPL

SEQ ID NO: 6312 - protein, 14 aa, Artificial Sequence
  Quasi-synthetic sequence derived from human genome
AFQFFKKRVRRWIK

SEQ ID NO: 6313 - protein, 14 aa, Artificial Sequence
  Quasi-synthetic sequence derived from human genome
LKARKIPIIIRRYL

SEQ ID NO: 6314 - protein, 14 aa, Artificial Sequence
  Quasi-synthetic sequence derived from human genome
LSKKLRRKLQMWLW

SEQ ID NO: 6315 - protein, 14 aa, Artificial Sequence
  Quasi-synthetic sequence derived from human genome
IIRLMLKYQKILWK

SEQ ID NO: 6316 - protein, 14 aa, Artificial Sequence
  Quasi-synthetic sequence derived from human genome
RKKFPLKIFKKPLK

SEQ ID NO: 6317 - protein, 14 aa, Artificial Sequence
  Quasi-synthetic sequence derived from human genome
LRLLRALRVLYVMR

SEQ ID NO: 6318 - protein, 14 aa, Artificial Sequence
  Quasi-synthetic sequence derived from human genome
LLLMVLLRYVPRRR

SEQ ID NO: 6319 - protein, 14 aa, Artificial Sequence
  Quasi-synthetic sequence derived from human genome
RFLMRKRLLFPALV

SEQ ID NO: 6320 - protein, 14 aa, Artificial Sequence
  Quasi-synthetic sequence derived from human genome
LKLKLIKFLALISK

SEQ ID NO: 6321 - protein, 14 aa, Artificial Sequence
  Quasi-synthetic sequence derived from human genome
WWFMSVKVKLKRKK

SEQ ID NO: 6322 - protein, 14 aa, Artificial Sequence
  Quasi-synthetic sequence derived from human genome
FKAFRRTFKRKFKI

SEQ ID NO: 6323 - protein, 14 aa, Artificial Sequence
  Quasi-synthetic sequence derived from human genome
LRLVKRLYFGLRVL

SEQ ID NO: 6324 - protein, 14 aa, Artificial Sequence
  Quasi-synthetic sequence derived from human genome
VLRPLQLLRLFKLK

SEQ ID NO: 6325 - protein, 14 aa, Artificial Sequence
  Quasi-synthetic sequence derived from human genome
FIRLLRSKVSRFLR

SEQ ID NO: 6326 - protein, 14 aa, Artificial Sequence
  Quasi-synthetic sequence derived from human genome
MRKKLILFFKRRNH

SEQ ID NO: 6327 - protein, 14 aa, Artificial Sequence
  Quasi-synthetic sequence derived from human genome
KSLKIFRRPRKLFM

SEQ ID NO: 6328 - protein, 14 aa, Artificial Sequence
  Quasi-synthetic sequence derived from human genome
KYRVVLRRWKSLKL

SEQ ID NO: 6329 - protein, 14 aa, Artificial Sequence
  Quasi-synthetic sequence derived from human genome
FRRLKKLCRPLPWK

SEQ ID NO: 6330 - protein, 14 aa, Artificial Sequence
  Quasi-synthetic sequence derived from human genome
WRKRCLYFFVLLLL

SEQ ID NO: 6331 - protein, 14 aa, Artificial Sequence
  Quasi-synthetic sequence derived from human genome
KFLIKRLAKIVRLT

SEQ ID NO: 6332 - protein, 14 aa, Artificial Sequence
  Quasi-synthetic sequence derived from human genome
RMRTRLVRKRFLCL

SEQ ID NO: 6333 - protein, 14 aa, Artificial Sequence
  Quasi-synthetic sequence derived from human genome
RLLRGLWQRWRRYK

SEQ ID NO: 6334 - protein, 14 aa, Artificial Sequence
  Quasi-synthetic sequence derived from human genome
RCLALLYWRMFRLK

SEQ ID NO: 6335 - protein, 14 aa, Artificial Sequence
  Quasi-synthetic sequence derived from human genome
LILVGLLIFFLKRR

SEQ ID NO: 6336 - protein, 14 aa, Artificial Sequence
  Quasi-synthetic sequence derived from human genome
LRKILLRKFCQIRY

SEQ ID NO: 6337 - protein, 14 aa, Artificial Sequence
  Quasi-synthetic sequence derived from human genome
LRLLVLGRKHMLRR

SEQ ID NO: 6338 - protein, 14 aa, Artificial Sequence
  Quasi-synthetic sequence derived from human genome
LRLRLPNLKMVRLR

SEQ ID NO: 6339 - protein, 14 aa, Artificial Sequence
  Quasi-synthetic sequence derived from human genome
LRRKKKKTIKMLML

SEQ ID NO: 6340 - protein, 14 aa, Artificial Sequence
  Quasi-synthetic sequence derived from human genome
PPPRRRRRRRLLFW

SEQ ID NO: 6341 - protein, 14 aa, Artificial Sequence
  Quasi-synthetic sequence derived from human genome
LRILRKRNKALRKI

SEQ ID NO: 6342 - protein, 14 aa, Artificial Sequence
  Quasi-synthetic sequence derived from human genome
LLALRLRRWHKSRL

SEQ ID NO: 6343 - protein, 14 aa, Artificial Sequence
  Quasi-synthetic sequence derived from human genome
RRLPFSKWRLAFRF

SEQ ID NO: 6344 - protein, 14 aa, Artificial Sequence
  Quasi-synthetic sequence derived from human genome
LRIARFRFRAFHFL

SEQ ID NO: 6345 - protein, 14 aa, Artificial Sequence
  Quasi-synthetic sequence derived from human genome
LLMAFYFFRKKYRI

SEQ ID NO: 6346 - protein, 14 aa, Artificial Sequence
  Quasi-synthetic sequence derived from human genome
AKLWFKFQRYFRRK

SEQ ID NO: 6347 - protein, 14 aa, Artificial Sequence
  Quasi-synthetic sequence derived from human genome
KRMKIIKHFIKIAL

SEQ ID NO: 6348 - protein, 14 aa, Artificial Sequence
  Quasi-synthetic sequence derived from human genome
KRIKLYMRRLLCLP

SEQ ID NO: 6349 - protein, 14 aa, Artificial Sequence
  Quasi-synthetic sequence derived from human genome
LKRRVRSVILVILL

SEQ ID NO: 6350 - protein, 14 aa, Artificial Sequence
  Quasi-synthetic sequence derived from human genome
LGRIFKPWKWRKKK

SEQ ID NO: 6351 - protein, 14 aa, Artificial Sequence
  Quasi-synthetic sequence derived from human genome
KRGKRHWKKLWFVI

SEQ ID NO: 6352 - protein, 14 aa, Artificial Sequence
  Quasi-synthetic sequence derived from human genome
WLIAVLYRRRRKAI

SEQ ID NO: 6353 - protein, 14 aa, Artificial Sequence
  Quasi-synthetic sequence derived from human genome
FRMKLRNLFTKFIR

SEQ ID NO: 6354 - protein, 14 aa, Artificial Sequence
  Quasi-synthetic sequence derived from human genome
LLYKRIIRPFFLKH

SEQ ID NO: 6355 - protein, 14 aa, Artificial Sequence
  Quasi-synthetic sequence derived from human genome
LRRFLRTLRLKLAA

SEQ ID NO: 6356 - protein, 14 aa, Artificial Sequence
  Quasi-synthetic sequence derived from human genome
WIVARLRMRNFKRL

SEQ ID NO: 6357 - protein, 14 aa, Artificial Sequence
  Quasi-synthetic sequence derived from human genome
LLEFKILWKKLKKW

SEQ ID NO: 6358 - protein, 14 aa, Artificial Sequence
  Quasi-synthetic sequence derived from human genome
WVKRLFLQKLPKLL

SEQ ID NO: 6359 - protein, 14 aa, Artificial Sequence
  Quasi-synthetic sequence derived from human genome
WRMRKLKYKHLAFL

SEQ ID NO: 6360 - protein, 14 aa, Artificial Sequence
  Quasi-synthetic sequence derived from human genome
FVKIRWARWSKLLI

SEQ ID NO: 6361 - protein, 14 aa, Artificial Sequence
  Quasi-synthetic sequence derived from human genome
LVRWLLKKVFQCRR

SEQ ID NO: 6362 - protein, 14 aa, Artificial Sequence
  Quasi-synthetic sequence derived from human genome
FKKLLRLFSLVIWI

SEQ ID NO: 6363 - protein, 14 aa, Artificial Sequence
  Quasi-synthetic sequence derived from human genome
VFLQRNLKKFRRRW

SEQ ID NO: 6364 - protein, 14 aa, Artificial Sequence
  Quasi-synthetic sequence derived from human genome
IFRFLTRFFYAKKK

SEQ ID NO: 6365 - protein, 14 aa, Artificial Sequence
  Quasi-synthetic sequence derived from human genome
RRSRKLILFIVFLA

SEQ ID NO: 6366 - protein, 14 aa, Artificial Sequence
  Quasi-synthetic sequence derived from human genome
KIRALRNRLIVLLL

SEQ ID NO: 6367 - protein, 14 aa, Artificial Sequence
  Quasi-synthetic sequence derived from human genome
IQKMRKFYFRRIMR

SEQ ID NO: 6368 - protein, 14 aa, Artificial Sequence
  Quasi-synthetic sequence derived from human genome
RLLLLCRWDKRRWR

SEQ ID NO: 6369 - protein, 14 aa, Artificial Sequence
  Quasi-synthetic sequence derived from human genome
ILKKHLRWLKALPR

SEQ ID NO: 6370 - protein, 14 aa, Artificial Sequence
  Quasi-synthetic sequence derived from human genome
QKKFKRLMLHRIKW

SEQ ID NO: 6371 - protein, 14 aa, Artificial Sequence
  Quasi-synthetic sequence derived from human genome
RVRLGRFISRLLLW

SEQ ID NO: 6372 - protein, 14 aa, Artificial Sequence
  Quasi-synthetic sequence derived from human genome
RLATRLLKLRYLIL

SEQ ID NO: 6373 - protein, 14 aa, Artificial Sequence
  Quasi-synthetic sequence derived from human genome
VMYFFFRVRSRRWK

SEQ ID NO: 6374 - protein, 14 aa, Artificial Sequence
  Quasi-synthetic sequence derived from human genome
LQRYAWRKRWFVLR

SEQ ID NO: 6375 - protein, 14 aa, Artificial Sequence
  Quasi-synthetic sequence derived from human genome
RKKVLSWPFLMRRL

SEQ ID NO: 6376 - protein, 14 aa, Artificial Sequence
  Quasi-synthetic sequence derived from human genome
LRVLRALRILYVMR

SEQ ID NO: 6377 - protein, 14 aa, Artificial Sequence
  Quasi-synthetic sequence derived from human genome
GKLITRMWKLLRRR

SEQ ID NO: 6378 - protein, 14 aa, Artificial Sequence
  Quasi-synthetic sequence derived from human genome
RWLLLKLLLLLLLL

SEQ ID NO: 6379 - protein, 14 aa, Artificial Sequence
  Quasi-synthetic sequence derived from human genome
LHLKRQPKRRWLFW

SEQ ID NO: 6380 - protein, 14 aa, Artificial Sequence
  Quasi-synthetic sequence derived from human genome
SRTFFYWRLRRLLL

SEQ ID NO: 6381 - protein, 14 aa, Artificial Sequence
  Quasi-synthetic sequence derived from human genome
KYRSFRRRLLKFIP

SEQ ID NO: 6382 - protein, 14 aa, Artificial Sequence
  Quasi-synthetic sequence derived from human genome
SLWKLWRVKKFLIP

SEQ ID NO: 6383 - protein, 14 aa, Artificial Sequence
  Quasi-synthetic sequence derived from human genome
LRRRLVPRYRLQLL

SEQ ID NO: 6384 - protein, 14 aa, Artificial Sequence
  Quasi-synthetic sequence derived from human genome
KRKYWWKNLKMMII

SEQ ID NO: 6385 - protein, 14 aa, Artificial Sequence
  Quasi-synthetic sequence derived from human genome
HRRFLLFRRAFKQL

SEQ ID NO: 6386 - protein, 14 aa, Artificial Sequence
  Quasi-synthetic sequence derived from human genome
KKLVVFRPRLFLLC

SEQ ID NO: 6387 - protein, 14 aa, Artificial Sequence
  Quasi-synthetic sequence derived from human genome
HLRIFRIPRRPRKL

SEQ ID NO: 6388 - protein, 14 aa, Artificial Sequence
  Quasi-synthetic sequence derived from human genome
LKTLRLRLRRCHRF

SEQ ID NO: 6389 - protein, 14 aa, Artificial Sequence
  Quasi-synthetic sequence derived from human genome
FRFCLLLRLLRQLL

SEQ ID NO: 6390 - protein, 14 aa, Artificial Sequence
  Quasi-synthetic sequence derived from human genome
GWRFIRVFIKTIRR

SEQ ID NO: 6391 - protein, 14 aa, Artificial Sequence
  Quasi-synthetic sequence derived from human genome
ILRVLRVLRPLRAI

SEQ ID NO: 6392 - protein, 14 aa, Artificial Sequence
  Quasi-synthetic sequence derived from human genome
LRSLRFLQILRMLR

SEQ ID NO: 6393 - protein, 14 aa, Artificial Sequence
  Quasi-synthetic sequence derived from human genome
KMLVLRFLAKLHKK

SEQ ID NO: 6394 - protein, 14 aa, Artificial Sequence
  Quasi-synthetic sequence derived from human genome
VLAKKMLRKALKLL

SEQ ID NO: 6395 - protein, 14 aa, Artificial Sequence
  Quasi-synthetic sequence derived from human genome
WFRRLYIIFSRYMR

SEQ ID NO: 6396 - protein, 14 aa, Artificial Sequence
  Quasi-synthetic sequence derived from human genome
CRVIFLNRKILLIR

SEQ ID NO: 6397 - protein, 14 aa, Artificial Sequence
  Quasi-synthetic sequence derived from human genome
LLLLLLLLILRLLR

SEQ ID NO: 6398 - protein, 14 aa, Artificial Sequence
  Quasi-synthetic sequence derived from human genome
FLLLIFSMWKHRKK

SEQ ID NO: 6399 - protein, 14 aa, Artificial Sequence
  Quasi-synthetic sequence derived from human genome
WKKKALIIIWAKVL

SEQ ID NO: 6400 - protein, 14 aa, Artificial Sequence
  Quasi-synthetic sequence derived from human genome
RRHIVRKRTLRRLL

SEQ ID NO: 6401 - protein, 14 aa, Artificial Sequence
  Quasi-synthetic sequence derived from human genome
WKRARIFPMIFKKV

SEQ ID NO: 6402 - protein, 14 aa, Artificial Sequence
  Quasi-synthetic sequence derived from human genome
RKIILRCKRKLGLK

SEQ ID NO: 6403 - protein, 14 aa, Artificial Sequence
  Quasi-synthetic sequence derived from human genome
RRKLLWAIHHWKKI

SEQ ID NO: 6404 - protein, 14 aa, Artificial Sequence
  Quasi-synthetic sequence derived from human genome
KKLLKKVALFSKLL

SEQ ID NO: 6405 - protein, 14 aa, Artificial Sequence
  Quasi-synthetic sequence derived from human genome
LKKYLMKRRWKKNF

SEQ ID NO: 6406 - protein, 14 aa, Artificial Sequence
  Quasi-synthetic sequence derived from human genome
RKFWWKNVKMIVLI

SEQ ID NO: 6407 - protein, 14 aa, Artificial Sequence
  Quasi-synthetic sequence derived from human genome
MRKRICILVFLRFA

SEQ ID NO: 6408 - protein, 14 aa, Artificial Sequence
  Quasi-synthetic sequence derived from human genome
LRRHRLTRKLVVLI

SEQ ID NO: 6409 - protein, 14 aa, Artificial Sequence
  Quasi-synthetic sequence derived from human genome
LRRLLLRPRAPVRL

SEQ ID NO: 6410 - protein, 14 aa, Artificial Sequence
  Quasi-synthetic sequence derived from human genome
NILKISFKRKKFFI

SEQ ID NO: 6411 - protein, 14 aa, Artificial Sequence
  Quasi-synthetic sequence derived from human genome
WLRVRRGLLVLRLA

SEQ ID NO: 6412 - protein, 14 aa, Artificial Sequence
  Quasi-synthetic sequence derived from human genome
IRRIFAFICRKHRI

SEQ ID NO: 6413 - protein, 14 aa, Artificial Sequence
  Quasi-synthetic sequence derived from human genome
FIKLLRSKVSRFLR

SEQ ID NO: 6414 - protein, 14 aa, Artificial Sequence
  Quasi-synthetic sequence derived from human genome
HMILKPFMLRRIKK

SEQ ID NO: 6415 - protein, 14 aa, Artificial Sequence
  Quasi-synthetic sequence derived from human genome
LKKYFFLLNLKRAK

SEQ ID NO: 6416 - protein, 14 aa, Artificial Sequence
  Quasi-synthetic sequence derived from human genome
LKGYFLLRFLAKRL

SEQ ID NO: 6417 - protein, 14 aa, Artificial Sequence
  Quasi-synthetic sequence derived from human genome
RIRTWFWTKWVRMR

SEQ ID NO: 6418 - protein, 14 aa, Artificial Sequence
  Quasi-synthetic sequence derived from human genome
RRLRAIYTIMRWFR

SEQ ID NO: 6419 - protein, 14 aa, Artificial Sequence
  Quasi-synthetic sequence derived from human genome
VRLARIGRILRLVR

SEQ ID NO: 6420 - protein, 14 aa, Artificial Sequence
  Quasi-synthetic sequence derived from human genome
FRVIRLARIGRVLR

SEQ ID NO: 6421 - protein, 14 aa, Artificial Sequence
  Quasi-synthetic sequence derived from human genome
KFLLLFYLKKLTLF

SEQ ID NO: 6422 - protein, 14 aa, Artificial Sequence
  Quasi-synthetic sequence derived from human genome
IYVFMIRKFRRSLL

SEQ ID NO: 6423 - protein, 14 aa, Artificial Sequence
  Quasi-synthetic sequence derived from human genome
LVAILWKLGFFKRK

SEQ ID NO: 6424 - protein, 14 aa, Artificial Sequence
  Quasi-synthetic sequence derived from human genome
KKRVVRMLLVIVVL

SEQ ID NO: 6425 - protein, 14 aa, Artificial Sequence
  Quasi-synthetic sequence derived from human genome
LLTLVFWKLIRSRR

SEQ ID NO: 6426 - protein, 14 aa, Artificial Sequence
  Quasi-synthetic sequence derived from human genome
RRLRNIRRAVVRLL

SEQ ID NO: 6427 - protein, 14 aa, Artificial Sequence
  Quasi-synthetic sequence derived from human genome
IKKVLLLLWKVVMF

SEQ ID NO: 6428 - protein, 14 aa, Artificial Sequence
  Quasi-synthetic sequence derived from human genome
LRALLLWGRRLRPL

SEQ ID NO: 6429 - protein, 14 aa, Artificial Sequence
  Quasi-synthetic sequence derived from human genome
LLALKLRRWHKSRL

SEQ ID NO: 6430 - protein, 14 aa, Artificial Sequence
  Quasi-synthetic sequence derived from human genome
LFAYVLRRRRKKLP

SEQ ID NO: 6431 - protein, 14 aa, Artificial Sequence
  Quasi-synthetic sequence derived from human genome
FLRNRIRVAIILLK

SEQ ID NO: 6432 - protein, 14 aa, Artificial Sequence
  Quasi-synthetic sequence derived from human genome
ILRNKAKIKFIIKK

SEQ ID NO: 6433 - protein, 14 aa, Artificial Sequence
  Quasi-synthetic sequence derived from human genome
RFGMKNFKKRWFRL

SEQ ID NO: 6434 - protein, 14 aa, Artificial Sequence
  Quasi-synthetic sequence derived from human genome
WFQNRRMKKKRLLL

SEQ ID NO: 6435 - protein, 14 aa, Artificial Sequence
  Quasi-synthetic sequence derived from human genome
LWLLRLLFPRVLCR

SEQ ID NO: 6436 - protein, 14 aa, Artificial Sequence
  Quasi-synthetic sequence derived from human genome
LLVRYRHYFRLLVR

SEQ ID NO: 6437 - protein, 14 aa, Artificial Sequence
  Quasi-synthetic sequence derived from human genome
FLYKLAQLFRWIRK

SEQ ID NO: 6438 - protein, 14 aa, Artificial Sequence
  Quasi-synthetic sequence derived from human genome
IKVAIKKIMKRIFY

SEQ ID NO: 6439 - protein, 14 aa, Artificial Sequence
  Quasi-synthetic sequence derived from human genome
RRRRRACIALFLVL

SEQ ID NO: 6440 - protein, 14 aa, Artificial Sequence
  Quasi-synthetic sequence derived from human genome
LRRILIRYYIKSII

SEQ ID NO: 6441 - protein, 14 aa, Artificial Sequence
  Quasi-synthetic sequence derived from human genome
PRMVILRLLRYIVR

SEQ ID NO: 6442 - protein, 14 aa, Artificial Sequence
  Quasi-synthetic sequence derived from human genome
LKLFRPKKLLPKAF

SEQ ID NO: 6443 - protein, 14 aa, Artificial Sequence
  Quasi-synthetic sequence derived from human genome
FLKRFLRLRYGRQR

SEQ ID NO: 6444 - protein, 14 aa, Artificial Sequence
  Quasi-synthetic sequence derived from human genome
WLLRKKYLRMRKAA

SEQ ID NO: 6445 - protein, 14 aa, Artificial Sequence
  Quasi-synthetic sequence derived from human genome
RYFRRKPVRFFTFL

SEQ ID NO: 6446 - protein, 14 aa, Artificial Sequence
  Quasi-synthetic sequence derived from human genome
RRIPRLWRLLLWAG

SEQ ID NO: 6447 - protein, 14 aa, Artificial Sequence
  Quasi-synthetic sequence derived from human genome
LKRPIKQKRKLRIF

SEQ ID NO: 6448 - protein, 14 aa, Artificial Sequence
  Quasi-synthetic sequence derived from human genome
LRSLRFLQILRMIR

SEQ ID NO: 6449 - protein, 14 aa, Artificial Sequence
  Quasi-synthetic sequence derived from human genome
IRVIKKKKVIMKKR

SEQ ID NO: 6450 - protein, 14 aa, Artificial Sequence
  Quasi-synthetic sequence derived from human genome
RRRKRRFFGLCCLI

SEQ ID NO: 6451 - protein, 14 aa, Artificial Sequence
  Quasi-synthetic sequence derived from human genome
RRIFIQLMKRFGLK

SEQ ID NO: 6452 - protein, 14 aa, Artificial Sequence
  Quasi-synthetic sequence derived from human genome
SRRKYWFLNRRLII

SEQ ID NO: 6453 - protein, 14 aa, Artificial Sequence
  Quasi-synthetic sequence derived from human genome
RKLGIYRRCWLVFR

SEQ ID NO: 6454 - protein, 14 aa, Artificial Sequence
  Quasi-synthetic sequence derived from human genome
WKCYKARKFFLFYR

SEQ ID NO: 6455 - protein, 14 aa, Artificial Sequence
  Quasi-synthetic sequence derived from human genome
LRRFLRTVQLRVRL

SEQ ID NO: 6456 - protein, 14 aa, Artificial Sequence
  Quasi-synthetic sequence derived from human genome
LMALVLLQRKLWRR

SEQ ID NO: 6457 - protein, 14 aa, Artificial Sequence
  Quasi-synthetic sequence derived from human genome
RWRKLFSFTKYFLK

SEQ ID NO: 6458 - protein, 14 aa, Artificial Sequence
  Quasi-synthetic sequence derived from human genome
LLALRLWRWHKSRL

SEQ ID NO: 6459 - protein, 14 aa, Artificial Sequence
  Quasi-synthetic sequence derived from human genome
RWTHLLRLLRLIIL

SEQ ID NO: 6460 - protein, 14 aa, Artificial Sequence
  Quasi-synthetic sequence derived from human genome
RLPRRLLLLLALWV

SEQ ID NO: 6461 - protein, 14 aa, Artificial Sequence
  Quasi-synthetic sequence derived from human genome
FVKRVIMSRFFKII

SEQ ID NO: 6462 - protein, 14 aa, Artificial Sequence
  Quasi-synthetic sequence derived from human genome
VRFTKILSLLRLLR

SEQ ID NO: 6463 - protein, 14 aa, Artificial Sequence
  Quasi-synthetic sequence derived from human genome
FGKIFKPWKWRKKK

SEQ ID NO: 6464 - protein, 14 aa, Artificial Sequence
  Quasi-synthetic sequence derived from human genome
WKCFLRLRHFQLLR

SEQ ID NO: 6465 - protein, 14 aa, Artificial Sequence
  Quasi-synthetic sequence derived from human genome
RGILKYLKFHLKRI

SEQ ID NO: 6466 - protein, 14 aa, Artificial Sequence
  Quasi-synthetic sequence derived from human genome
FRLTLRAIKLWAKR

SEQ ID NO: 6467 - protein, 14 aa, Artificial Sequence
  Quasi-synthetic sequence derived from human genome
LRRVVWIFCRTRLI

SEQ ID NO: 6468 - protein, 14 aa, Artificial Sequence
  Quasi-synthetic sequence derived from human genome
ILLFFAVKYLLRWK

SEQ ID NO: 6469 - protein, 14 aa, Artificial Sequence
  Quasi-synthetic sequence derived from human genome
LFKPLVLRRQYLRR

SEQ ID NO: 6470 - protein, 14 aa, Artificial Sequence
  Quasi-synthetic sequence derived from human genome
RWLLRTKRLHWSRL

SEQ ID NO: 6471 - protein, 14 aa, Artificial Sequence
  Quasi-synthetic sequence derived from human genome
LILPLLFYLRKRNK

SEQ ID NO: 6472 - protein, 14 aa, Artificial Sequence
  Quasi-synthetic sequence derived from human genome
RKFFLRIGVVYKIW

SEQ ID NO: 6473 - protein, 14 aa, Artificial Sequence
  Quasi-synthetic sequence derived from human genome
LTKFKFVFFLRLSR

SEQ ID NO: 6474 - protein, 14 aa, Artificial Sequence
  Quasi-synthetic sequence derived from human genome
RVWFIKVRKMKAIY

SEQ ID NO: 6475 - protein, 14 aa, Artificial Sequence
  Quasi-synthetic sequence derived from human genome
FIMKLRKAHVIWKK

SEQ ID NO: 6476 - protein, 14 aa, Artificial Sequence
  Quasi-synthetic sequence derived from human genome
VLRLLRTLRPLRVI

SEQ ID NO: 6477 - protein, 14 aa, Artificial Sequence
  Quasi-synthetic sequence derived from human genome
WLRRKLRGKRRPVI

SEQ ID NO: 6478 - protein, 14 aa, Artificial Sequence
  Quasi-synthetic sequence derived from human genome
RLSRLIFLLRRWAA

SEQ ID NO: 6479 - protein, 14 aa, Artificial Sequence
  Quasi-synthetic sequence derived from human genome
LRVLCLLRPWRPLR

SEQ ID NO: 6480 - protein, 14 aa, Artificial Sequence
  Quasi-synthetic sequence derived from human genome
KLWRRNLWIFVSKF

SEQ ID NO: 6481 - protein, 14 aa, Artificial Sequence
  Quasi-synthetic sequence derived from human genome
IFLPPWLFSRRRRL

SEQ ID NO: 6482 - protein, 14 aa, Artificial Sequence
  Quasi-synthetic sequence derived from human genome
VMLFKKKKTRKLKI

SEQ ID NO: 6483 - protein, 14 aa, Artificial Sequence
  Quasi-synthetic sequence derived from human genome
KLKMLNIAKKILRI

SEQ ID NO: 6484 - protein, 14 aa, Artificial Sequence
  Quasi-synthetic sequence derived from human genome
RLIHRVRYRRGLWR

SEQ ID NO: 6485 - protein, 14 aa, Artificial Sequence
  Quasi-synthetic sequence derived from human genome
LRLRHLRRPRVARL

SEQ ID NO: 6486 - protein, 14 aa, Artificial Sequence
  Quasi-synthetic sequence derived from human genome
KIKTFLSLVWKRRI

SEQ ID NO: 6487 - protein, 14 aa, Artificial Sequence
  Quasi-synthetic sequence derived from human genome
LRVLRVLRPLKTIK

SEQ ID NO: 6488 - protein, 14 aa, Artificial Sequence
  Quasi-synthetic sequence derived from human genome
VLLGFARLIKRMRK

SEQ ID NO: 6489 - protein, 14 aa, Artificial Sequence
  Quasi-synthetic sequence derived from human genome
RGVMILKLPFLKRR

SEQ ID NO: 6490 - protein, 14 aa, Artificial Sequence
  Quasi-synthetic sequence derived from human genome
RPPLLLRPVKLLRR

SEQ ID NO: 6491 - protein, 14 aa, Artificial Sequence
  Quasi-synthetic sequence derived from human genome
LLLLIGLALWFRKR

SEQ ID NO: 6492 - protein, 14 aa, Artificial Sequence
  Quasi-synthetic sequence derived from human genome
RKKMVRRVVCILVW

SEQ ID NO: 6493 - protein, 14 aa, Artificial Sequence
  Quasi-synthetic sequence derived from human genome
VIVLVALLLLWRRR

SEQ ID NO: 6494 - protein, 14 aa, Artificial Sequence
  Quasi-synthetic sequence derived from human genome
LFLFSRMLLVAKRR

SEQ ID NO: 6495 - protein, 14 aa, Artificial Sequence
  Quasi-synthetic sequence derived from human genome
LRRLLRPLQMLLVK

SEQ ID NO: 6496 - protein, 14 aa, Artificial Sequence
  Quasi-synthetic sequence derived from human genome
RKVFLRLLPQLLRM

SEQ ID NO: 6497 - protein, 14 aa, Artificial Sequence
  Quasi-synthetic sequence derived from human genome
FFMGRLPLLRRVLK

SEQ ID NO: 6498 - protein, 14 aa, Artificial Sequence
  Quasi-synthetic sequence derived from human genome
LRKKLKCKSFKWYL

SEQ ID NO: 6499 - protein, 14 aa, Artificial Sequence
  Quasi-synthetic sequence derived from human genome
KLAKRLKPLKVRRI

SEQ ID NO: 6500 - protein, 14 aa, Artificial Sequence
  Quasi-synthetic sequence derived from human genome
KKFRMMKIPKPILF

SEQ ID NO: 6501 - protein, 14 aa, Artificial Sequence
  Quasi-synthetic sequence derived from human genome
KLLKLRRNIVKLSL

SEQ ID NO: 6502 - protein, 14 aa, Artificial Sequence
  Quasi-synthetic sequence derived from human genome
RLKAFLLQALRWRL

SEQ ID NO: 6503 - protein, 14 aa, Artificial Sequence
  Quasi-synthetic sequence derived from human genome
FKALLWKNWLCRLR

SEQ ID NO: 6504 - protein, 14 aa, Artificial Sequence
  Quasi-synthetic sequence derived from human genome
MKLLRRAWRRRAAL

SEQ ID NO: 6505 - protein, 14 aa, Artificial Sequence
  Quasi-synthetic sequence derived from human genome
LQRALRSRFRLRLL

SEQ ID NO: 6506 - protein, 14 aa, Artificial Sequence
  Quasi-synthetic sequence derived from human genome
LILVLMFVVWMKRR

SEQ ID NO: 6507 - protein, 14 aa, Artificial Sequence
  Quasi-synthetic sequence derived from human genome
FIIFWVRSKRSRLL

SEQ ID NO: 6508 - protein, 14 aa, Artificial Sequence
  Quasi-synthetic sequence derived from human genome
VVGLLRLAIRLLRR

SEQ ID NO: 6509 - protein, 14 aa, Artificial Sequence
  Quasi-synthetic sequence derived from human genome
RIVVSRGRLRRLLW

SEQ ID NO: 6510 - protein, 14 aa, Artificial Sequence
  Quasi-synthetic sequence derived from human genome
LWIRWKCRRLRIRE

SEQ ID NO: 6511 - protein, 14 aa, Artificial Sequence
  Quasi-synthetic sequence derived from human genome
LKWWIGYLQRKFKR

SEQ ID NO: 6512 - protein, 14 aa, Artificial Sequence
  Quasi-synthetic sequence derived from human genome
LPRFKLKCIFCKKR

SEQ ID NO: 6513 - protein, 14 aa, Artificial Sequence
  Quasi-synthetic sequence derived from human genome
RPLIMIRAFRIYFR

SEQ ID NO: 6514 - protein, 14 aa, Artificial Sequence
  Quasi-synthetic sequence derived from human genome
YWRMYVVRRRYKIR

SEQ ID NO: 6515 - protein, 14 aa, Artificial Sequence
  Quasi-synthetic sequence derived from human genome
MRRAFHIRLIARRL

SEQ ID NO: 6516 - protein, 14 aa, Artificial Sequence
  Quasi-synthetic sequence derived from human genome
KRLLRMGMRLQLLR

SEQ ID NO: 6517 - protein, 14 aa, Artificial Sequence
  Quasi-synthetic sequence derived from human genome
LRKRFGGRRIRLYL

SEQ ID NO: 6518 - protein, 14 aa, Artificial Sequence
  Quasi-synthetic sequence derived from human genome
RFRPRWKVILTFFV

SEQ ID NO: 6519 - protein, 14 aa, Artificial Sequence
  Quasi-synthetic sequence derived from human genome
RMFRWLVLRINKAL

SEQ ID NO: 6520 - protein, 14 aa, Artificial Sequence
  Quasi-synthetic sequence derived from human genome
LLYRLLLLKGLGRR

SEQ ID NO: 6521 - protein, 14 aa, Artificial Sequence
  Quasi-synthetic sequence derived from human genome
FLALCALRFKRKII

SEQ ID NO: 6522 - protein, 14 aa, Artificial Sequence
  Quasi-synthetic sequence derived from human genome
FVLIYVRVFRKSRR

SEQ ID NO: 6523 - protein, 14 aa, Artificial Sequence
  Quasi-synthetic sequence derived from human genome
ILAIRRAKNLRRLL

SEQ ID NO: 6524 - protein, 14 aa, Artificial Sequence
  Quasi-synthetic sequence derived from human genome
PRFILRVRRSRLVK

SEQ ID NO: 6525 - protein, 14 aa, Artificial Sequence
  Quasi-synthetic sequence derived from human genome
RRRRAMRAFRMLLY

SEQ ID NO: 6526 - protein, 14 aa, Artificial Sequence
  Quasi-synthetic sequence derived from human genome
LRIVRFTKILSLLR

SEQ ID NO: 6527 - protein, 14 aa, Artificial Sequence
  Quasi-synthetic sequence derived from human genome
RLPIRLLRGLLARL

SEQ ID NO: 6528 - protein, 14 aa, Artificial Sequence
  Quasi-synthetic sequence derived from human genome
FICRKPSLWRRLLL

SEQ ID NO: 6529 - protein, 14 aa, Artificial Sequence
  Quasi-synthetic sequence derived from human genome
IIWKLLTLRPLFLR

SEQ ID NO: 6530 - protein, 14 aa, Artificial Sequence
  Quasi-synthetic sequence derived from human genome
WRRMPRWGLLLLLW

SEQ ID NO: 6531 - protein, 14 aa, Artificial Sequence
  Quasi-synthetic sequence derived from human genome
RSKIRRVLWLVVVL

SEQ ID NO: 6532 - protein, 14 aa, Artificial Sequence
  Quasi-synthetic sequence derived from human genome
FQLWFHFKRYRYRR

SEQ ID NO: 6533 - protein, 14 aa, Artificial Sequence
  Quasi-synthetic sequence derived from human genome
VLRMAKKRVIVKKL

SEQ ID NO: 6534 - protein, 14 aa, Artificial Sequence
  Quasi-synthetic sequence derived from human genome
IFRFVRTLFKAMRL

SEQ ID NO: 6535 - protein, 14 aa, Artificial Sequence
  Quasi-synthetic sequence derived from human genome
RVMRNLFVRKLYLW

SEQ ID NO: 6536 - protein, 14 aa, Artificial Sequence
  Quasi-synthetic sequence derived from human genome
KIILLKPIIKVLPK

SEQ ID NO: 6537 - protein, 14 aa, Artificial Sequence
  Quasi-synthetic sequence derived from human genome
LWRLFRKKNHFLMV

SEQ ID NO: 6538 - protein, 14 aa, Artificial Sequence
  Quasi-synthetic sequence derived from human genome
FRRALKYILLGKIF

SEQ ID NO: 6539 - protein, 14 aa, Artificial Sequence
  Quasi-synthetic sequence derived from human genome
FRVFHLSLWRLMKK

SEQ ID NO: 6540 - protein, 14 aa, Artificial Sequence
  Quasi-synthetic sequence derived from human genome
KVLYKGVLKRLILL

SEQ ID NO: 6541 - protein, 14 aa, Artificial Sequence
  Quasi-synthetic sequence derived from human genome
KKKKCIFRLRIRVP

SEQ ID NO: 6542 - protein, 14 aa, Artificial Sequence
  Quasi-synthetic sequence derived from human genome
VLLLFLLLFLLLRR

SEQ ID NO: 6543 - protein, 14 aa, Artificial Sequence
  Quasi-synthetic sequence derived from human genome
WRKRCLYFFVLLLM

SEQ ID NO: 6544 - protein, 14 aa, Artificial Sequence
  Quasi-synthetic sequence derived from human genome
IKKKKHLFGLRIRV

SEQ ID NO: 6545 - protein, 14 aa, Artificial Sequence
  Quasi-synthetic sequence derived from human genome
LVILACVLWKKRIK

SEQ ID NO: 6546 - protein, 14 aa, Artificial Sequence
  Quasi-synthetic sequence derived from human genome
LQALLLKRFLLARR

SEQ ID NO: 6547 - protein, 14 aa, Artificial Sequence
  Quasi-synthetic sequence derived from human genome
IKIWLSLRSYLKRR

SEQ ID NO: 6548 - protein, 14 aa, Artificial Sequence
  Quasi-synthetic sequence derived from human genome
LRPFVQKRIYFRLR

SEQ ID NO: 6549 - protein, 14 aa, Artificial Sequence
  Quasi-synthetic sequence derived from human genome
FHRHKQLIRFLKRL

SEQ ID NO: 6550 - protein, 14 aa, Artificial Sequence
  Quasi-synthetic sequence derived from human genome
RLWKWLKSPRSWRL

SEQ ID NO: 6551 - protein, 14 aa, Artificial Sequence
  Quasi-synthetic sequence derived from human genome
LLLRLVCLKPPRRK

SEQ ID NO: 6552 - protein, 14 aa, Artificial Sequence
  Quasi-synthetic sequence derived from human genome
KRLRPRLSAILFKL

SEQ ID NO: 6553 - protein, 14 aa, Artificial Sequence
  Quasi-synthetic sequence derived from human genome
KLSLIRKFRLFPRP

SEQ ID NO: 6554 - protein, 14 aa, Artificial Sequence
  Quasi-synthetic sequence derived from human genome
RWWLRRYQQVRRRW

SEQ ID NO: 6555 - protein, 14 aa, Artificial Sequence
  Quasi-synthetic sequence derived from human genome
LVLRRLRTIIRKKQ

SEQ ID NO: 6556 - protein, 14 aa, Artificial Sequence
  Quasi-synthetic sequence derived from human genome
SWIWWRMLRQVLRR

SEQ ID NO: 6557 - protein, 14 aa, Artificial Sequence
  Quasi-synthetic sequence derived from human genome
LICYLKIVICLRRR

SEQ ID NO: 6558 - protein, 14 aa, Artificial Sequence
  Quasi-synthetic sequence derived from human genome
RFKVKKIWDLWRIL

SEQ ID NO: 6559 - protein, 14 aa, Artificial Sequence
  Quasi-synthetic sequence derived from human genome
LFKRRVVRRLASLK

SEQ ID NO: 6560 - protein, 14 aa, Artificial Sequence
  Quasi-synthetic sequence derived from human genome
LLIPYILTLRKKWK

SEQ ID NO: 6561 - protein, 14 aa, Artificial Sequence
  Quasi-synthetic sequence derived from human genome
LFKKKKTRKLKIAL

SEQ ID NO: 6562 - protein, 14 aa, Artificial Sequence
  Quasi-synthetic sequence derived from human genome
FLIWRCFLRNKTRR

SEQ ID NO: 6563 - protein, 14 aa, Artificial Sequence
  Quasi-synthetic sequence derived from human genome
RLLWLRGRGRLRYV

SEQ ID NO: 6564 - protein, 14 aa, Artificial Sequence
  Quasi-synthetic sequence derived from human genome
LLGLRLRRWHKSRL

SEQ ID NO: 6565 - protein, 14 aa, Artificial Sequence
  Quasi-synthetic sequence derived from human genome
RKKAVLIMYKVFLK

SEQ ID NO: 6566 - protein, 14 aa, Artificial Sequence
  Quasi-synthetic sequence derived from human genome
IILKIVHRRIINRF

SEQ ID NO: 6567 - protein, 14 aa, Artificial Sequence
  Quasi-synthetic sequence derived from human genome
FVRRQVRKLLLFIC

SEQ ID NO: 6568 - protein, 14 aa, Artificial Sequence
  Quasi-synthetic sequence derived from human genome
KVLIRLLKDLRIRF

SEQ ID NO: 6569 - protein, 14 aa, Artificial Sequence
  Quasi-synthetic sequence derived from human genome
IHFWLPVLKMIRKK

SEQ ID NO: 6570 - protein, 14 aa, Artificial Sequence
  Quasi-synthetic sequence derived from human genome
LRKLLRVLTLMKFP

SEQ ID NO: 6571 - protein, 14 aa, Artificial Sequence
  Quasi-synthetic sequence derived from human genome
GLWKIARKWMRRKM

SEQ ID NO: 6572 - protein, 14 aa, Artificial Sequence
  Quasi-synthetic sequence derived from human genome
GLRRGLRRLRRLWA

SEQ ID NO: 6573 - protein, 14 aa, Artificial Sequence
  Quasi-synthetic sequence derived from human genome
LIARRKKIMKLCMK

SEQ ID NO: 6574 - protein, 14 aa, Artificial Sequence
  Quasi-synthetic sequence derived from human genome
RIIKVNNRILRLKF

SEQ ID NO: 6575 - protein, 14 aa, Artificial Sequence
  Quasi-synthetic sequence derived from human genome
IGKIFKPWKWRKKK

SEQ ID NO: 6576 - protein, 14 aa, Artificial Sequence
  Quasi-synthetic sequence derived from human genome
FKTLKKRAWAIFLR

SEQ ID NO: 6577 - protein, 14 aa, Artificial Sequence
  Quasi-synthetic sequence derived from human genome
FLRLLRCQCRRRRR

SEQ ID NO: 6578 - protein, 14 aa, Artificial Sequence
  Quasi-synthetic sequence derived from human genome
RTRALLRRFPRMLL

SEQ ID NO: 6579 - protein, 14 aa, Artificial Sequence
  Quasi-synthetic sequence derived from human genome
WIKNRVLKKWKTRL

SEQ ID NO: 6580 - protein, 14 aa, Artificial Sequence
  Quasi-synthetic sequence derived from human genome
VVKRGRKKLLYIFK

SEQ ID NO: 6581 - protein, 14 aa, Artificial Sequence
  Quasi-synthetic sequence derived from human genome
MRRRLWLGLAWLLL

SEQ ID NO: 6582 - protein, 14 aa, Artificial Sequence
  Quasi-synthetic sequence derived from human genome
KRWFAFKMMMAKKW

SEQ ID NO: 6583 - protein, 14 aa, Artificial Sequence
  Quasi-synthetic sequence derived from human genome
KLKVVKHLIRIKPL

SEQ ID NO: 6584 - protein, 14 aa, Artificial Sequence
  Quasi-synthetic sequence derived from human genome
LFKSLLGKKKMRIL

SEQ ID NO: 6585 - protein, 14 aa, Artificial Sequence
  Quasi-synthetic sequence derived from human genome
LKRKILIKNKRLKP

SEQ ID NO: 6586 - protein, 14 aa, Artificial Sequence
  Quasi-synthetic sequence derived from human genome
FRIQKFRVTFLKIW

SEQ ID NO: 6587 - protein, 14 aa, Artificial Sequence
  Quasi-synthetic sequence derived from human genome
WILWRLLRKLQKCH

SEQ ID NO: 6588 - protein, 14 aa, Artificial Sequence
  Quasi-synthetic sequence derived from human genome
FLRRFPRPLLRLVA

SEQ ID NO: 6589 - protein, 14 aa, Artificial Sequence
  Quasi-synthetic sequence derived from human genome
RLKMRKNSWLKIII

SEQ ID NO: 6590 - protein, 14 aa, Artificial Sequence
  Quasi-synthetic sequence derived from human genome
NRYKPLRRRVIWLI

SEQ ID NO: 6591 - protein, 14 aa, Artificial Sequence
  Quasi-synthetic sequence derived from human genome
KRLKRTLIRKVFNL

SEQ ID NO: 6592 - protein, 14 aa, Artificial Sequence
  Quasi-synthetic sequence derived from human genome
RFRKYLRQLFHRRV

SEQ ID NO: 6593 - protein, 14 aa, Artificial Sequence
  Quasi-synthetic sequence derived from human genome
LFRKLTHRLFRRNF

SEQ ID NO: 6594 - protein, 14 aa, Artificial Sequence
  Quasi-synthetic sequence derived from human genome
RLASHLRKLRKRLL

SEQ ID NO: 6595 - protein, 14 aa, Artificial Sequence
  Quasi-synthetic sequence derived from human genome
LILLVKIKLKQRRS

SEQ ID NO: 6596 - protein, 14 aa, Artificial Sequence
  Quasi-synthetic sequence derived from human genome
ILQFRRWARKWSRF

SEQ ID NO: 6597 - protein, 14 aa, Artificial Sequence
  Quasi-synthetic sequence derived from human genome
WIARLRHIKRLRQR

SEQ ID NO: 6598 - protein, 14 aa, Artificial Sequence
  Quasi-synthetic sequence derived from human genome
ALRARIRARRLRVL

SEQ ID NO: 6599 - protein, 14 aa, Artificial Sequence
  Quasi-synthetic sequence derived from human genome
KAFKLLKKLMRLNM

SEQ ID NO: 6600 - protein, 14 aa, Artificial Sequence
  Quasi-synthetic sequence derived from human genome
RRLLLRYLFPALLL

SEQ ID NO: 6601 - protein, 14 aa, Artificial Sequence
  Quasi-synthetic sequence derived from human genome
YLKRFKVMKPKVLR

SEQ ID NO: 6602 - protein, 14 aa, Artificial Sequence
  Quasi-synthetic sequence derived from human genome
RLRRRYLDWRKRRL

SEQ ID NO: 6603 - protein, 14 aa, Artificial Sequence
  Quasi-synthetic sequence derived from human genome
LRIKRRVKSVVLVI

SEQ ID NO: 6604 - protein, 14 aa, Artificial Sequence
  Quasi-synthetic sequence derived from human genome
LFVYLVIRALRLWR

SEQ ID NO: 6605 - protein, 14 aa, Artificial Sequence
  Quasi-synthetic sequence derived from human genome
IFPAWYWRRRPKRL

SEQ ID NO: 6606 - protein, 14 aa, Artificial Sequence
  Quasi-synthetic sequence derived from human genome
KLKGIHIMKKLKIL

SEQ ID NO: 6607 - protein, 14 aa, Artificial Sequence
  Quasi-synthetic sequence derived from human genome
LLAVYFIARKIRKK

SEQ ID NO: 6608 - protein, 14 aa, Artificial Sequence
  Quasi-synthetic sequence derived from human genome
RRRTTRRWKRWFKF

SEQ ID NO: 6609 - protein, 14 aa, Artificial Sequence
  Quasi-synthetic sequence derived from human genome
LGMLRVLRLLRTLR

SEQ ID NO: 6610 - protein, 14 aa, Artificial Sequence
  Quasi-synthetic sequence derived from human genome
LLLLASLIKIRRLF

SEQ ID NO: 6611 - protein, 14 aa, Artificial Sequence
  Quasi-synthetic sequence derived from human genome
LIILLLWKCGFFKR

SEQ ID NO: 6612 - protein, 14 aa, Artificial Sequence
  Quasi-synthetic sequence derived from human genome
PWLRIARRALRFVL

SEQ ID NO: 6613 - protein, 14 aa, Artificial Sequence
  Quasi-synthetic sequence derived from human genome
KIKLCILLHAFRIR

SEQ ID NO: 6614 - protein, 14 aa, Artificial Sequence
  Quasi-synthetic sequence derived from human genome
RLPKLRKRMRKMCL

SEQ ID NO: 6615 - protein, 14 aa, Artificial Sequence
  Quasi-synthetic sequence derived from human genome
RLPKRLRVVYFLAR

SEQ ID NO: 6616 - protein, 14 aa, Artificial Sequence
  Quasi-synthetic sequence derived from human genome
AKILGVLRVLRLLR

SEQ ID NO: 6617 - protein, 14 aa, Artificial Sequence
  Quasi-synthetic sequence derived from human genome
YKMLMAKKWVKFKR

SEQ ID NO: 6618 - protein, 14 aa, Artificial Sequence
  Quasi-synthetic sequence derived from human genome
SWMKLFFKMKPLLR

SEQ ID NO: 6619 - protein, 14 aa, Artificial Sequence
  Quasi-synthetic sequence derived from human genome
LYILTHKRILKFLK

SEQ ID NO: 6620 - protein, 14 aa, Artificial Sequence
  Quasi-synthetic sequence derived from human genome
RRVFGRIRRFFSRR

SEQ ID NO: 6621 - protein, 14 aa, Artificial Sequence
  Quasi-synthetic sequence derived from human genome
FLRGWLCRRKWKTI

SEQ ID NO: 6622 - protein, 14 aa, Artificial Sequence
  Quasi-synthetic sequence derived from human genome
ILKRLILNFRKGYR

SEQ ID NO: 6623 - protein, 14 aa, Artificial Sequence
  Quasi-synthetic sequence derived from human genome
LVFRILKKCYRGRF

SEQ ID NO: 6624 - protein, 14 aa, Artificial Sequence
  Quasi-synthetic sequence derived from human genome
FFFWLKLKINKVML

SEQ ID NO: 6625 - protein, 14 aa, Artificial Sequence
  Quasi-synthetic sequence derived from human genome
RVSKKNIFLLFKKL

SEQ ID NO: 6626 - protein, 14 aa, Artificial Sequence
  Quasi-synthetic sequence derived from human genome
LRLKRPILRRISHI

SEQ ID NO: 6627 - protein, 14 aa, Artificial Sequence
  Quasi-synthetic sequence derived from human genome
IRHWRQWNRIFRWK

SEQ ID NO: 6628 - protein, 14 aa, Artificial Sequence
  Quasi-synthetic sequence derived from human genome
RLKLARAIYRKYIL

SEQ ID NO: 6629 - protein, 14 aa, Artificial Sequence
  Quasi-synthetic sequence derived from human genome
HRRKNWKVRKFILR

SEQ ID NO: 6630 - protein, 14 aa, Artificial Sequence
  Quasi-synthetic sequence derived from human genome
YYRLLWFKVKKMPL

SEQ ID NO: 6631 - protein, 14 aa, Artificial Sequence
  Quasi-synthetic sequence derived from human genome
RKKLRLYQFLLGLL

SEQ ID NO: 6632 - protein, 14 aa, Artificial Sequence
  Quasi-synthetic sequence derived from human genome
FFKRSVRRRLIYRC

SEQ ID NO: 6633 - protein, 14 aa, Artificial Sequence
  Quasi-synthetic sequence derived from human genome
KVILHKKRYIYRKI

SEQ ID NO: 6634 - protein, 14 aa, Artificial Sequence
  Quasi-synthetic sequence derived from human genome
LIGLIIFCCRKKRR

SEQ ID NO: 6635 - protein, 14 aa, Artificial Sequence
  Quasi-synthetic sequence derived from human genome
SRRFRSVKLWFVIR

SEQ ID NO: 6636 - protein, 14 aa, Artificial Sequence
  Quasi-synthetic sequence derived from human genome
KARRKLMFIIICVI

SEQ ID NO: 6637 - protein, 14 aa, Artificial Sequence
  Quasi-synthetic sequence derived from human genome
LLLHKHRSILLRRL

SEQ ID NO: 6638 - protein, 14 aa, Artificial Sequence
  Quasi-synthetic sequence derived from human genome
VLKLVAFGLRRFFK

SEQ ID NO: 6639 - protein, 14 aa, Artificial Sequence
  Quasi-synthetic sequence derived from human genome
QKIMKRLIKRYVLK

SEQ ID NO: 6640 - protein, 14 aa, Artificial Sequence
  Quasi-synthetic sequence derived from human genome
GLLRSFFRRRRPRL

SEQ ID NO: 6641 - protein, 14 aa, Artificial Sequence
  Quasi-synthetic sequence derived from human genome
FRLLVRTVLLRSLR

SEQ ID NO: 6642 - protein, 14 aa, Artificial Sequence
  Quasi-synthetic sequence derived from human genome
RIISWVFFWRQKIK

SEQ ID NO: 6643 - protein, 14 aa, Artificial Sequence
  Quasi-synthetic sequence derived from human genome
LFRTPRLRKRTFIL

SEQ ID NO: 6644 - protein, 14 aa, Artificial Sequence
  Quasi-synthetic sequence derived from human genome
FLAFLLLFLYRRCK

SEQ ID NO: 6645 - protein, 14 aa, Artificial Sequence
  Quasi-synthetic sequence derived from human genome
FIYLIMLRRFKHKA

SEQ ID NO: 6646 - protein, 14 aa, Artificial Sequence
  Quasi-synthetic sequence derived from human genome
RSWLGLRFLRALRL

SEQ ID NO: 6647 - protein, 14 aa, Artificial Sequence
  Quasi-synthetic sequence derived from human genome
LLKIKKTFCLCKRL

SEQ ID NO: 6648 - protein, 14 aa, Artificial Sequence
  Quasi-synthetic sequence derived from human genome
ISVLRCVRLLRIFK

SEQ ID NO: 6649 - protein, 14 aa, Artificial Sequence
  Quasi-synthetic sequence derived from human genome
MVRRFLVTLRIRRA

SEQ ID NO: 6650 - protein, 14 aa, Artificial Sequence
  Quasi-synthetic sequence derived from human genome
RRSLLQLLCLRLLR

SEQ ID NO: 6651 - protein, 14 aa, Artificial Sequence
  Quasi-synthetic sequence derived from human genome
RKRMISLRFLAWYF

SEQ ID NO: 6652 - protein, 14 aa, Artificial Sequence
  Quasi-synthetic sequence derived from human genome
GFSIWLYWRRKKRK

SEQ ID NO: 6653 - protein, 14 aa, Artificial Sequence
  Quasi-synthetic sequence derived from human genome
RTWWRWLTFWRRLQ

SEQ ID NO: 6654 - protein, 14 aa, Artificial Sequence
  Quasi-synthetic sequence derived from human genome
RLLLKWRGSIYKLL

SEQ ID NO: 6655 - protein, 14 aa, Artificial Sequence
  Quasi-synthetic sequence derived from human genome
LLRFQLLMKLKSIK

SEQ ID NO: 6656 - protein, 14 aa, Artificial Sequence
  Quasi-synthetic sequence derived from human genome
FRRLIFTRKGVLRV

SEQ ID NO: 6657 - protein, 14 aa, Artificial Sequence
  Quasi-synthetic sequence derived from human genome
RVRRFDLLKRILKM

SEQ ID NO: 6658 - protein, 14 aa, Artificial Sequence
  Quasi-synthetic sequence derived from human genome
KLALRFHGRLLFLK

SEQ ID NO: 6659 - protein, 14 aa, Artificial Sequence
  Quasi-synthetic sequence derived from human genome
LPKPFFRLLNLRKL

SEQ ID NO: 6660 - protein, 14 aa, Artificial Sequence
  Quasi-synthetic sequence derived from human genome
RSRIPLLRKRWFQL

SEQ ID NO: 6661 - protein, 14 aa, Artificial Sequence
  Quasi-synthetic sequence derived from human genome
WLVYLYYQRRRRKL

SEQ ID NO: 6662 - protein, 14 aa, Artificial Sequence
  Quasi-synthetic sequence derived from human genome
RFLRLHCGLWVRRK

SEQ ID NO: 6663 - protein, 14 aa, Artificial Sequence
  Quasi-synthetic sequence derived from human genome
LKRRVKSVILVMLL

SEQ ID NO: 6664 - protein, 14 aa, Artificial Sequence
  Quasi-synthetic sequence derived from human genome
WRRYWRTLVLLLLV

SEQ ID NO: 6665 - protein, 14 aa, Artificial Sequence
  Quasi-synthetic sequence derived from human genome
VRIIRKFIKGFISR

SEQ ID NO: 6666 - protein, 14 aa, Artificial Sequence
  Quasi-synthetic sequence derived from human genome
IIKKIWKRTSMKLL

SEQ ID NO: 6667 - protein, 14 aa, Artificial Sequence
  Quasi-synthetic sequence derived from human genome
LQRCLRGFFIKRRF

SEQ ID NO: 6668 - protein, 14 aa, Artificial Sequence
  Quasi-synthetic sequence derived from human genome
RKCSRFNFLRFLIR

SEQ ID NO: 6669 - protein, 14 aa, Artificial Sequence
  Quasi-synthetic sequence derived from human genome
LTIKPLVKWLKVKR

SEQ ID NO: 6670 - protein, 14 aa, Artificial Sequence
  Quasi-synthetic sequence derived from human genome
LARISLVKKLMKKW

SEQ ID NO: 6671 - protein, 14 aa, Artificial Sequence
  Quasi-synthetic sequence derived from human genome
RWFLSPRWILQFRR

SEQ ID NO: 6672 - protein, 14 aa, Artificial Sequence
  Quasi-synthetic sequence derived from human genome
IKRRPLFRSCFILL

SEQ ID NO: 6673 - protein, 14 aa, Artificial Sequence
  Quasi-synthetic sequence derived from human genome
LLTRLLPLRRLFVL

SEQ ID NO: 6674 - protein, 14 aa, Artificial Sequence
  Quasi-synthetic sequence derived from human genome
RWLRGILLFLFTLK

SEQ ID NO: 6675 - protein, 14 aa, Artificial Sequence
  Quasi-synthetic sequence derived from human genome
KIKVWNYKLRRCLF

SEQ ID NO: 6676 - protein, 14 aa, Artificial Sequence
  Quasi-synthetic sequence derived from human genome
KRRRLLSIIVVLVV

SEQ ID NO: 6677 - protein, 14 aa, Artificial Sequence
  Quasi-synthetic sequence derived from human genome
WNFLKRHKKKCIFL

SEQ ID NO: 6678 - protein, 14 aa, Artificial Sequence
  Quasi-synthetic sequence derived from human genome
MLLPKKMKLLLFLV

SEQ ID NO: 6679 - protein, 14 aa, Artificial Sequence
  Quasi-synthetic sequence derived from human genome
RCLSLLYLRMFKLK

SEQ ID NO: 6680 - protein, 14 aa, Artificial Sequence
  Quasi-synthetic sequence derived from human genome
FIFIAALVRYKKLR

SEQ ID NO: 6681 - protein, 14 aa, Artificial Sequence
  Quasi-synthetic sequence derived from human genome
WPFRRLPLRPLIKM

SEQ ID NO: 6682 - protein, 14 aa, Artificial Sequence
  Quasi-synthetic sequence derived from human genome
IRIMKFHVAKRKFK

SEQ ID NO: 6683 - protein, 14 aa, Artificial Sequence
  Quasi-synthetic sequence derived from human genome
WLLRKSSLLKKYLL

SEQ ID NO: 6684 - protein, 14 aa, Artificial Sequence
  Quasi-synthetic sequence derived from human genome
MKMRRYKLFLMFCM

SEQ ID NO: 6685 - protein, 14 aa, Artificial Sequence
  Quasi-synthetic sequence derived from human genome
RGLWRLFRKKNHFL

SEQ ID NO: 6686 - protein, 14 aa, Artificial Sequence
  Quasi-synthetic sequence derived from human genome
LIVLSMLLLRRKKP

SEQ ID NO: 6687 - protein, 14 aa, Artificial Sequence
  Quasi-synthetic sequence derived from human genome
IKIWFQNRRMKWKK

SEQ ID NO: 6688 - protein, 14 aa, Artificial Sequence
  Quasi-synthetic sequence derived from human genome
RVRKRWLPKIKSML

SEQ ID NO: 6689 - protein, 14 aa, Artificial Sequence
  Quasi-synthetic sequence derived from human genome
FLRRRCFLLTFYLW

SEQ ID NO: 6690 - protein, 14 aa, Artificial Sequence
  Quasi-synthetic sequence derived from human genome
RFRWRRRLLVISAP

SEQ ID NO: 6691 - protein, 14 aa, Artificial Sequence
  Quasi-synthetic sequence derived from human genome
FKRRRSIINWAFWR

SEQ ID NO: 6692 - protein, 14 aa, Artificial Sequence
  Quasi-synthetic sequence derived from human genome
RRRSRMLLCFAFLW

SEQ ID NO: 6693 - protein, 14 aa, Artificial Sequence
  Quasi-synthetic sequence derived from human genome
LPLLLLGGWKRWRR

SEQ ID NO: 6694 - protein, 14 aa, Artificial Sequence
  Quasi-synthetic sequence derived from human genome
RWRFKKAPLLLHYR

SEQ ID NO: 6695 - protein, 14 aa, Artificial Sequence
  Quasi-synthetic sequence derived from human genome
FLIRAFRLKKPQRR

SEQ ID NO: 6696 - protein, 14 aa, Artificial Sequence
  Quasi-synthetic sequence derived from human genome
VRRRKKLPSVLLFK

SEQ ID NO: 6697 - protein, 14 aa, Artificial Sequence
  Quasi-synthetic sequence derived from human genome
MWIKLRSLLRYMVK

SEQ ID NO: 6698 - protein, 14 aa, Artificial Sequence
  Quasi-synthetic sequence derived from human genome
CVRLALIRFRVKVF

SEQ ID NO: 6699 - protein, 14 aa, Artificial Sequence
  Quasi-synthetic sequence derived from human genome
LKRRVKSVVLVILL

SEQ ID NO: 6700 - protein, 14 aa, Artificial Sequence
  Quasi-synthetic sequence derived from human genome
FRLQRALRFLLGRL

SEQ ID NO: 6701 - protein, 14 aa, Artificial Sequence
  Quasi-synthetic sequence derived from human genome
WKTWIFWKTWIFWK

SEQ ID NO: 6702 - protein, 14 aa, Artificial Sequence
  Quasi-synthetic sequence derived from human genome
RSPRVRLLLLLLLL

SEQ ID NO: 6703 - protein, 14 aa, Artificial Sequence
  Quasi-synthetic sequence derived from human genome
RMRILRRLLRRYRE

SEQ ID NO: 6704 - protein, 14 aa, Artificial Sequence
  Quasi-synthetic sequence derived from human genome
LFICIIRILLQKLR

SEQ ID NO: 6705 - protein, 14 aa, Artificial Sequence
  Quasi-synthetic sequence derived from human genome
YCKFLWRCLKFVMR

SEQ ID NO: 6706 - protein, 14 aa, Artificial Sequence
  Quasi-synthetic sequence derived from human genome
ILIFCILLYFYKRK

SEQ ID NO: 6707 - protein, 14 aa, Artificial Sequence
  Quasi-synthetic sequence derived from human genome
RRRMKCCRAWWILM

SEQ ID NO: 6708 - protein, 14 aa, Artificial Sequence
  Quasi-synthetic sequence derived from human genome
LLKRFIRKLPTPLL

SEQ ID NO: 6709 - protein, 14 aa, Artificial Sequence
  Quasi-synthetic sequence derived from human genome
LKLRHWQWWRLFTK

SEQ ID NO: 6710 - protein, 14 aa, Artificial Sequence
  Quasi-synthetic sequence derived from human genome
LLILILLIKKLIIF

SEQ ID NO: 6711 - protein, 14 aa, Artificial Sequence
  Quasi-synthetic sequence derived from human genome
WWARAARLARLRFR

SEQ ID NO: 6712 - protein, 14 aa, Artificial Sequence
  Quasi-synthetic sequence derived from human genome
LRRRFLHLKKAAIV

SEQ ID NO: 6713 - protein, 14 aa, Artificial Sequence
  Quasi-synthetic sequence derived from human genome
KRKNWKVRRFVLRK

SEQ ID NO: 6714 - protein, 14 aa, Artificial Sequence
  Quasi-synthetic sequence derived from human genome
LIVWFFVCPRMKRK

SEQ ID NO: 6715 - protein, 14 aa, Artificial Sequence
  Quasi-synthetic sequence derived from human genome
IAMWFIRCRLPFRK

SEQ ID NO: 6716 - protein, 14 aa, Artificial Sequence
  Quasi-synthetic sequence derived from human genome
PWMKLYFKIKPLLK

SEQ ID NO: 6717 - protein, 14 aa, Artificial Sequence
  Quasi-synthetic sequence derived from human genome
RLIRKMFSFKVSRW

SEQ ID NO: 6718 - protein, 14 aa, Artificial Sequence
  Quasi-synthetic sequence derived from human genome
MVSLRKKRLKKFPW

SEQ ID NO: 6719 - protein, 14 aa, Artificial Sequence
  Quasi-synthetic sequence derived from human genome
RAKFWPRRRFNFFV

SEQ ID NO: 6720 - protein, 14 aa, Artificial Sequence
  Quasi-synthetic sequence derived from human genome
IRVFSLLQKKIKKL

SEQ ID NO: 6721 - protein, 14 aa, Artificial Sequence
  Quasi-synthetic sequence derived from human genome
CIRKFFPKRKCFVF

SEQ ID NO: 6722 - protein, 14 aa, Artificial Sequence
  Quasi-synthetic sequence derived from human genome
LSKRVQLLKKFIKI

SEQ ID NO: 6723 - protein, 14 aa, Artificial Sequence
  Quasi-synthetic sequence derived from human genome
LFLPCISRKLKRIK

SEQ ID NO: 6724 - protein, 14 aa, Artificial Sequence
  Quasi-synthetic sequence derived from human genome
YLQKWKRYRPLWKL

SEQ ID NO: 6725 - protein, 14 aa, Artificial Sequence
  Quasi-synthetic sequence derived from human genome
KRKWPLKGWHKRFF

SEQ ID NO: 6726 - protein, 14 aa, Artificial Sequence
  Quasi-synthetic sequence derived from human genome
LAIILLLLKIWKSR

SEQ ID NO: 6727 - protein, 14 aa, Artificial Sequence
  Quasi-synthetic sequence derived from human genome
KFRRRTCIILALFI

SEQ ID NO: 6728 - protein, 14 aa, Artificial Sequence
  Quasi-synthetic sequence derived from human genome
RLGVLRALFFKVIK

SEQ ID NO: 6729 - protein, 14 aa, Artificial Sequence
  Quasi-synthetic sequence derived from human genome
RIHRRGPKILLLLL

SEQ ID NO: 6730 - protein, 14 aa, Artificial Sequence
  Quasi-synthetic sequence derived from human genome
LVGVLILFMFRRLR

SEQ ID NO: 6731 - protein, 14 aa, Artificial Sequence
  Quasi-synthetic sequence derived from human genome
RWRRYKYRFVPWIA

SEQ ID NO: 6732 - protein, 14 aa, Artificial Sequence
  Quasi-synthetic sequence derived from human genome
LLQRFLRRKVVNKF

SEQ ID NO: 6733 - protein, 14 aa, Artificial Sequence
  Quasi-synthetic sequence derived from human genome
RKLARLGLVRCLRL

SEQ ID NO: 6734 - protein, 14 aa, Artificial Sequence
  Quasi-synthetic sequence derived from human genome
WRLSWLRSLRSWRK

SEQ ID NO: 6735 - protein, 14 aa, Artificial Sequence
  Quasi-synthetic sequence derived from human genome
LRRKILVKGKKLTL

SEQ ID NO: 6736 - protein, 14 aa, Artificial Sequence
  Quasi-synthetic sequence derived from human genome
LRSLRFLQILRMVR

SEQ ID NO: 6737 - protein, 14 aa, Artificial Sequence
  Quasi-synthetic sequence derived from human genome
FLQICKKILCRLFR

SEQ ID NO: 6738 - protein, 14 aa, Artificial Sequence
  Quasi-synthetic sequence derived from human genome
RRKLQLLMRMMARI

SEQ ID NO: 6739 - protein, 14 aa, Artificial Sequence
  Quasi-synthetic sequence derived from human genome
FRRLRELLRRRKKR

SEQ ID NO: 6740 - protein, 14 aa, Artificial Sequence
  Quasi-synthetic sequence derived from human genome
RLLRRRHMPLRLAM

SEQ ID NO: 6741 - protein, 14 aa, Artificial Sequence
  Quasi-synthetic sequence derived from human genome
LKPRMRKIFSRLIY

SEQ ID NO: 6742 - protein, 14 aa, Artificial Sequence
  Quasi-synthetic sequence derived from human genome
LLYQFRMNFRRRRR

SEQ ID NO: 6743 - protein, 14 aa, Artificial Sequence
  Quasi-synthetic sequence derived from human genome
IAKVKMKFRFLGKL

SEQ ID NO: 6744 - protein, 14 aa, Artificial Sequence
  Quasi-synthetic sequence derived from human genome
LLKVIRKKLVHKTL

SEQ ID NO: 6745 - protein, 14 aa, Artificial Sequence
  Quasi-synthetic sequence derived from human genome
LRALRILYVMRLAR

SEQ ID NO: 6746 - protein, 14 aa, Artificial Sequence
  Quasi-synthetic sequence derived from human genome
LKKQLKLHRKIHLW

SEQ ID NO: 6747 - protein, 14 aa, Artificial Sequence
  Quasi-synthetic sequence derived from human genome
ILVYKAKKRCIFFL

SEQ ID NO: 6748 - protein, 14 aa, Artificial Sequence
  Quasi-synthetic sequence derived from human genome
YLVLWAVRKHLRRL

SEQ ID NO: 6749 - protein, 14 aa, Artificial Sequence
  Quasi-synthetic sequence derived from human genome
HKKVLKKMLKFLAK

SEQ ID NO: 6750 - protein, 14 aa, Artificial Sequence
  Quasi-synthetic sequence derived from human genome
FRRTVKLLLCLLWI

SEQ ID NO: 6751 - protein, 14 aa, Artificial Sequence
  Quasi-synthetic sequence derived from human genome
IACRRKFFWCYRLL

SEQ ID NO: 6752 - protein, 14 aa, Artificial Sequence
  Quasi-synthetic sequence derived from human genome
LLKITNLRIKFVKL

SEQ ID NO: 6753 - protein, 14 aa, Artificial Sequence
  Quasi-synthetic sequence derived from human genome
ALFKNLLLKKIKRC

SEQ ID NO: 6754 - protein, 14 aa, Artificial Sequence
  Quasi-synthetic sequence derived from human genome
RPFKKLLCKFSFKI

SEQ ID NO: 6755 - protein, 14 aa, Artificial Sequence
  Quasi-synthetic sequence derived from human genome
LRLKAFILFGKLAR

SEQ ID NO: 6756 - protein, 14 aa, Artificial Sequence
  Quasi-synthetic sequence derived from human genome
RRLKPLILGKLLFA

SEQ ID NO: 6757 - protein, 14 aa, Artificial Sequence
  Quasi-synthetic sequence derived from human genome
RKLVKKTRFLRRKV

SEQ ID NO: 6758 - protein, 14 aa, Artificial Sequence
  Quasi-synthetic sequence derived from human genome
FLKRVFKRKKPQLR

SEQ ID NO: 6759 - protein, 14 aa, Artificial Sequence
  Quasi-synthetic sequence derived from human genome
WWRDLTRLRLWLKR

SEQ ID NO: 6760 - protein, 14 aa, Artificial Sequence
  Quasi-synthetic sequence derived from human genome
FLRRLLEYVKWRLR

SEQ ID NO: 6761 - protein, 14 aa, Artificial Sequence
  Quasi-synthetic sequence derived from human genome
LLSLWYLLRRRRNV

SEQ ID NO: 6762 - protein, 14 aa, Artificial Sequence
  Quasi-synthetic sequence derived from human genome
RFFWRLCRTFGKIF

SEQ ID NO: 6763 - protein, 14 aa, Artificial Sequence
  Quasi-synthetic sequence derived from human genome
LLLALCLLVRRTRR

SEQ ID NO: 6764 - protein, 14 aa, Artificial Sequence
  Quasi-synthetic sequence derived from human genome
IRKIRQKFFHAILR

SEQ ID NO: 6765 - protein, 14 aa, Artificial Sequence
  Quasi-synthetic sequence derived from human genome
LWKVKKALKMTIFW

SEQ ID NO: 6766 - protein, 14 aa, Artificial Sequence
  Quasi-synthetic sequence derived from human genome
LFLKRPKRSLFFNR

SEQ ID NO: 6767 - protein, 14 aa, Artificial Sequence
  Quasi-synthetic sequence derived from human genome
RRLALAAMRWRKKI

SEQ ID NO: 6768 - protein, 14 aa, Artificial Sequence
  Quasi-synthetic sequence derived from human genome
FRKALKMMLFGKIF

SEQ ID NO: 6769 - protein, 14 aa, Artificial Sequence
  Quasi-synthetic sequence derived from human genome
FRMLRIFKLGKYWP

SEQ ID NO: 6770 - protein, 14 aa, Artificial Sequence
  Quasi-synthetic sequence derived from human genome
LKVVRLLRLGRVAR

SEQ ID NO: 6771 - protein, 14 aa, Artificial Sequence
  Quasi-synthetic sequence derived from human genome
SLRALRAIRVLRRL

SEQ ID NO: 6772 - protein, 14 aa, Artificial Sequence
  Quasi-synthetic sequence derived from human genome
RRLAGLLRRALIRV

SEQ ID NO: 6773 - protein, 14 aa, Artificial Sequence
  Quasi-synthetic sequence derived from human genome
VILRLPNRRALRLR

SEQ ID NO: 6774 - protein, 14 aa, Artificial Sequence
  Quasi-synthetic sequence derived from human genome
LARMSRLLLLLLLK

SEQ ID NO: 6775 - protein, 14 aa, Artificial Sequence
  Quasi-synthetic sequence derived from human genome
RRKIYYLPRRYKFM

SEQ ID NO: 6776 - protein, 14 aa, Artificial Sequence
  Quasi-synthetic sequence derived from human genome
RMLNMLIVFRFLRI

SEQ ID NO: 6777 - protein, 14 aa, Artificial Sequence
  Quasi-synthetic sequence derived from human genome
LPLKVKGRRFYFLL

SEQ ID NO: 6778 - protein, 14 aa, Artificial Sequence
  Quasi-synthetic sequence derived from human genome
LCLILLRVRSCRRK

SEQ ID NO: 6779 - protein, 14 aa, Artificial Sequence
  Quasi-synthetic sequence derived from human genome
RWTHLVRLLRLIIL

SEQ ID NO: 6780 - protein, 14 aa, Artificial Sequence
  Quasi-synthetic sequence derived from human genome
KLFQFLKLRKYSIK

SEQ ID NO: 6781 - protein, 14 aa, Artificial Sequence
  Quasi-synthetic sequence derived from human genome
RRVFVRKVYTILLI

SEQ ID NO: 6782 - protein, 14 aa, Artificial Sequence
  Quasi-synthetic sequence derived from human genome
KFFMARVRLQLKII

SEQ ID NO: 6783 - protein, 14 aa, Artificial Sequence
  Quasi-synthetic sequence derived from human genome
IFLGVVLVMKKRKL

SEQ ID NO: 6784 - protein, 14 aa, Artificial Sequence
  Quasi-synthetic sequence derived from human genome
HRLRLRAQMRLRRL

SEQ ID NO: 6785 - protein, 14 aa, Artificial Sequence
  Quasi-synthetic sequence derived from human genome
RVLLRWWLGWRQLL

SEQ ID NO: 6786 - protein, 14 aa, Artificial Sequence
  Quasi-synthetic sequence derived from human genome
IRAVRILQFRLYKK

SEQ ID NO: 6787 - protein, 14 aa, Artificial Sequence
  Quasi-synthetic sequence derived from human genome
RFPRYLYKKMRWHL

SEQ ID NO: 6788 - protein, 14 aa, Artificial Sequence
  Quasi-synthetic sequence derived from human genome
IKQKFVALLKRFKV

SEQ ID NO: 6789 - protein, 14 aa, Artificial Sequence
  Quasi-synthetic sequence derived from human genome
RISITFFRLFRVMR

SEQ ID NO: 6790 - protein, 14 aa, Artificial Sequence
  Quasi-synthetic sequence derived from human genome
RKVIKRVAQWILWI

SEQ ID NO: 6791 - protein, 14 aa, Artificial Sequence
  Quasi-synthetic sequence derived from human genome
KFLIVRMRELLWRK

SEQ ID NO: 6792 - protein, 14 aa, Artificial Sequence
  Quasi-synthetic sequence derived from human genome
LVLMVLYLIKKRLV

SEQ ID NO: 6793 - protein, 14 aa, Artificial Sequence
  Quasi-synthetic sequence derived from human genome
LFRKHSKCLILLIR

SEQ ID NO: 6794 - protein, 14 aa, Artificial Sequence
  Quasi-synthetic sequence derived from human genome
LLRRRRWAALLVLG

SEQ ID NO: 6795 - protein, 14 aa, Artificial Sequence
  Quasi-synthetic sequence derived from human genome
RMLCRLLQRFKVVK

SEQ ID NO: 6796 - protein, 14 aa, Artificial Sequence
  Quasi-synthetic sequence derived from human genome
RRVLLLCKTRRLIA

SEQ ID NO: 6797 - protein, 14 aa, Artificial Sequence
  Quasi-synthetic sequence derived from human genome
LRKYMLVFKGKRYL

SEQ ID NO: 6798 - protein, 14 aa, Artificial Sequence
  Quasi-synthetic sequence derived from human genome
KFKLLSSLPRWRRI

SEQ ID NO: 6799 - protein, 14 aa, Artificial Sequence
  Quasi-synthetic sequence derived from human genome
RLPQVLRLHLKRFR

SEQ ID NO: 6800 - protein, 14 aa, Artificial Sequence
  Quasi-synthetic sequence derived from human genome
LALLRRFRHRARCL

SEQ ID NO: 6801 - protein, 14 aa, Artificial Sequence
  Quasi-synthetic sequence derived from human genome
LLLLVLILVYCRKK

SEQ ID NO: 6802 - protein, 14 aa, Artificial Sequence
  Quasi-synthetic sequence derived from human genome
RLVAKWLLTIFFLR

SEQ ID NO: 6803 - protein, 14 aa, Artificial Sequence
  Quasi-synthetic sequence derived from human genome
RVLLRFQRKLSVLL

SEQ ID NO: 6804 - protein, 14 aa, Artificial Sequence
  Quasi-synthetic sequence derived from human genome
KLSVLLLLLGRRRV

SEQ ID NO: 6805 - protein, 14 aa, Artificial Sequence
  Quasi-synthetic sequence derived from human genome
RLIRKRFLCLGWGL

SEQ ID NO: 6806 - protein, 14 aa, Artificial Sequence
  Quasi-synthetic sequence derived from human genome
RRVVRKAFRKLAKL

SEQ ID NO: 6807 - protein, 14 aa, Artificial Sequence
  Quasi-synthetic sequence derived from human genome
IRRRLIQRRWGLPR

SEQ ID NO: 6808 - protein, 14 aa, Artificial Sequence
  Quasi-synthetic sequence derived from human genome
LIIFLSWIILKHRK

SEQ ID NO: 6809 - protein, 14 aa, Artificial Sequence
  Quasi-synthetic sequence derived from human genome
KRRFLLCLLLFTVI

SEQ ID NO: 6810 - protein, 14 aa, Artificial Sequence
  Quasi-synthetic sequence derived from human genome
LRYRPKVKFLFGIW

SEQ ID NO: 6811 - protein, 14 aa, Artificial Sequence
  Quasi-synthetic sequence derived from human genome
PRAVFLLTRWRKFW

SEQ ID NO: 6812 - protein, 14 aa, Artificial Sequence
  Quasi-synthetic sequence derived from human genome
RFWRRKQLRAHLRR

SEQ ID NO: 6813 - protein, 14 aa, Artificial Sequence
  Quasi-synthetic sequence derived from human genome
LVMILYTRRRWCKR

SEQ ID NO: 6814 - protein, 14 aa, Artificial Sequence
  Quasi-synthetic sequence derived from human genome
ICIVIAILLYKRKR

SEQ ID NO: 6815 - protein, 14 aa, Artificial Sequence
  Quasi-synthetic sequence derived from human genome
RLLRGSRLLRRNFL

SEQ ID NO: 6816 - protein, 14 aa, Artificial Sequence
  Quasi-synthetic sequence derived from human genome
LLLKYKSIISRRFF

SEQ ID NO: 6817 - protein, 14 aa, Artificial Sequence
  Quasi-synthetic sequence derived from human genome
LLIGTWALFFRKRR

SEQ ID NO: 6818 - protein, 14 aa, Artificial Sequence
  Quasi-synthetic sequence derived from human genome
MRRLPRALLLQLRL

SEQ ID NO: 6819 - protein, 14 aa, Artificial Sequence
  Quasi-synthetic sequence derived from human genome
LARRRKKILFYCHF

SEQ ID NO: 6820 - protein, 14 aa, Artificial Sequence
  Quasi-synthetic sequence derived from human genome
LLRHCKYLIRKHRF

SEQ ID NO: 6821 - protein, 14 aa, Artificial Sequence
  Quasi-synthetic sequence derived from human genome
FRLTLRAVKLWAKR

SEQ ID NO: 6822 - protein, 14 aa, Artificial Sequence
  Quasi-synthetic sequence derived from human genome
RLKKAIHLKKLNFL

SEQ ID NO: 6823 - protein, 14 aa, Artificial Sequence
  Quasi-synthetic sequence derived from human genome
LLLLCLALWYMRRR

SEQ ID NO: 6824 - protein, 14 aa, Artificial Sequence
  Quasi-synthetic sequence derived from human genome
KKRSRIPLLRKRRF

SEQ ID NO: 6825 - protein, 14 aa, Artificial Sequence
  Quasi-synthetic sequence derived from human genome
RIIPFLPGKILFRR

SEQ ID NO: 6826 - protein, 14 aa, Artificial Sequence
  Quasi-synthetic sequence derived from human genome
FLRQRIRIAIALLK

SEQ ID NO: 6827 - protein, 14 aa, Artificial Sequence
  Quasi-synthetic sequence derived from human genome
IILLGVIMAKRKRK

SEQ ID NO: 6828 - protein, 14 aa, Artificial Sequence
  Quasi-synthetic sequence derived from human genome
RQYLLPLLRRLARR

SEQ ID NO: 6829 - protein, 14 aa, Artificial Sequence
  Quasi-synthetic sequence derived from human genome
LKTKRILRRNLLAL

SEQ ID NO: 6830 - protein, 14 aa, Artificial Sequence
  Quasi-synthetic sequence derived from human genome
LKKKLLPWQRRGLL

SEQ ID NO: 6831 - protein, 14 aa, Artificial Sequence
  Quasi-synthetic sequence derived from human genome
WKKKQLRRPSLLLL

SEQ ID NO: 6832 - protein, 14 aa, Artificial Sequence
  Quasi-synthetic sequence derived from human genome
KNWRKLFPNFLKLR

SEQ ID NO: 6833 - protein, 14 aa, Artificial Sequence
  Quasi-synthetic sequence derived from human genome
IRKKHLQRPIFRLR

SEQ ID NO: 6834 - protein, 14 aa, Artificial Sequence
  Quasi-synthetic sequence derived from human genome
HFLRVLICLRLLMR

SEQ ID NO: 6835 - protein, 14 aa, Artificial Sequence
  Quasi-synthetic sequence derived from human genome
AKRFKRRWMVRKMK

SEQ ID NO: 6836 - protein, 14 aa, Artificial Sequence
  Quasi-synthetic sequence derived from human genome
IFQLWFHFKRYRYR

SEQ ID NO: 6837 - protein, 14 aa, Artificial Sequence
  Quasi-synthetic sequence derived from human genome
WKLVNKKWMLTLLR

SEQ ID NO: 6838 - protein, 14 aa, Artificial Sequence
  Quasi-synthetic sequence derived from human genome
YFIRRRINKIQLIK

SEQ ID NO: 6839 - protein, 14 aa, Artificial Sequence
  Quasi-synthetic sequence derived from human genome
FRKYLRHFFHRHLL

SEQ ID NO: 6840 - protein, 14 aa, Artificial Sequence
  Quasi-synthetic sequence derived from human genome
ILKVIRKNLVKKCL

SEQ ID NO: 6841 - protein, 14 aa, Artificial Sequence
  Quasi-synthetic sequence derived from human genome
PVRRRALARLVLRL

SEQ ID NO: 6842 - protein, 14 aa, Artificial Sequence
  Quasi-synthetic sequence derived from human genome
MMLKKSAFKKLIKF

SEQ ID NO: 6843 - protein, 14 aa, Artificial Sequence
  Quasi-synthetic sequence derived from human genome
MRVLSRISKFRRLR

SEQ ID NO: 6844 - protein, 14 aa, Artificial Sequence
  Quasi-synthetic sequence derived from human genome
IKRLRKKFAQKMLR

SEQ ID NO: 6845 - protein, 14 aa, Artificial Sequence
  Quasi-synthetic sequence derived from human genome
LLLFLLLFLLLRHR

SEQ ID NO: 6846 - protein, 14 aa, Artificial Sequence
  Quasi-synthetic sequence derived from human genome
MIFLVIITKRRLHK

SEQ ID NO: 6847 - protein, 14 aa, Artificial Sequence
  Quasi-synthetic sequence derived from human genome
KLMILWIGIRKIKT

SEQ ID NO: 6848 - protein, 14 aa, Artificial Sequence
  Quasi-synthetic sequence derived from human genome
LRKRTLKVLTFLVL

SEQ ID NO: 6849 - protein, 14 aa, Artificial Sequence
  Quasi-synthetic sequence derived from human genome
KVRKVLQLLRLRQI

SEQ ID NO: 6850 - protein, 14 aa, Artificial Sequence
  Quasi-synthetic sequence derived from human genome
WLWRQSSILRRWKR

SEQ ID NO: 6851 - protein, 14 aa, Artificial Sequence
  Quasi-synthetic sequence derived from human genome
RLIFRRLSLGRIKP

SEQ ID NO: 6852 - protein, 14 aa, Artificial Sequence
  Quasi-synthetic sequence derived from human genome
FNIIFRKILKKLSM

SEQ ID NO: 6853 - protein, 14 aa, Artificial Sequence
  Quasi-synthetic sequence derived from human genome
VLKFKHIFFRSFVK

SEQ ID NO: 6854 - protein, 14 aa, Artificial Sequence
  Quasi-synthetic sequence derived from human genome
ILMHRLRVIMTRRK

SEQ ID NO: 6855 - protein, 14 aa, Artificial Sequence
  Quasi-synthetic sequence derived from human genome
KPRMRKIFSRLIYI

SEQ ID NO: 6856 - protein, 14 aa, Artificial Sequence
  Quasi-synthetic sequence derived from human genome
RRRPPLLPLLLLLL

SEQ ID NO: 6857 - protein, 14 aa, Artificial Sequence
  Quasi-synthetic sequence derived from human genome
FVWHLFLSKFKFLR

SEQ ID NO: 6858 - protein, 14 aa, Artificial Sequence
  Quasi-synthetic sequence derived from human genome
IAAFKRIRLRPRYL

SEQ ID NO: 6859 - protein, 14 aa, Artificial Sequence
  Quasi-synthetic sequence derived from human genome
VCRLRTLWLKICRL

SEQ ID NO: 6860 - protein, 14 aa, Artificial Sequence
  Quasi-synthetic sequence derived from human genome
VKLRRSFRTLIVLL

SEQ ID NO: 6861 - protein, 14 aa, Artificial Sequence
  Quasi-synthetic sequence derived from human genome
KLRMRVFGLCFVRF

SEQ ID NO: 6862 - protein, 14 aa, Artificial Sequence
  Quasi-synthetic sequence derived from human genome
LLFQVIRLYQRRRW

SEQ ID NO: 6863 - protein, 14 aa, Artificial Sequence
  Quasi-synthetic sequence derived from human genome
LPWRPRWARPLKRL

SEQ ID NO: 6864 - protein, 14 aa, Artificial Sequence
  Quasi-synthetic sequence derived from human genome
RNKRIGHFLFWFLR

SEQ ID NO: 6865 - protein, 14 aa, Artificial Sequence
  Quasi-synthetic sequence derived from human genome
RVRVWFKNRRAKWR

SEQ ID NO: 6866 - protein, 14 aa, Artificial Sequence
  Quasi-synthetic sequence derived from human genome
LLLLLLLLYKYKQK

SEQ ID NO: 6867 - protein, 14 aa, Artificial Sequence
  Quasi-synthetic sequence derived from human genome
KRKRKKVLVHLGLL

SEQ ID NO: 6868 - protein, 14 aa, Artificial Sequence
  Quasi-synthetic sequence derived from human genome
IDVFKRKLKMWLKR

SEQ ID NO: 6869 - protein, 14 aa, Artificial Sequence
  Quasi-synthetic sequence derived from human genome
KRFQKAFLKIFCIK

SEQ ID NO: 6870 - protein, 14 aa, Artificial Sequence
  Quasi-synthetic sequence derived from human genome
PFLQVRILRLLRIL

SEQ ID NO: 6871 - protein, 14 aa, Artificial Sequence
  Quasi-synthetic sequence derived from human genome
KKHVLHLWPKRLLL

SEQ ID NO: 6872 - protein, 14 aa, Artificial Sequence
  Quasi-synthetic sequence derived from human genome
RLRKACSLLRLRMR

SEQ ID NO: 6873 - protein, 14 aa, Artificial Sequence
  Quasi-synthetic sequence derived from human genome
KKAKAIKLILLVVI

SEQ ID NO: 6874 - protein, 14 aa, Artificial Sequence
  Quasi-synthetic sequence derived from human genome
LLFKLSPRVKRIFY

SEQ ID NO: 6875 - protein, 14 aa, Artificial Sequence
  Quasi-synthetic sequence derived from human genome
IALLRKRLQQLRLK

SEQ ID NO: 6876 - protein, 14 aa, Artificial Sequence
  Quasi-synthetic sequence derived from human genome
KVKRTIVFLLWLLV

SEQ ID NO: 6877 - protein, 14 aa, Artificial Sequence
  Quasi-synthetic sequence derived from human genome
RIMYKKRTKRLVVF

SEQ ID NO: 6878 - protein, 14 aa, Artificial Sequence
  Quasi-synthetic sequence derived from human genome
RQKLILTPFLLRRL

SEQ ID NO: 6879 - protein, 14 aa, Artificial Sequence
  Quasi-synthetic sequence derived from human genome
RYSLQKLRLVRWLL

SEQ ID NO: 6880 - protein, 14 aa, Artificial Sequence
  Quasi-synthetic sequence derived from human genome
KFFRRLSTLILHLR

SEQ ID NO: 6881 - protein, 14 aa, Artificial Sequence
  Quasi-synthetic sequence derived from human genome
LLAIAIFIRWKKSR

SEQ ID NO: 6882 - protein, 14 aa, Artificial Sequence
  Quasi-synthetic sequence derived from human genome
ILTFLRAGKLRLLR

SEQ ID NO: 6883 - protein, 14 aa, Artificial Sequence
  Quasi-synthetic sequence derived from human genome
FLFVNKRLVLRTKL

SEQ ID NO: 6884 - protein, 14 aa, Artificial Sequence
  Quasi-synthetic sequence derived from human genome
RLKKTWARWRHMFR

SEQ ID NO: 6885 - protein, 14 aa, Artificial Sequence
  Quasi-synthetic sequence derived from human genome
LWVRRKAGYKKKLW

SEQ ID NO: 6886 - protein, 14 aa, Artificial Sequence
  Quasi-synthetic sequence derived from human genome
FKPYVVRLAKLLRK

SEQ ID NO: 6887 - protein, 14 aa, Artificial Sequence
  Quasi-synthetic sequence derived from human genome
RIIRRGFIMLTRLV

SEQ ID NO: 6888 - protein, 14 aa, Artificial Sequence
  Quasi-synthetic sequence derived from human genome
VLGFLKLIHLLLRR

SEQ ID NO: 6889 - protein, 14 aa, Artificial Sequence
  Quasi-synthetic sequence derived from human genome
RLNRYKMIRLLIMY

SEQ ID NO: 6890 - protein, 14 aa, Artificial Sequence
  Quasi-synthetic sequence derived from human genome
CLRLLLLLGYRRRC

SEQ ID NO: 6891 - protein, 14 aa, Artificial Sequence
  Quasi-synthetic sequence derived from human genome
RKLYMKSLLKIFAW

SEQ ID NO: 6892 - protein, 14 aa, Artificial Sequence
  Quasi-synthetic sequence derived from human genome
IKMWLSLRSYLKRR

SEQ ID NO: 6893 - protein, 14 aa, Artificial Sequence
  Quasi-synthetic sequence derived from human genome
ARLLLRITKRTWRK

SEQ ID NO: 6894 - protein, 14 aa, Artificial Sequence
  Quasi-synthetic sequence derived from human genome
RRAWKRLQLRLHLY

SEQ ID NO: 6895 - protein, 14 aa, Artificial Sequence
  Quasi-synthetic sequence derived from human genome
MAKPFFRLQKFLRR

SEQ ID NO: 6896 - protein, 14 aa, Artificial Sequence
  Quasi-synthetic sequence derived from human genome
LFRAARKLRQFLKM

SEQ ID NO: 6897 - protein, 14 aa, Artificial Sequence
  Quasi-synthetic sequence derived from human genome
NRVFLQRLLWLLRL

SEQ ID NO: 6898 - protein, 14 aa, Artificial Sequence
  Quasi-synthetic sequence derived from human genome
LFYPWFRKAIKLIL

SEQ ID NO: 6899 - protein, 14 aa, Artificial Sequence
  Quasi-synthetic sequence derived from human genome
GFLLKKRKWPLKGW

SEQ ID NO: 6900 - protein, 14 aa, Artificial Sequence
  Quasi-synthetic sequence derived from human genome
LRVNLRLVINRLKL

SEQ ID NO: 6901 - protein, 14 aa, Artificial Sequence
  Quasi-synthetic sequence derived from human genome
RKFLYLWIRMTFGR

SEQ ID NO: 6902 - protein, 14 aa, Artificial Sequence
  Quasi-synthetic sequence derived from human genome
RALRRLIQGRILLL

SEQ ID NO: 6903 - protein, 14 aa, Artificial Sequence
  Quasi-synthetic sequence derived from human genome
LWWMLRRSLKKYSF

SEQ ID NO: 6904 - protein, 14 aa, Artificial Sequence
  Quasi-synthetic sequence derived from human genome
YFRKFFKFQVLKPL

SEQ ID NO: 6905 - protein, 14 aa, Artificial Sequence
  Quasi-synthetic sequence derived from human genome
LVLIILFCYFRYKR

SEQ ID NO: 6906 - protein, 14 aa, Artificial Sequence
  Quasi-synthetic sequence derived from human genome
LLFLLLVLLLLVRK

SEQ ID NO: 6907 - protein, 14 aa, Artificial Sequence
  Quasi-synthetic sequence derived from human genome
RRRLIPHPRRLWPF

SEQ ID NO: 6908 - protein, 14 aa, Artificial Sequence
  Quasi-synthetic sequence derived from human genome
KVKRLLKKQVVRIM

SEQ ID NO: 6909 - protein, 14 aa, Artificial Sequence
  Quasi-synthetic sequence derived from human genome
HICWVLLKKFKLPR

SEQ ID NO: 6910 - protein, 14 aa, Artificial Sequence
  Quasi-synthetic sequence derived from human genome
KIPIFSLFRKWKAF

SEQ ID NO: 6911 - protein, 14 aa, Artificial Sequence
  Quasi-synthetic sequence derived from human genome
LRRLNKRWRKLVSK

SEQ ID NO: 6912 - protein, 14 aa, Artificial Sequence
  Quasi-synthetic sequence derived from human genome
ILHLQRALVLRRKR

SEQ ID NO: 6913 - protein, 14 aa, Artificial Sequence
  Quasi-synthetic sequence derived from human genome
FRIRRGMWRLCLVY

SEQ ID NO: 6914 - protein, 14 aa, Artificial Sequence
  Quasi-synthetic sequence derived from human genome
LKRKKPFLHRRRRV

SEQ ID NO: 6915 - protein, 14 aa, Artificial Sequence
  Quasi-synthetic sequence derived from human genome
LGALLWMWWRRNRR

SEQ ID NO: 6916 - protein, 14 aa, Artificial Sequence
  Quasi-synthetic sequence derived from human genome
LLAMLLAGRIRLRR

SEQ ID NO: 6917 - protein, 14 aa, Artificial Sequence
  Quasi-synthetic sequence derived from human genome
MRRLRRLAHLVLFC

SEQ ID NO: 6918 - protein, 14 aa, Artificial Sequence
  Quasi-synthetic sequence derived from human genome
RFSRLVLWFAAFRK

SEQ ID NO: 6919 - protein, 14 aa, Artificial Sequence
  Quasi-synthetic sequence derived from human genome
IFKSILFLPCLRKK

SEQ ID NO: 6920 - protein, 14 aa, Artificial Sequence
  Quasi-synthetic sequence derived from human genome
FFRKVLGWPLRLPR

SEQ ID NO: 6921 - protein, 14 aa, Artificial Sequence
  Quasi-synthetic sequence derived from human genome
RKGIMKIMVYKIFR

SEQ ID NO: 6922 - protein, 14 aa, Artificial Sequence
  Quasi-synthetic sequence derived from human genome
MRVRRRLSLFLNVR

SEQ ID NO: 6923 - protein, 14 aa, Artificial Sequence
  Quasi-synthetic sequence derived from human genome
IHRIRHFYMRKVKF

SEQ ID NO: 6924 - protein, 14 aa, Artificial Sequence
  Quasi-synthetic sequence derived from human genome
LRKIQRWWQLGRLR

SEQ ID NO: 6925 - protein, 14 aa, Artificial Sequence
  Quasi-synthetic sequence derived from human genome
VYFYLFKLLRKCIL

SEQ ID NO: 6926 - protein, 14 aa, Artificial Sequence
  Quasi-synthetic sequence derived from human genome
LLKIKAVRAAKFWK

SEQ ID NO: 6927 - protein, 14 aa, Artificial Sequence
  Quasi-synthetic sequence derived from human genome
KTLKSLKALLRWKL

SEQ ID NO: 6928 - protein, 14 aa, Artificial Sequence
  Quasi-synthetic sequence derived from human genome
WLRRYIKWPLLPPK

SEQ ID NO: 6929 - protein, 14 aa, Artificial Sequence
  Quasi-synthetic sequence derived from human genome
RSRIPLLRKRRFQL

SEQ ID NO: 6930 - protein, 14 aa, Artificial Sequence
  Quasi-synthetic sequence derived from human genome
LIWLRRVYLLRAMV

SEQ ID NO: 6931 - protein, 14 aa, Artificial Sequence
  Quasi-synthetic sequence derived from human genome
VIIIKFLLGYKWFK

SEQ ID NO: 6932 - protein, 14 aa, Artificial Sequence
  Quasi-synthetic sequence derived from human genome
RRLYKLHFQLLLLF

SEQ ID NO: 6933 - protein, 14 aa, Artificial Sequence
  Quasi-synthetic sequence derived from human genome
KFTLKKLLLLVCFL

SEQ ID NO: 6934 - protein, 14 aa, Artificial Sequence
  Quasi-synthetic sequence derived from human genome
KMFRFFIRRMVKAQ

SEQ ID NO: 6935 - protein, 14 aa, Artificial Sequence
  Quasi-synthetic sequence derived from human genome
MFKHLRKWVVTRFF

SEQ ID NO: 6936 - protein, 14 aa, Artificial Sequence
  Quasi-synthetic sequence derived from human genome
KRKVLGKALYLIRI

SEQ ID NO: 6937 - protein, 14 aa, Artificial Sequence
  Quasi-synthetic sequence derived from human genome
KKLRSKLKPIFPLI

SEQ ID NO: 6938 - protein, 14 aa, Artificial Sequence
  Quasi-synthetic sequence derived from human genome
RLRLLPALLILRAF

SEQ ID NO: 6939 - protein, 14 aa, Artificial Sequence
  Quasi-synthetic sequence derived from human genome
RKKLLIQMKSIWKK

SEQ ID NO: 6940 - protein, 14 aa, Artificial Sequence
  Quasi-synthetic sequence derived from human genome
NIKLLKALRVRKKM

SEQ ID NO: 6941 - protein, 14 aa, Artificial Sequence
  Quasi-synthetic sequence derived from human genome
KTVKRLVKVKVLLK

SEQ ID NO: 6942 - protein, 14 aa, Artificial Sequence
  Quasi-synthetic sequence derived from human genome
KLSMIRFRYRILRS

SEQ ID NO: 6943 - protein, 14 aa, Artificial Sequence
  Quasi-synthetic sequence derived from human genome
FLRKIIMVHPKVRF

SEQ ID NO: 6944 - protein, 14 aa, Artificial Sequence
  Quasi-synthetic sequence derived from human genome
WAKIRKLSFKRKHF

SEQ ID NO: 6945 - protein, 14 aa, Artificial Sequence
  Quasi-synthetic sequence derived from human genome
FRCLKRLKMSWFLP

SEQ ID NO: 6946 - protein, 14 aa, Artificial Sequence
  Quasi-synthetic sequence derived from human genome
LVILFKCGFFKRKY

SEQ ID NO: 6947 - protein, 14 aa, Artificial Sequence
  Quasi-synthetic sequence derived from human genome
RLWLSKTLRILKAL

SEQ ID NO: 6948 - protein, 14 aa, Artificial Sequence
  Quasi-synthetic sequence derived from human genome
KFAVRRFFSVYLRR

SEQ ID NO: 6949 - protein, 14 aa, Artificial Sequence
  Quasi-synthetic sequence derived from human genome
SLKHLCRLKIRRLM

SEQ ID NO: 6950 - protein, 14 aa, Artificial Sequence
  Quasi-synthetic sequence derived from human genome
RWRRRWFVLKGHTL

SEQ ID NO: 6951 - protein, 14 aa, Artificial Sequence
  Quasi-synthetic sequence derived from human genome
RRRFLSLKKTAILI

SEQ ID NO: 6952 - protein, 14 aa, Artificial Sequence
  Quasi-synthetic sequence derived from human genome
RFLKFMNSRVFKKI

SEQ ID NO: 6953 - protein, 14 aa, Artificial Sequence
  Quasi-synthetic sequence derived from human genome
WPKNKKNILLRLLR

SEQ ID NO: 6954 - protein, 14 aa, Artificial Sequence
  Quasi-synthetic sequence derived from human genome
LGKLWRKLFKGIPR

SEQ ID NO: 6955 - protein, 14 aa, Artificial Sequence
  Quasi-synthetic sequence derived from human genome
LAPILRRKKKKKKL

SEQ ID NO: 6956 - protein, 14 aa, Artificial Sequence
  Quasi-synthetic sequence derived from human genome
VRWVVKVVKTLLLR

SEQ ID NO: 6957 - protein, 14 aa, Artificial Sequence
  Quasi-synthetic sequence derived from human genome
IIKYIIINRFRGRK

SEQ ID NO: 6958 - protein, 14 aa, Artificial Sequence
  Quasi-synthetic sequence derived from human genome
KKLLIIISRPARLL

SEQ ID NO: 6959 - protein, 14 aa, Artificial Sequence
  Quasi-synthetic sequence derived from human genome
LLFYSFWLCCRRRK

SEQ ID NO: 6960 - protein, 14 aa, Artificial Sequence
  Quasi-synthetic sequence derived from human genome
IRPVKLKNLILLVK

SEQ ID NO: 6961 - protein, 14 aa, Artificial Sequence
  Quasi-synthetic sequence derived from human genome
FLYARRLSLLCRRF

SEQ ID NO: 6962 - protein, 14 aa, Artificial Sequence
  Quasi-synthetic sequence derived from human genome
LRLSLVRFSFLLLR

SEQ ID NO: 6963 - protein, 14 aa, Artificial Sequence
  Quasi-synthetic sequence derived from human genome
KKRLFFPRFFFLSN

SEQ ID NO: 6964 - protein, 14 aa, Artificial Sequence
  Quasi-synthetic sequence derived from human genome
ILKVIRKNIVKKCL

SEQ ID NO: 6965 - protein, 14 aa, Artificial Sequence
  Quasi-synthetic sequence derived from human genome
AKAVLRMLLLLWFK

SEQ ID NO: 6966 - protein, 14 aa, Artificial Sequence
  Quasi-synthetic sequence derived from human genome
LLLFYVVRYCWLRR

SEQ ID NO: 6967 - protein, 14 aa, Artificial Sequence
  Quasi-synthetic sequence derived from human genome
LYRLYKPILWRGLK

SEQ ID NO: 6968 - protein, 14 aa, Artificial Sequence
  Quasi-synthetic sequence derived from human genome
LARFLLKRGLRNKR

SEQ ID NO: 6969 - protein, 14 aa, Artificial Sequence
  Quasi-synthetic sequence derived from human genome
KRKGLFARRRQLLL

SEQ ID NO: 6970 - protein, 14 aa, Artificial Sequence
  Quasi-synthetic sequence derived from human genome
KYWRRVLAQRKLLM

SEQ ID NO: 6971 - protein, 14 aa, Artificial Sequence
  Quasi-synthetic sequence derived from human genome
FLWLKWRVSRVMVW

SEQ ID NO: 6972 - protein, 14 aa, Artificial Sequence
  Quasi-synthetic sequence derived from human genome
KALLIFLVVHRLRW

SEQ ID NO: 6973 - protein, 14 aa, Artificial Sequence
  Quasi-synthetic sequence derived from human genome
RFFAWRDRLRVRLF

SEQ ID NO: 6974 - protein, 14 aa, Artificial Sequence
  Quasi-synthetic sequence derived from human genome
RLFSLTLKKLVMLK

SEQ ID NO: 6975 - protein, 14 aa, Artificial Sequence
  Quasi-synthetic sequence derived from human genome
TRLAKKLLGWLLFK

SEQ ID NO: 6976 - protein, 14 aa, Artificial Sequence
  Quasi-synthetic sequence derived from human genome
RIWVFSMMRRKKIA

SEQ ID NO: 6977 - protein, 14 aa, Artificial Sequence
  Quasi-synthetic sequence derived from human genome
IRKRLIQRRWGLPR

SEQ ID NO: 6978 - protein, 14 aa, Artificial Sequence
  Quasi-synthetic sequence derived from human genome
IMRWFRRHKVRAHL

SEQ ID NO: 6979 - protein, 14 aa, Artificial Sequence
  Quasi-synthetic sequence derived from human genome
RKKQKIIKMLLIVA

SEQ ID NO: 6980 - protein, 14 aa, Artificial Sequence
  Quasi-synthetic sequence derived from human genome
RWRQLRKFTMLALR

SEQ ID NO: 6981 - protein, 14 aa, Artificial Sequence
  Quasi-synthetic sequence derived from human genome
ILPIFLFRSVRLLK

SEQ ID NO: 6982 - protein, 14 aa, Artificial Sequence
  Quasi-synthetic sequence derived from human genome
MRKKLILYFKRRNH

SEQ ID NO: 6983 - protein, 14 aa, Artificial Sequence
  Quasi-synthetic sequence derived from human genome
KRKPPWVIWWNLRK

SEQ ID NO: 6984 - protein, 14 aa, Artificial Sequence
  Quasi-synthetic sequence derived from human genome
KKNWRRVYKSLLLL

SEQ ID NO: 6985 - protein, 14 aa, Artificial Sequence
  Quasi-synthetic sequence derived from human genome
KNTFCLWKRLIKLK

SEQ ID NO: 6986 - protein, 14 aa, Artificial Sequence
  Quasi-synthetic sequence derived from human genome
LMCKKMKHLWFFLL

SEQ ID NO: 6987 - protein, 14 aa, Artificial Sequence
  Quasi-synthetic sequence derived from human genome
KRLLFYKYMHKKYR

SEQ ID NO: 6988 - protein, 14 aa, Artificial Sequence
  Quasi-synthetic sequence derived from human genome
KVKPLLMKLKRLKG

SEQ ID NO: 6989 - protein, 14 aa, Artificial Sequence
  Quasi-synthetic sequence derived from human genome
LRFLSSPKKWKFFK

SEQ ID NO: 6990 - protein, 14 aa, Artificial Sequence
  Quasi-synthetic sequence derived from human genome
LKIGKRNFYIIKWL

SEQ ID NO: 6991 - protein, 14 aa, Artificial Sequence
  Quasi-synthetic sequence derived from human genome
AVRLNRYKIIKLLL

SEQ ID NO: 6992 - protein, 14 aa, Artificial Sequence
  Quasi-synthetic sequence derived from human genome
ALAARLWRLLPFRR

SEQ ID NO: 6993 - protein, 14 aa, Artificial Sequence
  Quasi-synthetic sequence derived from human genome
KLWHWLNKKMIIWL

SEQ ID NO: 6994 - protein, 14 aa, Artificial Sequence
  Quasi-synthetic sequence derived from human genome
PLRPILAARLRRRL

SEQ ID NO: 6995 - protein, 14 aa, Artificial Sequence
  Quasi-synthetic sequence derived from human genome
IMKKKKKVLVWNRV

SEQ ID NO: 6996 - protein, 14 aa, Artificial Sequence
  Quasi-synthetic sequence derived from human genome
RKILIVIARPARLL

SEQ ID NO: 6997 - protein, 14 aa, Artificial Sequence
  Quasi-synthetic sequence derived from human genome
IGRITKRLLLPLFR

SEQ ID NO: 6998 - protein, 14 aa, Artificial Sequence
  Quasi-synthetic sequence derived from human genome
KRLLLPRHLRVFSF

SEQ ID NO: 6999 - protein, 14 aa, Artificial Sequence
  Quasi-synthetic sequence derived from human genome
KKILHLLFLKRRDW

SEQ ID NO: 7000 - protein, 14 aa, Artificial Sequence
  Quasi-synthetic sequence derived from human genome
LWKHLKSSLRILFR

SEQ ID NO: 7001 - protein, 15 aa, Artificial Sequence
  Quasi-synthetic sequence derived from human genome
LLLFMKLRWFLKRWR

SEQ ID NO: 7002 - protein, 15 aa, Artificial Sequence
  Quasi-synthetic sequence derived from human genome
RFFRFLLRKLYVFRR

SEQ ID NO: 7003 - protein, 15 aa, Artificial Sequence
  Quasi-synthetic sequence derived from human genome
WMRRMRILRRLLRRY

SEQ ID NO: 7004 - protein, 15 aa, Artificial Sequence
  Quasi-synthetic sequence derived from human genome
LRIIRLVRVFRIFKL

SEQ ID NO: 7005 - protein, 15 aa, Artificial Sequence
  Quasi-synthetic sequence derived from human genome
ILRIIRLVRVFRIFK

SEQ ID NO: 7006 - protein, 15 aa, Artificial Sequence
  Quasi-synthetic sequence derived from human genome
FKRKKRIKRRALLFL

SEQ ID NO: 7007 - protein, 15 aa, Artificial Sequence
  Quasi-synthetic sequence derived from human genome
FLRVVRFVRILRIFK

SEQ ID NO: 7008 - protein, 15 aa, Artificial Sequence
  Quasi-synthetic sequence derived from human genome
IRRLLILILKIGRRW

SEQ ID NO: 7009 - protein, 15 aa, Artificial Sequence
  Quasi-synthetic sequence derived from human genome
LRVIRLVRVFRIFKL

SEQ ID NO: 7010 - protein, 15 aa, Artificial Sequence
  Quasi-synthetic sequence derived from human genome
KLRRYAWKKRWFILR

SEQ ID NO: 7011 - protein, 15 aa, Artificial Sequence
  Quasi-synthetic sequence derived from human genome
ILRLMRIFRILKLAR

SEQ ID NO: 7012 - protein, 15 aa, Artificial Sequence
  Quasi-synthetic sequence derived from human genome
LMRRLVRRLRRWGLL

SEQ ID NO: 7013 - protein, 15 aa, Artificial Sequence
  Quasi-synthetic sequence derived from human genome
RLLLKFIKIMKHLRK

SEQ ID NO: 7014 - protein, 15 aa, Artificial Sequence
  Quasi-synthetic sequence derived from human genome
IFRIMRILRILKLAR

SEQ ID NO: 7015 - protein, 15 aa, Artificial Sequence
  Quasi-synthetic sequence derived from human genome
KFILWRRFRWAIILF

SEQ ID NO: 7016 - protein, 15 aa, Artificial Sequence
  Quasi-synthetic sequence derived from human genome
KKWKGVRWKRLRLLL

SEQ ID NO: 7017 - protein, 15 aa, Artificial Sequence
  Quasi-synthetic sequence derived from human genome
IKWMIKIRKRYLKRR

SEQ ID NO: 7018 - protein, 15 aa, Artificial Sequence
  Quasi-synthetic sequence derived from human genome
LLRLFRMLRIFKLGK

SEQ ID NO: 7019 - protein, 15 aa, Artificial Sequence
  Quasi-synthetic sequence derived from human genome
FWIKRRILLLIPKWL

SEQ ID NO: 7020 - protein, 15 aa, Artificial Sequence
  Quasi-synthetic sequence derived from human genome
LRALLKRKHRFILLR

SEQ ID NO: 7021 - protein, 15 aa, Artificial Sequence
  Quasi-synthetic sequence derived from human genome
ILILWKFALLRKRIL

SEQ ID NO: 7022 - protein, 15 aa, Artificial Sequence
  Quasi-synthetic sequence derived from human genome
FLLFFLFRLLLRFLR

SEQ ID NO: 7023 - protein, 15 aa, Artificial Sequence
  Quasi-synthetic sequence derived from human genome
FLRLFRAARLIKLLR

SEQ ID NO: 7024 - protein, 15 aa, Artificial Sequence
  Quasi-synthetic sequence derived from human genome
RAVFRLRKWIIFRLV

SEQ ID NO: 7025 - protein, 15 aa, Artificial Sequence
  Quasi-synthetic sequence derived from human genome
LLVILKRKWWKYILL

SEQ ID NO: 7026 - protein, 15 aa, Artificial Sequence
  Quasi-synthetic sequence derived from human genome
INLKRKFIKKRIIII

SEQ ID NO: 7027 - protein, 15 aa, Artificial Sequence
  Quasi-synthetic sequence derived from human genome
MVFCLILWKWKKKKR

SEQ ID NO: 7028 - protein, 15 aa, Artificial Sequence
  Quasi-synthetic sequence derived from human genome
LLLLLGFFLWLKKRK

SEQ ID NO: 7029 - protein, 15 aa, Artificial Sequence
  Quasi-synthetic sequence derived from human genome
ILTRKRIRYRFRRFI

SEQ ID NO: 7030 - protein, 15 aa, Artificial Sequence
  Quasi-synthetic sequence derived from human genome
KLKRYAWKRRWFVLR

SEQ ID NO: 7031 - protein, 15 aa, Artificial Sequence
  Quasi-synthetic sequence derived from human genome
LRLRRRVCVLRKRRL

SEQ ID NO: 7032 - protein, 15 aa, Artificial Sequence
  Quasi-synthetic sequence derived from human genome
LLILILLLLLFLRRR

SEQ ID NO: 7033 - protein, 15 aa, Artificial Sequence
  Quasi-synthetic sequence derived from human genome
LRTFRLLRVLKLVRF

SEQ ID NO: 7034 - protein, 15 aa, Artificial Sequence
  Quasi-synthetic sequence derived from human genome
KKIRKQMKLLLLLLL

SEQ ID NO: 7035 - protein, 15 aa, Artificial Sequence
  Quasi-synthetic sequence derived from human genome
MVWRRLLRKRWVLAL

SEQ ID NO: 7036 - protein, 15 aa, Artificial Sequence
  Quasi-synthetic sequence derived from human genome
LVVLFIVFRKKVFRK

SEQ ID NO: 7037 - protein, 15 aa, Artificial Sequence
  Quasi-synthetic sequence derived from human genome
RARLLRALRLVRRLR

SEQ ID NO: 7038 - protein, 15 aa, Artificial Sequence
  Quasi-synthetic sequence derived from human genome
FRLFRVMRLIKLLSR

SEQ ID NO: 7039 - protein, 15 aa, Artificial Sequence
  Quasi-synthetic sequence derived from human genome
VLLVLIFVLRKRIKL

SEQ ID NO: 7040 - protein, 15 aa, Artificial Sequence
  Quasi-synthetic sequence derived from human genome
LRRIILLQRWFRVLL

SEQ ID NO: 7041 - protein, 15 aa, Artificial Sequence
  Quasi-synthetic sequence derived from human genome
LRRRWHRWRLGKVLW

SEQ ID NO: 7042 - protein, 15 aa, Artificial Sequence
  Quasi-synthetic sequence derived from human genome
VKLLRRRFRLLLALA

SEQ ID NO: 7043 - protein, 15 aa, Artificial Sequence
  Quasi-synthetic sequence derived from human genome
RLLWRRLKPLILGKL

SEQ ID NO: 7044 - protein, 15 aa, Artificial Sequence
  Quasi-synthetic sequence derived from human genome
KRRLLPRVRLLPLLL

SEQ ID NO: 7045 - protein, 15 aa, Artificial Sequence
  Quasi-synthetic sequence derived from human genome
RWLGRWRRKRRWRRV

SEQ ID NO: 7046 - protein, 15 aa, Artificial Sequence
  Quasi-synthetic sequence derived from human genome
VFRLMRIFRVLKLAR

SEQ ID NO: 7047 - protein, 15 aa, Artificial Sequence
  Quasi-synthetic sequence derived from human genome
RRRRSLRRLFSRFLL

SEQ ID NO: 7048 - protein, 15 aa, Artificial Sequence
  Quasi-synthetic sequence derived from human genome
YLRRLLLLLLLLLLR

SEQ ID NO: 7049 - protein, 15 aa, Artificial Sequence
  Quasi-synthetic sequence derived from human genome
VWLIKLLTRLKVRKK

SEQ ID NO: 7050 - protein, 15 aa, Artificial Sequence
  Quasi-synthetic sequence derived from human genome
KFMVLLWKNFILKRR

SEQ ID NO: 7051 - protein, 15 aa, Artificial Sequence
  Quasi-synthetic sequence derived from human genome
LLRRLPKLRKRMRKM

SEQ ID NO: 7052 - protein, 15 aa, Artificial Sequence
  Quasi-synthetic sequence derived from human genome
RSPRIRKRFLLRRIL

SEQ ID NO: 7053 - protein, 15 aa, Artificial Sequence
  Quasi-synthetic sequence derived from human genome
YKFLRFRRSLLLLVK

SEQ ID NO: 7054 - protein, 15 aa, Artificial Sequence
  Quasi-synthetic sequence derived from human genome
FFKILLRLRLAILKY

SEQ ID NO: 7055 - protein, 15 aa, Artificial Sequence
  Quasi-synthetic sequence derived from human genome
FGFIILLLLVLRKRR

SEQ ID NO: 7056 - protein, 15 aa, Artificial Sequence
  Quasi-synthetic sequence derived from human genome
YRKAIFIFIRWLLKL

SEQ ID NO: 7057 - protein, 15 aa, Artificial Sequence
  Quasi-synthetic sequence derived from human genome
LAKKIMFFLLIIRKL

SEQ ID NO: 7058 - protein, 15 aa, Artificial Sequence
  Quasi-synthetic sequence derived from human genome
RIMRVLRIARVLKLL

SEQ ID NO: 7059 - protein, 15 aa, Artificial Sequence
  Quasi-synthetic sequence derived from human genome
LLSLWKLWRVKKFLI

SEQ ID NO: 7060 - protein, 15 aa, Artificial Sequence
  Quasi-synthetic sequence derived from human genome
LIFLRLKRRVKSVIL

SEQ ID NO: 7061 - protein, 15 aa, Artificial Sequence
  Quasi-synthetic sequence derived from human genome
RLRKLNWKRILIRHR

SEQ ID NO: 7062 - protein, 15 aa, Artificial Sequence
  Quasi-synthetic sequence derived from human genome
FFIKRRFRSLRHKII

SEQ ID NO: 7063 - protein, 15 aa, Artificial Sequence
  Quasi-synthetic sequence derived from human genome
LWGLLILLKYRWRKL

SEQ ID NO: 7064 - protein, 15 aa, Artificial Sequence
  Quasi-synthetic sequence derived from human genome
ILRLLRYIVRLVWRM

SEQ ID NO: 7065 - protein, 15 aa, Artificial Sequence
  Quasi-synthetic sequence derived from human genome
LFRWKPLWGVRLRLR

SEQ ID NO: 7066 - protein, 15 aa, Artificial Sequence
  Quasi-synthetic sequence derived from human genome
LRTFRLMRVLKLVRF

SEQ ID NO: 7067 - protein, 15 aa, Artificial Sequence
  Quasi-synthetic sequence derived from human genome
ILLIFRLIWRSVKKW

SEQ ID NO: 7068 - protein, 15 aa, Artificial Sequence
  Quasi-synthetic sequence derived from human genome
LGLLCLLLLWWRRRK

SEQ ID NO: 7069 - protein, 15 aa, Artificial Sequence
  Quasi-synthetic sequence derived from human genome
IPVFRLARRRKKILF

SEQ ID NO: 7070 - protein, 15 aa, Artificial Sequence
  Quasi-synthetic sequence derived from human genome
AILLYLLRLRRIHRR

SEQ ID NO: 7071 - protein, 15 aa, Artificial Sequence
  Quasi-synthetic sequence derived from human genome
IILIVIAILLFKRKR

SEQ ID NO: 7072 - protein, 15 aa, Artificial Sequence
  Quasi-synthetic sequence derived from human genome
FRLFRVMRLVKLLSR

SEQ ID NO: 7073 - protein, 15 aa, Artificial Sequence
  Quasi-synthetic sequence derived from human genome
LLVLRLRRWHKSRLL

SEQ ID NO: 7074 - protein, 15 aa, Artificial Sequence
  Quasi-synthetic sequence derived from human genome
ILFINILRILMRKLR

SEQ ID NO: 7075 - protein, 15 aa, Artificial Sequence
  Quasi-synthetic sequence derived from human genome
RFLKIIRPLRNIFLK

SEQ ID NO: 7076 - protein, 15 aa, Artificial Sequence
  Quasi-synthetic sequence derived from human genome
RLCLRLLLLLGYRRR

SEQ ID NO: 7077 - protein, 15 aa, Artificial Sequence
  Quasi-synthetic sequence derived from human genome
YLRLLVKLYRFLARR

SEQ ID NO: 7078 - protein, 15 aa, Artificial Sequence
  Quasi-synthetic sequence derived from human genome
IIIFLTVLLLKLRKR

SEQ ID NO: 7079 - protein, 15 aa, Artificial Sequence
  Quasi-synthetic sequence derived from human genome
LCLRLLLFFRFKRTL

SEQ ID NO: 7080 - protein, 15 aa, Artificial Sequence
  Quasi-synthetic sequence derived from human genome
FLMKVLKKKIKRVKK

SEQ ID NO: 7081 - protein, 15 aa, Artificial Sequence
  Quasi-synthetic sequence derived from human genome
FLWLRWRILRLFPWI

SEQ ID NO: 7082 - protein, 15 aa, Artificial Sequence
  Quasi-synthetic sequence derived from human genome
RRKGVWLRLRKILFC

SEQ ID NO: 7083 - protein, 15 aa, Artificial Sequence
  Quasi-synthetic sequence derived from human genome
ILILLIKKLIIFILK

SEQ ID NO: 7084 - protein, 15 aa, Artificial Sequence
  Quasi-synthetic sequence derived from human genome
IRKLSFKRKHFLIKL

SEQ ID NO: 7085 - protein, 15 aa, Artificial Sequence
  Quasi-synthetic sequence derived from human genome
LLRRWLPRPRAWFIR

SEQ ID NO: 7086 - protein, 15 aa, Artificial Sequence
  Quasi-synthetic sequence derived from human genome
RRSRHRLLLLLLRYL

SEQ ID NO: 7087 - protein, 15 aa, Artificial Sequence
  Quasi-synthetic sequence derived from human genome
YWKKVLPLLKIIKKK

SEQ ID NO: 7088 - protein, 15 aa, Artificial Sequence
  Quasi-synthetic sequence derived from human genome
MILGLICLLRWRRRK

SEQ ID NO: 7089 - protein, 15 aa, Artificial Sequence
  Quasi-synthetic sequence derived from human genome
FHRIRWVFKRRLGLL

SEQ ID NO: 7090 - protein, 15 aa, Artificial Sequence
  Quasi-synthetic sequence derived from human genome
LTRLRLRNVFRRFLR

SEQ ID NO: 7091 - protein, 15 aa, Artificial Sequence
  Quasi-synthetic sequence derived from human genome
LCIFKIARKLLFLFR

SEQ ID NO: 7092 - protein, 15 aa, Artificial Sequence
  Quasi-synthetic sequence derived from human genome
FFIYMISFIFRKRRK

SEQ ID NO: 7093 - protein, 15 aa, Artificial Sequence
  Quasi-synthetic sequence derived from human genome
FLLKIKRTRKGFRLL

SEQ ID NO: 7094 - protein, 15 aa, Artificial Sequence
  Quasi-synthetic sequence derived from human genome
FRLFRVMRLVKLLSK

SEQ ID NO: 7095 - protein, 15 aa, Artificial Sequence
  Quasi-synthetic sequence derived from human genome
FYPWRFRLLCLLRRW

SEQ ID NO: 7096 - protein, 15 aa, Artificial Sequence
  Quasi-synthetic sequence derived from human genome
FKAFRRTFKRKFKIL

SEQ ID NO: 7097 - protein, 15 aa, Artificial Sequence
  Quasi-synthetic sequence derived from human genome
FRKTFKMLLLCRWKK

SEQ ID NO: 7098 - protein, 15 aa, Artificial Sequence
  Quasi-synthetic sequence derived from human genome
MRWRWWQRLLPWRLL

SEQ ID NO: 7099 - protein, 15 aa, Artificial Sequence
  Quasi-synthetic sequence derived from human genome
VIIILLLIFLRKRIL

SEQ ID NO: 7100 - protein, 15 aa, Artificial Sequence
  Quasi-synthetic sequence derived from human genome
FLRLKRKFIQMRRPF

SEQ ID NO: 7101 - protein, 15 aa, Artificial Sequence
  Quasi-synthetic sequence derived from human genome
MLRFVKCFLRRRKPF

SEQ ID NO: 7102 - protein, 15 aa, Artificial Sequence
  Quasi-synthetic sequence derived from human genome
RRKALAPRLLLRLLR

SEQ ID NO: 7103 - protein, 15 aa, Artificial Sequence
  Quasi-synthetic sequence derived from human genome
WRFYLSFRKLMRWIL

SEQ ID NO: 7104 - protein, 15 aa, Artificial Sequence
  Quasi-synthetic sequence derived from human genome
FRRLLKLPRTLILLL

SEQ ID NO: 7105 - protein, 15 aa, Artificial Sequence
  Quasi-synthetic sequence derived from human genome
FRRSFKHILFRRRRR

SEQ ID NO: 7106 - protein, 15 aa, Artificial Sequence
  Quasi-synthetic sequence derived from human genome
KNVWKRWKKRFFVLV

SEQ ID NO: 7107 - protein, 15 aa, Artificial Sequence
  Quasi-synthetic sequence derived from human genome
RKLGIFRRCWLVFKK

SEQ ID NO: 7108 - protein, 15 aa, Artificial Sequence
  Quasi-synthetic sequence derived from human genome
RCLALLYWRMFRLKR

SEQ ID NO: 7109 - protein, 15 aa, Artificial Sequence
  Quasi-synthetic sequence derived from human genome
RKYLLKALFKALKRL

SEQ ID NO: 7110 - protein, 15 aa, Artificial Sequence
  Quasi-synthetic sequence derived from human genome
RIRFSKLLLKILFYI

SEQ ID NO: 7111 - protein, 15 aa, Artificial Sequence
  Quasi-synthetic sequence derived from human genome
LKCILKFFLRALKIL

SEQ ID NO: 7112 - protein, 15 aa, Artificial Sequence
  Quasi-synthetic sequence derived from human genome
KVRKLSFKRKRFLIK

SEQ ID NO: 7113 - protein, 15 aa, Artificial Sequence
  Quasi-synthetic sequence derived from human genome
IGWRIRKKYFLMKIK

SEQ ID NO: 7114 - protein, 15 aa, Artificial Sequence
  Quasi-synthetic sequence derived from human genome
RIFFHKIFIRPLRYR

SEQ ID NO: 7115 - protein, 15 aa, Artificial Sequence
  Quasi-synthetic sequence derived from human genome
FILAIPLRRKVKKLL

SEQ ID NO: 7116 - protein, 15 aa, Artificial Sequence
  Quasi-synthetic sequence derived from human genome
KLLLLRRPLYRNLLR

SEQ ID NO: 7117 - protein, 15 aa, Artificial Sequence
  Quasi-synthetic sequence derived from human genome
LLFLLLVLLLLVRKK

SEQ ID NO: 7118 - protein, 15 aa, Artificial Sequence
  Quasi-synthetic sequence derived from human genome
RRRLHVLKALKKLRI

SEQ ID NO: 7119 - protein, 15 aa, Artificial Sequence
  Quasi-synthetic sequence derived from human genome
LRKRRRLLSIIVVLV

SEQ ID NO: 7120 - protein, 15 aa, Artificial Sequence
  Quasi-synthetic sequence derived from human genome
LFRVIRLARIGRILR

SEQ ID NO: 7121 - protein, 15 aa, Artificial Sequence
  Quasi-synthetic sequence derived from human genome
VIRLVRVFRIFKLSR

SEQ ID NO: 7122 - protein, 15 aa, Artificial Sequence
  Quasi-synthetic sequence derived from human genome
CKFLWRCLKFVMRKL

SEQ ID NO: 7123 - protein, 15 aa, Artificial Sequence
  Quasi-synthetic sequence derived from human genome
KLLKVIRKKLVRKTL

SEQ ID NO: 7124 - protein, 15 aa, Artificial Sequence
  Quasi-synthetic sequence derived from human genome
HLLRLLRLIILLRIF

SEQ ID NO: 7125 - protein, 15 aa, Artificial Sequence
  Quasi-synthetic sequence derived from human genome
LLLFLLLFLLLRRQR

SEQ ID NO: 7126 - protein, 15 aa, Artificial Sequence
  Quasi-synthetic sequence derived from human genome
KRKVIIFLKKCLLCK

SEQ ID NO: 7127 - protein, 15 aa, Artificial Sequence
  Quasi-synthetic sequence derived from human genome
LVLILLIVTMRRRKK

SEQ ID NO: 7128 - protein, 15 aa, Artificial Sequence
  Quasi-synthetic sequence derived from human genome
LLSRKILRLITIRKL

SEQ ID NO: 7129 - protein, 15 aa, Artificial Sequence
  Quasi-synthetic sequence derived from human genome
YKSRFWLLKLLFRVF

SEQ ID NO: 7130 - protein, 15 aa, Artificial Sequence
  Quasi-synthetic sequence derived from human genome
FLLLFTFLKKNRKKK

SEQ ID NO: 7131 - protein, 15 aa, Artificial Sequence
  Quasi-synthetic sequence derived from human genome
IRMWLKKCLKRIRAK

SEQ ID NO: 7132 - protein, 15 aa, Artificial Sequence
  Quasi-synthetic sequence derived from human genome
MLRVLRLLRTLRPLR

SEQ ID NO: 7133 - protein, 15 aa, Artificial Sequence
  Quasi-synthetic sequence derived from human genome
ILLRKFCQMRKRRLR

SEQ ID NO: 7134 - protein, 15 aa, Artificial Sequence
  Quasi-synthetic sequence derived from human genome
WVLRWLRSRRRRPRR

SEQ ID NO: 7135 - protein, 15 aa, Artificial Sequence
  Quasi-synthetic sequence derived from human genome
RRRRPKLKKLKKLLM

SEQ ID NO: 7136 - protein, 15 aa, Artificial Sequence
  Quasi-synthetic sequence derived from human genome
LKRFKVMKIKVLRSW

SEQ ID NO: 7137 - protein, 15 aa, Artificial Sequence
  Quasi-synthetic sequence derived from human genome
VIRLARIGRILRLIR

SEQ ID NO: 7138 - protein, 15 aa, Artificial Sequence
  Quasi-synthetic sequence derived from human genome
RVIRLARIGRILRLI

SEQ ID NO: 7139 - protein, 15 aa, Artificial Sequence
  Quasi-synthetic sequence derived from human genome
LKLFLKKKVVVKICK

SEQ ID NO: 7140 - protein, 15 aa, Artificial Sequence
  Quasi-synthetic sequence derived from human genome
MRLMRIFRILKLARH

SEQ ID NO: 7141 - protein, 15 aa, Artificial Sequence
  Quasi-synthetic sequence derived from human genome
RLLRLIILIRIFHLL

SEQ ID NO: 7142 - protein, 15 aa, Artificial Sequence
  Quasi-synthetic sequence derived from human genome
ILRRRWWKYMILGLI

SEQ ID NO: 7143 - protein, 15 aa, Artificial Sequence
  Quasi-synthetic sequence derived from human genome
VLRALRLLRIFKITK

SEQ ID NO: 7144 - protein, 15 aa, Artificial Sequence
  Quasi-synthetic sequence derived from human genome
MRLRLRLLALLLLLL

SEQ ID NO: 7145 - protein, 15 aa, Artificial Sequence
  Quasi-synthetic sequence derived from human genome
VLRVLRLLRTLRPLR

SEQ ID NO: 7146 - protein, 15 aa, Artificial Sequence
  Quasi-synthetic sequence derived from human genome
RRLLLALHRRLRGLR

SEQ ID NO: 7147 - protein, 15 aa, Artificial Sequence
  Quasi-synthetic sequence derived from human genome
RALLLWGRRLRPLLR

SEQ ID NO: 7148 - protein, 15 aa, Artificial Sequence
  Quasi-synthetic sequence derived from human genome
LLLVAMICRRRRRRK

SEQ ID NO: 7149 - protein, 15 aa, Artificial Sequence
  Quasi-synthetic sequence derived from human genome
KFIVWRRFKWVIIGL

SEQ ID NO: 7150 - protein, 15 aa, Artificial Sequence
  Quasi-synthetic sequence derived from human genome
LIFLRIKRRVKSVVL

SEQ ID NO: 7151 - protein, 15 aa, Artificial Sequence
  Quasi-synthetic sequence derived from human genome
LKKYLMKRRWKKNFI

SEQ ID NO: 7152 - protein, 15 aa, Artificial Sequence
  Quasi-synthetic sequence derived from human genome
IVLRFKKTWKLRALK

SEQ ID NO: 7153 - protein, 15 aa, Artificial Sequence
  Quasi-synthetic sequence derived from human genome
WKRRLIRLLLYHFKQ

SEQ ID NO: 7154 - protein, 15 aa, Artificial Sequence
  Quasi-synthetic sequence derived from human genome
RLSKKLRRKLQMWLW

SEQ ID NO: 7155 - protein, 15 aa, Artificial Sequence
  Quasi-synthetic sequence derived from human genome
LLWTFLLQRRFVKKR

SEQ ID NO: 7156 - protein, 15 aa, Artificial Sequence
  Quasi-synthetic sequence derived from human genome
FLRLHRLLLLFLVLR

SEQ ID NO: 7157 - protein, 15 aa, Artificial Sequence
  Quasi-synthetic sequence derived from human genome
LKWRVKKVVLVLLLV

SEQ ID NO: 7158 - protein, 15 aa, Artificial Sequence
  Quasi-synthetic sequence derived from human genome
LKTLRLRLRRCHRFL

SEQ ID NO: 7159 - protein, 15 aa, Artificial Sequence
  Quasi-synthetic sequence derived from human genome
VLRCIRLLRIFKITK

SEQ ID NO: 7160 - protein, 15 aa, Artificial Sequence
  Quasi-synthetic sequence derived from human genome
RLCKLLFFRIRPIFV

SEQ ID NO: 7161 - protein, 15 aa, Artificial Sequence
  Quasi-synthetic sequence derived from human genome
LMKRKIIVLMPWLLR

SEQ ID NO: 7162 - protein, 15 aa, Artificial Sequence
  Quasi-synthetic sequence derived from human genome
LMALVLLQRKLWRRR

SEQ ID NO: 7163 - protein, 15 aa, Artificial Sequence
  Quasi-synthetic sequence derived from human genome
RRRLPFSKWRLAFRF

SEQ ID NO: 7164 - protein, 15 aa, Artificial Sequence
  Quasi-synthetic sequence derived from human genome
MRFRIYKRKVLILTL

SEQ ID NO: 7165 - protein, 15 aa, Artificial Sequence
  Quasi-synthetic sequence derived from human genome
LKRPIKQKRKLRIFI

SEQ ID NO: 7166 - protein, 15 aa, Artificial Sequence
  Quasi-synthetic sequence derived from human genome
LIIRRLHKVLRPFLL

SEQ ID NO: 7167 - protein, 15 aa, Artificial Sequence
  Quasi-synthetic sequence derived from human genome
LFAYVLRRRRKKLPF

SEQ ID NO: 7168 - protein, 15 aa, Artificial Sequence
  Quasi-synthetic sequence derived from human genome
LKTVRLLRLLRLLQK

SEQ ID NO: 7169 - protein, 15 aa, Artificial Sequence
  Quasi-synthetic sequence derived from human genome
RLRRFLRTLRLKLAA

SEQ ID NO: 7170 - protein, 15 aa, Artificial Sequence
  Quasi-synthetic sequence derived from human genome
ILSLLRLLRLSRLIR

SEQ ID NO: 7171 - protein, 15 aa, Artificial Sequence
  Quasi-synthetic sequence derived from human genome
ALRRRLLLLLLVLLI

SEQ ID NO: 7172 - protein, 15 aa, Artificial Sequence
  Quasi-synthetic sequence derived from human genome
RLSRLIFLLRRWAAR

SEQ ID NO: 7173 - protein, 15 aa, Artificial Sequence
  Quasi-synthetic sequence derived from human genome
RSIRILKFLVAKRKF

SEQ ID NO: 7174 - protein, 15 aa, Artificial Sequence
  Quasi-synthetic sequence derived from human genome
RWRMRKLKYKHLAFL

SEQ ID NO: 7175 - protein, 15 aa, Artificial Sequence
  Quasi-synthetic sequence derived from human genome
VFLFRLFKRRQGRIF

SEQ ID NO: 7176 - protein, 15 aa, Artificial Sequence
  Quasi-synthetic sequence derived from human genome
VLLLCRLRRLRARAR

SEQ ID NO: 7177 - protein, 15 aa, Artificial Sequence
  Quasi-synthetic sequence derived from human genome
WKLLPLLRSVLRFRL

SEQ ID NO: 7178 - protein, 15 aa, Artificial Sequence
  Quasi-synthetic sequence derived from human genome
FLLRRRFLHLKKAAI

SEQ ID NO: 7179 - protein, 15 aa, Artificial Sequence
  Quasi-synthetic sequence derived from human genome
FIKVVQFFRILRIFK

SEQ ID NO: 7180 - protein, 15 aa, Artificial Sequence
  Quasi-synthetic sequence derived from human genome
LGFLFKRFLRIQRLF

SEQ ID NO: 7181 - protein, 15 aa, Artificial Sequence
  Quasi-synthetic sequence derived from human genome
FWKTWIFWKTWIFRK

SEQ ID NO: 7182 - protein, 15 aa, Artificial Sequence
  Quasi-synthetic sequence derived from human genome
SLRWCGRRRLRWRLL

SEQ ID NO: 7183 - protein, 15 aa, Artificial Sequence
  Quasi-synthetic sequence derived from human genome
LIRIRKLTLKRQRKL

SEQ ID NO: 7184 - protein, 15 aa, Artificial Sequence
  Quasi-synthetic sequence derived from human genome
VLRLLRALRMLKLGR

SEQ ID NO: 7185 - protein, 15 aa, Artificial Sequence
  Quasi-synthetic sequence derived from human genome
LLALRLRRWHKSRLL

SEQ ID NO: 7186 - protein, 15 aa, Artificial Sequence
  Quasi-synthetic sequence derived from human genome
LQRYAWRKRWFVLRR

SEQ ID NO: 7187 - protein, 15 aa, Artificial Sequence
  Quasi-synthetic sequence derived from human genome
RVIFLNRKILLIRPK

SEQ ID NO: 7188 - protein, 15 aa, Artificial Sequence
  Quasi-synthetic sequence derived from human genome
RRFKLKFLAKVILGK

SEQ ID NO: 7189 - protein, 15 aa, Artificial Sequence
  Quasi-synthetic sequence derived from human genome
RRFRSLKMWFVFRMY

SEQ ID NO: 7190 - protein, 15 aa, Artificial Sequence
  Quasi-synthetic sequence derived from human genome
LKRMKIIKHFIKIAL

SEQ ID NO: 7191 - protein, 15 aa, Artificial Sequence
  Quasi-synthetic sequence derived from human genome
KLLAKKRVVRMLLVI

SEQ ID NO: 7192 - protein, 15 aa, Artificial Sequence
  Quasi-synthetic sequence derived from human genome
MRKAMKRLWIRTLRL

SEQ ID NO: 7193 - protein, 15 aa, Artificial Sequence
  Quasi-synthetic sequence derived from human genome
VKRRWRLSRIVFRHL

SEQ ID NO: 7194 - protein, 15 aa, Artificial Sequence
  Quasi-synthetic sequence derived from human genome
LWKIGFFKRPLKKKM

SEQ ID NO: 7195 - protein, 15 aa, Artificial Sequence
  Quasi-synthetic sequence derived from human genome
KLKQFTKILRRKRLL

SEQ ID NO: 7196 - protein, 15 aa, Artificial Sequence
  Quasi-synthetic sequence derived from human genome
VILKRKWWKYILLGL

SEQ ID NO: 7197 - protein, 15 aa, Artificial Sequence
  Quasi-synthetic sequence derived from human genome
WKRARIFPMIFKKVR

SEQ ID NO: 7198 - protein, 15 aa, Artificial Sequence
  Quasi-synthetic sequence derived from human genome
ILLKLAKFKIGFLRL

SEQ ID NO: 7199 - protein, 15 aa, Artificial Sequence
  Quasi-synthetic sequence derived from human genome
RRFRTLMMRRRFLSL

SEQ ID NO: 7200 - protein, 15 aa, Artificial Sequence
  Quasi-synthetic sequence derived from human genome
KRWLGKLRRKRRWRR

SEQ ID NO: 7201 - protein, 15 aa, Artificial Sequence
  Quasi-synthetic sequence derived from human genome
FIIIVLYMLRFKKYK

SEQ ID NO: 7202 - protein, 15 aa, Artificial Sequence
  Quasi-synthetic sequence derived from human genome
RLRFLKLKRQTKVLL

SEQ ID NO: 7203 - protein, 15 aa, Artificial Sequence
  Quasi-synthetic sequence derived from human genome
LLFLMRKDKKKLRRL

SEQ ID NO: 7204 - protein, 15 aa, Artificial Sequence
  Quasi-synthetic sequence derived from human genome
FLRRLIYRRRPMIYV

SEQ ID NO: 7205 - protein, 15 aa, Artificial Sequence
  Quasi-synthetic sequence derived from human genome
LRLRHLRRPRVARLL

SEQ ID NO: 7206 - protein, 15 aa, Artificial Sequence
  Quasi-synthetic sequence derived from human genome
WWFMSVKVKLKRKKR

SEQ ID NO: 7207 - protein, 15 aa, Artificial Sequence
  Quasi-synthetic sequence derived from human genome
MKFFRWVRRAWQRII

SEQ ID NO: 7208 - protein, 15 aa, Artificial Sequence
  Quasi-synthetic sequence derived from human genome
LKRKYWWKNLKMMII

SEQ ID NO: 7209 - protein, 15 aa, Artificial Sequence
  Quasi-synthetic sequence derived from human genome
LLWLKRGLKFLKGFL

SEQ ID NO: 7210 - protein, 15 aa, Artificial Sequence
  Quasi-synthetic sequence derived from human genome
IRRLRNIRRAVVRLL

SEQ ID NO: 7211 - protein, 15 aa, Artificial Sequence
  Quasi-synthetic sequence derived from human genome
KKRVIRMLIVIVVLF

SEQ ID NO: 7212 - protein, 15 aa, Artificial Sequence
  Quasi-synthetic sequence derived from human genome
FVTLRVFRVFRIFKF

SEQ ID NO: 7213 - protein, 15 aa, Artificial Sequence
  Quasi-synthetic sequence derived from human genome
LRKMKIPFLLLFFLW

SEQ ID NO: 7214 - protein, 15 aa, Artificial Sequence
  Quasi-synthetic sequence derived from human genome
MKMMLVRRFRVLILM

SEQ ID NO: 7215 - protein, 15 aa, Artificial Sequence
  Quasi-synthetic sequence derived from human genome
IFWKRYRFKLIAFMV

SEQ ID NO: 7216 - protein, 15 aa, Artificial Sequence
  Quasi-synthetic sequence derived from human genome
ALLIFLLVWLLIRRK

SEQ ID NO: 7217 - protein, 15 aa, Artificial Sequence
  Quasi-synthetic sequence derived from human genome
WLLRKKYLRMRKAAI

SEQ ID NO: 7218 - protein, 15 aa, Artificial Sequence
  Quasi-synthetic sequence derived from human genome
LRRLLLRPRAPVRLL

SEQ ID NO: 7219 - protein, 15 aa, Artificial Sequence
  Quasi-synthetic sequence derived from human genome
FRMKLRNLFTKFIRK

SEQ ID NO: 7220 - protein, 15 aa, Artificial Sequence
  Quasi-synthetic sequence derived from human genome
RILWITLRTWKKFVK

SEQ ID NO: 7221 - protein, 15 aa, Artificial Sequence
  Quasi-synthetic sequence derived from human genome
LLALKLRRWHKSRLL

SEQ ID NO: 7222 - protein, 15 aa, Artificial Sequence
  Quasi-synthetic sequence derived from human genome
IVLLLYLKRLKIIIF

SEQ ID NO: 7223 - protein, 15 aa, Artificial Sequence
  Quasi-synthetic sequence derived from human genome
RSRRKYWFLNRRLII

SEQ ID NO: 7224 - protein, 15 aa, Artificial Sequence
  Quasi-synthetic sequence derived from human genome
RWKFIKRWKTRYFTL

SEQ ID NO: 7225 - protein, 15 aa, Artificial Sequence
  Quasi-synthetic sequence derived from human genome
LLIFLRRRLRKQARA

SEQ ID NO: 7226 - protein, 15 aa, Artificial Sequence
  Quasi-synthetic sequence derived from human genome
KRYKYLRRLFRFRQM

SEQ ID NO: 7227 - protein, 15 aa, Artificial Sequence
  Quasi-synthetic sequence derived from human genome
AIFLILLLVYRMRKK

SEQ ID NO: 7228 - protein, 15 aa, Artificial Sequence
  Quasi-synthetic sequence derived from human genome
VLRCVRLLRIFKITR

SEQ ID NO: 7229 - protein, 15 aa, Artificial Sequence
  Quasi-synthetic sequence derived from human genome
LRVFRVFRIFKFSRH

SEQ ID NO: 7230 - protein, 15 aa, Artificial Sequence
  Quasi-synthetic sequence derived from human genome
RRRRRACIALFLVLL

SEQ ID NO: 7231 - protein, 15 aa, Artificial Sequence
  Quasi-synthetic sequence derived from human genome
IIFRFLTRFFYAKKK

SEQ ID NO: 7232 - protein, 15 aa, Artificial Sequence
  Quasi-synthetic sequence derived from human genome
LLLLMVLLRYVPRRR

SEQ ID NO: 7233 - protein, 15 aa, Artificial Sequence
  Quasi-synthetic sequence derived from human genome
RRRRARLRFMKQLRL

SEQ ID NO: 7234 - protein, 15 aa, Artificial Sequence
  Quasi-synthetic sequence derived from human genome
WRRVLAQRKLLMLKK

SEQ ID NO: 7235 - protein, 15 aa, Artificial Sequence
  Quasi-synthetic sequence derived from human genome
RGILKYLKFHLKRIR

SEQ ID NO: 7236 - protein, 15 aa, Artificial Sequence
  Quasi-synthetic sequence derived from human genome
FLKRVFKRKKPQLRL

SEQ ID NO: 7237 - protein, 15 aa, Artificial Sequence
  Quasi-synthetic sequence derived from human genome
LIALKRKIFPRRRIH

SEQ ID NO: 7238 - protein, 15 aa, Artificial Sequence
  Quasi-synthetic sequence derived from human genome
RWLRWKASLIKLRAL

SEQ ID NO: 7239 - protein, 15 aa, Artificial Sequence
  Quasi-synthetic sequence derived from human genome
ALLFRIVLKRRLNWI

SEQ ID NO: 7240 - protein, 15 aa, Artificial Sequence
  Quasi-synthetic sequence derived from human genome
RLFFRFMNVLIKRCK

SEQ ID NO: 7241 - protein, 15 aa, Artificial Sequence
  Quasi-synthetic sequence derived from human genome
VLWGIRLLLQRKKKL

SEQ ID NO: 7242 - protein, 15 aa, Artificial Sequence
  Quasi-synthetic sequence derived from human genome
VLRSFRLLRVFKLAK

SEQ ID NO: 7243 - protein, 15 aa, Artificial Sequence
  Quasi-synthetic sequence derived from human genome
AQLLARRFLLRRKFI

SEQ ID NO: 7244 - protein, 15 aa, Artificial Sequence
  Quasi-synthetic sequence derived from human genome
IKHWRKMLWRFISLF

SEQ ID NO: 7245 - protein, 15 aa, Artificial Sequence
  Quasi-synthetic sequence derived from human genome
IVLAKKMLRKALKLL

SEQ ID NO: 7246 - protein, 15 aa, Artificial Sequence
  Quasi-synthetic sequence derived from human genome
RRKLLWAIHHWKKIK

SEQ ID NO: 7247 - protein, 15 aa, Artificial Sequence
  Quasi-synthetic sequence derived from human genome
WWLKLRPILKILAKY

SEQ ID NO: 7248 - protein, 15 aa, Artificial Sequence
  Quasi-synthetic sequence derived from human genome
VKRLLIKKLPRVLAI

SEQ ID NO: 7249 - protein, 15 aa, Artificial Sequence
  Quasi-synthetic sequence derived from human genome
LRILRKRNKALRKIR

SEQ ID NO: 7250 - protein, 15 aa, Artificial Sequence
  Quasi-synthetic sequence derived from human genome
LRIFRIPRRPRKLTL

SEQ ID NO: 7251 - protein, 15 aa, Artificial Sequence
  Quasi-synthetic sequence derived from human genome
LRVLRVLRPLKTIKR

SEQ ID NO: 7252 - protein, 15 aa, Artificial Sequence
  Quasi-synthetic sequence derived from human genome
ALLWKRLLIARRSRK

SEQ ID NO: 7253 - protein, 15 aa, Artificial Sequence
  Quasi-synthetic sequence derived from human genome
RPPLLLRPVKLLRRR

SEQ ID NO: 7254 - protein, 15 aa, Artificial Sequence
  Quasi-synthetic sequence derived from human genome
RKKFRMMKIPKPILF

SEQ ID NO: 7255 - protein, 15 aa, Artificial Sequence
  Quasi-synthetic sequence derived from human genome
KFHIRRFIFLFFILV

SEQ ID NO: 7256 - protein, 15 aa, Artificial Sequence
  Quasi-synthetic sequence derived from human genome
LFIMKLRKAHVIWKK

SEQ ID NO: 7257 - protein, 15 aa, Artificial Sequence
  Quasi-synthetic sequence derived from human genome
KIHFWLPVLKMIRKK

SEQ ID NO: 7258 - protein, 15 aa, Artificial Sequence
  Quasi-synthetic sequence derived from human genome
RRAVKILKKKKLRRI

SEQ ID NO: 7259 - protein, 15 aa, Artificial Sequence
  Quasi-synthetic sequence derived from human genome
RKALLIFLVVHRLRW

SEQ ID NO: 7260 - protein, 15 aa, Artificial Sequence
  Quasi-synthetic sequence derived from human genome
VIRLARIGRVLRLIR

SEQ ID NO: 7261 - protein, 15 aa, Artificial Sequence
  Quasi-synthetic sequence derived from human genome
RIVRLARIGRILRLV

SEQ ID NO: 7262 - protein, 15 aa, Artificial Sequence
  Quasi-synthetic sequence derived from human genome
RVIRLARIGRILRLV

SEQ ID NO: 7263 - protein, 15 aa, Artificial Sequence
  Quasi-synthetic sequence derived from human genome
RRSRKLILFIVFLAL

SEQ ID NO: 7264 - protein, 15 aa, Artificial Sequence
  Quasi-synthetic sequence derived from human genome
RRIVVSRGRLRRLLW

SEQ ID NO: 7265 - protein, 15 aa, Artificial Sequence
  Quasi-synthetic sequence derived from human genome
VRLRYFLKVTIVRRL

SEQ ID NO: 7266 - protein, 15 aa, Artificial Sequence
  Quasi-synthetic sequence derived from human genome
LRVRLGRFISRLLLW

SEQ ID NO: 7267 - protein, 15 aa, Artificial Sequence
  Quasi-synthetic sequence derived from human genome
VLRALRLLRIFKVTK

SEQ ID NO: 7268 - protein, 15 aa, Artificial Sequence
  Quasi-synthetic sequence derived from human genome
KIKTFLSLVWKRRIL

SEQ ID NO: 7269 - protein, 15 aa, Artificial Sequence
  Quasi-synthetic sequence derived from human genome
LWFKFQRYFRRKPVR

SEQ ID NO: 7270 - protein, 15 aa, Artificial Sequence
  Quasi-synthetic sequence derived from human genome
FSIWLYWRRKKRKGL

SEQ ID NO: 7271 - protein, 15 aa, Artificial Sequence
  Quasi-synthetic sequence derived from human genome
LRFRRQLLYWFLKVY

SEQ ID NO: 7272 - protein, 15 aa, Artificial Sequence
  Quasi-synthetic sequence derived from human genome
AKVRYKRALLLLRRR

SEQ ID NO: 7273 - protein, 15 aa, Artificial Sequence
  Quasi-synthetic sequence derived from human genome
LRVLRALRILYVMRL

SEQ ID NO: 7274 - protein, 15 aa, Artificial Sequence
  Quasi-synthetic sequence derived from human genome
LVGLLIFFLKRRNKK

SEQ ID NO: 7275 - protein, 15 aa, Artificial Sequence
  Quasi-synthetic sequence derived from human genome
LLRLLRLSRLIRYIH

SEQ ID NO: 7276 - protein, 15 aa, Artificial Sequence
  Quasi-synthetic sequence derived from human genome
RRRLWLGLAWLLLAR

SEQ ID NO: 7277 - protein, 15 aa, Artificial Sequence
  Quasi-synthetic sequence derived from human genome
IRLVRVFRIFKLSRH

SEQ ID NO: 7278 - protein, 15 aa, Artificial Sequence
  Quasi-synthetic sequence derived from human genome
RWILQFRRWARKWSR

SEQ ID NO: 7279 - protein, 15 aa, Artificial Sequence
  Quasi-synthetic sequence derived from human genome
GRRARRRRLVFLWWP

SEQ ID NO: 7280 - protein, 15 aa, Artificial Sequence
  Quasi-synthetic sequence derived from human genome
LKLFRPKKLLPKAFK

SEQ ID NO: 7281 - protein, 15 aa, Artificial Sequence
  Quasi-synthetic sequence derived from human genome
RIYVVLKQRRRKRIL

SEQ ID NO: 7282 - protein, 15 aa, Artificial Sequence
  Quasi-synthetic sequence derived from human genome
RHRRLLLLPLLLFLL

SEQ ID NO: 7283 - protein, 15 aa, Artificial Sequence
  Quasi-synthetic sequence derived from human genome
LRRKKKKTIKMLMLV

SEQ ID NO: 7284 - protein, 15 aa, Artificial Sequence
  Quasi-synthetic sequence derived from human genome
FLKRFLRLRYGRQRR

SEQ ID NO: 7285 - protein, 15 aa, Artificial Sequence
  Quasi-synthetic sequence derived from human genome
LWFRRLYIIFSRYMR

SEQ ID NO: 7286 - protein, 15 aa, Artificial Sequence
  Quasi-synthetic sequence derived from human genome
VKRRLLPMLRLVIPR

SEQ ID NO: 7287 - protein, 15 aa, Artificial Sequence
  Quasi-synthetic sequence derived from human genome
KRKKKKKFCYLCILL

SEQ ID NO: 7288 - protein, 15 aa, Artificial Sequence
  Quasi-synthetic sequence derived from human genome
RKLGIYRRCWLVFRK

SEQ ID NO: 7289 - protein, 15 aa, Artificial Sequence
  Quasi-synthetic sequence derived from human genome
ISLIIMLRIWRVKRV

SEQ ID NO: 7290 - protein, 15 aa, Artificial Sequence
  Quasi-synthetic sequence derived from human genome
LLLLCRWDKRRWRKI

SEQ ID NO: 7291 - protein, 15 aa, Artificial Sequence
  Quasi-synthetic sequence derived from human genome
LLKFNQLKFRKKKLK

SEQ ID NO: 7292 - protein, 15 aa, Artificial Sequence
  Quasi-synthetic sequence derived from human genome
RWRKLFSFTKYFLKI

SEQ ID NO: 7293 - protein, 15 aa, Artificial Sequence
  Quasi-synthetic sequence derived from human genome
LFMRRRHIVRKRTLR

SEQ ID NO: 7294 - protein, 15 aa, Artificial Sequence
  Quasi-synthetic sequence derived from human genome
WIARLRHIKRLRQRI

SEQ ID NO: 7295 - protein, 15 aa, Artificial Sequence
  Quasi-synthetic sequence derived from human genome
IKLTVWKRLFRKVLP

SEQ ID NO: 7296 - protein, 15 aa, Artificial Sequence
  Quasi-synthetic sequence derived from human genome
RLWVLYKGVLKRLIL

SEQ ID NO: 7297 - protein, 15 aa, Artificial Sequence
  Quasi-synthetic sequence derived from human genome
LKRLRLLPALLILRA

SEQ ID NO: 7298 - protein, 15 aa, Artificial Sequence
  Quasi-synthetic sequence derived from human genome
CLIPLKRKRKYFKVF

SEQ ID NO: 7299 - protein, 15 aa, Artificial Sequence
  Quasi-synthetic sequence derived from human genome
LLLLRLVCLKPPRRK

SEQ ID NO: 7300 - protein, 15 aa, Artificial Sequence
  Quasi-synthetic sequence derived from human genome
KKRVVRMLLVIVVLF

SEQ ID NO: 7301 - protein, 15 aa, Artificial Sequence
  Quasi-synthetic sequence derived from human genome
RGRLPRRLLLLLALW

SEQ ID NO: 7302 - protein, 15 aa, Artificial Sequence
  Quasi-synthetic sequence derived from human genome
LWKVKKALKMTIFWR

SEQ ID NO: 7303 - protein, 15 aa, Artificial Sequence
  Quasi-synthetic sequence derived from human genome
LLGLRLRRWHKSRLL

SEQ ID NO: 7304 - protein, 15 aa, Artificial Sequence
  Quasi-synthetic sequence derived from human genome
IRVWFIKVRKMKAIY

SEQ ID NO: 7305 - protein, 15 aa, Artificial Sequence
  Quasi-synthetic sequence derived from human genome
LLYQFRMNFRRRRRL

SEQ ID NO: 7306 - protein, 15 aa, Artificial Sequence
  Quasi-synthetic sequence derived from human genome
RRPLILKRRRLPLPV

SEQ ID NO: 7307 - protein, 15 aa, Artificial Sequence
  Quasi-synthetic sequence derived from human genome
FFKTLKKRAWAIFLR

SEQ ID NO: 7308 - protein, 15 aa, Artificial Sequence
  Quasi-synthetic sequence derived from human genome
FVVYLKRKTLIRLLF

SEQ ID NO: 7309 - protein, 15 aa, Artificial Sequence
  Quasi-synthetic sequence derived from human genome
FIRRNVKLRGRLRRI

SEQ ID NO: 7310 - protein, 15 aa, Artificial Sequence
  Quasi-synthetic sequence derived from human genome
LKVVKHLIRIKPLKL

SEQ ID NO: 7311 - protein, 15 aa, Artificial Sequence
  Quasi-synthetic sequence derived from human genome
IFSKVRIFGLKKRRL

SEQ ID NO: 7312 - protein, 15 aa, Artificial Sequence
  Quasi-synthetic sequence derived from human genome
VKRIRVLVIRKLVRS

SEQ ID NO: 7313 - protein, 15 aa, Artificial Sequence
  Quasi-synthetic sequence derived from human genome
LLAVYFIARKIRKKR

SEQ ID NO: 7314 - protein, 15 aa, Artificial Sequence
  Quasi-synthetic sequence derived from human genome
KPILRKLPRIKKHLL

SEQ ID NO: 7315 - protein, 15 aa, Artificial Sequence
  Quasi-synthetic sequence derived from human genome
FRRKIYYLPRRYKFM

SEQ ID NO: 7316 - protein, 15 aa, Artificial Sequence
  Quasi-synthetic sequence derived from human genome
VMRKKLILFFKRRNH

SEQ ID NO: 7317 - protein, 15 aa, Artificial Sequence
  Quasi-synthetic sequence derived from human genome
RIKVLRSRIRFIHLV

SEQ ID NO: 7318 - protein, 15 aa, Artificial Sequence
  Quasi-synthetic sequence derived from human genome
RKLSVLLLLLGRRRV

SEQ ID NO: 7319 - protein, 15 aa, Artificial Sequence
  Quasi-synthetic sequence derived from human genome
RCLSLLYLRMFKLKK

SEQ ID NO: 7320 - protein, 15 aa, Artificial Sequence
  Quasi-synthetic sequence derived from human genome
FRRKEKMFRFFIRRM

SEQ ID NO: 7321 - protein, 15 aa, Artificial Sequence
  Quasi-synthetic sequence derived from human genome
ILKRLILNFRKGYRR

SEQ ID NO: 7322 - protein, 15 aa, Artificial Sequence
  Quasi-synthetic sequence derived from human genome
LRLPKRLRVVYFLAR

SEQ ID NO: 7323 - protein, 15 aa, Artificial Sequence
  Quasi-synthetic sequence derived from human genome
VRFTKILSLLRLLRL

SEQ ID NO: 7324 - protein, 15 aa, Artificial Sequence
  Quasi-synthetic sequence derived from human genome
IQKMRKFYFRRIMRM

SEQ ID NO: 7325 - protein, 15 aa, Artificial Sequence
  Quasi-synthetic sequence derived from human genome
ARRALLRFLFRQLLL

SEQ ID NO: 7326 - protein, 15 aa, Artificial Sequence
  Quasi-synthetic sequence derived from human genome
SGRKLWKRFFCFLRR

SEQ ID NO: 7327 - protein, 15 aa, Artificial Sequence
  Quasi-synthetic sequence derived from human genome
LLLKRFLLARRSRRG

SEQ ID NO: 7328 - protein, 15 aa, Artificial Sequence
  Quasi-synthetic sequence derived from human genome
LRRVVWIFCRTRLIL

SEQ ID NO: 7329 - protein, 15 aa, Artificial Sequence
  Quasi-synthetic sequence derived from human genome
MGKLITRMWKLLRRR

SEQ ID NO: 7330 - protein, 15 aa, Artificial Sequence
  Quasi-synthetic sequence derived from human genome
FIRHWRQWNRIFRWK

SEQ ID NO: 7331 - protein, 15 aa, Artificial Sequence
  Quasi-synthetic sequence derived from human genome
KKMWIKLRSLLRYMV

SEQ ID NO: 7332 - protein, 15 aa, Artificial Sequence
  Quasi-synthetic sequence derived from human genome
RKIMRFLRRCRHRMR

SEQ ID NO: 7333 - protein, 15 aa, Artificial Sequence
  Quasi-synthetic sequence derived from human genome
KLKWWIGYLQRKFKR

SEQ ID NO: 7334 - protein, 15 aa, Artificial Sequence
  Quasi-synthetic sequence derived from human genome
LKFFFLRTRRFALMV

SEQ ID NO: 7335 - protein, 15 aa, Artificial Sequence
  Quasi-synthetic sequence derived from human genome
LRIKGKRRRKKLILA

SEQ ID NO: 7336 - protein, 15 aa, Artificial Sequence
  Quasi-synthetic sequence derived from human genome
LSRRFRSVKLWFVIR

SEQ ID NO: 7337 - protein, 15 aa, Artificial Sequence
  Quasi-synthetic sequence derived from human genome
IKIYIVLRRRRKRVN

SEQ ID NO: 7338 - protein, 15 aa, Artificial Sequence
  Quasi-synthetic sequence derived from human genome
YWRMYVVRRRYKIRR

SEQ ID NO: 7339 - protein, 15 aa, Artificial Sequence
  Quasi-synthetic sequence derived from human genome
IIITLVVLLLKYRRR

SEQ ID NO: 7340 - protein, 15 aa, Artificial Sequence
  Quasi-synthetic sequence derived from human genome
IFQLWFHFKRYRYRR

SEQ ID NO: 7341 - protein, 15 aa, Artificial Sequence
  Quasi-synthetic sequence derived from human genome
LRKFFLRIGVVYKIW

SEQ ID NO: 7342 - protein, 15 aa, Artificial Sequence
  Quasi-synthetic sequence derived from human genome
PWKRKGRTLFRRLLF

SEQ ID NO: 7343 - protein, 15 aa, Artificial Sequence
  Quasi-synthetic sequence derived from human genome
KKLMRKYTVLRLMIR

SEQ ID NO: 7344 - protein, 15 aa, Artificial Sequence
  Quasi-synthetic sequence derived from human genome
WWWARAARLARLRFR

SEQ ID NO: 7345 - protein, 15 aa, Artificial Sequence
  Quasi-synthetic sequence derived from human genome
VLKHLKLKKLKCVII

SEQ ID NO: 7346 - protein, 15 aa, Artificial Sequence
  Quasi-synthetic sequence derived from human genome
GISRIWVFRLKRRKR

SEQ ID NO: 7347 - protein, 15 aa, Artificial Sequence
  Quasi-synthetic sequence derived from human genome
IFLRNRIRVAIILLK

SEQ ID NO: 7348 - protein, 15 aa, Artificial Sequence
  Quasi-synthetic sequence derived from human genome
LKIKRLRKKFAQKML

SEQ ID NO: 7349 - protein, 15 aa, Artificial Sequence
  Quasi-synthetic sequence derived from human genome
WVNILKISFKRKKFF

SEQ ID NO: 7350 - protein, 15 aa, Artificial Sequence
  Quasi-synthetic sequence derived from human genome
RRRLHGRPVRRLFLL

SEQ ID NO: 7351 - protein, 15 aa, Artificial Sequence
  Quasi-synthetic sequence derived from human genome
WFRRALKYILLGKIF

SEQ ID NO: 7352 - protein, 15 aa, Artificial Sequence
  Quasi-synthetic sequence derived from human genome
IRTRLIRKRFLCLGW

SEQ ID NO: 7353 - protein, 15 aa, Artificial Sequence
  Quasi-synthetic sequence derived from human genome
KRFGMKNFKKRWFRL

SEQ ID NO: 7354 - protein, 15 aa, Artificial Sequence
  Quasi-synthetic sequence derived from human genome
LVRRRKRRFFGLCCL

SEQ ID NO: 7355 - protein, 15 aa, Artificial Sequence
  Quasi-synthetic sequence derived from human genome
QKVWKRWKKRYFVLV

SEQ ID NO: 7356 - protein, 15 aa, Artificial Sequence
  Quasi-synthetic sequence derived from human genome
RLARISLVKKLMKKW

SEQ ID NO: 7357 - protein, 15 aa, Artificial Sequence
  Quasi-synthetic sequence derived from human genome
IRKFRRSLLQLLCLR

SEQ ID NO: 7358 - protein, 15 aa, Artificial Sequence
  Quasi-synthetic sequence derived from human genome
LRKKLIRKMKLILSS

SEQ ID NO: 7359 - protein, 15 aa, Artificial Sequence
  Quasi-synthetic sequence derived from human genome
FKRFHPFCLVLRKRK

SEQ ID NO: 7360 - protein, 15 aa, Artificial Sequence
  Quasi-synthetic sequence derived from human genome
MLRLRLPNLKMVRLR

SEQ ID NO: 7361 - protein, 15 aa, Artificial Sequence
  Quasi-synthetic sequence derived from human genome
LFKSLLGKKKMRILI

SEQ ID NO: 7362 - protein, 15 aa, Artificial Sequence
  Quasi-synthetic sequence derived from human genome
RLRINRFAWPKILKI

SEQ ID NO: 7363 - protein, 15 aa, Artificial Sequence
  Quasi-synthetic sequence derived from human genome
KVFLGFTKVRLLRLR

SEQ ID NO: 7364 - protein, 15 aa, Artificial Sequence
  Quasi-synthetic sequence derived from human genome
RPLIMIRAFRIYFRF

SEQ ID NO: 7365 - protein, 15 aa, Artificial Sequence
  Quasi-synthetic sequence derived from human genome
ARWRRLRLQQLRRLR

SEQ ID NO: 7366 - protein, 15 aa, Artificial Sequence
  Quasi-synthetic sequence derived from human genome
KRIIKVNNRILRLKF

SEQ ID NO: 7367 - protein, 15 aa, Artificial Sequence
  Quasi-synthetic sequence derived from human genome
LLLIRKYIPRRSFFI

SEQ ID NO: 7368 - protein, 15 aa, Artificial Sequence
  Quasi-synthetic sequence derived from human genome
ARTLLRLLLRLLLFL

SEQ ID NO: 7369 - protein, 15 aa, Artificial Sequence
  Quasi-synthetic sequence derived from human genome
FLLKKRKWPLKGWHK

SEQ ID NO: 7370 - protein, 15 aa, Artificial Sequence
  Quasi-synthetic sequence derived from human genome
RRNLLRLYFILLLII

SEQ ID NO: 7371 - protein, 15 aa, Artificial Sequence
  Quasi-synthetic sequence derived from human genome
LRIVRFTKILSLLRL

SEQ ID NO: 7372 - protein, 15 aa, Artificial Sequence
  Quasi-synthetic sequence derived from human genome
RLRVNLRLVINRLKL

SEQ ID NO: 7373 - protein, 15 aa, Artificial Sequence
  Quasi-synthetic sequence derived from human genome
PLRIRRLLRPFFLLQ

SEQ ID NO: 7374 - protein, 15 aa, Artificial Sequence
  Quasi-synthetic sequence derived from human genome
VLIAYILYRKKIFWK

SEQ ID NO: 7375 - protein, 15 aa, Artificial Sequence
  Quasi-synthetic sequence derived from human genome
KKVRRLIMKRIVKIS

SEQ ID NO: 7376 - protein, 15 aa, Artificial Sequence
  Quasi-synthetic sequence derived from human genome
RIRVIKKKKVIMKKR

SEQ ID NO: 7377 - protein, 15 aa, Artificial Sequence
  Quasi-synthetic sequence derived from human genome
LAFIIWLARRLKKGK

SEQ ID NO: 7378 - protein, 15 aa, Artificial Sequence
  Quasi-synthetic sequence derived from human genome
RLASHLRKLRKRLLR

SEQ ID NO: 7379 - protein, 15 aa, Artificial Sequence
  Quasi-synthetic sequence derived from human genome
FLRRRKRFKRQPLLP

SEQ ID NO: 7380 - protein, 15 aa, Artificial Sequence
  Quasi-synthetic sequence derived from human genome
VVVMILIKYRRLRIM

SEQ ID NO: 7381 - protein, 15 aa, Artificial Sequence
  Quasi-synthetic sequence derived from human genome
LIFRFVRTLFKAMRL

SEQ ID NO: 7382 - protein, 15 aa, Artificial Sequence
  Quasi-synthetic sequence derived from human genome
KIILLKPIIKVLPKL

SEQ ID NO: 7383 - protein, 15 aa, Artificial Sequence
  Quasi-synthetic sequence derived from human genome
FLRGWLCRRKWKTII

SEQ ID NO: 7384 - protein, 15 aa, Artificial Sequence
  Quasi-synthetic sequence derived from human genome
FRLIRKMFSFKVSRW

SEQ ID NO: 7385 - protein, 15 aa, Artificial Sequence
  Quasi-synthetic sequence derived from human genome
KRWIFWLWWRACWFV

SEQ ID NO: 7386 - protein, 15 aa, Artificial Sequence
  Quasi-synthetic sequence derived from human genome
RLPQVLRLHLKRFRW

SEQ ID NO: 7387 - protein, 15 aa, Artificial Sequence
  Quasi-synthetic sequence derived from human genome
RAKFWPRRRFNFFVL

SEQ ID NO: 7388 - protein, 15 aa, Artificial Sequence
  Quasi-synthetic sequence derived from human genome
LCIRKFFPKRKCFVF

SEQ ID NO: 7389 - protein, 15 aa, Artificial Sequence
  Quasi-synthetic sequence derived from human genome
LARKIILRCKRKLGL

SEQ ID NO: 7390 - protein, 15 aa, Artificial Sequence
  Quasi-synthetic sequence derived from human genome
LLVILACVLWKKRIK

SEQ ID NO: 7391 - protein, 15 aa, Artificial Sequence
  Quasi-synthetic sequence derived from human genome
RWRRYKYRFVPWIAL

SEQ ID NO: 7392 - protein, 15 aa, Artificial Sequence
  Quasi-synthetic sequence derived from human genome
WIWWRMLRQVLRRGL

SEQ ID NO: 7393 - protein, 15 aa, Artificial Sequence
  Quasi-synthetic sequence derived from human genome
IIFLPPWLFSRRRRL

SEQ ID NO: 7394 - protein, 15 aa, Artificial Sequence
  Quasi-synthetic sequence derived from human genome
IKLWRRNLWIFVSKF

SEQ ID NO: 7395 - protein, 15 aa, Artificial Sequence
  Quasi-synthetic sequence derived from human genome
LIGPRYKLRILRMKL

SEQ ID NO: 7396 - protein, 15 aa, Artificial Sequence
  Quasi-synthetic sequence derived from human genome
RRKSWRLEFLFLRRR

SEQ ID NO: 7397 - protein, 15 aa, Artificial Sequence
  Quasi-synthetic sequence derived from human genome
IFFFIALVFFLYRRR

SEQ ID NO: 7398 - protein, 15 aa, Artificial Sequence
  Quasi-synthetic sequence derived from human genome
ALRIMRIARIFKLAR

SEQ ID NO: 7399 - protein, 15 aa, Artificial Sequence
  Quasi-synthetic sequence derived from human genome
LLLGRWRKKHLTFRI

SEQ ID NO: 7400 - protein, 15 aa, Artificial Sequence
  Quasi-synthetic sequence derived from human genome
KSKIFFLFRLCKKLP

SEQ ID NO: 7401 - protein, 15 aa, Artificial Sequence
  Quasi-synthetic sequence derived from human genome
LLWLLRLLFPRVLCR

SEQ ID NO: 7402 - protein, 15 aa, Artificial Sequence
  Quasi-synthetic sequence derived from human genome
FLRRFPRPLLRLVAL

SEQ ID NO: 7403 - protein, 15 aa, Artificial Sequence
  Quasi-synthetic sequence derived from human genome
MLFKKKKTRKLKIAL

SEQ ID NO: 7404 - protein, 15 aa, Artificial Sequence
  Quasi-synthetic sequence derived from human genome
LRALRAIRVLRRLSF

SEQ ID NO: 7405 - protein, 15 aa, Artificial Sequence
  Quasi-synthetic sequence derived from human genome
KRLKLARAIYRKYIL

SEQ ID NO: 7406 - protein, 15 aa, Artificial Sequence
  Quasi-synthetic sequence derived from human genome
WKIARKWMRRKMGKW

SEQ ID NO: 7407 - protein, 15 aa, Artificial Sequence
  Quasi-synthetic sequence derived from human genome
PLKTFVFFIWRRYWR

SEQ ID NO: 7408 - protein, 15 aa, Artificial Sequence
  Quasi-synthetic sequence derived from human genome
IRKCSRFNFLRFLIR

SEQ ID NO: 7409 - protein, 15 aa, Artificial Sequence
  Quasi-synthetic sequence derived from human genome
ILKKHLRWLKALPRV

SEQ ID NO: 7410 - protein, 15 aa, Artificial Sequence
  Quasi-synthetic sequence derived from human genome
RKKLKMLNIAKKILR

SEQ ID NO: 7411 - protein, 15 aa, Artificial Sequence
  Quasi-synthetic sequence derived from human genome
RLLRGLWQRWRRYKY

SEQ ID NO: 7412 - protein, 15 aa, Artificial Sequence
  Quasi-synthetic sequence derived from human genome
FRKVKRRSLRLYARW

SEQ ID NO: 7413 - protein, 15 aa, Artificial Sequence
  Quasi-synthetic sequence derived from human genome
RARRRRPLFALLLLC

SEQ ID NO: 7414 - protein, 15 aa, Artificial Sequence
  Quasi-synthetic sequence derived from human genome
LLFLHLKRRVRSVIL

SEQ ID NO: 7415 - protein, 15 aa, Artificial Sequence
  Quasi-synthetic sequence derived from human genome
PRLRKRTFILMYLWF

SEQ ID NO: 7416 - protein, 15 aa, Artificial Sequence
  Quasi-synthetic sequence derived from human genome
HYWKKVLPLLKIIKK

SEQ ID NO: 7417 - protein, 15 aa, Artificial Sequence
  Quasi-synthetic sequence derived from human genome
PKSLFYLLLKLKKWI

SEQ ID NO: 7418 - protein, 15 aa, Artificial Sequence
  Quasi-synthetic sequence derived from human genome
IIRLMLKYQKILWKV

SEQ ID NO: 7419 - protein, 15 aa, Artificial Sequence
  Quasi-synthetic sequence derived from human genome
RLLLLWRQVVGFRRL

SEQ ID NO: 7420 - protein, 15 aa, Artificial Sequence
  Quasi-synthetic sequence derived from human genome
RIVLWGFRWLIFRIM

SEQ ID NO: 7421 - protein, 15 aa, Artificial Sequence
  Quasi-synthetic sequence derived from human genome
KHLLRFIKRAMKRHL

SEQ ID NO: 7422 - protein, 15 aa, Artificial Sequence
  Quasi-synthetic sequence derived from human genome
RWLKIIWRRHGIWPL

SEQ ID NO: 7423 - protein, 15 aa, Artificial Sequence
  Quasi-synthetic sequence derived from human genome
KLWSFFIYLLRRQIR

SEQ ID NO: 7424 - protein, 15 aa, Artificial Sequence
  Quasi-synthetic sequence derived from human genome
FLFKRFLRIQRLFPP

SEQ ID NO: 7425 - protein, 15 aa, Artificial Sequence
  Quasi-synthetic sequence derived from human genome
VVLRPLQLLRLFKLK

SEQ ID NO: 7426 - protein, 15 aa, Artificial Sequence
  Quasi-synthetic sequence derived from human genome
FIILLGVIMAKRKRK

SEQ ID NO: 7427 - protein, 15 aa, Artificial Sequence
  Quasi-synthetic sequence derived from human genome
RYSLQKLRLVRWLLK

SEQ ID NO: 7428 - protein, 15 aa, Artificial Sequence
  Quasi-synthetic sequence derived from human genome
RQKLILTPFLLRRLK

SEQ ID NO: 7429 - protein, 15 aa, Artificial Sequence
  Quasi-synthetic sequence derived from human genome
RQYLLPLLRRLARRL

SEQ ID NO: 7430 - protein, 15 aa, Artificial Sequence
  Quasi-synthetic sequence derived from human genome
ILICYLKIVICLRRR

SEQ ID NO: 7431 - protein, 15 aa, Artificial Sequence
  Quasi-synthetic sequence derived from human genome
RAVRILQFRLYKKKF

SEQ ID NO: 7432 - protein, 15 aa, Artificial Sequence
  Quasi-synthetic sequence derived from human genome
FRLTLRAVKLWAKRR

SEQ ID NO: 7433 - protein, 15 aa, Artificial Sequence
  Quasi-synthetic sequence derived from human genome
KIILFLPCISRKLKR

SEQ ID NO: 7434 - protein, 15 aa, Artificial Sequence
  Quasi-synthetic sequence derived from human genome
QLRLLLWKNLTFRRR

SEQ ID NO: 7435 - protein, 15 aa, Artificial Sequence
  Quasi-synthetic sequence derived from human genome
RKRMISLRFLAWYFL

SEQ ID NO: 7436 - protein, 15 aa, Artificial Sequence
  Quasi-synthetic sequence derived from human genome
LFYVKLRWLLKHWRQ

SEQ ID NO: 7437 - protein, 15 aa, Artificial Sequence
  Quasi-synthetic sequence derived from human genome
VILFIGILFIILRKR

SEQ ID NO: 7438 - protein, 15 aa, Artificial Sequence
  Quasi-synthetic sequence derived from human genome
RRKLLLFKTFSRKVV

SEQ ID NO: 7439 - protein, 15 aa, Artificial Sequence
  Quasi-synthetic sequence derived from human genome
RRVRKRWLPKIKSML

SEQ ID NO: 7440 - protein, 15 aa, Artificial Sequence
  Quasi-synthetic sequence derived from human genome
RWKKKQLRRPSLLLL

SEQ ID NO: 7441 - protein, 15 aa, Artificial Sequence
  Quasi-synthetic sequence derived from human genome
LKKKLLPWQRRGLLR

SEQ ID NO: 7442 - protein, 15 aa, Artificial Sequence
  Quasi-synthetic sequence derived from human genome
ILYRRLLLTKLFIRG

SEQ ID NO: 7443 - protein, 15 aa, Artificial Sequence
  Quasi-synthetic sequence derived from human genome
LILMHRLRVIMTRRK

SEQ ID NO: 7444 - protein, 15 aa, Artificial Sequence
  Quasi-synthetic sequence derived from human genome
LKPRMRKIFSRLIYI

SEQ ID NO: 7445 - protein, 15 aa, Artificial Sequence
  Quasi-synthetic sequence derived from human genome
LVLRRLRTIIRKKQK

SEQ ID NO: 7446 - protein, 15 aa, Artificial Sequence
  Quasi-synthetic sequence derived from human genome
KHICWVLLKKFKLPR

SEQ ID NO: 7447 - protein, 15 aa, Artificial Sequence
  Quasi-synthetic sequence derived from human genome
WGWLLRRRRWAALLV

SEQ ID NO: 7448 - protein, 15 aa, Artificial Sequence
  Quasi-synthetic sequence derived from human genome
WVFILFRKAVFQRLK

SEQ ID NO: 7449 - protein, 15 aa, Artificial Sequence
  Quasi-synthetic sequence derived from human genome
VRKKRLIVLFSHWLL

SEQ ID NO: 7450 - protein, 15 aa, Artificial Sequence
  Quasi-synthetic sequence derived from human genome
RWRVLRLGAWARWLL

SEQ ID NO: 7451 - protein, 15 aa, Artificial Sequence
  Quasi-synthetic sequence derived from human genome
FLIRAFRLKKPQRRR

SEQ ID NO: 7452 - protein, 15 aa, Artificial Sequence
  Quasi-synthetic sequence derived from human genome
LRLFRRLLLAALLLV

SEQ ID NO: 7453 - protein, 15 aa, Artificial Sequence
  Quasi-synthetic sequence derived from human genome
ALLWMWWRRNRRGKL

SEQ ID NO: 7454 - protein, 15 aa, Artificial Sequence
  Quasi-synthetic sequence derived from human genome
RLRILMLRKHPRSLL

SEQ ID NO: 7455 - protein, 15 aa, Artificial Sequence
  Quasi-synthetic sequence derived from human genome
KSILFLPCLRKKILK

SEQ ID NO: 7456 - protein, 15 aa, Artificial Sequence
  Quasi-synthetic sequence derived from human genome
RRTVRLRRRLPCRLL

SEQ ID NO: 7457 - protein, 15 aa, Artificial Sequence
  Quasi-synthetic sequence derived from human genome
RRVFGRIRRFFSRRR

SEQ ID NO: 7458 - protein, 15 aa, Artificial Sequence
  Quasi-synthetic sequence derived from human genome
RFGRRFILRWCLLQL

SEQ ID NO: 7459 - protein, 15 aa, Artificial Sequence
  Quasi-synthetic sequence derived from human genome
LYRVRRFDLLKRILK

SEQ ID NO: 7460 - protein, 15 aa, Artificial Sequence
  Quasi-synthetic sequence derived from human genome
HLLKKKILGRVWWLM

SEQ ID NO: 7461 - protein, 15 aa, Artificial Sequence
  Quasi-synthetic sequence derived from human genome
IKTVKRLVKVKVLLK

SEQ ID NO: 7462 - protein, 15 aa, Artificial Sequence
  Quasi-synthetic sequence derived from human genome
LLIIALMLWRLHWRR

SEQ ID NO: 7463 - protein, 15 aa, Artificial Sequence
  Quasi-synthetic sequence derived from human genome
RWLLLKLLLLLLLLL

SEQ ID NO: 7464 - protein, 15 aa, Artificial Sequence
  Quasi-synthetic sequence derived from human genome
FMMWKFINFQLRRWR

SEQ ID NO: 7465 - protein, 15 aa, Artificial Sequence
  Quasi-synthetic sequence derived from human genome
MRLWKARVLKLVLKT

SEQ ID NO: 7466 - protein, 15 aa, Artificial Sequence
  Quasi-synthetic sequence derived from human genome
RKVAKLVHFLLLKYR

SEQ ID NO: 7467 - protein, 15 aa, Artificial Sequence
  Quasi-synthetic sequence derived from human genome
IMRFRKRKNFKKKRI

SEQ ID NO: 7468 - protein, 15 aa, Artificial Sequence
  Quasi-synthetic sequence derived from human genome
KVALAKKLLAKLRFL

SEQ ID NO: 7469 - protein, 15 aa, Artificial Sequence
  Quasi-synthetic sequence derived from human genome
KKMVRRVVCILVWLL

SEQ ID NO: 7470 - protein, 15 aa, Artificial Sequence
  Quasi-synthetic sequence derived from human genome
LRSLRFLQILRMLRM

SEQ ID NO: 7471 - protein, 15 aa, Artificial Sequence
  Quasi-synthetic sequence derived from human genome
LLPLLLLGGWKRWRR

SEQ ID NO: 7472 - protein, 15 aa, Artificial Sequence
  Quasi-synthetic sequence derived from human genome
MFLFRAARKLRQFLK

SEQ ID NO: 7473 - protein, 15 aa, Artificial Sequence
  Quasi-synthetic sequence derived from human genome
LRRAWKRLQLRLHLY

SEQ ID NO: 7474 - protein, 15 aa, Artificial Sequence
  Quasi-synthetic sequence derived from human genome
LARFLLKRGLRNKRI

SEQ ID NO: 7475 - protein, 15 aa, Artificial Sequence
  Quasi-synthetic sequence derived from human genome
RSKLSLIRKFRLFPR

SEQ ID NO: 7476 - protein, 15 aa, Artificial Sequence
  Quasi-synthetic sequence derived from human genome
MFLLLIFSMWKHRKK

SEQ ID NO: 7477 - protein, 15 aa, Artificial Sequence
  Quasi-synthetic sequence derived from human genome
WFRKALKMMLFGKIF

SEQ ID NO: 7478 - protein, 15 aa, Artificial Sequence
  Quasi-synthetic sequence derived from human genome
ALWHRRRILMGKIFR

SEQ ID NO: 7479 - protein, 15 aa, Artificial Sequence
  Quasi-synthetic sequence derived from human genome
HLAWLGKWLRKRRIV

SEQ ID NO: 7480 - protein, 15 aa, Artificial Sequence
  Quasi-synthetic sequence derived from human genome
KIKRLKKSAFVVLIL

SEQ ID NO: 7481 - protein, 15 aa, Artificial Sequence
  Quasi-synthetic sequence derived from human genome
RMMRIFWVIKLARHF

SEQ ID NO: 7482 - protein, 15 aa, Artificial Sequence
  Quasi-synthetic sequence derived from human genome
IYALLSLWYLLRRRR

SEQ ID NO: 7483 - protein, 15 aa, Artificial Sequence
  Quasi-synthetic sequence derived from human genome
KLLKVIRKKLVHKTL

SEQ ID NO: 7484 - protein, 15 aa, Artificial Sequence
  Quasi-synthetic sequence derived from human genome
FKPYVVRLAKLLRKR

SEQ ID NO: 7485 - protein, 15 aa, Artificial Sequence
  Quasi-synthetic sequence derived from human genome
WKFFMARVRLQLKII

SEQ ID NO: 7486 - protein, 15 aa, Artificial Sequence
  Quasi-synthetic sequence derived from human genome
KLAKRLKPLKVRRIK

SEQ ID NO: 7487 - protein, 15 aa, Artificial Sequence
  Quasi-synthetic sequence derived from human genome
AAFRFKRKLPKYLLF

SEQ ID NO: 7488 - protein, 15 aa, Artificial Sequence
  Quasi-synthetic sequence derived from human genome
LLRTKRLHWSRLLFL

SEQ ID NO: 7489 - protein, 15 aa, Artificial Sequence
  Quasi-synthetic sequence derived from human genome
FRKGIMKIMVYKIFR

SEQ ID NO: 7490 - protein, 15 aa, Artificial Sequence
  Quasi-synthetic sequence derived from human genome
KFRRRTCIILALFIL

SEQ ID NO: 7491 - protein, 15 aa, Artificial Sequence
  Quasi-synthetic sequence derived from human genome
ALKFLAKCRKKKKLF

SEQ ID NO: 7492 - protein, 15 aa, Artificial Sequence
  Quasi-synthetic sequence derived from human genome
SILRRWKRNWFALWL

SEQ ID NO: 7493 - protein, 15 aa, Artificial Sequence
  Quasi-synthetic sequence derived from human genome
RIHRRGPKILLLLLF

SEQ ID NO: 7494 - protein, 15 aa, Artificial Sequence
  Quasi-synthetic sequence derived from human genome
KTKYRSFRRRLLKFI

SEQ ID NO: 7495 - protein, 15 aa, Artificial Sequence
  Quasi-synthetic sequence derived from human genome
RKWPLKGWHKRFFVL

SEQ ID NO: 7496 - protein, 15 aa, Artificial Sequence
  Quasi-synthetic sequence derived from human genome
KKLRSKLKPIFPLIL

SEQ ID NO: 7497 - protein, 15 aa, Artificial Sequence
  Quasi-synthetic sequence derived from human genome
LKFRKKKLRFGRSRI

SEQ ID NO: 7498 - protein, 15 aa, Artificial Sequence
  Quasi-synthetic sequence derived from human genome
LKVVRLLRLGRVARK

SEQ ID NO: 7499 - protein, 15 aa, Artificial Sequence
  Quasi-synthetic sequence derived from human genome
LKHLCRLKIRRLMGL

SEQ ID NO: 7500 - protein, 15 aa, Artificial Sequence
  Quasi-synthetic sequence derived from human genome
MKLLKLRRNIVKLSL

SEQ ID NO: 7501 - protein, 15 aa, Artificial Sequence
  Quasi-synthetic sequence derived from human genome
LKTKRILRRNLLALI

SEQ ID NO: 7502 - protein, 15 aa, Artificial Sequence
  Quasi-synthetic sequence derived from human genome
LGKLWRKLFKGIPRL

SEQ ID NO: 7503 - protein, 15 aa, Artificial Sequence
  Quasi-synthetic sequence derived from human genome
FVSLKFRKNFWKLVK

SEQ ID NO: 7504 - protein, 15 aa, Artificial Sequence
  Quasi-synthetic sequence derived from human genome
RRRTTRRWKRWFKFR

SEQ ID NO: 7505 - protein, 15 aa, Artificial Sequence
  Quasi-synthetic sequence derived from human genome
RVVLRRWKSLKLPKK

SEQ ID NO: 7506 - protein, 15 aa, Artificial Sequence
  Quasi-synthetic sequence derived from human genome
WLLLKYKSIISRRFF

SEQ ID NO: 7507 - protein, 15 aa, Artificial Sequence
  Quasi-synthetic sequence derived from human genome
LLRLKAFILFGKLAR

SEQ ID NO: 7508 - protein, 15 aa, Artificial Sequence
  Quasi-synthetic sequence derived from human genome
LLLLALCLLVRRTRR

SEQ ID NO: 7509 - protein, 15 aa, Artificial Sequence
  Quasi-synthetic sequence derived from human genome
WNLPPRRILFIKRFI

SEQ ID NO: 7510 - protein, 15 aa, Artificial Sequence
  Quasi-synthetic sequence derived from human genome
VIAILRLRFLVKKWQ

SEQ ID NO: 7511 - protein, 15 aa, Artificial Sequence
  Quasi-synthetic sequence derived from human genome
AVLLWKMGFFRRRYK

SEQ ID NO: 7512 - protein, 15 aa, Artificial Sequence
  Quasi-synthetic sequence derived from human genome
YLHLKRQPKRRWLFW

SEQ ID NO: 7513 - protein, 15 aa, Artificial Sequence
  Quasi-synthetic sequence derived from human genome
WALLCKNFLKKWRMK

SEQ ID NO: 7514 - protein, 15 aa, Artificial Sequence
  Quasi-synthetic sequence derived from human genome
ISRFRRWLPKKPMRL

SEQ ID NO: 7515 - protein, 15 aa, Artificial Sequence
  Quasi-synthetic sequence derived from human genome
LRVRKAIGKYRIKLL

SEQ ID NO: 7516 - protein, 15 aa, Artificial Sequence
  Quasi-synthetic sequence derived from human genome
WYRRQRLLARTLRLW

SEQ ID NO: 7517 - protein, 15 aa, Artificial Sequence
  Quasi-synthetic sequence derived from human genome
RLKRTLIRKVFNLYL

SEQ ID NO: 7518 - protein, 15 aa, Artificial Sequence
  Quasi-synthetic sequence derived from human genome
RKKQKIIKMLLIVAL

SEQ ID NO: 7519 - protein, 15 aa, Artificial Sequence
  Quasi-synthetic sequence derived from human genome
YLRRRLVPRYRLQLL

SEQ ID NO: 7520 - protein, 15 aa, Artificial Sequence
  Quasi-synthetic sequence derived from human genome
LIWAKFKRRPWWPCR

SEQ ID NO: 7521 - protein, 15 aa, Artificial Sequence
  Quasi-synthetic sequence derived from human genome
LLLLLLLLILRLLRI

SEQ ID NO: 7522 - protein, 15 aa, Artificial Sequence
  Quasi-synthetic sequence derived from human genome
LLRFLSSPKKWKFFK

SEQ ID NO: 7523 - protein, 15 aa, Artificial Sequence
  Quasi-synthetic sequence derived from human genome
FLIYKFKRKIPWINI

SEQ ID NO: 7524 - protein, 15 aa, Artificial Sequence
  Quasi-synthetic sequence derived from human genome
RWKPFLYRGRICRRL

SEQ ID NO: 7525 - protein, 15 aa, Artificial Sequence
  Quasi-synthetic sequence derived from human genome
IRRRLIQRRWGLPRR

SEQ ID NO: 7526 - protein, 15 aa, Artificial Sequence
  Quasi-synthetic sequence derived from human genome
RTGIKRRILLLIPKW

SEQ ID NO: 7527 - protein, 15 aa, Artificial Sequence
  Quasi-synthetic sequence derived from human genome
WLRKLRLHKYYPVFK

SEQ ID NO: 7528 - protein, 15 aa, Artificial Sequence
  Quasi-synthetic sequence derived from human genome
WKHLSVRRFFWWARF

SEQ ID NO: 7529 - protein, 15 aa, Artificial Sequence
  Quasi-synthetic sequence derived from human genome
RISITFFRLFRVMRL

SEQ ID NO: 7530 - protein, 15 aa, Artificial Sequence
  Quasi-synthetic sequence derived from human genome
LRSLRFLQILRMIRM

SEQ ID NO: 7531 - protein, 15 aa, Artificial Sequence
  Quasi-synthetic sequence derived from human genome
RKVIKRVAQWILWIL

SEQ ID NO: 7532 - protein, 15 aa, Artificial Sequence
  Quasi-synthetic sequence derived from human genome
VLLTLVFWKLIRSRR

SEQ ID NO: 7533 - protein, 15 aa, Artificial Sequence
  Quasi-synthetic sequence derived from human genome
FKLYMPRGRYWRLRL

SEQ ID NO: 7534 - protein, 15 aa, Artificial Sequence
  Quasi-synthetic sequence derived from human genome
RVFRLFQRRLLQLRA

SEQ ID NO: 7535 - protein, 15 aa, Artificial Sequence
  Quasi-synthetic sequence derived from human genome
RLKKAIHLKKLNFLK

SEQ ID NO: 7536 - protein, 15 aa, Artificial Sequence
  Quasi-synthetic sequence derived from human genome
KRLKKHLPQILKLLK

SEQ ID NO: 7537 - protein, 15 aa, Artificial Sequence
  Quasi-synthetic sequence derived from human genome
LAVALVLYIRKKKRL

SEQ ID NO: 7538 - protein, 15 aa, Artificial Sequence
  Quasi-synthetic sequence derived from human genome
LMVMYFFFRVRSRRW

SEQ ID NO: 7539 - protein, 15 aa, Artificial Sequence
  Quasi-synthetic sequence derived from human genome
FICYFKIYIRLKRRN

SEQ ID NO: 7540 - protein, 15 aa, Artificial Sequence
  Quasi-synthetic sequence derived from human genome
RKILRLITIRKLFTA

SEQ ID NO: 7541 - protein, 15 aa, Artificial Sequence
  Quasi-synthetic sequence derived from human genome
WRKRCLYFFVLLLMI

SEQ ID NO: 7542 - protein, 15 aa, Artificial Sequence
  Quasi-synthetic sequence derived from human genome
FVKRVIMSRFFKIIM

SEQ ID NO: 7543 - protein, 15 aa, Artificial Sequence
  Quasi-synthetic sequence derived from human genome
LIVWFFVCPRMKRKI

SEQ ID NO: 7544 - protein, 15 aa, Artificial Sequence
  Quasi-synthetic sequence derived from human genome
YLRIIRFLPLFKIIV

SEQ ID NO: 7545 - protein, 15 aa, Artificial Sequence
  Quasi-synthetic sequence derived from human genome
KIWLRLRGLRKYKKT

SEQ ID NO: 7546 - protein, 15 aa, Artificial Sequence
  Quasi-synthetic sequence derived from human genome
KILKVIRKNLVKKCL

SEQ ID NO: 7547 - protein, 15 aa, Artificial Sequence
  Quasi-synthetic sequence derived from human genome
IRKRWLRKPRPVSLF

SEQ ID NO: 7548 - protein, 15 aa, Artificial Sequence
  Quasi-synthetic sequence derived from human genome
LHWKKVYLKAILRMK

SEQ ID NO: 7549 - protein, 15 aa, Artificial Sequence
  Quasi-synthetic sequence derived from human genome
RRQILLPFRKPLIIF

SEQ ID NO: 7550 - protein, 15 aa, Artificial Sequence
  Quasi-synthetic sequence derived from human genome
LIFLHLKRRVKSVIL

SEQ ID NO: 7551 - protein, 15 aa, Artificial Sequence
  Quasi-synthetic sequence derived from human genome
FIFLHLKRRVKSVIL

SEQ ID NO: 7552 - protein, 15 aa, Artificial Sequence
  Quasi-synthetic sequence derived from human genome
VFKKLLRLFSLVIWI

SEQ ID NO: 7553 - protein, 15 aa, Artificial Sequence
  Quasi-synthetic sequence derived from human genome
VILAIRRAKNLRRLL

SEQ ID NO: 7554 - protein, 15 aa, Artificial Sequence
  Quasi-synthetic sequence derived from human genome
IVLRRVKAFVKRLLQ

SEQ ID NO: 7555 - protein, 15 aa, Artificial Sequence
  Quasi-synthetic sequence derived from human genome
LLKYLVYILRKAARR

SEQ ID NO: 7556 - protein, 15 aa, Artificial Sequence
  Quasi-synthetic sequence derived from human genome
KILLLCLCLILLRVR

SEQ ID NO: 7557 - protein, 15 aa, Artificial Sequence
  Quasi-synthetic sequence derived from human genome
ANMWKLRPLLKKWLK

SEQ ID NO: 7558 - protein, 15 aa, Artificial Sequence
  Quasi-synthetic sequence derived from human genome
FWKLVNKKWMLTLLR

SEQ ID NO: 7559 - protein, 15 aa, Artificial Sequence
  Quasi-synthetic sequence derived from human genome
LWLTWLLKAFWGKKR

SEQ ID NO: 7560 - protein, 15 aa, Artificial Sequence
  Quasi-synthetic sequence derived from human genome
WLARRRFQSIRRFVL

SEQ ID NO: 7561 - protein, 15 aa, Artificial Sequence
  Quasi-synthetic sequence derived from human genome
LFLAFLLLFLYRRCK

SEQ ID NO: 7562 - protein, 15 aa, Artificial Sequence
  Quasi-synthetic sequence derived from human genome
LRRLRGLLRVLRGRP

SEQ ID NO: 7563 - protein, 15 aa, Artificial Sequence
  Quasi-synthetic sequence derived from human genome
LIILVYKAKKRCIFF

SEQ ID NO: 7564 - protein, 15 aa, Artificial Sequence
  Quasi-synthetic sequence derived from human genome
LRKRTLKVLTFLVLF

SEQ ID NO: 7565 - protein, 15 aa, Artificial Sequence
  Quasi-synthetic sequence derived from human genome
VRRRKKLPSVLLFKK

SEQ ID NO: 7566 - protein, 15 aa, Artificial Sequence
  Quasi-synthetic sequence derived from human genome
PFFKKKLTSLRLKRF

SEQ ID NO: 7567 - protein, 15 aa, Artificial Sequence
  Quasi-synthetic sequence derived from human genome
LYRRAVLLQRFIKIL

SEQ ID NO: 7568 - protein, 15 aa, Artificial Sequence
  Quasi-synthetic sequence derived from human genome
LRAWKRIFWRQILLT

SEQ ID NO: 7569 - protein, 15 aa, Artificial Sequence
  Quasi-synthetic sequence derived from human genome
MLRVLCLLRPWRPLR

SEQ ID NO: 7570 - protein, 15 aa, Artificial Sequence
  Quasi-synthetic sequence derived from human genome
LLLRWRRPALHRPIK

SEQ ID NO: 7571 - protein, 15 aa, Artificial Sequence
  Quasi-synthetic sequence derived from human genome
LLLASLIKIRRLFHK

SEQ ID NO: 7572 - protein, 15 aa, Artificial Sequence
  Quasi-synthetic sequence derived from human genome
LKMKLKRRRVSLVLP

SEQ ID NO: 7573 - protein, 15 aa, Artificial Sequence
  Quasi-synthetic sequence derived from human genome
KIDVFKRKLKMWLKR

SEQ ID NO: 7574 - protein, 15 aa, Artificial Sequence
  Quasi-synthetic sequence derived from human genome
TYFWRFKLFLLRILY

SEQ ID NO: 7575 - protein, 15 aa, Artificial Sequence
  Quasi-synthetic sequence derived from human genome
LRRLLRLLVLGLWLA

SEQ ID NO: 7576 - protein, 15 aa, Artificial Sequence
  Quasi-synthetic sequence derived from human genome
KRFQKAFLKIFCIKK

SEQ ID NO: 7577 - protein, 15 aa, Artificial Sequence
  Quasi-synthetic sequence derived from human genome
LLLFQVIRLYQRRRW

SEQ ID NO: 7578 - protein, 15 aa, Artificial Sequence
  Quasi-synthetic sequence derived from human genome
KILGVLRVLRLLRTL

SEQ ID NO: 7579 - protein, 15 aa, Artificial Sequence
  Quasi-synthetic sequence derived from human genome
ALLLRRVPLFSLRFR

SEQ ID NO: 7580 - protein, 15 aa, Artificial Sequence
  Quasi-synthetic sequence derived from human genome
LRNKRIGHFLFWFLR

SEQ ID NO: 7581 - protein, 15 aa, Artificial Sequence
  Quasi-synthetic sequence derived from human genome
VKRLRPRLSAILFKL

SEQ ID NO: 7582 - protein, 15 aa, Artificial Sequence
  Quasi-synthetic sequence derived from human genome
LRRKTKKVKKKCFWW

SEQ ID NO: 7583 - protein, 15 aa, Artificial Sequence
  Quasi-synthetic sequence derived from human genome
IALLRKRLQQLRLKK

SEQ ID NO: 7584 - protein, 15 aa, Artificial Sequence
  Quasi-synthetic sequence derived from human genome
ILIKGSFRILKLIVR

SEQ ID NO: 7585 - protein, 15 aa, Artificial Sequence
  Quasi-synthetic sequence derived from human genome
WRRYWRTLVLLLLVL

SEQ ID NO: 7586 - protein, 15 aa, Artificial Sequence
  Quasi-synthetic sequence derived from human genome
RKRCLYFFVLLLMIL

SEQ ID NO: 7587 - protein, 15 aa, Artificial Sequence
  Quasi-synthetic sequence derived from human genome
LRLLRTLRPLRVISR

SEQ ID NO: 7588 - protein, 15 aa, Artificial Sequence
  Quasi-synthetic sequence derived from human genome
WKTARTFLYWRLRRL

SEQ ID NO: 7589 - protein, 15 aa, Artificial Sequence
  Quasi-synthetic sequence derived from human genome
ILFVYLVIRALRLWR

SEQ ID NO: 7590 - protein, 15 aa, Artificial Sequence
  Quasi-synthetic sequence derived from human genome
RYQKIMKRLIKRYVL

SEQ ID NO: 7591 - protein, 15 aa, Artificial Sequence
  Quasi-synthetic sequence derived from human genome
KRAIRIILSFFFLFL

SEQ ID NO: 7592 - protein, 15 aa, Artificial Sequence
  Quasi-synthetic sequence derived from human genome
LLKWPLRFVIIHKRC

SEQ ID NO: 7593 - protein, 15 aa, Artificial Sequence
  Quasi-synthetic sequence derived from human genome
LWLRAKFQRLLFKLG

SEQ ID NO: 7594 - protein, 15 aa, Artificial Sequence
  Quasi-synthetic sequence derived from human genome
LRMAKKRVIVKKLPI

SEQ ID NO: 7595 - protein, 15 aa, Artificial Sequence
  Quasi-synthetic sequence derived from human genome
KRLITYRLRHLLRAR

SEQ ID NO: 7596 - protein, 15 aa, Artificial Sequence
  Quasi-synthetic sequence derived from human genome
RTRALLRRFPRMLLV

SEQ ID NO: 7597 - protein, 15 aa, Artificial Sequence
  Quasi-synthetic sequence derived from human genome
LILTYNLRKRIVFRK

SEQ ID NO: 7598 - protein, 15 aa, Artificial Sequence
  Quasi-synthetic sequence derived from human genome
LKIKNTFCLWKRLIK

SEQ ID NO: 7599 - protein, 15 aa, Artificial Sequence
  Quasi-synthetic sequence derived from human genome
KLYVRLFQRKLSWIK

SEQ ID NO: 7600 - protein, 15 aa, Artificial Sequence
  Quasi-synthetic sequence derived from human genome
KPIQRLLHYRLLLRR

SEQ ID NO: 7601 - protein, 15 aa, Artificial Sequence
  Quasi-synthetic sequence derived from human genome
LTPRARARRLWLLLR

SEQ ID NO: 7602 - protein, 15 aa, Artificial Sequence
  Quasi-synthetic sequence derived from human genome
RIIRRGFIMLTRLVL

SEQ ID NO: 7603 - protein, 15 aa, Artificial Sequence
  Quasi-synthetic sequence derived from human genome
GPLLFVKLRKRHLLK

SEQ ID NO: 7604 - protein, 15 aa, Artificial Sequence
  Quasi-synthetic sequence derived from human genome
VILVILFKCGFFKRK

SEQ ID NO: 7605 - protein, 15 aa, Artificial Sequence
  Quasi-synthetic sequence derived from human genome
LFLRRRCFLLTFYLW

SEQ ID NO: 7606 - protein, 15 aa, Artificial Sequence
  Quasi-synthetic sequence derived from human genome
FFKKRVRRWIKSPMV

SEQ ID NO: 7607 - protein, 15 aa, Artificial Sequence
  Quasi-synthetic sequence derived from human genome
YLRKRFGGRRIRLYL

SEQ ID NO: 7608 - protein, 15 aa, Artificial Sequence
  Quasi-synthetic sequence derived from human genome
RLRINRFAWPKVLKI

SEQ ID NO: 7609 - protein, 15 aa, Artificial Sequence
  Quasi-synthetic sequence derived from human genome
WLRRGKTLKLIFSLR

SEQ ID NO: 7610 - protein, 15 aa, Artificial Sequence
  Quasi-synthetic sequence derived from human genome
AFVLFLRLRSIRCLR

SEQ ID NO: 7611 - protein, 15 aa, Artificial Sequence
  Quasi-synthetic sequence derived from human genome
KKNIFLLFKKLCSFR

SEQ ID NO: 7612 - protein, 15 aa, Artificial Sequence
  Quasi-synthetic sequence derived from human genome
KLSKRQLFFRKKLLH

SEQ ID NO: 7613 - protein, 15 aa, Artificial Sequence
  Quasi-synthetic sequence derived from human genome
LRKLRIGTRRPRIRW

SEQ ID NO: 7614 - protein, 15 aa, Artificial Sequence
  Quasi-synthetic sequence derived from human genome
RRFWRRKQLRAHLRR

SEQ ID NO: 7615 - protein, 15 aa, Artificial Sequence
  Quasi-synthetic sequence derived from human genome
LRLLWRKLLWHQVFF

SEQ ID NO: 7616 - protein, 15 aa, Artificial Sequence
  Quasi-synthetic sequence derived from human genome
RLKLKCIFCRHRVKR

SEQ ID NO: 7617 - protein, 15 aa, Artificial Sequence
  Quasi-synthetic sequence derived from human genome
LFRCRRLRGWWPVVK

SEQ ID NO: 7618 - protein, 15 aa, Artificial Sequence
  Quasi-synthetic sequence derived from human genome
FRKMKIFMKNLLTKI

SEQ ID NO: 7619 - protein, 15 aa, Artificial Sequence
  Quasi-synthetic sequence derived from human genome
ILHLQRALVLRRKRK

SEQ ID NO: 7620 - protein, 15 aa, Artificial Sequence
  Quasi-synthetic sequence derived from human genome
RKSYPMLKLVRLKLW

SEQ ID NO: 7621 - protein, 15 aa, Artificial Sequence
  Quasi-synthetic sequence derived from human genome
RSPRVRLLLLLLLLL

SEQ ID NO: 7622 - protein, 15 aa, Artificial Sequence
  Quasi-synthetic sequence derived from human genome
VLLLLLLGLLRPLRR

SEQ ID NO: 7623 - protein, 15 aa, Artificial Sequence
  Quasi-synthetic sequence derived from human genome
VKFLLLFYLKKLTLF

SEQ ID NO: 7624 - protein, 15 aa, Artificial Sequence
  Quasi-synthetic sequence derived from human genome
IICIVIAILLYKRKR

SEQ ID NO: 7625 - protein, 15 aa, Artificial Sequence
  Quasi-synthetic sequence derived from human genome
VRKVFLRLLPQLLRM

SEQ ID NO: 7626 - protein, 15 aa, Artificial Sequence
  Quasi-synthetic sequence derived from human genome
ILLIGTWALFFRKRR

SEQ ID NO: 7627 - protein, 15 aa, Artificial Sequence
  Quasi-synthetic sequence derived from human genome
IERRKRWRTIKLLLR

SEQ ID NO: 7628 - protein, 15 aa, Artificial Sequence
  Quasi-synthetic sequence derived from human genome
VIFPAWYWRRRPKRL

SEQ ID NO: 7629 - protein, 15 aa, Artificial Sequence
  Quasi-synthetic sequence derived from human genome
RFSRLVLWFAAFRKL

SEQ ID NO: 7630 - protein, 15 aa, Artificial Sequence
  Quasi-synthetic sequence derived from human genome
KCKALTKFKFVFFLR

SEQ ID NO: 7631 - protein, 15 aa, Artificial Sequence
  Quasi-synthetic sequence derived from human genome
KRLFLQKLPKLLCMK

SEQ ID NO: 7632 - protein, 15 aa, Artificial Sequence
  Quasi-synthetic sequence derived from human genome
IFLRQRIRIAIALLK

SEQ ID NO: 7633 - protein, 15 aa, Artificial Sequence
  Quasi-synthetic sequence derived from human genome
KVRRVFVRKVYTILL

SEQ ID NO: 7634 - protein, 15 aa, Artificial Sequence
  Quasi-synthetic sequence derived from human genome
RLLLRFKILRSLQAF

SEQ ID NO: 7635 - protein, 15 aa, Artificial Sequence
  Quasi-synthetic sequence derived from human genome
FLLRKKRFGQWTKLL

SEQ ID NO: 7636 - protein, 15 aa, Artificial Sequence
  Quasi-synthetic sequence derived from human genome
LSRISKFRRLRQLLR

SEQ ID NO: 7637 - protein, 15 aa, Artificial Sequence
  Quasi-synthetic sequence derived from human genome
LLAIILLLLKIWKSR

SEQ ID NO: 7638 - protein, 15 aa, Artificial Sequence
  Quasi-synthetic sequence derived from human genome
LKRFKVMKPKVLRSW

SEQ ID NO: 7639 - protein, 15 aa, Artificial Sequence
  Quasi-synthetic sequence derived from human genome
FWGKKPWSRKKKILW

SEQ ID NO: 7640 - protein, 15 aa, Artificial Sequence
  Quasi-synthetic sequence derived from human genome
FLIPFLLSLKKKMKV

SEQ ID NO: 7641 - protein, 15 aa, Artificial Sequence
  Quasi-synthetic sequence derived from human genome
LVAILWKLGFFKRKY

SEQ ID NO: 7642 - protein, 15 aa, Artificial Sequence
  Quasi-synthetic sequence derived from human genome
IKKFQFIKSLRCFWK

SEQ ID NO: 7643 - protein, 15 aa, Artificial Sequence
  Quasi-synthetic sequence derived from human genome
WRHALHRRLLNRRLL

SEQ ID NO: 7644 - protein, 15 aa, Artificial Sequence
  Quasi-synthetic sequence derived from human genome
RRRAVGWWKRLFTLK

SEQ ID NO: 7645 - protein, 15 aa, Artificial Sequence
  Quasi-synthetic sequence derived from human genome
KFAVRRFFSVYLRRK

SEQ ID NO: 7646 - protein, 15 aa, Artificial Sequence
  Quasi-synthetic sequence derived from human genome
VLFRIIKPRKVFFMA

SEQ ID NO: 7647 - protein, 15 aa, Artificial Sequence
  Quasi-synthetic sequence derived from human genome
LQRRVLLLCKTRRLI

SEQ ID NO: 7648 - protein, 15 aa, Artificial Sequence
  Quasi-synthetic sequence derived from human genome
LVLGLGALRRRKRLL

SEQ ID NO: 7649 - protein, 15 aa, Artificial Sequence
  Quasi-synthetic sequence derived from human genome
RILRIFKLIAPKLLQ

SEQ ID NO: 7650 - protein, 15 aa, Artificial Sequence
  Quasi-synthetic sequence derived from human genome
FLLFYSFWLCCRRRK

SEQ ID NO: 7651 - protein, 15 aa, Artificial Sequence
  Quasi-synthetic sequence derived from human genome
KILKVIRKNIVKKCL

SEQ ID NO: 7652 - protein, 15 aa, Artificial Sequence
  Quasi-synthetic sequence derived from human genome
RILINLMKYLQKWKR

SEQ ID NO: 7653 - protein, 15 aa, Artificial Sequence
  Quasi-synthetic sequence derived from human genome
LIVKLRRSFRTLIVL

SEQ ID NO: 7654 - protein, 15 aa, Artificial Sequence
  Quasi-synthetic sequence derived from human genome
KLRHWQWWRLFTKVK

SEQ ID NO: 7655 - protein, 15 aa, Artificial Sequence
  Quasi-synthetic sequence derived from human genome
RPRVLLRWWLGWRQL

SEQ ID NO: 7656 - protein, 15 aa, Artificial Sequence
  Quasi-synthetic sequence derived from human genome
KYRLRRKFPLPRTIW

SEQ ID NO: 7657 - protein, 15 aa, Artificial Sequence
  Quasi-synthetic sequence derived from human genome
RRMGAVIKIRFFKIM

SEQ ID NO: 7658 - protein, 15 aa, Artificial Sequence
  Quasi-synthetic sequence derived from human genome
LRRILIRYYIKSIIY

SEQ ID NO: 7659 - protein, 15 aa, Artificial Sequence
  Quasi-synthetic sequence derived from human genome
RGLWRLFRKKNHFLM

SEQ ID NO: 7660 - protein, 15 aa, Artificial Sequence
  Quasi-synthetic sequence derived from human genome
YRKLVKKTRFLRRKV

SEQ ID NO: 7661 - protein, 15 aa, Artificial Sequence
  Quasi-synthetic sequence derived from human genome
LLALILPLLFYLRKR

SEQ ID NO: 7662 - protein, 15 aa, Artificial Sequence
  Quasi-synthetic sequence derived from human genome
KKKLRRLLKYMFIRD

SEQ ID NO: 7663 - protein, 15 aa, Artificial Sequence
  Quasi-synthetic sequence derived from human genome
FRVFHLSLWRLMKKV

SEQ ID NO: 7664 - protein, 15 aa, Artificial Sequence
  Quasi-synthetic sequence derived from human genome
FIFIFTFVKKKKIGF

SEQ ID NO: 7665 - protein, 15 aa, Artificial Sequence
  Quasi-synthetic sequence derived from human genome
LLVVLILVKYKGLKR

SEQ ID NO: 7666 - protein, 15 aa, Artificial Sequence
  Quasi-synthetic sequence derived from human genome
LLKIGKRNFYIIKWL

SEQ ID NO: 7667 - protein, 15 aa, Artificial Sequence
  Quasi-synthetic sequence derived from human genome
VRLNRYKIIKLLLLH

SEQ ID NO: 7668 - protein, 15 aa, Artificial Sequence
  Quasi-synthetic sequence derived from human genome
RRSLLRYFYRQLLLF

SEQ ID NO: 7669 - protein, 15 aa, Artificial Sequence
  Quasi-synthetic sequence derived from human genome
LLARMSRLLLLLLLK

SEQ ID NO: 7670 - protein, 15 aa, Artificial Sequence
  Quasi-synthetic sequence derived from human genome
LKVVAKVIRALLRIL

SEQ ID NO: 7671 - protein, 15 aa, Artificial Sequence
  Quasi-synthetic sequence derived from human genome
KFFRRLSTLILHLRI

SEQ ID NO: 7672 - protein, 15 aa, Artificial Sequence
  Quasi-synthetic sequence derived from human genome
KFRLLGKIAWRSFLL

SEQ ID NO: 7673 - protein, 15 aa, Artificial Sequence
  Quasi-synthetic sequence derived from human genome
LLWKHLKSSLRILFR

SEQ ID NO: 7674 - protein, 15 aa, Artificial Sequence
  Quasi-synthetic sequence derived from human genome
LAFVLVLLALRLRRW

SEQ ID NO: 7675 - protein, 15 aa, Artificial Sequence
  Quasi-synthetic sequence derived from human genome
KPLRPILAARLRRRL

SEQ ID NO: 7676 - protein, 15 aa, Artificial Sequence
  Quasi-synthetic sequence derived from human genome
WKGLKTNFRLLKRRL

SEQ ID NO: 7677 - protein, 15 aa, Artificial Sequence
  Quasi-synthetic sequence derived from human genome
RYVSWRRKKLYLLFA

SEQ ID NO: 7678 - protein, 15 aa, Artificial Sequence
  Quasi-synthetic sequence derived from human genome
RVAQVLRLMRIFRIL

SEQ ID NO: 7679 - protein, 15 aa, Artificial Sequence
  Quasi-synthetic sequence derived from human genome
RMRRIVFAGVILFRL

SEQ ID NO: 7680 - protein, 15 aa, Artificial Sequence
  Quasi-synthetic sequence derived from human genome
PPPPRRRRRRRLLFW

SEQ ID NO: 7681 - protein, 15 aa, Artificial Sequence
  Quasi-synthetic sequence derived from human genome
IRKLYMKSLLKIFAW

SEQ ID NO: 7682 - protein, 15 aa, Artificial Sequence
  Quasi-synthetic sequence derived from human genome
VIGRMRTRLVRKRFL

SEQ ID NO: 7683 - protein, 15 aa, Artificial Sequence
  Quasi-synthetic sequence derived from human genome
LRRQIIKLNRRLQLL

SEQ ID NO: 7684 - protein, 15 aa, Artificial Sequence
  Quasi-synthetic sequence derived from human genome
LWVFRRRWRLNFNRQ

SEQ ID NO: 7685 - protein, 15 aa, Artificial Sequence
  Quasi-synthetic sequence derived from human genome
RRLNFVRLLMLYTRK

SEQ ID NO: 7686 - protein, 15 aa, Artificial Sequence
  Quasi-synthetic sequence derived from human genome
WRGFHWRQKFLRVKR

SEQ ID NO: 7687 - protein, 15 aa, Artificial Sequence
  Quasi-synthetic sequence derived from human genome
ILFICIIRILLQKLR

SEQ ID NO: 7688 - protein, 15 aa, Artificial Sequence
  Quasi-synthetic sequence derived from human genome
VKVLIRLLKDLRIRF

SEQ ID NO: 7689 - protein, 15 aa, Artificial Sequence
  Quasi-synthetic sequence derived from human genome
MLVFILRNRKRSKRR

SEQ ID NO: 7690 - protein, 15 aa, Artificial Sequence
  Quasi-synthetic sequence derived from human genome
MRNLFVRKLYLWPRF

SEQ ID NO: 7691 - protein, 15 aa, Artificial Sequence
  Quasi-synthetic sequence derived from human genome
RKNRSRIPLLRKRWF

SEQ ID NO: 7692 - protein, 15 aa, Artificial Sequence
  Quasi-synthetic sequence derived from human genome
VWNFLKRHKKKCIFL

SEQ ID NO: 7693 - protein, 15 aa, Artificial Sequence
  Quasi-synthetic sequence derived from human genome
WKKKSLIQKLILLRA

SEQ ID NO: 7694 - protein, 15 aa, Artificial Sequence
  Quasi-synthetic sequence derived from human genome
LCLALIIMKILPKRR

SEQ ID NO: 7695 - protein, 15 aa, Artificial Sequence
  Quasi-synthetic sequence derived from human genome
IFIILRKQKLIFLHW

SEQ ID NO: 7696 - protein, 15 aa, Artificial Sequence
  Quasi-synthetic sequence derived from human genome
LLIIFLSWIILKHRK

SEQ ID NO: 7697 - protein, 15 aa, Artificial Sequence
  Quasi-synthetic sequence derived from human genome
TRSIVLALRLRKRFL

SEQ ID NO: 7698 - protein, 15 aa, Artificial Sequence
  Quasi-synthetic sequence derived from human genome
RLMKIGIVRRILLTL

SEQ ID NO: 7699 - protein, 15 aa, Artificial Sequence
  Quasi-synthetic sequence derived from human genome
RSFRLLRVFKLAKSW

SEQ ID NO: 7700 - protein, 15 aa, Artificial Sequence
  Quasi-synthetic sequence derived from human genome
LLLRRRLRAGRAHLL

SEQ ID NO: 7701 - protein, 15 aa, Artificial Sequence
  Quasi-synthetic sequence derived from human genome
LLAMLLAGRIRLRRI

SEQ ID NO: 7702 - protein, 15 aa, Artificial Sequence
  Quasi-synthetic sequence derived from human genome
LVLVLLILSMRRHRK

SEQ ID NO: 7703 - protein, 15 aa, Artificial Sequence
  Quasi-synthetic sequence derived from human genome
PRVRFLRKVLSILLM

SEQ ID NO: 7704 - protein, 15 aa, Artificial Sequence
  Quasi-synthetic sequence derived from human genome
MRLLRRRHMPLRLAM

SEQ ID NO: 7705 - protein, 15 aa, Artificial Sequence
  Quasi-synthetic sequence derived from human genome
VMILYTRRRWCKRRR

SEQ ID NO: 7706 - protein, 15 aa, Artificial Sequence
  Quasi-synthetic sequence derived from human genome
RWNKIVLKKWYTIFK

SEQ ID NO: 7707 - protein, 15 aa, Artificial Sequence
  Quasi-synthetic sequence derived from human genome
RWSRWRVPGRLLLLL

SEQ ID NO: 7708 - protein, 15 aa, Artificial Sequence
  Quasi-synthetic sequence derived from human genome
LLRICRVLRSLKLLA

SEQ ID NO: 7709 - protein, 15 aa, Artificial Sequence
  Quasi-synthetic sequence derived from human genome
LLLLLCLALWYMRRR

SEQ ID NO: 7710 - protein, 15 aa, Artificial Sequence
  Quasi-synthetic sequence derived from human genome
RLKPLIPGLRKKLKR

SEQ ID NO: 7711 - protein, 15 aa, Artificial Sequence
  Quasi-synthetic sequence derived from human genome
FRFIFALRLSKKQKK

SEQ ID NO: 7712 - protein, 15 aa, Artificial Sequence
  Quasi-synthetic sequence derived from human genome
SFILKKKGLLRLARK

SEQ ID NO: 7713 - protein, 15 aa, Artificial Sequence
  Quasi-synthetic sequence derived from human genome
VRLLRLLRLLPRLDR

SEQ ID NO: 7714 - protein, 15 aa, Artificial Sequence
  Quasi-synthetic sequence derived from human genome
RKKKMCVLRLIQVIR

SEQ ID NO: 7715 - protein, 15 aa, Artificial Sequence
  Quasi-synthetic sequence derived from human genome
RLCHIRGKLRKKVWI

SEQ ID NO: 7716 - protein, 15 aa, Artificial Sequence
  Quasi-synthetic sequence derived from human genome
LLIWVPVKVILHKKR

SEQ ID NO: 7717 - protein, 15 aa, Artificial Sequence
  Quasi-synthetic sequence derived from human genome
RMYLRLRGRCPLLLR

SEQ ID NO: 7718 - protein, 15 aa, Artificial Sequence
  Quasi-synthetic sequence derived from human genome
RLRPVPPVMWRLFRR

SEQ ID NO: 7719 - protein, 15 aa, Artificial Sequence
  Quasi-synthetic sequence derived from human genome
LLLRAKAMRLLYYLK

SEQ ID NO: 7720 - protein, 15 aa, Artificial Sequence
  Quasi-synthetic sequence derived from human genome
KLRINRFPWPKVLKI

SEQ ID NO: 7721 - protein, 15 aa, Artificial Sequence
  Quasi-synthetic sequence derived from human genome
TPRRARRFFLRCIIW

SEQ ID NO: 7722 - protein, 15 aa, Artificial Sequence
  Quasi-synthetic sequence derived from human genome
KKVFAKWAKKHRIIF

SEQ ID NO: 7723 - protein, 15 aa, Artificial Sequence
  Quasi-synthetic sequence derived from human genome
LFIINLHRSRKKIKL

SEQ ID NO: 7724 - protein, 15 aa, Artificial Sequence
  Quasi-synthetic sequence derived from human genome
LWVRRKAGYKKKLWK

SEQ ID NO: 7725 - protein, 15 aa, Artificial Sequence
  Quasi-synthetic sequence derived from human genome
KVGLVLRVLRALRIL

SEQ ID NO: 7726 - protein, 15 aa, Artificial Sequence
  Quasi-synthetic sequence derived from human genome
RKGIVRVVFFPFFFR

SEQ ID NO: 7727 - protein, 15 aa, Artificial Sequence
  Quasi-synthetic sequence derived from human genome
FIRHRRAHMRRRLYI

SEQ ID NO: 7728 - protein, 15 aa, Artificial Sequence
  Quasi-synthetic sequence derived from human genome
LLTYLVKVLKRRTWR

SEQ ID NO: 7729 - protein, 15 aa, Artificial Sequence
  Quasi-synthetic sequence derived from human genome
RLLLRRFLASVISRK

SEQ ID NO: 7730 - protein, 15 aa, Artificial Sequence
  Quasi-synthetic sequence derived from human genome
FFLRFIRARKFNVGR

SEQ ID NO: 7731 - protein, 15 aa, Artificial Sequence
  Quasi-synthetic sequence derived from human genome
FLTYVLSFIFRKWRK

SEQ ID NO: 7732 - protein, 15 aa, Artificial Sequence
  Quasi-synthetic sequence derived from human genome
YLRRLLRPLQMLLVK

SEQ ID NO: 7733 - protein, 15 aa, Artificial Sequence
  Quasi-synthetic sequence derived from human genome
RRQLYLPMLFKVRLL

SEQ ID NO: 7734 - protein, 15 aa, Artificial Sequence
  Quasi-synthetic sequence derived from human genome
YFFMGRLPLLRRVLK

SEQ ID NO: 7735 - protein, 15 aa, Artificial Sequence
  Quasi-synthetic sequence derived from human genome
SKKKYVCKLLFIFLL

SEQ ID NO: 7736 - protein, 15 aa, Artificial Sequence
  Quasi-synthetic sequence derived from human genome
WRCRRLRAIYTIMRW

SEQ ID NO: 7737 - protein, 15 aa, Artificial Sequence
  Quasi-synthetic sequence derived from human genome
LYGRIFRAARFRIRK

SEQ ID NO: 7738 - protein, 15 aa, Artificial Sequence
  Quasi-synthetic sequence derived from human genome
KGKKVWIGIKKLLML

SEQ ID NO: 7739 - protein, 15 aa, Artificial Sequence
  Quasi-synthetic sequence derived from human genome
VKRLMFRIAMRILLG

SEQ ID NO: 7740 - protein, 15 aa, Artificial Sequence
  Quasi-synthetic sequence derived from human genome
RFYDRRFLKLLRFYI

SEQ ID NO: 7741 - protein, 15 aa, Artificial Sequence
  Quasi-synthetic sequence derived from human genome
VLLHKIPPRKRLRKR

SEQ ID NO: 7742 - protein, 15 aa, Artificial Sequence
  Quasi-synthetic sequence derived from human genome
LKSLKILRIRGYVFK

SEQ ID NO: 7743 - protein, 15 aa, Artificial Sequence
  Quasi-synthetic sequence derived from human genome
LRKILLRKFCQIRYH

SEQ ID NO: 7744 - protein, 15 aa, Artificial Sequence
  Quasi-synthetic sequence derived from human genome
LLKTARLLRLVRVAR

SEQ ID NO: 7745 - protein, 15 aa, Artificial Sequence
  Quasi-synthetic sequence derived from human genome
IIYFFVGSLRKKRLK

SEQ ID NO: 7746 - protein, 15 aa, Artificial Sequence
  Quasi-synthetic sequence derived from human genome
LRTLRAVRVLRPLKL

SEQ ID NO: 7747 - protein, 15 aa, Artificial Sequence
  Quasi-synthetic sequence derived from human genome
RYIVLLRSVRPLRLF

SEQ ID NO: 7748 - protein, 15 aa, Artificial Sequence
  Quasi-synthetic sequence derived from human genome
LLAHRLRRWHKSRLL

SEQ ID NO: 7749 - protein, 15 aa, Artificial Sequence
  Quasi-synthetic sequence derived from human genome
FSLFRKWKAFSVWRK

SEQ ID NO: 7750 - protein, 15 aa, Artificial Sequence
  Quasi-synthetic sequence derived from human genome
WSFRRLKKLCRPLPW

SEQ ID NO: 7751 - protein, 15 aa, Artificial Sequence
  Quasi-synthetic sequence derived from human genome
LWRKLLKAFWWLVVA

SEQ ID NO: 7752 - protein, 15 aa, Artificial Sequence
  Quasi-synthetic sequence derived from human genome
FFHVLRRQILLPFRK

SEQ ID NO: 7753 - protein, 15 aa, Artificial Sequence
  Quasi-synthetic sequence derived from human genome
FFRLQKFLRRTQFLL

SEQ ID NO: 7754 - protein, 15 aa, Artificial Sequence
  Quasi-synthetic sequence derived from human genome
KRRVFFRNIKILIPA

SEQ ID NO: 7755 - protein, 15 aa, Artificial Sequence
  Quasi-synthetic sequence derived from human genome
RNRSLLKRMLKCLIF

SEQ ID NO: 7756 - protein, 15 aa, Artificial Sequence
  Quasi-synthetic sequence derived from human genome
KLKGIHIMKKLKILY

SEQ ID NO: 7757 - protein, 15 aa, Artificial Sequence
  Quasi-synthetic sequence derived from human genome
LFMYAKRNKRRIMRI

SEQ ID NO: 7758 - protein, 15 aa, Artificial Sequence
  Quasi-synthetic sequence derived from human genome
FKRAFLRLLRCQCRR

SEQ ID NO: 7759 - protein, 15 aa, Artificial Sequence
  Quasi-synthetic sequence derived from human genome
RKYRFLLYGLLGKKR

SEQ ID NO: 7760 - protein, 15 aa, Artificial Sequence
  Quasi-synthetic sequence derived from human genome
LVLGFLKLIHLLLRR

SEQ ID NO: 7761 - protein, 15 aa, Artificial Sequence
  Quasi-synthetic sequence derived from human genome
RLLRALRVLYVMRLA

SEQ ID NO: 7762 - protein, 15 aa, Artificial Sequence
  Quasi-synthetic sequence derived from human genome
LRVLRVLRPLRAINR

SEQ ID NO: 7763 - protein, 15 aa, Artificial Sequence
  Quasi-synthetic sequence derived from human genome
LKRKKPFLHRRRRVR

SEQ ID NO: 7764 - protein, 15 aa, Artificial Sequence
  Quasi-synthetic sequence derived from human genome
LLIKKHWLWTRKCFV

SEQ ID NO: 7765 - protein, 15 aa, Artificial Sequence
  Quasi-synthetic sequence derived from human genome
LKLKLIKFLALISKA

SEQ ID NO: 7766 - protein, 15 aa, Artificial Sequence
  Quasi-synthetic sequence derived from human genome
LHLWPKRLLLPRHLR

SEQ ID NO: 7767 - protein, 15 aa, Artificial Sequence
  Quasi-synthetic sequence derived from human genome
IGPKAFKLLKKLMRL

SEQ ID NO: 7768 - protein, 15 aa, Artificial Sequence
  Quasi-synthetic sequence derived from human genome
KQIKVAIKKIMKRIF

SEQ ID NO: 7769 - protein, 15 aa, Artificial Sequence
  Quasi-synthetic sequence derived from human genome
MRRRSRMLLCFAFLW

SEQ ID NO: 7770 - protein, 15 aa, Artificial Sequence
  Quasi-synthetic sequence derived from human genome
KLKALQRPKLLRLVK

SEQ ID NO: 7771 - protein, 15 aa, Artificial Sequence
  Quasi-synthetic sequence derived from human genome
LRLVKRLYFGLRVLP

SEQ ID NO: 7772 - protein, 15 aa, Artificial Sequence
  Quasi-synthetic sequence derived from human genome
LRKRLLVLQRVFYAL

SEQ ID NO: 7773 - protein, 15 aa, Artificial Sequence
  Quasi-synthetic sequence derived from human genome
LRRIIRILNLSKRLQ

SEQ ID NO: 7774 - protein, 15 aa, Artificial Sequence
  Quasi-synthetic sequence derived from human genome
LLVLIILFCYFRYKR

SEQ ID NO: 7775 - protein, 15 aa, Artificial Sequence
  Quasi-synthetic sequence derived from human genome
KKTFYKRLLLYFIAL

SEQ ID NO: 7776 - protein, 15 aa, Artificial Sequence
  Quasi-synthetic sequence derived from human genome
KLFQFLKLRKYSIKV

SEQ ID NO: 7777 - protein, 15 aa, Artificial Sequence
  Quasi-synthetic sequence derived from human genome
RKKLLIQMKSIWKKK

SEQ ID NO: 7778 - protein, 15 aa, Artificial Sequence
  Quasi-synthetic sequence derived from human genome
IIILLGVMLTIKRRR

SEQ ID NO: 7779 - protein, 15 aa, Artificial Sequence
  Quasi-synthetic sequence derived from human genome
FVIVLLALRLWRWHK

SEQ ID NO: 7780 - protein, 15 aa, Artificial Sequence
  Quasi-synthetic sequence derived from human genome
LRLRQRLKSLRAYLF

SEQ ID NO: 7781 - protein, 15 aa, Artificial Sequence
  Quasi-synthetic sequence derived from human genome
MMMLKKSAFKKLIKF

SEQ ID NO: 7782 - protein, 15 aa, Artificial Sequence
  Quasi-synthetic sequence derived from human genome
IRIYKLNRRKRYRCL

SEQ ID NO: 7783 - protein, 15 aa, Artificial Sequence
  Quasi-synthetic sequence derived from human genome
TVKVWFRNRRFKLKK

SEQ ID NO: 7784 - protein, 15 aa, Artificial Sequence
  Quasi-synthetic sequence derived from human genome
ILLFFAVKYLLRWKY

SEQ ID NO: 7785 - protein, 15 aa, Artificial Sequence
  Quasi-synthetic sequence derived from human genome
KVLYKGVLKRLILLY

SEQ ID NO: 7786 - protein, 15 aa, Artificial Sequence
  Quasi-synthetic sequence derived from human genome
FILIWRTKKLKHTFL

SEQ ID NO: 7787 - protein, 15 aa, Artificial Sequence
  Quasi-synthetic sequence derived from human genome
KVKMKFRFLGKLMAK

SEQ ID NO: 7788 - protein, 15 aa, Artificial Sequence
  Quasi-synthetic sequence derived from human genome
LRRWRCHVQRFFYRI

SEQ ID NO: 7789 - protein, 15 aa, Artificial Sequence
  Quasi-synthetic sequence derived from human genome
RASLVLILKTIRRRL

SEQ ID NO: 7790 - protein, 15 aa, Artificial Sequence
  Quasi-synthetic sequence derived from human genome
HKKFFHTRFLMRMRL

SEQ ID NO: 7791 - protein, 15 aa, Artificial Sequence
  Quasi-synthetic sequence derived from human genome
RIARFRFRAFHFLNR

SEQ ID NO: 7792 - protein, 15 aa, Artificial Sequence
  Quasi-synthetic sequence derived from human genome
LVRWLLKKVFQCRRA

SEQ ID NO: 7793 - protein, 15 aa, Artificial Sequence
  Quasi-synthetic sequence derived from human genome
KKKYKAIRLIFVIMA

SEQ ID NO: 7794 - protein, 15 aa, Artificial Sequence
  Quasi-synthetic sequence derived from human genome
WLLYCHKTRLKKILK

SEQ ID NO: 7795 - protein, 15 aa, Artificial Sequence
  Quasi-synthetic sequence derived from human genome
RFKKLKYLWLHHNKL

SEQ ID NO: 7796 - protein, 15 aa, Artificial Sequence
  Quasi-synthetic sequence derived from human genome
PRLRLWALIPWLPRK

SEQ ID NO: 7797 - protein, 15 aa, Artificial Sequence
  Quasi-synthetic sequence derived from human genome
LKRRSIKKLRFLCTR

SEQ ID NO: 7798 - protein, 15 aa, Artificial Sequence
  Quasi-synthetic sequence derived from human genome
RRKSLLKPKLLRLQR

SEQ ID NO: 7799 - protein, 15 aa, Artificial Sequence
  Quasi-synthetic sequence derived from human genome
FVIIIKFLLGYKWFK

SEQ ID NO: 7800 - protein, 15 aa, Artificial Sequence
  Quasi-synthetic sequence derived from human genome
RRLKSQILLKKYLMK

SEQ ID NO: 7801 - protein, 15 aa, Artificial Sequence
  Quasi-synthetic sequence derived from human genome
FILRLFRQKNKRGFI

SEQ ID NO: 7802 - protein, 15 aa, Artificial Sequence
  Quasi-synthetic sequence derived from human genome
RLCFLLGRLSIRKVK

SEQ ID NO: 7803 - protein, 15 aa, Artificial Sequence
  Quasi-synthetic sequence derived from human genome
LRCLRVLLLGKNRIK

SEQ ID NO: 7804 - protein, 15 aa, Artificial Sequence
  Quasi-synthetic sequence derived from human genome
RRVFIVFRKGFVNIR

SEQ ID NO: 7805 - protein, 15 aa, Artificial Sequence
  Quasi-synthetic sequence derived from human genome
LFRRCRRRLIPHPRR

SEQ ID NO: 7806 - protein, 15 aa, Artificial Sequence
  Quasi-synthetic sequence derived from human genome
LRSLRFLQILRMVRM

SEQ ID NO: 7807 - protein, 15 aa, Artificial Sequence
  Quasi-synthetic sequence derived from human genome
VRLLRGSRLLRRNFL

SEQ ID NO: 7808 - protein, 15 aa, Artificial Sequence
  Quasi-synthetic sequence derived from human genome
LKRPMKQKRKLRLYI

SEQ ID NO: 7809 - protein, 15 aa, Artificial Sequence
  Quasi-synthetic sequence derived from human genome
RFFKYLCIAAKVRRL

SEQ ID NO: 7810 - protein, 15 aa, Artificial Sequence
  Quasi-synthetic sequence derived from human genome
FRKALIYQKKYLLLL

SEQ ID NO: 7811 - protein, 15 aa, Artificial Sequence
  Quasi-synthetic sequence derived from human genome
KIFRVKPVLGIKRMI

SEQ ID NO: 7812 - protein, 15 aa, Artificial Sequence
  Quasi-synthetic sequence derived from human genome
RVRVWFKNRRAKWRK

SEQ ID NO: 7813 - protein, 15 aa, Artificial Sequence
  Quasi-synthetic sequence derived from human genome
LWPTRLRRSFLAWRR

SEQ ID NO: 7814 - protein, 15 aa, Artificial Sequence
  Quasi-synthetic sequence derived from human genome
LRRIKGKLFTWNILK

SEQ ID NO: 7815 - protein, 15 aa, Artificial Sequence
  Quasi-synthetic sequence derived from human genome
FLLRQHKVWRKCRMR

SEQ ID NO: 7816 - protein, 15 aa, Artificial Sequence
  Quasi-synthetic sequence derived from human genome
IFIHKLPLYLRLKRP

SEQ ID NO: 7817 - protein, 15 aa, Artificial Sequence
  Quasi-synthetic sequence derived from human genome
LAKAVLRMLLLLWFK

SEQ ID NO: 7818 - protein, 15 aa, Artificial Sequence
  Quasi-synthetic sequence derived from human genome
KIMKKKKKVLVWNRV

SEQ ID NO: 7819 - protein, 15 aa, Artificial Sequence
  Quasi-synthetic sequence derived from human genome
KRRFLAARALRSFRW

SEQ ID NO: 7820 - protein, 15 aa, Artificial Sequence
  Quasi-synthetic sequence derived from human genome
KLLRRAWRRRAALGL

SEQ ID NO: 7821 - protein, 15 aa, Artificial Sequence
  Quasi-synthetic sequence derived from human genome
LLLLFYVVRYCWLRR

SEQ ID NO: 7822 - protein, 15 aa, Artificial Sequence
  Quasi-synthetic sequence derived from human genome
RLAMKYIGFLVRLLR

SEQ ID NO: 7823 - protein, 15 aa, Artificial Sequence
  Quasi-synthetic sequence derived from human genome
KFRLVVKTALKLLLV

SEQ ID NO: 7824 - protein, 15 aa, Artificial Sequence
  Quasi-synthetic sequence derived from human genome
KLIMLFPQKLRPRLL

SEQ ID NO: 7825 - protein, 15 aa, Artificial Sequence
  Quasi-synthetic sequence derived from human genome
RRAFHIRLIARRLGW

SEQ ID NO: 7826 - protein, 15 aa, Artificial Sequence
  Quasi-synthetic sequence derived from human genome
RGKMLLFSGRRLWRF

SEQ ID NO: 7827 - protein, 15 aa, Artificial Sequence
  Quasi-synthetic sequence derived from human genome
FIVVLVQLCRIKKKK

SEQ ID NO: 7828 - protein, 15 aa, Artificial Sequence
  Quasi-synthetic sequence derived from human genome
ILHKKRYIYRKIKGW

SEQ ID NO: 7829 - protein, 15 aa, Artificial Sequence
  Quasi-synthetic sequence derived from human genome
RKRMFTPRKLKLTLF

SEQ ID NO: 7830 - protein, 15 aa, Artificial Sequence
  Quasi-synthetic sequence derived from human genome
RKFWWKNVKMIVLIC

SEQ ID NO: 7831 - protein, 15 aa, Artificial Sequence
  Quasi-synthetic sequence derived from human genome
VIAMWFIRCRLPFRK

SEQ ID NO: 7832 - protein, 15 aa, Artificial Sequence
  Quasi-synthetic sequence derived from human genome
MWWRDLTRLRLWLKR

SEQ ID NO: 7833 - protein, 15 aa, Artificial Sequence
  Quasi-synthetic sequence derived from human genome
RIFKGIFAIIKPFLK

SEQ ID NO: 7834 - protein, 15 aa, Artificial Sequence
  Quasi-synthetic sequence derived from human genome
FVKIRWARWSKLLIA

SEQ ID NO: 7835 - protein, 15 aa, Artificial Sequence
  Quasi-synthetic sequence derived from human genome
KSYLKRIFQLVRFLF

SEQ ID NO: 7836 - protein, 15 aa, Artificial Sequence
  Quasi-synthetic sequence derived from human genome
LKAVWLGRLRLTRLL

SEQ ID NO: 7837 - protein, 15 aa, Artificial Sequence
  Quasi-synthetic sequence derived from human genome
FLLPCISRRLARIRR

SEQ ID NO: 7838 - protein, 15 aa, Artificial Sequence
  Quasi-synthetic sequence derived from human genome
LYRAILQLVRRYKKL

SEQ ID NO: 7839 - protein, 15 aa, Artificial Sequence
  Quasi-synthetic sequence derived from human genome
LMCKKMKHLWFFLLL

SEQ ID NO: 7840 - protein, 15 aa, Artificial Sequence
  Quasi-synthetic sequence derived from human genome
GWRIRKKYFLMKIKN

SEQ ID NO: 7841 - protein, 15 aa, Artificial Sequence
  Quasi-synthetic sequence derived from human genome
GRRRRLCLQLYFLWL

SEQ ID NO: 7842 - protein, 15 aa, Artificial Sequence
  Quasi-synthetic sequence derived from human genome
KPKRWISFKSFFRRR

SEQ ID NO: 7843 - protein, 15 aa, Artificial Sequence
  Quasi-synthetic sequence derived from human genome
LHRMWIQAVKKLRRW

SEQ ID NO: 7844 - protein, 15 aa, Artificial Sequence
  Quasi-synthetic sequence derived from human genome
ALLILRAFKPHRKIR

SEQ ID NO: 7845 - protein, 15 aa, Artificial Sequence
  Quasi-synthetic sequence derived from human genome
FLQICKKILCRLFRV

SEQ ID NO: 7846 - protein, 15 aa, Artificial Sequence
  Quasi-synthetic sequence derived from human genome
RWSYIRMCKFLRYFF

SEQ ID NO: 7847 - protein, 15 aa, Artificial Sequence
  Quasi-synthetic sequence derived from human genome
ARLATRLLKLRYLIL

SEQ ID NO: 7848 - protein, 15 aa, Artificial Sequence
  Quasi-synthetic sequence derived from human genome
KLRYPPWLLLLKRLN

SEQ ID NO: 7849 - protein, 15 aa, Artificial Sequence
  Quasi-synthetic sequence derived from human genome
VLRRKVKNKRVRVVW

SEQ ID NO: 7850 - protein, 15 aa, Artificial Sequence
  Quasi-synthetic sequence derived from human genome
ICRKMLHRHMLIFRL

SEQ ID NO: 7851 - protein, 15 aa, Artificial Sequence
  Quasi-synthetic sequence derived from human genome
LFIFVKRQIMRFAMK

SEQ ID NO: 7852 - protein, 15 aa, Artificial Sequence
  Quasi-synthetic sequence derived from human genome
IWRLKKPKMVSKKLK

SEQ ID NO: 7853 - protein, 15 aa, Artificial Sequence
  Quasi-synthetic sequence derived from human genome
RKMKRVLVLLLAVAF

SEQ ID NO: 7854 - protein, 15 aa, Artificial Sequence
  Quasi-synthetic sequence derived from human genome
RHPLFIWLKMRISKL

SEQ ID NO: 7855 - protein, 15 aa, Artificial Sequence
  Quasi-synthetic sequence derived from human genome
VYLVLWAVRKHLRRL

SEQ ID NO: 7856 - protein, 15 aa, Artificial Sequence
  Quasi-synthetic sequence derived from human genome
LLILILLIKKLIIFI

SEQ ID NO: 7857 - protein, 15 aa, Artificial Sequence
  Quasi-synthetic sequence derived from human genome
FLCVCFIFRVKTRRK

SEQ ID NO: 7858 - protein, 15 aa, Artificial Sequence
  Quasi-synthetic sequence derived from human genome
MLRKIQRWWQLGRLR

SEQ ID NO: 7859 - protein, 15 aa, Artificial Sequence
  Quasi-synthetic sequence derived from human genome
SLRRTRLILFVLLLF

SEQ ID NO: 7860 - protein, 15 aa, Artificial Sequence
  Quasi-synthetic sequence derived from human genome
LWLLSLLKLLNVRRL

SEQ ID NO: 7861 - protein, 15 aa, Artificial Sequence
  Quasi-synthetic sequence derived from human genome
IFLYLLRLRRIHHRQ

SEQ ID NO: 7862 - protein, 15 aa, Artificial Sequence
  Quasi-synthetic sequence derived from human genome
LLGSKWFIKILKRHF

SEQ ID NO: 7863 - protein, 15 aa, Artificial Sequence
  Quasi-synthetic sequence derived from human genome
KIKKVLKSTKLKIFR

SEQ ID NO: 7864 - protein, 15 aa, Artificial Sequence
  Quasi-synthetic sequence derived from human genome
VVVKILKPVKKKKIK

SEQ ID NO: 7865 - protein, 15 aa, Artificial Sequence
  Quasi-synthetic sequence derived from human genome
LIFIRILGILLSKLR

SEQ ID NO: 7866 - protein, 15 aa, Artificial Sequence
  Quasi-synthetic sequence derived from human genome
LRKRKKRKFSLWVRQ

SEQ ID NO: 7867 - protein, 15 aa, Artificial Sequence
  Quasi-synthetic sequence derived from human genome
ILKLGRRSRLKRAVW

SEQ ID NO: 7868 - protein, 15 aa, Artificial Sequence
  Quasi-synthetic sequence derived from human genome
FLRRLLEYVKWRLRV

SEQ ID NO: 7869 - protein, 15 aa, Artificial Sequence
  Quasi-synthetic sequence derived from human genome
WKTSRTFFYWRLRRL

SEQ ID NO: 7870 - protein, 15 aa, Artificial Sequence
  Quasi-synthetic sequence derived from human genome
RALCRLPRRGLWLLL

SEQ ID NO: 7871 - protein, 15 aa, Artificial Sequence
  Quasi-synthetic sequence derived from human genome
RWKALIAIRYLSKLK

SEQ ID NO: 7872 - protein, 15 aa, Artificial Sequence
  Quasi-synthetic sequence derived from human genome
RRKSIKKKRALRRFL

SEQ ID NO: 7873 - protein, 15 aa, Artificial Sequence
  Quasi-synthetic sequence derived from human genome
IMAIVVFILKMKVKK

SEQ ID NO: 7874 - protein, 15 aa, Artificial Sequence
  Quasi-synthetic sequence derived from human genome
LVMRKRLRLYRNTLK

SEQ ID NO: 7875 - protein, 15 aa, Artificial Sequence
  Quasi-synthetic sequence derived from human genome
RILRRLFNLCKRCHR

SEQ ID NO: 7876 - protein, 15 aa, Artificial Sequence
  Quasi-synthetic sequence derived from human genome
FAWKKKALIIIWAKV

SEQ ID NO: 7877 - protein, 15 aa, Artificial Sequence
  Quasi-synthetic sequence derived from human genome
LMKKVRHLRHPKRIL

SEQ ID NO: 7878 - protein, 15 aa, Artificial Sequence
  Quasi-synthetic sequence derived from human genome
RKAPLWLRAKFQRLL

SEQ ID NO: 7879 - protein, 15 aa, Artificial Sequence
  Quasi-synthetic sequence derived from human genome
YIIKFVKPFVHLIRR

SEQ ID NO: 7880 - protein, 15 aa, Artificial Sequence
  Quasi-synthetic sequence derived from human genome
RQMHLARFLRMLLRL

SEQ ID NO: 7881 - protein, 15 aa, Artificial Sequence
  Quasi-synthetic sequence derived from human genome
ISRIWVFSMMRRKKI

SEQ ID NO: 7882 - protein, 15 aa, Artificial Sequence
  Quasi-synthetic sequence derived from human genome
WLRRKLRGKRRPVIA

SEQ ID NO: 7883 - protein, 15 aa, Artificial Sequence
  Quasi-synthetic sequence derived from human genome
KILYRNPRFLRLAFL

SEQ ID NO: 7884 - protein, 15 aa, Artificial Sequence
  Quasi-synthetic sequence derived from human genome
FLLVLYLNRKGIKKW

SEQ ID NO: 7885 - protein, 15 aa, Artificial Sequence
  Quasi-synthetic sequence derived from human genome
IAISRMKFLVRRWHR

SEQ ID NO: 7886 - protein, 15 aa, Artificial Sequence
  Quasi-synthetic sequence derived from human genome
LLLVLLILCFIKRSK

SEQ ID NO: 7887 - protein, 15 aa, Artificial Sequence
  Quasi-synthetic sequence derived from human genome
RRLIPHPRRLWPFVR

SEQ ID NO: 7888 - protein, 15 aa, Artificial Sequence
  Quasi-synthetic sequence derived from human genome
AKVFGLRSRKLKLFL

SEQ ID NO: 7889 - protein, 15 aa, Artificial Sequence
  Quasi-synthetic sequence derived from human genome
ILGIIILKKRYSIFK

SEQ ID NO: 7890 - protein, 15 aa, Artificial Sequence
  Quasi-synthetic sequence derived from human genome
YFRLLVRTVLLRSLR

SEQ ID NO: 7891 - protein, 15 aa, Artificial Sequence
  Quasi-synthetic sequence derived from human genome
IFYLIIRRKPLFYLV

SEQ ID NO: 7892 - protein, 15 aa, Artificial Sequence
  Quasi-synthetic sequence derived from human genome
LLVALIKGLVRRRRP

SEQ ID NO: 7893 - protein, 15 aa, Artificial Sequence
  Quasi-synthetic sequence derived from human genome
WLRVRFGTWNWIWRR

SEQ ID NO: 7894 - protein, 15 aa, Artificial Sequence
  Quasi-synthetic sequence derived from human genome
KKNVLRLCCKKLKIF

SEQ ID NO: 7895 - protein, 15 aa, Artificial Sequence
  Quasi-synthetic sequence derived from human genome
FKKIKRGLWGKYKLK

SEQ ID NO: 7896 - protein, 15 aa, Artificial Sequence
  Quasi-synthetic sequence derived from human genome
RKKKLLKKAALFSKL

SEQ ID NO: 7897 - protein, 15 aa, Artificial Sequence
  Quasi-synthetic sequence derived from human genome
LRRAPRLWKVRAMMI

SEQ ID NO: 7898 - protein, 15 aa, Artificial Sequence
  Quasi-synthetic sequence derived from human genome
KRRNLLNCLIVRILK

SEQ ID NO: 7899 - protein, 15 aa, Artificial Sequence
  Quasi-synthetic sequence derived from human genome
RWKCRRLRIREAWLL

SEQ ID NO: 7900 - protein, 15 aa, Artificial Sequence
  Quasi-synthetic sequence derived from human genome
RKVYGRCMWYRLRLL

SEQ ID NO: 7901 - protein, 15 aa, Artificial Sequence
  Quasi-synthetic sequence derived from human genome
RLTRYPLLLKNIWKR

SEQ ID NO: 7902 - protein, 15 aa, Artificial Sequence
  Quasi-synthetic sequence derived from human genome
FFFFFFRWSLARLPR

SEQ ID NO: 7903 - protein, 15 aa, Artificial Sequence
  Quasi-synthetic sequence derived from human genome
KTLKSLKALLRWKLV

SEQ ID NO: 7904 - protein, 15 aa, Artificial Sequence
  Quasi-synthetic sequence derived from human genome
QLMLLLWKNFMYRRR

SEQ ID NO: 7905 - protein, 15 aa, Artificial Sequence
  Quasi-synthetic sequence derived from human genome
RLLLKWRGSIYKLLY

SEQ ID NO: 7906 - protein, 15 aa, Artificial Sequence
  Quasi-synthetic sequence derived from human genome
LLLRWRGSIYKLLYK

SEQ ID NO: 7907 - protein, 15 aa, Artificial Sequence
  Quasi-synthetic sequence derived from human genome
LWSRFKKKCFKLTRK

SEQ ID NO: 7908 - protein, 15 aa, Artificial Sequence
  Quasi-synthetic sequence derived from human genome
LIQSRFRSLLVRRRF

SEQ ID NO: 7909 - protein, 15 aa, Artificial Sequence
  Quasi-synthetic sequence derived from human genome
LKLAKIILALKVSRK

SEQ ID NO: 7910 - protein, 15 aa, Artificial Sequence
  Quasi-synthetic sequence derived from human genome
FKFFFRRNPYFRNKL

SEQ ID NO: 7911 - protein, 15 aa, Artificial Sequence
  Quasi-synthetic sequence derived from human genome
LFLRAVLHVLKAKRL

SEQ ID NO: 7912 - protein, 15 aa, Artificial Sequence
  Quasi-synthetic sequence derived from human genome
LRQRRRRLLIKKMPA

SEQ ID NO: 7913 - protein, 15 aa, Artificial Sequence
  Quasi-synthetic sequence derived from human genome
LLVLLLAAYFFRFRK

SEQ ID NO: 7914 - protein, 15 aa, Artificial Sequence
  Quasi-synthetic sequence derived from human genome
RRRLERVRRRRLRLR

SEQ ID NO: 7915 - protein, 15 aa, Artificial Sequence
  Quasi-synthetic sequence derived from human genome
RCKRGKRHWKKLWFV

SEQ ID NO: 7916 - protein, 15 aa, Artificial Sequence
  Quasi-synthetic sequence derived from human genome
RRIFIQLMKRFGLKA

SEQ ID NO: 7917 - protein, 15 aa, Artificial Sequence
  Quasi-synthetic sequence derived from human genome
LLVRRRFISLKKATI

SEQ ID NO: 7918 - protein, 15 aa, Artificial Sequence
  Quasi-synthetic sequence derived from human genome
RVVRLLRLRAALTLL

SEQ ID NO: 7919 - protein, 15 aa, Artificial Sequence
  Quasi-synthetic sequence derived from human genome
WRRAARAFRGFLLLL

SEQ ID NO: 7920 - protein, 15 aa, Artificial Sequence
  Quasi-synthetic sequence derived from human genome
LWRLPPFLIIHLKRF

SEQ ID NO: 7921 - protein, 15 aa, Artificial Sequence
  Quasi-synthetic sequence derived from human genome
LQVLIVVLRIVRYRK

SEQ ID NO: 7922 - protein, 15 aa, Artificial Sequence
  Quasi-synthetic sequence derived from human genome
VIIKYIIINRFRGRK

SEQ ID NO: 7923 - protein, 15 aa, Artificial Sequence
  Quasi-synthetic sequence derived from human genome
SLLLFMVHRLRQRRR

SEQ ID NO: 7924 - protein, 15 aa, Artificial Sequence
  Quasi-synthetic sequence derived from human genome
SLWRLFRGKKWNVLR

SEQ ID NO: 7925 - protein, 15 aa, Artificial Sequence
  Quasi-synthetic sequence derived from human genome
KKLSRMKLLLKHLTL

SEQ ID NO: 7926 - protein, 15 aa, Artificial Sequence
  Quasi-synthetic sequence derived from human genome
YRIMYKKRTKRLVVF

SEQ ID NO: 7927 - protein, 15 aa, Artificial Sequence
  Quasi-synthetic sequence derived from human genome
FLLSWVTKFIYRKIK

SEQ ID NO: 7928 - protein, 15 aa, Artificial Sequence
  Quasi-synthetic sequence derived from human genome
LICKIKLGPVRRKLK

SEQ ID NO: 7929 - protein, 15 aa, Artificial Sequence
  Quasi-synthetic sequence derived from human genome
LYMKPRMKIFLRQKK

SEQ ID NO: 7930 - protein, 15 aa, Artificial Sequence
  Quasi-synthetic sequence derived from human genome
LKAKRKVVKMMIIVV

SEQ ID NO: 7931 - protein, 15 aa, Artificial Sequence
  Quasi-synthetic sequence derived from human genome
HFLYKLAQLFRWIRK

SEQ ID NO: 7932 - protein, 15 aa, Artificial Sequence
  Quasi-synthetic sequence derived from human genome
LRFLKLRRERRALLC

SEQ ID NO: 7933 - protein, 15 aa, Artificial Sequence
  Quasi-synthetic sequence derived from human genome
LILILLIVCFIRRNK

SEQ ID NO: 7934 - protein, 15 aa, Artificial Sequence
  Quasi-synthetic sequence derived from human genome
VQLRKLLRVLTLMKF

SEQ ID NO: 7935 - protein, 15 aa, Artificial Sequence
  Quasi-synthetic sequence derived from human genome
LILLKMYNRKMRTRR

SEQ ID NO: 7936 - protein, 15 aa, Artificial Sequence
  Quasi-synthetic sequence derived from human genome
LLRAVRIRAPIMRMR

SEQ ID NO: 7937 - protein, 15 aa, Artificial Sequence
  Quasi-synthetic sequence derived from human genome
RLLRKLLSRYRLPVA

SEQ ID NO: 7938 - protein, 15 aa, Artificial Sequence
  Quasi-synthetic sequence derived from human genome
LKQMGLRKLILRLHK

SEQ ID NO: 7939 - protein, 15 aa, Artificial Sequence
  Quasi-synthetic sequence derived from human genome
KLRNWQWWRLFTKVK

SEQ ID NO: 7940 - protein, 15 aa, Artificial Sequence
  Quasi-synthetic sequence derived from human genome
RLLRNKKRKARWLRA

SEQ ID NO: 7941 - protein, 15 aa, Artificial Sequence
  Quasi-synthetic sequence derived from human genome
IQRFPKILVLHLKRF

SEQ ID NO: 7942 - protein, 15 aa, Artificial Sequence
  Quasi-synthetic sequence derived from human genome
KKVLLRCLTLLQRLL

SEQ ID NO: 7943 - protein, 15 aa, Artificial Sequence
  Quasi-synthetic sequence derived from human genome
RIRISRVCHRWKRLV

SEQ ID NO: 7944 - protein, 15 aa, Artificial Sequence
  Quasi-synthetic sequence derived from human genome
FFCFRLLVVLTRFLK

SEQ ID NO: 7945 - protein, 15 aa, Artificial Sequence
  Quasi-synthetic sequence derived from human genome
LIALKALKKALLLYK

SEQ ID NO: 7946 - protein, 15 aa, Artificial Sequence
  Quasi-synthetic sequence derived from human genome
LLLLRLLGPRLLRPL

SEQ ID NO: 7947 - protein, 15 aa, Artificial Sequence
  Quasi-synthetic sequence derived from human genome
LRIFKLVPQMRKVVR

SEQ ID NO: 7948 - protein, 15 aa, Artificial Sequence
  Quasi-synthetic sequence derived from human genome
IMYKVPLIRKKSLRR

SEQ ID NO: 7949 - protein, 15 aa, Artificial Sequence
  Quasi-synthetic sequence derived from human genome
LCYLLLKVCFRRSKR

SEQ ID NO: 7950 - protein, 15 aa, Artificial Sequence
  Quasi-synthetic sequence derived from human genome
RRRAGRLLLTLPLLR

SEQ ID NO: 7951 - protein, 15 aa, Artificial Sequence
  Quasi-synthetic sequence derived from human genome
RIKKPIKTKFRLPVF

SEQ ID NO: 7952 - protein, 15 aa, Artificial Sequence
  Quasi-synthetic sequence derived from human genome
KRKVAWLLRWKAVTR

SEQ ID NO: 7953 - protein, 15 aa, Artificial Sequence
  Quasi-synthetic sequence derived from human genome
MRALRRLIQGRILLL

SEQ ID NO: 7954 - protein, 15 aa, Artificial Sequence
  Quasi-synthetic sequence derived from human genome
KRHKVWYKKFFHHLL

SEQ ID NO: 7955 - protein, 15 aa, Artificial Sequence
  Quasi-synthetic sequence derived from human genome
MYFRKFFKFQVLKPL

SEQ ID NO: 7956 - protein, 15 aa, Artificial Sequence
  Quasi-synthetic sequence derived from human genome
KKKKCIFRLRIRVPP

SEQ ID NO: 7957 - protein, 15 aa, Artificial Sequence
  Quasi-synthetic sequence derived from human genome
RYRLVSNKLKKRFLR

SEQ ID NO: 7958 - protein, 15 aa, Artificial Sequence
  Quasi-synthetic sequence derived from human genome
KIFAMKVLKKAMIVR

SEQ ID NO: 7959 - protein, 15 aa, Artificial Sequence
  Quasi-synthetic sequence derived from human genome
FKGRWFWRVRHNRVL

SEQ ID NO: 7960 - protein, 15 aa, Artificial Sequence
  Quasi-synthetic sequence derived from human genome
KQIRLGILHKFVLRR

SEQ ID NO: 7961 - protein, 15 aa, Artificial Sequence
  Quasi-synthetic sequence derived from human genome
TLLIYRRLRKPKITW

SEQ ID NO: 7962 - protein, 15 aa, Artificial Sequence
  Quasi-synthetic sequence derived from human genome
RLRLKKIFSGVFVKV

SEQ ID NO: 7963 - protein, 15 aa, Artificial Sequence
  Quasi-synthetic sequence derived from human genome
FWIRLYKIRRGRTRP

SEQ ID NO: 7964 - protein, 15 aa, Artificial Sequence
  Quasi-synthetic sequence derived from human genome
YLLRHCKYLIRKHRF

SEQ ID NO: 7965 - protein, 15 aa, Artificial Sequence
  Quasi-synthetic sequence derived from human genome
LKTARLLRLVRVARK

SEQ ID NO: 7966 - protein, 15 aa, Artificial Sequence
  Quasi-synthetic sequence derived from human genome
PRLLLTRKKLQLLML

SEQ ID NO: 7967 - protein, 15 aa, Artificial Sequence
  Quasi-synthetic sequence derived from human genome
KFLLLYALLKLSLIR

SEQ ID NO: 7968 - protein, 15 aa, Artificial Sequence
  Quasi-synthetic sequence derived from human genome
RHLMKVKLKKYTKFL

SEQ ID NO: 7969 - protein, 15 aa, Artificial Sequence
  Quasi-synthetic sequence derived from human genome
KKAIILVTILLLLRL

SEQ ID NO: 7970 - protein, 15 aa, Artificial Sequence
  Quasi-synthetic sequence derived from human genome
LRVGLFLRRAGRLRV

SEQ ID NO: 7971 - protein, 15 aa, Artificial Sequence
  Quasi-synthetic sequence derived from human genome
WLRPLLRPLAWLVLR

SEQ ID NO: 7972 - protein, 15 aa, Artificial Sequence
  Quasi-synthetic sequence derived from human genome
KKAKAIKLILLVVIV

SEQ ID NO: 7973 - protein, 15 aa, Artificial Sequence
  Quasi-synthetic sequence derived from human genome
VKKKIKPTLPLRIFI

SEQ ID NO: 7974 - protein, 15 aa, Artificial Sequence
  Quasi-synthetic sequence derived from human genome
RSRIPLLRKRRFQLY

SEQ ID NO: 7975 - protein, 15 aa, Artificial Sequence
  Quasi-synthetic sequence derived from human genome
TLSRRNWKKRWFVLR

SEQ ID NO: 7976 - protein, 15 aa, Artificial Sequence
  Quasi-synthetic sequence derived from human genome
RLGIHLIRRKIVKPK

SEQ ID NO: 7977 - protein, 15 aa, Artificial Sequence
  Quasi-synthetic sequence derived from human genome
LRGFLARNRYRKILR

SEQ ID NO: 7978 - protein, 15 aa, Artificial Sequence
  Quasi-synthetic sequence derived from human genome
RRLWPLLTRRGFRPR

SEQ ID NO: 7979 - protein, 15 aa, Artificial Sequence
  Quasi-synthetic sequence derived from human genome
KKLVLRKLRRKALDL

SEQ ID NO: 7980 - protein, 15 aa, Artificial Sequence
  Quasi-synthetic sequence derived from human genome
LLKKQLPSVRKLLRR

SEQ ID NO: 7981 - protein, 15 aa, Artificial Sequence
  Quasi-synthetic sequence derived from human genome
VFRRTVKLLLCLLWI

SEQ ID NO: 7982 - protein, 15 aa, Artificial Sequence
  Quasi-synthetic sequence derived from human genome
LLRRWKHWLLLLGIC

SEQ ID NO: 7983 - protein, 15 aa, Artificial Sequence
  Quasi-synthetic sequence derived from human genome
IFVIIIFYVRCCKKK

SEQ ID NO: 7984 - protein, 15 aa, Artificial Sequence
  Quasi-synthetic sequence derived from human genome
VLLAIAIFIRWKKSR

SEQ ID NO: 7985 - protein, 15 aa, Artificial Sequence
  Quasi-synthetic sequence derived from human genome
RTLLRFNAVLRKLLI

SEQ ID NO: 7986 - protein, 15 aa, Artificial Sequence
  Quasi-synthetic sequence derived from human genome
LIGLLKTARLLRLVR

SEQ ID NO: 7987 - protein, 15 aa, Artificial Sequence
  Quasi-synthetic sequence derived from human genome
RRGFVMLPRLCLKLL

SEQ ID NO: 7988 - protein, 15 aa, Artificial Sequence
  Quasi-synthetic sequence derived from human genome
RRLPRALLLQLRLAL

SEQ ID NO: 7989 - protein, 15 aa, Artificial Sequence
  Quasi-synthetic sequence derived from human genome
FRARFRRLWPCGRRR

SEQ ID NO: 7990 - protein, 15 aa, Artificial Sequence
  Quasi-synthetic sequence derived from human genome
FINAKIKSLIKLFKK

SEQ ID NO: 7991 - protein, 15 aa, Artificial Sequence
  Quasi-synthetic sequence derived from human genome
VKFGKKCWRKVWALL

SEQ ID NO: 7992 - protein, 15 aa, Artificial Sequence
  Quasi-synthetic sequence derived from human genome
KIPLPRFKLKCIFCK

SEQ ID NO: 7993 - protein, 15 aa, Artificial Sequence
  Quasi-synthetic sequence derived from human genome
LKFFRKAKLLHYHMK

SEQ ID NO: 7994 - protein, 15 aa, Artificial Sequence
  Quasi-synthetic sequence derived from human genome
VRLNRYKMIRLLIMY

SEQ ID NO: 7995 - protein, 15 aa, Artificial Sequence
  Quasi-synthetic sequence derived from human genome
LLIAVRWLVRRLGPR

SEQ ID NO: 7996 - protein, 15 aa, Artificial Sequence
  Quasi-synthetic sequence derived from human genome
LGGRVKTWKRRWFIL

SEQ ID NO: 7997 - protein, 15 aa, Artificial Sequence
  Quasi-synthetic sequence derived from human genome
IIQKNYRAFLLRRRF

SEQ ID NO: 7998 - protein, 15 aa, Artificial Sequence
  Quasi-synthetic sequence derived from human genome
LFYGFLGKKFKRYFL

SEQ ID NO: 7999 - protein, 15 aa, Artificial Sequence
  Quasi-synthetic sequence derived from human genome
WMKLFFKIKPLLKSA

SEQ ID NO: 8000 - protein, 15 aa, Artificial Sequence
  Quasi-synthetic sequence derived from human genome
LLLVRKKRKIKEPLL

SEQ ID NO: 8001 - protein, 16 aa, Artificial Sequence
  Quasi-synthetic sequence derived from human genome
FLLLFMKLRWFLKRWR

SEQ ID NO: 8002 - protein, 16 aa, Artificial Sequence
  Quasi-synthetic sequence derived from human genome
LFLLLVLLLLVRKKRK

SEQ ID NO: 8003 - protein, 16 aa, Artificial Sequence
  Quasi-synthetic sequence derived from human genome
IFKRKKRIKRRALLFL

SEQ ID NO: 8004 - protein, 16 aa, Artificial Sequence
  Quasi-synthetic sequence derived from human genome
LRLRRRVCVLRKRRLL

SEQ ID NO: 8005 - protein, 16 aa, Artificial Sequence
  Quasi-synthetic sequence derived from human genome
FLKKVRRLIMKRIVKI

SEQ ID NO: 8006 - protein, 16 aa, Artificial Sequence
  Quasi-synthetic sequence derived from human genome
LFFLFRLLLRFLRLCR

SEQ ID NO: 8007 - protein, 16 aa, Artificial Sequence
  Quasi-synthetic sequence derived from human genome
ILRVIRLVRVFRIFKL

SEQ ID NO: 8008 - protein, 16 aa, Artificial Sequence
  Quasi-synthetic sequence derived from human genome
KKLRRYAWKKRWFILR

SEQ ID NO: 8009 - protein, 16 aa, Artificial Sequence
  Quasi-synthetic sequence derived from human genome
ILILLIKKLIIFILKK

SEQ ID NO: 8010 - protein, 16 aa, Artificial Sequence
  Quasi-synthetic sequence derived from human genome
WVFRLKRRKRIARRLV

SEQ ID NO: 8011 - protein, 16 aa, Artificial Sequence
  Quasi-synthetic sequence derived from human genome
VLRVMRLMRIFRILKL

SEQ ID NO: 8012 - protein, 16 aa, Artificial Sequence
  Quasi-synthetic sequence derived from human genome
RFFRFLLRKLYVFRRS

SEQ ID NO: 8013 - protein, 16 aa, Artificial Sequence
  Quasi-synthetic sequence derived from human genome
LLRLLGLRRGLRRLRR

SEQ ID NO: 8014 - protein, 16 aa, Artificial Sequence
  Quasi-synthetic sequence derived from human genome
KFMVLLWKNFILKRRR

SEQ ID NO: 8015 - protein, 16 aa, Artificial Sequence
  Quasi-synthetic sequence derived from human genome
KKIRKQMKLLLLLLLL

SEQ ID NO: 8016 - protein, 16 aa, Artificial Sequence
  Quasi-synthetic sequence derived from human genome
RRRPLLLSLLRRVRWL

SEQ ID NO: 8017 - protein, 16 aa, Artificial Sequence
  Quasi-synthetic sequence derived from human genome
RLLKRLLGPKLRRFLK

SEQ ID NO: 8018 - protein, 16 aa, Artificial Sequence
  Quasi-synthetic sequence derived from human genome
LLLVLLLCRLRRLRAR

SEQ ID NO: 8019 - protein, 16 aa, Artificial Sequence
  Quasi-synthetic sequence derived from human genome
VWRRLLRKRWVLALVF

SEQ ID NO: 8020 - protein, 16 aa, Artificial Sequence
  Quasi-synthetic sequence derived from human genome
KKLKRYAWKRRWFVLR

SEQ ID NO: 8021 - protein, 16 aa, Artificial Sequence
  Quasi-synthetic sequence derived from human genome
LRRRRPKLKKLKKLLM

SEQ ID NO: 8022 - protein, 16 aa, Artificial Sequence
  Quasi-synthetic sequence derived from human genome
RFRLLCLLRRWLPRPR

SEQ ID NO: 8023 - protein, 16 aa, Artificial Sequence
  Quasi-synthetic sequence derived from human genome
KVRKLSFKRKRFLIKL

SEQ ID NO: 8024 - protein, 16 aa, Artificial Sequence
  Quasi-synthetic sequence derived from human genome
LVYIKIYIVLRRRRKR

SEQ ID NO: 8025 - protein, 16 aa, Artificial Sequence
  Quasi-synthetic sequence derived from human genome
RIMRVLRIARVLKLLK

SEQ ID NO: 8026 - protein, 16 aa, Artificial Sequence
  Quasi-synthetic sequence derived from human genome
VMVFCLILWKWKKKKR

SEQ ID NO: 8027 - protein, 16 aa, Artificial Sequence
  Quasi-synthetic sequence derived from human genome
LRLFRMLRIFKLGKYW

SEQ ID NO: 8028 - protein, 16 aa, Artificial Sequence
  Quasi-synthetic sequence derived from human genome
RFLKIIRPLRNIFLKK

SEQ ID NO: 8029 - protein, 16 aa, Artificial Sequence
  Quasi-synthetic sequence derived from human genome
LLFRWKPLWGVRLRLR

SEQ ID NO: 8030 - protein, 16 aa, Artificial Sequence
  Quasi-synthetic sequence derived from human genome
RWLGRWRRKRRWRRVR

SEQ ID NO: 8031 - protein, 16 aa, Artificial Sequence
  Quasi-synthetic sequence derived from human genome
RVIRLVRVFRIFKLSR

SEQ ID NO: 8032 - protein, 16 aa, Artificial Sequence
  Quasi-synthetic sequence derived from human genome
LRKKRLKKFPWSLWVW

SEQ ID NO: 8033 - protein, 16 aa, Artificial Sequence
  Quasi-synthetic sequence derived from human genome
FLRLKRKFIQMRRPFL

SEQ ID NO: 8034 - protein, 16 aa, Artificial Sequence
  Quasi-synthetic sequence derived from human genome
LRRKALAPRLLLRLLR

SEQ ID NO: 8035 - protein, 16 aa, Artificial Sequence
  Quasi-synthetic sequence derived from human genome
RVVIAILRLRFLVKKW

SEQ ID NO: 8036 - protein, 16 aa, Artificial Sequence
  Quasi-synthetic sequence derived from human genome
FFRLFRVMRLVKLLSR

SEQ ID NO: 8037 - protein, 16 aa, Artificial Sequence
  Quasi-synthetic sequence derived from human genome
RRIILLQRWFRVLLCR

SEQ ID NO: 8038 - protein, 16 aa, Artificial Sequence
  Quasi-synthetic sequence derived from human genome
FWFVLKVVLIIIRLKK

SEQ ID NO: 8039 - protein, 16 aa, Artificial Sequence
  Quasi-synthetic sequence derived from human genome
LAKKIMFFLLIIRKLL

SEQ ID NO: 8040 - protein, 16 aa, Artificial Sequence
  Quasi-synthetic sequence derived from human genome
RVIRLARIGRILRLIR

SEQ ID NO: 8041 - protein, 16 aa, Artificial Sequence
  Quasi-synthetic sequence derived from human genome
LILLLLLFLRRRAVVK

SEQ ID NO: 8042 - protein, 16 aa, Artificial Sequence
  Quasi-synthetic sequence derived from human genome
IFRIMRILRILKLARH

SEQ ID NO: 8043 - protein, 16 aa, Artificial Sequence
  Quasi-synthetic sequence derived from human genome
FLLLFTFLKKNRKKKL

SEQ ID NO: 8044 - protein, 16 aa, Artificial Sequence
  Quasi-synthetic sequence derived from human genome
LKVLFKKTHRILRRLF

SEQ ID NO: 8045 - protein, 16 aa, Artificial Sequence
  Quasi-synthetic sequence derived from human genome
IYLRLLVKLYRFLARR

SEQ ID NO: 8046 - protein, 16 aa, Artificial Sequence
  Quasi-synthetic sequence derived from human genome
WKLLLLRRPLYRNLLR

SEQ ID NO: 8047 - protein, 16 aa, Artificial Sequence
  Quasi-synthetic sequence derived from human genome
IRRLLILILKIGRRWT

SEQ ID NO: 8048 - protein, 16 aa, Artificial Sequence
  Quasi-synthetic sequence derived from human genome
FRIFFHKIFIRPLRYR

SEQ ID NO: 8049 - protein, 16 aa, Artificial Sequence
  Quasi-synthetic sequence derived from human genome
RLLRVLKLVRFLPALR

SEQ ID NO: 8050 - protein, 16 aa, Artificial Sequence
  Quasi-synthetic sequence derived from human genome
KLLRRRFRLLLALAVV

SEQ ID NO: 8051 - protein, 16 aa, Artificial Sequence
  Quasi-synthetic sequence derived from human genome
IILLIFRLIWRSVKKW

SEQ ID NO: 8052 - protein, 16 aa, Artificial Sequence
  Quasi-synthetic sequence derived from human genome
RKLSFKRKRFLIKLRP

SEQ ID NO: 8053 - protein, 16 aa, Artificial Sequence
  Quasi-synthetic sequence derived from human genome
VLVALLLLWRRRQKRR

SEQ ID NO: 8054 - protein, 16 aa, Artificial Sequence
  Quasi-synthetic sequence derived from human genome
RVIRLARIGRILRLIK

SEQ ID NO: 8055 - protein, 16 aa, Artificial Sequence
  Quasi-synthetic sequence derived from human genome
RVLRMMRIFWVIKLAR

SEQ ID NO: 8056 - protein, 16 aa, Artificial Sequence
  Quasi-synthetic sequence derived from human genome
LKLFLKKKVVVKICKR

SEQ ID NO: 8057 - protein, 16 aa, Artificial Sequence
  Quasi-synthetic sequence derived from human genome
RWTHLLRLLRLIILLR

SEQ ID NO: 8058 - protein, 16 aa, Artificial Sequence
  Quasi-synthetic sequence derived from human genome
RKKKKKFCYLCILLLI

SEQ ID NO: 8059 - protein, 16 aa, Artificial Sequence
  Quasi-synthetic sequence derived from human genome
LGRRKGVWLRLRKILF

SEQ ID NO: 8060 - protein, 16 aa, Artificial Sequence
  Quasi-synthetic sequence derived from human genome
LLLGFFLWLKKRKQIK

SEQ ID NO: 8061 - protein, 16 aa, Artificial Sequence
  Quasi-synthetic sequence derived from human genome
IFFFIALVFFLYRRRK

SEQ ID NO: 8062 - protein, 16 aa, Artificial Sequence
  Quasi-synthetic sequence derived from human genome
LRALLLWGRRLRPLLR

SEQ ID NO: 8063 - protein, 16 aa, Artificial Sequence
  Quasi-synthetic sequence derived from human genome
LLFLMRKDKKKLRRLL

SEQ ID NO: 8064 - protein, 16 aa, Artificial Sequence
  Quasi-synthetic sequence derived from human genome
LIFLRLKRRVKSVILV

SEQ ID NO: 8065 - protein, 16 aa, Artificial Sequence
  Quasi-synthetic sequence derived from human genome
IRRRLPFSKWRLAFRF

SEQ ID NO: 8066 - protein, 16 aa, Artificial Sequence
  Quasi-synthetic sequence derived from human genome
LLLWTFLLQRRFVKKR

SEQ ID NO: 8067 - protein, 16 aa, Artificial Sequence
  Quasi-synthetic sequence derived from human genome
RRILWITLRTWKKFVK

SEQ ID NO: 8068 - protein, 16 aa, Artificial Sequence
  Quasi-synthetic sequence derived from human genome
RIRKRFLLRRILEMLF

SEQ ID NO: 8069 - protein, 16 aa, Artificial Sequence
  Quasi-synthetic sequence derived from human genome
FLWLRWRILRLFPWIL

SEQ ID NO: 8070 - protein, 16 aa, Artificial Sequence
  Quasi-synthetic sequence derived from human genome
FFRILRIFKLIAPKLL

SEQ ID NO: 8071 - protein, 16 aa, Artificial Sequence
  Quasi-synthetic sequence derived from human genome
RRKGVWLRLRKILFCV

SEQ ID NO: 8072 - protein, 16 aa, Artificial Sequence
  Quasi-synthetic sequence derived from human genome
LLKFNQLKFRKKKLKF

SEQ ID NO: 8073 - protein, 16 aa, Artificial Sequence
  Quasi-synthetic sequence derived from human genome
RWLRWKASLIKLRALR

SEQ ID NO: 8074 - protein, 16 aa, Artificial Sequence
  Quasi-synthetic sequence derived from human genome
IMRVLRIARVLKLLKM

SEQ ID NO: 8075 - protein, 16 aa, Artificial Sequence
  Quasi-synthetic sequence derived from human genome
LLWRRLKPLILGKLLF

SEQ ID NO: 8076 - protein, 16 aa, Artificial Sequence
  Quasi-synthetic sequence derived from human genome
RKWAVRIIRKFIKGFI

SEQ ID NO: 8077 - protein, 16 aa, Artificial Sequence
  Quasi-synthetic sequence derived from human genome
LLKTVRLLRLLRLLQK

SEQ ID NO: 8078 - protein, 16 aa, Artificial Sequence
  Quasi-synthetic sequence derived from human genome
VFGFIILLLLVLRKRR

SEQ ID NO: 8079 - protein, 16 aa, Artificial Sequence
  Quasi-synthetic sequence derived from human genome
LRVLRLLRTLRPLRVI

SEQ ID NO: 8080 - protein, 16 aa, Artificial Sequence
  Quasi-synthetic sequence derived from human genome
LKCILKFFLRALKILI

SEQ ID NO: 8081 - protein, 16 aa, Artificial Sequence
  Quasi-synthetic sequence derived from human genome
LRCIRLLRIFKITKYW

SEQ ID NO: 8082 - protein, 16 aa, Artificial Sequence
  Quasi-synthetic sequence derived from human genome
KLKRKYWWKNLKMMII

SEQ ID NO: 8083 - protein, 16 aa, Artificial Sequence
  Quasi-synthetic sequence derived from human genome
LLLLLLLLFLILRHRR

SEQ ID NO: 8084 - protein, 16 aa, Artificial Sequence
  Quasi-synthetic sequence derived from human genome
RVIRLARIGRVLRLIR

SEQ ID NO: 8085 - protein, 16 aa, Artificial Sequence
  Quasi-synthetic sequence derived from human genome
IPVFRLARRRKKILFY

SEQ ID NO: 8086 - protein, 16 aa, Artificial Sequence
  Quasi-synthetic sequence derived from human genome
LRVLRVLRPLKTIKRL

SEQ ID NO: 8087 - protein, 16 aa, Artificial Sequence
  Quasi-synthetic sequence derived from human genome
RPPLLLRPVKLLRRRF

SEQ ID NO: 8088 - protein, 16 aa, Artificial Sequence
  Quasi-synthetic sequence derived from human genome
RIVRFTKILSLLRLLR

SEQ ID NO: 8089 - protein, 16 aa, Artificial Sequence
  Quasi-synthetic sequence derived from human genome
RRRSLRRLFSRFLLAL

SEQ ID NO: 8090 - protein, 16 aa, Artificial Sequence
  Quasi-synthetic sequence derived from human genome
KFIVWRRFKWVIIGLL

SEQ ID NO: 8091 - protein, 16 aa, Artificial Sequence
  Quasi-synthetic sequence derived from human genome
LWFKFQRYFRRKPVRF

SEQ ID NO: 8092 - protein, 16 aa, Artificial Sequence
  Quasi-synthetic sequence derived from human genome
RKILLRKFCQMRKRRL

SEQ ID NO: 8093 - protein, 16 aa, Artificial Sequence
  Quasi-synthetic sequence derived from human genome
RRSRHRLLLLLLRYLV

SEQ ID NO: 8094 - protein, 16 aa, Artificial Sequence
  Quasi-synthetic sequence derived from human genome
RLCKLLFFRIRPIFVF

SEQ ID NO: 8095 - protein, 16 aa, Artificial Sequence
  Quasi-synthetic sequence derived from human genome
ILGLWKIARKWMRRKM

SEQ ID NO: 8096 - protein, 16 aa, Artificial Sequence
  Quasi-synthetic sequence derived from human genome
RLLLLCRWDKRRWRKI

SEQ ID NO: 8097 - protein, 16 aa, Artificial Sequence
  Quasi-synthetic sequence derived from human genome
FLMKRKIIVLMPWLLR

SEQ ID NO: 8098 - protein, 16 aa, Artificial Sequence
  Quasi-synthetic sequence derived from human genome
VFFIYMISFIFRKRRK

SEQ ID NO: 8099 - protein, 16 aa, Artificial Sequence
  Quasi-synthetic sequence derived from human genome
ITVITLLIFLRRRLRK

SEQ ID NO: 8100 - protein, 16 aa, Artificial Sequence
  Quasi-synthetic sequence derived from human genome
LLVIMFLMLLRRFRSR

SEQ ID NO: 8101 - protein, 16 aa, Artificial Sequence
  Quasi-synthetic sequence derived from human genome
LIFLRKRILIAIALIK

SEQ ID NO: 8102 - protein, 16 aa, Artificial Sequence
  Quasi-synthetic sequence derived from human genome
IIMRFRKRKNFKKKRI

SEQ ID NO: 8103 - protein, 16 aa, Artificial Sequence
  Quasi-synthetic sequence derived from human genome
VLLLLLLGLLRPLRRR

SEQ ID NO: 8104 - protein, 16 aa, Artificial Sequence
  Quasi-synthetic sequence derived from human genome
RKLQRYAWRKRWFVLR

SEQ ID NO: 8105 - protein, 16 aa, Artificial Sequence
  Quasi-synthetic sequence derived from human genome
LWRRFRWAIILFIILF

SEQ ID NO: 8106 - protein, 16 aa, Artificial Sequence
  Quasi-synthetic sequence derived from human genome
LIKGSFRILKLIVRRR

SEQ ID NO: 8107 - protein, 16 aa, Artificial Sequence
  Quasi-synthetic sequence derived from human genome
RRRRRACIALFLVLLF

SEQ ID NO: 8108 - protein, 16 aa, Artificial Sequence
  Quasi-synthetic sequence derived from human genome
RRRRRLALFLARKHLK

SEQ ID NO: 8109 - protein, 16 aa, Artificial Sequence
  Quasi-synthetic sequence derived from human genome
RLLRVLKLVRFMPALR

SEQ ID NO: 8110 - protein, 16 aa, Artificial Sequence
  Quasi-synthetic sequence derived from human genome
MKRTLIKLWRRKVILH

SEQ ID NO: 8111 - protein, 16 aa, Artificial Sequence
  Quasi-synthetic sequence derived from human genome
SFLRLFRAARLIKLLR

SEQ ID NO: 8112 - protein, 16 aa, Artificial Sequence
  Quasi-synthetic sequence derived from human genome
RRIVVSRGRLRRLLWI

SEQ ID NO: 8113 - protein, 16 aa, Artificial Sequence
  Quasi-synthetic sequence derived from human genome
MLFLRFRYIILKQKFL

SEQ ID NO: 8114 - protein, 16 aa, Artificial Sequence
  Quasi-synthetic sequence derived from human genome
LVGLLIFFLKRRNKKK

SEQ ID NO: 8115 - protein, 16 aa, Artificial Sequence
  Quasi-synthetic sequence derived from human genome
VRFVRILRIFKLTRHF

SEQ ID NO: 8116 - protein, 16 aa, Artificial Sequence
  Quasi-synthetic sequence derived from human genome
QVLRLMRIFRILKLAR

SEQ ID NO: 8117 - protein, 16 aa, Artificial Sequence
  Quasi-synthetic sequence derived from human genome
RFVRILRIFKLTRHFV

SEQ ID NO: 8118 - protein, 16 aa, Artificial Sequence
  Quasi-synthetic sequence derived from human genome
LRRKLYIHRVTLRKLL

SEQ ID NO: 8119 - protein, 16 aa, Artificial Sequence
  Quasi-synthetic sequence derived from human genome
FLYLKWRVKKVVLVLL

SEQ ID NO: 8120 - protein, 16 aa, Artificial Sequence
  Quasi-synthetic sequence derived from human genome
WWWARAARLARLRFRR

SEQ ID NO: 8121 - protein, 16 aa, Artificial Sequence
  Quasi-synthetic sequence derived from human genome
AVLLVLIFVLRKRIKL

SEQ ID NO: 8122 - protein, 16 aa, Artificial Sequence
  Quasi-synthetic sequence derived from human genome
LRCVRLLRIFKITRYW

SEQ ID NO: 8123 - protein, 16 aa, Artificial Sequence
  Quasi-synthetic sequence derived from human genome
ARLLRALRLVRRLRGL

SEQ ID NO: 8124 - protein, 16 aa, Artificial Sequence
  Quasi-synthetic sequence derived from human genome
RKKMVRRVVCILVWLL

SEQ ID NO: 8125 - protein, 16 aa, Artificial Sequence
  Quasi-synthetic sequence derived from human genome
RRRGFGLFFFLRLHRL

SEQ ID NO: 8126 - protein, 16 aa, Artificial Sequence
  Quasi-synthetic sequence derived from human genome
KKRVIRMLIVIVVLFF

SEQ ID NO: 8127 - protein, 16 aa, Artificial Sequence
  Quasi-synthetic sequence derived from human genome
LLLLRLVCLKPPRRKK

SEQ ID NO: 8128 - protein, 16 aa, Artificial Sequence
  Quasi-synthetic sequence derived from human genome
IFWKTWIFWKTWIFRK

SEQ ID NO: 8129 - protein, 16 aa, Artificial Sequence
  Quasi-synthetic sequence derived from human genome
KLWKVKKALKMTIFWR

SEQ ID NO: 8130 - protein, 16 aa, Artificial Sequence
  Quasi-synthetic sequence derived from human genome
ILFLPCLRKKILKIRH

SEQ ID NO: 8131 - protein, 16 aa, Artificial Sequence
  Quasi-synthetic sequence derived from human genome
LLKALFKALKRLKSLR

SEQ ID NO: 8132 - protein, 16 aa, Artificial Sequence
  Quasi-synthetic sequence derived from human genome
KMMLVRRFRVLILMVF

SEQ ID NO: 8133 - protein, 16 aa, Artificial Sequence
  Quasi-synthetic sequence derived from human genome
SFLKLFRAARLIKLLR

SEQ ID NO: 8134 - protein, 16 aa, Artificial Sequence
  Quasi-synthetic sequence derived from human genome
RRKLLWAIHHWKKIKK

SEQ ID NO: 8135 - protein, 16 aa, Artificial Sequence
  Quasi-synthetic sequence derived from human genome
RKFRRSLLQLLCLRLL

SEQ ID NO: 8136 - protein, 16 aa, Artificial Sequence
  Quasi-synthetic sequence derived from human genome
FAIFLILLLVYRMRKK

SEQ ID NO: 8137 - protein, 16 aa, Artificial Sequence
  Quasi-synthetic sequence derived from human genome
RKKLKMLNIAKKILRI

SEQ ID NO: 8138 - protein, 16 aa, Artificial Sequence
  Quasi-synthetic sequence derived from human genome
WRRLRLQQLRRLRGLL

SEQ ID NO: 8139 - protein, 16 aa, Artificial Sequence
  Quasi-synthetic sequence derived from human genome
KKMWIKLRSLLRYMVK

SEQ ID NO: 8140 - protein, 16 aa, Artificial Sequence
  Quasi-synthetic sequence derived from human genome
FRLKICYFMRYWILKF

SEQ ID NO: 8141 - protein, 16 aa, Artificial Sequence
  Quasi-synthetic sequence derived from human genome
VRWRMRKLKYKHLAFL

SEQ ID NO: 8142 - protein, 16 aa, Artificial Sequence
  Quasi-synthetic sequence derived from human genome
YRCLALLYWRMFRLKR

SEQ ID NO: 8143 - protein, 16 aa, Artificial Sequence
  Quasi-synthetic sequence derived from human genome
IFWKRYRFKLIAFMVI

SEQ ID NO: 8144 - protein, 16 aa, Artificial Sequence
  Quasi-synthetic sequence derived from human genome
LIFLRIKRRVKSVVLV

SEQ ID NO: 8145 - protein, 16 aa, Artificial Sequence
  Quasi-synthetic sequence derived from human genome
FLKRFLRLRYGRQRRR

SEQ ID NO: 8146 - protein, 16 aa, Artificial Sequence
  Quasi-synthetic sequence derived from human genome
MLMALVLLQRKLWRRR

SEQ ID NO: 8147 - protein, 16 aa, Artificial Sequence
  Quasi-synthetic sequence derived from human genome
LLRGLWQRWRRYKYRF

SEQ ID NO: 8148 - protein, 16 aa, Artificial Sequence
  Quasi-synthetic sequence derived from human genome
LLMVLRCLRPLRIFKL

SEQ ID NO: 8149 - protein, 16 aa, Artificial Sequence
  Quasi-synthetic sequence derived from human genome
KIRTRLIRKRFLCLGW

SEQ ID NO: 8150 - protein, 16 aa, Artificial Sequence
  Quasi-synthetic sequence derived from human genome
FYCKFLWRCLKFVMRK

SEQ ID NO: 8151 - protein, 16 aa, Artificial Sequence
  Quasi-synthetic sequence derived from human genome
LFMRRRHIVRKRTLRR

SEQ ID NO: 8152 - protein, 16 aa, Artificial Sequence
  Quasi-synthetic sequence derived from human genome
KMLRLRLPNLKMVRLR

SEQ ID NO: 8153 - protein, 16 aa, Artificial Sequence
  Quasi-synthetic sequence derived from human genome
KLFKSLLGKKKMRILI

SEQ ID NO: 8154 - protein, 16 aa, Artificial Sequence
  Quasi-synthetic sequence derived from human genome
RCLRGFFIKRRFRSLR

SEQ ID NO: 8155 - protein, 16 aa, Artificial Sequence
  Quasi-synthetic sequence derived from human genome
VFRLRKWIIFRLVSIV

SEQ ID NO: 8156 - protein, 16 aa, Artificial Sequence
  Quasi-synthetic sequence derived from human genome
KILGVLRVLRLLRTLR

SEQ ID NO: 8157 - protein, 16 aa, Artificial Sequence
  Quasi-synthetic sequence derived from human genome
VKILRVLRVLRPLRAI

SEQ ID NO: 8158 - protein, 16 aa, Artificial Sequence
  Quasi-synthetic sequence derived from human genome
IFIKMCLWLWKQFLKR

SEQ ID NO: 8159 - protein, 16 aa, Artificial Sequence
  Quasi-synthetic sequence derived from human genome
MRFRIYKRKVLILTLV

SEQ ID NO: 8160 - protein, 16 aa, Artificial Sequence
  Quasi-synthetic sequence derived from human genome
RVIFLNRKILLIRPKM

SEQ ID NO: 8161 - protein, 16 aa, Artificial Sequence
  Quasi-synthetic sequence derived from human genome
LAFIIWLARRLKKGKK

SEQ ID NO: 8162 - protein, 16 aa, Artificial Sequence
  Quasi-synthetic sequence derived from human genome
SRLLFFLLGFLRIRVR

SEQ ID NO: 8163 - protein, 16 aa, Artificial Sequence
  Quasi-synthetic sequence derived from human genome
LALWKIGFFKRPLKKK

SEQ ID NO: 8164 - protein, 16 aa, Artificial Sequence
  Quasi-synthetic sequence derived from human genome
VLLALRLRRWHKSRLL

SEQ ID NO: 8165 - protein, 16 aa, Artificial Sequence
  Quasi-synthetic sequence derived from human genome
WKRRVPLLPFLRFSLR

SEQ ID NO: 8166 - protein, 16 aa, Artificial Sequence
  Quasi-synthetic sequence derived from human genome
RLWVLYKGVLKRLILL

SEQ ID NO: 8167 - protein, 16 aa, Artificial Sequence
  Quasi-synthetic sequence derived from human genome
KKRVVRMLLVIVVLFF

SEQ ID NO: 8168 - protein, 16 aa, Artificial Sequence
  Quasi-synthetic sequence derived from human genome
VLLLFLLLFLLLRRQR

SEQ ID NO: 8169 - protein, 16 aa, Artificial Sequence
  Quasi-synthetic sequence derived from human genome
LMVMYFFFRVRSRRWK

SEQ ID NO: 8170 - protein, 16 aa, Artificial Sequence
  Quasi-synthetic sequence derived from human genome
LKVVRLLRLGRVARKL

SEQ ID NO: 8171 - protein, 16 aa, Artificial Sequence
  Quasi-synthetic sequence derived from human genome
QCWWRLILSKILKKRR

SEQ ID NO: 8172 - protein, 16 aa, Artificial Sequence
  Quasi-synthetic sequence derived from human genome
KSKIFFLFRLCKKLPF

SEQ ID NO: 8173 - protein, 16 aa, Artificial Sequence
  Quasi-synthetic sequence derived from human genome
RISKFRRLRQLLRRRK

SEQ ID NO: 8174 - protein, 16 aa, Artificial Sequence
  Quasi-synthetic sequence derived from human genome
WVNILKISFKRKKFFI

SEQ ID NO: 8175 - protein, 16 aa, Artificial Sequence
  Quasi-synthetic sequence derived from human genome
MKRALMKLWRRRVVLH

SEQ ID NO: 8176 - protein, 16 aa, Artificial Sequence
  Quasi-synthetic sequence derived from human genome
VRIRVIKKKKVIMKKR

SEQ ID NO: 8177 - protein, 16 aa, Artificial Sequence
  Quasi-synthetic sequence derived from human genome
TLFWLLLTLFIRKMKR

SEQ ID NO: 8178 - protein, 16 aa, Artificial Sequence
  Quasi-synthetic sequence derived from human genome
LIRKCSRFNFLRFLIR

SEQ ID NO: 8179 - protein, 16 aa, Artificial Sequence
  Quasi-synthetic sequence derived from human genome
RKRFGMKNFKKRWFRL

SEQ ID NO: 8180 - protein, 16 aa, Artificial Sequence
  Quasi-synthetic sequence derived from human genome
HYWKKVLPLLKIIKKK

SEQ ID NO: 8181 - protein, 16 aa, Artificial Sequence
  Quasi-synthetic sequence derived from human genome
LLLAVLLWKMGFFRRR

SEQ ID NO: 8182 - protein, 16 aa, Artificial Sequence
  Quasi-synthetic sequence derived from human genome
VMKFFRWVRRAWQRII

SEQ ID NO: 8183 - protein, 16 aa, Artificial Sequence
  Quasi-synthetic sequence derived from human genome
SLQKLRLVRWLLKKVF

SEQ ID NO: 8184 - protein, 16 aa, Artificial Sequence
  Quasi-synthetic sequence derived from human genome
WALLCKNFLKKWRMKR

SEQ ID NO: 8185 - protein, 16 aa, Artificial Sequence
  Quasi-synthetic sequence derived from human genome
LLFRIVLKRRLNWIQW

SEQ ID NO: 8186 - protein, 16 aa, Artificial Sequence
  Quasi-synthetic sequence derived from human genome
LVRLLRLIILIRIFHL

SEQ ID NO: 8187 - protein, 16 aa, Artificial Sequence
  Quasi-synthetic sequence derived from human genome
LFIILLGVIMAKRKRK

SEQ ID NO: 8188 - protein, 16 aa, Artificial Sequence
  Quasi-synthetic sequence derived from human genome
ILFLPCISRKLKRIKK

SEQ ID NO: 8189 - protein, 16 aa, Artificial Sequence
  Quasi-synthetic sequence derived from human genome
IIVLLLYLKRLKIIIF

SEQ ID NO: 8190 - protein, 16 aa, Artificial Sequence
  Quasi-synthetic sequence derived from human genome
KRLARISLVKKLMKKW

SEQ ID NO: 8191 - protein, 16 aa, Artificial Sequence
  Quasi-synthetic sequence derived from human genome
WVLIAYILYRKKIFWK

SEQ ID NO: 8192 - protein, 16 aa, Artificial Sequence
  Quasi-synthetic sequence derived from human genome
QVFRLMRIFRVLKLAR

SEQ ID NO: 8193 - protein, 16 aa, Artificial Sequence
  Quasi-synthetic sequence derived from human genome
FVALLWKRLLIARRSR

SEQ ID NO: 8194 - protein, 16 aa, Artificial Sequence
  Quasi-synthetic sequence derived from human genome
VLGRHIFWRRLRKALL

SEQ ID NO: 8195 - protein, 16 aa, Artificial Sequence
  Quasi-synthetic sequence derived from human genome
VLGFLFKRFLRIQRLF

SEQ ID NO: 8196 - protein, 16 aa, Artificial Sequence
  Quasi-synthetic sequence derived from human genome
LRILRKRNKALRKIRK

SEQ ID NO: 8197 - protein, 16 aa, Artificial Sequence
  Quasi-synthetic sequence derived from human genome
KFRRLRQLLRRRKKRR

SEQ ID NO: 8198 - protein, 16 aa, Artificial Sequence
  Quasi-synthetic sequence derived from human genome
KHWKLLPLLRSVLRFR

SEQ ID NO: 8199 - protein, 16 aa, Artificial Sequence
  Quasi-synthetic sequence derived from human genome
RWLGKLRRKRRWRRAR

SEQ ID NO: 8200 - protein, 16 aa, Artificial Sequence
  Quasi-synthetic sequence derived from human genome
FLRLRWSRFARVLLTR

SEQ ID NO: 8201 - protein, 16 aa, Artificial Sequence
  Quasi-synthetic sequence derived from human genome
LLYRVRRFDLLKRILK

SEQ ID NO: 8202 - protein, 16 aa, Artificial Sequence
  Quasi-synthetic sequence derived from human genome
ILLLPKRKRFRKKKSR

SEQ ID NO: 8203 - protein, 16 aa, Artificial Sequence
  Quasi-synthetic sequence derived from human genome
FLTVLLLKLRKRHRKH

SEQ ID NO: 8204 - protein, 16 aa, Artificial Sequence
  Quasi-synthetic sequence derived from human genome
VFIIIVLYMLRFKKYK

SEQ ID NO: 8205 - protein, 16 aa, Artificial Sequence
  Quasi-synthetic sequence derived from human genome
LLYQFRMNFRRRRRLM

SEQ ID NO: 8206 - protein, 16 aa, Artificial Sequence
  Quasi-synthetic sequence derived from human genome
KIKRLKKSAFVVLILL

SEQ ID NO: 8207 - protein, 16 aa, Artificial Sequence
  Quasi-synthetic sequence derived from human genome
RKLGIFRRCWLVFKKA

SEQ ID NO: 8208 - protein, 16 aa, Artificial Sequence
  Quasi-synthetic sequence derived from human genome
RRLVRRLRRWGLLPRT

SEQ ID NO: 8209 - protein, 16 aa, Artificial Sequence
  Quasi-synthetic sequence derived from human genome
KIILLKPIIKVLPKLF

SEQ ID NO: 8210 - protein, 16 aa, Artificial Sequence
  Quasi-synthetic sequence derived from human genome
LRKFFLRIGVVYKIWI

SEQ ID NO: 8211 - protein, 16 aa, Artificial Sequence
  Quasi-synthetic sequence derived from human genome
FLFLILVFSIIRRRFW

SEQ ID NO: 8212 - protein, 16 aa, Artificial Sequence
  Quasi-synthetic sequence derived from human genome
LRKTKYRSFRRRLLKF

SEQ ID NO: 8213 - protein, 16 aa, Artificial Sequence
  Quasi-synthetic sequence derived from human genome
RLLRALRVLYVMRLAR

SEQ ID NO: 8214 - protein, 16 aa, Artificial Sequence
  Quasi-synthetic sequence derived from human genome
KKKLRSKLKPIFPLIL

SEQ ID NO: 8215 - protein, 16 aa, Artificial Sequence
  Quasi-synthetic sequence derived from human genome
LPRFKLKCIFCKKRRK

SEQ ID NO: 8216 - protein, 16 aa, Artificial Sequence
  Quasi-synthetic sequence derived from human genome
AMRWRWWQRLLPWRLL

SEQ ID NO: 8217 - protein, 16 aa, Artificial Sequence
  Quasi-synthetic sequence derived from human genome
KYWRMYVVRRRYKIRR

SEQ ID NO: 8218 - protein, 16 aa, Artificial Sequence
  Quasi-synthetic sequence derived from human genome
YWRRVLAQRKLLMLKK

SEQ ID NO: 8219 - protein, 16 aa, Artificial Sequence
  Quasi-synthetic sequence derived from human genome
LWYRRQRLLARTLRLW

SEQ ID NO: 8220 - protein, 16 aa, Artificial Sequence
  Quasi-synthetic sequence derived from human genome
VKRIRVLVIRKLVRSV

SEQ ID NO: 8221 - protein, 16 aa, Artificial Sequence
  Quasi-synthetic sequence derived from human genome
KRLKRTLIRKVFNLYL

SEQ ID NO: 8222 - protein, 16 aa, Artificial Sequence
  Quasi-synthetic sequence derived from human genome
FRTGIKRRILLLIPKW

SEQ ID NO: 8223 - protein, 16 aa, Artificial Sequence
  Quasi-synthetic sequence derived from human genome
KNYRAFLLRRRFLHLK

SEQ ID NO: 8224 - protein, 16 aa, Artificial Sequence
  Quasi-synthetic sequence derived from human genome
ILYRRLLLTKLFIRGW

SEQ ID NO: 8225 - protein, 16 aa, Artificial Sequence
  Quasi-synthetic sequence derived from human genome
PRLFKKRRLRSPRVLF

SEQ ID NO: 8226 - protein, 16 aa, Artificial Sequence
  Quasi-synthetic sequence derived from human genome
IKLLPLRTFRVFRALK

SEQ ID NO: 8227 - protein, 16 aa, Artificial Sequence
  Quasi-synthetic sequence derived from human genome
RTFRKTFKMLLLCRWK

SEQ ID NO: 8228 - protein, 16 aa, Artificial Sequence
  Quasi-synthetic sequence derived from human genome
LIKWIWTHLCKKKMRR

SEQ ID NO: 8229 - protein, 16 aa, Artificial Sequence
  Quasi-synthetic sequence derived from human genome
FRLMRVLKLVRFLPAL

SEQ ID NO: 8230 - protein, 16 aa, Artificial Sequence
  Quasi-synthetic sequence derived from human genome
IFRWRVNFIRHLRSRR

SEQ ID NO: 8231 - protein, 16 aa, Artificial Sequence
  Quasi-synthetic sequence derived from human genome
ITLVVLLLKYRRRHRK

SEQ ID NO: 8232 - protein, 16 aa, Artificial Sequence
  Quasi-synthetic sequence derived from human genome
KLLKLRRNIVKLSLYR

SEQ ID NO: 8233 - protein, 16 aa, Artificial Sequence
  Quasi-synthetic sequence derived from human genome
LLLWKNWTLRKRQKIR

SEQ ID NO: 8234 - protein, 16 aa, Artificial Sequence
  Quasi-synthetic sequence derived from human genome
RKGIMKIMVYKIFRIL

SEQ ID NO: 8235 - protein, 16 aa, Artificial Sequence
  Quasi-synthetic sequence derived from human genome
FLSRFRWRRRLLVISA

SEQ ID NO: 8236 - protein, 16 aa, Artificial Sequence
  Quasi-synthetic sequence derived from human genome
VRWRKLFSFTKYFLKI

SEQ ID NO: 8237 - protein, 16 aa, Artificial Sequence
  Quasi-synthetic sequence derived from human genome
LLVLLLWKMGFFKRAK

SEQ ID NO: 8238 - protein, 16 aa, Artificial Sequence
  Quasi-synthetic sequence derived from human genome
VRRVFGRIRRFFSRRR

SEQ ID NO: 8239 - protein, 16 aa, Artificial Sequence
  Quasi-synthetic sequence derived from human genome
KVILAIRRAKNLRRLL

SEQ ID NO: 8240 - protein, 16 aa, Artificial Sequence
  Quasi-synthetic sequence derived from human genome
RILKVFKSLRALRAIR

SEQ ID NO: 8241 - protein, 16 aa, Artificial Sequence
  Quasi-synthetic sequence derived from human genome
RVLRALRILYVMRLAR

SEQ ID NO: 8242 - protein, 16 aa, Artificial Sequence
  Quasi-synthetic sequence derived from human genome
RLHMVLRPFLLRRIKA

SEQ ID NO: 8243 - protein, 16 aa, Artificial Sequence
  Quasi-synthetic sequence derived from human genome
WLLRTKRLHWSRLLFL

SEQ ID NO: 8244 - protein, 16 aa, Artificial Sequence
  Quasi-synthetic sequence derived from human genome
RPHLLKKKILGRVWWL

SEQ ID NO: 8245 - protein, 16 aa, Artificial Sequence
  Quasi-synthetic sequence derived from human genome
WLRRKLRGKRRPVIAF

SEQ ID NO: 8246 - protein, 16 aa, Artificial Sequence
  Quasi-synthetic sequence derived from human genome
VMLFKKKKTRKLKIAL

SEQ ID NO: 8247 - protein, 16 aa, Artificial Sequence
  Quasi-synthetic sequence derived from human genome
HRIRWVFKRRLGLLGR

SEQ ID NO: 8248 - protein, 16 aa, Artificial Sequence
  Quasi-synthetic sequence derived from human genome
LKSQILLKKYLMKRRW

SEQ ID NO: 8249 - protein, 16 aa, Artificial Sequence
  Quasi-synthetic sequence derived from human genome
WVFILFRKAVFQRLKL

SEQ ID NO: 8250 - protein, 16 aa, Artificial Sequence
  Quasi-synthetic sequence derived from human genome
TIRGWLLRKKYLRMRK

SEQ ID NO: 8251 - protein, 16 aa, Artificial Sequence
  Quasi-synthetic sequence derived from human genome
LCRRAVKILKKKKLRR

SEQ ID NO: 8252 - protein, 16 aa, Artificial Sequence
  Quasi-synthetic sequence derived from human genome
FRLFRVMRLVKLLSRG

SEQ ID NO: 8253 - protein, 16 aa, Artificial Sequence
  Quasi-synthetic sequence derived from human genome
FLLRHHKVWRKCKMRI

SEQ ID NO: 8254 - protein, 16 aa, Artificial Sequence
  Quasi-synthetic sequence derived from human genome
WKTARTFLYWRLRRLL

SEQ ID NO: 8255 - protein, 16 aa, Artificial Sequence
  Quasi-synthetic sequence derived from human genome
FRKLMRWILILVIALW

SEQ ID NO: 8256 - protein, 16 aa, Artificial Sequence
  Quasi-synthetic sequence derived from human genome
MRRRLWLGLAWLLLAR

SEQ ID NO: 8257 - protein, 16 aa, Artificial Sequence
  Quasi-synthetic sequence derived from human genome
LLKIKNTFCLWKRLIK

SEQ ID NO: 8258 - protein, 16 aa, Artificial Sequence
  Quasi-synthetic sequence derived from human genome
KKKLKLIRVLGLFMGL

SEQ ID NO: 8259 - protein, 16 aa, Artificial Sequence
  Quasi-synthetic sequence derived from human genome
AFVIVLLVLRLRRWHK

SEQ ID NO: 8260 - protein, 16 aa, Artificial Sequence
  Quasi-synthetic sequence derived from human genome
KRILRRNLLALIHRMI

SEQ ID NO: 8261 - protein, 16 aa, Artificial Sequence
  Quasi-synthetic sequence derived from human genome
PTFRVKFLLRLLRGRL

SEQ ID NO: 8262 - protein, 16 aa, Artificial Sequence
  Quasi-synthetic sequence derived from human genome
FLRAKVFVKRFVRAVL

SEQ ID NO: 8263 - protein, 16 aa, Artificial Sequence
  Quasi-synthetic sequence derived from human genome
LFMYAKRNKRRIMRIF

SEQ ID NO: 8264 - protein, 16 aa, Artificial Sequence
  Quasi-synthetic sequence derived from human genome
VKRIIKVNNRILRLKF

SEQ ID NO: 8265 - protein, 16 aa, Artificial Sequence
  Quasi-synthetic sequence derived from human genome
YILTHKRILKFLKLFI

SEQ ID NO: 8266 - protein, 16 aa, Artificial Sequence
  Quasi-synthetic sequence derived from human genome
AIVLRFKKTWKLRALK

SEQ ID NO: 8267 - protein, 16 aa, Artificial Sequence
  Quasi-synthetic sequence derived from human genome
RRNLLRLYFILLLIIF

SEQ ID NO: 8268 - protein, 16 aa, Artificial Sequence
  Quasi-synthetic sequence derived from human genome
LFRCRRLRGWWPVVKL

SEQ ID NO: 8269 - protein, 16 aa, Artificial Sequence
  Quasi-synthetic sequence derived from human genome
RKSYPMLKLVRLKLWF

SEQ ID NO: 8270 - protein, 16 aa, Artificial Sequence
  Quasi-synthetic sequence derived from human genome
LVLRVLRALRILYVMR

SEQ ID NO: 8271 - protein, 16 aa, Artificial Sequence
  Quasi-synthetic sequence derived from human genome
KFANFLMKVLKKKIKR

SEQ ID NO: 8272 - protein, 16 aa, Artificial Sequence
  Quasi-synthetic sequence derived from human genome
AFVILLLALRLRRWHK

SEQ ID NO: 8273 - protein, 16 aa, Artificial Sequence
  Quasi-synthetic sequence derived from human genome
RLLLKWRGSIYKLLYR

SEQ ID NO: 8274 - protein, 16 aa, Artificial Sequence
  Quasi-synthetic sequence derived from human genome
KCKALTKFKFVFFLRL

SEQ ID NO: 8275 - protein, 16 aa, Artificial Sequence
  Quasi-synthetic sequence derived from human genome
RLRPVPPVMWRLFRRR

SEQ ID NO: 8276 - protein, 16 aa, Artificial Sequence
  Quasi-synthetic sequence derived from human genome
WLRRGKTLKLIFSLRK

SEQ ID NO: 8277 - protein, 16 aa, Artificial Sequence
  Quasi-synthetic sequence derived from human genome
KFRRRTCIILALFILF

SEQ ID NO: 8278 - protein, 16 aa, Artificial Sequence
  Quasi-synthetic sequence derived from human genome
LIILLLWKCGFFKRAR

SEQ ID NO: 8279 - protein, 16 aa, Artificial Sequence
  Quasi-synthetic sequence derived from human genome
IVVLRPLQLLRLFKLK

SEQ ID NO: 8280 - protein, 16 aa, Artificial Sequence
  Quasi-synthetic sequence derived from human genome
GLCLRLLLFFRFKRTL

SEQ ID NO: 8281 - protein, 16 aa, Artificial Sequence
  Quasi-synthetic sequence derived from human genome
RIHRRGPKILLLLLFF

SEQ ID NO: 8282 - protein, 16 aa, Artificial Sequence
  Quasi-synthetic sequence derived from human genome
RKILRLITIRKLFTAI

SEQ ID NO: 8283 - protein, 16 aa, Artificial Sequence
  Quasi-synthetic sequence derived from human genome
LWHRRRILMGKIFRTW

SEQ ID NO: 8284 - protein, 16 aa, Artificial Sequence
  Quasi-synthetic sequence derived from human genome
ALKRPIKQKRKLRIFI

SEQ ID NO: 8285 - protein, 16 aa, Artificial Sequence
  Quasi-synthetic sequence derived from human genome
LLTYLVKVLKRRTWRR

SEQ ID NO: 8286 - protein, 16 aa, Artificial Sequence
  Quasi-synthetic sequence derived from human genome
IFIHKLPLYLRLKRPK

SEQ ID NO: 8287 - protein, 16 aa, Artificial Sequence
  Quasi-synthetic sequence derived from human genome
LKRRLVKLVVNFLFYF

SEQ ID NO: 8288 - protein, 16 aa, Artificial Sequence
  Quasi-synthetic sequence derived from human genome
LLKRYLLKRLNLIWNI

SEQ ID NO: 8289 - protein, 16 aa, Artificial Sequence
  Quasi-synthetic sequence derived from human genome
WRKRCLYLFVLLLLII

SEQ ID NO: 8290 - protein, 16 aa, Artificial Sequence
  Quasi-synthetic sequence derived from human genome
LVIFYCYIRKRCLKLK

SEQ ID NO: 8291 - protein, 16 aa, Artificial Sequence
  Quasi-synthetic sequence derived from human genome
RNIGIWFFWIRLYKIR

SEQ ID NO: 8292 - protein, 16 aa, Artificial Sequence
  Quasi-synthetic sequence derived from human genome
LKLRHWQWWRLFTKVK

SEQ ID NO: 8293 - protein, 16 aa, Artificial Sequence
  Quasi-synthetic sequence derived from human genome
LAPFLLWLRKCLRKAK

SEQ ID NO: 8294 - protein, 16 aa, Artificial Sequence
  Quasi-synthetic sequence derived from human genome
IERRKRWRTIKLLLRR

SEQ ID NO: 8295 - protein, 16 aa, Artificial Sequence
  Quasi-synthetic sequence derived from human genome
RRMGAVIKIRFFKIML

SEQ ID NO: 8296 - protein, 16 aa, Artificial Sequence
  Quasi-synthetic sequence derived from human genome
SFAILRIIRLVRVFRI

SEQ ID NO: 8297 - protein, 16 aa, Artificial Sequence
  Quasi-synthetic sequence derived from human genome
GYLYFCFRWLLIRFKR

SEQ ID NO: 8298 - protein, 16 aa, Artificial Sequence
  Quasi-synthetic sequence derived from human genome
SRALSRRYLRRLLLLL

SEQ ID NO: 8299 - protein, 16 aa, Artificial Sequence
  Quasi-synthetic sequence derived from human genome
RKKKKTIKMLMLVVVL

SEQ ID NO: 8300 - protein, 16 aa, Artificial Sequence
  Quasi-synthetic sequence derived from human genome
IGIPKMKKLIRYLKLK

SEQ ID NO: 8301 - protein, 16 aa, Artificial Sequence
  Quasi-synthetic sequence derived from human genome
VTLRVFRVFRIFKFSR

SEQ ID NO: 8302 - protein, 16 aa, Artificial Sequence
  Quasi-synthetic sequence derived from human genome
VIFLIWRCFLRNKTRR

SEQ ID NO: 8303 - protein, 16 aa, Artificial Sequence
  Quasi-synthetic sequence derived from human genome
LLRRRRWAALLVLGLL

SEQ ID NO: 8304 - protein, 16 aa, Artificial Sequence
  Quasi-synthetic sequence derived from human genome
RGRLPRRLLLLLALWV

SEQ ID NO: 8305 - protein, 16 aa, Artificial Sequence
  Quasi-synthetic sequence derived from human genome
ILMVFSIWLYRHRKKR

SEQ ID NO: 8306 - protein, 16 aa, Artificial Sequence
  Quasi-synthetic sequence derived from human genome
LLWVFRRRWRLNFNRQ

SEQ ID NO: 8307 - protein, 16 aa, Artificial Sequence
  Quasi-synthetic sequence derived from human genome
RRLNFVRLLMLYTRKF

SEQ ID NO: 8308 - protein, 16 aa, Artificial Sequence
  Quasi-synthetic sequence derived from human genome
RLRRFLRTLRLKLAAA

SEQ ID NO: 8309 - protein, 16 aa, Artificial Sequence
  Quasi-synthetic sequence derived from human genome
LILTYNLRKRIVFRKI

SEQ ID NO: 8310 - protein, 16 aa, Artificial Sequence
  Quasi-synthetic sequence derived from human genome
FRLIRKMFSFKVSRWM

SEQ ID NO: 8311 - protein, 16 aa, Artificial Sequence
  Quasi-synthetic sequence derived from human genome
KRWIFWLWWRACWFVI

SEQ ID NO: 8312 - protein, 16 aa, Artificial Sequence
  Quasi-synthetic sequence derived from human genome
KFFKRKPKVLGVVRIL

SEQ ID NO: 8313 - protein, 16 aa, Artificial Sequence
  Quasi-synthetic sequence derived from human genome
RAFVKRVIMSRFFKII

SEQ ID NO: 8314 - protein, 16 aa, Artificial Sequence
  Quasi-synthetic sequence derived from human genome
LRSFRLLRVFKLAKSW

SEQ ID NO: 8315 - protein, 16 aa, Artificial Sequence
  Quasi-synthetic sequence derived from human genome
RARWLRGILLFLFTLK

SEQ ID NO: 8316 - protein, 16 aa, Artificial Sequence
  Quasi-synthetic sequence derived from human genome
LRLRHLRRPRVARLLC

SEQ ID NO: 8317 - protein, 16 aa, Artificial Sequence
  Quasi-synthetic sequence derived from human genome
FILKLGRRSRLKRAVW

SEQ ID NO: 8318 - protein, 16 aa, Artificial Sequence
  Quasi-synthetic sequence derived from human genome
RALRLLRIFKITKYWA

SEQ ID NO: 8319 - protein, 16 aa, Artificial Sequence
  Quasi-synthetic sequence derived from human genome
PKLKQFTKILRRKRLL

SEQ ID NO: 8320 - protein, 16 aa, Artificial Sequence
  Quasi-synthetic sequence derived from human genome
LRRQILLPFRKPLIIF

SEQ ID NO: 8321 - protein, 16 aa, Artificial Sequence
  Quasi-synthetic sequence derived from human genome
RLIILLRIFHLFHQKR

SEQ ID NO: 8322 - protein, 16 aa, Artificial Sequence
  Quasi-synthetic sequence derived from human genome
LRWCGRRRLRWRLLQA

SEQ ID NO: 8323 - protein, 16 aa, Artificial Sequence
  Quasi-synthetic sequence derived from human genome
MRLRLRLLALLLLLLA

SEQ ID NO: 8324 - protein, 16 aa, Artificial Sequence
  Quasi-synthetic sequence derived from human genome
LKTFVFFIWRRYWRTL

SEQ ID NO: 8325 - protein, 16 aa, Artificial Sequence
  Quasi-synthetic sequence derived from human genome
RCKRGKRHWKKLWFVI

SEQ ID NO: 8326 - protein, 16 aa, Artificial Sequence
  Quasi-synthetic sequence derived from human genome
WKGLKTNFRLLKRRLR

SEQ ID NO: 8327 - protein, 16 aa, Artificial Sequence
  Quasi-synthetic sequence derived from human genome
CRRLRAIYTIMRWFRR

SEQ ID NO: 8328 - protein, 16 aa, Artificial Sequence
  Quasi-synthetic sequence derived from human genome
KVRRVFVRKVYTILLI

SEQ ID NO: 8329 - protein, 16 aa, Artificial Sequence
  Quasi-synthetic sequence derived from human genome
TFRRLLKLPRTLILLL

SEQ ID NO: 8330 - protein, 16 aa, Artificial Sequence
  Quasi-synthetic sequence derived from human genome
LIILVYKAKKRCIFFL

SEQ ID NO: 8331 - protein, 16 aa, Artificial Sequence
  Quasi-synthetic sequence derived from human genome
LMKYLQKWKRYRPLWK

SEQ ID NO: 8332 - protein, 16 aa, Artificial Sequence
  Quasi-synthetic sequence derived from human genome
VKVILHKKRYIYRKIK

SEQ ID NO: 8333 - protein, 16 aa, Artificial Sequence
  Quasi-synthetic sequence derived from human genome
LRAWKRIFWRQILLTL

SEQ ID NO: 8334 - protein, 16 aa, Artificial Sequence
  Quasi-synthetic sequence derived from human genome
RLSRLIFLLRRWAARH

SEQ ID NO: 8335 - protein, 16 aa, Artificial Sequence
  Quasi-synthetic sequence derived from human genome
ARLSRLIFLLRRWAAR

SEQ ID NO: 8336 - protein, 16 aa, Artificial Sequence
  Quasi-synthetic sequence derived from human genome
LRVLCLLRPWRPLRAR

SEQ ID NO: 8337 - protein, 16 aa, Artificial Sequence
  Quasi-synthetic sequence derived from human genome
RRKLLLFKTFSRKVVV

SEQ ID NO: 8338 - protein, 16 aa, Artificial Sequence
  Quasi-synthetic sequence derived from human genome
FYRNKLKYLAFLRKRM

SEQ ID NO: 8339 - protein, 16 aa, Artificial Sequence
  Quasi-synthetic sequence derived from human genome
RSIVLALRLRKRFLNF

SEQ ID NO: 8340 - protein, 16 aa, Artificial Sequence
  Quasi-synthetic sequence derived from human genome
VKRRWRLSRIVFRHLA

SEQ ID NO: 8341 - protein, 16 aa, Artificial Sequence
  Quasi-synthetic sequence derived from human genome
MRKKLILFFKRRNHAR

SEQ ID NO: 8342 - protein, 16 aa, Artificial Sequence
  Quasi-synthetic sequence derived from human genome
WKVLKVVAKVIRALLR

SEQ ID NO: 8343 - protein, 16 aa, Artificial Sequence
  Quasi-synthetic sequence derived from human genome
VLRLLRALRMLKLGRH

SEQ ID NO: 8344 - protein, 16 aa, Artificial Sequence
  Quasi-synthetic sequence derived from human genome
LGLRFRRQLLYWFLKV

SEQ ID NO: 8345 - protein, 16 aa, Artificial Sequence
  Quasi-synthetic sequence derived from human genome
RKAIFIFIRWLLKLGH

SEQ ID NO: 8346 - protein, 16 aa, Artificial Sequence
  Quasi-synthetic sequence derived from human genome
ILFLVALLARVLVKRK

SEQ ID NO: 8347 - protein, 16 aa, Artificial Sequence
  Quasi-synthetic sequence derived from human genome
IKGKRRRKKLILAKKF

SEQ ID NO: 8348 - protein, 16 aa, Artificial Sequence
  Quasi-synthetic sequence derived from human genome
FRRSFKHILFRRRRRG

SEQ ID NO: 8349 - protein, 16 aa, Artificial Sequence
  Quasi-synthetic sequence derived from human genome
YRCLSLLYLRMFKLKK

SEQ ID NO: 8350 - protein, 16 aa, Artificial Sequence
  Quasi-synthetic sequence derived from human genome
RYQKIMKRLIKRYVLK

SEQ ID NO: 8351 - protein, 16 aa, Artificial Sequence
  Quasi-synthetic sequence derived from human genome
LKRMKIIKHFIKIALH

SEQ ID NO: 8352 - protein, 16 aa, Artificial Sequence
  Quasi-synthetic sequence derived from human genome
IALMLWRLHWRRLLSK

SEQ ID NO: 8353 - protein, 16 aa, Artificial Sequence
  Quasi-synthetic sequence derived from human genome
FIICIVIAILLYKRKR

SEQ ID NO: 8354 - protein, 16 aa, Artificial Sequence
  Quasi-synthetic sequence derived from human genome
LLLGALLWMWWRRNRR

SEQ ID NO: 8355 - protein, 16 aa, Artificial Sequence
  Quasi-synthetic sequence derived from human genome
NRIRFSKLLLKILFYI

SEQ ID NO: 8356 - protein, 16 aa, Artificial Sequence
  Quasi-synthetic sequence derived from human genome
LILLIGTWALFFRKRR

SEQ ID NO: 8357 - protein, 16 aa, Artificial Sequence
  Quasi-synthetic sequence derived from human genome
RRRRARLRFMKQLRLH

SEQ ID NO: 8358 - protein, 16 aa, Artificial Sequence
  Quasi-synthetic sequence derived from human genome
RFSRLVLWFAAFRKLL

SEQ ID NO: 8359 - protein, 16 aa, Artificial Sequence
  Quasi-synthetic sequence derived from human genome
VSLLLLSLWKLWRVKK

SEQ ID NO: 8360 - protein, 16 aa, Artificial Sequence
  Quasi-synthetic sequence derived from human genome
IGWRIRKKYFLMKIKN

SEQ ID NO: 8361 - protein, 16 aa, Artificial Sequence
  Quasi-synthetic sequence derived from human genome
VVLFIVFRKKVFRKNY

SEQ ID NO: 8362 - protein, 16 aa, Artificial Sequence
  Quasi-synthetic sequence derived from human genome
RLRLWALIPWLPRKQR

SEQ ID NO: 8363 - protein, 16 aa, Artificial Sequence
  Quasi-synthetic sequence derived from human genome
KRLLIKKLPRVLAIQL

SEQ ID NO: 8364 - protein, 16 aa, Artificial Sequence
  Quasi-synthetic sequence derived from human genome
FILAIPLRRKVKKLLG

SEQ ID NO: 8365 - protein, 16 aa, Artificial Sequence
  Quasi-synthetic sequence derived from human genome
RLIILIRIFHLLHQKR

SEQ ID NO: 8366 - protein, 16 aa, Artificial Sequence
  Quasi-synthetic sequence derived from human genome
LIALKALKKALLLYKK

SEQ ID NO: 8367 - protein, 16 aa, Artificial Sequence
  Quasi-synthetic sequence derived from human genome
LLLLLFLILRHRRQGK

SEQ ID NO: 8368 - protein, 16 aa, Artificial Sequence
  Quasi-synthetic sequence derived from human genome
KNIRVWFIKVRKMKAI

SEQ ID NO: 8369 - protein, 16 aa, Artificial Sequence
  Quasi-synthetic sequence derived from human genome
LRIARFRFRAFHFLNR

SEQ ID NO: 8370 - protein, 16 aa, Artificial Sequence
  Quasi-synthetic sequence derived from human genome
VHYWKKVLPLLKIIKK

SEQ ID NO: 8371 - protein, 16 aa, Artificial Sequence
  Quasi-synthetic sequence derived from human genome
RHLMKVKLKKYTKFLF

SEQ ID NO: 8372 - protein, 16 aa, Artificial Sequence
  Quasi-synthetic sequence derived from human genome
FWKLVNKKWMLTLLRI

SEQ ID NO: 8373 - protein, 16 aa, Artificial Sequence
  Quasi-synthetic sequence derived from human genome
LWLTWLLKAFWGKKRI

SEQ ID NO: 8374 - protein, 16 aa, Artificial Sequence
  Quasi-synthetic sequence derived from human genome
RLCFLLGRLSIRKVKL

SEQ ID NO: 8375 - protein, 16 aa, Artificial Sequence
  Quasi-synthetic sequence derived from human genome
RMRTRLVRKRFLCLGW

SEQ ID NO: 8376 - protein, 16 aa, Artificial Sequence
  Quasi-synthetic sequence derived from human genome
RVKKLPMILALHLKRF

SEQ ID NO: 8377 - protein, 16 aa, Artificial Sequence
  Quasi-synthetic sequence derived from human genome
RKRTLKVLTFLVLFIF

SEQ ID NO: 8378 - protein, 16 aa, Artificial Sequence
  Quasi-synthetic sequence derived from human genome
RRRLIPHPRRLWPFVR

SEQ ID NO: 8379 - protein, 16 aa, Artificial Sequence
  Quasi-synthetic sequence derived from human genome
AKRYKYLRRLFRFRQM

SEQ ID NO: 8380 - protein, 16 aa, Artificial Sequence
  Quasi-synthetic sequence derived from human genome
RVMRNLFVRKLYLWPR

SEQ ID NO: 8381 - protein, 16 aa, Artificial Sequence
  Quasi-synthetic sequence derived from human genome
VVRKLLVQLRRLYWWV

SEQ ID NO: 8382 - protein, 16 aa, Artificial Sequence
  Quasi-synthetic sequence derived from human genome
LRLFRRLLLAALLLVI

SEQ ID NO: 8383 - protein, 16 aa, Artificial Sequence
  Quasi-synthetic sequence derived from human genome
PALRRRLLLLLLVLLI

SEQ ID NO: 8384 - protein, 16 aa, Artificial Sequence
  Quasi-synthetic sequence derived from human genome
LFLLFYSFWLCCRRRK

SEQ ID NO: 8385 - protein, 16 aa, Artificial Sequence
  Quasi-synthetic sequence derived from human genome
FIMRIVNFPKCRRRRL

SEQ ID NO: 8386 - protein, 16 aa, Artificial Sequence
  Quasi-synthetic sequence derived from human genome
RIRASLVLILKTIRRR

SEQ ID NO: 8387 - protein, 16 aa, Artificial Sequence
  Quasi-synthetic sequence derived from human genome
MRLKKAIHLKKLNFLK

SEQ ID NO: 8388 - protein, 16 aa, Artificial Sequence
  Quasi-synthetic sequence derived from human genome
LIVKLRRSFRTLIVLL

SEQ ID NO: 8389 - protein, 16 aa, Artificial Sequence
  Quasi-synthetic sequence derived from human genome
RPRVLLRWWLGWRQLL

SEQ ID NO: 8390 - protein, 16 aa, Artificial Sequence
  Quasi-synthetic sequence derived from human genome
LLRRIKGKLFTWNILK

SEQ ID NO: 8391 - protein, 16 aa, Artificial Sequence
  Quasi-synthetic sequence derived from human genome
LLWPTRLRRSFLAWRR

SEQ ID NO: 8392 - protein, 16 aa, Artificial Sequence
  Quasi-synthetic sequence derived from human genome
YIRKKAVLIMYKVFLK

SEQ ID NO: 8393 - protein, 16 aa, Artificial Sequence
  Quasi-synthetic sequence derived from human genome
KKKKRQCFAFLIYFRL

SEQ ID NO: 8394 - protein, 16 aa, Artificial Sequence
  Quasi-synthetic sequence derived from human genome
KKFAVRRFFSVYLRRK

SEQ ID NO: 8395 - protein, 16 aa, Artificial Sequence
  Quasi-synthetic sequence derived from human genome
LRKKLKLPIGKRNWLK

SEQ ID NO: 8396 - protein, 16 aa, Artificial Sequence
  Quasi-synthetic sequence derived from human genome
LFLLPCISRRLARIRR

SEQ ID NO: 8397 - protein, 16 aa, Artificial Sequence
  Quasi-synthetic sequence derived from human genome
RRRRPLFALLLLCALL

SEQ ID NO: 8398 - protein, 16 aa, Artificial Sequence
  Quasi-synthetic sequence derived from human genome
RMRRIVFAGVILFRLL

SEQ ID NO: 8399 - protein, 16 aa, Artificial Sequence
  Quasi-synthetic sequence derived from human genome
ICLCLIFFLIVKARRK

SEQ ID NO: 8400 - protein, 16 aa, Artificial Sequence
  Quasi-synthetic sequence derived from human genome
RKGIVRVVFFPFFFRW

SEQ ID NO: 8401 - protein, 16 aa, Artificial Sequence
  Quasi-synthetic sequence derived from human genome
FILRLFRQKNKRGFIK

SEQ ID NO: 8402 - protein, 16 aa, Artificial Sequence
  Quasi-synthetic sequence derived from human genome
LWRLFRGKKWNVLRQR

SEQ ID NO: 8403 - protein, 16 aa, Artificial Sequence
  Quasi-synthetic sequence derived from human genome
ALRRLLLRPRAPVRLL

SEQ ID NO: 8404 - protein, 16 aa, Artificial Sequence
  Quasi-synthetic sequence derived from human genome
WMLLFKPLVLRRQYLR

SEQ ID NO: 8405 - protein, 16 aa, Artificial Sequence
  Quasi-synthetic sequence derived from human genome
RGLLLLIPFLILLRKL

SEQ ID NO: 8406 - protein, 16 aa, Artificial Sequence
  Quasi-synthetic sequence derived from human genome
RKDKKKLRRLLKYMFI

SEQ ID NO: 8407 - protein, 16 aa, Artificial Sequence
  Quasi-synthetic sequence derived from human genome
FLCLALIIMKILPKRR

SEQ ID NO: 8408 - protein, 16 aa, Artificial Sequence
  Quasi-synthetic sequence derived from human genome
ALLWLKRGLKFLKGFL

SEQ ID NO: 8409 - protein, 16 aa, Artificial Sequence
  Quasi-synthetic sequence derived from human genome
ILRVLRVLRPLRAINR

SEQ ID NO: 8410 - protein, 16 aa, Artificial Sequence
  Quasi-synthetic sequence derived from human genome
LLVLVLLILSMRRHRK

SEQ ID NO: 8411 - protein, 16 aa, Artificial Sequence
  Quasi-synthetic sequence derived from human genome
AFVTLRVFRVFRIFKF

SEQ ID NO: 8412 - protein, 16 aa, Artificial Sequence
  Quasi-synthetic sequence derived from human genome
WKTSRTFFYWRLRRLL

SEQ ID NO: 8413 - protein, 16 aa, Artificial Sequence
  Quasi-synthetic sequence derived from human genome
WLLKLGGRVKTWKRRW

SEQ ID NO: 8414 - protein, 16 aa, Artificial Sequence
  Quasi-synthetic sequence derived from human genome
RWSRWRVPGRLLLLLL

SEQ ID NO: 8415 - protein, 16 aa, Artificial Sequence
  Quasi-synthetic sequence derived from human genome
RKAPLWLRAKFQRLLF

SEQ ID NO: 8416 - protein, 16 aa, Artificial Sequence
  Quasi-synthetic sequence derived from human genome
LVLFILVFWILKRKLS

SEQ ID NO: 8417 - protein, 16 aa, Artificial Sequence
  Quasi-synthetic sequence derived from human genome
RKRHKVWYKKFFHHLL

SEQ ID NO: 8418 - protein, 16 aa, Artificial Sequence
  Quasi-synthetic sequence derived from human genome
LFWICKTCFRCLKRLK

SEQ ID NO: 8419 - protein, 16 aa, Artificial Sequence
  Quasi-synthetic sequence derived from human genome
KQIRLGILHKFVLRRR

SEQ ID NO: 8420 - protein, 16 aa, Artificial Sequence
  Quasi-synthetic sequence derived from human genome
KLICFLIPFLLSLKKK

SEQ ID NO: 8421 - protein, 16 aa, Artificial Sequence
  Quasi-synthetic sequence derived from human genome
WIKILRWKLSQIRKQL

SEQ ID NO: 8422 - protein, 16 aa, Artificial Sequence
  Quasi-synthetic sequence derived from human genome
LLFLAFLLLFLYRRCK

SEQ ID NO: 8423 - protein, 16 aa, Artificial Sequence
  Quasi-synthetic sequence derived from human genome
LHRMWIQAVKKLRRWK

SEQ ID NO: 8424 - protein, 16 aa, Artificial Sequence
  Quasi-synthetic sequence derived from human genome
LVVLLAILLYLLRLRR

SEQ ID NO: 8425 - protein, 16 aa, Artificial Sequence
  Quasi-synthetic sequence derived from human genome
KYRVVLRRWKSLKLPK

SEQ ID NO: 8426 - protein, 16 aa, Artificial Sequence
  Quasi-synthetic sequence derived from human genome
LRRLLRLLVLGLWLAL

SEQ ID NO: 8427 - protein, 16 aa, Artificial Sequence
  Quasi-synthetic sequence derived from human genome
RVFLQRLLWLLRLLFP

SEQ ID NO: 8428 - protein, 16 aa, Artificial Sequence
  Quasi-synthetic sequence derived from human genome
PLRKMKIPFLLLFFLW

SEQ ID NO: 8429 - protein, 16 aa, Artificial Sequence
  Quasi-synthetic sequence derived from human genome
FLCVCFIFRVKTRRKK

SEQ ID NO: 8430 - protein, 16 aa, Artificial Sequence
  Quasi-synthetic sequence derived from human genome
ILTIWLFKHRRVRFLH

SEQ ID NO: 8431 - protein, 16 aa, Artificial Sequence
  Quasi-synthetic sequence derived from human genome
YILFRRAVLRRLQPRL

SEQ ID NO: 8432 - protein, 16 aa, Artificial Sequence
  Quasi-synthetic sequence derived from human genome
LLVQRTIARLRLKKIF

SEQ ID NO: 8433 - protein, 16 aa, Artificial Sequence
  Quasi-synthetic sequence derived from human genome
RERLLLKFIKIMKHLR

SEQ ID NO: 8434 - protein, 16 aa, Artificial Sequence
  Quasi-synthetic sequence derived from human genome
AFVLVLLALRLRRWHK

SEQ ID NO: 8435 - protein, 16 aa, Artificial Sequence
  Quasi-synthetic sequence derived from human genome
AQLLARRFLLRRKFIP

SEQ ID NO: 8436 - protein, 16 aa, Artificial Sequence
  Quasi-synthetic sequence derived from human genome
VRRKSIKKKRALRRFL

SEQ ID NO: 8437 - protein, 16 aa, Artificial Sequence
  Quasi-synthetic sequence derived from human genome
WLLREQKRKKKLRKLL

SEQ ID NO: 8438 - protein, 16 aa, Artificial Sequence
  Quasi-synthetic sequence derived from human genome
WIARLRHIKRLRQRIC

SEQ ID NO: 8439 - protein, 16 aa, Artificial Sequence
  Quasi-synthetic sequence derived from human genome
FFRLQKFLRRTQFLLF

SEQ ID NO: 8440 - protein, 16 aa, Artificial Sequence
  Quasi-synthetic sequence derived from human genome
RLQRALRFLLGRLPWR

SEQ ID NO: 8441 - protein, 16 aa, Artificial Sequence
  Quasi-synthetic sequence derived from human genome
KRAIRIILSFFFLFLL

SEQ ID NO: 8442 - protein, 16 aa, Artificial Sequence
  Quasi-synthetic sequence derived from human genome
MSLAILRIIRLVRVFR

SEQ ID NO: 8443 - protein, 16 aa, Artificial Sequence
  Quasi-synthetic sequence derived from human genome
LWIRWKCRRLRIREAW

SEQ ID NO: 8444 - protein, 16 aa, Artificial Sequence
  Quasi-synthetic sequence derived from human genome
LRFLKLRRERRALLCL

SEQ ID NO: 8445 - protein, 16 aa, Artificial Sequence
  Quasi-synthetic sequence derived from human genome
RFQRKLSVLLLLLGRR

SEQ ID NO: 8446 - protein, 16 aa, Artificial Sequence
  Quasi-synthetic sequence derived from human genome
LRMAKKRVIVKKLPIV

SEQ ID NO: 8447 - protein, 16 aa, Artificial Sequence
  Quasi-synthetic sequence derived from human genome
LKKTPKLRKFWNLIKK

SEQ ID NO: 8448 - protein, 16 aa, Artificial Sequence
  Quasi-synthetic sequence derived from human genome
ILLYYGLHRFIIRKLR

SEQ ID NO: 8449 - protein, 16 aa, Artificial Sequence
  Quasi-synthetic sequence derived from human genome
FLFLRRRCFLLTFYLW

SEQ ID NO: 8450 - protein, 16 aa, Artificial Sequence
  Quasi-synthetic sequence derived from human genome
LKLRNWQWWRLFTKVK

SEQ ID NO: 8451 - protein, 16 aa, Artificial Sequence
  Quasi-synthetic sequence derived from human genome
RWLLLKLLLLLLLLLL

SEQ ID NO: 8452 - protein, 16 aa, Artificial Sequence
  Quasi-synthetic sequence derived from human genome
LLRTLSRAKFWPRRRF

SEQ ID NO: 8453 - protein, 16 aa, Artificial Sequence
  Quasi-synthetic sequence derived from human genome
QRLSKKLRRKLQMWLW

SEQ ID NO: 8454 - protein, 16 aa, Artificial Sequence
  Quasi-synthetic sequence derived from human genome
FSKLKKSRKWLKSILL

SEQ ID NO: 8455 - protein, 16 aa, Artificial Sequence
  Quasi-synthetic sequence derived from human genome
FIIILLGVMLTIKRRR

SEQ ID NO: 8456 - protein, 16 aa, Artificial Sequence
  Quasi-synthetic sequence derived from human genome
RRLLLLLLLLLLRQPV

SEQ ID NO: 8457 - protein, 16 aa, Artificial Sequence
  Quasi-synthetic sequence derived from human genome
FLRLHRLLLLFLVLRG

SEQ ID NO: 8458 - protein, 16 aa, Artificial Sequence
  Quasi-synthetic sequence derived from human genome
MFLLLIFSMWKHRKKM

SEQ ID NO: 8459 - protein, 16 aa, Artificial Sequence
  Quasi-synthetic sequence derived from human genome
RWRVLRLGAWARWLLV

SEQ ID NO: 8460 - protein, 16 aa, Artificial Sequence
  Quasi-synthetic sequence derived from human genome
RKKLVRALFIVPRQRL

SEQ ID NO: 8461 - protein, 16 aa, Artificial Sequence
  Quasi-synthetic sequence derived from human genome
RRRTTRRWKRWFKFRK

SEQ ID NO: 8462 - protein, 16 aa, Artificial Sequence
  Quasi-synthetic sequence derived from human genome
MLLCYRHLKTKRILRR

SEQ ID NO: 8463 - protein, 16 aa, Artificial Sequence
  Quasi-synthetic sequence derived from human genome
RKVYGRCMWYRLRLLK

SEQ ID NO: 8464 - protein, 16 aa, Artificial Sequence
  Quasi-synthetic sequence derived from human genome
RCLRVLLLGKNRIKKI

SEQ ID NO: 8465 - protein, 16 aa, Artificial Sequence
  Quasi-synthetic sequence derived from human genome
RKKNVLRLCCKKLKIF

SEQ ID NO: 8466 - protein, 16 aa, Artificial Sequence
  Quasi-synthetic sequence derived from human genome
SLAILRVIRLVRVFRI

SEQ ID NO: 8467 - protein, 16 aa, Artificial Sequence
  Quasi-synthetic sequence derived from human genome
IRWKALIAIRYLSKLK

SEQ ID NO: 8468 - protein, 16 aa, Artificial Sequence
  Quasi-synthetic sequence derived from human genome
LLQRLRGILCALRRRR

SEQ ID NO: 8469 - protein, 16 aa, Artificial Sequence
  Quasi-synthetic sequence derived from human genome
LRILMLRKHPRSLLIL

SEQ ID NO: 8470 - protein, 16 aa, Artificial Sequence
  Quasi-synthetic sequence derived from human genome
KMKKKTFKGLIRIFRK

SEQ ID NO: 8471 - protein, 16 aa, Artificial Sequence
  Quasi-synthetic sequence derived from human genome
RRRSRMLLCFAFLWVL

SEQ ID NO: 8472 - protein, 16 aa, Artificial Sequence
  Quasi-synthetic sequence derived from human genome
FRKALIYQKKYLLLLL

SEQ ID NO: 8473 - protein, 16 aa, Artificial Sequence
  Quasi-synthetic sequence derived from human genome
YVRRRKKLPSVLLFKK

SEQ ID NO: 8474 - protein, 16 aa, Artificial Sequence
  Quasi-synthetic sequence derived from human genome
FLHLKRRVRSVILVIL

SEQ ID NO: 8475 - protein, 16 aa, Artificial Sequence
  Quasi-synthetic sequence derived from human genome
VIKLQSLVRMWRVRWR

SEQ ID NO: 8476 - protein, 16 aa, Artificial Sequence
  Quasi-synthetic sequence derived from human genome
RLVKLHIKRHYHKKFW

SEQ ID NO: 8477 - protein, 16 aa, Artificial Sequence
  Quasi-synthetic sequence derived from human genome
VANMWKLRPLLKKWLK

SEQ ID NO: 8478 - protein, 16 aa, Artificial Sequence
  Quasi-synthetic sequence derived from human genome
IFLTYVLSFIFRKWRK

SEQ ID NO: 8479 - protein, 16 aa, Artificial Sequence
  Quasi-synthetic sequence derived from human genome
LLAIFVALFFLTKKRR

SEQ ID NO: 8480 - protein, 16 aa, Artificial Sequence
  Quasi-synthetic sequence derived from human genome
KFRLVVKTALKLLLVF

SEQ ID NO: 8481 - protein, 16 aa, Artificial Sequence
  Quasi-synthetic sequence derived from human genome
RLCFLLGRLCSRRLKL

SEQ ID NO: 8482 - protein, 16 aa, Artificial Sequence
  Quasi-synthetic sequence derived from human genome
FKFKQLKMPVRALLRL

SEQ ID NO: 8483 - protein, 16 aa, Artificial Sequence
  Quasi-synthetic sequence derived from human genome
LRGLRPFMTIRLRLLL

SEQ ID NO: 8484 - protein, 16 aa, Artificial Sequence
  Quasi-synthetic sequence derived from human genome
RLWKARVLKLVLKTAK

SEQ ID NO: 8485 - protein, 16 aa, Artificial Sequence
  Quasi-synthetic sequence derived from human genome
IWFQNRRMKKKRVVLR

SEQ ID NO: 8486 - protein, 16 aa, Artificial Sequence
  Quasi-synthetic sequence derived from human genome
LLLLLLLLYKYKQKPK

SEQ ID NO: 8487 - protein, 16 aa, Artificial Sequence
  Quasi-synthetic sequence derived from human genome
VKVLNINLKRKFIKKR

SEQ ID NO: 8488 - protein, 16 aa, Artificial Sequence
  Quasi-synthetic sequence derived from human genome
LIQSRFRSLLVRRRFI

SEQ ID NO: 8489 - protein, 16 aa, Artificial Sequence
  Quasi-synthetic sequence derived from human genome
LLLALILPLLFYLRKR

SEQ ID NO: 8490 - protein, 16 aa, Artificial Sequence
  Quasi-synthetic sequence derived from human genome
PVKRRLLPMLRLVIPR

SEQ ID NO: 8491 - protein, 16 aa, Artificial Sequence
  Quasi-synthetic sequence derived from human genome
LLKKRKWPLKGWHKRY

SEQ ID NO: 8492 - protein, 16 aa, Artificial Sequence
  Quasi-synthetic sequence derived from human genome
FKFFFRRNPYFRNKLI

SEQ ID NO: 8493 - protein, 16 aa, Artificial Sequence
  Quasi-synthetic sequence derived from human genome
KLGLLEFKILWKKLKK

SEQ ID NO: 8494 - protein, 16 aa, Artificial Sequence
  Quasi-synthetic sequence derived from human genome
VGVLILFMFRRLRQFR

SEQ ID NO: 8495 - protein, 16 aa, Artificial Sequence
  Quasi-synthetic sequence derived from human genome
LLGRKRRWSKCKIRVF

SEQ ID NO: 8496 - protein, 16 aa, Artificial Sequence
  Quasi-synthetic sequence derived from human genome
RLPKLRKRMRKMCLTF

SEQ ID NO: 8497 - protein, 16 aa, Artificial Sequence
  Quasi-synthetic sequence derived from human genome
LVLYGRIFRAARFRIR

SEQ ID NO: 8498 - protein, 16 aa, Artificial Sequence
  Quasi-synthetic sequence derived from human genome
IPRRIFIQLMKRFGLK

SEQ ID NO: 8499 - protein, 16 aa, Artificial Sequence
  Quasi-synthetic sequence derived from human genome
FLQICKKILCRLFRVF

SEQ ID NO: 8500 - protein, 16 aa, Artificial Sequence
  Quasi-synthetic sequence derived from human genome
LIVGLLTYWFLFRKKK

SEQ ID NO: 8501 - protein, 16 aa, Artificial Sequence
  Quasi-synthetic sequence derived from human genome
KKLLPKAFKQYWFIFK

SEQ ID NO: 8502 - protein, 16 aa, Artificial Sequence
  Quasi-synthetic sequence derived from human genome
PRRPLILKRRRLPLPV

SEQ ID NO: 8503 - protein, 16 aa, Artificial Sequence
  Quasi-synthetic sequence derived from human genome
KRSWPFLRSFRVLRVF

SEQ ID NO: 8504 - protein, 16 aa, Artificial Sequence
  Quasi-synthetic sequence derived from human genome
PLTFRHLHLKLKRLKL

SEQ ID NO: 8505 - protein, 16 aa, Artificial Sequence
  Quasi-synthetic sequence derived from human genome
IRKKHLQRPIFRLRCL

SEQ ID NO: 8506 - protein, 16 aa, Artificial Sequence
  Quasi-synthetic sequence derived from human genome
RLWLRVLLRLSPMAFR

SEQ ID NO: 8507 - protein, 16 aa, Artificial Sequence
  Quasi-synthetic sequence derived from human genome
LLRLKAFILFGKLARV

SEQ ID NO: 8508 - protein, 16 aa, Artificial Sequence
  Quasi-synthetic sequence derived from human genome
VVVKILKPVKKKKIKR

SEQ ID NO: 8509 - protein, 16 aa, Artificial Sequence
  Quasi-synthetic sequence derived from human genome
RVVVKILKPVKKKKIK

SEQ ID NO: 8510 - protein, 16 aa, Artificial Sequence
  Quasi-synthetic sequence derived from human genome
TWKRARIFPMIFKKVR

SEQ ID NO: 8511 - protein, 16 aa, Artificial Sequence
  Quasi-synthetic sequence derived from human genome
KRLKPLIPGLRKKLKR

SEQ ID NO: 8512 - protein, 16 aa, Artificial Sequence
  Quasi-synthetic sequence derived from human genome
FILFIIVQLFIMKLRK

SEQ ID NO: 8513 - protein, 16 aa, Artificial Sequence
  Quasi-synthetic sequence derived from human genome
RSRIPLLRKRRFQLYR

SEQ ID NO: 8514 - protein, 16 aa, Artificial Sequence
  Quasi-synthetic sequence derived from human genome
FINAKIKSLIKLFKKK

SEQ ID NO: 8515 - protein, 16 aa, Artificial Sequence
  Quasi-synthetic sequence derived from human genome
KKKCKICKLRSFFRKL

SEQ ID NO: 8516 - protein, 16 aa, Artificial Sequence
  Quasi-synthetic sequence derived from human genome
VVILFIGILFIILRKR

SEQ ID NO: 8517 - protein, 16 aa, Artificial Sequence
  Quasi-synthetic sequence derived from human genome
KQNIFLFYVKLRWLLK

SEQ ID NO: 8518 - protein, 16 aa, Artificial Sequence
  Quasi-synthetic sequence derived from human genome
MGFLRRLIYRRRPMIY

SEQ ID NO: 8519 - protein, 16 aa, Artificial Sequence
  Quasi-synthetic sequence derived from human genome
LRFSVVKRGRKKLLYI

SEQ ID NO: 8520 - protein, 16 aa, Artificial Sequence
  Quasi-synthetic sequence derived from human genome
MFFWLLLVIILRTVKR

SEQ ID NO: 8521 - protein, 16 aa, Artificial Sequence
  Quasi-synthetic sequence derived from human genome
RFKKKCFKLTRKMPII

SEQ ID NO: 8522 - protein, 16 aa, Artificial Sequence
  Quasi-synthetic sequence derived from human genome
RALRLLRIFKVTKYWA

SEQ ID NO: 8523 - protein, 16 aa, Artificial Sequence
  Quasi-synthetic sequence derived from human genome
KLSRKQLVLRRGLLLL

SEQ ID NO: 8524 - protein, 16 aa, Artificial Sequence
  Quasi-synthetic sequence derived from human genome
TILIIRRLHKVLRPFL

SEQ ID NO: 8525 - protein, 16 aa, Artificial Sequence
  Quasi-synthetic sequence derived from human genome
FLAKCRKKKKLFAPWR

SEQ ID NO: 8526 - protein, 16 aa, Artificial Sequence
  Quasi-synthetic sequence derived from human genome
RISITFFRLFRVMRLV

SEQ ID NO: 8527 - protein, 16 aa, Artificial Sequence
  Quasi-synthetic sequence derived from human genome
RLSKQLLLRNFIRMKR

SEQ ID NO: 8528 - protein, 16 aa, Artificial Sequence
  Quasi-synthetic sequence derived from human genome
QALLLKRFLLARRSRR

SEQ ID NO: 8529 - protein, 16 aa, Artificial Sequence
  Quasi-synthetic sequence derived from human genome
VLLLAAYFFRFRKQRK

SEQ ID NO: 8530 - protein, 16 aa, Artificial Sequence
  Quasi-synthetic sequence derived from human genome
VKRLFLQKLPKLLCMK

SEQ ID NO: 8531 - protein, 16 aa, Artificial Sequence
  Quasi-synthetic sequence derived from human genome
LKVVKHLIRIKPLKLP

SEQ ID NO: 8532 - protein, 16 aa, Artificial Sequence
  Quasi-synthetic sequence derived from human genome
FRKALIYQKKYLLLLI

SEQ ID NO: 8533 - protein, 16 aa, Artificial Sequence
  Quasi-synthetic sequence derived from human genome
WLQLLRICRVLRSLKL

SEQ ID NO: 8534 - protein, 16 aa, Artificial Sequence
  Quasi-synthetic sequence derived from human genome
LKVIWKVMSILKGRKF

SEQ ID NO: 8535 - protein, 16 aa, Artificial Sequence
  Quasi-synthetic sequence derived from human genome
LKRKYWWKNCKMMIML

SEQ ID NO: 8536 - protein, 16 aa, Artificial Sequence
  Quasi-synthetic sequence derived from human genome
IRQRIIKKFQFIKSLR

SEQ ID NO: 8537 - protein, 16 aa, Artificial Sequence
  Quasi-synthetic sequence derived from human genome
MRKAMKRLWIRTLRLN

SEQ ID NO: 8538 - protein, 16 aa, Artificial Sequence
  Quasi-synthetic sequence derived from human genome
WWKCKKWALHILARLF

SEQ ID NO: 8539 - protein, 16 aa, Artificial Sequence
  Quasi-synthetic sequence derived from human genome
KKLPMILALHLKRFKY

SEQ ID NO: 8540 - protein, 16 aa, Artificial Sequence
  Quasi-synthetic sequence derived from human genome
HKLKWWIGYLQRKFKR

SEQ ID NO: 8541 - protein, 16 aa, Artificial Sequence
  Quasi-synthetic sequence derived from human genome
RLLKKQFFHRALKVMK

SEQ ID NO: 8542 - protein, 16 aa, Artificial Sequence
  Quasi-synthetic sequence derived from human genome
LLRCQCRRRRRRRPLW

SEQ ID NO: 8543 - protein, 16 aa, Artificial Sequence
  Quasi-synthetic sequence derived from human genome
WRLKISNLKKILKGIL

SEQ ID NO: 8544 - protein, 16 aa, Artificial Sequence
  Quasi-synthetic sequence derived from human genome
KYRKLVKKTRFLRRKV

SEQ ID NO: 8545 - protein, 16 aa, Artificial Sequence
  Quasi-synthetic sequence derived from human genome
RHRRLLLLPLLLFLLP

SEQ ID NO: 8546 - protein, 16 aa, Artificial Sequence
  Quasi-synthetic sequence derived from human genome
LLLFQVIRLYQRRRWM

SEQ ID NO: 8547 - protein, 16 aa, Artificial Sequence
  Quasi-synthetic sequence derived from human genome
RQKKLLKKVALFSKLL

SEQ ID NO: 8548 - protein, 16 aa, Artificial Sequence
  Quasi-synthetic sequence derived from human genome
KFCLFCFWKFARKGKK

SEQ ID NO: 8549 - protein, 16 aa, Artificial Sequence
  Quasi-synthetic sequence derived from human genome
IKSYLKRIFQLVRFLF

SEQ ID NO: 8550 - protein, 16 aa, Artificial Sequence
  Quasi-synthetic sequence derived from human genome
NILLKLAKFKIGFLRL

SEQ ID NO: 8551 - protein, 16 aa, Artificial Sequence
  Quasi-synthetic sequence derived from human genome
HLRNRLIRKRFLCLGW

SEQ ID NO: 8552 - protein, 16 aa, Artificial Sequence
  Quasi-synthetic sequence derived from human genome
RRRQRGRLMRRLVRRL

SEQ ID NO: 8553 - protein, 16 aa, Artificial Sequence
  Quasi-synthetic sequence derived from human genome
LIFLHLKRRVKSVILV

SEQ ID NO: 8554 - protein, 16 aa, Artificial Sequence
  Quasi-synthetic sequence derived from human genome
FIFLHLKRRVKSVILV

SEQ ID NO: 8555 - protein, 16 aa, Artificial Sequence
  Quasi-synthetic sequence derived from human genome
VLLCCFCSFLRRRLKR

SEQ ID NO: 8556 - protein, 16 aa, Artificial Sequence
  Quasi-synthetic sequence derived from human genome
LKLRHWQWWRVFTKVK

SEQ ID NO: 8557 - protein, 16 aa, Artificial Sequence
  Quasi-synthetic sequence derived from human genome
LRFLKLKRQTKVLLTL

SEQ ID NO: 8558 - protein, 16 aa, Artificial Sequence
  Quasi-synthetic sequence derived from human genome
PFWKKIVFVIFLRLYL

SEQ ID NO: 8559 - protein, 16 aa, Artificial Sequence
  Quasi-synthetic sequence derived from human genome
KWRLLPAFLKVKGLVK

SEQ ID NO: 8560 - protein, 16 aa, Artificial Sequence
  Quasi-synthetic sequence derived from human genome
WRRVYKSLLLLAYLIR

SEQ ID NO: 8561 - protein, 16 aa, Artificial Sequence
  Quasi-synthetic sequence derived from human genome
LHFLYKLAQLFRWIRK

SEQ ID NO: 8562 - protein, 16 aa, Artificial Sequence
  Quasi-synthetic sequence derived from human genome
HRRRLHGRPVRRLFLL

SEQ ID NO: 8563 - protein, 16 aa, Artificial Sequence
  Quasi-synthetic sequence derived from human genome
LHPRVAFWIIKLPRRR

SEQ ID NO: 8564 - protein, 16 aa, Artificial Sequence
  Quasi-synthetic sequence derived from human genome
HPRMVILRLLRYIVRL

SEQ ID NO: 8565 - protein, 16 aa, Artificial Sequence
  Quasi-synthetic sequence derived from human genome
FVLFLRLRSIRCLRNI

SEQ ID NO: 8566 - protein, 16 aa, Artificial Sequence
  Quasi-synthetic sequence derived from human genome
ILLIIFLSWIILKHRK

SEQ ID NO: 8567 - protein, 16 aa, Artificial Sequence
  Quasi-synthetic sequence derived from human genome
RAIIKKIWKRTSMKLL

SEQ ID NO: 8568 - protein, 16 aa, Artificial Sequence
  Quasi-synthetic sequence derived from human genome
VLYRRAVLLQRFIKIL

SEQ ID NO: 8569 - protein, 16 aa, Artificial Sequence
  Quasi-synthetic sequence derived from human genome
LGLLILLRLWRVARII

SEQ ID NO: 8570 - protein, 16 aa, Artificial Sequence
  Quasi-synthetic sequence derived from human genome
RLLRLSLLWLGLLLVR

SEQ ID NO: 8571 - protein, 16 aa, Artificial Sequence
  Quasi-synthetic sequence derived from human genome
RIQRRWRGYRVRKYLF

SEQ ID NO: 8572 - protein, 16 aa, Artificial Sequence
  Quasi-synthetic sequence derived from human genome
RKRTKVLSLAKRILRF

SEQ ID NO: 8573 - protein, 16 aa, Artificial Sequence
  Quasi-synthetic sequence derived from human genome
RIRKLTLKRQRKLVPL

SEQ ID NO: 8574 - protein, 16 aa, Artificial Sequence
  Quasi-synthetic sequence derived from human genome
MSFFLLILSLRRHIRR

SEQ ID NO: 8575 - protein, 16 aa, Artificial Sequence
  Quasi-synthetic sequence derived from human genome
MKLLRRAWRRRAALGL

SEQ ID NO: 8576 - protein, 16 aa, Artificial Sequence
  Quasi-synthetic sequence derived from human genome
LALIGLIIFCCRKKRR

SEQ ID NO: 8577 - protein, 16 aa, Artificial Sequence
  Quasi-synthetic sequence derived from human genome
PLSRRFRSVKLWFVIR

SEQ ID NO: 8578 - protein, 16 aa, Artificial Sequence
  Quasi-synthetic sequence derived from human genome
ISRILKNLVFRILKKC

SEQ ID NO: 8579 - protein, 16 aa, Artificial Sequence
  Quasi-synthetic sequence derived from human genome
RRRLRLRRDALLTLLL

SEQ ID NO: 8580 - protein, 16 aa, Artificial Sequence
  Quasi-synthetic sequence derived from human genome
LLLVLIILFCYFRYKR

SEQ ID NO: 8581 - protein, 16 aa, Artificial Sequence
  Quasi-synthetic sequence derived from human genome
LAFLWGLLILLKYRWR

SEQ ID NO: 8582 - protein, 16 aa, Artificial Sequence
  Quasi-synthetic sequence derived from human genome
RFRKFPFFTRPLLSKW

SEQ ID NO: 8583 - protein, 16 aa, Artificial Sequence
  Quasi-synthetic sequence derived from human genome
MLRIPRPLIMIRAFRI

SEQ ID NO: 8584 - protein, 16 aa, Artificial Sequence
  Quasi-synthetic sequence derived from human genome
GALLIFLLVWLLIRRK

SEQ ID NO: 8585 - protein, 16 aa, Artificial Sequence
  Quasi-synthetic sequence derived from human genome
KKAKAIKLILLVVIVF

SEQ ID NO: 8586 - protein, 16 aa, Artificial Sequence
  Quasi-synthetic sequence derived from human genome
IFLLVLYLNRKGIKKW

SEQ ID NO: 8587 - protein, 16 aa, Artificial Sequence
  Quasi-synthetic sequence derived from human genome
LIMCNIKLLKALRVRK

SEQ ID NO: 8588 - protein, 16 aa, Artificial Sequence
  Quasi-synthetic sequence derived from human genome
RLRTVLKNLSLLKLLK

SEQ ID NO: 8589 - protein, 16 aa, Artificial Sequence
  Quasi-synthetic sequence derived from human genome
WRRKSAYWKALKVFKL

SEQ ID NO: 8590 - protein, 16 aa, Artificial Sequence
  Quasi-synthetic sequence derived from human genome
RRLPRALLLQLRLALL

SEQ ID NO: 8591 - protein, 16 aa, Artificial Sequence
  Quasi-synthetic sequence derived from human genome
VVILVLMVVKCVRRKK

SEQ ID NO: 8592 - protein, 16 aa, Artificial Sequence
  Quasi-synthetic sequence derived from human genome
IRVRRLFCRTQWYLRI

SEQ ID NO: 8593 - protein, 16 aa, Artificial Sequence
  Quasi-synthetic sequence derived from human genome
RRRKTVRLLLANLVIF

SEQ ID NO: 8594 - protein, 16 aa, Artificial Sequence
  Quasi-synthetic sequence derived from human genome
RRQLFRTKSKRRFFFR

SEQ ID NO: 8595 - protein, 16 aa, Artificial Sequence
  Quasi-synthetic sequence derived from human genome
FKKVFKFVGFKFTVKK

SEQ ID NO: 8596 - protein, 16 aa, Artificial Sequence
  Quasi-synthetic sequence derived from human genome
MRLLRRRHMPLRLAMV

SEQ ID NO: 8597 - protein, 16 aa, Artificial Sequence
  Quasi-synthetic sequence derived from human genome
RKFLYLWIRMTFGRVF

SEQ ID NO: 8598 - protein, 16 aa, Artificial Sequence
  Quasi-synthetic sequence derived from human genome
PFLQVRILRLLRILGR

SEQ ID NO: 8599 - protein, 16 aa, Artificial Sequence
  Quasi-synthetic sequence derived from human genome
VAFVLFLRLRSIRCLR

SEQ ID NO: 8600 - protein, 16 aa, Artificial Sequence
  Quasi-synthetic sequence derived from human genome
PLKFFFLRTRRFALMV

SEQ ID NO: 8601 - protein, 16 aa, Artificial Sequence
  Quasi-synthetic sequence derived from human genome
RMKLRNLFTKFIRKFG

SEQ ID NO: 8602 - protein, 16 aa, Artificial Sequence
  Quasi-synthetic sequence derived from human genome
KQKTINRFLMRKRLLF

SEQ ID NO: 8603 - protein, 16 aa, Artificial Sequence
  Quasi-synthetic sequence derived from human genome
KKHVLHLWPKRLLLPR

SEQ ID NO: 8604 - protein, 16 aa, Artificial Sequence
  Quasi-synthetic sequence derived from human genome
QFLKKYFFLLNLKRAK

SEQ ID NO: 8605 - protein, 16 aa, Artificial Sequence
  Quasi-synthetic sequence derived from human genome
FRARFRRLWPCGRRRR

SEQ ID NO: 8606 - protein, 16 aa, Artificial Sequence
  Quasi-synthetic sequence derived from human genome
KFNRLPRVLILHLKRY

SEQ ID NO: 8607 - protein, 16 aa, Artificial Sequence
  Quasi-synthetic sequence derived from human genome
RKKLRLYQFLLGLLTR

SEQ ID NO: 8608 - protein, 16 aa, Artificial Sequence
  Quasi-synthetic sequence derived from human genome
RKVRIFRFVTGKLMRV

SEQ ID NO: 8609 - protein, 16 aa, Artificial Sequence
  Quasi-synthetic sequence derived from human genome
IRRRSLRTRAIKMLVL

SEQ ID NO: 8610 - protein, 16 aa, Artificial Sequence
  Quasi-synthetic sequence derived from human genome
LFRKWKAFSVWRKNVR

SEQ ID NO: 8611 - protein, 16 aa, Artificial Sequence
  Quasi-synthetic sequence derived from human genome
FILLLVTVLLAARRRR

SEQ ID NO: 8612 - protein, 16 aa, Artificial Sequence
  Quasi-synthetic sequence derived from human genome
HKVFLGFTKVRLLRLR

SEQ ID NO: 8613 - protein, 16 aa, Artificial Sequence
  Quasi-synthetic sequence derived from human genome
PPRLKKWKGVRWKRLR

SEQ ID NO: 8614 - protein, 16 aa, Artificial Sequence
  Quasi-synthetic sequence derived from human genome
RIPLLRKRRFQLCRCM

SEQ ID NO: 8615 - protein, 16 aa, Artificial Sequence
  Quasi-synthetic sequence derived from human genome
KKLRRLLKYMFIRDYK

SEQ ID NO: 8616 - protein, 16 aa, Artificial Sequence
  Quasi-synthetic sequence derived from human genome
PLVLRRILRRAVRFSM

SEQ ID NO: 8617 - protein, 16 aa, Artificial Sequence
  Quasi-synthetic sequence derived from human genome
RLLLRFKILRSLQAFV

SEQ ID NO: 8618 - protein, 16 aa, Artificial Sequence
  Quasi-synthetic sequence derived from human genome
VWKRWKKRFFVLVQVS

SEQ ID NO: 8619 - protein, 16 aa, Artificial Sequence
  Quasi-synthetic sequence derived from human genome
IRFLPLFKIIVPILIR

SEQ ID NO: 8620 - protein, 16 aa, Artificial Sequence
  Quasi-synthetic sequence derived from human genome
FKKLLRLFSLVIWICL

SEQ ID NO: 8621 - protein, 16 aa, Artificial Sequence
  Quasi-synthetic sequence derived from human genome
ILVLGFLKLIHLLLRR

SEQ ID NO: 8622 - protein, 16 aa, Artificial Sequence
  Quasi-synthetic sequence derived from human genome
RSRKLILFIVFLALLL

SEQ ID NO: 8623 - protein, 16 aa, Artificial Sequence
  Quasi-synthetic sequence derived from human genome
KPKRWISFKSFFRRRK

SEQ ID NO: 8624 - protein, 16 aa, Artificial Sequence
  Quasi-synthetic sequence derived from human genome
FGLIARRKKIMKLCMK

SEQ ID NO: 8625 - protein, 16 aa, Artificial Sequence
  Quasi-synthetic sequence derived from human genome
ILTKRLRYMVFRSMLR

SEQ ID NO: 8626 - protein, 16 aa, Artificial Sequence
  Quasi-synthetic sequence derived from human genome
LRVFRVFRIFKFSRHS

SEQ ID NO: 8627 - protein, 16 aa, Artificial Sequence
  Quasi-synthetic sequence derived from human genome
LMMRRRFLSLKKTAIL

SEQ ID NO: 8628 - protein, 16 aa, Artificial Sequence
  Quasi-synthetic sequence derived from human genome
LKSIPRLKRKKPFHWL

SEQ ID NO: 8629 - protein, 16 aa, Artificial Sequence
  Quasi-synthetic sequence derived from human genome
RQIQKMRKFYFRRIMR

SEQ ID NO: 8630 - protein, 16 aa, Artificial Sequence
  Quasi-synthetic sequence derived from human genome
KQTIRMWLKKCLKRIR

SEQ ID NO: 8631 - protein, 16 aa, Artificial Sequence
  Quasi-synthetic sequence derived from human genome
LCLCLILLRVRSCRRK

SEQ ID NO: 8632 - protein, 16 aa, Artificial Sequence
  Quasi-synthetic sequence derived from human genome
KRKKVLSWPFLMRRLS

SEQ ID NO: 8633 - protein, 16 aa, Artificial Sequence
  Quasi-synthetic sequence derived from human genome
VKGKKVWIGIKKLLML

SEQ ID NO: 8634 - protein, 16 aa, Artificial Sequence
  Quasi-synthetic sequence derived from human genome
KRLILFRPFGPIMKVK

SEQ ID NO: 8635 - protein, 16 aa, Artificial Sequence
  Quasi-synthetic sequence derived from human genome
LVKKLLIIISRPARLL

SEQ ID NO: 8636 - protein, 16 aa, Artificial Sequence
  Quasi-synthetic sequence derived from human genome
FLLLCLLHKRRRALGL

SEQ ID NO: 8637 - protein, 16 aa, Artificial Sequence
  Quasi-synthetic sequence derived from human genome
RKKRKIPKLVLRINAI

SEQ ID NO: 8638 - protein, 16 aa, Artificial Sequence
  Quasi-synthetic sequence derived from human genome
KIMVRRCLVTLRPFRL

SEQ ID NO: 8639 - protein, 16 aa, Artificial Sequence
  Quasi-synthetic sequence derived from human genome
LLKKQLPSVRKLLRRK

SEQ ID NO: 8640 - protein, 16 aa, Artificial Sequence
  Quasi-synthetic sequence derived from human genome
GFLKRVFKRKKPQLRL

SEQ ID NO: 8641 - protein, 16 aa, Artificial Sequence
  Quasi-synthetic sequence derived from human genome
AILLLMLIFLRQRIRI

SEQ ID NO: 8642 - protein, 16 aa, Artificial Sequence
  Quasi-synthetic sequence derived from human genome
MKGALRRLLARIWRLC

SEQ ID NO: 8643 - protein, 16 aa, Artificial Sequence
  Quasi-synthetic sequence derived from human genome
LRITLRFFASVLIRRI

SEQ ID NO: 8644 - protein, 16 aa, Artificial Sequence
  Quasi-synthetic sequence derived from human genome
LALCALRFKRKIIGLK

SEQ ID NO: 8645 - protein, 16 aa, Artificial Sequence
  Quasi-synthetic sequence derived from human genome
VLLAHRLRRWHKSRLL

SEQ ID NO: 8646 - protein, 16 aa, Artificial Sequence
  Quasi-synthetic sequence derived from human genome
KLKRKYWWKNCKMWAI

SEQ ID NO: 8647 - protein, 16 aa, Artificial Sequence
  Quasi-synthetic sequence derived from human genome
FKRKKLQLLTKKPLYL

SEQ ID NO: 8648 - protein, 16 aa, Artificial Sequence
  Quasi-synthetic sequence derived from human genome
LALRLLAYLVLRYRVK

SEQ ID NO: 8649 - protein, 16 aa, Artificial Sequence
  Quasi-synthetic sequence derived from human genome
AVIPWGVRKLLRWVRR

SEQ ID NO: 8650 - protein, 16 aa, Artificial Sequence
  Quasi-synthetic sequence derived from human genome
RKLIQFGLMKNLIRRL

SEQ ID NO: 8651 - protein, 16 aa, Artificial Sequence
  Quasi-synthetic sequence derived from human genome
TKIHFWLPVLKMIRKK

SEQ ID NO: 8652 - protein, 16 aa, Artificial Sequence
  Quasi-synthetic sequence derived from human genome
RLRVHGPFFPRILRRR

SEQ ID NO: 8653 - protein, 16 aa, Artificial Sequence
  Quasi-synthetic sequence derived from human genome
RPVILRLPNRRALRLR

SEQ ID NO: 8654 - protein, 16 aa, Artificial Sequence
  Quasi-synthetic sequence derived from human genome
YRKKLLIQMKSIWKKK

SEQ ID NO: 8655 - protein, 16 aa, Artificial Sequence
  Quasi-synthetic sequence derived from human genome
KFTFYRCAVLLRWRLL

SEQ ID NO: 8656 - protein, 16 aa, Artificial Sequence
  Quasi-synthetic sequence derived from human genome
RKVRSKSWKKLRYFRL

SEQ ID NO: 8657 - protein, 16 aa, Artificial Sequence
  Quasi-synthetic sequence derived from human genome
FALKPRMRKIFSRLIY

SEQ ID NO: 8658 - protein, 16 aa, Artificial Sequence
  Quasi-synthetic sequence derived from human genome
AFLLYRLLLLKGLGRR

SEQ ID NO: 8659 - protein, 16 aa, Artificial Sequence
  Quasi-synthetic sequence derived from human genome
QIVLAKKMLRKALKLL

SEQ ID NO: 8660 - protein, 16 aa, Artificial Sequence
  Quasi-synthetic sequence derived from human genome
KKGVKIKLHKIIYRLV

SEQ ID NO: 8661 - protein, 16 aa, Artificial Sequence
  Quasi-synthetic sequence derived from human genome
VRLRYFLKVTIVRRLT

SEQ ID NO: 8662 - protein, 16 aa, Artificial Sequence
  Quasi-synthetic sequence derived from human genome
LRLLRLSRLIRYIHQW

SEQ ID NO: 8663 - protein, 16 aa, Artificial Sequence
  Quasi-synthetic sequence derived from human genome
LLLLVLLILCFIKRSK

SEQ ID NO: 8664 - protein, 16 aa, Artificial Sequence
  Quasi-synthetic sequence derived from human genome
LPFICRKPSLWRRLLL

SEQ ID NO: 8665 - protein, 16 aa, Artificial Sequence
  Quasi-synthetic sequence derived from human genome
ALKLRLQVLLLARVLR

SEQ ID NO: 8666 - protein, 16 aa, Artificial Sequence
  Quasi-synthetic sequence derived from human genome
ALRIMRIARIFKLARH

SEQ ID NO: 8667 - protein, 16 aa, Artificial Sequence
  Quasi-synthetic sequence derived from human genome
IITKFCLFCFRKLAKK

SEQ ID NO: 8668 - protein, 16 aa, Artificial Sequence
  Quasi-synthetic sequence derived from human genome
RLLIYKQGRKLFPIKL

SEQ ID NO: 8669 - protein, 16 aa, Artificial Sequence
  Quasi-synthetic sequence derived from human genome
RRFLSRKKIRHHIYVL

SEQ ID NO: 8670 - protein, 16 aa, Artificial Sequence
  Quasi-synthetic sequence derived from human genome
ARRVRKRWLPKIKSML

SEQ ID NO: 8671 - protein, 16 aa, Artificial Sequence
  Quasi-synthetic sequence derived from human genome
AKRPRLKCLLHIVRKL

SEQ ID NO: 8672 - protein, 16 aa, Artificial Sequence
  Quasi-synthetic sequence derived from human genome
VKKKILSRVAALRLKL

SEQ ID NO: 8673 - protein, 16 aa, Artificial Sequence
  Quasi-synthetic sequence derived from human genome
MFIVVLVQLCRIKKKK

SEQ ID NO: 8674 - protein, 16 aa, Artificial Sequence
  Quasi-synthetic sequence derived from human genome
VLMFKKRRRRARKYTL

SEQ ID NO: 8675 - protein, 16 aa, Artificial Sequence
  Quasi-synthetic sequence derived from human genome
RGRGVMILKLPFLKRR

SEQ ID NO: 8676 - protein, 16 aa, Artificial Sequence
  Quasi-synthetic sequence derived from human genome
KRRRYVVCFYFLIFHL

SEQ ID NO: 8677 - protein, 16 aa, Artificial Sequence
  Quasi-synthetic sequence derived from human genome
LMLLPFLLRQHKVWRK

SEQ ID NO: 8678 - protein, 16 aa, Artificial Sequence
  Quasi-synthetic sequence derived from human genome
FKKIKRGLWGKYKLKK

SEQ ID NO: 8679 - protein, 16 aa, Artificial Sequence
  Quasi-synthetic sequence derived from human genome
VILFVYLVIRALRLWR

SEQ ID NO: 8680 - protein, 16 aa, Artificial Sequence
  Quasi-synthetic sequence derived from human genome
RKVLELLKVAWKRRLI

SEQ ID NO: 8681 - protein, 16 aa, Artificial Sequence
  Quasi-synthetic sequence derived from human genome
LRALLVVVNALLRKRR

SEQ ID NO: 8682 - protein, 16 aa, Artificial Sequence
  Quasi-synthetic sequence derived from human genome
LYRLYKPILWRGLKAR

SEQ ID NO: 8683 - protein, 16 aa, Artificial Sequence
  Quasi-synthetic sequence derived from human genome
RIIWKALKPLLVGKIL

SEQ ID NO: 8684 - protein, 16 aa, Artificial Sequence
  Quasi-synthetic sequence derived from human genome
ALLVILACVLWKKRIK

SEQ ID NO: 8685 - protein, 16 aa, Artificial Sequence
  Quasi-synthetic sequence derived from human genome
LVRTIRYLYRRLQRML

SEQ ID NO: 8686 - protein, 16 aa, Artificial Sequence
  Quasi-synthetic sequence derived from human genome
LYTIRMRLVNRFYRRL

SEQ ID NO: 8687 - protein, 16 aa, Artificial Sequence
  Quasi-synthetic sequence derived from human genome
LVKPKIVKKRTKKFIR

SEQ ID NO: 8688 - protein, 16 aa, Artificial Sequence
  Quasi-synthetic sequence derived from human genome
KIMKKKKKVLVWNRVY

SEQ ID NO: 8689 - protein, 16 aa, Artificial Sequence
  Quasi-synthetic sequence derived from human genome
IFFILNSIIVYKLRRK

SEQ ID NO: 8690 - protein, 16 aa, Artificial Sequence
  Quasi-synthetic sequence derived from human genome
KKPWKHFWFVIKNKVL

SEQ ID NO: 8691 - protein, 16 aa, Artificial Sequence
  Quasi-synthetic sequence derived from human genome
HIKLWRRNLWIFVSKF

SEQ ID NO: 8692 - protein, 16 aa, Artificial Sequence
  Quasi-synthetic sequence derived from human genome
AIIFLPPWLFSRRRRL

SEQ ID NO: 8693 - protein, 16 aa, Artificial Sequence
  Quasi-synthetic sequence derived from human genome
LVRTRRYVRKFVLMRA

SEQ ID NO: 8694 - protein, 16 aa, Artificial Sequence
  Quasi-synthetic sequence derived from human genome
KMRPKDLWKRLMIKFR

SEQ ID NO: 8695 - protein, 16 aa, Artificial Sequence
  Quasi-synthetic sequence derived from human genome
VGRVFRLFQRRLLQLR

SEQ ID NO: 8696 - protein, 16 aa, Artificial Sequence
  Quasi-synthetic sequence derived from human genome
LFKKSKPNKRKLMILI

SEQ ID NO: 8697 - protein, 16 aa, Artificial Sequence
  Quasi-synthetic sequence derived from human genome
IFIRILGILLSKLRTR

SEQ ID NO: 8698 - protein, 16 aa, Artificial Sequence
  Quasi-synthetic sequence derived from human genome
KTKIKLCILLHAFRIR

SEQ ID NO: 8699 - protein, 16 aa, Artificial Sequence
  Quasi-synthetic sequence derived from human genome
RKLSFKRKHFLIKLHA

SEQ ID NO: 8700 - protein, 16 aa, Artificial Sequence
  Quasi-synthetic sequence derived from human genome
RRQLYLPMLFKVRLLM

SEQ ID NO: 8701 - protein, 16 aa, Artificial Sequence
  Quasi-synthetic sequence derived from human genome
MYLRRLLRPLQMLLVK

SEQ ID NO: 8702 - protein, 16 aa, Artificial Sequence
  Quasi-synthetic sequence derived from human genome
CKHICWVLLKKFKLPR

SEQ ID NO: 8703 - protein, 16 aa, Artificial Sequence
  Quasi-synthetic sequence derived from human genome
RFWAKHRWGLPLRVLK

SEQ ID NO: 8704 - protein, 16 aa, Artificial Sequence
  Quasi-synthetic sequence derived from human genome
LLLIKCHLKLYRTKLI

SEQ ID NO: 8705 - protein, 16 aa, Artificial Sequence
  Quasi-synthetic sequence derived from human genome
WILQFRRWARKWSRFT

SEQ ID NO: 8706 - protein, 16 aa, Artificial Sequence
  Quasi-synthetic sequence derived from human genome
VACRFFHFRRLIFTRK

SEQ ID NO: 8707 - protein, 16 aa, Artificial Sequence
  Quasi-synthetic sequence derived from human genome
IRRPKHVVVKFVVKFF

SEQ ID NO: 8708 - protein, 16 aa, Artificial Sequence
  Quasi-synthetic sequence derived from human genome
LKKKLLPWQRRGLLRA

SEQ ID NO: 8709 - protein, 16 aa, Artificial Sequence
  Quasi-synthetic sequence derived from human genome
LRRTRLILFVLLLFGI

SEQ ID NO: 8710 - protein, 16 aa, Artificial Sequence
  Quasi-synthetic sequence derived from human genome
AKVRYKRALLLLRRRS

SEQ ID NO: 8711 - protein, 16 aa, Artificial Sequence
  Quasi-synthetic sequence derived from human genome
FAYVLRRRRKKLPFRS

SEQ ID NO: 8712 - protein, 16 aa, Artificial Sequence
  Quasi-synthetic sequence derived from human genome
RSPRVRLLLLLLLLLV

SEQ ID NO: 8713 - protein, 16 aa, Artificial Sequence
  Quasi-synthetic sequence derived from human genome
FFLPKPRKLRNRHLRK

SEQ ID NO: 8714 - protein, 16 aa, Artificial Sequence
  Quasi-synthetic sequence derived from human genome
LLMAFYFFRKKYRITI

SEQ ID NO: 8715 - protein, 16 aa, Artificial Sequence
  Quasi-synthetic sequence derived from human genome
HPLSRLLWRRLKPLIL

SEQ ID NO: 8716 - protein, 16 aa, Artificial Sequence
  Quasi-synthetic sequence derived from human genome
LLLAVALLFHCWRRRK

SEQ ID NO: 8717 - protein, 16 aa, Artificial Sequence
  Quasi-synthetic sequence derived from human genome
LLILILLIVCFIRRNK

SEQ ID NO: 8718 - protein, 16 aa, Artificial Sequence
  Quasi-synthetic sequence derived from human genome
RWRFKKAPLLLHYRPK

SEQ ID NO: 8719 - protein, 16 aa, Artificial Sequence
  Quasi-synthetic sequence derived from human genome
VLILLKMYNRKMRTRR

SEQ ID NO: 8720 - protein, 16 aa, Artificial Sequence
  Quasi-synthetic sequence derived from human genome
RMQVFAMARLRFLKLK

SEQ ID NO: 8721 - protein, 16 aa, Artificial Sequence
  Quasi-synthetic sequence derived from human genome
PGGRRARRRRLVFLWW

SEQ ID NO: 8722 - protein, 16 aa, Artificial Sequence
  Quasi-synthetic sequence derived from human genome
KQIKVAIKKIMKRIFY

SEQ ID NO: 8723 - protein, 16 aa, Artificial Sequence
  Quasi-synthetic sequence derived from human genome
RLVRVFRIFKLSRHSK

SEQ ID NO: 8724 - protein, 16 aa, Artificial Sequence
  Quasi-synthetic sequence derived from human genome
KKYQAVLRRKALLIFL

SEQ ID NO: 8725 - protein, 16 aa, Artificial Sequence
  Quasi-synthetic sequence derived from human genome
LPSLFHLRLLWRKLLW

SEQ ID NO: 8726 - protein, 16 aa, Artificial Sequence
  Quasi-synthetic sequence derived from human genome
LKQIYKGKKKLMLLVR

SEQ ID NO: 8727 - protein, 16 aa, Artificial Sequence
  Quasi-synthetic sequence derived from human genome
ILVIFRRMMKSRMMVI

SEQ ID NO: 8728 - protein, 16 aa, Artificial Sequence
  Quasi-synthetic sequence derived from human genome
LFVNKRLVLRTKLHKL

SEQ ID NO: 8729 - protein, 16 aa, Artificial Sequence
  Quasi-synthetic sequence derived from human genome
RLARQYLLPLLRRLAR

SEQ ID NO: 8730 - protein, 16 aa, Artificial Sequence
  Quasi-synthetic sequence derived from human genome
LILSRRPRRRLGSLRW

SEQ ID NO: 8731 - protein, 16 aa, Artificial Sequence
  Quasi-synthetic sequence derived from human genome
RLLRNKKRKARWLRAY

SEQ ID NO: 8732 - protein, 16 aa, Artificial Sequence
  Quasi-synthetic sequence derived from human genome
RYKPLRRRVIWLIGQW

SEQ ID NO: 8733 - protein, 16 aa, Artificial Sequence
  Quasi-synthetic sequence derived from human genome
FIRRNVKLRGRLRRIT

SEQ ID NO: 8734 - protein, 16 aa, Artificial Sequence
  Quasi-synthetic sequence derived from human genome
LRIARRALRFVLSKHW

SEQ ID NO: 8735 - protein, 16 aa, Artificial Sequence
  Quasi-synthetic sequence derived from human genome
PQLRLLLWKNLTFRRR

SEQ ID NO: 8736 - protein, 16 aa, Artificial Sequence
  Quasi-synthetic sequence derived from human genome
RRWCPPPFFYRRRFVR

SEQ ID NO: 8737 - protein, 16 aa, Artificial Sequence
  Quasi-synthetic sequence derived from human genome
LVALLGWSWLRRRRAR

SEQ ID NO: 8738 - protein, 16 aa, Artificial Sequence
  Quasi-synthetic sequence derived from human genome
LILAICGLKLQRRWKR

SEQ ID NO: 8739 - protein, 16 aa, Artificial Sequence
  Quasi-synthetic sequence derived from human genome
PKVRKVLQLLRLRQIF

SEQ ID NO: 8740 - protein, 16 aa, Artificial Sequence
  Quasi-synthetic sequence derived from human genome
RYIVLLRSVRPLRLFV

SEQ ID NO: 8741 - protein, 16 aa, Artificial Sequence
  Quasi-synthetic sequence derived from human genome
RRRRRDILRVQLVRIF

SEQ ID NO: 8742 - protein, 16 aa, Artificial Sequence
  Quasi-synthetic sequence derived from human genome
KSRKLGIYRRCWLVFR

SEQ ID NO: 8743 - protein, 16 aa, Artificial Sequence
  Quasi-synthetic sequence derived from human genome
ARSKLSLIRKFRLFPR

SEQ ID NO: 8744 - protein, 16 aa, Artificial Sequence
  Quasi-synthetic sequence derived from human genome
PLILMHRLRVIMTRRK

SEQ ID NO: 8745 - protein, 16 aa, Artificial Sequence
  Quasi-synthetic sequence derived from human genome
ALKPRMRKIFSRLIYI

SEQ ID NO: 8746 - protein, 16 aa, Artificial Sequence
  Quasi-synthetic sequence derived from human genome
LGPWLRVRRGLLVLRL

SEQ ID NO: 8747 - protein, 16 aa, Artificial Sequence
  Quasi-synthetic sequence derived from human genome
IIRLMLKYQKILWKVP

SEQ ID NO: 8748 - protein, 16 aa, Artificial Sequence
  Quasi-synthetic sequence derived from human genome
FVVYLKRKTLIRLLFT

SEQ ID NO: 8749 - protein, 16 aa, Artificial Sequence
  Quasi-synthetic sequence derived from human genome
LVIKARKLPPFFARKL

SEQ ID NO: 8750 - protein, 16 aa, Artificial Sequence
  Quasi-synthetic sequence derived from human genome
RLIHRVRYRRGLWRTR

SEQ ID NO: 8751 - protein, 16 aa, Artificial Sequence
  Quasi-synthetic sequence derived from human genome
FILDQKVKIRRRIRIL

SEQ ID NO: 8752 - protein, 16 aa, Artificial Sequence
  Quasi-synthetic sequence derived from human genome
VILMGFSIWLYWRRKK

SEQ ID NO: 8753 - protein, 16 aa, Artificial Sequence
  Quasi-synthetic sequence derived from human genome
FVGLAVFLIYKFKRKI

SEQ ID NO: 8754 - protein, 16 aa, Artificial Sequence
  Quasi-synthetic sequence derived from human genome
FPRAWYRRSIARRLFL

SEQ ID NO: 8755 - protein, 16 aa, Artificial Sequence
  Quasi-synthetic sequence derived from human genome
RTVAKKLVVFRPRLFL

SEQ ID NO: 8756 - protein, 16 aa, Artificial Sequence
  Quasi-synthetic sequence derived from human genome
RRFWRRKQLRAHLRRC

SEQ ID NO: 8757 - protein, 16 aa, Artificial Sequence
  Quasi-synthetic sequence derived from human genome
KKSKAVRLIFVIMIIF

SEQ ID NO: 8758 - protein, 16 aa, Artificial Sequence
  Quasi-synthetic sequence derived from human genome
KFGNRIKVLRSRIRFI

SEQ ID NO: 8759 - protein, 16 aa, Artificial Sequence
  Quasi-synthetic sequence derived from human genome
AKLWSFFIYLLRRQIR

SEQ ID NO: 8760 - protein, 16 aa, Artificial Sequence
  Quasi-synthetic sequence derived from human genome
IAISRMKFLVRRWHRV

SEQ ID NO: 8761 - protein, 16 aa, Artificial Sequence
  Quasi-synthetic sequence derived from human genome
LLARMSRLLLLLLLKV

SEQ ID NO: 8762 - protein, 16 aa, Artificial Sequence
  Quasi-synthetic sequence derived from human genome
KFLSRPALPFILRLLR

SEQ ID NO: 8763 - protein, 16 aa, Artificial Sequence
  Quasi-synthetic sequence derived from human genome
LLLRIRKRTRRQKGVL

SEQ ID NO: 8764 - protein, 16 aa, Artificial Sequence
  Quasi-synthetic sequence derived from human genome
KYRRRPALGWLARLLR

SEQ ID NO: 8765 - protein, 16 aa, Artificial Sequence
  Quasi-synthetic sequence derived from human genome
RRPRLLWAPKGYRLLR

SEQ ID NO: 8766 - protein, 16 aa, Artificial Sequence
  Quasi-synthetic sequence derived from human genome
WALLCKNCLKKWRMKR

SEQ ID NO: 8767 - protein, 16 aa, Artificial Sequence
  Quasi-synthetic sequence derived from human genome
RLWKWLKSPRSWRLGL

SEQ ID NO: 8768 - protein, 16 aa, Artificial Sequence
  Quasi-synthetic sequence derived from human genome
KRLRPRLSAILFKLQF

SEQ ID NO: 8769 - protein, 16 aa, Artificial Sequence
  Quasi-synthetic sequence derived from human genome
LRRILIRYYIKSIIYY

SEQ ID NO: 8770 - protein, 16 aa, Artificial Sequence
  Quasi-synthetic sequence derived from human genome
LFAVFLILLLMYRMKK

SEQ ID NO: 8771 - protein, 16 aa, Artificial Sequence
  Quasi-synthetic sequence derived from human genome
WRKKRMRRLKRKRRKM

SEQ ID NO: 8772 - protein, 16 aa, Artificial Sequence
  Quasi-synthetic sequence derived from human genome
FHLYRAPYFWIKRRIL

SEQ ID NO: 8773 - protein, 16 aa, Artificial Sequence
  Quasi-synthetic sequence derived from human genome
KRTVRRIRINLVLALI

SEQ ID NO: 8774 - protein, 16 aa, Artificial Sequence
  Quasi-synthetic sequence derived from human genome
RLLWLRGRGRLRYVNL

SEQ ID NO: 8775 - protein, 16 aa, Artificial Sequence
  Quasi-synthetic sequence derived from human genome
ILTMAFKKILKLKNIK

SEQ ID NO: 8776 - protein, 16 aa, Artificial Sequence
  Quasi-synthetic sequence derived from human genome
LWKVKKALKMTIFWRG

SEQ ID NO: 8777 - protein, 16 aa, Artificial Sequence
  Quasi-synthetic sequence derived from human genome
LLRKRYRHRPCRLQFL

SEQ ID NO: 8778 - protein, 16 aa, Artificial Sequence
  Quasi-synthetic sequence derived from human genome
FFYGHFFRFWMKWLLR

SEQ ID NO: 8779 - protein, 16 aa, Artificial Sequence
  Quasi-synthetic sequence derived from human genome
KIKIFIIYLKKPMIIS

SEQ ID NO: 8780 - protein, 16 aa, Artificial Sequence
  Quasi-synthetic sequence derived from human genome
KKLRYYARFIVVCLLL

SEQ ID NO: 8781 - protein, 16 aa, Artificial Sequence
  Quasi-synthetic sequence derived from human genome
LKVFYKFINLNRYKIR

SEQ ID NO: 8782 - protein, 16 aa, Artificial Sequence
  Quasi-synthetic sequence derived from human genome
KHFLRKIIMVHPKVRF

SEQ ID NO: 8783 - protein, 16 aa, Artificial Sequence
  Quasi-synthetic sequence derived from human genome
RALRLLRIFKVTKYWS

SEQ ID NO: 8784 - protein, 16 aa, Artificial Sequence
  Quasi-synthetic sequence derived from human genome
CIRKRWLRKPRPVSLF

SEQ ID NO: 8785 - protein, 16 aa, Artificial Sequence
  Quasi-synthetic sequence derived from human genome
LLLALALGLLVYRKRR

SEQ ID NO: 8786 - protein, 16 aa, Artificial Sequence
  Quasi-synthetic sequence derived from human genome
RKLWWLPAHLPRFVRI

SEQ ID NO: 8787 - protein, 16 aa, Artificial Sequence
  Quasi-synthetic sequence derived from human genome
LLLIIVIIVLIAYKRK

SEQ ID NO: 8788 - protein, 16 aa, Artificial Sequence
  Quasi-synthetic sequence derived from human genome
HWPWMKLYFKIKPLLK

SEQ ID NO: 8789 - protein, 16 aa, Artificial Sequence
  Quasi-synthetic sequence derived from human genome
MGRRRRLCLQLYFLWL

SEQ ID NO: 8790 - protein, 16 aa, Artificial Sequence
  Quasi-synthetic sequence derived from human genome
RRVLLGRLWRRLHGRP

SEQ ID NO: 8791 - protein, 16 aa, Artificial Sequence
  Quasi-synthetic sequence derived from human genome
VRKKRLIVLFSHWLLH

SEQ ID NO: 8792 - protein, 16 aa, Artificial Sequence
  Quasi-synthetic sequence derived from human genome
LLLLIGLALWFRKRCF

SEQ ID NO: 8793 - protein, 16 aa, Artificial Sequence
  Quasi-synthetic sequence derived from human genome
RLRPRLHFCLVLLLLL

SEQ ID NO: 8794 - protein, 16 aa, Artificial Sequence
  Quasi-synthetic sequence derived from human genome
LVRRRFISLKKATIFV

SEQ ID NO: 8795 - protein, 16 aa, Artificial Sequence
  Quasi-synthetic sequence derived from human genome
RILRLIRAAKGIRTLL

SEQ ID NO: 8796 - protein, 16 aa, Artificial Sequence
  Quasi-synthetic sequence derived from human genome
RAIVALLRAGKLRLLR

SEQ ID NO: 8797 - protein, 16 aa, Artificial Sequence
  Quasi-synthetic sequence derived from human genome
KVFLSSLKFHIRRFIF

SEQ ID NO: 8798 - protein, 16 aa, Artificial Sequence
  Quasi-synthetic sequence derived from human genome
KPILRKLPRIKKHLLN

SEQ ID NO: 8799 - protein, 16 aa, Artificial Sequence
  Quasi-synthetic sequence derived from human genome
RFGRRFILRWCLLQLA

SEQ ID NO: 8800 - protein, 16 aa, Artificial Sequence
  Quasi-synthetic sequence derived from human genome
IKKASVLLIRKLYILM

SEQ ID NO: 8801 - protein, 16 aa, Artificial Sequence
  Quasi-synthetic sequence derived from human genome
FKLYMPRGRYWRLRLC

SEQ ID NO: 8802 - protein, 16 aa, Artificial Sequence
  Quasi-synthetic sequence derived from human genome
VKNWPWMRLFFKIKPL

SEQ ID NO: 8803 - protein, 16 aa, Artificial Sequence
  Quasi-synthetic sequence derived from human genome
KRCFLHKLPTFLFMKR

SEQ ID NO: 8804 - protein, 16 aa, Artificial Sequence
  Quasi-synthetic sequence derived from human genome
NFQKLLKLFYIKKLKP

SEQ ID NO: 8805 - protein, 16 aa, Artificial Sequence
  Quasi-synthetic sequence derived from human genome
RRVLKKNPLKNLRIML

SEQ ID NO: 8806 - protein, 16 aa, Artificial Sequence
  Quasi-synthetic sequence derived from human genome
RFRKYLRQLFHRRVAV

SEQ ID NO: 8807 - protein, 16 aa, Artificial Sequence
  Quasi-synthetic sequence derived from human genome
LFLKNINVFICKKKKK

SEQ ID NO: 8808 - protein, 16 aa, Artificial Sequence
  Quasi-synthetic sequence derived from human genome
FRRFFQRVLCLRCCLL

SEQ ID NO: 8809 - protein, 16 aa, Artificial Sequence
  Quasi-synthetic sequence derived from human genome
AFMMWKFINFQLRRWR

SEQ ID NO: 8810 - protein, 16 aa, Artificial Sequence
  Quasi-synthetic sequence derived from human genome
KLQKFLKCLYRPILII

SEQ ID NO: 8811 - protein, 16 aa, Artificial Sequence
  Quasi-synthetic sequence derived from human genome
KLLWRKFQIPRFMPAR

SEQ ID NO: 8812 - protein, 16 aa, Artificial Sequence
  Quasi-synthetic sequence derived from human genome
FFRKLLVNKSIRQRRR

SEQ ID NO: 8813 - protein, 16 aa, Artificial Sequence
  Quasi-synthetic sequence derived from human genome
RKFWWKNVKMIVLICV

SEQ ID NO: 8814 - protein, 16 aa, Artificial Sequence
  Quasi-synthetic sequence derived from human genome
RRILFIKHFIIYSIPR

SEQ ID NO: 8815 - protein, 16 aa, Artificial Sequence
  Quasi-synthetic sequence derived from human genome
MRARRGLLRLPRRSLL

SEQ ID NO: 8816 - protein, 16 aa, Artificial Sequence
  Quasi-synthetic sequence derived from human genome
WLLLKYKSIISRRFFC

SEQ ID NO: 8817 - protein, 16 aa, Artificial Sequence
  Quasi-synthetic sequence derived from human genome
ILVLLLLPVKKTQRRK

SEQ ID NO: 8818 - protein, 16 aa, Artificial Sequence
  Quasi-synthetic sequence derived from human genome
LLMVACRLRLVKQKLK

SEQ ID NO: 8819 - protein, 16 aa, Artificial Sequence
  Quasi-synthetic sequence derived from human genome
AFVSLKFRKNFWKLVK

SEQ ID NO: 8820 - protein, 16 aa, Artificial Sequence
  Quasi-synthetic sequence derived from human genome
LIFLHLKRRVKSVVLV

SEQ ID NO: 8821 - protein, 16 aa, Artificial Sequence
  Quasi-synthetic sequence derived from human genome
KLPFLVMIIKNLKKYF

SEQ ID NO: 8822 - protein, 16 aa, Artificial Sequence
  Quasi-synthetic sequence derived from human genome
RRPAGSRLRLLLLLLL

SEQ ID NO: 8823 - protein, 16 aa, Artificial Sequence
  Quasi-synthetic sequence derived from human genome
VMRMVKKRAIVKKLPI

SEQ ID NO: 8824 - protein, 16 aa, Artificial Sequence
  Quasi-synthetic sequence derived from human genome
FLIKMGGKIKTWKKRW

SEQ ID NO: 8825 - protein, 16 aa, Artificial Sequence
  Quasi-synthetic sequence derived from human genome
LLAKQGLRLLRGLRRR

SEQ ID NO: 8826 - protein, 16 aa, Artificial Sequence
  Quasi-synthetic sequence derived from human genome
RGSGRKLWKRFFCFLR

SEQ ID NO: 8827 - protein, 16 aa, Artificial Sequence
  Quasi-synthetic sequence derived from human genome
KLATLGRIFKPWKWRK

SEQ ID NO: 8828 - protein, 16 aa, Artificial Sequence
  Quasi-synthetic sequence derived from human genome
LSRVSKKNIFLLFKKL

SEQ ID NO: 8829 - protein, 16 aa, Artificial Sequence
  Quasi-synthetic sequence derived from human genome
PKRLKKHLPQILKLLK

SEQ ID NO: 8830 - protein, 16 aa, Artificial Sequence
  Quasi-synthetic sequence derived from human genome
AIYALLSLWYLLRRRR

SEQ ID NO: 8831 - protein, 16 aa, Artificial Sequence
  Quasi-synthetic sequence derived from human genome
RLRALRLALLILLTFI

SEQ ID NO: 8832 - protein, 16 aa, Artificial Sequence
  Quasi-synthetic sequence derived from human genome
MGKLITRMWKLLRRRS

SEQ ID NO: 8833 - protein, 16 aa, Artificial Sequence
  Quasi-synthetic sequence derived from human genome
KFIPKRIIIIARYYRH

SEQ ID NO: 8834 - protein, 16 aa, Artificial Sequence
  Quasi-synthetic sequence derived from human genome
KRLITYRLRHLLRARC

SEQ ID NO: 8835 - protein, 16 aa, Artificial Sequence
  Quasi-synthetic sequence derived from human genome
MILGIIILKKRYSIFK

SEQ ID NO: 8836 - protein, 16 aa, Artificial Sequence
  Quasi-synthetic sequence derived from human genome
FILLLLVVILIVKKSK

SEQ ID NO: 8837 - protein, 16 aa, Artificial Sequence
  Quasi-synthetic sequence derived from human genome
RRVRNKLIVMRWKVNR

SEQ ID NO: 8838 - protein, 16 aa, Artificial Sequence
  Quasi-synthetic sequence derived from human genome
FNKLKKKKKALLALKK

SEQ ID NO: 8839 - protein, 16 aa, Artificial Sequence
  Quasi-synthetic sequence derived from human genome
IIKFVKPFVHLIRRAI

SEQ ID NO: 8840 - protein, 16 aa, Artificial Sequence
  Quasi-synthetic sequence derived from human genome
PWKRKGRTLFRRLLFQ

SEQ ID NO: 8841 - protein, 16 aa, Artificial Sequence
  Quasi-synthetic sequence derived from human genome
LKSLGRYRLLGKIFRK

SEQ ID NO: 8842 - protein, 16 aa, Artificial Sequence
  Quasi-synthetic sequence derived from human genome
YSKKKYVCKLLFIFLL

SEQ ID NO: 8843 - protein, 16 aa, Artificial Sequence
  Quasi-synthetic sequence derived from human genome
LLVLVLLVALRARFWK

SEQ ID NO: 8844 - protein, 16 aa, Artificial Sequence
  Quasi-synthetic sequence derived from human genome
RLRFMKQKFNIVCLKI

SEQ ID NO: 8845 - protein, 16 aa, Artificial Sequence
  Quasi-synthetic sequence derived from human genome
KWMIKIRKRYLKRRGQ

SEQ ID NO: 8846 - protein, 16 aa, Artificial Sequence
  Quasi-synthetic sequence derived from human genome
KLKIITYRNLFKKVYL

SEQ ID NO: 8847 - protein, 16 aa, Artificial Sequence
  Quasi-synthetic sequence derived from human genome
FCLLLRLLRQLLTLLR

SEQ ID NO: 8848 - protein, 16 aa, Artificial Sequence
  Quasi-synthetic sequence derived from human genome
LFLWLMKLKNMLLAKF

SEQ ID NO: 8849 - protein, 16 aa, Artificial Sequence
  Quasi-synthetic sequence derived from human genome
RSRIPLLRKRWFQLGR

SEQ ID NO: 8850 - protein, 16 aa, Artificial Sequence
  Quasi-synthetic sequence derived from human genome
IKVIRRMQYFVAKKKF

SEQ ID NO: 8851 - protein, 16 aa, Artificial Sequence
  Quasi-synthetic sequence derived from human genome
MRVVRLLRLRAALTLL

SEQ ID NO: 8852 - protein, 16 aa, Artificial Sequence
  Quasi-synthetic sequence derived from human genome
VVVVSIWLFRRKSIKK

SEQ ID NO: 8853 - protein, 16 aa, Artificial Sequence
  Quasi-synthetic sequence derived from human genome
IFRLSQFRKPLQRWLR

SEQ ID NO: 8854 - protein, 16 aa, Artificial Sequence
  Quasi-synthetic sequence derived from human genome
MRHLKIVYRRFRHGFR

SEQ ID NO: 8855 - protein, 16 aa, Artificial Sequence
  Quasi-synthetic sequence derived from human genome
RLPFRALLQIRAMRKK

SEQ ID NO: 8856 - protein, 16 aa, Artificial Sequence
  Quasi-synthetic sequence derived from human genome
FFMGRLPLLRRVLKGL

SEQ ID NO: 8857 - protein, 16 aa, Artificial Sequence
  Quasi-synthetic sequence derived from human genome
LIGKLLKFQLLQIKFK

SEQ ID NO: 8858 - protein, 16 aa, Artificial Sequence
  Quasi-synthetic sequence derived from human genome
HKRFQKAFLKIFCIKK

SEQ ID NO: 8859 - protein, 16 aa, Artificial Sequence
  Quasi-synthetic sequence derived from human genome
KYGAWYLKPKLWKKLR

SEQ ID NO: 8860 - protein, 16 aa, Artificial Sequence
  Quasi-synthetic sequence derived from human genome
RLKRKLIRLFGRLCEL

SEQ ID NO: 8861 - protein, 16 aa, Artificial Sequence
  Quasi-synthetic sequence derived from human genome
RLHAVLKPFLLRRIKT

SEQ ID NO: 8862 - protein, 16 aa, Artificial Sequence
  Quasi-synthetic sequence derived from human genome
VFVIVLLALRLWRWHK

SEQ ID NO: 8863 - protein, 16 aa, Artificial Sequence
  Quasi-synthetic sequence derived from human genome
IRIRILCCLTFLVKVK

SEQ ID NO: 8864 - protein, 16 aa, Artificial Sequence
  Quasi-synthetic sequence derived from human genome
KIFQRKMRYWLLPPFL

SEQ ID NO: 8865 - protein, 16 aa, Artificial Sequence
  Quasi-synthetic sequence derived from human genome
LKHLCRLKIRKCMGRL

SEQ ID NO: 8866 - protein, 16 aa, Artificial Sequence
  Quasi-synthetic sequence derived from human genome
LRPFVQKRIYFRLRNK

SEQ ID NO: 8867 - protein, 16 aa, Artificial Sequence
  Quasi-synthetic sequence derived from human genome
LVFVLLFIFVKRQIMR

SEQ ID NO: 8868 - protein, 16 aa, Artificial Sequence
  Quasi-synthetic sequence derived from human genome
FKRFHPFCLVLRKRKS

SEQ ID NO: 8869 - protein, 16 aa, Artificial Sequence
  Quasi-synthetic sequence derived from human genome
KLFARKLNPKRCFLVR

SEQ ID NO: 8870 - protein, 16 aa, Artificial Sequence
  Quasi-synthetic sequence derived from human genome
LCLLLLLLLLILRLLR

SEQ ID NO: 8871 - protein, 16 aa, Artificial Sequence
  Quasi-synthetic sequence derived from human genome
IWAKFKRRPWWPCRIC

SEQ ID NO: 8872 - protein, 16 aa, Artificial Sequence
  Quasi-synthetic sequence derived from human genome
PIQAFVKRKVIIFLKK

SEQ ID NO: 8873 - protein, 16 aa, Artificial Sequence
  Quasi-synthetic sequence derived from human genome
FLKILKDLWCVRRKYK

SEQ ID NO: 8874 - protein, 16 aa, Artificial Sequence
  Quasi-synthetic sequence derived from human genome
FLVKVKSKALLKNRLL

SEQ ID NO: 8875 - protein, 16 aa, Artificial Sequence
  Quasi-synthetic sequence derived from human genome
LFVKLSRVVGRLRLVF

SEQ ID NO: 8876 - protein, 16 aa, Artificial Sequence
  Quasi-synthetic sequence derived from human genome
LIFRFVRTLFKAMRLT

SEQ ID NO: 8877 - protein, 16 aa, Artificial Sequence
  Quasi-synthetic sequence derived from human genome
LIVQLKRFSFRSFIWR

SEQ ID NO: 8878 - protein, 16 aa, Artificial Sequence
  Quasi-synthetic sequence derived from human genome
MVQLRKLLRVLTLMKF

SEQ ID NO: 8879 - protein, 16 aa, Artificial Sequence
  Quasi-synthetic sequence derived from human genome
RRKFLQMKRRKYGFIY

SEQ ID NO: 8880 - protein, 16 aa, Artificial Sequence
  Quasi-synthetic sequence derived from human genome
LRRHLMVWKVFAPKFI

SEQ ID NO: 8881 - protein, 16 aa, Artificial Sequence
  Quasi-synthetic sequence derived from human genome
WWKCKKWALHIVARLF

SEQ ID NO: 8882 - protein, 16 aa, Artificial Sequence
  Quasi-synthetic sequence derived from human genome
RLTFLKKRRCIQWRFS

SEQ ID NO: 8883 - protein, 16 aa, Artificial Sequence
  Quasi-synthetic sequence derived from human genome
LLRKRSQVWKPKVIRI

SEQ ID NO: 8884 - protein, 16 aa, Artificial Sequence
  Quasi-synthetic sequence derived from human genome
WPRRLLLRYLFPALLL

SEQ ID NO: 8885 - protein, 16 aa, Artificial Sequence
  Quasi-synthetic sequence derived from human genome
RIVVAIRNKLLLITRK

SEQ ID NO: 8886 - protein, 16 aa, Artificial Sequence
  Quasi-synthetic sequence derived from human genome
LVVVFVLCRKMISRKK

SEQ ID NO: 8887 - protein, 16 aa, Artificial Sequence
  Quasi-synthetic sequence derived from human genome
IRRPKNVVLRLAVKFF

SEQ ID NO: 8888 - protein, 16 aa, Artificial Sequence
  Quasi-synthetic sequence derived from human genome
RLRINRFAWPKILKIS

SEQ ID NO: 8889 - protein, 16 aa, Artificial Sequence
  Quasi-synthetic sequence derived from human genome
FLWLKWRVSRVMVWML

SEQ ID NO: 8890 - protein, 16 aa, Artificial Sequence
  Quasi-synthetic sequence derived from human genome
LIFLLWKLPSARAKIR

SEQ ID NO: 8891 - protein, 16 aa, Artificial Sequence
  Quasi-synthetic sequence derived from human genome
IFIILRKQKLIFLHWY

SEQ ID NO: 8892 - protein, 16 aa, Artificial Sequence
  Quasi-synthetic sequence derived from human genome
IKRIFNILKFTWVLFL

SEQ ID NO: 8893 - protein, 16 aa, Artificial Sequence
  Quasi-synthetic sequence derived from human genome
LTLLIPYILTLRKKWK

SEQ ID NO: 8894 - protein, 16 aa, Artificial Sequence
  Quasi-synthetic sequence derived from human genome
RRAWKRLQLRLHLYPK

SEQ ID NO: 8895 - protein, 16 aa, Artificial Sequence
  Quasi-synthetic sequence derived from human genome
KGFLLKKRKWPLKGWH

SEQ ID NO: 8896 - protein, 16 aa, Artificial Sequence
  Quasi-synthetic sequence derived from human genome
VLQVLIVVLRIVRYRK

SEQ ID NO: 8897 - protein, 16 aa, Artificial Sequence
  Quasi-synthetic sequence derived from human genome
RRRGNWITLKMRKLIK

SEQ ID NO: 8898 - protein, 16 aa, Artificial Sequence
  Quasi-synthetic sequence derived from human genome
RRIVSKKYKIYFWNII

SEQ ID NO: 8899 - protein, 16 aa, Artificial Sequence
  Quasi-synthetic sequence derived from human genome
ILGLICLLRWRRRKGQ

SEQ ID NO: 8900 - protein, 16 aa, Artificial Sequence
  Quasi-synthetic sequence derived from human genome
YLRGFLARNRYRKILR

SEQ ID NO: 8901 - protein, 16 aa, Artificial Sequence
  Quasi-synthetic sequence derived from human genome
LRLKLRKKLKAEKKKL

SEQ ID NO: 8902 - protein, 16 aa, Artificial Sequence
  Quasi-synthetic sequence derived from human genome
KKSWKKIYFFLRRSGL

SEQ ID NO: 8903 - protein, 16 aa, Artificial Sequence
  Quasi-synthetic sequence derived from human genome
KGKRWFAFKMMMAKKW

SEQ ID NO: 8904 - protein, 16 aa, Artificial Sequence
  Quasi-synthetic sequence derived from human genome
RRRRTFCLLVVIVVVF

SEQ ID NO: 8905 - protein, 16 aa, Artificial Sequence
  Quasi-synthetic sequence derived from human genome
FIVVKKRINTRFFLKH

SEQ ID NO: 8906 - protein, 16 aa, Artificial Sequence
  Quasi-synthetic sequence derived from human genome
FLLRKKRFGQWTKLLC

SEQ ID NO: 8907 - protein, 16 aa, Artificial Sequence
  Quasi-synthetic sequence derived from human genome
AWASRWLRRKLRARRK

SEQ ID NO: 8908 - protein, 16 aa, Artificial Sequence
  Quasi-synthetic sequence derived from human genome
RLPFRALLQIRAVRKK

SEQ ID NO: 8909 - protein, 16 aa, Artificial Sequence
  Quasi-synthetic sequence derived from human genome
LRNRRLLRKVIKAAAL

SEQ ID NO: 8910 - protein, 16 aa, Artificial Sequence
  Quasi-synthetic sequence derived from human genome
KYLFRFIIQSRVLYLR

SEQ ID NO: 8911 - protein, 16 aa, Artificial Sequence
  Quasi-synthetic sequence derived from human genome
ALIVWFFVCPRMKRKI

SEQ ID NO: 8912 - protein, 16 aa, Artificial Sequence
  Quasi-synthetic sequence derived from human genome
SFLRGWLCRRKWKTII

SEQ ID NO: 8913 - protein, 16 aa, Artificial Sequence
  Quasi-synthetic sequence derived from human genome
RALRAIRVLRRLSFLT

SEQ ID NO: 8914 - protein, 16 aa, Artificial Sequence
  Quasi-synthetic sequence derived from human genome
LLRLVSAVNRRRMKLL

SEQ ID NO: 8915 - protein, 16 aa, Artificial Sequence
  Quasi-synthetic sequence derived from human genome
LRLSKLRRCVQWLKVM

SEQ ID NO: 8916 - protein, 16 aa, Artificial Sequence
  Quasi-synthetic sequence derived from human genome
RLWVSRLLRHRKAQLL

SEQ ID NO: 8917 - protein, 16 aa, Artificial Sequence
  Quasi-synthetic sequence derived from human genome
RMKLVLRWYLSGFYKK

SEQ ID NO: 8918 - protein, 16 aa, Artificial Sequence
  Quasi-synthetic sequence derived from human genome
VLMRLGRQRWKLKGRI

SEQ ID NO: 8919 - protein, 16 aa, Artificial Sequence
  Quasi-synthetic sequence derived from human genome
RKILSRLFRVFVHVYI

SEQ ID NO: 8920 - protein, 16 aa, Artificial Sequence
  Quasi-synthetic sequence derived from human genome
RRRRVLQTLVWFLLTL

SEQ ID NO: 8921 - protein, 16 aa, Artificial Sequence
  Quasi-synthetic sequence derived from human genome
YYLIMRIKMCLIKLCK

SEQ ID NO: 8922 - protein, 16 aa, Artificial Sequence
  Quasi-synthetic sequence derived from human genome
MRKKLILYFKRRNHAR

SEQ ID NO: 8923 - protein, 16 aa, Artificial Sequence
  Quasi-synthetic sequence derived from human genome
IFRKKAKTTKKIVLRL

SEQ ID NO: 8924 - protein, 16 aa, Artificial Sequence
  Quasi-synthetic sequence derived from human genome
ILIQAVWKGFILRKKL

SEQ ID NO: 8925 - protein, 16 aa, Artificial Sequence
  Quasi-synthetic sequence derived from human genome
LWLRAKFQRLLFKLGC

SEQ ID NO: 8926 - protein, 16 aa, Artificial Sequence
  Quasi-synthetic sequence derived from human genome
LMCKKMKHLWFFLLLV

SEQ ID NO: 8927 - protein, 16 aa, Artificial Sequence
  Quasi-synthetic sequence derived from human genome
SWIWWRMLRQVLRRGL

SEQ ID NO: 8928 - protein, 16 aa, Artificial Sequence
  Quasi-synthetic sequence derived from human genome
RISSAFFRLFRVMRLI

SEQ ID NO: 8929 - protein, 16 aa, Artificial Sequence
  Quasi-synthetic sequence derived from human genome
ILQALVRGWLVRKRFL

SEQ ID NO: 8930 - protein, 16 aa, Artificial Sequence
  Quasi-synthetic sequence derived from human genome
RIYKLNRRKRYRCLAL

SEQ ID NO: 8931 - protein, 16 aa, Artificial Sequence
  Quasi-synthetic sequence derived from human genome
KLFKFPCLKRGAKFRK

SEQ ID NO: 8932 - protein, 16 aa, Artificial Sequence
  Quasi-synthetic sequence derived from human genome
LLLIAFIFLIIKSYRK

SEQ ID NO: 8933 - protein, 16 aa, Artificial Sequence
  Quasi-synthetic sequence derived from human genome
WVARYIFKRLKFLGNK

SEQ ID NO: 8934 - protein, 16 aa, Artificial Sequence
  Quasi-synthetic sequence derived from human genome
KRKARGYLRLVPLFVL

SEQ ID NO: 8935 - protein, 16 aa, Artificial Sequence
  Quasi-synthetic sequence derived from human genome
LVKMGGRIKTWRKRWF

SEQ ID NO: 8936 - protein, 16 aa, Artificial Sequence
  Quasi-synthetic sequence derived from human genome
LLLVVRRRRREQRLKR

SEQ ID NO: 8937 - protein, 16 aa, Artificial Sequence
  Quasi-synthetic sequence derived from human genome
LLIGLLLVTLIILRKK

SEQ ID NO: 8938 - protein, 16 aa, Artificial Sequence
  Quasi-synthetic sequence derived from human genome
RTRIYHKLKHFKFKLY

SEQ ID NO: 8939 - protein, 16 aa, Artificial Sequence
  Quasi-synthetic sequence derived from human genome
FKRSMVLKLTLRCLVR

SEQ ID NO: 8940 - protein, 16 aa, Artificial Sequence
  Quasi-synthetic sequence derived from human genome
LTVLYSLIGRKLWRRR

SEQ ID NO: 8941 - protein, 16 aa, Artificial Sequence
  Quasi-synthetic sequence derived from human genome
FRFKVLILAYAVCRLR

SEQ ID NO: 8942 - protein, 16 aa, Artificial Sequence
  Quasi-synthetic sequence derived from human genome
FDKKRFRYIILKQKFL

SEQ ID NO: 8943 - protein, 16 aa, Artificial Sequence
  Quasi-synthetic sequence derived from human genome
LLGRWRKKHLTFRILN

SEQ ID NO: 8944 - protein, 16 aa, Artificial Sequence
  Quasi-synthetic sequence derived from human genome
RLIRRNPLLWLLQFLF

SEQ ID NO: 8945 - protein, 16 aa, Artificial Sequence
  Quasi-synthetic sequence derived from human genome
LWRKLLKAFWWLVVAY

SEQ ID NO: 8946 - protein, 16 aa, Artificial Sequence
  Quasi-synthetic sequence derived from human genome
LFINILRILMRKLRTQ

SEQ ID NO: 8947 - protein, 16 aa, Artificial Sequence
  Quasi-synthetic sequence derived from human genome
RFLRLCRSFYITCRRL

SEQ ID NO: 8948 - protein, 16 aa, Artificial Sequence
  Quasi-synthetic sequence derived from human genome
RTLLRFNAVLRKLLIV

SEQ ID NO: 8949 - protein, 16 aa, Artificial Sequence
  Quasi-synthetic sequence derived from human genome
VVLLAIAIFIRWKKSR

SEQ ID NO: 8950 - protein, 16 aa, Artificial Sequence
  Quasi-synthetic sequence derived from human genome
PRLRKRTFILMYLWFT

SEQ ID NO: 8951 - protein, 16 aa, Artificial Sequence
  Quasi-synthetic sequence derived from human genome
KQRIIPFLPGKILFRR

SEQ ID NO: 8952 - protein, 16 aa, Artificial Sequence
  Quasi-synthetic sequence derived from human genome
FLSYRFKQGFRRVLLR

SEQ ID NO: 8953 - protein, 16 aa, Artificial Sequence
  Quasi-synthetic sequence derived from human genome
PALLLRRVPLFSLRFR

SEQ ID NO: 8954 - protein, 16 aa, Artificial Sequence
  Quasi-synthetic sequence derived from human genome
FLRRFPRPLLRLVALQ

SEQ ID NO: 8955 - protein, 16 aa, Artificial Sequence
  Quasi-synthetic sequence derived from human genome
WRLKVLVRLSKFLQAL

SEQ ID NO: 8956 - protein, 16 aa, Artificial Sequence
  Quasi-synthetic sequence derived from human genome
LLVLILLIVCFIKRSR

SEQ ID NO: 8957 - protein, 16 aa, Artificial Sequence
  Quasi-synthetic sequence derived from human genome
RKSRKTLCIIILILVI

SEQ ID NO: 8958 - protein, 16 aa, Artificial Sequence
  Quasi-synthetic sequence derived from human genome
WQRIISWVFFWRQKIK

SEQ ID NO: 8959 - protein, 16 aa, Artificial Sequence
  Quasi-synthetic sequence derived from human genome
RQIRKIRQKFFHAILR

SEQ ID NO: 8960 - protein, 16 aa, Artificial Sequence
  Quasi-synthetic sequence derived from human genome
VKWGNRWWRWRRARWQ

SEQ ID NO: 8961 - protein, 16 aa, Artificial Sequence
  Quasi-synthetic sequence derived from human genome
VILFLIMLVMRKRVAL

SEQ ID NO: 8962 - protein, 16 aa, Artificial Sequence
  Quasi-synthetic sequence derived from human genome
LKGWWQKFRLRSKKRK

SEQ ID NO: 8963 - protein, 16 aa, Artificial Sequence
  Quasi-synthetic sequence derived from human genome
ILHRGCPLLRRWLCRR

SEQ ID NO: 8964 - protein, 16 aa, Artificial Sequence
  Quasi-synthetic sequence derived from human genome
WLWRQSSILRRWKRNW

SEQ ID NO: 8965 - protein, 16 aa, Artificial Sequence
  Quasi-synthetic sequence derived from human genome
KQKVKYLTFRFIFALR

SEQ ID NO: 8966 - protein, 16 aa, Artificial Sequence
  Quasi-synthetic sequence derived from human genome
RILRRLLRRYRESKKI

SEQ ID NO: 8967 - protein, 16 aa, Artificial Sequence
  Quasi-synthetic sequence derived from human genome
WRRRSCWRKWKQLSRL

SEQ ID NO: 8968 - protein, 16 aa, Artificial Sequence
  Quasi-synthetic sequence derived from human genome
LTILTIWLFKHRRARF

SEQ ID NO: 8969 - protein, 16 aa, Artificial Sequence
  Quasi-synthetic sequence derived from human genome
RFRFFQPLRLERFFFR

SEQ ID NO: 8970 - protein, 16 aa, Artificial Sequence
  Quasi-synthetic sequence derived from human genome
LFLLAVILAIALRLRR

SEQ ID NO: 8971 - protein, 16 aa, Artificial Sequence
  Quasi-synthetic sequence derived from human genome
RLRLHRVNLIALQRRR

SEQ ID NO: 8972 - protein, 16 aa, Artificial Sequence
  Quasi-synthetic sequence derived from human genome
KRKIARLGINMLLKMI

SEQ ID NO: 8973 - protein, 16 aa, Artificial Sequence
  Quasi-synthetic sequence derived from human genome
VLVYIKRRLAMCARRL

SEQ ID NO: 8974 - protein, 16 aa, Artificial Sequence
  Quasi-synthetic sequence derived from human genome
TFRLTLRAVKLWAKRR

SEQ ID NO: 8975 - protein, 16 aa, Artificial Sequence
  Quasi-synthetic sequence derived from human genome
YLRPLFRKLRKRNLPA

SEQ ID NO: 8976 - protein, 16 aa, Artificial Sequence
  Quasi-synthetic sequence derived from human genome
IRPVKLKNLILLVKHW

SEQ ID NO: 8977 - protein, 16 aa, Artificial Sequence
  Quasi-synthetic sequence derived from human genome
WRWLTFWRRLQSAFLK

SEQ ID NO: 8978 - protein, 16 aa, Artificial Sequence
  Quasi-synthetic sequence derived from human genome
VRRRKRRFFGLCCLIS

SEQ ID NO: 8979 - protein, 16 aa, Artificial Sequence
  Quasi-synthetic sequence derived from human genome
LSRGRRRRMHVLRRRW

SEQ ID NO: 8980 - protein, 16 aa, Artificial Sequence
  Quasi-synthetic sequence derived from human genome
RFKVKKIWDLWRILTI

SEQ ID NO: 8981 - protein, 16 aa, Artificial Sequence
  Quasi-synthetic sequence derived from human genome
KFKRYFLQLLKYIPPK

SEQ ID NO: 8982 - protein, 16 aa, Artificial Sequence
  Quasi-synthetic sequence derived from human genome
LCLRLLLLLGYRRRCP

SEQ ID NO: 8983 - protein, 16 aa, Artificial Sequence
  Quasi-synthetic sequence derived from human genome
RWKILWFIPFRQRQPL

SEQ ID NO: 8984 - protein, 16 aa, Artificial Sequence
  Quasi-synthetic sequence derived from human genome
IQQYKFLRFRRSLLLL

SEQ ID NO: 8985 - protein, 16 aa, Artificial Sequence
  Quasi-synthetic sequence derived from human genome
LKLRWRITGLIPWLLW

SEQ ID NO: 8986 - protein, 16 aa, Artificial Sequence
  Quasi-synthetic sequence derived from human genome
LKRGLRNKRIGHFLFW

SEQ ID NO: 8987 - protein, 16 aa, Artificial Sequence
  Quasi-synthetic sequence derived from human genome
WLRVLGRLVKLSLKQK

SEQ ID NO: 8988 - protein, 16 aa, Artificial Sequence
  Quasi-synthetic sequence derived from human genome
HLLWKKRSILRFLERK

SEQ ID NO: 8989 - protein, 16 aa, Artificial Sequence
  Quasi-synthetic sequence derived from human genome
RLFYYRLWDLYKKVKR

SEQ ID NO: 8990 - protein, 16 aa, Artificial Sequence
  Quasi-synthetic sequence derived from human genome
LYAYKMLMAKKWVKFK

SEQ ID NO: 8991 - protein, 16 aa, Artificial Sequence
  Quasi-synthetic sequence derived from human genome
IILKRKRGRPPKNLLL

SEQ ID NO: 8992 - protein, 16 aa, Artificial Sequence
  Quasi-synthetic sequence derived from human genome
AWRGFHWRQKFLRVKR

SEQ ID NO: 8993 - protein, 16 aa, Artificial Sequence
  Quasi-synthetic sequence derived from human genome
SPKSLFYLLLKLKKWI

SEQ ID NO: 8994 - protein, 16 aa, Artificial Sequence
  Quasi-synthetic sequence derived from human genome
KKIFCCLFFITLFFIR

SEQ ID NO: 8995 - protein, 16 aa, Artificial Sequence
  Quasi-synthetic sequence derived from human genome
RPFLVRLFSWALLRFL

SEQ ID NO: 8996 - protein, 16 aa, Artificial Sequence
  Quasi-synthetic sequence derived from human genome
RLYMRQTIIKVIKFIL

SEQ ID NO: 8997 - protein, 16 aa, Artificial Sequence
  Quasi-synthetic sequence derived from human genome
VLLFLWRSFRSVRSRL

SEQ ID NO: 8998 - protein, 16 aa, Artificial Sequence
  Quasi-synthetic sequence derived from human genome
VLFFLWRSFRSVRSRL

SEQ ID NO: 8999 - protein, 16 aa, Artificial Sequence
  Quasi-synthetic sequence derived from human genome
RYNRVGILRRILRTLR

SEQ ID NO: 9000 - protein, 16 aa, Artificial Sequence
  Quasi-synthetic sequence derived from human genome
LLFHFCIFHRRKMKAI

SEQ ID NO: 9001 - protein, 17 aa, Artificial Sequence
  Quasi-synthetic sequence derived from human genome
RIFKRKKRIKRRALLFL

SEQ ID NO: 9002 - protein, 17 aa, Artificial Sequence
  Quasi-synthetic sequence derived from human genome
RLKKWKGVRWKRLRLLL

SEQ ID NO: 9003 - protein, 17 aa, Artificial Sequence
  Quasi-synthetic sequence derived from human genome
KLRLFAWRKRWFILRRG

SEQ ID NO: 9004 - protein, 17 aa, Artificial Sequence
  Quasi-synthetic sequence derived from human genome
NFLLLFMKLRWFLKRWR

SEQ ID NO: 9005 - protein, 17 aa, Artificial Sequence
  Quasi-synthetic sequence derived from human genome
LLRLLGLRRGLRRLRRL

SEQ ID NO: 9006 - protein, 17 aa, Artificial Sequence
  Quasi-synthetic sequence derived from human genome
RFFRFLLRKLYVFRRSF

SEQ ID NO: 9007 - protein, 17 aa, Artificial Sequence
  Quasi-synthetic sequence derived from human genome
LLFFLFRLLLRFLRLCR

SEQ ID NO: 9008 - protein, 17 aa, Artificial Sequence
  Quasi-synthetic sequence derived from human genome
LRVMRLMRIFRILKLAR

SEQ ID NO: 9009 - protein, 17 aa, Artificial Sequence
  Quasi-synthetic sequence derived from human genome
LRIIRLVRVFRIFKLSR

SEQ ID NO: 9010 - protein, 17 aa, Artificial Sequence
  Quasi-synthetic sequence derived from human genome
LILILLIKKLIIFILKK

SEQ ID NO: 9011 - protein, 17 aa, Artificial Sequence
  Quasi-synthetic sequence derived from human genome
WRFRLLCLLRRWLPRPR

SEQ ID NO: 9012 - protein, 17 aa, Artificial Sequence
  Quasi-synthetic sequence derived from human genome
IRIMRVLRIARVLKLLK

SEQ ID NO: 9013 - protein, 17 aa, Artificial Sequence
  Quasi-synthetic sequence derived from human genome
RLLWRRLKPLILGKLLF

SEQ ID NO: 9014 - protein, 17 aa, Artificial Sequence
  Quasi-synthetic sequence derived from human genome
RLMRRLVRRLRRWGLLP

SEQ ID NO: 9015 - protein, 17 aa, Artificial Sequence
  Quasi-synthetic sequence derived from human genome
LCIFKIARKLLFLFRIK

SEQ ID NO: 9016 - protein, 17 aa, Artificial Sequence
  Quasi-synthetic sequence derived from human genome
LRVIRLVRVFRIFKLSR

SEQ ID NO: 9017 - protein, 17 aa, Artificial Sequence
  Quasi-synthetic sequence derived from human genome
RMVILRLLRYIVRLVWR

SEQ ID NO: 9018 - protein, 17 aa, Artificial Sequence
  Quasi-synthetic sequence derived from human genome
RFLLLFTFLKKNRKKKL

SEQ ID NO: 9019 - protein, 17 aa, Artificial Sequence
  Quasi-synthetic sequence derived from human genome
FRVIRLARIGRILRLIR

SEQ ID NO: 9020 - protein, 17 aa, Artificial Sequence
  Quasi-synthetic sequence derived from human genome
LLLFRWKPLWGVRLRLR

SEQ ID NO: 9021 - protein, 17 aa, Artificial Sequence
  Quasi-synthetic sequence derived from human genome
LVYIKIYIVLRRRRKRV

SEQ ID NO: 9022 - protein, 17 aa, Artificial Sequence
  Quasi-synthetic sequence derived from human genome
RRVVQIFRIMRILRILK

SEQ ID NO: 9023 - protein, 17 aa, Artificial Sequence
  Quasi-synthetic sequence derived from human genome
LRRIILLQRWFRVLLCR

SEQ ID NO: 9024 - protein, 17 aa, Artificial Sequence
  Quasi-synthetic sequence derived from human genome
VKKIRKQMKLLLLLLLL

SEQ ID NO: 9025 - protein, 17 aa, Artificial Sequence
  Quasi-synthetic sequence derived from human genome
MVWRRLLRKRWVLALVF

SEQ ID NO: 9026 - protein, 17 aa, Artificial Sequence
  Quasi-synthetic sequence derived from human genome
LAILRVIRLVRVFRIFK

SEQ ID NO: 9027 - protein, 17 aa, Artificial Sequence
  Quasi-synthetic sequence derived from human genome
FRVIRLARIGRILRLIK

SEQ ID NO: 9028 - protein, 17 aa, Artificial Sequence
  Quasi-synthetic sequence derived from human genome
IIFLTVLLLKLRKRHRK

SEQ ID NO: 9029 - protein, 17 aa, Artificial Sequence
  Quasi-synthetic sequence derived from human genome
LLVLLLCRLRRLRARAR

SEQ ID NO: 9030 - protein, 17 aa, Artificial Sequence
  Quasi-synthetic sequence derived from human genome
MVFCLILWKWKKKKRPR

SEQ ID NO: 9031 - protein, 17 aa, Artificial Sequence
  Quasi-synthetic sequence derived from human genome
RRKYLLKALFKALKRLK

SEQ ID NO: 9032 - protein, 17 aa, Artificial Sequence
  Quasi-synthetic sequence derived from human genome
KRKKKKKFCYLCILLLI

SEQ ID NO: 9033 - protein, 17 aa, Artificial Sequence
  Quasi-synthetic sequence derived from human genome
RRILWITLRTWKKFVKF

SEQ ID NO: 9034 - protein, 17 aa, Artificial Sequence
  Quasi-synthetic sequence derived from human genome
RLLLKFIKIMKHLRKLN

SEQ ID NO: 9035 - protein, 17 aa, Artificial Sequence
  Quasi-synthetic sequence derived from human genome
RWLRWKASLIKLRALRR

SEQ ID NO: 9036 - protein, 17 aa, Artificial Sequence
  Quasi-synthetic sequence derived from human genome
RRKWAVRIIRKFIKGFI

SEQ ID NO: 9037 - protein, 17 aa, Artificial Sequence
  Quasi-synthetic sequence derived from human genome
LRVLRMMRIFWVIKLAR

SEQ ID NO: 9038 - protein, 17 aa, Artificial Sequence
  Quasi-synthetic sequence derived from human genome
RRKGVWLRLRKILFCVL

SEQ ID NO: 9039 - protein, 17 aa, Artificial Sequence
  Quasi-synthetic sequence derived from human genome
FRKTFKMLLLCRWKKKK

SEQ ID NO: 9040 - protein, 17 aa, Artificial Sequence
  Quasi-synthetic sequence derived from human genome
KLKRKYWWKNLKMMIIL

SEQ ID NO: 9041 - protein, 17 aa, Artificial Sequence
  Quasi-synthetic sequence derived from human genome
LLFLMRKDKKKLRRLLK

SEQ ID NO: 9042 - protein, 17 aa, Artificial Sequence
  Quasi-synthetic sequence derived from human genome
RPPLLLRPVKLLRRRFR

SEQ ID NO: 9043 - protein, 17 aa, Artificial Sequence
  Quasi-synthetic sequence derived from human genome
LLLLGFFLWLKKRKQIK

SEQ ID NO: 9044 - protein, 17 aa, Artificial Sequence
  Quasi-synthetic sequence derived from human genome
FRIVRLARIGRILRLVR

SEQ ID NO: 9045 - protein, 17 aa, Artificial Sequence
  Quasi-synthetic sequence derived from human genome
RRRRSLRRLFSRFLLAL

SEQ ID NO: 9046 - protein, 17 aa, Artificial Sequence
  Quasi-synthetic sequence derived from human genome
KRWLGRWRRKRRWRRVR

SEQ ID NO: 9047 - protein, 17 aa, Artificial Sequence
  Quasi-synthetic sequence derived from human genome
KFMVLLWKNFILKRRRC

SEQ ID NO: 9048 - protein, 17 aa, Artificial Sequence
  Quasi-synthetic sequence derived from human genome
VLRRKALAPRLLLRLLR

SEQ ID NO: 9049 - protein, 17 aa, Artificial Sequence
  Quasi-synthetic sequence derived from human genome
IRSIRILKFLVAKRKFK

SEQ ID NO: 9050 - protein, 17 aa, Artificial Sequence
  Quasi-synthetic sequence derived from human genome
LKLFLKKKVVVKICKRK

SEQ ID NO: 9051 - protein, 17 aa, Artificial Sequence
  Quasi-synthetic sequence derived from human genome
ILILLLLLFLRRRAVVK

SEQ ID NO: 9052 - protein, 17 aa, Artificial Sequence
  Quasi-synthetic sequence derived from human genome
LFMRRRHIVRKRTLRRL

SEQ ID NO: 9053 - protein, 17 aa, Artificial Sequence
  Quasi-synthetic sequence derived from human genome
GVLLLFVLLLVVRRRRR

SEQ ID NO: 9054 - protein, 17 aa, Artificial Sequence
  Quasi-synthetic sequence derived from human genome
LWFKFQRYFRRKPVRFF

SEQ ID NO: 9055 - protein, 17 aa, Artificial Sequence
  Quasi-synthetic sequence derived from human genome
VRKLSFKRKRFLIKLRP

SEQ ID NO: 9056 - protein, 17 aa, Artificial Sequence
  Quasi-synthetic sequence derived from human genome
RIRKRFLLRRILEMLFF

SEQ ID NO: 9057 - protein, 17 aa, Artificial Sequence
  Quasi-synthetic sequence derived from human genome
LIILLIFRLIWRSVKKW

SEQ ID NO: 9058 - protein, 17 aa, Artificial Sequence
  Quasi-synthetic sequence derived from human genome
KKLRRYAWKKRWFILRS

SEQ ID NO: 9059 - protein, 17 aa, Artificial Sequence
  Quasi-synthetic sequence derived from human genome
VKVILKKKKKLLLLQKK

SEQ ID NO: 9060 - protein, 17 aa, Artificial Sequence
  Quasi-synthetic sequence derived from human genome
LRILRKRNKALRKIRKL

SEQ ID NO: 9061 - protein, 17 aa, Artificial Sequence
  Quasi-synthetic sequence derived from human genome
VLRTFRLMRVLKLVRFL

SEQ ID NO: 9062 - protein, 17 aa, Artificial Sequence
  Quasi-synthetic sequence derived from human genome
HRLLKRLLGPKLRRFLK

SEQ ID NO: 9063 - protein, 17 aa, Artificial Sequence
  Quasi-synthetic sequence derived from human genome
RKFRRSLLQLLCLRLLR

SEQ ID NO: 9064 - protein, 17 aa, Artificial Sequence
  Quasi-synthetic sequence derived from human genome
LLKTVRLLRLLRLLQKL

SEQ ID NO: 9065 - protein, 17 aa, Artificial Sequence
  Quasi-synthetic sequence derived from human genome
VRVVIAILRLRFLVKKW

SEQ ID NO: 9066 - protein, 17 aa, Artificial Sequence
  Quasi-synthetic sequence derived from human genome
FRVIRLARIGRILRLVK

SEQ ID NO: 9067 - protein, 17 aa, Artificial Sequence
  Quasi-synthetic sequence derived from human genome
LLLAVYFIARKIRKKRL

SEQ ID NO: 9068 - protein, 17 aa, Artificial Sequence
  Quasi-synthetic sequence derived from human genome
LIFFFIALVFFLYRRRK

SEQ ID NO: 9069 - protein, 17 aa, Artificial Sequence
  Quasi-synthetic sequence derived from human genome
LLLKRFLLARRSRRGLF

SEQ ID NO: 9070 - protein, 17 aa, Artificial Sequence
  Quasi-synthetic sequence derived from human genome
LRIVRFTKILSLLRLLR

SEQ ID NO: 9071 - protein, 17 aa, Artificial Sequence
  Quasi-synthetic sequence derived from human genome
RWTHLLRLLRLIILLRI

SEQ ID NO: 9072 - protein, 17 aa, Artificial Sequence
  Quasi-synthetic sequence derived from human genome
RARLLRALRLVRRLRGL

SEQ ID NO: 9073 - protein, 17 aa, Artificial Sequence
  Quasi-synthetic sequence derived from human genome
RKLQRYAWRKRWFVLRR

SEQ ID NO: 9074 - protein, 17 aa, Artificial Sequence
  Quasi-synthetic sequence derived from human genome
ILIKGSFRILKLIVRRR

SEQ ID NO: 9075 - protein, 17 aa, Artificial Sequence
  Quasi-synthetic sequence derived from human genome
LVFFIYMISFIFRKRRK

SEQ ID NO: 9076 - protein, 17 aa, Artificial Sequence
  Quasi-synthetic sequence derived from human genome
FLLKKRKWPLKGWHKRF

SEQ ID NO: 9077 - protein, 17 aa, Artificial Sequence
  Quasi-synthetic sequence derived from human genome
RKILLRKFCQMRKRRLR

SEQ ID NO: 9078 - protein, 17 aa, Artificial Sequence
  Quasi-synthetic sequence derived from human genome
ILVGLLIFFLKRRNKKK

SEQ ID NO: 9079 - protein, 17 aa, Artificial Sequence
  Quasi-synthetic sequence derived from human genome
RWRRLRLQQLRRLRGLL

SEQ ID NO: 9080 - protein, 17 aa, Artificial Sequence
  Quasi-synthetic sequence derived from human genome
KIWFQNRRMKKKRLLLR

SEQ ID NO: 9081 - protein, 17 aa, Artificial Sequence
  Quasi-synthetic sequence derived from human genome
IIMRFRKRKNFKKKRIV

SEQ ID NO: 9082 - protein, 17 aa, Artificial Sequence
  Quasi-synthetic sequence derived from human genome
LSFLRLFRAARLIKLLR

SEQ ID NO: 9083 - protein, 17 aa, Artificial Sequence
  Quasi-synthetic sequence derived from human genome
MSIRRLLILILKIGRRW

SEQ ID NO: 9084 - protein, 17 aa, Artificial Sequence
  Quasi-synthetic sequence derived from human genome
VFRIFFHKIFIRPLRYR

SEQ ID NO: 9085 - protein, 17 aa, Artificial Sequence
  Quasi-synthetic sequence derived from human genome
RWLLRTKRLHWSRLLFL

SEQ ID NO: 9086 - protein, 17 aa, Artificial Sequence
  Quasi-synthetic sequence derived from human genome
RLLRGLWQRWRRYKYRF

SEQ ID NO: 9087 - protein, 17 aa, Artificial Sequence
  Quasi-synthetic sequence derived from human genome
LLWKRLLIARRSRKGFF

SEQ ID NO: 9088 - protein, 17 aa, Artificial Sequence
  Quasi-synthetic sequence derived from human genome
KLFKSLLGKKKMRILIL

SEQ ID NO: 9089 - protein, 17 aa, Artificial Sequence
  Quasi-synthetic sequence derived from human genome
KIKTFLSLVWKRRILFF

SEQ ID NO: 9090 - protein, 17 aa, Artificial Sequence
  Quasi-synthetic sequence derived from human genome
RRLLRLLVLGLWLALLR

SEQ ID NO: 9091 - protein, 17 aa, Artificial Sequence
  Quasi-synthetic sequence derived from human genome
RVFLQRLLWLLRLLFPR

SEQ ID NO: 9092 - protein, 17 aa, Artificial Sequence
  Quasi-synthetic sequence derived from human genome
IVFGFIILLLLVLRKRR

SEQ ID NO: 9093 - protein, 17 aa, Artificial Sequence
  Quasi-synthetic sequence derived from human genome
FWFVLKVVLIIIRLKKY

SEQ ID NO: 9094 - protein, 17 aa, Artificial Sequence
  Quasi-synthetic sequence derived from human genome
FWSRLRKLNWKRILIRH

SEQ ID NO: 9095 - protein, 17 aa, Artificial Sequence
  Quasi-synthetic sequence derived from human genome
FLRLKRRVKSVILVVLL

SEQ ID NO: 9096 - protein, 17 aa, Artificial Sequence
  Quasi-synthetic sequence derived from human genome
RRRGFGLFFFLRLHRLL

SEQ ID NO: 9097 - protein, 17 aa, Artificial Sequence
  Quasi-synthetic sequence derived from human genome
FFLMKRKIIVLMPWLLR

SEQ ID NO: 9098 - protein, 17 aa, Artificial Sequence
  Quasi-synthetic sequence derived from human genome
LCRRAVKILKKKKLRRI

SEQ ID NO: 9099 - protein, 17 aa, Artificial Sequence
  Quasi-synthetic sequence derived from human genome
LILKTIRRRLPFSKWRL

SEQ ID NO: 9100 - protein, 17 aa, Artificial Sequence
  Quasi-synthetic sequence derived from human genome
IFSKVRIFGLKKRRLRR

SEQ ID NO: 9101 - protein, 17 aa, Artificial Sequence
  Quasi-synthetic sequence derived from human genome
FLWLRWRILRLFPWILL

SEQ ID NO: 9102 - protein, 17 aa, Artificial Sequence
  Quasi-synthetic sequence derived from human genome
LLIFLRKRILIAIALIK

SEQ ID NO: 9103 - protein, 17 aa, Artificial Sequence
  Quasi-synthetic sequence derived from human genome
LRKTKYRSFRRRLLKFI

SEQ ID NO: 9104 - protein, 17 aa, Artificial Sequence
  Quasi-synthetic sequence derived from human genome
LKRRLVKLVVNFLFYFR

SEQ ID NO: 9105 - protein, 17 aa, Artificial Sequence
  Quasi-synthetic sequence derived from human genome
RFLKIIRPLRNIFLKKP

SEQ ID NO: 9106 - protein, 17 aa, Artificial Sequence
  Quasi-synthetic sequence derived from human genome
LRLFRMLRIFKLGKYWP

SEQ ID NO: 9107 - protein, 17 aa, Artificial Sequence
  Quasi-synthetic sequence derived from human genome
MLLLWTFLLQRRFVKKR

SEQ ID NO: 9108 - protein, 17 aa, Artificial Sequence
  Quasi-synthetic sequence derived from human genome
IRVIKKKKVIMKKRKKL

SEQ ID NO: 9109 - protein, 17 aa, Artificial Sequence
  Quasi-synthetic sequence derived from human genome
FLRIKRRVKSVVLVILL

SEQ ID NO: 9110 - protein, 17 aa, Artificial Sequence
  Quasi-synthetic sequence derived from human genome
LLLLLLLLLFLILRHRR

SEQ ID NO: 9111 - protein, 17 aa, Artificial Sequence
  Quasi-synthetic sequence derived from human genome
FMLMALVLLQRKLWRRR

SEQ ID NO: 9112 - protein, 17 aa, Artificial Sequence
  Quasi-synthetic sequence derived from human genome
IKRLARISLVKKLMKKW

SEQ ID NO: 9113 - protein, 17 aa, Artificial Sequence
  Quasi-synthetic sequence derived from human genome
WIFWKTWIFWKTWIFRK

SEQ ID NO: 9114 - protein, 17 aa, Artificial Sequence
  Quasi-synthetic sequence derived from human genome
FYCKFLWRCLKFVMRKL

SEQ ID NO: 9115 - protein, 17 aa, Artificial Sequence
  Quasi-synthetic sequence derived from human genome
FLYLKWRVKKVVLVLLL

SEQ ID NO: 9116 - protein, 17 aa, Artificial Sequence
  Quasi-synthetic sequence derived from human genome
KSILFLPCLRKKILKIR

SEQ ID NO: 9117 - protein, 17 aa, Artificial Sequence
  Quasi-synthetic sequence derived from human genome
MLRVLRLLRTLRPLRVI

SEQ ID NO: 9118 - protein, 17 aa, Artificial Sequence
  Quasi-synthetic sequence derived from human genome
RVIRLVRVFRIFKLSRH

SEQ ID NO: 9119 - protein, 17 aa, Artificial Sequence
  Quasi-synthetic sequence derived from human genome
ILALWKIGFFKRPLKKK

SEQ ID NO: 9120 - protein, 17 aa, Artificial Sequence
  Quasi-synthetic sequence derived from human genome
VLRALRLLRIFKITKYW

SEQ ID NO: 9121 - protein, 17 aa, Artificial Sequence
  Quasi-synthetic sequence derived from human genome
AFLRLKRKFIQMRRPFL

SEQ ID NO: 9122 - protein, 17 aa, Artificial Sequence
  Quasi-synthetic sequence derived from human genome
LKTYLKRFKVMKIKVLR

SEQ ID NO: 9123 - protein, 17 aa, Artificial Sequence
  Quasi-synthetic sequence derived from human genome
KKLKRYAWKRRWFVLRS

SEQ ID NO: 9124 - protein, 17 aa, Artificial Sequence
  Quasi-synthetic sequence derived from human genome
KKRVIRMLIVIVVLFFL

SEQ ID NO: 9125 - protein, 17 aa, Artificial Sequence
  Quasi-synthetic sequence derived from human genome
LRGFFIKRRFRSLRHKI

SEQ ID NO: 9126 - protein, 17 aa, Artificial Sequence
  Quasi-synthetic sequence derived from human genome
IQCWWRLILSKILKKRR

SEQ ID NO: 9127 - protein, 17 aa, Artificial Sequence
  Quasi-synthetic sequence derived from human genome
VLRVLRLLRTLRPLRVI

SEQ ID NO: 9128 - protein, 17 aa, Artificial Sequence
  Quasi-synthetic sequence derived from human genome
WAKIRKLSFKRKHFLIK

SEQ ID NO: 9129 - protein, 17 aa, Artificial Sequence
  Quasi-synthetic sequence derived from human genome
VLRCIRLLRIFKITKYW

SEQ ID NO: 9130 - protein, 17 aa, Artificial Sequence
  Quasi-synthetic sequence derived from human genome
FLLRRRFLHLKKAAIVF

SEQ ID NO: 9131 - protein, 17 aa, Artificial Sequence
  Quasi-synthetic sequence derived from human genome
KMMLVRRFRVLILMVFL

SEQ ID NO: 9132 - protein, 17 aa, Artificial Sequence
  Quasi-synthetic sequence derived from human genome
FRRSFKHILFRRRRRGF

SEQ ID NO: 9133 - protein, 17 aa, Artificial Sequence
  Quasi-synthetic sequence derived from human genome
FLMVMYFFFRVRSRRWK

SEQ ID NO: 9134 - protein, 17 aa, Artificial Sequence
  Quasi-synthetic sequence derived from human genome
IRYSLQKLRLVRWLLKK

SEQ ID NO: 9135 - protein, 17 aa, Artificial Sequence
  Quasi-synthetic sequence derived from human genome
VFLKRFLRLRYGRQRRR

SEQ ID NO: 9136 - protein, 17 aa, Artificial Sequence
  Quasi-synthetic sequence derived from human genome
KIILFLPCISRKLKRIK

SEQ ID NO: 9137 - protein, 17 aa, Artificial Sequence
  Quasi-synthetic sequence derived from human genome
MRKKLKMLNIAKKILRI

SEQ ID NO: 9138 - protein, 17 aa, Artificial Sequence
  Quasi-synthetic sequence derived from human genome
MLKCILKFFLRALKILI

SEQ ID NO: 9139 - protein, 17 aa, Artificial Sequence
  Quasi-synthetic sequence derived from human genome
RRSRHRLLLLLLRYLVV

SEQ ID NO: 9140 - protein, 17 aa, Artificial Sequence
  Quasi-synthetic sequence derived from human genome
FVIVLLVLRLRRWHKSR

SEQ ID NO: 9141 - protein, 17 aa, Artificial Sequence
  Quasi-synthetic sequence derived from human genome
ILWRRFRWAIILFIILF

SEQ ID NO: 9142 - protein, 17 aa, Artificial Sequence
  Quasi-synthetic sequence derived from human genome
WMLLFKPLVLRRQYLRR

SEQ ID NO: 9143 - protein, 17 aa, Artificial Sequence
  Quasi-synthetic sequence derived from human genome
FVILLLALRLRRWHKSR

SEQ ID NO: 9144 - protein, 17 aa, Artificial Sequence
  Quasi-synthetic sequence derived from human genome
IVLLALRLRRWHKSRLL

SEQ ID NO: 9145 - protein, 17 aa, Artificial Sequence
  Quasi-synthetic sequence derived from human genome
LLLWKNWTLRKRQKIRF

SEQ ID NO: 9146 - protein, 17 aa, Artificial Sequence
  Quasi-synthetic sequence derived from human genome
FRILKVFKSLRALRAIR

SEQ ID NO: 9147 - protein, 17 aa, Artificial Sequence
  Quasi-synthetic sequence derived from human genome
FHRIRWVFKRRLGLLGR

SEQ ID NO: 9148 - protein, 17 aa, Artificial Sequence
  Quasi-synthetic sequence derived from human genome
KHWKLLPLLRSVLRFRL

SEQ ID NO: 9149 - protein, 17 aa, Artificial Sequence
  Quasi-synthetic sequence derived from human genome
FLLRHHKVWRKCKMRIF

SEQ ID NO: 9150 - protein, 17 aa, Artificial Sequence
  Quasi-synthetic sequence derived from human genome
SKFRRLRQLLRRRKKRW

SEQ ID NO: 9151 - protein, 17 aa, Artificial Sequence
  Quasi-synthetic sequence derived from human genome
LAFLWGLLILLKYRWRK

SEQ ID NO: 9152 - protein, 17 aa, Artificial Sequence
  Quasi-synthetic sequence derived from human genome
RFFHFRRLIFTRKGVLR

SEQ ID NO: 9153 - protein, 17 aa, Artificial Sequence
  Quasi-synthetic sequence derived from human genome
LSRLLFFLLGFLRIRVR

SEQ ID NO: 9154 - protein, 17 aa, Artificial Sequence
  Quasi-synthetic sequence derived from human genome
RLKSQILLKKYLMKRRW

SEQ ID NO: 9155 - protein, 17 aa, Artificial Sequence
  Quasi-synthetic sequence derived from human genome
KKRVVRMLLVIVVLFFL

SEQ ID NO: 9156 - protein, 17 aa, Artificial Sequence
  Quasi-synthetic sequence derived from human genome
LRLLRALRVLYVMRLAR

SEQ ID NO: 9157 - protein, 17 aa, Artificial Sequence
  Quasi-synthetic sequence derived from human genome
RIIKKFQFIKSLRCFWK

SEQ ID NO: 9158 - protein, 17 aa, Artificial Sequence
  Quasi-synthetic sequence derived from human genome
LFRCRRLRGWWPVVKLK

SEQ ID NO: 9159 - protein, 17 aa, Artificial Sequence
  Quasi-synthetic sequence derived from human genome
ILFIILLGVIMAKRKRK

SEQ ID NO: 9160 - protein, 17 aa, Artificial Sequence
  Quasi-synthetic sequence derived from human genome
LGRRKGVWLRLRKILFC

SEQ ID NO: 9161 - protein, 17 aa, Artificial Sequence
  Quasi-synthetic sequence derived from human genome
RVAQVLRLMRIFRILKL

SEQ ID NO: 9162 - protein, 17 aa, Artificial Sequence
  Quasi-synthetic sequence derived from human genome
KVVQVFRLMRIFRVLKL

SEQ ID NO: 9163 - protein, 17 aa, Artificial Sequence
  Quasi-synthetic sequence derived from human genome
VRFVRILRIFKLTRHFV

SEQ ID NO: 9164 - protein, 17 aa, Artificial Sequence
  Quasi-synthetic sequence derived from human genome
IITLVVLLLKYRRRHRK

SEQ ID NO: 9165 - protein, 17 aa, Artificial Sequence
  Quasi-synthetic sequence derived from human genome
LLAVLLWKMGFFRRRYK

SEQ ID NO: 9166 - protein, 17 aa, Artificial Sequence
  Quasi-synthetic sequence derived from human genome
LWYRRQRLLARTLRLWF

SEQ ID NO: 9167 - protein, 17 aa, Artificial Sequence
  Quasi-synthetic sequence derived from human genome
RKKQKIIKMLLIVALLF

SEQ ID NO: 9168 - protein, 17 aa, Artificial Sequence
  Quasi-synthetic sequence derived from human genome
LLWFRRLYIIFSRYMRI

SEQ ID NO: 9169 - protein, 17 aa, Artificial Sequence
  Quasi-synthetic sequence derived from human genome
RLRILMLRKHPRSLLIL

SEQ ID NO: 9170 - protein, 17 aa, Artificial Sequence
  Quasi-synthetic sequence derived from human genome
FRTGIKRRILLLIPKWL

SEQ ID NO: 9171 - protein, 17 aa, Artificial Sequence
  Quasi-synthetic sequence derived from human genome
RKKKKTIKMLMLVVVLF

SEQ ID NO: 9172 - protein, 17 aa, Artificial Sequence
  Quasi-synthetic sequence derived from human genome
LYFLIRAFRLKKPQRRR

SEQ ID NO: 9173 - protein, 17 aa, Artificial Sequence
  Quasi-synthetic sequence derived from human genome
LLLVLLLLVRKKRKIKE

SEQ ID NO: 9174 - protein, 17 aa, Artificial Sequence
  Quasi-synthetic sequence derived from human genome
LRKKRLKKFPWSLWVWT

SEQ ID NO: 9175 - protein, 17 aa, Artificial Sequence
  Quasi-synthetic sequence derived from human genome
LAKKMLRKALKLLNRIF

SEQ ID NO: 9176 - protein, 17 aa, Artificial Sequence
  Quasi-synthetic sequence derived from human genome
LYRRTVRLRRRLPCRLL

SEQ ID NO: 9177 - protein, 17 aa, Artificial Sequence
  Quasi-synthetic sequence derived from human genome
LAPFLLWLRKCLRKAKK

SEQ ID NO: 9178 - protein, 17 aa, Artificial Sequence
  Quasi-synthetic sequence derived from human genome
MSFLKLFRAARLIKLLR

SEQ ID NO: 9179 - protein, 17 aa, Artificial Sequence
  Quasi-synthetic sequence derived from human genome
KYWRRVLAQRKLLMLKK

SEQ ID NO: 9180 - protein, 17 aa, Artificial Sequence
  Quasi-synthetic sequence derived from human genome
RLLIKKLPRVLAIQLKR

SEQ ID NO: 9181 - protein, 17 aa, Artificial Sequence
  Quasi-synthetic sequence derived from human genome
TFFRLFRVMRLVKLLSR

SEQ ID NO: 9182 - protein, 17 aa, Artificial Sequence
  Quasi-synthetic sequence derived from human genome
KIKRLKKSAFVVLILLI

SEQ ID NO: 9183 - protein, 17 aa, Artificial Sequence
  Quasi-synthetic sequence derived from human genome
LRLRHLRRPRVARLLCL

SEQ ID NO: 9184 - protein, 17 aa, Artificial Sequence
  Quasi-synthetic sequence derived from human genome
LWVLIAYILYRKKIFWK

SEQ ID NO: 9185 - protein, 17 aa, Artificial Sequence
  Quasi-synthetic sequence derived from human genome
FRKGIMKIMVYKIFRIL

SEQ ID NO: 9186 - protein, 17 aa, Artificial Sequence
  Quasi-synthetic sequence derived from human genome
LLKFNQLKFRKKKLKFC

SEQ ID NO: 9187 - protein, 17 aa, Artificial Sequence
  Quasi-synthetic sequence derived from human genome
LVIMFLMLLRRFRSRYW

SEQ ID NO: 9188 - protein, 17 aa, Artificial Sequence
  Quasi-synthetic sequence derived from human genome
LRVLRALRILYVMRLAR

SEQ ID NO: 9189 - protein, 17 aa, Artificial Sequence
  Quasi-synthetic sequence derived from human genome
KMLRLRLPNLKMVRLRV

SEQ ID NO: 9190 - protein, 17 aa, Artificial Sequence
  Quasi-synthetic sequence derived from human genome
VFRLARRRKKILFYCHF

SEQ ID NO: 9191 - protein, 17 aa, Artificial Sequence
  Quasi-synthetic sequence derived from human genome
WELRRRRPKLKKLKKLL

SEQ ID NO: 9192 - protein, 17 aa, Artificial Sequence
  Quasi-synthetic sequence derived from human genome
WKTARTFLYWRLRRLLL

SEQ ID NO: 9193 - protein, 17 aa, Artificial Sequence
  Quasi-synthetic sequence derived from human genome
KIFRWRVNFIRHLRSRR

SEQ ID NO: 9194 - protein, 17 aa, Artificial Sequence
  Quasi-synthetic sequence derived from human genome
LRVLRPLKTIKRLPKLK

SEQ ID NO: 9195 - protein, 17 aa, Artificial Sequence
  Quasi-synthetic sequence derived from human genome
VLRALRLLRIFKVTKYW

SEQ ID NO: 9196 - protein, 17 aa, Artificial Sequence
  Quasi-synthetic sequence derived from human genome
LLKPIQRLLHYRLLLRR

SEQ ID NO: 9197 - protein, 17 aa, Artificial Sequence
  Quasi-synthetic sequence derived from human genome
ILRLMRIFRILKLARHS

SEQ ID NO: 9198 - protein, 17 aa, Artificial Sequence
  Quasi-synthetic sequence derived from human genome
LKIKRLRKKFAQKMLRK

SEQ ID NO: 9199 - protein, 17 aa, Artificial Sequence
  Quasi-synthetic sequence derived from human genome
FLLRQHKVWRKCRMRIF

SEQ ID NO: 9200 - protein, 17 aa, Artificial Sequence
  Quasi-synthetic sequence derived from human genome
LWHRRRILMGKIFRTWF

SEQ ID NO: 9201 - protein, 17 aa, Artificial Sequence
  Quasi-synthetic sequence derived from human genome
LRALLLWGRRLRPLLRA

SEQ ID NO: 9202 - protein, 17 aa, Artificial Sequence
  Quasi-synthetic sequence derived from human genome
FVLLLFLLLFLLLRRQR

SEQ ID NO: 9203 - protein, 17 aa, Artificial Sequence
  Quasi-synthetic sequence derived from human genome
IIRKINKMKTLKRKKLL

SEQ ID NO: 9204 - protein, 17 aa, Artificial Sequence
  Quasi-synthetic sequence derived from human genome
KFFKRKPKVLGVVRILI

SEQ ID NO: 9205 - protein, 17 aa, Artificial Sequence
  Quasi-synthetic sequence derived from human genome
NLAKKIMFFLLIIRKLL

SEQ ID NO: 9206 - protein, 17 aa, Artificial Sequence
  Quasi-synthetic sequence derived from human genome
FLVIFYCYIRKRCLKLK

SEQ ID NO: 9207 - protein, 17 aa, Artificial Sequence
  Quasi-synthetic sequence derived from human genome
KVKRIIKVNNRILRLKF

SEQ ID NO: 9208 - protein, 17 aa, Artificial Sequence
  Quasi-synthetic sequence derived from human genome
FILKLGRRSRLKRAVWI

SEQ ID NO: 9209 - protein, 17 aa, Artificial Sequence
  Quasi-synthetic sequence derived from human genome
SRALSRRYLRRLLLLLL

SEQ ID NO: 9210 - protein, 17 aa, Artificial Sequence
  Quasi-synthetic sequence derived from human genome
RVIRLARIGRILRLIRG

SEQ ID NO: 9211 - protein, 17 aa, Artificial Sequence
  Quasi-synthetic sequence derived from human genome
LVIFLIWRCFLRNKTRR

SEQ ID NO: 9212 - protein, 17 aa, Artificial Sequence
  Quasi-synthetic sequence derived from human genome
VVKILRVLRVLRPLRAI

SEQ ID NO: 9213 - protein, 17 aa, Artificial Sequence
  Quasi-synthetic sequence derived from human genome
IYLRLLVKLYRFLARRT

SEQ ID NO: 9214 - protein, 17 aa, Artificial Sequence
  Quasi-synthetic sequence derived from human genome
LFAVFLILLLMYRMKKK

SEQ ID NO: 9215 - protein, 17 aa, Artificial Sequence
  Quasi-synthetic sequence derived from human genome
WVFILFRKAVFQRLKLW

SEQ ID NO: 9216 - protein, 17 aa, Artificial Sequence
  Quasi-synthetic sequence derived from human genome
MRFRIYKRKVLILTLVV

SEQ ID NO: 9217 - protein, 17 aa, Artificial Sequence
  Quasi-synthetic sequence derived from human genome
VHYWKKVLPLLKIIKKK

SEQ ID NO: 9218 - protein, 17 aa, Artificial Sequence
  Quasi-synthetic sequence derived from human genome
RLTWKLLLLRRPLYRNL

SEQ ID NO: 9219 - protein, 17 aa, Artificial Sequence
  Quasi-synthetic sequence derived from human genome
IVFIIIVLYMLRFKKYK

SEQ ID NO: 9220 - protein, 17 aa, Artificial Sequence
  Quasi-synthetic sequence derived from human genome
RISKFRRLRQLLRRRKK

SEQ ID NO: 9221 - protein, 17 aa, Artificial Sequence
  Quasi-synthetic sequence derived from human genome
RFCLLLRLLRQLLTLLR

SEQ ID NO: 9222 - protein, 17 aa, Artificial Sequence
  Quasi-synthetic sequence derived from human genome
LLKKRKWPLKGWHKRYF

SEQ ID NO: 9223 - protein, 17 aa, Artificial Sequence
  Quasi-synthetic sequence derived from human genome
LKYLLLGRWRKKHLTFR

SEQ ID NO: 9224 - protein, 17 aa, Artificial Sequence
  Quasi-synthetic sequence derived from human genome
RVKKLPMILALHLKRFK

SEQ ID NO: 9225 - protein, 17 aa, Artificial Sequence
  Quasi-synthetic sequence derived from human genome
RSRKLGIFRRCWLVFKK

SEQ ID NO: 9226 - protein, 17 aa, Artificial Sequence
  Quasi-synthetic sequence derived from human genome
RRKARRLLKTVLMILLA

SEQ ID NO: 9227 - protein, 17 aa, Artificial Sequence
  Quasi-synthetic sequence derived from human genome
VVRRVFGRIRRFFSRRR

SEQ ID NO: 9228 - protein, 17 aa, Artificial Sequence
  Quasi-synthetic sequence derived from human genome
LVRLLRLIILIRIFHLL

SEQ ID NO: 9229 - protein, 17 aa, Artificial Sequence
  Quasi-synthetic sequence derived from human genome
WLLKLGGRVKTWKRRWF

SEQ ID NO: 9230 - protein, 17 aa, Artificial Sequence
  Quasi-synthetic sequence derived from human genome
GLKVLFKKTHRILRRLF

SEQ ID NO: 9231 - protein, 17 aa, Artificial Sequence
  Quasi-synthetic sequence derived from human genome
RRRLIPHPRRLWPFVRR

SEQ ID NO: 9232 - protein, 17 aa, Artificial Sequence
  Quasi-synthetic sequence derived from human genome
RISITFFRLFRVMRLVK

SEQ ID NO: 9233 - protein, 17 aa, Artificial Sequence
  Quasi-synthetic sequence derived from human genome
LLFQVIRLYQRRRWMIR

SEQ ID NO: 9234 - protein, 17 aa, Artificial Sequence
  Quasi-synthetic sequence derived from human genome
FVLVLLALRLRRWHKSR

SEQ ID NO: 9235 - protein, 17 aa, Artificial Sequence
  Quasi-synthetic sequence derived from human genome
RWRWWQRLLPWRLLQAR

SEQ ID NO: 9236 - protein, 17 aa, Artificial Sequence
  Quasi-synthetic sequence derived from human genome
LLMVLRCLRPLRIFKLV

SEQ ID NO: 9237 - protein, 17 aa, Artificial Sequence
  Quasi-synthetic sequence derived from human genome
RSIVLALRLRKRFLNFF

SEQ ID NO: 9238 - protein, 17 aa, Artificial Sequence
  Quasi-synthetic sequence derived from human genome
LKQFTKILRRKRLLPKR

SEQ ID NO: 9239 - protein, 17 aa, Artificial Sequence
  Quasi-synthetic sequence derived from human genome
LRVLRVLRPLKTIKRLP

SEQ ID NO: 9240 - protein, 17 aa, Artificial Sequence
  Quasi-synthetic sequence derived from human genome
KLLAKKRVVRMLLVIVV

SEQ ID NO: 9241 - protein, 17 aa, Artificial Sequence
  Quasi-synthetic sequence derived from human genome
FQKLLKLFYIKKLKPLY

SEQ ID NO: 9242 - protein, 17 aa, Artificial Sequence
  Quasi-synthetic sequence derived from human genome
KTIRGWLLRKKYLRMRK

SEQ ID NO: 9243 - protein, 17 aa, Artificial Sequence
  Quasi-synthetic sequence derived from human genome
KILRVLRVLRPLRAINR

SEQ ID NO: 9244 - protein, 17 aa, Artificial Sequence
  Quasi-synthetic sequence derived from human genome
RKAPLWLRAKFQRLLFK

SEQ ID NO: 9245 - protein, 17 aa, Artificial Sequence
  Quasi-synthetic sequence derived from human genome
IILMVFSIWLYRHRKKR

SEQ ID NO: 9246 - protein, 17 aa, Artificial Sequence
  Quasi-synthetic sequence derived from human genome
LVLRVLRALRILYVMRL

SEQ ID NO: 9247 - protein, 17 aa, Artificial Sequence
  Quasi-synthetic sequence derived from human genome
LKFHIRRFIFLFFILVI

SEQ ID NO: 9248 - protein, 17 aa, Artificial Sequence
  Quasi-synthetic sequence derived from human genome
FIVVLRPLQLLRLFKLK

SEQ ID NO: 9249 - protein, 17 aa, Artificial Sequence
  Quasi-synthetic sequence derived from human genome
WLLRRRRWAALLVLGLL

SEQ ID NO: 9250 - protein, 17 aa, Artificial Sequence
  Quasi-synthetic sequence derived from human genome
VVMKFFRWVRRAWQRII

SEQ ID NO: 9251 - protein, 17 aa, Artificial Sequence
  Quasi-synthetic sequence derived from human genome
LRIARFRFRAFHFLNRF

SEQ ID NO: 9252 - protein, 17 aa, Artificial Sequence
  Quasi-synthetic sequence derived from human genome
KLLRRRFRLLLALAVVS

SEQ ID NO: 9253 - protein, 17 aa, Artificial Sequence
  Quasi-synthetic sequence derived from human genome
LRVLKLVRFLPALRRQL

SEQ ID NO: 9254 - protein, 17 aa, Artificial Sequence
  Quasi-synthetic sequence derived from human genome
VKVLNINLKRKFIKKRI

SEQ ID NO: 9255 - protein, 17 aa, Artificial Sequence
  Quasi-synthetic sequence derived from human genome
TLLVLILLIVTMRRRKK

SEQ ID NO: 9256 - protein, 17 aa, Artificial Sequence
  Quasi-synthetic sequence derived from human genome
RVMRNLFVRKLYLWPRF

SEQ ID NO: 9257 - protein, 17 aa, Artificial Sequence
  Quasi-synthetic sequence derived from human genome
CRRIVVSRGRLRRLLWI

SEQ ID NO: 9258 - protein, 17 aa, Artificial Sequence
  Quasi-synthetic sequence derived from human genome
VLLVLIFVLRKRIKLTV

SEQ ID NO: 9259 - protein, 17 aa, Artificial Sequence
  Quasi-synthetic sequence derived from human genome
LLYRVRRFDLLKRILKM

SEQ ID NO: 9260 - protein, 17 aa, Artificial Sequence
  Quasi-synthetic sequence derived from human genome
LLLWPTRLRRSFLAWRR

SEQ ID NO: 9261 - protein, 17 aa, Artificial Sequence
  Quasi-synthetic sequence derived from human genome
IARLSRLIFLLRRWAAR

SEQ ID NO: 9262 - protein, 17 aa, Artificial Sequence
  Quasi-synthetic sequence derived from human genome
WRRFKWVIIGLLFLLIL

SEQ ID NO: 9263 - protein, 17 aa, Artificial Sequence
  Quasi-synthetic sequence derived from human genome
MLFKKKKTRKLKIALAL

SEQ ID NO: 9264 - protein, 17 aa, Artificial Sequence
  Quasi-synthetic sequence derived from human genome
LLKLNQLKFRKKKLRFG

SEQ ID NO: 9265 - protein, 17 aa, Artificial Sequence
  Quasi-synthetic sequence derived from human genome
MIERRKRWRTIKLLLRR

SEQ ID NO: 9266 - protein, 17 aa, Artificial Sequence
  Quasi-synthetic sequence derived from human genome
MKLLKLRRNIVKLSLYR

SEQ ID NO: 9267 - protein, 17 aa, Artificial Sequence
  Quasi-synthetic sequence derived from human genome
YIFWKRYRFKLIAFMVI

SEQ ID NO: 9268 - protein, 17 aa, Artificial Sequence
  Quasi-synthetic sequence derived from human genome
WKVLKVVAKVIRALLRI

SEQ ID NO: 9269 - protein, 17 aa, Artificial Sequence
  Quasi-synthetic sequence derived from human genome
WPFLRSFRVLRVFKLAK

SEQ ID NO: 9270 - protein, 17 aa, Artificial Sequence
  Quasi-synthetic sequence derived from human genome
RVLLRFQRKLSVLLLLL

SEQ ID NO: 9271 - protein, 17 aa, Artificial Sequence
  Quasi-synthetic sequence derived from human genome
RRLRAIYTIMRWFRRHK

SEQ ID NO: 9272 - protein, 17 aa, Artificial Sequence
  Quasi-synthetic sequence derived from human genome
KFANFLMKVLKKKIKRV

SEQ ID NO: 9273 - protein, 17 aa, Artificial Sequence
  Quasi-synthetic sequence derived from human genome
KRWLGKLRRKRRWRRAR

SEQ ID NO: 9274 - protein, 17 aa, Artificial Sequence
  Quasi-synthetic sequence derived from human genome
WKTSRTFFYWRLRRLLL

SEQ ID NO: 9275 - protein, 17 aa, Artificial Sequence
  Quasi-synthetic sequence derived from human genome
KFRRRTCIILALFILFI

SEQ ID NO: 9276 - protein, 17 aa, Artificial Sequence
  Quasi-synthetic sequence derived from human genome
HRLCKLLFFRIRPIFVF

SEQ ID NO: 9277 - protein, 17 aa, Artificial Sequence
  Quasi-synthetic sequence derived from human genome
LGSLRWCGRRRLRWRLL

SEQ ID NO: 9278 - protein, 17 aa, Artificial Sequence
  Quasi-synthetic sequence derived from human genome
VLLCCFCSFLRRRLKRR

SEQ ID NO: 9279 - protein, 17 aa, Artificial Sequence
  Quasi-synthetic sequence derived from human genome
RLRFLKLKRQTKVLLTL

SEQ ID NO: 9280 - protein, 17 aa, Artificial Sequence
  Quasi-synthetic sequence derived from human genome
LRFSVVKRGRKKLLYIF

SEQ ID NO: 9281 - protein, 17 aa, Artificial Sequence
  Quasi-synthetic sequence derived from human genome
RWFLSPRWILQFRRWAR

SEQ ID NO: 9282 - protein, 17 aa, Artificial Sequence
  Quasi-synthetic sequence derived from human genome
ARRRRRACIALFLVLLF

SEQ ID NO: 9283 - protein, 17 aa, Artificial Sequence
  Quasi-synthetic sequence derived from human genome
WLLLGALLWMWWRRNRR

SEQ ID NO: 9284 - protein, 17 aa, Artificial Sequence
  Quasi-synthetic sequence derived from human genome
KKKKKRQCFAFLIYFRL

SEQ ID NO: 9285 - protein, 17 aa, Artificial Sequence
  Quasi-synthetic sequence derived from human genome
MLIFLRNRIRVAIILLK

SEQ ID NO: 9286 - protein, 17 aa, Artificial Sequence
  Quasi-synthetic sequence derived from human genome
VILMGFSIWLYWRRKKR

SEQ ID NO: 9287 - protein, 17 aa, Artificial Sequence
  Quasi-synthetic sequence derived from human genome
IRKVYGRCMWYRLRLLK

SEQ ID NO: 9288 - protein, 17 aa, Artificial Sequence
  Quasi-synthetic sequence derived from human genome
LRRKLYIHRVTLRKLLP

SEQ ID NO: 9289 - protein, 17 aa, Artificial Sequence
  Quasi-synthetic sequence derived from human genome
IRIRKLTLKRQRKLVPL

SEQ ID NO: 9290 - protein, 17 aa, Artificial Sequence
  Quasi-synthetic sequence derived from human genome
FRKLMRWILILVIALWF

SEQ ID NO: 9291 - protein, 17 aa, Artificial Sequence
  Quasi-synthetic sequence derived from human genome
RCKRGKRHWKKLWFVIK

SEQ ID NO: 9292 - protein, 17 aa, Artificial Sequence
  Quasi-synthetic sequence derived from human genome
LGVLRVLRLLRTLRPLR

SEQ ID NO: 9293 - protein, 17 aa, Artificial Sequence
  Quasi-synthetic sequence derived from human genome
RIIILKIVHRRIINRFH

SEQ ID NO: 9294 - protein, 17 aa, Artificial Sequence
  Quasi-synthetic sequence derived from human genome
LWIRWKCRRLRIREAWL

SEQ ID NO: 9295 - protein, 17 aa, Artificial Sequence
  Quasi-synthetic sequence derived from human genome
LRFLKLRRERRALLCLL

SEQ ID NO: 9296 - protein, 17 aa, Artificial Sequence
  Quasi-synthetic sequence derived from human genome
WWLKLRPLMKILAKYKA

SEQ ID NO: 9297 - protein, 17 aa, Artificial Sequence
  Quasi-synthetic sequence derived from human genome
KLGLLEFKILWKKLKKW

SEQ ID NO: 9298 - protein, 17 aa, Artificial Sequence
  Quasi-synthetic sequence derived from human genome
LCFIFICYFKIYIRLKR

SEQ ID NO: 9299 - protein, 17 aa, Artificial Sequence
  Quasi-synthetic sequence derived from human genome
SRLHMILKPFMLRRIKK

SEQ ID NO: 9300 - protein, 17 aa, Artificial Sequence
  Quasi-synthetic sequence derived from human genome
RRNLLRLYFILLLIIFL

SEQ ID NO: 9301 - protein, 17 aa, Artificial Sequence
  Quasi-synthetic sequence derived from human genome
LLILLIGTWALFFRKRR

SEQ ID NO: 9302 - protein, 17 aa, Artificial Sequence
  Quasi-synthetic sequence derived from human genome
YRVVLRRWKSLKLPKKR

SEQ ID NO: 9303 - protein, 17 aa, Artificial Sequence
  Quasi-synthetic sequence derived from human genome
MRKKLILFFKRRNHARK

SEQ ID NO: 9304 - protein, 17 aa, Artificial Sequence
  Quasi-synthetic sequence derived from human genome
RRKSWRLEFLFLRRRCF

SEQ ID NO: 9305 - protein, 17 aa, Artificial Sequence
  Quasi-synthetic sequence derived from human genome
LRLIILIRIFHLLHQKR

SEQ ID NO: 9306 - protein, 17 aa, Artificial Sequence
  Quasi-synthetic sequence derived from human genome
RKGIVRVVFFPFFFRWW

SEQ ID NO: 9307 - protein, 17 aa, Artificial Sequence
  Quasi-synthetic sequence derived from human genome
LLLLLLFLILRHRRQGK

SEQ ID NO: 9308 - protein, 17 aa, Artificial Sequence
  Quasi-synthetic sequence derived from human genome
RLWVLYKGVLKRLILLY

SEQ ID NO: 9309 - protein, 17 aa, Artificial Sequence
  Quasi-synthetic sequence derived from human genome
RPHLLKKKILGRVWWLM

SEQ ID NO: 9310 - protein, 17 aa, Artificial Sequence
  Quasi-synthetic sequence derived from human genome
RIKGKRRRKKLILAKKF

SEQ ID NO: 9311 - protein, 17 aa, Artificial Sequence
  Quasi-synthetic sequence derived from human genome
LVKLHIKRHYHKKFWKL

SEQ ID NO: 9312 - protein, 17 aa, Artificial Sequence
  Quasi-synthetic sequence derived from human genome
LFIIPKKLMIFLRTVIR

SEQ ID NO: 9313 - protein, 17 aa, Artificial Sequence
  Quasi-synthetic sequence derived from human genome
RKRTLKVLTFLVLFIFL

SEQ ID NO: 9314 - protein, 17 aa, Artificial Sequence
  Quasi-synthetic sequence derived from human genome
LLPPKRRLLPRVRLLPL

SEQ ID NO: 9315 - protein, 17 aa, Artificial Sequence
  Quasi-synthetic sequence derived from human genome
QFFRILRIFKLIAPKLL

SEQ ID NO: 9316 - protein, 17 aa, Artificial Sequence
  Quasi-synthetic sequence derived from human genome
RKKMVRRVVCILVWLLA

SEQ ID NO: 9317 - protein, 17 aa, Artificial Sequence
  Quasi-synthetic sequence derived from human genome
PPRRILFIKRFIIYSIR

SEQ ID NO: 9318 - protein, 17 aa, Artificial Sequence
  Quasi-synthetic sequence derived from human genome
LLVFILWKCGFFKRNKK

SEQ ID NO: 9319 - protein, 17 aa, Artificial Sequence
  Quasi-synthetic sequence derived from human genome
KRWFAFKMMMAKKWAKF

SEQ ID NO: 9320 - protein, 17 aa, Artificial Sequence
  Quasi-synthetic sequence derived from human genome
WRKRCLYLFVLLLLIIL

SEQ ID NO: 9321 - protein, 17 aa, Artificial Sequence
  Quasi-synthetic sequence derived from human genome
KLKRKYWWKNCKMMIML

SEQ ID NO: 9322 - protein, 17 aa, Artificial Sequence
  Quasi-synthetic sequence derived from human genome
FRMKLRNLFTKFIRKFG

SEQ ID NO: 9323 - protein, 17 aa, Artificial Sequence
  Quasi-synthetic sequence derived from human genome
VTFLLKIKRTRKGFRLL

SEQ ID NO: 9324 - protein, 17 aa, Artificial Sequence
  Quasi-synthetic sequence derived from human genome
WVKRLFLQKLPKLLCMK

SEQ ID NO: 9325 - protein, 17 aa, Artificial Sequence
  Quasi-synthetic sequence derived from human genome
RKVRIFRFVTGKLMRVF

SEQ ID NO: 9326 - protein, 17 aa, Artificial Sequence
  Quasi-synthetic sequence derived from human genome
INSLKKLVLRKLRRKAL

SEQ ID NO: 9327 - protein, 17 aa, Artificial Sequence
  Quasi-synthetic sequence derived from human genome
VLRKFFLRIGVVYKIWI

SEQ ID NO: 9328 - protein, 17 aa, Artificial Sequence
  Quasi-synthetic sequence derived from human genome
LLLLRWRRPALHRPIKV

SEQ ID NO: 9329 - protein, 17 aa, Artificial Sequence
  Quasi-synthetic sequence derived from human genome
KWIARLRHIKRLRQRIC

SEQ ID NO: 9330 - protein, 17 aa, Artificial Sequence
  Quasi-synthetic sequence derived from human genome
FIIWLARRLKKGKKSKR

SEQ ID NO: 9331 - protein, 17 aa, Artificial Sequence
  Quasi-synthetic sequence derived from human genome
WVFRLKRRKRIARRLVD

SEQ ID NO: 9332 - protein, 17 aa, Artificial Sequence
  Quasi-synthetic sequence derived from human genome
MKKFAVRRFFSVYLRRK

SEQ ID NO: 9333 - protein, 17 aa, Artificial Sequence
  Quasi-synthetic sequence derived from human genome
IKSLKIKYRHCLIKKFL

SEQ ID NO: 9334 - protein, 17 aa, Artificial Sequence
  Quasi-synthetic sequence derived from human genome
KQRLSKKLRRKLQMWLW

SEQ ID NO: 9335 - protein, 17 aa, Artificial Sequence
  Quasi-synthetic sequence derived from human genome
RIRFSKLLLKILFYISI

SEQ ID NO: 9336 - protein, 17 aa, Artificial Sequence
  Quasi-synthetic sequence derived from human genome
YLIKWIWTHLCKKKMRR

SEQ ID NO: 9337 - protein, 17 aa, Artificial Sequence
  Quasi-synthetic sequence derived from human genome
VKKKLKLIRVLGLFMGL

SEQ ID NO: 9338 - protein, 17 aa, Artificial Sequence
  Quasi-synthetic sequence derived from human genome
VRWRMRKLKYKHLAFLA

SEQ ID NO: 9339 - protein, 17 aa, Artificial Sequence
  Quasi-synthetic sequence derived from human genome
KKFLSRPALPFILRLLR

SEQ ID NO: 9340 - protein, 17 aa, Artificial Sequence
  Quasi-synthetic sequence derived from human genome
RLLFLFSRMLLVAKRRG

SEQ ID NO: 9341 - protein, 17 aa, Artificial Sequence
  Quasi-synthetic sequence derived from human genome
RILINLMKYLQKWKRYR

SEQ ID NO: 9342 - protein, 17 aa, Artificial Sequence
  Quasi-synthetic sequence derived from human genome
FWKLVNKKWMLTLLRII

SEQ ID NO: 9343 - protein, 17 aa, Artificial Sequence
  Quasi-synthetic sequence derived from human genome
LKLICFLIPFLLSLKKK

SEQ ID NO: 9344 - protein, 17 aa, Artificial Sequence
  Quasi-synthetic sequence derived from human genome
FFRKLLVNKSIRQRRRF

SEQ ID NO: 9345 - protein, 17 aa, Artificial Sequence
  Quasi-synthetic sequence derived from human genome
MRVLRIARVLKLLKMAV

SEQ ID NO: 9346 - protein, 17 aa, Artificial Sequence
  Quasi-synthetic sequence derived from human genome
RIRVLVIRKLVRSVGRL

SEQ ID NO: 9347 - protein, 17 aa, Artificial Sequence
  Quasi-synthetic sequence derived from human genome
RVIRLARIGRVLRLIRG

SEQ ID NO: 9348 - protein, 17 aa, Artificial Sequence
  Quasi-synthetic sequence derived from human genome
LVLLLAAYFFRFRKQRK

SEQ ID NO: 9349 - protein, 17 aa, Artificial Sequence
  Quasi-synthetic sequence derived from human genome
KVILAIRRAKNLRRLLY

SEQ ID NO: 9350 - protein, 17 aa, Artificial Sequence
  Quasi-synthetic sequence derived from human genome
LYRRLLLTKLFIRGWGR

SEQ ID NO: 9351 - protein, 17 aa, Artificial Sequence
  Quasi-synthetic sequence derived from human genome
KRLRCRRKTVLVLMCIL

SEQ ID NO: 9352 - protein, 17 aa, Artificial Sequence
  Quasi-synthetic sequence derived from human genome
RRKLLLFKTFSRKVVVV

SEQ ID NO: 9353 - protein, 17 aa, Artificial Sequence
  Quasi-synthetic sequence derived from human genome
RRLPKLRKRMRKMCLTF

SEQ ID NO: 9354 - protein, 17 aa, Artificial Sequence
  Quasi-synthetic sequence derived from human genome
LLFLCLLPLIVKHIRKK

SEQ ID NO: 9355 - protein, 17 aa, Artificial Sequence
  Quasi-synthetic sequence derived from human genome
IKWMIKIRKRYLKRRGQ

SEQ ID NO: 9356 - protein, 17 aa, Artificial Sequence
  Quasi-synthetic sequence derived from human genome
KNWPWMRLFFKIKPLVK

SEQ ID NO: 9357 - protein, 17 aa, Artificial Sequence
  Quasi-synthetic sequence derived from human genome
FFRLQKFLRRTQFLLFF

SEQ ID NO: 9358 - protein, 17 aa, Artificial Sequence
  Quasi-synthetic sequence derived from human genome
IRMRRIVFAGVILFRLL

SEQ ID NO: 9359 - protein, 17 aa, Artificial Sequence
  Quasi-synthetic sequence derived from human genome
TITVITLLIFLRRRLRK

SEQ ID NO: 9360 - protein, 17 aa, Artificial Sequence
  Quasi-synthetic sequence derived from human genome
RRMGAVIKIRFFKIMLV

SEQ ID NO: 9361 - protein, 17 aa, Artificial Sequence
  Quasi-synthetic sequence derived from human genome
RAFVKRVIMSRFFKIIM

SEQ ID NO: 9362 - protein, 17 aa, Artificial Sequence
  Quasi-synthetic sequence derived from human genome
RLARQYLLPLLRRLARR

SEQ ID NO: 9363 - protein, 17 aa, Artificial Sequence
  Quasi-synthetic sequence derived from human genome
CRVIFLNRKILLIRPKM

SEQ ID NO: 9364 - protein, 17 aa, Artificial Sequence
  Quasi-synthetic sequence derived from human genome
RKQKTINRFLMRKRLLF

SEQ ID NO: 9365 - protein, 17 aa, Artificial Sequence
  Quasi-synthetic sequence derived from human genome
FRLKICYFMRYWILKFP

SEQ ID NO: 9366 - protein, 17 aa, Artificial Sequence
  Quasi-synthetic sequence derived from human genome
KLMRKYTVLRLMIRQRL

SEQ ID NO: 9367 - protein, 17 aa, Artificial Sequence
  Quasi-synthetic sequence derived from human genome
IFLGVVLVMKKRKLAKK

SEQ ID NO: 9368 - protein, 17 aa, Artificial Sequence
  Quasi-synthetic sequence derived from human genome
KRKHFRLVLRLVLRGGR

SEQ ID NO: 9369 - protein, 17 aa, Artificial Sequence
  Quasi-synthetic sequence derived from human genome
VILHKKRYIYRKIKGWR

SEQ ID NO: 9370 - protein, 17 aa, Artificial Sequence
  Quasi-synthetic sequence derived from human genome
MLRVLCLLRPWRPLRAR

SEQ ID NO: 9371 - protein, 17 aa, Artificial Sequence
  Quasi-synthetic sequence derived from human genome
FRFIFALRLSKKQKKKK

SEQ ID NO: 9372 - protein, 17 aa, Artificial Sequence
  Quasi-synthetic sequence derived from human genome
RHLMKVKLKKYTKFLFV

SEQ ID NO: 9373 - protein, 17 aa, Artificial Sequence
  Quasi-synthetic sequence derived from human genome
LPRLCIRKFFPKKKCFV

SEQ ID NO: 9374 - protein, 17 aa, Artificial Sequence
  Quasi-synthetic sequence derived from human genome
RRRKTVRLLLANLVIFL

SEQ ID NO: 9375 - protein, 17 aa, Artificial Sequence
  Quasi-synthetic sequence derived from human genome
VLRSFRLLRVFKLAKSW

SEQ ID NO: 9376 - protein, 17 aa, Artificial Sequence
  Quasi-synthetic sequence derived from human genome
WLLREQKRKKKLRKLLK

SEQ ID NO: 9377 - protein, 17 aa, Artificial Sequence
  Quasi-synthetic sequence derived from human genome
LLFLHLKRRVRSVILVI

SEQ ID NO: 9378 - protein, 17 aa, Artificial Sequence
  Quasi-synthetic sequence derived from human genome
RRRARLRFMKQLRLHPL

SEQ ID NO: 9379 - protein, 17 aa, Artificial Sequence
  Quasi-synthetic sequence derived from human genome
MKRTLIKLWRRKVILHT

SEQ ID NO: 9380 - protein, 17 aa, Artificial Sequence
  Quasi-synthetic sequence derived from human genome
LIFLTYVLSFIFRKWRK

SEQ ID NO: 9381 - protein, 17 aa, Artificial Sequence
  Quasi-synthetic sequence derived from human genome
RLLIYKQGRKLFPIKLK

SEQ ID NO: 9382 - protein, 17 aa, Artificial Sequence
  Quasi-synthetic sequence derived from human genome
LLLLLLLLLYKYKQKPK

SEQ ID NO: 9383 - protein, 17 aa, Artificial Sequence
  Quasi-synthetic sequence derived from human genome
VGLCLRLLLFFRFKRTL

SEQ ID NO: 9384 - protein, 17 aa, Artificial Sequence
  Quasi-synthetic sequence derived from human genome
VFRCVRLLRIFKVTRHW

SEQ ID NO: 9385 - protein, 17 aa, Artificial Sequence
  Quasi-synthetic sequence derived from human genome
RWKILWFIPFRQRQPLR

SEQ ID NO: 9386 - protein, 17 aa, Artificial Sequence
  Quasi-synthetic sequence derived from human genome
RLSRLIFLLRRWAARHV

SEQ ID NO: 9387 - protein, 17 aa, Artificial Sequence
  Quasi-synthetic sequence derived from human genome
LLRKRYRHRPCRLQFLL

SEQ ID NO: 9388 - protein, 17 aa, Artificial Sequence
  Quasi-synthetic sequence derived from human genome
LVGVLILFMFRRLRQFR

SEQ ID NO: 9389 - protein, 17 aa, Artificial Sequence
  Quasi-synthetic sequence derived from human genome
AIFIKMCLWLWKQFLKR

SEQ ID NO: 9390 - protein, 17 aa, Artificial Sequence
  Quasi-synthetic sequence derived from human genome
LLCLCLILLRVRSCRRK

SEQ ID NO: 9391 - protein, 17 aa, Artificial Sequence
  Quasi-synthetic sequence derived from human genome
YVRRKSIKKKRALRRFL

SEQ ID NO: 9392 - protein, 17 aa, Artificial Sequence
  Quasi-synthetic sequence derived from human genome
SRRRRRLALFLARKHLK

SEQ ID NO: 9393 - protein, 17 aa, Artificial Sequence
  Quasi-synthetic sequence derived from human genome
KRKKNVLRLCCKKLKIF

SEQ ID NO: 9394 - protein, 17 aa, Artificial Sequence
  Quasi-synthetic sequence derived from human genome
LLFHFCIFHRRKMKAIR

SEQ ID NO: 9395 - protein, 17 aa, Artificial Sequence
  Quasi-synthetic sequence derived from human genome
LWRLFRGKKWNVLRQRV

SEQ ID NO: 9396 - protein, 17 aa, Artificial Sequence
  Quasi-synthetic sequence derived from human genome
KIMVRRCLVTLRPFRLF

SEQ ID NO: 9397 - protein, 17 aa, Artificial Sequence
  Quasi-synthetic sequence derived from human genome
LRVLKLVRFMPALRRQL

SEQ ID NO: 9398 - protein, 17 aa, Artificial Sequence
  Quasi-synthetic sequence derived from human genome
RKVFLRLLPQLLRMHVR

SEQ ID NO: 9399 - protein, 17 aa, Artificial Sequence
  Quasi-synthetic sequence derived from human genome
FLALCALRFKRKIIGLK

SEQ ID NO: 9400 - protein, 17 aa, Artificial Sequence
  Quasi-synthetic sequence derived from human genome
RKKKCKICKLRSFFRKL

SEQ ID NO: 9401 - protein, 17 aa, Artificial Sequence
  Quasi-synthetic sequence derived from human genome
RLAVIPWGVRKLLRWVR

SEQ ID NO: 9402 - protein, 17 aa, Artificial Sequence
  Quasi-synthetic sequence derived from human genome
LSVLRSFRLLRVFKLAK

SEQ ID NO: 9403 - protein, 17 aa, Artificial Sequence
  Quasi-synthetic sequence derived from human genome
FILIWRTKKLKHTFLLI

SEQ ID NO: 9404 - protein, 17 aa, Artificial Sequence
  Quasi-synthetic sequence derived from human genome
IRRVRNKLIVMRWKVNR

SEQ ID NO: 9405 - protein, 17 aa, Artificial Sequence
  Quasi-synthetic sequence derived from human genome
RHLKTKRILRRNLLALI

SEQ ID NO: 9406 - protein, 17 aa, Artificial Sequence
  Quasi-synthetic sequence derived from human genome
IPLSRRFRSVKLWFVIR

SEQ ID NO: 9407 - protein, 17 aa, Artificial Sequence
  Quasi-synthetic sequence derived from human genome
LKQNIFLFYVKLRWLLK

SEQ ID NO: 9408 - protein, 17 aa, Artificial Sequence
  Quasi-synthetic sequence derived from human genome
TILIIRRLHKVLRPFLL

SEQ ID NO: 9409 - protein, 17 aa, Artificial Sequence
  Quasi-synthetic sequence derived from human genome
IRLVRVFRIFKLSRHSK

SEQ ID NO: 9410 - protein, 17 aa, Artificial Sequence
  Quasi-synthetic sequence derived from human genome
LRGSGRKLWKRFFCFLR

SEQ ID NO: 9411 - protein, 17 aa, Artificial Sequence
  Quasi-synthetic sequence derived from human genome
FLIKMGGKIKTWKKRWF

SEQ ID NO: 9412 - protein, 17 aa, Artificial Sequence
  Quasi-synthetic sequence derived from human genome
MRRAFHIRLIARRLGWL

SEQ ID NO: 9413 - protein, 17 aa, Artificial Sequence
  Quasi-synthetic sequence derived from human genome
RRRTTRRWKRWFKFRKR

SEQ ID NO: 9414 - protein, 17 aa, Artificial Sequence
  Quasi-synthetic sequence derived from human genome
RLLLLLGYRRRCPPLLR

SEQ ID NO: 9415 - protein, 17 aa, Artificial Sequence
  Quasi-synthetic sequence derived from human genome
WLRIARRALRFVLSKHW

SEQ ID NO: 9416 - protein, 17 aa, Artificial Sequence
  Quasi-synthetic sequence derived from human genome
WPQLRLLLWKNLTFRRR

SEQ ID NO: 9417 - protein, 17 aa, Artificial Sequence
  Quasi-synthetic sequence derived from human genome
PWVNILKISFKRKKFFI

SEQ ID NO: 9418 - protein, 17 aa, Artificial Sequence
  Quasi-synthetic sequence derived from human genome
MLLIILVYKAKKRCIFF

SEQ ID NO: 9419 - protein, 17 aa, Artificial Sequence
  Quasi-synthetic sequence derived from human genome
WLQLLRICRVLRSLKLL

SEQ ID NO: 9420 - protein, 17 aa, Artificial Sequence
  Quasi-synthetic sequence derived from human genome
LLRCQCRRRRRRRPLWR

SEQ ID NO: 9421 - protein, 17 aa, Artificial Sequence
  Quasi-synthetic sequence derived from human genome
FLVVLLAILLYLLRLRR

SEQ ID NO: 9422 - protein, 17 aa, Artificial Sequence
  Quasi-synthetic sequence derived from human genome
RISSAFFRLFRVMRLIK

SEQ ID NO: 9423 - protein, 17 aa, Artificial Sequence
  Quasi-synthetic sequence derived from human genome
KKKYKAIRLIFVIMAVF

SEQ ID NO: 9424 - protein, 17 aa, Artificial Sequence
  Quasi-synthetic sequence derived from human genome
RKVLELLKVAWKRRLIF

SEQ ID NO: 9425 - protein, 17 aa, Artificial Sequence
  Quasi-synthetic sequence derived from human genome
KLKWWIGYLQRKFKRNL

SEQ ID NO: 9426 - protein, 17 aa, Artificial Sequence
  Quasi-synthetic sequence derived from human genome
YLKLRHWQWWRLFTKVK

SEQ ID NO: 9427 - protein, 17 aa, Artificial Sequence
  Quasi-synthetic sequence derived from human genome
LLALVAILWKLGFFKRK

SEQ ID NO: 9428 - protein, 17 aa, Artificial Sequence
  Quasi-synthetic sequence derived from human genome
LIRKCSRFNFLRFLIRH

SEQ ID NO: 9429 - protein, 17 aa, Artificial Sequence
  Quasi-synthetic sequence derived from human genome
KWRRKSAYWKALKVFKL

SEQ ID NO: 9430 - protein, 17 aa, Artificial Sequence
  Quasi-synthetic sequence derived from human genome
TKLWKVKKALKMTIFWR

SEQ ID NO: 9431 - protein, 17 aa, Artificial Sequence
  Quasi-synthetic sequence derived from human genome
GWWWARAARLARLRFRR

SEQ ID NO: 9432 - protein, 17 aa, Artificial Sequence
  Quasi-synthetic sequence derived from human genome
LLRKRLRRCIVCIRTRP

SEQ ID NO: 9433 - protein, 17 aa, Artificial Sequence
  Quasi-synthetic sequence derived from human genome
LLGRKRRWSKCKIRVFV

SEQ ID NO: 9434 - protein, 17 aa, Artificial Sequence
  Quasi-synthetic sequence derived from human genome
VRQIFIHKLPLYLRLKR

SEQ ID NO: 9435 - protein, 17 aa, Artificial Sequence
  Quasi-synthetic sequence derived from human genome
VLRRQILLPFRKPLIIF

SEQ ID NO: 9436 - protein, 17 aa, Artificial Sequence
  Quasi-synthetic sequence derived from human genome
LRCVRLLRIFKITRYWN

SEQ ID NO: 9437 - protein, 17 aa, Artificial Sequence
  Quasi-synthetic sequence derived from human genome
LKTFVFFIWRRYWRTLV

SEQ ID NO: 9438 - protein, 17 aa, Artificial Sequence
  Quasi-synthetic sequence derived from human genome
IILLLWKCGFFKRARTR

SEQ ID NO: 9439 - protein, 17 aa, Artificial Sequence
  Quasi-synthetic sequence derived from human genome
RARRRRPLFALLLLCAL

SEQ ID NO: 9440 - protein, 17 aa, Artificial Sequence
  Quasi-synthetic sequence derived from human genome
RGLLLLIPFLILLRKLI

SEQ ID NO: 9441 - protein, 17 aa, Artificial Sequence
  Quasi-synthetic sequence derived from human genome
LVIKARKLPPFFARKLK

SEQ ID NO: 9442 - protein, 17 aa, Artificial Sequence
  Quasi-synthetic sequence derived from human genome
RGTRLRLRQRRRRLLIK

SEQ ID NO: 9443 - protein, 17 aa, Artificial Sequence
  Quasi-synthetic sequence derived from human genome
VLRMAKKRVIVKKLPIV

SEQ ID NO: 9444 - protein, 17 aa, Artificial Sequence
  Quasi-synthetic sequence derived from human genome
LCRLRVRKAIGKYRIKL

SEQ ID NO: 9445 - protein, 17 aa, Artificial Sequence
  Quasi-synthetic sequence derived from human genome
IRRPRLLWAPKGYRLLR

SEQ ID NO: 9446 - protein, 17 aa, Artificial Sequence
  Quasi-synthetic sequence derived from human genome
RLPFRALLQIRAMRKKL

SEQ ID NO: 9447 - protein, 17 aa, Artificial Sequence
  Quasi-synthetic sequence derived from human genome
LKTYLKRFKVMKPKVLR

SEQ ID NO: 9448 - protein, 17 aa, Artificial Sequence
  Quasi-synthetic sequence derived from human genome
KYWRMYVVRRRYKIRRA

SEQ ID NO: 9449 - protein, 17 aa, Artificial Sequence
  Quasi-synthetic sequence derived from human genome
LFLRRRCFLLTFYLWFL

SEQ ID NO: 9450 - protein, 17 aa, Artificial Sequence
  Quasi-synthetic sequence derived from human genome
LMMRRRFLSLKKTAILI

SEQ ID NO: 9451 - protein, 17 aa, Artificial Sequence
  Quasi-synthetic sequence derived from human genome
RGFLKRVFKRKKPQLRL

SEQ ID NO: 9452 - protein, 17 aa, Artificial Sequence
  Quasi-synthetic sequence derived from human genome
LMSFFLLILSLRRHIRR

SEQ ID NO: 9453 - protein, 17 aa, Artificial Sequence
  Quasi-synthetic sequence derived from human genome
ATLFWLLLTLFIRKMKR

SEQ ID NO: 9454 - protein, 17 aa, Artificial Sequence
  Quasi-synthetic sequence derived from human genome
VKGKKVWIGIKKLLMLI

SEQ ID NO: 9455 - protein, 17 aa, Artificial Sequence
  Quasi-synthetic sequence derived from human genome
FLFVNKRLVLRTKLHKL

SEQ ID NO: 9456 - protein, 17 aa, Artificial Sequence
  Quasi-synthetic sequence derived from human genome
RRQLFRTKSKRRFFFRV

SEQ ID NO: 9457 - protein, 17 aa, Artificial Sequence
  Quasi-synthetic sequence derived from human genome
LLIAFIFLIIKSYRKYR

SEQ ID NO: 9458 - protein, 17 aa, Artificial Sequence
  Quasi-synthetic sequence derived from human genome
KFLAKCRKKKKLFAPWR

SEQ ID NO: 9459 - protein, 17 aa, Artificial Sequence
  Quasi-synthetic sequence derived from human genome
MRLWKARVLKLVLKTAK

SEQ ID NO: 9460 - protein, 17 aa, Artificial Sequence
  Quasi-synthetic sequence derived from human genome
IVLLAHRLRRWHKSRLL

SEQ ID NO: 9461 - protein, 17 aa, Artificial Sequence
  Quasi-synthetic sequence derived from human genome
LTILTIWLFKHRRVRFL

SEQ ID NO: 9462 - protein, 17 aa, Artificial Sequence
  Quasi-synthetic sequence derived from human genome
KKAKAIKLILLVVIVFF

SEQ ID NO: 9463 - protein, 17 aa, Artificial Sequence
  Quasi-synthetic sequence derived from human genome
ILLFLAFLLLFLYRRCK

SEQ ID NO: 9464 - protein, 17 aa, Artificial Sequence
  Quasi-synthetic sequence derived from human genome
LVFLCVCFIFRVKTRRK

SEQ ID NO: 9465 - protein, 17 aa, Artificial Sequence
  Quasi-synthetic sequence derived from human genome
RKFGNRIKVLRSRIRFI

SEQ ID NO: 9466 - protein, 17 aa, Artificial Sequence
  Quasi-synthetic sequence derived from human genome
LRRAWKRLQLRLHLYPK

SEQ ID NO: 9467 - protein, 17 aa, Artificial Sequence
  Quasi-synthetic sequence derived from human genome
IRIYKLNRRKRYRCLAL

SEQ ID NO: 9468 - protein, 17 aa, Artificial Sequence
  Quasi-synthetic sequence derived from human genome
ILVVLLAIFLYLLRLRR

SEQ ID NO: 9469 - protein, 17 aa, Artificial Sequence
  Quasi-synthetic sequence derived from human genome
KFKKFDHRYLRKILIRK

SEQ ID NO: 9470 - protein, 17 aa, Artificial Sequence
  Quasi-synthetic sequence derived from human genome
LPLILMHRLRVIMTRRK

SEQ ID NO: 9471 - protein, 17 aa, Artificial Sequence
  Quasi-synthetic sequence derived from human genome
FALKPRMRKIFSRLIYI

SEQ ID NO: 9472 - protein, 17 aa, Artificial Sequence
  Quasi-synthetic sequence derived from human genome
ALLFRIVLKRRLNWIQW

SEQ ID NO: 9473 - protein, 17 aa, Artificial Sequence
  Quasi-synthetic sequence derived from human genome
IKPILRKLPRIKKHLLN

SEQ ID NO: 9474 - protein, 17 aa, Artificial Sequence
  Quasi-synthetic sequence derived from human genome
LVAFVLFLRLRSIRCLR

SEQ ID NO: 9475 - protein, 17 aa, Artificial Sequence
  Quasi-synthetic sequence derived from human genome
YFIMRIVNFPKCRRRRL

SEQ ID NO: 9476 - protein, 17 aa, Artificial Sequence
  Quasi-synthetic sequence derived from human genome
LLKRYLLKRLNLIWNIY

SEQ ID NO: 9477 - protein, 17 aa, Artificial Sequence
  Quasi-synthetic sequence derived from human genome
RTVAKKLVVFRPRLFLL

SEQ ID NO: 9478 - protein, 17 aa, Artificial Sequence
  Quasi-synthetic sequence derived from human genome
RHKFNRLPRVLILHLKR

SEQ ID NO: 9479 - protein, 17 aa, Artificial Sequence
  Quasi-synthetic sequence derived from human genome
WGILKLRHIWNLKLMRW

SEQ ID NO: 9480 - protein, 17 aa, Artificial Sequence
  Quasi-synthetic sequence derived from human genome
WLRRKLRGKRRPVIAFC

SEQ ID NO: 9481 - protein, 17 aa, Artificial Sequence
  Quasi-synthetic sequence derived from human genome
VIGRMRTRLVRKRFLCL

SEQ ID NO: 9482 - protein, 17 aa, Artificial Sequence
  Quasi-synthetic sequence derived from human genome
VFIICIVIAILLYKRKR

SEQ ID NO: 9483 - protein, 17 aa, Artificial Sequence
  Quasi-synthetic sequence derived from human genome
LFILLLVTVLLAARRRR

SEQ ID NO: 9484 - protein, 17 aa, Artificial Sequence
  Quasi-synthetic sequence derived from human genome
LWKVKKALKMTIFWRGL

SEQ ID NO: 9485 - protein, 17 aa, Artificial Sequence
  Quasi-synthetic sequence derived from human genome
VRYRHYFRLLVRTVLLR

SEQ ID NO: 9486 - protein, 17 aa, Artificial Sequence
  Quasi-synthetic sequence derived from human genome
SLIGPRYKLRILRMKLR

SEQ ID NO: 9487 - protein, 17 aa, Artificial Sequence
  Quasi-synthetic sequence derived from human genome
RVLKKNPLKNLRIMLKL

SEQ ID NO: 9488 - protein, 17 aa, Artificial Sequence
  Quasi-synthetic sequence derived from human genome
LLMVACRLRLVKQKLKK

SEQ ID NO: 9489 - protein, 17 aa, Artificial Sequence
  Quasi-synthetic sequence derived from human genome
VRIQRRWRGYRVRKYLF

SEQ ID NO: 9490 - protein, 17 aa, Artificial Sequence
  Quasi-synthetic sequence derived from human genome
LTVLYSLIGRKLWRRRR

SEQ ID NO: 9491 - protein, 17 aa, Artificial Sequence
  Quasi-synthetic sequence derived from human genome
RKRTKVLSLAKRILRFK

SEQ ID NO: 9492 - protein, 17 aa, Artificial Sequence
  Quasi-synthetic sequence derived from human genome
RILRLIRAAKGIRTLLF

SEQ ID NO: 9493 - protein, 17 aa, Artificial Sequence
  Quasi-synthetic sequence derived from human genome
LLVRRRFISLKKATIFV

SEQ ID NO: 9494 - protein, 17 aa, Artificial Sequence
  Quasi-synthetic sequence derived from human genome
FVIVLLALRLWRWHKSR

SEQ ID NO: 9495 - protein, 17 aa, Artificial Sequence
  Quasi-synthetic sequence derived from human genome
RFLRLCRSFYITCRRLR

SEQ ID NO: 9496 - protein, 17 aa, Artificial Sequence
  Quasi-synthetic sequence derived from human genome
SKKMWIKLRSLLRYMVK

SEQ ID NO: 9497 - protein, 17 aa, Artificial Sequence
  Quasi-synthetic sequence derived from human genome
IRKKHLQRPIFRLRCLV

SEQ ID NO: 9498 - protein, 17 aa, Artificial Sequence
  Quasi-synthetic sequence derived from human genome
RLLKKQFFHRALKVMKM

SEQ ID NO: 9499 - protein, 17 aa, Artificial Sequence
  Quasi-synthetic sequence derived from human genome
RLQRALRFLLGRLPWRV

SEQ ID NO: 9500 - protein, 17 aa, Artificial Sequence
  Quasi-synthetic sequence derived from human genome
FLALRLLAYLVLRYRVK

SEQ ID NO: 9501 - protein, 17 aa, Artificial Sequence
  Quasi-synthetic sequence derived from human genome
RQIQKMRKFYFRRIMRM

SEQ ID NO: 9502 - protein, 17 aa, Artificial Sequence
  Quasi-synthetic sequence derived from human genome
KVVVKILKPVKKKKIKR

SEQ ID NO: 9503 - protein, 17 aa, Artificial Sequence
  Quasi-synthetic sequence derived from human genome
LRNRLIRKRFLCLGWGL

SEQ ID NO: 9504 - protein, 17 aa, Artificial Sequence
  Quasi-synthetic sequence derived from human genome
KKRLKPLIPGLRKKLKR

SEQ ID NO: 9505 - protein, 17 aa, Artificial Sequence
  Quasi-synthetic sequence derived from human genome
LRKIWVFLKTAFHARLR

SEQ ID NO: 9506 - protein, 17 aa, Artificial Sequence
  Quasi-synthetic sequence derived from human genome
LKFVVVTRWRFKKAPLL

SEQ ID NO: 9507 - protein, 17 aa, Artificial Sequence
  Quasi-synthetic sequence derived from human genome
VLMFKKRRRRARKYTLV

SEQ ID NO: 9508 - protein, 17 aa, Artificial Sequence
  Quasi-synthetic sequence derived from human genome
WPIQAFVKRKVIIFLKK

SEQ ID NO: 9509 - protein, 17 aa, Artificial Sequence
  Quasi-synthetic sequence derived from human genome
VFINAKIKSLIKLFKKK

SEQ ID NO: 9510 - protein, 17 aa, Artificial Sequence
  Quasi-synthetic sequence derived from human genome
FVVILFIGILFIILRKR

SEQ ID NO: 9511 - protein, 17 aa, Artificial Sequence
  Quasi-synthetic sequence derived from human genome
LLRLLRLSRLIRYIHQW

SEQ ID NO: 9512 - protein, 17 aa, Artificial Sequence
  Quasi-synthetic sequence derived from human genome
MLLKKQLPSVRKLLRRK

SEQ ID NO: 9513 - protein, 17 aa, Artificial Sequence
  Quasi-synthetic sequence derived from human genome
LALKLRLQVLLLARVLR

SEQ ID NO: 9514 - protein, 17 aa, Artificial Sequence
  Quasi-synthetic sequence derived from human genome
RYKPLRRRVIWLIGQWI

SEQ ID NO: 9515 - protein, 17 aa, Artificial Sequence
  Quasi-synthetic sequence derived from human genome
VLFIVFRKKVFRKNYSR

SEQ ID NO: 9516 - protein, 17 aa, Artificial Sequence
  Quasi-synthetic sequence derived from human genome
LLVAMICRRRRRRKKAR

SEQ ID NO: 9517 - protein, 17 aa, Artificial Sequence
  Quasi-synthetic sequence derived from human genome
RPWKRKGRTLFRRLLFQ

SEQ ID NO: 9518 - protein, 17 aa, Artificial Sequence
  Quasi-synthetic sequence derived from human genome
ILILAICGLKLQRRWKR

SEQ ID NO: 9519 - protein, 17 aa, Artificial Sequence
  Quasi-synthetic sequence derived from human genome
GKIRTRLIRKRFLCLGW

SEQ ID NO: 9520 - protein, 17 aa, Artificial Sequence
  Quasi-synthetic sequence derived from human genome
LYAYKMLMAKKWVKFKR

SEQ ID NO: 9521 - protein, 17 aa, Artificial Sequence
  Quasi-synthetic sequence derived from human genome
CFLFLILVFSIIRRRFW

SEQ ID NO: 9522 - protein, 17 aa, Artificial Sequence
  Quasi-synthetic sequence derived from human genome
VLLVLVLLILSMRRHRK

SEQ ID NO: 9523 - protein, 17 aa, Artificial Sequence
  Quasi-synthetic sequence derived from human genome
LIFIRILGILLSKLRTR

SEQ ID NO: 9524 - protein, 17 aa, Artificial Sequence
  Quasi-synthetic sequence derived from human genome
RLFRRLLLAALLLVIVW

SEQ ID NO: 9525 - protein, 17 aa, Artificial Sequence
  Quasi-synthetic sequence derived from human genome
LVKLFKFPCLKRGAKFR

SEQ ID NO: 9526 - protein, 17 aa, Artificial Sequence
  Quasi-synthetic sequence derived from human genome
LKRFKVMKPKVLRSWCR

SEQ ID NO: 9527 - protein, 17 aa, Artificial Sequence
  Quasi-synthetic sequence derived from human genome
KVKLIRLVGIMLLLYVK

SEQ ID NO: 9528 - protein, 17 aa, Artificial Sequence
  Quasi-synthetic sequence derived from human genome
LVVVFVLCRKMISRKKK

SEQ ID NO: 9529 - protein, 17 aa, Artificial Sequence
  Quasi-synthetic sequence derived from human genome
RGLRNKRIGHFLFWFLR

SEQ ID NO: 9530 - protein, 17 aa, Artificial Sequence
  Quasi-synthetic sequence derived from human genome
LLYSKRLITYRLRHLLR

SEQ ID NO: 9531 - protein, 17 aa, Artificial Sequence
  Quasi-synthetic sequence derived from human genome
KRRRRRDILRVQLVRIF

SEQ ID NO: 9532 - protein, 17 aa, Artificial Sequence
  Quasi-synthetic sequence derived from human genome
RRNWKKRWFVLRQSKLM

SEQ ID NO: 9533 - protein, 17 aa, Artificial Sequence
  Quasi-synthetic sequence derived from human genome
KSRKLGIYRRCWLVFRK

SEQ ID NO: 9534 - protein, 17 aa, Artificial Sequence
  Quasi-synthetic sequence derived from human genome
IKHFLRKIIMVHPKVRF

SEQ ID NO: 9535 - protein, 17 aa, Artificial Sequence
  Quasi-synthetic sequence derived from human genome
LLIKKHWLWTRKCFVCK

SEQ ID NO: 9536 - protein, 17 aa, Artificial Sequence
  Quasi-synthetic sequence derived from human genome
RLLKFWKRAGFVPVYLR

SEQ ID NO: 9537 - protein, 17 aa, Artificial Sequence
  Quasi-synthetic sequence derived from human genome
IKLLPLRTFRVFRALKA

SEQ ID NO: 9538 - protein, 17 aa, Artificial Sequence
  Quasi-synthetic sequence derived from human genome
IFILFIIVQLFIMKLRK

SEQ ID NO: 9539 - protein, 17 aa, Artificial Sequence
  Quasi-synthetic sequence derived from human genome
LLKKGKGKRWKNLYFIL

SEQ ID NO: 9540 - protein, 17 aa, Artificial Sequence
  Quasi-synthetic sequence derived from human genome
FKPYVVRLAKLLRKRAK

SEQ ID NO: 9541 - protein, 17 aa, Artificial Sequence
  Quasi-synthetic sequence derived from human genome
KFYLCWKKTLFIIAFIR

SEQ ID NO: 9542 - protein, 17 aa, Artificial Sequence
  Quasi-synthetic sequence derived from human genome
RLLRLSLLWLGLLLVRF

SEQ ID NO: 9543 - protein, 17 aa, Artificial Sequence
  Quasi-synthetic sequence derived from human genome
LRIVVAIRNKLLLITRK

SEQ ID NO: 9544 - protein, 17 aa, Artificial Sequence
  Quasi-synthetic sequence derived from human genome
KLINALRRCFFWRFMFY

SEQ ID NO: 9545 - protein, 17 aa, Artificial Sequence
  Quasi-synthetic sequence derived from human genome
FMKKTFYKRLLLYFIAL

SEQ ID NO: 9546 - protein, 17 aa, Artificial Sequence
  Quasi-synthetic sequence derived from human genome
MFIIILLGVMLTIKRRR

SEQ ID NO: 9547 - protein, 17 aa, Artificial Sequence
  Quasi-synthetic sequence derived from human genome
FLSRFRWRRRLLVISAP

SEQ ID NO: 9548 - protein, 17 aa, Artificial Sequence
  Quasi-synthetic sequence derived from human genome
LLLLVVILIVKKSKLAK

SEQ ID NO: 9549 - protein, 17 aa, Artificial Sequence
  Quasi-synthetic sequence derived from human genome
KKLPMILALHLKRFKYM

SEQ ID NO: 9550 - protein, 17 aa, Artificial Sequence
  Quasi-synthetic sequence derived from human genome
LRKRFGGRRIRLYLSVL

SEQ ID NO: 9551 - protein, 17 aa, Artificial Sequence
  Quasi-synthetic sequence derived from human genome
MKRALMKLWRRRVVLHT

SEQ ID NO: 9552 - protein, 17 aa, Artificial Sequence
  Quasi-synthetic sequence derived from human genome
FFLRKFKNSRFFPGRIR

SEQ ID NO: 9553 - protein, 17 aa, Artificial Sequence
  Quasi-synthetic sequence derived from human genome
RRELRRRTILLLYYLLR

SEQ ID NO: 9554 - protein, 17 aa, Artificial Sequence
  Quasi-synthetic sequence derived from human genome
LKLLRKRSQVWKPKVIR

SEQ ID NO: 9555 - protein, 17 aa, Artificial Sequence
  Quasi-synthetic sequence derived from human genome
LAFIVVKKRINTRFFLK

SEQ ID NO: 9556 - protein, 17 aa, Artificial Sequence
  Quasi-synthetic sequence derived from human genome
RKRFGMKNFKKRWFRLT

SEQ ID NO: 9557 - protein, 17 aa, Artificial Sequence
  Quasi-synthetic sequence derived from human genome
IVKKILAKLKRARSKKL

SEQ ID NO: 9558 - protein, 17 aa, Artificial Sequence
  Quasi-synthetic sequence derived from human genome
KKWRGMKWKKWSIHIVI

SEQ ID NO: 9559 - protein, 17 aa, Artificial Sequence
  Quasi-synthetic sequence derived from human genome
KRMKIIKHFIKIALHCR

SEQ ID NO: 9560 - protein, 17 aa, Artificial Sequence
  Quasi-synthetic sequence derived from human genome
LLFQVIRLYQRRRWTIR

SEQ ID NO: 9561 - protein, 17 aa, Artificial Sequence
  Quasi-synthetic sequence derived from human genome
LHLWPKRLLLPRHLRVF

SEQ ID NO: 9562 - protein, 17 aa, Artificial Sequence
  Quasi-synthetic sequence derived from human genome
LLRLVSAVNRRRMKLLL

SEQ ID NO: 9563 - protein, 17 aa, Artificial Sequence
  Quasi-synthetic sequence derived from human genome
LRALRAIRVLRRLSFLT

SEQ ID NO: 9564 - protein, 17 aa, Artificial Sequence
  Quasi-synthetic sequence derived from human genome
VQVLRLLRALRMLKLGR

SEQ ID NO: 9565 - protein, 17 aa, Artificial Sequence
  Quasi-synthetic sequence derived from human genome
MKKKKKVLVWNRVYKVI

SEQ ID NO: 9566 - protein, 17 aa, Artificial Sequence
  Quasi-synthetic sequence derived from human genome
LQRLKLKCIFCRHRVKR

SEQ ID NO: 9567 - protein, 17 aa, Artificial Sequence
  Quasi-synthetic sequence derived from human genome
LSRAKFWPRRRFNFFVL

SEQ ID NO: 9568 - protein, 17 aa, Artificial Sequence
  Quasi-synthetic sequence derived from human genome
SWKRRVPLLPFLRFSLR

SEQ ID NO: 9569 - protein, 17 aa, Artificial Sequence
  Quasi-synthetic sequence derived from human genome
RLILFLNKLILNKKNVK

SEQ ID NO: 9570 - protein, 17 aa, Artificial Sequence
  Quasi-synthetic sequence derived from human genome
RLWVSRLLRHRKAQLLL

SEQ ID NO: 9571 - protein, 17 aa, Artificial Sequence
  Quasi-synthetic sequence derived from human genome
MRRRSRMLLCFAFLWVL

SEQ ID NO: 9572 - protein, 17 aa, Artificial Sequence
  Quasi-synthetic sequence derived from human genome
LLVILACVLWKKRIKPI

SEQ ID NO: 9573 - protein, 17 aa, Artificial Sequence
  Quasi-synthetic sequence derived from human genome
PRLRPVPPVMWRLFRRR

SEQ ID NO: 9574 - protein, 17 aa, Artificial Sequence
  Quasi-synthetic sequence derived from human genome
MGFLRRLIYRRRPMIYV

SEQ ID NO: 9575 - protein, 17 aa, Artificial Sequence
  Quasi-synthetic sequence derived from human genome
RWLIFRIMLGAGLIKIR

SEQ ID NO: 9576 - protein, 17 aa, Artificial Sequence
  Quasi-synthetic sequence derived from human genome
FHLYRAPYFWIKRRILL

SEQ ID NO: 9577 - protein, 17 aa, Artificial Sequence
  Quasi-synthetic sequence derived from human genome
RRRRPGLLLPGLWLLLL

SEQ ID NO: 9578 - protein, 17 aa, Artificial Sequence
  Quasi-synthetic sequence derived from human genome
KRKARGYLRLVPLFVLL

SEQ ID NO: 9579 - protein, 17 aa, Artificial Sequence
  Quasi-synthetic sequence derived from human genome
ALLVLLLWKMGFFKRAK

SEQ ID NO: 9580 - protein, 17 aa, Artificial Sequence
  Quasi-synthetic sequence derived from human genome
SLKVVRLLRLGRVARKL

SEQ ID NO: 9581 - protein, 17 aa, Artificial Sequence
  Quasi-synthetic sequence derived from human genome
LILILVCAWHWRNRKKK

SEQ ID NO: 9582 - protein, 17 aa, Artificial Sequence
  Quasi-synthetic sequence derived from human genome
LLLLALALGLLVYRKRR

SEQ ID NO: 9583 - protein, 17 aa, Artificial Sequence
  Quasi-synthetic sequence derived from human genome
KSKIFFLFRLCKKLPFN

SEQ ID NO: 9584 - protein, 17 aa, Artificial Sequence
  Quasi-synthetic sequence derived from human genome
LILVLGFLKLIHLLLRR

SEQ ID NO: 9585 - protein, 17 aa, Artificial Sequence
  Quasi-synthetic sequence derived from human genome
WKFFMARVRLQLKIILC

SEQ ID NO: 9586 - protein, 17 aa, Artificial Sequence
  Quasi-synthetic sequence derived from human genome
FLHLKRRVKSVILVMLL

SEQ ID NO: 9587 - protein, 17 aa, Artificial Sequence
  Quasi-synthetic sequence derived from human genome
MRRRLRLRRDALLTLLL

SEQ ID NO: 9588 - protein, 17 aa, Artificial Sequence
  Quasi-synthetic sequence derived from human genome
LLAALLLLLLLSRRRTR

SEQ ID NO: 9589 - protein, 17 aa, Artificial Sequence
  Quasi-synthetic sequence derived from human genome
RTAILGLWKIARKWMRR

SEQ ID NO: 9590 - protein, 17 aa, Artificial Sequence
  Quasi-synthetic sequence derived from human genome
MRRFLSRKKIRHHIYVL

SEQ ID NO: 9591 - protein, 17 aa, Artificial Sequence
  Quasi-synthetic sequence derived from human genome
RKSYPMLKLVRLKLWFP

SEQ ID NO: 9592 - protein, 17 aa, Artificial Sequence
  Quasi-synthetic sequence derived from human genome
LMRWNNLLRKRNFYKKL

SEQ ID NO: 9593 - protein, 17 aa, Artificial Sequence
  Quasi-synthetic sequence derived from human genome
WLWRQSSILRRWKRNWF

SEQ ID NO: 9594 - protein, 17 aa, Artificial Sequence
  Quasi-synthetic sequence derived from human genome
YLKLRNWQWWRLFTKVK

SEQ ID NO: 9595 - protein, 17 aa, Artificial Sequence
  Quasi-synthetic sequence derived from human genome
HRLLLKWRGSIYKLLYR

SEQ ID NO: 9596 - protein, 17 aa, Artificial Sequence
  Quasi-synthetic sequence derived from human genome
FRLTLRAVKLWAKRRGI

SEQ ID NO: 9597 - protein, 17 aa, Artificial Sequence
  Quasi-synthetic sequence derived from human genome
KPPRLRLWALIPWLPRK

SEQ ID NO: 9598 - protein, 17 aa, Artificial Sequence
  Quasi-synthetic sequence derived from human genome
LATLGRIFKPWKWRKKK

SEQ ID NO: 9599 - protein, 17 aa, Artificial Sequence
  Quasi-synthetic sequence derived from human genome
KRKIARLGINMLLKMIF

SEQ ID NO: 9600 - protein, 17 aa, Artificial Sequence
  Quasi-synthetic sequence derived from human genome
MPLRKMKIPFLLLFFLW

SEQ ID NO: 9601 - protein, 17 aa, Artificial Sequence
  Quasi-synthetic sequence derived from human genome
KFRLVVKTALKLLLVFV

SEQ ID NO: 9602 - protein, 17 aa, Artificial Sequence
  Quasi-synthetic sequence derived from human genome
VLLAIFVALFFLTKKRR

SEQ ID NO: 9603 - protein, 17 aa, Artificial Sequence
  Quasi-synthetic sequence derived from human genome
MRRRLWLGLAWLLLARA

SEQ ID NO: 9604 - protein, 17 aa, Artificial Sequence
  Quasi-synthetic sequence derived from human genome
KLQKFLKCLYRPILIIF

SEQ ID NO: 9605 - protein, 17 aa, Artificial Sequence
  Quasi-synthetic sequence derived from human genome
KLLRNIPRWTHLVRLLR

SEQ ID NO: 9606 - protein, 17 aa, Artificial Sequence
  Quasi-synthetic sequence derived from human genome
MKMRPKDLWKRLMIKFR

SEQ ID NO: 9607 - protein, 17 aa, Artificial Sequence
  Quasi-synthetic sequence derived from human genome
VRRLAGLLRRALIRVAR

SEQ ID NO: 9608 - protein, 17 aa, Artificial Sequence
  Quasi-synthetic sequence derived from human genome
RVLVTRRRVRALIAVLW

SEQ ID NO: 9609 - protein, 17 aa, Artificial Sequence
  Quasi-synthetic sequence derived from human genome
RLKMRKNSWLKIIISII

SEQ ID NO: 9610 - protein, 17 aa, Artificial Sequence
  Quasi-synthetic sequence derived from human genome
TRRWKKKQLRRPSLLLL

SEQ ID NO: 9611 - protein, 17 aa, Artificial Sequence
  Quasi-synthetic sequence derived from human genome
IRYIVLLRSVRPLRLFV

SEQ ID NO: 9612 - protein, 17 aa, Artificial Sequence
  Quasi-synthetic sequence derived from human genome
FLHLKRRVKSVVLVILL

SEQ ID NO: 9613 - protein, 17 aa, Artificial Sequence
  Quasi-synthetic sequence derived from human genome
LSLVVKKKRCFLFPRYK

SEQ ID NO: 9614 - protein, 17 aa, Artificial Sequence
  Quasi-synthetic sequence derived from human genome
RLRRFLRTLRLKLAAAP

SEQ ID NO: 9615 - protein, 17 aa, Artificial Sequence
  Quasi-synthetic sequence derived from human genome
LAIYALLSLWYLLRRRR

SEQ ID NO: 9616 - protein, 17 aa, Artificial Sequence
  Quasi-synthetic sequence derived from human genome
LKFFRKAKLLHYHMKYF

SEQ ID NO: 9617 - protein, 17 aa, Artificial Sequence
  Quasi-synthetic sequence derived from human genome
RLALRQRLKCRSFKWYL

SEQ ID NO: 9618 - protein, 17 aa, Artificial Sequence
  Quasi-synthetic sequence derived from human genome
ILKIRLLPGHPRRLKVK

SEQ ID NO: 9619 - protein, 17 aa, Artificial Sequence
  Quasi-synthetic sequence derived from human genome
VIKLQSLVRMWRVRWRY

SEQ ID NO: 9620 - protein, 17 aa, Artificial Sequence
  Quasi-synthetic sequence derived from human genome
LLRLKAFILFGKLARVV

SEQ ID NO: 9621 - protein, 17 aa, Artificial Sequence
  Quasi-synthetic sequence derived from human genome
RMYLRLRGRCPLLLRCL

SEQ ID NO: 9622 - protein, 17 aa, Artificial Sequence
  Quasi-synthetic sequence derived from human genome
LKLFRMRSLRWQLLSII

SEQ ID NO: 9623 - protein, 17 aa, Artificial Sequence
  Quasi-synthetic sequence derived from human genome
RILRLVRAARGIRTLLF

SEQ ID NO: 9624 - protein, 17 aa, Artificial Sequence
  Quasi-synthetic sequence derived from human genome
VTLRVFRVFRIFKFSRH

SEQ ID NO: 9625 - protein, 17 aa, Artificial Sequence
  Quasi-synthetic sequence derived from human genome
RRRRLGVHLLHRALLVF

SEQ ID NO: 9626 - protein, 17 aa, Artificial Sequence
  Quasi-synthetic sequence derived from human genome
SVLGRHIFWRRLRKALL

SEQ ID NO: 9627 - protein, 17 aa, Artificial Sequence
  Quasi-synthetic sequence derived from human genome
RLGRILKIHRNGKLLLR

SEQ ID NO: 9628 - protein, 17 aa, Artificial Sequence
  Quasi-synthetic sequence derived from human genome
YRLRPMLRVFVKPLVLF

SEQ ID NO: 9629 - protein, 17 aa, Artificial Sequence
  Quasi-synthetic sequence derived from human genome
FIITKFCLFCFWKFARK

SEQ ID NO: 9630 - protein, 17 aa, Artificial Sequence
  Quasi-synthetic sequence derived from human genome
SKFRRLRQLLRRRKKRR

SEQ ID NO: 9631 - protein, 17 aa, Artificial Sequence
  Quasi-synthetic sequence derived from human genome
RWRLNVLRLNFRGCLLR

SEQ ID NO: 9632 - protein, 17 aa, Artificial Sequence
  Quasi-synthetic sequence derived from human genome
PFRLIRKMFSFKVSRWM

SEQ ID NO: 9633 - protein, 17 aa, Artificial Sequence
  Quasi-synthetic sequence derived from human genome
RYQKIMKRLIKRYVLKA

SEQ ID NO: 9634 - protein, 17 aa, Artificial Sequence
  Quasi-synthetic sequence derived from human genome
RNLKKKLLPWQRRGLLR

SEQ ID NO: 9635 - protein, 17 aa, Artificial Sequence
  Quasi-synthetic sequence derived from human genome
KFWIQKLPKVLCLHLKR

SEQ ID NO: 9636 - protein, 17 aa, Artificial Sequence
  Quasi-synthetic sequence derived from human genome
WLVWLRFHKKKWQLQAR

SEQ ID NO: 9637 - protein, 17 aa, Artificial Sequence
  Quasi-synthetic sequence derived from human genome
RARWLRGILLFLFTLKC

SEQ ID NO: 9638 - protein, 17 aa, Artificial Sequence
  Quasi-synthetic sequence derived from human genome
ILLLMLIFLRQRIRIAI

SEQ ID NO: 9639 - protein, 17 aa, Artificial Sequence
  Quasi-synthetic sequence derived from human genome
LVALLLLWRRRQKRRTG

SEQ ID NO: 9640 - protein, 17 aa, Artificial Sequence
  Quasi-synthetic sequence derived from human genome
KVKMKFRFLGKLMAKAI

SEQ ID NO: 9641 - protein, 17 aa, Artificial Sequence
  Quasi-synthetic sequence derived from human genome
LIVVLRIVRYRKSSKLI

SEQ ID NO: 9642 - protein, 17 aa, Artificial Sequence
  Quasi-synthetic sequence derived from human genome
RFGRRFILRWCLLQLAI

SEQ ID NO: 9643 - protein, 17 aa, Artificial Sequence
  Quasi-synthetic sequence derived from human genome
GFLRLRWSRFARVLLTR

SEQ ID NO: 9644 - protein, 17 aa, Artificial Sequence
  Quasi-synthetic sequence derived from human genome
LRRHLMVWKVFAPKFIF

SEQ ID NO: 9645 - protein, 17 aa, Artificial Sequence
  Quasi-synthetic sequence derived from human genome
RRKLFGVLRLKCHSLFL

SEQ ID NO: 9646 - protein, 17 aa, Artificial Sequence
  Quasi-synthetic sequence derived from human genome
CYRCLSLLYLRMFKLKK

SEQ ID NO: 9647 - protein, 17 aa, Artificial Sequence
  Quasi-synthetic sequence derived from human genome
VVLILLKMYNRKMRTRR

SEQ ID NO: 9648 - protein, 17 aa, Artificial Sequence
  Quasi-synthetic sequence derived from human genome
LLPSLFHLRLLWRKLLW

SEQ ID NO: 9649 - protein, 17 aa, Artificial Sequence
  Quasi-synthetic sequence derived from human genome
RKKRKIPKLVLRINAIY

SEQ ID NO: 9650 - protein, 17 aa, Artificial Sequence
  Quasi-synthetic sequence derived from human genome
FLIFLLWKLPSARAKIR

SEQ ID NO: 9651 - protein, 17 aa, Artificial Sequence
  Quasi-synthetic sequence derived from human genome
PSFRLMKMARLLARFLR

SEQ ID NO: 9652 - protein, 17 aa, Artificial Sequence
  Quasi-synthetic sequence derived from human genome
LLLRVFRSGKRLKKTRK

SEQ ID NO: 9653 - protein, 17 aa, Artificial Sequence
  Quasi-synthetic sequence derived from human genome
RKFWWKNVKMIVLICVI

SEQ ID NO: 9654 - protein, 17 aa, Artificial Sequence
  Quasi-synthetic sequence derived from human genome
LLIIVIIVLIAYKRKSR

SEQ ID NO: 9655 - protein, 17 aa, Artificial Sequence
  Quasi-synthetic sequence derived from human genome
ILLLLVLLILCFIKRSK

SEQ ID NO: 9656 - protein, 17 aa, Artificial Sequence
  Quasi-synthetic sequence derived from human genome
WLLLKYKSIISRRFFCI

SEQ ID NO: 9657 - protein, 17 aa, Artificial Sequence
  Quasi-synthetic sequence derived from human genome
MVSKLKKPRRIILLVKA

SEQ ID NO: 9658 - protein, 17 aa, Artificial Sequence
  Quasi-synthetic sequence derived from human genome
LRALSWRRLYLSRAKLK

SEQ ID NO: 9659 - protein, 17 aa, Artificial Sequence
  Quasi-synthetic sequence derived from human genome
LAAWASRWLRRKLRARR

SEQ ID NO: 9660 - protein, 17 aa, Artificial Sequence
  Quasi-synthetic sequence derived from human genome
YYRKKLLIQMKSIWKKK

SEQ ID NO: 9661 - protein, 17 aa, Artificial Sequence
  Quasi-synthetic sequence derived from human genome
RFLVLPLTFNRKLPLRK

SEQ ID NO: 9662 - protein, 17 aa, Artificial Sequence
  Quasi-synthetic sequence derived from human genome
RRRRARLRFMKQKFNIV

SEQ ID NO: 9663 - protein, 17 aa, Artificial Sequence
  Quasi-synthetic sequence derived from human genome
KYLICTRYKWLIIKIVL

SEQ ID NO: 9664 - protein, 17 aa, Artificial Sequence
  Quasi-synthetic sequence derived from human genome
IKLPFLVMIIKNLKKYF

SEQ ID NO: 9665 - protein, 17 aa, Artificial Sequence
  Quasi-synthetic sequence derived from human genome
LRCVRLLRIFKVTRHWA

SEQ ID NO: 9666 - protein, 17 aa, Artificial Sequence
  Quasi-synthetic sequence derived from human genome
FRKLFRVYSNFLRGKLK

SEQ ID NO: 9667 - protein, 17 aa, Artificial Sequence
  Quasi-synthetic sequence derived from human genome
MLYRLYKPILWRGLKAR

SEQ ID NO: 9668 - protein, 17 aa, Artificial Sequence
  Quasi-synthetic sequence derived from human genome
LRRVVWIFCRTRLILSI

SEQ ID NO: 9669 - protein, 17 aa, Artificial Sequence
  Quasi-synthetic sequence derived from human genome
RILRLIRGAKGIRTLLF

SEQ ID NO: 9670 - protein, 17 aa, Artificial Sequence
  Quasi-synthetic sequence derived from human genome
LLLSIAIFQRQKRRKFW

SEQ ID NO: 9671 - protein, 17 aa, Artificial Sequence
  Quasi-synthetic sequence derived from human genome
KIHFWLPVLKMIRKKQM

SEQ ID NO: 9672 - protein, 17 aa, Artificial Sequence
  Quasi-synthetic sequence derived from human genome
LKYLFRFIIQSRVLYLR

SEQ ID NO: 9673 - protein, 17 aa, Artificial Sequence
  Quasi-synthetic sequence derived from human genome
WWRWLTFWRRLQSAFLK

SEQ ID NO: 9674 - protein, 17 aa, Artificial Sequence
  Quasi-synthetic sequence derived from human genome
MRRLPRALLLQLRLALL

SEQ ID NO: 9675 - protein, 17 aa, Artificial Sequence
  Quasi-synthetic sequence derived from human genome
IKKKAWYLIAMLLKLAF

SEQ ID NO: 9676 - protein, 17 aa, Artificial Sequence
  Quasi-synthetic sequence derived from human genome
RRRRVLQTLVWFLLTLL

SEQ ID NO: 9677 - protein, 17 aa, Artificial Sequence
  Quasi-synthetic sequence derived from human genome
FYYLIMRIKMCLIKLCK

SEQ ID NO: 9678 - protein, 17 aa, Artificial Sequence
  Quasi-synthetic sequence derived from human genome
LRKWLKMFKKRQLELYL

SEQ ID NO: 9679 - protein, 17 aa, Artificial Sequence
  Quasi-synthetic sequence derived from human genome
RPVKLKNLILLVKHWYR

SEQ ID NO: 9680 - protein, 17 aa, Artificial Sequence
  Quasi-synthetic sequence derived from human genome
RLLPALLILRAFKPHRK

SEQ ID NO: 9681 - protein, 17 aa, Artificial Sequence
  Quasi-synthetic sequence derived from human genome
KKLKKSIKIIFIVVAAF

SEQ ID NO: 9682 - protein, 17 aa, Artificial Sequence
  Quasi-synthetic sequence derived from human genome
QKKKLRSKLKPIFPLIL

SEQ ID NO: 9683 - protein, 17 aa, Artificial Sequence
  Quasi-synthetic sequence derived from human genome
LFCLFIFVLIYVRVFRK

SEQ ID NO: 9684 - protein, 17 aa, Artificial Sequence
  Quasi-synthetic sequence derived from human genome
ATFRRLLKLPRTLILLL

SEQ ID NO: 9685 - protein, 17 aa, Artificial Sequence
  Quasi-synthetic sequence derived from human genome
IRRCLYYFYKFTALFRR

SEQ ID NO: 9686 - protein, 17 aa, Artificial Sequence
  Quasi-synthetic sequence derived from human genome
RRFVKKFVKTQLFSLFI

SEQ ID NO: 9687 - protein, 17 aa, Artificial Sequence
  Quasi-synthetic sequence derived from human genome
KFLLLYALLKLSLIRGK

SEQ ID NO: 9688 - protein, 17 aa, Artificial Sequence
  Quasi-synthetic sequence derived from human genome
RNLILTYNLRKRIVFRK

SEQ ID NO: 9689 - protein, 17 aa, Artificial Sequence
  Quasi-synthetic sequence derived from human genome
LKHLCRLKIRRLMGLQK

SEQ ID NO: 9690 - protein, 17 aa, Artificial Sequence
  Quasi-synthetic sequence derived from human genome
FLRRLITSLGRSRLWLK

SEQ ID NO: 9691 - protein, 17 aa, Artificial Sequence
  Quasi-synthetic sequence derived from human genome
FLLGILIVISKKVKCRK

SEQ ID NO: 9692 - protein, 17 aa, Artificial Sequence
  Quasi-synthetic sequence derived from human genome
YLKLRHWQWWRVFTKVK

SEQ ID NO: 9693 - protein, 17 aa, Artificial Sequence
  Quasi-synthetic sequence derived from human genome
RTLLRFNAVLRKLLIVF

SEQ ID NO: 9694 - protein, 17 aa, Artificial Sequence
  Quasi-synthetic sequence derived from human genome
TLYILTHKRILKFLKLF

SEQ ID NO: 9695 - protein, 17 aa, Artificial Sequence
  Quasi-synthetic sequence derived from human genome
AKRWIFWLWWRACWFVI

SEQ ID NO: 9696 - protein, 17 aa, Artificial Sequence
  Quasi-synthetic sequence derived from human genome
FVLFVLSVHYLWKKWKK

SEQ ID NO: 9697 - protein, 17 aa, Artificial Sequence
  Quasi-synthetic sequence derived from human genome
VVGRVFRLFQRRLLQLR

SEQ ID NO: 9698 - protein, 17 aa, Artificial Sequence
  Quasi-synthetic sequence derived from human genome
RRQGSRFLWLLKILVII

SEQ ID NO: 9699 - protein, 17 aa, Artificial Sequence
  Quasi-synthetic sequence derived from human genome
VRFWAKHRWGLPLRVLK

SEQ ID NO: 9700 - protein, 17 aa, Artificial Sequence
  Quasi-synthetic sequence derived from human genome
CKALTKFKFVFFLRLSR

SEQ ID NO: 9701 - protein, 17 aa, Artificial Sequence
  Quasi-synthetic sequence derived from human genome
LTILTIWLFKHRRARFL

SEQ ID NO: 9702 - protein, 17 aa, Artificial Sequence
  Quasi-synthetic sequence derived from human genome
PLIALKALKKALLLYKK

SEQ ID NO: 9703 - protein, 17 aa, Artificial Sequence
  Quasi-synthetic sequence derived from human genome
QKRLKRTLIRKVFNLYL

SEQ ID NO: 9704 - protein, 17 aa, Artificial Sequence
  Quasi-synthetic sequence derived from human genome
MRLRLRLLALLLLLLAP

SEQ ID NO: 9705 - protein, 17 aa, Artificial Sequence
  Quasi-synthetic sequence derived from human genome
LFFRRPKASLPRVFVLR

SEQ ID NO: 9706 - protein, 17 aa, Artificial Sequence
  Quasi-synthetic sequence derived from human genome
ILFLVALLARVLVKRKP

SEQ ID NO: 9707 - protein, 17 aa, Artificial Sequence
  Quasi-synthetic sequence derived from human genome
RKAIFIFIRWLLKLGHH

SEQ ID NO: 9708 - protein, 17 aa, Artificial Sequence
  Quasi-synthetic sequence derived from human genome
WRKKRMRRLKRKRRKMR

SEQ ID NO: 9709 - protein, 17 aa, Artificial Sequence
  Quasi-synthetic sequence derived from human genome
LLLRNFIRMKRCVMVLV

SEQ ID NO: 9710 - protein, 17 aa, Artificial Sequence
  Quasi-synthetic sequence derived from human genome
KKKTFKGLIRIFRKGVI

SEQ ID NO: 9711 - protein, 17 aa, Artificial Sequence
  Quasi-synthetic sequence derived from human genome
RWIRKAAFSRLYQLRIR

SEQ ID NO: 9712 - protein, 17 aa, Artificial Sequence
  Quasi-synthetic sequence derived from human genome
CVVRKLLVQLRRLYWWV

SEQ ID NO: 9713 - protein, 17 aa, Artificial Sequence
  Quasi-synthetic sequence derived from human genome
ARLCFLLGRLSIRKVKL

SEQ ID NO: 9714 - protein, 17 aa, Artificial Sequence
  Quasi-synthetic sequence derived from human genome
KFLSHFKRKFIIHRGKR

SEQ ID NO: 9715 - protein, 17 aa, Artificial Sequence
  Quasi-synthetic sequence derived from human genome
WLRRYIKWPLLPPKNIK

SEQ ID NO: 9716 - protein, 17 aa, Artificial Sequence
  Quasi-synthetic sequence derived from human genome
MRILRRLLRRYRESKKI

SEQ ID NO: 9717 - protein, 17 aa, Artificial Sequence
  Quasi-synthetic sequence derived from human genome
LFALLSRGRRRRMHVLR

SEQ ID NO: 9718 - protein, 17 aa, Artificial Sequence
  Quasi-synthetic sequence derived from human genome
LAVRLLRGSRLLRRNFL

SEQ ID NO: 9719 - protein, 17 aa, Artificial Sequence
  Quasi-synthetic sequence derived from human genome
LLLRRLRRGSLSVRALL

SEQ ID NO: 9720 - protein, 17 aa, Artificial Sequence
  Quasi-synthetic sequence derived from human genome
KFFIAGFRRSMRLCRRK

SEQ ID NO: 9721 - protein, 17 aa, Artificial Sequence
  Quasi-synthetic sequence derived from human genome
AFILRLFRQKNKRGFIK

SEQ ID NO: 9722 - protein, 17 aa, Artificial Sequence
  Quasi-synthetic sequence derived from human genome
KKYQAVLRRKALLIFLV

SEQ ID NO: 9723 - protein, 17 aa, Artificial Sequence
  Quasi-synthetic sequence derived from human genome
LKWLYHLYIKTPRKMFR

SEQ ID NO: 9724 - protein, 17 aa, Artificial Sequence
  Quasi-synthetic sequence derived from human genome
RRWKRGVARKVVRMVIR

SEQ ID NO: 9725 - protein, 17 aa, Artificial Sequence
  Quasi-synthetic sequence derived from human genome
PRLFKKRRLRSPRVLFS

SEQ ID NO: 9726 - protein, 17 aa, Artificial Sequence
  Quasi-synthetic sequence derived from human genome
IRKALDRLRKKRHLLRR

SEQ ID NO: 9727 - protein, 17 aa, Artificial Sequence
  Quasi-synthetic sequence derived from human genome
RRKFLQMKRRKYGFIYK

SEQ ID NO: 9728 - protein, 17 aa, Artificial Sequence
  Quasi-synthetic sequence derived from human genome
RMISFIRSFCKYRRFML

SEQ ID NO: 9729 - protein, 17 aa, Artificial Sequence
  Quasi-synthetic sequence derived from human genome
LVLLCLLLYYCRRKCLK

SEQ ID NO: 9730 - protein, 17 aa, Artificial Sequence
  Quasi-synthetic sequence derived from human genome
IALMLWRLHWRRLLSKA

SEQ ID NO: 9731 - protein, 17 aa, Artificial Sequence
  Quasi-synthetic sequence derived from human genome
VMRMVKKRAIVKKLPIV

SEQ ID NO: 9732 - protein, 17 aa, Artificial Sequence
  Quasi-synthetic sequence derived from human genome
KPYIRKKAVLIMYKVFL

SEQ ID NO: 9733 - protein, 17 aa, Artificial Sequence
  Quasi-synthetic sequence derived from human genome
IKINQAMRKKLILYFKR

SEQ ID NO: 9734 - protein, 17 aa, Artificial Sequence
  Quasi-synthetic sequence derived from human genome
MKYGAWYLKPKLWKKLR

SEQ ID NO: 9735 - protein, 17 aa, Artificial Sequence
  Quasi-synthetic sequence derived from human genome
LIFIVLYKVGFFKRNLK

SEQ ID NO: 9736 - protein, 17 aa, Artificial Sequence
  Quasi-synthetic sequence derived from human genome
FFWWLNPLFKIGHKRRL

SEQ ID NO: 9737 - protein, 17 aa, Artificial Sequence
  Quasi-synthetic sequence derived from human genome
FVIVLLAHRLRRWHKSR

SEQ ID NO: 9738 - protein, 17 aa, Artificial Sequence
  Quasi-synthetic sequence derived from human genome
LLQLRQKWHSLFLRRMR

SEQ ID NO: 9739 - protein, 17 aa, Artificial Sequence
  Quasi-synthetic sequence derived from human genome
YLRSLVQNLLLIRRFKK

SEQ ID NO: 9740 - protein, 17 aa, Artificial Sequence
  Quasi-synthetic sequence derived from human genome
KKLLPVVFRRKLEFLLL

SEQ ID NO: 9741 - protein, 17 aa, Artificial Sequence
  Quasi-synthetic sequence derived from human genome
ALFLLPCISRRLARIRR

SEQ ID NO: 9742 - protein, 17 aa, Artificial Sequence
  Quasi-synthetic sequence derived from human genome
ILIKYRRLRIMTNIYLL

SEQ ID NO: 9743 - protein, 17 aa, Artificial Sequence
  Quasi-synthetic sequence derived from human genome
CICLCLIFFLIVKARRK

SEQ ID NO: 9744 - protein, 17 aa, Artificial Sequence
  Quasi-synthetic sequence derived from human genome
LIFKVYMFKCVWRCYRL

SEQ ID NO: 9745 - protein, 17 aa, Artificial Sequence
  Quasi-synthetic sequence derived from human genome
RSLRLKIKFPKLGKKKV

SEQ ID NO: 9746 - protein, 17 aa, Artificial Sequence
  Quasi-synthetic sequence derived from human genome
MLRMIRKHVRKNYMKFK

SEQ ID NO: 9747 - protein, 17 aa, Artificial Sequence
  Quasi-synthetic sequence derived from human genome
RMWIQAVKKLRRWKGRV

SEQ ID NO: 9748 - protein, 17 aa, Artificial Sequence
  Quasi-synthetic sequence derived from human genome
RKRHKVWYKKFFHHLLH

SEQ ID NO: 9749 - protein, 17 aa, Artificial Sequence
  Quasi-synthetic sequence derived from human genome
CFMFSIWRFAWRKSIKK

SEQ ID NO: 9750 - protein, 17 aa, Artificial Sequence
  Quasi-synthetic sequence derived from human genome
RKRCIKKFSIQRFPKIL

SEQ ID NO: 9751 - protein, 17 aa, Artificial Sequence
  Quasi-synthetic sequence derived from human genome
LIVKLRRSFRTLIVLLA

SEQ ID NO: 9752 - protein, 17 aa, Artificial Sequence
  Quasi-synthetic sequence derived from human genome
ALHRMWIQAVKKLRRWK

SEQ ID NO: 9753 - protein, 17 aa, Artificial Sequence
  Quasi-synthetic sequence derived from human genome
LSYRSLRRRVRRLRRLT

SEQ ID NO: 9754 - protein, 17 aa, Artificial Sequence
  Quasi-synthetic sequence derived from human genome
RILRLIKGAKGIRTLLF

SEQ ID NO: 9755 - protein, 17 aa, Artificial Sequence
  Quasi-synthetic sequence derived from human genome
FKRRRVRRRRMETIVFL

SEQ ID NO: 9756 - protein, 17 aa, Artificial Sequence
  Quasi-synthetic sequence derived from human genome
FFYPWFRRALKYILLGK

SEQ ID NO: 9757 - protein, 17 aa, Artificial Sequence
  Quasi-synthetic sequence derived from human genome
LSLIRKFRLFPRPQVKL

SEQ ID NO: 9758 - protein, 17 aa, Artificial Sequence
  Quasi-synthetic sequence derived from human genome
VKRLRPRLSAILFKLQF

SEQ ID NO: 9759 - protein, 17 aa, Artificial Sequence
  Quasi-synthetic sequence derived from human genome
MAKKVKRLLKKQVVRIM

SEQ ID NO: 9760 - protein, 17 aa, Artificial Sequence
  Quasi-synthetic sequence derived from human genome
RMVLVRNKKVGVIFRLI

SEQ ID NO: 9761 - protein, 17 aa, Artificial Sequence
  Quasi-synthetic sequence derived from human genome
LGFKKIKRGLWGKYKLK

SEQ ID NO: 9762 - protein, 17 aa, Artificial Sequence
  Quasi-synthetic sequence derived from human genome
MRVLRIARVLKLLKMAT

SEQ ID NO: 9763 - protein, 17 aa, Artificial Sequence
  Quasi-synthetic sequence derived from human genome
FQLPMKKIVWLKLLIPK

SEQ ID NO: 9764 - protein, 17 aa, Artificial Sequence
  Quasi-synthetic sequence derived from human genome
WFLMHHLRQRRHHRRWR

SEQ ID NO: 9765 - protein, 17 aa, Artificial Sequence
  Quasi-synthetic sequence derived from human genome
QKVWKRWKKRYFVLVQV

SEQ ID NO: 9766 - protein, 17 aa, Artificial Sequence
  Quasi-synthetic sequence derived from human genome
RYFLWHTYRWLLLKLLL

SEQ ID NO: 9767 - protein, 17 aa, Artificial Sequence
  Quasi-synthetic sequence derived from human genome
KFNKLKKKKKALLALKK

SEQ ID NO: 9768 - protein, 17 aa, Artificial Sequence
  Quasi-synthetic sequence derived from human genome
RKKKNNIKLYVRRVFIM

SEQ ID NO: 9769 - protein, 17 aa, Artificial Sequence
  Quasi-synthetic sequence derived from human genome
LVFVLLFIFVKRQIMRF

SEQ ID NO: 9770 - protein, 17 aa, Artificial Sequence
  Quasi-synthetic sequence derived from human genome
IRFLPRPIRQQLLYKRR

SEQ ID NO: 9771 - protein, 17 aa, Artificial Sequence
  Quasi-synthetic sequence derived from human genome
LRSVWNFLKRHKKKCIF

SEQ ID NO: 9772 - protein, 17 aa, Artificial Sequence
  Quasi-synthetic sequence derived from human genome
ISLRKKLKLPIGKRNWL

SEQ ID NO: 9773 - protein, 17 aa, Artificial Sequence
  Quasi-synthetic sequence derived from human genome
RLIKLLRQGYTIRILLW

SEQ ID NO: 9774 - protein, 17 aa, Artificial Sequence
  Quasi-synthetic sequence derived from human genome
LLWKHLKSSLRILFRHF

SEQ ID NO: 9775 - protein, 17 aa, Artificial Sequence
  Quasi-synthetic sequence derived from human genome
WRWVLLRLHKAGARVKI

SEQ ID NO: 9776 - protein, 17 aa, Artificial Sequence
  Quasi-synthetic sequence derived from human genome
WLLRQSTILKRWKKNWF

SEQ ID NO: 9777 - protein, 17 aa, Artificial Sequence
  Quasi-synthetic sequence derived from human genome
LRKARSLLYQFRLLPRI

SEQ ID NO: 9778 - protein, 17 aa, Artificial Sequence
  Quasi-synthetic sequence derived from human genome
LLLVILVLGVMVARRKR

SEQ ID NO: 9779 - protein, 17 aa, Artificial Sequence
  Quasi-synthetic sequence derived from human genome
LRRNRLRALPRALFRNL

SEQ ID NO: 9780 - protein, 17 aa, Artificial Sequence
  Quasi-synthetic sequence derived from human genome
RFRARGGLRPLLALLRR

SEQ ID NO: 9781 - protein, 17 aa, Artificial Sequence
  Quasi-synthetic sequence derived from human genome
VYLKRKTLIRLLFTNKK

SEQ ID NO: 9782 - protein, 17 aa, Artificial Sequence
  Quasi-synthetic sequence derived from human genome
FLWLKWRVSRVMVWMLL

SEQ ID NO: 9783 - protein, 17 aa, Artificial Sequence
  Quasi-synthetic sequence derived from human genome
IIQQYKFLRFRRSLLLL

SEQ ID NO: 9784 - protein, 17 aa, Artificial Sequence
  Quasi-synthetic sequence derived from human genome
KNKRMILIYLLPVKMLL

SEQ ID NO: 9785 - protein, 17 aa, Artificial Sequence
  Quasi-synthetic sequence derived from human genome
GFLRAKVFVKRFVRAVL

SEQ ID NO: 9786 - protein, 17 aa, Artificial Sequence
  Quasi-synthetic sequence derived from human genome
FGLFMYAKRNKRRIMRI

SEQ ID NO: 9787 - protein, 17 aa, Artificial Sequence
  Quasi-synthetic sequence derived from human genome
RRQLYLPMLFKVRLLMV

SEQ ID NO: 9788 - protein, 17 aa, Artificial Sequence
  Quasi-synthetic sequence derived from human genome
PPALRRRLLLLLLVLLI

SEQ ID NO: 9789 - protein, 17 aa, Artificial Sequence
  Quasi-synthetic sequence derived from human genome
WRVHAIFKNVKMKKKII

SEQ ID NO: 9790 - protein, 17 aa, Artificial Sequence
  Quasi-synthetic sequence derived from human genome
LIYRRLRKPKITWSLRH

SEQ ID NO: 9791 - protein, 17 aa, Artificial Sequence
  Quasi-synthetic sequence derived from human genome
RPKKLLPKAFKQYWFIF

SEQ ID NO: 9792 - protein, 17 aa, Artificial Sequence
  Quasi-synthetic sequence derived from human genome
RLYMRQTIIKVIKFILI

SEQ ID NO: 9793 - protein, 17 aa, Artificial Sequence
  Quasi-synthetic sequence derived from human genome
LLKWPLRFVIIHKRCVY

SEQ ID NO: 9794 - protein, 17 aa, Artificial Sequence
  Quasi-synthetic sequence derived from human genome
FLRFMACLLKGYRVFLR

SEQ ID NO: 9795 - protein, 17 aa, Artificial Sequence
  Quasi-synthetic sequence derived from human genome
LKTLIQFTVKLRLLIKL

SEQ ID NO: 9796 - protein, 17 aa, Artificial Sequence
  Quasi-synthetic sequence derived from human genome
VKRCFLHKLPTFLFMKR

SEQ ID NO: 9797 - protein, 17 aa, Artificial Sequence
  Quasi-synthetic sequence derived from human genome
HLLRTLSRAKFWPRRRF

SEQ ID NO: 9798 - protein, 17 aa, Artificial Sequence
  Quasi-synthetic sequence derived from human genome
RRNFWPARLATRLLKLR

SEQ ID NO: 9799 - protein, 17 aa, Artificial Sequence
  Quasi-synthetic sequence derived from human genome
KLITRMWKLLRRRSAPK

SEQ ID NO: 9800 - protein, 17 aa, Artificial Sequence
  Quasi-synthetic sequence derived from human genome
YVRRRKKLPSVLLFKKP

SEQ ID NO: 9801 - protein, 17 aa, Artificial Sequence
  Quasi-synthetic sequence derived from human genome
KVIKLLKEKFHFKKIIM

SEQ ID NO: 9802 - protein, 17 aa, Artificial Sequence
  Quasi-synthetic sequence derived from human genome
FLLFCLHVLFKKRTKSK

SEQ ID NO: 9803 - protein, 17 aa, Artificial Sequence
  Quasi-synthetic sequence derived from human genome
LLYPKLLPRWPLAKLKL

SEQ ID NO: 9804 - protein, 17 aa, Artificial Sequence
  Quasi-synthetic sequence derived from human genome
NWLRRGKTLKLIFSLRK

SEQ ID NO: 9805 - protein, 17 aa, Artificial Sequence
  Quasi-synthetic sequence derived from human genome
WLFLRYKSIVGRRFCFI

SEQ ID NO: 9806 - protein, 17 aa, Artificial Sequence
  Quasi-synthetic sequence derived from human genome
PRWSRWRVPGRLLLLLL

SEQ ID NO: 9807 - protein, 17 aa, Artificial Sequence
  Quasi-synthetic sequence derived from human genome
VYPLKFFFLRTRRFALM

SEQ ID NO: 9808 - protein, 17 aa, Artificial Sequence
  Quasi-synthetic sequence derived from human genome
RIVTLRAKRNLPLKLLI

SEQ ID NO: 9809 - protein, 17 aa, Artificial Sequence
  Quasi-synthetic sequence derived from human genome
LRALLVVVNALLRKRRY

SEQ ID NO: 9810 - protein, 17 aa, Artificial Sequence
  Quasi-synthetic sequence derived from human genome
PRRARRFFLRCIIWNTR

SEQ ID NO: 9811 - protein, 17 aa, Artificial Sequence
  Quasi-synthetic sequence derived from human genome
LTFQWRFYLSFRKLMRW

SEQ ID NO: 9812 - protein, 17 aa, Artificial Sequence
  Quasi-synthetic sequence derived from human genome
LNRSWLGLRFLRALRLI

SEQ ID NO: 9813 - protein, 17 aa, Artificial Sequence
  Quasi-synthetic sequence derived from human genome
FKKLLRLFSLVIWICLV

SEQ ID NO: 9814 - protein, 17 aa, Artificial Sequence
  Quasi-synthetic sequence derived from human genome
RAPLTFRHLHLKLKRLK

SEQ ID NO: 9815 - protein, 17 aa, Artificial Sequence
  Quasi-synthetic sequence derived from human genome
ALKRPIKQKRKLRIFIS

SEQ ID NO: 9816 - protein, 17 aa, Artificial Sequence
  Quasi-synthetic sequence derived from human genome
KKPWKHFWFVIKNKVLY

SEQ ID NO: 9817 - protein, 17 aa, Artificial Sequence
  Quasi-synthetic sequence derived from human genome
LLMLVLYGRIFRAARFR

SEQ ID NO: 9818 - protein, 17 aa, Artificial Sequence
  Quasi-synthetic sequence derived from human genome
HKYRKLVKKTRFLRRKV

SEQ ID NO: 9819 - protein, 17 aa, Artificial Sequence
  Quasi-synthetic sequence derived from human genome
QLLTYLVKVLKRRTWRR

SEQ ID NO: 9820 - protein, 17 aa, Artificial Sequence
  Quasi-synthetic sequence derived from human genome
RRAWQRIISWVFFWRQK

SEQ ID NO: 9821 - protein, 17 aa, Artificial Sequence
  Quasi-synthetic sequence derived from human genome
YKTKIKLCILLHAFRIR

SEQ ID NO: 9822 - protein, 17 aa, Artificial Sequence
  Quasi-synthetic sequence derived from human genome
FVKIKASHALKKKILRF

SEQ ID NO: 9823 - protein, 17 aa, Artificial Sequence
  Quasi-synthetic sequence derived from human genome
LRRILIRYYIKSIIYYM

SEQ ID NO: 9824 - protein, 17 aa, Artificial Sequence
  Quasi-synthetic sequence derived from human genome
ILKDRRKKVIGWYRFRR

SEQ ID NO: 9825 - protein, 17 aa, Artificial Sequence
  Quasi-synthetic sequence derived from human genome
KPFLFLLKKKIPSPVKL

SEQ ID NO: 9826 - protein, 17 aa, Artificial Sequence
  Quasi-synthetic sequence derived from human genome
LRLLRQHRHLVTLLLWR

SEQ ID NO: 9827 - protein, 17 aa, Artificial Sequence
  Quasi-synthetic sequence derived from human genome
LLVFILWKCGFFKRSRY

SEQ ID NO: 9828 - protein, 17 aa, Artificial Sequence
  Quasi-synthetic sequence derived from human genome
WLARRRFQSIRRFVLNI

SEQ ID NO: 9829 - protein, 17 aa, Artificial Sequence
  Quasi-synthetic sequence derived from human genome
LTRLRLRNVFRRFLRDF

SEQ ID NO: 9830 - protein, 17 aa, Artificial Sequence
  Quasi-synthetic sequence derived from human genome
FLLRRIPTLKIRVASKK

SEQ ID NO: 9831 - protein, 17 aa, Artificial Sequence
  Quasi-synthetic sequence derived from human genome
RRFLSKVYSFPMRKLIL

SEQ ID NO: 9832 - protein, 17 aa, Artificial Sequence
  Quasi-synthetic sequence derived from human genome
RKFKFRKMHYDRFVIFL

SEQ ID NO: 9833 - protein, 17 aa, Artificial Sequence
  Quasi-synthetic sequence derived from human genome
LTLCFGLIARRKKIMKL

SEQ ID NO: 9834 - protein, 17 aa, Artificial Sequence
  Quasi-synthetic sequence derived from human genome
ILLVIVVLFVTLRRQKK

SEQ ID NO: 9835 - protein, 17 aa, Artificial Sequence
  Quasi-synthetic sequence derived from human genome
RVYVLKFKAGSKRLFFW

SEQ ID NO: 9836 - protein, 17 aa, Artificial Sequence
  Quasi-synthetic sequence derived from human genome
RRLPPIQKPKLLRPRLL

SEQ ID NO: 9837 - protein, 17 aa, Artificial Sequence
  Quasi-synthetic sequence derived from human genome
LKSNWLGLRFLRALRLL

SEQ ID NO: 9838 - protein, 17 aa, Artificial Sequence
  Quasi-synthetic sequence derived from human genome
KLRLKLRKKLKAEKKKL

SEQ ID NO: 9839 - protein, 17 aa, Artificial Sequence
  Quasi-synthetic sequence derived from human genome
KRRVFFRNIKILIPATW

SEQ ID NO: 9840 - protein, 17 aa, Artificial Sequence
  Quasi-synthetic sequence derived from human genome
IKFFLIDFIFKRCPRLR

SEQ ID NO: 9841 - protein, 17 aa, Artificial Sequence
  Quasi-synthetic sequence derived from human genome
RRLQKFWRVTVKGFFVK

SEQ ID NO: 9842 - protein, 17 aa, Artificial Sequence
  Quasi-synthetic sequence derived from human genome
KRKRSLKLILEKKLAIL

SEQ ID NO: 9843 - protein, 17 aa, Artificial Sequence
  Quasi-synthetic sequence derived from human genome
VRRLIMKRIVKISKCNL

SEQ ID NO: 9844 - protein, 17 aa, Artificial Sequence
  Quasi-synthetic sequence derived from human genome
RFYDRRFLKLLRFYIAL

SEQ ID NO: 9845 - protein, 17 aa, Artificial Sequence
  Quasi-synthetic sequence derived from human genome
SGYLYFCFRWLLIRFKR

SEQ ID NO: 9846 - protein, 17 aa, Artificial Sequence
  Quasi-synthetic sequence derived from human genome
VFVGLAVFLIYKFKRKI

SEQ ID NO: 9847 - protein, 17 aa, Artificial Sequence
  Quasi-synthetic sequence derived from human genome
FLLKQHKVWRKCSIRIF

SEQ ID NO: 9848 - protein, 17 aa, Artificial Sequence
  Quasi-synthetic sequence derived from human genome
RSFLRLRRPWNWIAHFR

SEQ ID NO: 9849 - protein, 17 aa, Artificial Sequence
  Quasi-synthetic sequence derived from human genome
LKVAKRLHRSLLNRIIL

SEQ ID NO: 9850 - protein, 17 aa, Artificial Sequence
  Quasi-synthetic sequence derived from human genome
RRRRRREYCKFALLLVL

SEQ ID NO: 9851 - protein, 17 aa, Artificial Sequence
  Quasi-synthetic sequence derived from human genome
FLRGLRYLHPLKKWPMR

SEQ ID NO: 9852 - protein, 17 aa, Artificial Sequence
  Quasi-synthetic sequence derived from human genome
FHLLKNFLRLLPKFSLK

SEQ ID NO: 9853 - protein, 17 aa, Artificial Sequence
  Quasi-synthetic sequence derived from human genome
VFKSLLLLKKKKYAALV

SEQ ID NO: 9854 - protein, 17 aa, Artificial Sequence
  Quasi-synthetic sequence derived from human genome
RRVFVRKVYTILLIQLL

SEQ ID NO: 9855 - protein, 17 aa, Artificial Sequence
  Quasi-synthetic sequence derived from human genome
IIKRIFNILKFTWVLFL

SEQ ID NO: 9856 - protein, 17 aa, Artificial Sequence
  Quasi-synthetic sequence derived from human genome
RRGNVVRRVFGRIRRFF

SEQ ID NO: 9857 - protein, 17 aa, Artificial Sequence
  Quasi-synthetic sequence derived from human genome
FLALCALRFMRRIIGLK

SEQ ID NO: 9858 - protein, 17 aa, Artificial Sequence
  Quasi-synthetic sequence derived from human genome
MRYKTSLVMRKRLRLYR

SEQ ID NO: 9859 - protein, 17 aa, Artificial Sequence
  Quasi-synthetic sequence derived from human genome
LVRREFRKALKSLLWRI

SEQ ID NO: 9860 - protein, 17 aa, Artificial Sequence
  Quasi-synthetic sequence derived from human genome
WLVRKRFLEQRAKIRLL

SEQ ID NO: 9861 - protein, 17 aa, Artificial Sequence
  Quasi-synthetic sequence derived from human genome
RSVHYWKKVLPLLKIIK

SEQ ID NO: 9862 - protein, 17 aa, Artificial Sequence
  Quasi-synthetic sequence derived from human genome
KKHFMALIFSAKRLKII

SEQ ID NO: 9863 - protein, 17 aa, Artificial Sequence
  Quasi-synthetic sequence derived from human genome
PIRWKALIAIRYLSKLK

SEQ ID NO: 9864 - protein, 17 aa, Artificial Sequence
  Quasi-synthetic sequence derived from human genome
RCKSLKIFRRPRKLFMQ

SEQ ID NO: 9865 - protein, 17 aa, Artificial Sequence
  Quasi-synthetic sequence derived from human genome
KVLNMWCCCFFKRRKRK

SEQ ID NO: 9866 - protein, 17 aa, Artificial Sequence
  Quasi-synthetic sequence derived from human genome
KFCLFCFRKLAKKGKKK

SEQ ID NO: 9867 - protein, 17 aa, Artificial Sequence
  Quasi-synthetic sequence derived from human genome
IMILIMVVILQLRRRGK

SEQ ID NO: 9868 - protein, 17 aa, Artificial Sequence
  Quasi-synthetic sequence derived from human genome
KKILQKKWTSFLKARLI

SEQ ID NO: 9869 - protein, 17 aa, Artificial Sequence
  Quasi-synthetic sequence derived from human genome
IILILAFWVLPKYKTRK

SEQ ID NO: 9870 - protein, 17 aa, Artificial Sequence
  Quasi-synthetic sequence derived from human genome
GRGRLPRRLLLLLALWV

SEQ ID NO: 9871 - protein, 17 aa, Artificial Sequence
  Quasi-synthetic sequence derived from human genome
LPRVAGHIKKRLFMFRF

SEQ ID NO: 9872 - protein, 17 aa, Artificial Sequence
  Quasi-synthetic sequence derived from human genome
RRPWGAWLSARLWKWLK

SEQ ID NO: 9873 - protein, 17 aa, Artificial Sequence
  Quasi-synthetic sequence derived from human genome
LCRIKASKALKKKIRRF

SEQ ID NO: 9874 - protein, 17 aa, Artificial Sequence
  Quasi-synthetic sequence derived from human genome
WRIRKKYFLMKIKNQPK

SEQ ID NO: 9875 - protein, 17 aa, Artificial Sequence
  Quasi-synthetic sequence derived from human genome
FQRWKKRYFKLRGRTLY

SEQ ID NO: 9876 - protein, 17 aa, Artificial Sequence
  Quasi-synthetic sequence derived from human genome
VKKLRYYARFIVVCLLL

SEQ ID NO: 9877 - protein, 17 aa, Artificial Sequence
  Quasi-synthetic sequence derived from human genome
LFVYLVIRALRLWRTAK

SEQ ID NO: 9878 - protein, 17 aa, Artificial Sequence
  Quasi-synthetic sequence derived from human genome
ILLYYGLHRFIIRKLRH

SEQ ID NO: 9879 - protein, 17 aa, Artificial Sequence
  Quasi-synthetic sequence derived from human genome
RKQLVLRRGLLLLGVFL

SEQ ID NO: 9880 - protein, 17 aa, Artificial Sequence
  Quasi-synthetic sequence derived from human genome
KKHRILKIYHLFVSLLL

SEQ ID NO: 9881 - protein, 17 aa, Artificial Sequence
  Quasi-synthetic sequence derived from human genome
PILIKVAWKKAAKRKIK

SEQ ID NO: 9882 - protein, 17 aa, Artificial Sequence
  Quasi-synthetic sequence derived from human genome
RMRLVNRFYRRLSALVW

SEQ ID NO: 9883 - protein, 17 aa, Artificial Sequence
  Quasi-synthetic sequence derived from human genome
FLKLRWRITGLIPWLLW

SEQ ID NO: 9884 - protein, 17 aa, Artificial Sequence
  Quasi-synthetic sequence derived from human genome
IFHFLYRKNRSRIPLLR

SEQ ID NO: 9885 - protein, 17 aa, Artificial Sequence
  Quasi-synthetic sequence derived from human genome
KKWLRQLKNAGKILLLI

SEQ ID NO: 9886 - protein, 17 aa, Artificial Sequence
  Quasi-synthetic sequence derived from human genome
RLVGLPVHLLFLRFYKR

SEQ ID NO: 9887 - protein, 17 aa, Artificial Sequence
  Quasi-synthetic sequence derived from human genome
RKLWWLPAHLPRFVRIV

SEQ ID NO: 9888 - protein, 17 aa, Artificial Sequence
  Quasi-synthetic sequence derived from human genome
RRLVPFLWLKWPGTRLL

SEQ ID NO: 9889 - protein, 17 aa, Artificial Sequence
  Quasi-synthetic sequence derived from human genome
WKKRLIRIKNGILRGVY

SEQ ID NO: 9890 - protein, 17 aa, Artificial Sequence
  Quasi-synthetic sequence derived from human genome
KKIFCCLFFITLFFIRL

SEQ ID NO: 9891 - protein, 17 aa, Artificial Sequence
  Quasi-synthetic sequence derived from human genome
KIVKKLKLTGFPYKIFK

SEQ ID NO: 9892 - protein, 17 aa, Artificial Sequence
  Quasi-synthetic sequence derived from human genome
REAFLKMLRFVKCFLRR

SEQ ID NO: 9893 - protein, 17 aa, Artificial Sequence
  Quasi-synthetic sequence derived from human genome
LLFARSLRLCRWGAKRL

SEQ ID NO: 9894 - protein, 17 aa, Artificial Sequence
  Quasi-synthetic sequence derived from human genome
RRGLLRLPRRSLLAALF

SEQ ID NO: 9895 - protein, 17 aa, Artificial Sequence
  Quasi-synthetic sequence derived from human genome
RWRVLRLGAWARWLLVA

SEQ ID NO: 9896 - protein, 17 aa, Artificial Sequence
  Quasi-synthetic sequence derived from human genome
AMFLLLIFSMWKHRKKM

SEQ ID NO: 9897 - protein, 17 aa, Artificial Sequence
  Quasi-synthetic sequence derived from human genome
VRYNRVGILRRILRTLR

SEQ ID NO: 9898 - protein, 17 aa, Artificial Sequence
  Quasi-synthetic sequence derived from human genome
RRLTRRLVLPVFGVLWI

SEQ ID NO: 9899 - protein, 17 aa, Artificial Sequence
  Quasi-synthetic sequence derived from human genome
RLRGAILTMAFKKILKL

SEQ ID NO: 9900 - protein, 17 aa, Artificial Sequence
  Quasi-synthetic sequence derived from human genome
RYWLHYLHPILRRQRLR

SEQ ID NO: 9901 - protein, 17 aa, Artificial Sequence
  Quasi-synthetic sequence derived from human genome
LWKGYLVRSLLRSKKKR

SEQ ID NO: 9902 - protein, 17 aa, Artificial Sequence
  Quasi-synthetic sequence derived from human genome
LRLWGALRLGAVILRWR

SEQ ID NO: 9903 - protein, 17 aa, Artificial Sequence
  Quasi-synthetic sequence derived from human genome
RLIILLRIFHLFHQKRQ

SEQ ID NO: 9904 - protein, 17 aa, Artificial Sequence
  Quasi-synthetic sequence derived from human genome
LRPLVKPKIVKKRTKKF

SEQ ID NO: 9905 - protein, 17 aa, Artificial Sequence
  Quasi-synthetic sequence derived from human genome
FLKHKLPLSLYKKVLLI

SEQ ID NO: 9906 - protein, 17 aa, Artificial Sequence
  Quasi-synthetic sequence derived from human genome
IRRGRVRRLVPNFRWAI

SEQ ID NO: 9907 - protein, 17 aa, Artificial Sequence
  Quasi-synthetic sequence derived from human genome
RTIRYLYRRLQRMLGLR

SEQ ID NO: 9908 - protein, 17 aa, Artificial Sequence
  Quasi-synthetic sequence derived from human genome
RSRQIVFILLRTVFLRL

SEQ ID NO: 9909 - protein, 17 aa, Artificial Sequence
  Quasi-synthetic sequence derived from human genome
RLKLFFIKNQRSSLRIR

SEQ ID NO: 9910 - protein, 17 aa, Artificial Sequence
  Quasi-synthetic sequence derived from human genome
FKRSMVLKLTLRCLVRM

SEQ ID NO: 9911 - protein, 17 aa, Artificial Sequence
  Quasi-synthetic sequence derived from human genome
RIKKPIKTKFRLPVFNW

SEQ ID NO: 9912 - protein, 17 aa, Artificial Sequence
  Quasi-synthetic sequence derived from human genome
MKKQRKILWRKGIHLAF

SEQ ID NO: 9913 - protein, 17 aa, Artificial Sequence
  Quasi-synthetic sequence derived from human genome
LKKYRLITKQGILLVRF

SEQ ID NO: 9914 - protein, 17 aa, Artificial Sequence
  Quasi-synthetic sequence derived from human genome
RIIWKALKPLLVGKILY

SEQ ID NO: 9915 - protein, 17 aa, Artificial Sequence
  Quasi-synthetic sequence derived from human genome
FKKMKPPKIPFMPLLLK

SEQ ID NO: 9916 - protein, 17 aa, Artificial Sequence
  Quasi-synthetic sequence derived from human genome
KRTVRRIRINLVLALIY

SEQ ID NO: 9917 - protein, 17 aa, Artificial Sequence
  Quasi-synthetic sequence derived from human genome
LIIFLIYKVVQFKQKLK

SEQ ID NO: 9918 - protein, 17 aa, Artificial Sequence
  Quasi-synthetic sequence derived from human genome
WLACVVLCVWWTRKRRK

SEQ ID NO: 9919 - protein, 17 aa, Artificial Sequence
  Quasi-synthetic sequence derived from human genome
IPRRIFIQLMKRFGLKA

SEQ ID NO: 9920 - protein, 17 aa, Artificial Sequence
  Quasi-synthetic sequence derived from human genome
FLLRKKRFGQWTKLLCV

SEQ ID NO: 9921 - protein, 17 aa, Artificial Sequence
  Quasi-synthetic sequence derived from human genome
RFLKLKKERKSLWTILL

SEQ ID NO: 9922 - protein, 17 aa, Artificial Sequence
  Quasi-synthetic sequence derived from human genome
RSPRVRLLLLLLLLLVV

SEQ ID NO: 9923 - protein, 17 aa, Artificial Sequence
  Quasi-synthetic sequence derived from human genome
FLLCHRRACRKRIRQKL

SEQ ID NO: 9924 - protein, 17 aa, Artificial Sequence
  Quasi-synthetic sequence derived from human genome
FHWHFLNQRRRRPLRRR

SEQ ID NO: 9925 - protein, 17 aa, Artificial Sequence
  Quasi-synthetic sequence derived from human genome
GLRAWKRIFWRQILLTL

SEQ ID NO: 9926 - protein, 17 aa, Artificial Sequence
  Quasi-synthetic sequence derived from human genome
LWSRFKKKCFKLTRKMP

SEQ ID NO: 9927 - protein, 17 aa, Artificial Sequence
  Quasi-synthetic sequence derived from human genome
LLLIKCHLKLYRTKLIY

SEQ ID NO: 9928 - protein, 17 aa, Artificial Sequence
  Quasi-synthetic sequence derived from human genome
FLLLKRNISPKIPRLLL

SEQ ID NO: 9929 - protein, 17 aa, Artificial Sequence
  Quasi-synthetic sequence derived from human genome
FLYLKWRVNKVILMILL

SEQ ID NO: 9930 - protein, 17 aa, Artificial Sequence
  Quasi-synthetic sequence derived from human genome
FVTRRRIRRTVRRALRR

SEQ ID NO: 9931 - protein, 17 aa, Artificial Sequence
  Quasi-synthetic sequence derived from human genome
FFFWLKLKINKVMLAIL

SEQ ID NO: 9932 - protein, 17 aa, Artificial Sequence
  Quasi-synthetic sequence derived from human genome
FVAVLLGLRLRRWHKSR

SEQ ID NO: 9933 - protein, 17 aa, Artificial Sequence
  Quasi-synthetic sequence derived from human genome
YLKVFYKFINLNRYKIR

SEQ ID NO: 9934 - protein, 17 aa, Artificial Sequence
  Quasi-synthetic sequence derived from human genome
LLFKKLCSFRYRRDLLR

SEQ ID NO: 9935 - protein, 17 aa, Artificial Sequence
  Quasi-synthetic sequence derived from human genome
NFYRNKLKYLAFLRKRM

SEQ ID NO: 9936 - protein, 17 aa, Artificial Sequence
  Quasi-synthetic sequence derived from human genome
KLARYKLRIVKPPKLPL

SEQ ID NO: 9937 - protein, 17 aa, Artificial Sequence
  Quasi-synthetic sequence derived from human genome
FIFVRIVQLLVAKLRAR

SEQ ID NO: 9938 - protein, 17 aa, Artificial Sequence
  Quasi-synthetic sequence derived from human genome
RRVRSFLRGLPALLLLL

SEQ ID NO: 9939 - protein, 17 aa, Artificial Sequence
  Quasi-synthetic sequence derived from human genome
WQRLLLRFKILRSLQAF

SEQ ID NO: 9940 - protein, 17 aa, Artificial Sequence
  Quasi-synthetic sequence derived from human genome
KKKKNNIKLYVRRVFIM

SEQ ID NO: 9941 - protein, 17 aa, Artificial Sequence
  Quasi-synthetic sequence derived from human genome
LPRLRVLRLRGNQLKLI

SEQ ID NO: 9942 - protein, 17 aa, Artificial Sequence
  Quasi-synthetic sequence derived from human genome
KSWKKIYFFLRRSGLYF

SEQ ID NO: 9943 - protein, 17 aa, Artificial Sequence
  Quasi-synthetic sequence derived from human genome
GVKRRWRLSRIVFRHLA

SEQ ID NO: 9944 - protein, 17 aa, Artificial Sequence
  Quasi-synthetic sequence derived from human genome
KPRLYQKYKISRVWWRL

SEQ ID NO: 9945 - protein, 17 aa, Artificial Sequence
  Quasi-synthetic sequence derived from human genome
LRTIFPLFMKSPRKIKK

SEQ ID NO: 9946 - protein, 17 aa, Artificial Sequence
  Quasi-synthetic sequence derived from human genome
FKLLILLLGSWALFFRR

SEQ ID NO: 9947 - protein, 17 aa, Artificial Sequence
  Quasi-synthetic sequence derived from human genome
LLKKRAAFTKLRRAAIL

SEQ ID NO: 9948 - protein, 17 aa, Artificial Sequence
  Quasi-synthetic sequence derived from human genome
LKDIGWRIRKKYFLMKI

SEQ ID NO: 9949 - protein, 17 aa, Artificial Sequence
  Quasi-synthetic sequence derived from human genome
KKLKQIFLSVLRHVRYW

SEQ ID NO: 9950 - protein, 17 aa, Artificial Sequence
  Quasi-synthetic sequence derived from human genome
LKVAAQKNFILKRLFWK

SEQ ID NO: 9951 - protein, 17 aa, Artificial Sequence
  Quasi-synthetic sequence derived from human genome
VRHPLFIWLKMRISKLV

SEQ ID NO: 9952 - protein, 17 aa, Artificial Sequence
  Quasi-synthetic sequence derived from human genome
FRARFRRLWPCGRRRRH

SEQ ID NO: 9953 - protein, 17 aa, Artificial Sequence
  Quasi-synthetic sequence derived from human genome
RQKKLLKKVALFSKLLP

SEQ ID NO: 9954 - protein, 17 aa, Artificial Sequence
  Quasi-synthetic sequence derived from human genome
IVLLLYLKRLKIIIFPP

SEQ ID NO: 9955 - protein, 17 aa, Artificial Sequence
  Quasi-synthetic sequence derived from human genome
VQALRIMRIARIFKLAR

SEQ ID NO: 9956 - protein, 17 aa, Artificial Sequence
  Quasi-synthetic sequence derived from human genome
ILVLSYFRYMRIYRRYI

SEQ ID NO: 9957 - protein, 17 aa, Artificial Sequence
  Quasi-synthetic sequence derived from human genome
ILLAIVVLFITLRRSKK

SEQ ID NO: 9958 - protein, 17 aa, Artificial Sequence
  Quasi-synthetic sequence derived from human genome
IKFLKKLQKLLLARNNI

SEQ ID NO: 9959 - protein, 17 aa, Artificial Sequence
  Quasi-synthetic sequence derived from human genome
MKIFQRKMRYWLLPPFL

SEQ ID NO: 9960 - protein, 17 aa, Artificial Sequence
  Quasi-synthetic sequence derived from human genome
LFLFLIVMIFRCAKLVK

SEQ ID NO: 9961 - protein, 17 aa, Artificial Sequence
  Quasi-synthetic sequence derived from human genome
RLTFLKKRRCIQWRFSY

SEQ ID NO: 9962 - protein, 17 aa, Artificial Sequence
  Quasi-synthetic sequence derived from human genome
ALVLRSVRVRLLLSFWK

SEQ ID NO: 9963 - protein, 17 aa, Artificial Sequence
  Quasi-synthetic sequence derived from human genome
VNFFIFLKILKLLISKL

SEQ ID NO: 9964 - protein, 17 aa, Artificial Sequence
  Quasi-synthetic sequence derived from human genome
LPHRRRLHGRPVRRLFL

SEQ ID NO: 9965 - protein, 17 aa, Artificial Sequence
  Quasi-synthetic sequence derived from human genome
LRKRQVLIFLVLLGLSR

SEQ ID NO: 9966 - protein, 17 aa, Artificial Sequence
  Quasi-synthetic sequence derived from human genome
LLARERRAVRRLVKILL

SEQ ID NO: 9967 - protein, 17 aa, Artificial Sequence
  Quasi-synthetic sequence derived from human genome
LLVLILSSVFLFRLFKR

SEQ ID NO: 9968 - protein, 17 aa, Artificial Sequence
  Quasi-synthetic sequence derived from human genome
AKPKRWISFKSFFRRRK

SEQ ID NO: 9969 - protein, 17 aa, Artificial Sequence
  Quasi-synthetic sequence derived from human genome
RLWLRVLLRLSPMAFRA

SEQ ID NO: 9970 - protein, 17 aa, Artificial Sequence
  Quasi-synthetic sequence derived from human genome
RLVLKSKNGIHLRLRRL

SEQ ID NO: 9971 - protein, 17 aa, Artificial Sequence
  Quasi-synthetic sequence derived from human genome
LLRRIIRILNLSKRLQG

SEQ ID NO: 9972 - protein, 17 aa, Artificial Sequence
  Quasi-synthetic sequence derived from human genome
KTRRRAVGWWKRLFTLK

SEQ ID NO: 9973 - protein, 17 aa, Artificial Sequence
  Quasi-synthetic sequence derived from human genome
LLMNRRKFLYQFKNVRW

SEQ ID NO: 9974 - protein, 17 aa, Artificial Sequence
  Quasi-synthetic sequence derived from human genome
LLRRIKGKLFTWNILKT

SEQ ID NO: 9975 - protein, 17 aa, Artificial Sequence
  Quasi-synthetic sequence derived from human genome
YFFYNKRLKRIVFFSCR

SEQ ID NO: 9976 - protein, 17 aa, Artificial Sequence
  Quasi-synthetic sequence derived from human genome
RFRKFPFFTRPLLSKWC

SEQ ID NO: 9977 - protein, 17 aa, Artificial Sequence
  Quasi-synthetic sequence derived from human genome
LLVLILLCLLIYYCRRR

SEQ ID NO: 9978 - protein, 17 aa, Artificial Sequence
  Quasi-synthetic sequence derived from human genome
LVLLAVGGLLFYRWRRR

SEQ ID NO: 9979 - protein, 17 aa, Artificial Sequence
  Quasi-synthetic sequence derived from human genome
RARLIPIIVLLLQKAWR

SEQ ID NO: 9980 - protein, 17 aa, Artificial Sequence
  Quasi-synthetic sequence derived from human genome
LGRFSRLVLWFAAFRKL

SEQ ID NO: 9981 - protein, 17 aa, Artificial Sequence
  Quasi-synthetic sequence derived from human genome
MKRIFYKHRKRRAPVFK

SEQ ID NO: 9982 - protein, 17 aa, Artificial Sequence
  Quasi-synthetic sequence derived from human genome
RKRISLKRPKKCFRNLF

SEQ ID NO: 9983 - protein, 17 aa, Artificial Sequence
  Quasi-synthetic sequence derived from human genome
LKKKKKMPKLRFASRIR

SEQ ID NO: 9984 - protein, 17 aa, Artificial Sequence
  Quasi-synthetic sequence derived from human genome
ITLFIINLHRSRKKIKL

SEQ ID NO: 9985 - protein, 17 aa, Artificial Sequence
  Quasi-synthetic sequence derived from human genome
LLVAPPLLRRAGRLRWR

SEQ ID NO: 9986 - protein, 17 aa, Artificial Sequence
  Quasi-synthetic sequence derived from human genome
FILAIPLRRKVKKLLGQ

SEQ ID NO: 9987 - protein, 17 aa, Artificial Sequence
  Quasi-synthetic sequence derived from human genome
RRRALARLVLRLNAPLW

SEQ ID NO: 9988 - protein, 17 aa, Artificial Sequence
  Quasi-synthetic sequence derived from human genome
LKIVNFSRLIFHHLKRK

SEQ ID NO: 9989 - protein, 17 aa, Artificial Sequence
  Quasi-synthetic sequence derived from human genome
RLPLRLINISHLIRKIL

SEQ ID NO: 9990 - protein, 17 aa, Artificial Sequence
  Quasi-synthetic sequence derived from human genome
RLFINFVLRRHVFFFVL

SEQ ID NO: 9991 - protein, 17 aa, Artificial Sequence
  Quasi-synthetic sequence derived from human genome
RVLRLIRGAKGIRTLLF

SEQ ID NO: 9992 - protein, 17 aa, Artificial Sequence
  Quasi-synthetic sequence derived from human genome
FFWIRLYKIRRGRTRPQ

SEQ ID NO: 9993 - protein, 17 aa, Artificial Sequence
  Quasi-synthetic sequence derived from human genome
RRFGRMHRLYLARRSFI

SEQ ID NO: 9994 - protein, 17 aa, Artificial Sequence
  Quasi-synthetic sequence derived from human genome
KRRVRQLRGLPLLVALL

SEQ ID NO: 9995 - protein, 17 aa, Artificial Sequence
  Quasi-synthetic sequence derived from human genome
KKNWRRVYKSLLLLAYL

SEQ ID NO: 9996 - protein, 17 aa, Artificial Sequence
  Quasi-synthetic sequence derived from human genome
LRRKRKALWAHLFSSLR

SEQ ID NO: 9997 - protein, 17 aa, Artificial Sequence
  Quasi-synthetic sequence derived from human genome
LSRFKKLKYLWLHHNKL

SEQ ID NO: 9998 - protein, 17 aa, Artificial Sequence
  Quasi-synthetic sequence derived from human genome
LVWWKCKKWALHIVARL

SEQ ID NO: 9999 - protein, 17 aa, Artificial Sequence
  Quasi-synthetic sequence derived from human genome
GLWLTWLLKAFWGKKRI

SEQ ID NO: 10000 - protein, 17 aa, Artificial Sequence
  Quasi-synthetic sequence derived from human genome
LFFPPLRRLILFKGARY

SEQ ID NO: 10001 - protein, 18 aa, Artificial Sequence
  Quasi-synthetic sequence derived from human genome
IRIFKRKKRIKRRALLFL

SEQ ID NO: 10002 - protein, 18 aa, Artificial Sequence
  Quasi-synthetic sequence derived from human genome
LLLVVLWIRWKCRRLRIR

SEQ ID NO: 10003 - protein, 18 aa, Artificial Sequence
  Quasi-synthetic sequence derived from human genome
RIWVFRLKRRKRIARRLV

SEQ ID NO: 10004 - protein, 18 aa, Artificial Sequence
  Quasi-synthetic sequence derived from human genome
PLLLRPVKLLRRRFRLLL

SEQ ID NO: 10005 - protein, 18 aa, Artificial Sequence
  Quasi-synthetic sequence derived from human genome
IIRRLHKVLRPFLLRRLK

SEQ ID NO: 10006 - protein, 18 aa, Artificial Sequence
  Quasi-synthetic sequence derived from human genome
ILRIIRLVRVFRIFKLSR

SEQ ID NO: 10007 - protein, 18 aa, Artificial Sequence
  Quasi-synthetic sequence derived from human genome
RLMRRLVRRLRRWGLLPR

SEQ ID NO: 10008 - protein, 18 aa, Artificial Sequence
  Quasi-synthetic sequence derived from human genome
PRLKKWKGVRWKRLRLLL

SEQ ID NO: 10009 - protein, 18 aa, Artificial Sequence
  Quasi-synthetic sequence derived from human genome
FLKMLRFVKCFLRRRKPF

SEQ ID NO: 10010 - protein, 18 aa, Artificial Sequence
  Quasi-synthetic sequence derived from human genome
LLLRKILLRKFCQMRKRR

SEQ ID NO: 10011 - protein, 18 aa, Artificial Sequence
  Quasi-synthetic sequence derived from human genome
ILILLIKKLIIFILKKTR

SEQ ID NO: 10012 - protein, 18 aa, Artificial Sequence
  Quasi-synthetic sequence derived from human genome
IIRIMRVLRIARVLKLLK

SEQ ID NO: 10013 - protein, 18 aa, Artificial Sequence
  Quasi-synthetic sequence derived from human genome
FRLLRVLKLVRFLPALRR

SEQ ID NO: 10014 - protein, 18 aa, Artificial Sequence
  Quasi-synthetic sequence derived from human genome
ILRVIRLVRVFRIFKLSR

SEQ ID NO: 10015 - protein, 18 aa, Artificial Sequence
  Quasi-synthetic sequence derived from human genome
LLLFMKLRWFLKRWRQGK

SEQ ID NO: 10016 - protein, 18 aa, Artificial Sequence
  Quasi-synthetic sequence derived from human genome
LFMRRRHIVRKRTLRRLL

SEQ ID NO: 10017 - protein, 18 aa, Artificial Sequence
  Quasi-synthetic sequence derived from human genome
KFILWRRFRWAIILFIIL

SEQ ID NO: 10018 - protein, 18 aa, Artificial Sequence
  Quasi-synthetic sequence derived from human genome
LLLVLLLCRLRRLRARAR

SEQ ID NO: 10019 - protein, 18 aa, Artificial Sequence
  Quasi-synthetic sequence derived from human genome
AVLRLRRRVCVLRKRRLL

SEQ ID NO: 10020 - protein, 18 aa, Artificial Sequence
  Quasi-synthetic sequence derived from human genome
KYFYFFKILLRLRLAILK

SEQ ID NO: 10021 - protein, 18 aa, Artificial Sequence
  Quasi-synthetic sequence derived from human genome
RALSRRYLRRLLLLLLLL

SEQ ID NO: 10022 - protein, 18 aa, Artificial Sequence
  Quasi-synthetic sequence derived from human genome
FRLLRVLKLVRFMPALRR

SEQ ID NO: 10023 - protein, 18 aa, Artificial Sequence
  Quasi-synthetic sequence derived from human genome
FFRFLLRKLYVFRRSFLM

SEQ ID NO: 10024 - protein, 18 aa, Artificial Sequence
  Quasi-synthetic sequence derived from human genome
KLWFKFQRYFRRKPVRFF

SEQ ID NO: 10025 - protein, 18 aa, Artificial Sequence
  Quasi-synthetic sequence derived from human genome
LVLRRKALAPRLLLRLLR

SEQ ID NO: 10026 - protein, 18 aa, Artificial Sequence
  Quasi-synthetic sequence derived from human genome
RMVILRLLRYIVRLVWRM

SEQ ID NO: 10027 - protein, 18 aa, Artificial Sequence
  Quasi-synthetic sequence derived from human genome
FLLKKRKWPLKGWHKRFF

SEQ ID NO: 10028 - protein, 18 aa, Artificial Sequence
  Quasi-synthetic sequence derived from human genome
LVKRLHKVLRPFLLRRVK

SEQ ID NO: 10029 - protein, 18 aa, Artificial Sequence
  Quasi-synthetic sequence derived from human genome
EKKLRLFAWRKRWFILRR

SEQ ID NO: 10030 - protein, 18 aa, Artificial Sequence
  Quasi-synthetic sequence derived from human genome
KFMVLLWKNFILKRRRCI

SEQ ID NO: 10031 - protein, 18 aa, Artificial Sequence
  Quasi-synthetic sequence derived from human genome
PWRFRLLCLLRRWLPRPR

SEQ ID NO: 10032 - protein, 18 aa, Artificial Sequence
  Quasi-synthetic sequence derived from human genome
IRKFRRSLLQLLCLRLLR

SEQ ID NO: 10033 - protein, 18 aa, Artificial Sequence
  Quasi-synthetic sequence derived from human genome
WSKVRKLSFKRKRFLIKL

SEQ ID NO: 10034 - protein, 18 aa, Artificial Sequence
  Quasi-synthetic sequence derived from human genome
VMVFCLILWKWKKKKRPR

SEQ ID NO: 10035 - protein, 18 aa, Artificial Sequence
  Quasi-synthetic sequence derived from human genome
FRKTFKMLLLCRWKKKKV

SEQ ID NO: 10036 - protein, 18 aa, Artificial Sequence
  Quasi-synthetic sequence derived from human genome
RKKKKKFCYLCILLLIVL

SEQ ID NO: 10037 - protein, 18 aa, Artificial Sequence
  Quasi-synthetic sequence derived from human genome
RLPVKKIRKQMKLLLLLL

SEQ ID NO: 10038 - protein, 18 aa, Artificial Sequence
  Quasi-synthetic sequence derived from human genome
RWRRLRLQQLRRLRGLLR

SEQ ID NO: 10039 - protein, 18 aa, Artificial Sequence
  Quasi-synthetic sequence derived from human genome
VRWLRWKASLIKLRALRR

SEQ ID NO: 10040 - protein, 18 aa, Artificial Sequence
  Quasi-synthetic sequence derived from human genome
KVRKLSFKRKRFLIKLRP

SEQ ID NO: 10041 - protein, 18 aa, Artificial Sequence
  Quasi-synthetic sequence derived from human genome
LRIVRFTKILSLLRLLRL

SEQ ID NO: 10042 - protein, 18 aa, Artificial Sequence
  Quasi-synthetic sequence derived from human genome
LILILLLLLFLRRRAVVK

SEQ ID NO: 10043 - protein, 18 aa, Artificial Sequence
  Quasi-synthetic sequence derived from human genome
FLLIIIFLTVLLLKLRKR

SEQ ID NO: 10044 - protein, 18 aa, Artificial Sequence
  Quasi-synthetic sequence derived from human genome
VIRSIRILKFLVAKRKFK

SEQ ID NO: 10045 - protein, 18 aa, Artificial Sequence
  Quasi-synthetic sequence derived from human genome
LLIFFFIALVFFLYRRRK

SEQ ID NO: 10046 - protein, 18 aa, Artificial Sequence
  Quasi-synthetic sequence derived from human genome
WMLLFKPLVLRRQYLRRK

SEQ ID NO: 10047 - protein, 18 aa, Artificial Sequence
  Quasi-synthetic sequence derived from human genome
ILLKKYLMKRRWKKNFIA

SEQ ID NO: 10048 - protein, 18 aa, Artificial Sequence
  Quasi-synthetic sequence derived from human genome
FKSILFLPCLRKKILKIR

SEQ ID NO: 10049 - protein, 18 aa, Artificial Sequence
  Quasi-synthetic sequence derived from human genome
LRGFFIKRRFRSLRHKII

SEQ ID NO: 10050 - protein, 18 aa, Artificial Sequence
  Quasi-synthetic sequence derived from human genome
RWTHLLRLLRLIILLRIF

SEQ ID NO: 10051 - protein, 18 aa, Artificial Sequence
  Quasi-synthetic sequence derived from human genome
RRRGFGLFFFLRLHRLLL

SEQ ID NO: 10052 - protein, 18 aa, Artificial Sequence
  Quasi-synthetic sequence derived from human genome
RRWRHALHRRLLNRRLLL

SEQ ID NO: 10053 - protein, 18 aa, Artificial Sequence
  Quasi-synthetic sequence derived from human genome
LLLFTFLKKNRKKKLMVF

SEQ ID NO: 10054 - protein, 18 aa, Artificial Sequence
  Quasi-synthetic sequence derived from human genome
ALLRLFRMLRIFKLGKYW

SEQ ID NO: 10055 - protein, 18 aa, Artificial Sequence
  Quasi-synthetic sequence derived from human genome
FVKRKVIIFLKKCLLCKV

SEQ ID NO: 10056 - protein, 18 aa, Artificial Sequence
  Quasi-synthetic sequence derived from human genome
KVLNINLKRKFIKKRIII

SEQ ID NO: 10057 - protein, 18 aa, Artificial Sequence
  Quasi-synthetic sequence derived from human genome
VGVLLLFVLLLVVRRRRR

SEQ ID NO: 10058 - protein, 18 aa, Artificial Sequence
  Quasi-synthetic sequence derived from human genome
VWRRLLRKRWVLALVFGL

SEQ ID NO: 10059 - protein, 18 aa, Artificial Sequence
  Quasi-synthetic sequence derived from human genome
KIILFLPCISRKLKRIKK

SEQ ID NO: 10060 - protein, 18 aa, Artificial Sequence
  Quasi-synthetic sequence derived from human genome
IIQCWWRLILSKILKKRR

SEQ ID NO: 10061 - protein, 18 aa, Artificial Sequence
  Quasi-synthetic sequence derived from human genome
WVYLLLRKILLRKFCQIR

SEQ ID NO: 10062 - protein, 18 aa, Artificial Sequence
  Quasi-synthetic sequence derived from human genome
LRRLLRLLVLGLWLALLR

SEQ ID NO: 10063 - protein, 18 aa, Artificial Sequence
  Quasi-synthetic sequence derived from human genome
IRNIGIWFFWIRLYKIRR

SEQ ID NO: 10064 - protein, 18 aa, Artificial Sequence
  Quasi-synthetic sequence derived from human genome
LRRKKKKTIKMLMLVVVL

SEQ ID NO: 10065 - protein, 18 aa, Artificial Sequence
  Quasi-synthetic sequence derived from human genome
FFLMKRKIIVLMPWLLRL

SEQ ID NO: 10066 - protein, 18 aa, Artificial Sequence
  Quasi-synthetic sequence derived from human genome
IFLRIKRRVKSVVLVILL

SEQ ID NO: 10067 - protein, 18 aa, Artificial Sequence
  Quasi-synthetic sequence derived from human genome
RLLRGLWQRWRRYKYRFV

SEQ ID NO: 10068 - protein, 18 aa, Artificial Sequence
  Quasi-synthetic sequence derived from human genome
LCFIFICYFKIYIRLKRR

SEQ ID NO: 10069 - protein, 18 aa, Artificial Sequence
  Quasi-synthetic sequence derived from human genome
RALGRRKGVWLRLRKILF

SEQ ID NO: 10070 - protein, 18 aa, Artificial Sequence
  Quasi-synthetic sequence derived from human genome
LFLMVMYFFFRVRSRRWK

SEQ ID NO: 10071 - protein, 18 aa, Artificial Sequence
  Quasi-synthetic sequence derived from human genome
HLLKTVRLLRLLRLLPRL

SEQ ID NO: 10072 - protein, 18 aa, Artificial Sequence
  Quasi-synthetic sequence derived from human genome
FTRRKYLLKALFKALKRL

SEQ ID NO: 10073 - protein, 18 aa, Artificial Sequence
  Quasi-synthetic sequence derived from human genome
LAPFLLWLRKCLRKAKKF

SEQ ID NO: 10074 - protein, 18 aa, Artificial Sequence
  Quasi-synthetic sequence derived from human genome
FVIVLLVLRLRRWHKSRL

SEQ ID NO: 10075 - protein, 18 aa, Artificial Sequence
  Quasi-synthetic sequence derived from human genome
RLLIKKLPRVLAIQLKRF

SEQ ID NO: 10076 - protein, 18 aa, Artificial Sequence
  Quasi-synthetic sequence derived from human genome
FVILLLALRLRRWHKSRL

SEQ ID NO: 10077 - protein, 18 aa, Artificial Sequence
  Quasi-synthetic sequence derived from human genome
KLLILLIGTWALFFRKRR

SEQ ID NO: 10078 - protein, 18 aa, Artificial Sequence
  Quasi-synthetic sequence derived from human genome
IIITLVVLLLKYRRRHRK

SEQ ID NO: 10079 - protein, 18 aa, Artificial Sequence
  Quasi-synthetic sequence derived from human genome
VIFILVVLFIVFRKKVFR

SEQ ID NO: 10080 - protein, 18 aa, Artificial Sequence
  Quasi-synthetic sequence derived from human genome
KIKTFLSLVWKRRILFFV

SEQ ID NO: 10081 - protein, 18 aa, Artificial Sequence
  Quasi-synthetic sequence derived from human genome
LRVLRMMRIFWVIKLARH

SEQ ID NO: 10082 - protein, 18 aa, Artificial Sequence
  Quasi-synthetic sequence derived from human genome
PLRILRKRNKALRKIRKL

SEQ ID NO: 10083 - protein, 18 aa, Artificial Sequence
  Quasi-synthetic sequence derived from human genome
RRKARRLLKTVLMILLAF

SEQ ID NO: 10084 - protein, 18 aa, Artificial Sequence
  Quasi-synthetic sequence derived from human genome
LVIVLWGIRLLLQRKKKL

SEQ ID NO: 10085 - protein, 18 aa, Artificial Sequence
  Quasi-synthetic sequence derived from human genome
LKVLFKKTHRILRRLFNL

SEQ ID NO: 10086 - protein, 18 aa, Artificial Sequence
  Quasi-synthetic sequence derived from human genome
AKLKRKYWWKNLKMMIIL

SEQ ID NO: 10087 - protein, 18 aa, Artificial Sequence
  Quasi-synthetic sequence derived from human genome
RYSLQKLRLVRWLLKKVF

SEQ ID NO: 10088 - protein, 18 aa, Artificial Sequence
  Quasi-synthetic sequence derived from human genome
LFRKGIMKIMVYKIFRIL

SEQ ID NO: 10089 - protein, 18 aa, Artificial Sequence
  Quasi-synthetic sequence derived from human genome
KLFLKKKVVVKICKRKYR

SEQ ID NO: 10090 - protein, 18 aa, Artificial Sequence
  Quasi-synthetic sequence derived from human genome
IILFIILLGVIMAKRKRK

SEQ ID NO: 10091 - protein, 18 aa, Artificial Sequence
  Quasi-synthetic sequence derived from human genome
KVFKSLRALRAIRVLRRL

SEQ ID NO: 10092 - protein, 18 aa, Artificial Sequence
  Quasi-synthetic sequence derived from human genome
FRIVRLARIGRILRLVRA

SEQ ID NO: 10093 - protein, 18 aa, Artificial Sequence
  Quasi-synthetic sequence derived from human genome
MKFIVWRRFKWVIIGLLF

SEQ ID NO: 10094 - protein, 18 aa, Artificial Sequence
  Quasi-synthetic sequence derived from human genome
ILLLLLLLLLFLILRHRR

SEQ ID NO: 10095 - protein, 18 aa, Artificial Sequence
  Quasi-synthetic sequence derived from human genome
LAFLWGLLILLKYRWRKL

SEQ ID NO: 10096 - protein, 18 aa, Artificial Sequence
  Quasi-synthetic sequence derived from human genome
LLKPIQRLLHYRLLLRRL

SEQ ID NO: 10097 - protein, 18 aa, Artificial Sequence
  Quasi-synthetic sequence derived from human genome
LIRIRKLTLKRQRKLVPL

SEQ ID NO: 10098 - protein, 18 aa, Artificial Sequence
  Quasi-synthetic sequence derived from human genome
RVFLQRLLWLLRLLFPRV

SEQ ID NO: 10099 - protein, 18 aa, Artificial Sequence
  Quasi-synthetic sequence derived from human genome
LRLLRCQCRRRRRRRPLW

SEQ ID NO: 10100 - protein, 18 aa, Artificial Sequence
  Quasi-synthetic sequence derived from human genome
RKAPLWLRAKFQRLLFKL

SEQ ID NO: 10101 - protein, 18 aa, Artificial Sequence
  Quasi-synthetic sequence derived from human genome
LLLVVILIVKKSKLAKKR

SEQ ID NO: 10102 - protein, 18 aa, Artificial Sequence
  Quasi-synthetic sequence derived from human genome
RLRLRQRRRRLLIKKMPA

SEQ ID NO: 10103 - protein, 18 aa, Artificial Sequence
  Quasi-synthetic sequence derived from human genome
HRLLKRLLGPKLRRFLKP

SEQ ID NO: 10104 - protein, 18 aa, Artificial Sequence
  Quasi-synthetic sequence derived from human genome
ITFFRLFRVMRLVKLLSR

SEQ ID NO: 10105 - protein, 18 aa, Artificial Sequence
  Quasi-synthetic sequence derived from human genome
RRRLIPHPRRLWPFVRRR

SEQ ID NO: 10106 - protein, 18 aa, Artificial Sequence
  Quasi-synthetic sequence derived from human genome
VILMGFSIWLYWRRKKRK

SEQ ID NO: 10107 - protein, 18 aa, Artificial Sequence
  Quasi-synthetic sequence derived from human genome
LRVLRVLRPLKTIKRLPK

SEQ ID NO: 10108 - protein, 18 aa, Artificial Sequence
  Quasi-synthetic sequence derived from human genome
RVVQIFRIMRILRILKLA

SEQ ID NO: 10109 - protein, 18 aa, Artificial Sequence
  Quasi-synthetic sequence derived from human genome
LLVIFLIWRCFLRNKTRR

SEQ ID NO: 10110 - protein, 18 aa, Artificial Sequence
  Quasi-synthetic sequence derived from human genome
LLIAFIFLIIKSYRKYRR

SEQ ID NO: 10111 - protein, 18 aa, Artificial Sequence
  Quasi-synthetic sequence derived from human genome
RLTWKLLLLRRPLYRNLL

SEQ ID NO: 10112 - protein, 18 aa, Artificial Sequence
  Quasi-synthetic sequence derived from human genome
RWFAFKMMMAKKWAKFLR

SEQ ID NO: 10113 - protein, 18 aa, Artificial Sequence
  Quasi-synthetic sequence derived from human genome
VLRTFRLMRVLKLVRFLP

SEQ ID NO: 10114 - protein, 18 aa, Artificial Sequence
  Quasi-synthetic sequence derived from human genome
LLLWTFLLQRRFVKKRGK

SEQ ID NO: 10115 - protein, 18 aa, Artificial Sequence
  Quasi-synthetic sequence derived from human genome
WIILMVFSIWLYRHRKKR

SEQ ID NO: 10116 - protein, 18 aa, Artificial Sequence
  Quasi-synthetic sequence derived from human genome
HLLKTVRLLRLLRLLQKL

SEQ ID NO: 10117 - protein, 18 aa, Artificial Sequence
  Quasi-synthetic sequence derived from human genome
RISITFFRLFRVMRLVKL

SEQ ID NO: 10118 - protein, 18 aa, Artificial Sequence
  Quasi-synthetic sequence derived from human genome
LLLFQVIRLYQRRRWMIR

SEQ ID NO: 10119 - protein, 18 aa, Artificial Sequence
  Quasi-synthetic sequence derived from human genome
LLLWKNWTLRKRQKIRFV

SEQ ID NO: 10120 - protein, 18 aa, Artificial Sequence
  Quasi-synthetic sequence derived from human genome
AVRVVIAILRLRFLVKKW

SEQ ID NO: 10121 - protein, 18 aa, Artificial Sequence
  Quasi-synthetic sequence derived from human genome
FVLVLLALRLRRWHKSRL

SEQ ID NO: 10122 - protein, 18 aa, Artificial Sequence
  Quasi-synthetic sequence derived from human genome
LMRKDKKKLRRLLKYMFI

SEQ ID NO: 10123 - protein, 18 aa, Artificial Sequence
  Quasi-synthetic sequence derived from human genome
RLLLLCRWDKRRWRKIPK

SEQ ID NO: 10124 - protein, 18 aa, Artificial Sequence
  Quasi-synthetic sequence derived from human genome
RSIVLALRLRKRFLNFFL

SEQ ID NO: 10125 - protein, 18 aa, Artificial Sequence
  Quasi-synthetic sequence derived from human genome
ALLLKRFLLARRSRRGLF

SEQ ID NO: 10126 - protein, 18 aa, Artificial Sequence
  Quasi-synthetic sequence derived from human genome
FKTLKKRAWAIFLRLCLK

SEQ ID NO: 10127 - protein, 18 aa, Artificial Sequence
  Quasi-synthetic sequence derived from human genome
KLLAKKRVVRMLLVIVVL

SEQ ID NO: 10128 - protein, 18 aa, Artificial Sequence
  Quasi-synthetic sequence derived from human genome
ITFFRLFRVMRLVKLLSK

SEQ ID NO: 10129 - protein, 18 aa, Artificial Sequence
  Quasi-synthetic sequence derived from human genome
LLKLNQLKFRKKKLRFGR

SEQ ID NO: 10130 - protein, 18 aa, Artificial Sequence
  Quasi-synthetic sequence derived from human genome
LKRLVKLHIKRHYHKKFW

SEQ ID NO: 10131 - protein, 18 aa, Artificial Sequence
  Quasi-synthetic sequence derived from human genome
RFFHFRRLIFTRKGVLRV

SEQ ID NO: 10132 - protein, 18 aa, Artificial Sequence
  Quasi-synthetic sequence derived from human genome
KRSWPFLRSFRVLRVFKL

SEQ ID NO: 10133 - protein, 18 aa, Artificial Sequence
  Quasi-synthetic sequence derived from human genome
RRKSWRLEFLFLRRRCFL

SEQ ID NO: 10134 - protein, 18 aa, Artificial Sequence
  Quasi-synthetic sequence derived from human genome
KKNIFLLFKKLCSFRYRR

SEQ ID NO: 10135 - protein, 18 aa, Artificial Sequence
  Quasi-synthetic sequence derived from human genome
KLRRYAWKKRWFILRSGR

SEQ ID NO: 10136 - protein, 18 aa, Artificial Sequence
  Quasi-synthetic sequence derived from human genome
MKMMLVRRFRVLILMVFL

SEQ ID NO: 10137 - protein, 18 aa, Artificial Sequence
  Quasi-synthetic sequence derived from human genome
WYLIKWIWTHLCKKKMRR

SEQ ID NO: 10138 - protein, 18 aa, Artificial Sequence
  Quasi-synthetic sequence derived from human genome
IVFIKVVQFFRILRIFKL

SEQ ID NO: 10139 - protein, 18 aa, Artificial Sequence
  Quasi-synthetic sequence derived from human genome
LTLLVLILLIVTMRRRKK

SEQ ID NO: 10140 - protein, 18 aa, Artificial Sequence
  Quasi-synthetic sequence derived from human genome
IQRRKWAVRIIRKFIKGF

SEQ ID NO: 10141 - protein, 18 aa, Artificial Sequence
  Quasi-synthetic sequence derived from human genome
SLLLLSLWKLWRVKKFLI

SEQ ID NO: 10142 - protein, 18 aa, Artificial Sequence
  Quasi-synthetic sequence derived from human genome
RRKGVWLRLRKILFCVLG

SEQ ID NO: 10143 - protein, 18 aa, Artificial Sequence
  Quasi-synthetic sequence derived from human genome
LKFLAKCRKKKKLFAPWR

SEQ ID NO: 10144 - protein, 18 aa, Artificial Sequence
  Quasi-synthetic sequence derived from human genome
YLKRFKVMKIKVLRSWCR

SEQ ID NO: 10145 - protein, 18 aa, Artificial Sequence
  Quasi-synthetic sequence derived from human genome
VLRVLRPLKTIKRLPKLK

SEQ ID NO: 10146 - protein, 18 aa, Artificial Sequence
  Quasi-synthetic sequence derived from human genome
FVIVLLALRLRRWHKSRL

SEQ ID NO: 10147 - protein, 18 aa, Artificial Sequence
  Quasi-synthetic sequence derived from human genome
IVLLCCFCSFLRRRLKRR

SEQ ID NO: 10148 - protein, 18 aa, Artificial Sequence
  Quasi-synthetic sequence derived from human genome
RAFLLRRRFLHLKKAAIV

SEQ ID NO: 10149 - protein, 18 aa, Artificial Sequence
  Quasi-synthetic sequence derived from human genome
KTIRRRLPFSKWRLAFRF

SEQ ID NO: 10150 - protein, 18 aa, Artificial Sequence
  Quasi-synthetic sequence derived from human genome
LKRYAWKRRWFVLRSGRL

SEQ ID NO: 10151 - protein, 18 aa, Artificial Sequence
  Quasi-synthetic sequence derived from human genome
VLLLLLLLLLFLILRHRR

SEQ ID NO: 10152 - protein, 18 aa, Artificial Sequence
  Quasi-synthetic sequence derived from human genome
RVLSRISKFRRLRQLLRR

SEQ ID NO: 10153 - protein, 18 aa, Artificial Sequence
  Quasi-synthetic sequence derived from human genome
RLAVIPWGVRKLLRWVRR

SEQ ID NO: 10154 - protein, 18 aa, Artificial Sequence
  Quasi-synthetic sequence derived from human genome
AFFRLFRVMRLIKLLSRA

SEQ ID NO: 10155 - protein, 18 aa, Artificial Sequence
  Quasi-synthetic sequence derived from human genome
FRFCLLLRLLRQLLTLLR

SEQ ID NO: 10156 - protein, 18 aa, Artificial Sequence
  Quasi-synthetic sequence derived from human genome
WRMQVFAMARLRFLKLKR

SEQ ID NO: 10157 - protein, 18 aa, Artificial Sequence
  Quasi-synthetic sequence derived from human genome
ILRRKLYIHRVTLRKLLP

SEQ ID NO: 10158 - protein, 18 aa, Artificial Sequence
  Quasi-synthetic sequence derived from human genome
VLAKKMLRKALKLLNRIF

SEQ ID NO: 10159 - protein, 18 aa, Artificial Sequence
  Quasi-synthetic sequence derived from human genome
LRIPRPLIMIRAFRIYFR

SEQ ID NO: 10160 - protein, 18 aa, Artificial Sequence
  Quasi-synthetic sequence derived from human genome
RKRLRCRRKTVLVLMCIL

SEQ ID NO: 10161 - protein, 18 aa, Artificial Sequence
  Quasi-synthetic sequence derived from human genome
RWILQFRRWARKWSRFTR

SEQ ID NO: 10162 - protein, 18 aa, Artificial Sequence
  Quasi-synthetic sequence derived from human genome
RRRRRACIALFLVLLFAF

SEQ ID NO: 10163 - protein, 18 aa, Artificial Sequence
  Quasi-synthetic sequence derived from human genome
KKIMFFLLIIRKLLNHIL

SEQ ID NO: 10164 - protein, 18 aa, Artificial Sequence
  Quasi-synthetic sequence derived from human genome
IRGWLLRKKYLRMRKAAI

SEQ ID NO: 10165 - protein, 18 aa, Artificial Sequence
  Quasi-synthetic sequence derived from human genome
RWVRRAWQRIISWVFFWR

SEQ ID NO: 10166 - protein, 18 aa, Artificial Sequence
  Quasi-synthetic sequence derived from human genome
LRKTKYRSFRRRLLKFIP

SEQ ID NO: 10167 - protein, 18 aa, Artificial Sequence
  Quasi-synthetic sequence derived from human genome
VKHWPWMKLFFKIKPLLK

SEQ ID NO: 10168 - protein, 18 aa, Artificial Sequence
  Quasi-synthetic sequence derived from human genome
RRLGSLRWCGRRRLRWRL

SEQ ID NO: 10169 - protein, 18 aa, Artificial Sequence
  Quasi-synthetic sequence derived from human genome
LLKKRKWPLKGWHKRYFV

SEQ ID NO: 10170 - protein, 18 aa, Artificial Sequence
  Quasi-synthetic sequence derived from human genome
ILFAVFLILLLMYRMKKK

SEQ ID NO: 10171 - protein, 18 aa, Artificial Sequence
  Quasi-synthetic sequence derived from human genome
KIPLPRFKLKCIFCKKRR

SEQ ID NO: 10172 - protein, 18 aa, Artificial Sequence
  Quasi-synthetic sequence derived from human genome
LRFLKLRRERRALLCLLL

SEQ ID NO: 10173 - protein, 18 aa, Artificial Sequence
  Quasi-synthetic sequence derived from human genome
LLRFQRKLSVLLLLLGRR

SEQ ID NO: 10174 - protein, 18 aa, Artificial Sequence
  Quasi-synthetic sequence derived from human genome
KLICFLIPFLLSLKKKMK

SEQ ID NO: 10175 - protein, 18 aa, Artificial Sequence
  Quasi-synthetic sequence derived from human genome
LNFPRSPRIRKRFLLRRI

SEQ ID NO: 10176 - protein, 18 aa, Artificial Sequence
  Quasi-synthetic sequence derived from human genome
RLARQYLLPLLRRLARRL

SEQ ID NO: 10177 - protein, 18 aa, Artificial Sequence
  Quasi-synthetic sequence derived from human genome
ALLFIVRKKRKEKRLKRL

SEQ ID NO: 10178 - protein, 18 aa, Artificial Sequence
  Quasi-synthetic sequence derived from human genome
KLKQFTKILRRKRLLPKR

SEQ ID NO: 10179 - protein, 18 aa, Artificial Sequence
  Quasi-synthetic sequence derived from human genome
LLAALLLLLLLSRRRTRR

SEQ ID NO: 10180 - protein, 18 aa, Artificial Sequence
  Quasi-synthetic sequence derived from human genome
LCCRRRRARLRFMKQLRL

SEQ ID NO: 10181 - protein, 18 aa, Artificial Sequence
  Quasi-synthetic sequence derived from human genome
FANFLMKVLKKKIKRVKK

SEQ ID NO: 10182 - protein, 18 aa, Artificial Sequence
  Quasi-synthetic sequence derived from human genome
ILIILIVIAILLFKRKRT

SEQ ID NO: 10183 - protein, 18 aa, Artificial Sequence
  Quasi-synthetic sequence derived from human genome
LCRLRVRKAIGKYRIKLL

SEQ ID NO: 10184 - protein, 18 aa, Artificial Sequence
  Quasi-synthetic sequence derived from human genome
RHLMKVKLKKYTKFLFVR

SEQ ID NO: 10185 - protein, 18 aa, Artificial Sequence
  Quasi-synthetic sequence derived from human genome
CIVFGFIILLLLVLRKRR

SEQ ID NO: 10186 - protein, 18 aa, Artificial Sequence
  Quasi-synthetic sequence derived from human genome
ILCLVMILYTRRRWCKRR

SEQ ID NO: 10187 - protein, 18 aa, Artificial Sequence
  Quasi-synthetic sequence derived from human genome
LLPPKRRLLPRVRLLPLL

SEQ ID NO: 10188 - protein, 18 aa, Artificial Sequence
  Quasi-synthetic sequence derived from human genome
WKKFLSRPALPFILRLLR

SEQ ID NO: 10189 - protein, 18 aa, Artificial Sequence
  Quasi-synthetic sequence derived from human genome
RMKVKKLPMILALHLKRF

SEQ ID NO: 10190 - protein, 18 aa, Artificial Sequence
  Quasi-synthetic sequence derived from human genome
MRVKKLPMILALHLKRFK

SEQ ID NO: 10191 - protein, 18 aa, Artificial Sequence
  Quasi-synthetic sequence derived from human genome
GKVVQILRLMRIFRILKL

SEQ ID NO: 10192 - protein, 18 aa, Artificial Sequence
  Quasi-synthetic sequence derived from human genome
LLAILRRRWWKYMILGLI

SEQ ID NO: 10193 - protein, 18 aa, Artificial Sequence
  Quasi-synthetic sequence derived from human genome
LLFKFKQLKMPVRALLRL

SEQ ID NO: 10194 - protein, 18 aa, Artificial Sequence
  Quasi-synthetic sequence derived from human genome
KKKKKKRQCFAFLIYFRL

SEQ ID NO: 10195 - protein, 18 aa, Artificial Sequence
  Quasi-synthetic sequence derived from human genome
VLRVLRALRILYVMRLAR

SEQ ID NO: 10196 - protein, 18 aa, Artificial Sequence
  Quasi-synthetic sequence derived from human genome
LRLPKRLRVVYFLARTRL

SEQ ID NO: 10197 - protein, 18 aa, Artificial Sequence
  Quasi-synthetic sequence derived from human genome
WLRRKLRGKRRPVIAFCL

SEQ ID NO: 10198 - protein, 18 aa, Artificial Sequence
  Quasi-synthetic sequence derived from human genome
LLRKRYRHRPCRLQFLLL

SEQ ID NO: 10199 - protein, 18 aa, Artificial Sequence
  Quasi-synthetic sequence derived from human genome
INFILFINILRILMRKLR

SEQ ID NO: 10200 - protein, 18 aa, Artificial Sequence
  Quasi-synthetic sequence derived from human genome
AIKRLARISLVKKLMKKW

SEQ ID NO: 10201 - protein, 18 aa, Artificial Sequence
  Quasi-synthetic sequence derived from human genome
ILGVLRVLRLLRTLRPLR

SEQ ID NO: 10202 - protein, 18 aa, Artificial Sequence
  Quasi-synthetic sequence derived from human genome
LILSLLLFMVHRLRQRRR

SEQ ID NO: 10203 - protein, 18 aa, Artificial Sequence
  Quasi-synthetic sequence derived from human genome
KRIRVLVIRKLVRSVGRL

SEQ ID NO: 10204 - protein, 18 aa, Artificial Sequence
  Quasi-synthetic sequence derived from human genome
KFRRRTCIILALFILFIF

SEQ ID NO: 10205 - protein, 18 aa, Artificial Sequence
  Quasi-synthetic sequence derived from human genome
RLLRLIILLRIFHLFHQK

SEQ ID NO: 10206 - protein, 18 aa, Artificial Sequence
  Quasi-synthetic sequence derived from human genome
RKLWKRFFCFLRRSGLYY

SEQ ID NO: 10207 - protein, 18 aa, Artificial Sequence
  Quasi-synthetic sequence derived from human genome
LLLFLLLFLLLRRQRHSK

SEQ ID NO: 10208 - protein, 18 aa, Artificial Sequence
  Quasi-synthetic sequence derived from human genome
YRVVLRRWKSLKLPKKRM

SEQ ID NO: 10209 - protein, 18 aa, Artificial Sequence
  Quasi-synthetic sequence derived from human genome
KTFYYKSRFWLLKLLFRV

SEQ ID NO: 10210 - protein, 18 aa, Artificial Sequence
  Quasi-synthetic sequence derived from human genome
RRIVVSRGRLRRLLWIGF

SEQ ID NO: 10211 - protein, 18 aa, Artificial Sequence
  Quasi-synthetic sequence derived from human genome
CLFIFVLIYVRVFRKSRR

SEQ ID NO: 10212 - protein, 18 aa, Artificial Sequence
  Quasi-synthetic sequence derived from human genome
WLMRRRRRKQRKKKAWIY

SEQ ID NO: 10213 - protein, 18 aa, Artificial Sequence
  Quasi-synthetic sequence derived from human genome
LLVLLLAAYFFRFRKQRK

SEQ ID NO: 10214 - protein, 18 aa, Artificial Sequence
  Quasi-synthetic sequence derived from human genome
RRFRRSRRTGRLVVLIIL

SEQ ID NO: 10215 - protein, 18 aa, Artificial Sequence
  Quasi-synthetic sequence derived from human genome
LLFRWKPLWGVRLRLRPC

SEQ ID NO: 10216 - protein, 18 aa, Artificial Sequence
  Quasi-synthetic sequence derived from human genome
VMLFKKKKTRKLKIALAL

SEQ ID NO: 10217 - protein, 18 aa, Artificial Sequence
  Quasi-synthetic sequence derived from human genome
WWWARAARLARLRFRRSL

SEQ ID NO: 10218 - protein, 18 aa, Artificial Sequence
  Quasi-synthetic sequence derived from human genome
KKLMRKYTVLRLMIRQRL

SEQ ID NO: 10219 - protein, 18 aa, Artificial Sequence
  Quasi-synthetic sequence derived from human genome
FRTGIKRRILLLIPKWLY

SEQ ID NO: 10220 - protein, 18 aa, Artificial Sequence
  Quasi-synthetic sequence derived from human genome
LVFLCVCFIFRVKTRRKK

SEQ ID NO: 10221 - protein, 18 aa, Artificial Sequence
  Quasi-synthetic sequence derived from human genome
LRFLKLKRQTKVLLTLLL

SEQ ID NO: 10222 - protein, 18 aa, Artificial Sequence
  Quasi-synthetic sequence derived from human genome
RRLRAIYTIMRWFRRHKV

SEQ ID NO: 10223 - protein, 18 aa, Artificial Sequence
  Quasi-synthetic sequence derived from human genome
LTITVITLLIFLRRRLRK

SEQ ID NO: 10224 - protein, 18 aa, Artificial Sequence
  Quasi-synthetic sequence derived from human genome
KLLRNIPRWTHLLRLLRL

SEQ ID NO: 10225 - protein, 18 aa, Artificial Sequence
  Quasi-synthetic sequence derived from human genome
VKILRVLRVLRPLRAINR

SEQ ID NO: 10226 - protein, 18 aa, Artificial Sequence
  Quasi-synthetic sequence derived from human genome
LLVLILSSVFLFRLFKRR

SEQ ID NO: 10227 - protein, 18 aa, Artificial Sequence
  Quasi-synthetic sequence derived from human genome
KLQRYAWRKRWFVLRRGR

SEQ ID NO: 10228 - protein, 18 aa, Artificial Sequence
  Quasi-synthetic sequence derived from human genome
AILLYLLRLRRIHRRTPR

SEQ ID NO: 10229 - protein, 18 aa, Artificial Sequence
  Quasi-synthetic sequence derived from human genome
VSLLLLSLWKLWRVKKFL

SEQ ID NO: 10230 - protein, 18 aa, Artificial Sequence
  Quasi-synthetic sequence derived from human genome
RLLRLIILIRIFHLLHQK

SEQ ID NO: 10231 - protein, 18 aa, Artificial Sequence
  Quasi-synthetic sequence derived from human genome
KLWKVKKALKMTIFWRGL

SEQ ID NO: 10232 - protein, 18 aa, Artificial Sequence
  Quasi-synthetic sequence derived from human genome
MRWRWWQRLLPWRLLQAR

SEQ ID NO: 10233 - protein, 18 aa, Artificial Sequence
  Quasi-synthetic sequence derived from human genome
LRKRTLKVLTFLVLFIFL

SEQ ID NO: 10234 - protein, 18 aa, Artificial Sequence
  Quasi-synthetic sequence derived from human genome
RRRKTVRLLLANLVIFLL

SEQ ID NO: 10235 - protein, 18 aa, Artificial Sequence
  Quasi-synthetic sequence derived from human genome
KKQRLSKKLRRKLQMWLW

SEQ ID NO: 10236 - protein, 18 aa, Artificial Sequence
  Quasi-synthetic sequence derived from human genome
RVIKKKKVIMKKRKKLTL

SEQ ID NO: 10237 - protein, 18 aa, Artificial Sequence
  Quasi-synthetic sequence derived from human genome
KKRVIRMLIVIVVLFFLC

SEQ ID NO: 10238 - protein, 18 aa, Artificial Sequence
  Quasi-synthetic sequence derived from human genome
FLARYRLVSNKLKKRFLR

SEQ ID NO: 10239 - protein, 18 aa, Artificial Sequence
  Quasi-synthetic sequence derived from human genome
LVIARRALLRFLFRQLLL

SEQ ID NO: 10240 - protein, 18 aa, Artificial Sequence
  Quasi-synthetic sequence derived from human genome
LLLKFIKIMKHLRKLNNF

SEQ ID NO: 10241 - protein, 18 aa, Artificial Sequence
  Quasi-synthetic sequence derived from human genome
FRRKIYYLPRRYKFMSRI

SEQ ID NO: 10242 - protein, 18 aa, Artificial Sequence
  Quasi-synthetic sequence derived from human genome
ILYRRLLLTKLFIRGWGR

SEQ ID NO: 10243 - protein, 18 aa, Artificial Sequence
  Quasi-synthetic sequence derived from human genome
IIQKYWRMYVVRRRYKIR

SEQ ID NO: 10244 - protein, 18 aa, Artificial Sequence
  Quasi-synthetic sequence derived from human genome
LVLALWKLGFFRSARRRR

SEQ ID NO: 10245 - protein, 18 aa, Artificial Sequence
  Quasi-synthetic sequence derived from human genome
MSIRRLLILILKIGRRWT

SEQ ID NO: 10246 - protein, 18 aa, Artificial Sequence
  Quasi-synthetic sequence derived from human genome
GQVLRVMRLMRIFRILKL

SEQ ID NO: 10247 - protein, 18 aa, Artificial Sequence
  Quasi-synthetic sequence derived from human genome
YLWAIGKNVWKRWKKRFF

SEQ ID NO: 10248 - protein, 18 aa, Artificial Sequence
  Quasi-synthetic sequence derived from human genome
LRKKFAQKMLRKARRKLI

SEQ ID NO: 10249 - protein, 18 aa, Artificial Sequence
  Quasi-synthetic sequence derived from human genome
AIRAVRILQFRLYKKKFK

SEQ ID NO: 10250 - protein, 18 aa, Artificial Sequence
  Quasi-synthetic sequence derived from human genome
LLLCLCLILLRVRSCRRK

SEQ ID NO: 10251 - protein, 18 aa, Artificial Sequence
  Quasi-synthetic sequence derived from human genome
WVRQIFIHKLPLYLRLKR

SEQ ID NO: 10252 - protein, 18 aa, Artificial Sequence
  Quasi-synthetic sequence derived from human genome
RAFVKRVIMSRFFKIIMI

SEQ ID NO: 10253 - protein, 18 aa, Artificial Sequence
  Quasi-synthetic sequence derived from human genome
RIRFSKLLLKILFYISIF

SEQ ID NO: 10254 - protein, 18 aa, Artificial Sequence
  Quasi-synthetic sequence derived from human genome
IRPWKRKGRTLFRRLLFQ

SEQ ID NO: 10255 - protein, 18 aa, Artificial Sequence
  Quasi-synthetic sequence derived from human genome
LRFLRLCRSFYITCRRLR

SEQ ID NO: 10256 - protein, 18 aa, Artificial Sequence
  Quasi-synthetic sequence derived from human genome
KKMWIKLRSLLRYMVKQL

SEQ ID NO: 10257 - protein, 18 aa, Artificial Sequence
  Quasi-synthetic sequence derived from human genome
WLLREQKRKKKLRKLLKR

SEQ ID NO: 10258 - protein, 18 aa, Artificial Sequence
  Quasi-synthetic sequence derived from human genome
NLSFLRLFRAARLIKLLR

SEQ ID NO: 10259 - protein, 18 aa, Artificial Sequence
  Quasi-synthetic sequence derived from human genome
RVIRLARIGRILRLIRAA

SEQ ID NO: 10260 - protein, 18 aa, Artificial Sequence
  Quasi-synthetic sequence derived from human genome
KFRRYLSVFFRKHITKRF

SEQ ID NO: 10261 - protein, 18 aa, Artificial Sequence
  Quasi-synthetic sequence derived from human genome
MARRSRHRLLLLLLRYLV

SEQ ID NO: 10262 - protein, 18 aa, Artificial Sequence
  Quasi-synthetic sequence derived from human genome
WVFILFRKAVFQRLKLWV

SEQ ID NO: 10263 - protein, 18 aa, Artificial Sequence
  Quasi-synthetic sequence derived from human genome
ILLILVVLFAALKRQRKK

SEQ ID NO: 10264 - protein, 18 aa, Artificial Sequence
  Quasi-synthetic sequence derived from human genome
RGKRHWKKLWFVIKGKVL

SEQ ID NO: 10265 - protein, 18 aa, Artificial Sequence
  Quasi-synthetic sequence derived from human genome
VIVFIIIVLYMLRFKKYK

SEQ ID NO: 10266 - protein, 18 aa, Artificial Sequence
  Quasi-synthetic sequence derived from human genome
RFVRILRIFKLTRHFVGL

SEQ ID NO: 10267 - protein, 18 aa, Artificial Sequence
  Quasi-synthetic sequence derived from human genome
KRGLRNKRIGHFLFWFLR

SEQ ID NO: 10268 - protein, 18 aa, Artificial Sequence
  Quasi-synthetic sequence derived from human genome
KVILHKKRYIYRKIKGWR

SEQ ID NO: 10269 - protein, 18 aa, Artificial Sequence
  Quasi-synthetic sequence derived from human genome
FFRLQKFLRRTQFLLFFL

SEQ ID NO: 10270 - protein, 18 aa, Artificial Sequence
  Quasi-synthetic sequence derived from human genome
KLLKLRRNIVKLSLYRHF

SEQ ID NO: 10271 - protein, 18 aa, Artificial Sequence
  Quasi-synthetic sequence derived from human genome
KLFKSLLGKKKMRILILS

SEQ ID NO: 10272 - protein, 18 aa, Artificial Sequence
  Quasi-synthetic sequence derived from human genome
VIRAIRIMKFHVAKRKFK

SEQ ID NO: 10273 - protein, 18 aa, Artificial Sequence
  Quasi-synthetic sequence derived from human genome
RARRRRPLFALLLLCALL

SEQ ID NO: 10274 - protein, 18 aa, Artificial Sequence
  Quasi-synthetic sequence derived from human genome
LLFFLTLRFSVVKRGRKK

SEQ ID NO: 10275 - protein, 18 aa, Artificial Sequence
  Quasi-synthetic sequence derived from human genome
IRLRLSKLRRCVQWLKVM

SEQ ID NO: 10276 - protein, 18 aa, Artificial Sequence
  Quasi-synthetic sequence derived from human genome
RWRRRWFVLKGHTLYWYR

SEQ ID NO: 10277 - protein, 18 aa, Artificial Sequence
  Quasi-synthetic sequence derived from human genome
LKLLRKRSQVWKPKVIRI

SEQ ID NO: 10278 - protein, 18 aa, Artificial Sequence
  Quasi-synthetic sequence derived from human genome
IMKKKKKVLVWNRVYKVI

SEQ ID NO: 10279 - protein, 18 aa, Artificial Sequence
  Quasi-synthetic sequence derived from human genome
MLKCILKFFLRALKILIP

SEQ ID NO: 10280 - protein, 18 aa, Artificial Sequence
  Quasi-synthetic sequence derived from human genome
KWSLRWFLSPRWILQFRR

SEQ ID NO: 10281 - protein, 18 aa, Artificial Sequence
  Quasi-synthetic sequence derived from human genome
RRRCFLLTFYLWFLFFSR

SEQ ID NO: 10282 - protein, 18 aa, Artificial Sequence
  Quasi-synthetic sequence derived from human genome
ALLWMWWRRNRRGKLGRL

SEQ ID NO: 10283 - protein, 18 aa, Artificial Sequence
  Quasi-synthetic sequence derived from human genome
IFSKVRIFGLKKRRLRRQ

SEQ ID NO: 10284 - protein, 18 aa, Artificial Sequence
  Quasi-synthetic sequence derived from human genome
KTVILGLLCLLLLWWRRR

SEQ ID NO: 10285 - protein, 18 aa, Artificial Sequence
  Quasi-synthetic sequence derived from human genome
KLLMRHQLRKHKILMKVF

SEQ ID NO: 10286 - protein, 18 aa, Artificial Sequence
  Quasi-synthetic sequence derived from human genome
RILKNLVFRILKKCYRGR

SEQ ID NO: 10287 - protein, 18 aa, Artificial Sequence
  Quasi-synthetic sequence derived from human genome
LKRMKIIKHFIKIALHCR

SEQ ID NO: 10288 - protein, 18 aa, Artificial Sequence
  Quasi-synthetic sequence derived from human genome
FRKLMRWILILVIALWFI

SEQ ID NO: 10289 - protein, 18 aa, Artificial Sequence
  Quasi-synthetic sequence derived from human genome
LVLGVLRMAKKRVIVKKL

SEQ ID NO: 10290 - protein, 18 aa, Artificial Sequence
  Quasi-synthetic sequence derived from human genome
RLPKLRKRMRKMCLTFMK

SEQ ID NO: 10291 - protein, 18 aa, Artificial Sequence
  Quasi-synthetic sequence derived from human genome
VKRKKNVLRLCCKKLKIF

SEQ ID NO: 10292 - protein, 18 aa, Artificial Sequence
  Quasi-synthetic sequence derived from human genome
RRRRRLALFLARKHLKNV

SEQ ID NO: 10293 - protein, 18 aa, Artificial Sequence
  Quasi-synthetic sequence derived from human genome
LLLLLLLLLLYKYKQKPK

SEQ ID NO: 10294 - protein, 18 aa, Artificial Sequence
  Quasi-synthetic sequence derived from human genome
WLLRRRRWAALLVLGLLV

SEQ ID NO: 10295 - protein, 18 aa, Artificial Sequence
  Quasi-synthetic sequence derived from human genome
RRLQHRLRLRAQMRLRRL

SEQ ID NO: 10296 - protein, 18 aa, Artificial Sequence
  Quasi-synthetic sequence derived from human genome
KLGLLEFKILWKKLKKWM

SEQ ID NO: 10297 - protein, 18 aa, Artificial Sequence
  Quasi-synthetic sequence derived from human genome
FLFYVKLRWLLKHWRQGK

SEQ ID NO: 10298 - protein, 18 aa, Artificial Sequence
  Quasi-synthetic sequence derived from human genome
CIAIVLRFKKTWKLRALK

SEQ ID NO: 10299 - protein, 18 aa, Artificial Sequence
  Quasi-synthetic sequence derived from human genome
IRKKHLQRPIFRLRCLVK

SEQ ID NO: 10300 - protein, 18 aa, Artificial Sequence
  Quasi-synthetic sequence derived from human genome
FYCKFLWRCLKFVMRKLT

SEQ ID NO: 10301 - protein, 18 aa, Artificial Sequence
  Quasi-synthetic sequence derived from human genome
LRIRCVARKFLYLWIRMT

SEQ ID NO: 10302 - protein, 18 aa, Artificial Sequence
  Quasi-synthetic sequence derived from human genome
FILIWRTKKLKHTFLLIL

SEQ ID NO: 10303 - protein, 18 aa, Artificial Sequence
  Quasi-synthetic sequence derived from human genome
MIYRLPQVLRLHLKRFRW

SEQ ID NO: 10304 - protein, 18 aa, Artificial Sequence
  Quasi-synthetic sequence derived from human genome
VAQVLRLMRIFRILKLAR

SEQ ID NO: 10305 - protein, 18 aa, Artificial Sequence
  Quasi-synthetic sequence derived from human genome
LSLVVKKKRCFLFPRYKF

SEQ ID NO: 10306 - protein, 18 aa, Artificial Sequence
  Quasi-synthetic sequence derived from human genome
RLRLWALIPWLPRKQRPR

SEQ ID NO: 10307 - protein, 18 aa, Artificial Sequence
  Quasi-synthetic sequence derived from human genome
ALWYRRQRLLARTLRLWF

SEQ ID NO: 10308 - protein, 18 aa, Artificial Sequence
  Quasi-synthetic sequence derived from human genome
MVRPHLLKKKILGRVWWL

SEQ ID NO: 10309 - protein, 18 aa, Artificial Sequence
  Quasi-synthetic sequence derived from human genome
LLLALVAILWKLGFFKRK

SEQ ID NO: 10310 - protein, 18 aa, Artificial Sequence
  Quasi-synthetic sequence derived from human genome
RRKLLLFKTFSRKVVVVV

SEQ ID NO: 10311 - protein, 18 aa, Artificial Sequence
  Quasi-synthetic sequence derived from human genome
PLRLRHLRRPRVARLLCL

SEQ ID NO: 10312 - protein, 18 aa, Artificial Sequence
  Quasi-synthetic sequence derived from human genome
IKKGFLNWMNLWKFIKIR

SEQ ID NO: 10313 - protein, 18 aa, Artificial Sequence
  Quasi-synthetic sequence derived from human genome
LLKKIMAILIKRFHHTRR

SEQ ID NO: 10314 - protein, 18 aa, Artificial Sequence
  Quasi-synthetic sequence derived from human genome
LVLLLLVRKKRKIKEPLL

SEQ ID NO: 10315 - protein, 18 aa, Artificial Sequence
  Quasi-synthetic sequence derived from human genome
KLKIITYRNLFKKVYLLL

SEQ ID NO: 10316 - protein, 18 aa, Artificial Sequence
  Quasi-synthetic sequence derived from human genome
LVKLFKFPCLKRGAKFRK

SEQ ID NO: 10317 - protein, 18 aa, Artificial Sequence
  Quasi-synthetic sequence derived from human genome
LKTFVFFIWRRYWRTLVL

SEQ ID NO: 10318 - protein, 18 aa, Artificial Sequence
  Quasi-synthetic sequence derived from human genome
IFKVYMFKCVWRCYRLIK

SEQ ID NO: 10319 - protein, 18 aa, Artificial Sequence
  Quasi-synthetic sequence derived from human genome
LIFRLIWRSVKKWQIIKG

SEQ ID NO: 10320 - protein, 18 aa, Artificial Sequence
  Quasi-synthetic sequence derived from human genome
HKMLRLRLPNLKMVRLRV

SEQ ID NO: 10321 - protein, 18 aa, Artificial Sequence
  Quasi-synthetic sequence derived from human genome
LLLLLIIALMLWRLHWRR

SEQ ID NO: 10322 - protein, 18 aa, Artificial Sequence
  Quasi-synthetic sequence derived from human genome
MKWRRKSAYWKALKVFKL

SEQ ID NO: 10323 - protein, 18 aa, Artificial Sequence
  Quasi-synthetic sequence derived from human genome
LIVVLRIVRYRKSSKLIK

SEQ ID NO: 10324 - protein, 18 aa, Artificial Sequence
  Quasi-synthetic sequence derived from human genome
LLLLWRRRQKRRTGALVL

SEQ ID NO: 10325 - protein, 18 aa, Artificial Sequence
  Quasi-synthetic sequence derived from human genome
FFFFFSVGRKFKKFNKVR

SEQ ID NO: 10326 - protein, 18 aa, Artificial Sequence
  Quasi-synthetic sequence derived from human genome
MLLILALWKIGFFKRPLK

SEQ ID NO: 10327 - protein, 18 aa, Artificial Sequence
  Quasi-synthetic sequence derived from human genome
ILFAILLVLVFIKKVAKK

SEQ ID NO: 10328 - protein, 18 aa, Artificial Sequence
  Quasi-synthetic sequence derived from human genome
ITAVLLVLIFVLRKRIKL

SEQ ID NO: 10329 - protein, 18 aa, Artificial Sequence
  Quasi-synthetic sequence derived from human genome
LLFVIIFLGVVLVMKKRK

SEQ ID NO: 10330 - protein, 18 aa, Artificial Sequence
  Quasi-synthetic sequence derived from human genome
LFIFVKRQIMRFAMKSRR

SEQ ID NO: 10331 - protein, 18 aa, Artificial Sequence
  Quasi-synthetic sequence derived from human genome
LLLFQVIRLYQRRRWTIR

SEQ ID NO: 10332 - protein, 18 aa, Artificial Sequence
  Quasi-synthetic sequence derived from human genome
RKKLKMLNIAKKILRIQK

SEQ ID NO: 10333 - protein, 18 aa, Artificial Sequence
  Quasi-synthetic sequence derived from human genome
KKHRILKIYHLFVSLLLK

SEQ ID NO: 10334 - protein, 18 aa, Artificial Sequence
  Quasi-synthetic sequence derived from human genome
LYVRRRKKLPSVLLFKKP

SEQ ID NO: 10335 - protein, 18 aa, Artificial Sequence
  Quasi-synthetic sequence derived from human genome
LKTKRILRRNLLALIHRM

SEQ ID NO: 10336 - protein, 18 aa, Artificial Sequence
  Quasi-synthetic sequence derived from human genome
VKHWPWMKLYFKIKPLLK

SEQ ID NO: 10337 - protein, 18 aa, Artificial Sequence
  Quasi-synthetic sequence derived from human genome
LLLGRWRKKHLTFRILNL

SEQ ID NO: 10338 - protein, 18 aa, Artificial Sequence
  Quasi-synthetic sequence derived from human genome
LKHLCRLKIRRLMGLQKL

SEQ ID NO: 10339 - protein, 18 aa, Artificial Sequence
  Quasi-synthetic sequence derived from human genome
RFRKYLRHFFHRHLLMHL

SEQ ID NO: 10340 - protein, 18 aa, Artificial Sequence
  Quasi-synthetic sequence derived from human genome
KSYPMLKLVRLKLWFPRF

SEQ ID NO: 10341 - protein, 18 aa, Artificial Sequence
  Quasi-synthetic sequence derived from human genome
RIRASLVLILKTIRRRLP

SEQ ID NO: 10342 - protein, 18 aa, Artificial Sequence
  Quasi-synthetic sequence derived from human genome
QVFLKRFLRLRYGRQRRR

SEQ ID NO: 10343 - protein, 18 aa, Artificial Sequence
  Quasi-synthetic sequence derived from human genome
FVIVLLALRLWRWHKSRL

SEQ ID NO: 10344 - protein, 18 aa, Artificial Sequence
  Quasi-synthetic sequence derived from human genome
LLALGALLVLQLIRRRRR

SEQ ID NO: 10345 - protein, 18 aa, Artificial Sequence
  Quasi-synthetic sequence derived from human genome
RQRIIKKFQFIKSLRCFW

SEQ ID NO: 10346 - protein, 18 aa, Artificial Sequence
  Quasi-synthetic sequence derived from human genome
FGKLFRKSFLRNRLFRGL

SEQ ID NO: 10347 - protein, 18 aa, Artificial Sequence
  Quasi-synthetic sequence derived from human genome
LKRKIARLGINMLLKMIF

SEQ ID NO: 10348 - protein, 18 aa, Artificial Sequence
  Quasi-synthetic sequence derived from human genome
IKLLPLRTFRVFRALKAI

SEQ ID NO: 10349 - protein, 18 aa, Artificial Sequence
  Quasi-synthetic sequence derived from human genome
RHRGLLRVRLGRFISRLL

SEQ ID NO: 10350 - protein, 18 aa, Artificial Sequence
  Quasi-synthetic sequence derived from human genome
KLLRNIPRWTHLVRLLRL

SEQ ID NO: 10351 - protein, 18 aa, Artificial Sequence
  Quasi-synthetic sequence derived from human genome
LRALLLWGRRLRPLLRAP

SEQ ID NO: 10352 - protein, 18 aa, Artificial Sequence
  Quasi-synthetic sequence derived from human genome
VKKRKKVLSWPFLMRRLS

SEQ ID NO: 10353 - protein, 18 aa, Artificial Sequence
  Quasi-synthetic sequence derived from human genome
RLKMRKNSWLKIIISIIL

SEQ ID NO: 10354 - protein, 18 aa, Artificial Sequence
  Quasi-synthetic sequence derived from human genome
LRCLRPLRIFKLVPQMRK

SEQ ID NO: 10355 - protein, 18 aa, Artificial Sequence
  Quasi-synthetic sequence derived from human genome
RSPVFRIFFHKIFIRPLR

SEQ ID NO: 10356 - protein, 18 aa, Artificial Sequence
  Quasi-synthetic sequence derived from human genome
KLVLRRLRTIIRKKQKIQ

SEQ ID NO: 10357 - protein, 18 aa, Artificial Sequence
  Quasi-synthetic sequence derived from human genome
YPLVRRRKRRFFGLCCLI

SEQ ID NO: 10358 - protein, 18 aa, Artificial Sequence
  Quasi-synthetic sequence derived from human genome
VLIVILVILFKCGFFKRK

SEQ ID NO: 10359 - protein, 18 aa, Artificial Sequence
  Quasi-synthetic sequence derived from human genome
RFLMRKRLLFPALVTLLI

SEQ ID NO: 10360 - protein, 18 aa, Artificial Sequence
  Quasi-synthetic sequence derived from human genome
FLIKMGGKIKTWKKRWFV

SEQ ID NO: 10361 - protein, 18 aa, Artificial Sequence
  Quasi-synthetic sequence derived from human genome
LRPLVKPKIVKKRTKKFI

SEQ ID NO: 10362 - protein, 18 aa, Artificial Sequence
  Quasi-synthetic sequence derived from human genome
HLLTLFHRLCKLLFFRIR

SEQ ID NO: 10363 - protein, 18 aa, Artificial Sequence
  Quasi-synthetic sequence derived from human genome
KPYIRKKAVLIMYKVFLK

SEQ ID NO: 10364 - protein, 18 aa, Artificial Sequence
  Quasi-synthetic sequence derived from human genome
RRRRLGVHLLHRALLVFL

SEQ ID NO: 10365 - protein, 18 aa, Artificial Sequence
  Quasi-synthetic sequence derived from human genome
LVYARIYVVLKQRRRKRI

SEQ ID NO: 10366 - protein, 18 aa, Artificial Sequence
  Quasi-synthetic sequence derived from human genome
FLIFIRILGILLSKLRTR

SEQ ID NO: 10367 - protein, 18 aa, Artificial Sequence
  Quasi-synthetic sequence derived from human genome
IVLGFLFKRFLRIQRLFP

SEQ ID NO: 10368 - protein, 18 aa, Artificial Sequence
  Quasi-synthetic sequence derived from human genome
IIQFIRHWRQWNRIFRWK

SEQ ID NO: 10369 - protein, 18 aa, Artificial Sequence
  Quasi-synthetic sequence derived from human genome
MRFRIYKRKVLILTLVVA

SEQ ID NO: 10370 - protein, 18 aa, Artificial Sequence
  Quasi-synthetic sequence derived from human genome
FKPYVVRLAKLLRKRAKK

SEQ ID NO: 10371 - protein, 18 aa, Artificial Sequence
  Quasi-synthetic sequence derived from human genome
LFALLSRGRRRRMHVLRR

SEQ ID NO: 10372 - protein, 18 aa, Artificial Sequence
  Quasi-synthetic sequence derived from human genome
VLVIKARKLPPFFARKLK

SEQ ID NO: 10373 - protein, 18 aa, Artificial Sequence
  Quasi-synthetic sequence derived from human genome
RWKILWFIPFRQRQPLRV

SEQ ID NO: 10374 - protein, 18 aa, Artificial Sequence
  Quasi-synthetic sequence derived from human genome
RNLILTYNLRKRIVFRKI

SEQ ID NO: 10375 - protein, 18 aa, Artificial Sequence
  Quasi-synthetic sequence derived from human genome
RIKKRSRSVFYRLTILIL

SEQ ID NO: 10376 - protein, 18 aa, Artificial Sequence
  Quasi-synthetic sequence derived from human genome
LRSVWNFLKRHKKKCIFL

SEQ ID NO: 10377 - protein, 18 aa, Artificial Sequence
  Quasi-synthetic sequence derived from human genome
KLSLIRKFRLFPRPQVKL

SEQ ID NO: 10378 - protein, 18 aa, Artificial Sequence
  Quasi-synthetic sequence derived from human genome
LMFIIILLGVMLTIKRRR

SEQ ID NO: 10379 - protein, 18 aa, Artificial Sequence
  Quasi-synthetic sequence derived from human genome
AFVLLLFLLLFLLLRRQR

SEQ ID NO: 10380 - protein, 18 aa, Artificial Sequence
  Quasi-synthetic sequence derived from human genome
LIPKLKGWWQKFRLRSKK

SEQ ID NO: 10381 - protein, 18 aa, Artificial Sequence
  Quasi-synthetic sequence derived from human genome
FLRLKRKFIQMRRPFLER

SEQ ID NO: 10382 - protein, 18 aa, Artificial Sequence
  Quasi-synthetic sequence derived from human genome
KARRKLMFIIICVIVLLV

SEQ ID NO: 10383 - protein, 18 aa, Artificial Sequence
  Quasi-synthetic sequence derived from human genome
KIMVRRCLVTLRPFRLFV

SEQ ID NO: 10384 - protein, 18 aa, Artificial Sequence
  Quasi-synthetic sequence derived from human genome
VRKVFLRLLPQLLRMHVR

SEQ ID NO: 10385 - protein, 18 aa, Artificial Sequence
  Quasi-synthetic sequence derived from human genome
RVFFWWLNPLFKIGHKRR

SEQ ID NO: 10386 - protein, 18 aa, Artificial Sequence
  Quasi-synthetic sequence derived from human genome
IIILLILVLMFVVWMKRR

SEQ ID NO: 10387 - protein, 18 aa, Artificial Sequence
  Quasi-synthetic sequence derived from human genome
IQKYWRRVLAQRKLLMLK

SEQ ID NO: 10388 - protein, 18 aa, Artificial Sequence
  Quasi-synthetic sequence derived from human genome
WRKRCLYLFVLLLLIILV

SEQ ID NO: 10389 - protein, 18 aa, Artificial Sequence
  Quasi-synthetic sequence derived from human genome
LLKLYMWKMTRFCISRRL

SEQ ID NO: 10390 - protein, 18 aa, Artificial Sequence
  Quasi-synthetic sequence derived from human genome
GLSRLLFFLLGFLRIRVR

SEQ ID NO: 10391 - protein, 18 aa, Artificial Sequence
  Quasi-synthetic sequence derived from human genome
FFISLRLIAYFVLRYKIR

SEQ ID NO: 10392 - protein, 18 aa, Artificial Sequence
  Quasi-synthetic sequence derived from human genome
KIIRPLRNIFLKKPVFAK

SEQ ID NO: 10393 - protein, 18 aa, Artificial Sequence
  Quasi-synthetic sequence derived from human genome
FVYFIMRIVNFPKCRRRR

SEQ ID NO: 10394 - protein, 18 aa, Artificial Sequence
  Quasi-synthetic sequence derived from human genome
ELRIVIKKIWKRMKQKLL

SEQ ID NO: 10395 - protein, 18 aa, Artificial Sequence
  Quasi-synthetic sequence derived from human genome
FRWLIFRIMLGAGLIKIR

SEQ ID NO: 10396 - protein, 18 aa, Artificial Sequence
  Quasi-synthetic sequence derived from human genome
RPKKLLPKAFKQYWFIFK

SEQ ID NO: 10397 - protein, 18 aa, Artificial Sequence
  Quasi-synthetic sequence derived from human genome
FHLYRAPYFWIKRRILLL

SEQ ID NO: 10398 - protein, 18 aa, Artificial Sequence
  Quasi-synthetic sequence derived from human genome
KKLKKSIKIIFIVVAAFL

SEQ ID NO: 10399 - protein, 18 aa, Artificial Sequence
  Quasi-synthetic sequence derived from human genome
IRVYNKRLKALRKIQKLI

SEQ ID NO: 10400 - protein, 18 aa, Artificial Sequence
  Quasi-synthetic sequence derived from human genome
RKECLKFLIKRLAKIVRL

SEQ ID NO: 10401 - protein, 18 aa, Artificial Sequence
  Quasi-synthetic sequence derived from human genome
LRKKRLKKFPWSLWVWTT

SEQ ID NO: 10402 - protein, 18 aa, Artificial Sequence
  Quasi-synthetic sequence derived from human genome
RMYLRLRGRCPLLLRCLI

SEQ ID NO: 10403 - protein, 18 aa, Artificial Sequence
  Quasi-synthetic sequence derived from human genome
RAPLTFRHLHLKLKRLKL

SEQ ID NO: 10404 - protein, 18 aa, Artificial Sequence
  Quasi-synthetic sequence derived from human genome
LALLVLLLWKMGFFKRAK

SEQ ID NO: 10405 - protein, 18 aa, Artificial Sequence
  Quasi-synthetic sequence derived from human genome
ILLVIVVLFAALKRQRKK

SEQ ID NO: 10406 - protein, 18 aa, Artificial Sequence
  Quasi-synthetic sequence derived from human genome
FPRSFIRLLRSKVSRFLR

SEQ ID NO: 10407 - protein, 18 aa, Artificial Sequence
  Quasi-synthetic sequence derived from human genome
RISLRKKLKLPIGKRNWL

SEQ ID NO: 10408 - protein, 18 aa, Artificial Sequence
  Quasi-synthetic sequence derived from human genome
LLVRKKRLIVLFSHWLLH

SEQ ID NO: 10409 - protein, 18 aa, Artificial Sequence
  Quasi-synthetic sequence derived from human genome
RKILRLITIRKLFTAIGK

SEQ ID NO: 10410 - protein, 18 aa, Artificial Sequence
  Quasi-synthetic sequence derived from human genome
FSNLIFLRLKRRVKSVIL

SEQ ID NO: 10411 - protein, 18 aa, Artificial Sequence
  Quasi-synthetic sequence derived from human genome
LLRIANFSNLIFLRIKRR

SEQ ID NO: 10412 - protein, 18 aa, Artificial Sequence
  Quasi-synthetic sequence derived from human genome
KVFLSSLKFHIRRFIFLF

SEQ ID NO: 10413 - protein, 18 aa, Artificial Sequence
  Quasi-synthetic sequence derived from human genome
KLATLGRIFKPWKWRKKK

SEQ ID NO: 10414 - protein, 18 aa, Artificial Sequence
  Quasi-synthetic sequence derived from human genome
WCFMFSIWRFAWRKSIKK

SEQ ID NO: 10415 - protein, 18 aa, Artificial Sequence
  Quasi-synthetic sequence derived from human genome
KIKRLKKSAFVVLILLIT

SEQ ID NO: 10416 - protein, 18 aa, Artificial Sequence
  Quasi-synthetic sequence derived from human genome
RKRHKVWYKKFFHHLLHI

SEQ ID NO: 10417 - protein, 18 aa, Artificial Sequence
  Quasi-synthetic sequence derived from human genome
LRIARFRFRAFHFLNRFP

SEQ ID NO: 10418 - protein, 18 aa, Artificial Sequence
  Quasi-synthetic sequence derived from human genome
LIRAFRLKKPQRRRYGLL

SEQ ID NO: 10419 - protein, 18 aa, Artificial Sequence
  Quasi-synthetic sequence derived from human genome
KALKQMGLRKLILRLHKL

SEQ ID NO: 10420 - protein, 18 aa, Artificial Sequence
  Quasi-synthetic sequence derived from human genome
LLALALGLLVYRKRRAKR

SEQ ID NO: 10421 - protein, 18 aa, Artificial Sequence
  Quasi-synthetic sequence derived from human genome
SLYRRTVRLRRRLPCRLL

SEQ ID NO: 10422 - protein, 18 aa, Artificial Sequence
  Quasi-synthetic sequence derived from human genome
LVKKYQAVLRRKALLIFL

SEQ ID NO: 10423 - protein, 18 aa, Artificial Sequence
  Quasi-synthetic sequence derived from human genome
KRRVFFRNIKILIPATWK

SEQ ID NO: 10424 - protein, 18 aa, Artificial Sequence
  Quasi-synthetic sequence derived from human genome
VVFINAKIKSLIKLFKKK

SEQ ID NO: 10425 - protein, 18 aa, Artificial Sequence
  Quasi-synthetic sequence derived from human genome
LLSRKILRLITIRKLFTA

SEQ ID NO: 10426 - protein, 18 aa, Artificial Sequence
  Quasi-synthetic sequence derived from human genome
ILLCLLIYYCRRRCLKPR

SEQ ID NO: 10427 - protein, 18 aa, Artificial Sequence
  Quasi-synthetic sequence derived from human genome
LQRLKLKCIFCRHRVKRV

SEQ ID NO: 10428 - protein, 18 aa, Artificial Sequence
  Quasi-synthetic sequence derived from human genome
LLAIFVALFFLTKKRRQR

SEQ ID NO: 10429 - protein, 18 aa, Artificial Sequence
  Quasi-synthetic sequence derived from human genome
IIGLRKTFWFFFQRHKLK

SEQ ID NO: 10430 - protein, 18 aa, Artificial Sequence
  Quasi-synthetic sequence derived from human genome
KFWRRYGKLSRHLMKVKL

SEQ ID NO: 10431 - protein, 18 aa, Artificial Sequence
  Quasi-synthetic sequence derived from human genome
LLVAPPLLRRAGRLRWRR

SEQ ID NO: 10432 - protein, 18 aa, Artificial Sequence
  Quasi-synthetic sequence derived from human genome
IQQYKFLRFRRSLLLLVK

SEQ ID NO: 10433 - protein, 18 aa, Artificial Sequence
  Quasi-synthetic sequence derived from human genome
FVIVLLAHRLRRWHKSRL

SEQ ID NO: 10434 - protein, 18 aa, Artificial Sequence
  Quasi-synthetic sequence derived from human genome
FVKIKASHALKKKILRFR

SEQ ID NO: 10435 - protein, 18 aa, Artificial Sequence
  Quasi-synthetic sequence derived from human genome
RSVHYWKKVLPLLKIIKK

SEQ ID NO: 10436 - protein, 18 aa, Artificial Sequence
  Quasi-synthetic sequence derived from human genome
WVKRCFLHKLPTFLFMKR

SEQ ID NO: 10437 - protein, 18 aa, Artificial Sequence
  Quasi-synthetic sequence derived from human genome
IRARRKTARMLMIVLLVF

SEQ ID NO: 10438 - protein, 18 aa, Artificial Sequence
  Quasi-synthetic sequence derived from human genome
RLKLFFIKNQRSSLRIRL

SEQ ID NO: 10439 - protein, 18 aa, Artificial Sequence
  Quasi-synthetic sequence derived from human genome
KRFRAGFKRAFRWCPFIK

SEQ ID NO: 10440 - protein, 18 aa, Artificial Sequence
  Quasi-synthetic sequence derived from human genome
RVIHLSLAPKRMKFFFKR

SEQ ID NO: 10441 - protein, 18 aa, Artificial Sequence
  Quasi-synthetic sequence derived from human genome
IRPVKLKNLILLVKHWYR

SEQ ID NO: 10442 - protein, 18 aa, Artificial Sequence
  Quasi-synthetic sequence derived from human genome
LYLKWRVKKVVLVLLLVT

SEQ ID NO: 10443 - protein, 18 aa, Artificial Sequence
  Quasi-synthetic sequence derived from human genome
IMKKIMKKRKFCHILKQM

SEQ ID NO: 10444 - protein, 18 aa, Artificial Sequence
  Quasi-synthetic sequence derived from human genome
LRLFRRLLLAALLLVIVW

SEQ ID NO: 10445 - protein, 18 aa, Artificial Sequence
  Quasi-synthetic sequence derived from human genome
LLKMSGKVKSWKRRWFVL

SEQ ID NO: 10446 - protein, 18 aa, Artificial Sequence
  Quasi-synthetic sequence derived from human genome
LGLLLLRWRRPALHRPIK

SEQ ID NO: 10447 - protein, 18 aa, Artificial Sequence
  Quasi-synthetic sequence derived from human genome
NLMKYLQKWKRYRPLWKL

SEQ ID NO: 10448 - protein, 18 aa, Artificial Sequence
  Quasi-synthetic sequence derived from human genome
IFLHLKRRVKSVILVMLL

SEQ ID NO: 10449 - protein, 18 aa, Artificial Sequence
  Quasi-synthetic sequence derived from human genome
KKLVVFRPRLFLLCFGII

SEQ ID NO: 10450 - protein, 18 aa, Artificial Sequence
  Quasi-synthetic sequence derived from human genome
IRKVYGRCMWYRLRLLKP

SEQ ID NO: 10451 - protein, 18 aa, Artificial Sequence
  Quasi-synthetic sequence derived from human genome
RLRGAILTMAFKKILKLK

SEQ ID NO: 10452 - protein, 18 aa, Artificial Sequence
  Quasi-synthetic sequence derived from human genome
TIIRKINKMKTLKRKKLL

SEQ ID NO: 10453 - protein, 18 aa, Artificial Sequence
  Quasi-synthetic sequence derived from human genome
LIFILFIIVQLFIMKLRK

SEQ ID NO: 10454 - protein, 18 aa, Artificial Sequence
  Quasi-synthetic sequence derived from human genome
FFLPKPRKLRNRHLRKPL

SEQ ID NO: 10455 - protein, 18 aa, Artificial Sequence
  Quasi-synthetic sequence derived from human genome
WKRARIFPMIFKKVRGLA

SEQ ID NO: 10456 - protein, 18 aa, Artificial Sequence
  Quasi-synthetic sequence derived from human genome
MPAKRFNLFLRRRLMFQK

SEQ ID NO: 10457 - protein, 18 aa, Artificial Sequence
  Quasi-synthetic sequence derived from human genome
LFLIFLLWKLPSARAKIR

SEQ ID NO: 10458 - protein, 18 aa, Artificial Sequence
  Quasi-synthetic sequence derived from human genome
IVRFWAKHRWGLPLRVLK

SEQ ID NO: 10459 - protein, 18 aa, Artificial Sequence
  Quasi-synthetic sequence derived from human genome
FLRLFRAARLIKLLRQGY

SEQ ID NO: 10460 - protein, 18 aa, Artificial Sequence
  Quasi-synthetic sequence derived from human genome
LLLIIVIIVLIAYKRKSR

SEQ ID NO: 10461 - protein, 18 aa, Artificial Sequence
  Quasi-synthetic sequence derived from human genome
LMSFFLLILSLRRHIRRM

SEQ ID NO: 10462 - protein, 18 aa, Artificial Sequence
  Quasi-synthetic sequence derived from human genome
LRITLRFFASVLIRRIHK

SEQ ID NO: 10463 - protein, 18 aa, Artificial Sequence
  Quasi-synthetic sequence derived from human genome
IFLHLKRRVKSVVLVILL

SEQ ID NO: 10464 - protein, 18 aa, Artificial Sequence
  Quasi-synthetic sequence derived from human genome
LVVLRLASLLFKRFLSLR

SEQ ID NO: 10465 - protein, 18 aa, Artificial Sequence
  Quasi-synthetic sequence derived from human genome
VIKIRFFKIMLVLIICWL

SEQ ID NO: 10466 - protein, 18 aa, Artificial Sequence
  Quasi-synthetic sequence derived from human genome
AFIIWLARRLKKGKKSKR

SEQ ID NO: 10467 - protein, 18 aa, Artificial Sequence
  Quasi-synthetic sequence derived from human genome
LRALGPWLRVRRGLLVLR

SEQ ID NO: 10468 - protein, 18 aa, Artificial Sequence
  Quasi-synthetic sequence derived from human genome
LWVIRVQKRHKMPRMKKL

SEQ ID NO: 10469 - protein, 18 aa, Artificial Sequence
  Quasi-synthetic sequence derived from human genome
MLMRWNNLLRKRNFYKKL

SEQ ID NO: 10470 - protein, 18 aa, Artificial Sequence
  Quasi-synthetic sequence derived from human genome
FPRSFIKLLRSKVSRFLR

SEQ ID NO: 10471 - protein, 18 aa, Artificial Sequence
  Quasi-synthetic sequence derived from human genome
LKYLFRFIIQSRVLYLRF

SEQ ID NO: 10472 - protein, 18 aa, Artificial Sequence
  Quasi-synthetic sequence derived from human genome
KKSWKKIYFFLRRSGLYF

SEQ ID NO: 10473 - protein, 18 aa, Artificial Sequence
  Quasi-synthetic sequence derived from human genome
RTIRYLYRRLQRMLGLRR

SEQ ID NO: 10474 - protein, 18 aa, Artificial Sequence
  Quasi-synthetic sequence derived from human genome
RRRRVLQTLVWFLLTLLL

SEQ ID NO: 10475 - protein, 18 aa, Artificial Sequence
  Quasi-synthetic sequence derived from human genome
LLLLRLVCLKPPRRKKPA

SEQ ID NO: 10476 - protein, 18 aa, Artificial Sequence
  Quasi-synthetic sequence derived from human genome
GLLKTARLLRLVRVARKL

SEQ ID NO: 10477 - protein, 18 aa, Artificial Sequence
  Quasi-synthetic sequence derived from human genome
FNLPRLCIRKFFPKKKCF

SEQ ID NO: 10478 - protein, 18 aa, Artificial Sequence
  Quasi-synthetic sequence derived from human genome
RRFLKPQGHPRLLLWFKR

SEQ ID NO: 10479 - protein, 18 aa, Artificial Sequence
  Quasi-synthetic sequence derived from human genome
RFRSLLVRRRFISLKKAT

SEQ ID NO: 10480 - protein, 18 aa, Artificial Sequence
  Quasi-synthetic sequence derived from human genome
KRRRMQVRVKLGKFQLLL

SEQ ID NO: 10481 - protein, 18 aa, Artificial Sequence
  Quasi-synthetic sequence derived from human genome
RMRTRLVRKRFLCLGWGL

SEQ ID NO: 10482 - protein, 18 aa, Artificial Sequence
  Quasi-synthetic sequence derived from human genome
VRNLKKKLLPWQRRGLLR

SEQ ID NO: 10483 - protein, 18 aa, Artificial Sequence
  Quasi-synthetic sequence derived from human genome
IKIVKKLKLTGFPYKIFK

SEQ ID NO: 10484 - protein, 18 aa, Artificial Sequence
  Quasi-synthetic sequence derived from human genome
GFLVIFYCYIRKRCLKLK

SEQ ID NO: 10485 - protein, 18 aa, Artificial Sequence
  Quasi-synthetic sequence derived from human genome
RRFLSKVYSFPMRKLILF

SEQ ID NO: 10486 - protein, 18 aa, Artificial Sequence
  Quasi-synthetic sequence derived from human genome
LKLRNWQWWRLFTKVKPL

SEQ ID NO: 10487 - protein, 18 aa, Artificial Sequence
  Quasi-synthetic sequence derived from human genome
LVRGLLLLIPFLILLRKL

SEQ ID NO: 10488 - protein, 18 aa, Artificial Sequence
  Quasi-synthetic sequence derived from human genome
WRVHAIFKNVKMKKKIIK

SEQ ID NO: 10489 - protein, 18 aa, Artificial Sequence
  Quasi-synthetic sequence derived from human genome
YLKRFKVMKPKVLRSWCR

SEQ ID NO: 10490 - protein, 18 aa, Artificial Sequence
  Quasi-synthetic sequence derived from human genome
LLKKRAAFTKLRRAAILR

SEQ ID NO: 10491 - protein, 18 aa, Artificial Sequence
  Quasi-synthetic sequence derived from human genome
KIPIFSLFRKWKAFSVWR

SEQ ID NO: 10492 - protein, 18 aa, Artificial Sequence
  Quasi-synthetic sequence derived from human genome
AVVLLLLVALLMLRKYRK

SEQ ID NO: 10493 - protein, 18 aa, Artificial Sequence
  Quasi-synthetic sequence derived from human genome
ATLIQRRFRTLMMRRRFL

SEQ ID NO: 10494 - protein, 18 aa, Artificial Sequence
  Quasi-synthetic sequence derived from human genome
FFVLFVLSVHYLWKKWKK

SEQ ID NO: 10495 - protein, 18 aa, Artificial Sequence
  Quasi-synthetic sequence derived from human genome
IRIKKPIKTKFRLPVFNW

SEQ ID NO: 10496 - protein, 18 aa, Artificial Sequence
  Quasi-synthetic sequence derived from human genome
AKLKRKYWWKNCKMMIML

SEQ ID NO: 10497 - protein, 18 aa, Artificial Sequence
  Quasi-synthetic sequence derived from human genome
RRQGSRFLWLLKILVIIL

SEQ ID NO: 10498 - protein, 18 aa, Artificial Sequence
  Quasi-synthetic sequence derived from human genome
KKFSIQRFPKILVLHLKR

SEQ ID NO: 10499 - protein, 18 aa, Artificial Sequence
  Quasi-synthetic sequence derived from human genome
FFKLRFNRKKKGMYRKAI

SEQ ID NO: 10500 - protein, 18 aa, Artificial Sequence
  Quasi-synthetic sequence derived from human genome
IYLRLLVKLYRFLARRTN

SEQ ID NO: 10501 - protein, 18 aa, Artificial Sequence
  Quasi-synthetic sequence derived from human genome
KNFLQICKKILCRLFRVF

SEQ ID NO: 10502 - protein, 18 aa, Artificial Sequence
  Quasi-synthetic sequence derived from human genome
FKKHFMALIFSAKRLKII

SEQ ID NO: 10503 - protein, 18 aa, Artificial Sequence
  Quasi-synthetic sequence derived from human genome
KVLYRVALAILKFFHKVR

SEQ ID NO: 10504 - protein, 18 aa, Artificial Sequence
  Quasi-synthetic sequence derived from human genome
RRLRRLAHLVLFCPFSKR

SEQ ID NO: 10505 - protein, 18 aa, Artificial Sequence
  Quasi-synthetic sequence derived from human genome
IKYLICTRYKWLIIKIVL

SEQ ID NO: 10506 - protein, 18 aa, Artificial Sequence
  Quasi-synthetic sequence derived from human genome
VMKMRPKDLWKRLMIKFR

SEQ ID NO: 10507 - protein, 18 aa, Artificial Sequence
  Quasi-synthetic sequence derived from human genome
FRLIRKMFSFKVSRWMGL

SEQ ID NO: 10508 - protein, 18 aa, Artificial Sequence
  Quasi-synthetic sequence derived from human genome
LLGLRRGLRRLRRLWAGP

SEQ ID NO: 10509 - protein, 18 aa, Artificial Sequence
  Quasi-synthetic sequence derived from human genome
ALLVFILWKCGFFKRNKK

SEQ ID NO: 10510 - protein, 18 aa, Artificial Sequence
  Quasi-synthetic sequence derived from human genome
HPLIKLLFLPRRSRCKFF

SEQ ID NO: 10511 - protein, 18 aa, Artificial Sequence
  Quasi-synthetic sequence derived from human genome
LLVLLCLLLYYCRRKCLK

SEQ ID NO: 10512 - protein, 18 aa, Artificial Sequence
  Quasi-synthetic sequence derived from human genome
KFLSHFKRKFIIHRGKRK

SEQ ID NO: 10513 - protein, 18 aa, Artificial Sequence
  Quasi-synthetic sequence derived from human genome
WRRQIYAVATLRFLKLRR

SEQ ID NO: 10514 - protein, 18 aa, Artificial Sequence
  Quasi-synthetic sequence derived from human genome
RRGLLRLPRRSLLAALFF

SEQ ID NO: 10515 - protein, 18 aa, Artificial Sequence
  Quasi-synthetic sequence derived from human genome
LPSRGILKYLKFHLKRIR

SEQ ID NO: 10516 - protein, 18 aa, Artificial Sequence
  Quasi-synthetic sequence derived from human genome
RHYSVKKKLKLIRVLGLF

SEQ ID NO: 10517 - protein, 18 aa, Artificial Sequence
  Quasi-synthetic sequence derived from human genome
NVVRRVFGRIRRFFSRRR

SEQ ID NO: 10518 - protein, 18 aa, Artificial Sequence
  Quasi-synthetic sequence derived from human genome
VRYNCRVIFLNRKILLIR

SEQ ID NO: 10519 - protein, 18 aa, Artificial Sequence
  Quasi-synthetic sequence derived from human genome
ALRLLRIFKITKYWASLR

SEQ ID NO: 10520 - protein, 18 aa, Artificial Sequence
  Quasi-synthetic sequence derived from human genome
LARLCFLLGRLCSRRLKL

SEQ ID NO: 10521 - protein, 18 aa, Artificial Sequence
  Quasi-synthetic sequence derived from human genome
LRYWLHYLHPILRRQRLR

SEQ ID NO: 10522 - protein, 18 aa, Artificial Sequence
  Quasi-synthetic sequence derived from human genome
KVKMKFRFLGKLMAKAIM

SEQ ID NO: 10523 - protein, 18 aa, Artificial Sequence
  Quasi-synthetic sequence derived from human genome
LLRKKRFGQWTKLLCVIK

SEQ ID NO: 10524 - protein, 18 aa, Artificial Sequence
  Quasi-synthetic sequence derived from human genome
PWVKRLFLQKLPKLLCMK

SEQ ID NO: 10525 - protein, 18 aa, Artificial Sequence
  Quasi-synthetic sequence derived from human genome
FKRKKLQLLTKKPLYLHL

SEQ ID NO: 10526 - protein, 18 aa, Artificial Sequence
  Quasi-synthetic sequence derived from human genome
RRLQKFWRVTVKGFFVKK

SEQ ID NO: 10527 - protein, 18 aa, Artificial Sequence
  Quasi-synthetic sequence derived from human genome
KVIKLLKEKFHFKKIIMI

SEQ ID NO: 10528 - protein, 18 aa, Artificial Sequence
  Quasi-synthetic sequence derived from human genome
FLKLFRAARLIKLLRQGY

SEQ ID NO: 10529 - protein, 18 aa, Artificial Sequence
  Quasi-synthetic sequence derived from human genome
KSKIFFLFRLCKKLPFNM

SEQ ID NO: 10530 - protein, 18 aa, Artificial Sequence
  Quasi-synthetic sequence derived from human genome
KVRRVFVRKVYTILLIQL

SEQ ID NO: 10531 - protein, 18 aa, Artificial Sequence
  Quasi-synthetic sequence derived from human genome
RPLRARVLVTRRRVRALI

SEQ ID NO: 10532 - protein, 18 aa, Artificial Sequence
  Quasi-synthetic sequence derived from human genome
RFLKLKKERKSLWTILLL

SEQ ID NO: 10533 - protein, 18 aa, Artificial Sequence
  Quasi-synthetic sequence derived from human genome
FWKTWIFWKTWIFRKTYI

SEQ ID NO: 10534 - protein, 18 aa, Artificial Sequence
  Quasi-synthetic sequence derived from human genome
SRISITFFRLFRVMRLVK

SEQ ID NO: 10535 - protein, 18 aa, Artificial Sequence
  Quasi-synthetic sequence derived from human genome
FVAVLLGLRLRRWHKSRL

SEQ ID NO: 10536 - protein, 18 aa, Artificial Sequence
  Quasi-synthetic sequence derived from human genome
RLWVSRLLRHRKAQLLLV

SEQ ID NO: 10537 - protein, 18 aa, Artificial Sequence
  Quasi-synthetic sequence derived from human genome
VKRGRKKLLYIFKQPFMR

SEQ ID NO: 10538 - protein, 18 aa, Artificial Sequence
  Quasi-synthetic sequence derived from human genome
RLRINRFAWPKILKISYK

SEQ ID NO: 10539 - protein, 18 aa, Artificial Sequence
  Quasi-synthetic sequence derived from human genome
TLYILTHKRILKFLKLFI

SEQ ID NO: 10540 - protein, 18 aa, Artificial Sequence
  Quasi-synthetic sequence derived from human genome
LLYFLLSWVTKFIYRKIK

SEQ ID NO: 10541 - protein, 18 aa, Artificial Sequence
  Quasi-synthetic sequence derived from human genome
FCLILWKWKKKKRPRNSY

SEQ ID NO: 10542 - protein, 18 aa, Artificial Sequence
  Quasi-synthetic sequence derived from human genome
LLKKPKTRRLWSRFPPWR

SEQ ID NO: 10543 - protein, 18 aa, Artificial Sequence
  Quasi-synthetic sequence derived from human genome
RRFGRMHRLYLARRSFII

SEQ ID NO: 10544 - protein, 18 aa, Artificial Sequence
  Quasi-synthetic sequence derived from human genome
FGRRKLKKWVTQPLLKLR

SEQ ID NO: 10545 - protein, 18 aa, Artificial Sequence
  Quasi-synthetic sequence derived from human genome
WKHLSVRRFFWWARFIAI

SEQ ID NO: 10546 - protein, 18 aa, Artificial Sequence
  Quasi-synthetic sequence derived from human genome
LLWKHLKSSLRILFRHFF

SEQ ID NO: 10547 - protein, 18 aa, Artificial Sequence
  Quasi-synthetic sequence derived from human genome
KLLILLLGSWALFFRRPK

SEQ ID NO: 10548 - protein, 18 aa, Artificial Sequence
  Quasi-synthetic sequence derived from human genome
FQKLLKLFYIKKLKPLYN

SEQ ID NO: 10549 - protein, 18 aa, Artificial Sequence
  Quasi-synthetic sequence derived from human genome
RRKMSKKLPPVIIKYIII

SEQ ID NO: 10550 - protein, 18 aa, Artificial Sequence
  Quasi-synthetic sequence derived from human genome
RTKQIRLGILHKFVLRRR

SEQ ID NO: 10551 - protein, 18 aa, Artificial Sequence
  Quasi-synthetic sequence derived from human genome
RRRARLRFMKQKFNIVCL

SEQ ID NO: 10552 - protein, 18 aa, Artificial Sequence
  Quasi-synthetic sequence derived from human genome
LGFKKIKRGLWGKYKLKK

SEQ ID NO: 10553 - protein, 18 aa, Artificial Sequence
  Quasi-synthetic sequence derived from human genome
FRQRIILRVWWSTWRQRL

SEQ ID NO: 10554 - protein, 18 aa, Artificial Sequence
  Quasi-synthetic sequence derived from human genome
LCLRLLLFFRFKRTLDRI

SEQ ID NO: 10555 - protein, 18 aa, Artificial Sequence
  Quasi-synthetic sequence derived from human genome
LVKTRRRAVGWWKRLFTL

SEQ ID NO: 10556 - protein, 18 aa, Artificial Sequence
  Quasi-synthetic sequence derived from human genome
LSMKKFAVRRFFSVYLRR

SEQ ID NO: 10557 - protein, 18 aa, Artificial Sequence
  Quasi-synthetic sequence derived from human genome
LLLRVFRSGKRLKKTRKY

SEQ ID NO: 10558 - protein, 18 aa, Artificial Sequence
  Quasi-synthetic sequence derived from human genome
FVTRRRIRRTVRRALRRV

SEQ ID NO: 10559 - protein, 18 aa, Artificial Sequence
  Quasi-synthetic sequence derived from human genome
RIMKRHLRLIHPTKLYKL

SEQ ID NO: 10560 - protein, 18 aa, Artificial Sequence
  Quasi-synthetic sequence derived from human genome
ILHLQRALVLRRKRKRMT

SEQ ID NO: 10561 - protein, 18 aa, Artificial Sequence
  Quasi-synthetic sequence derived from human genome
RYIRLQRQRAILYKRLKV

SEQ ID NO: 10562 - protein, 18 aa, Artificial Sequence
  Quasi-synthetic sequence derived from human genome
IRMRLVNRFYRRLSALVW

SEQ ID NO: 10563 - protein, 18 aa, Artificial Sequence
  Quasi-synthetic sequence derived from human genome
LLSAWIVARLRMRNFKRL

SEQ ID NO: 10564 - protein, 18 aa, Artificial Sequence
  Quasi-synthetic sequence derived from human genome
LLKIVNFSRLIFHHLKRK

SEQ ID NO: 10565 - protein, 18 aa, Artificial Sequence
  Quasi-synthetic sequence derived from human genome
LYRKNRSRIPLLRKRWFQ

SEQ ID NO: 10566 - protein, 18 aa, Artificial Sequence
  Quasi-synthetic sequence derived from human genome
KWPLRFVIIHKRCVYYFK

SEQ ID NO: 10567 - protein, 18 aa, Artificial Sequence
  Quasi-synthetic sequence derived from human genome
PFWKLVNKKWMLTLLRII

SEQ ID NO: 10568 - protein, 18 aa, Artificial Sequence
  Quasi-synthetic sequence derived from human genome
FCLFCFRKLAKKGKKKKR

SEQ ID NO: 10569 - protein, 18 aa, Artificial Sequence
  Quasi-synthetic sequence derived from human genome
RLLINESLIKKLRLFFRK

SEQ ID NO: 10570 - protein, 18 aa, Artificial Sequence
  Quasi-synthetic sequence derived from human genome
QKRRAKIQKLKYFIKIFY

SEQ ID NO: 10571 - protein, 18 aa, Artificial Sequence
  Quasi-synthetic sequence derived from human genome
LVKMGGKIKSWKKRWFVF

SEQ ID NO: 10572 - protein, 18 aa, Artificial Sequence
  Quasi-synthetic sequence derived from human genome
KIFKKLPGFKKIHVLGFR

SEQ ID NO: 10573 - protein, 18 aa, Artificial Sequence
  Quasi-synthetic sequence derived from human genome
FMLFRKRLGSMILAFRPR

SEQ ID NO: 10574 - protein, 18 aa, Artificial Sequence
  Quasi-synthetic sequence derived from human genome
FVTVLLALKLRRWHKSRL

SEQ ID NO: 10575 - protein, 18 aa, Artificial Sequence
  Quasi-synthetic sequence derived from human genome
LIKRRQQKIRKYTMRRLL

SEQ ID NO: 10576 - protein, 18 aa, Artificial Sequence
  Quasi-synthetic sequence derived from human genome
LLPLRMPLSRWQRRLRRA

SEQ ID NO: 10577 - protein, 18 aa, Artificial Sequence
  Quasi-synthetic sequence derived from human genome
LRALLKRKHRFILLRSPG

SEQ ID NO: 10578 - protein, 18 aa, Artificial Sequence
  Quasi-synthetic sequence derived from human genome
FYPWFRRALKYILLGKIF

SEQ ID NO: 10579 - protein, 18 aa, Artificial Sequence
  Quasi-synthetic sequence derived from human genome
KRLVLRTKLHKLIDFLLR

SEQ ID NO: 10580 - protein, 18 aa, Artificial Sequence
  Quasi-synthetic sequence derived from human genome
MRRKLFGVLRLKCHSLFL

SEQ ID NO: 10581 - protein, 18 aa, Artificial Sequence
  Quasi-synthetic sequence derived from human genome
KALLIIYGILVIFRRMMK

SEQ ID NO: 10582 - protein, 18 aa, Artificial Sequence
  Quasi-synthetic sequence derived from human genome
LHRMWIQAVKKLRRWKGR

SEQ ID NO: 10583 - protein, 18 aa, Artificial Sequence
  Quasi-synthetic sequence derived from human genome
FQLPMKKIVWLKLLIPKI

SEQ ID NO: 10584 - protein, 18 aa, Artificial Sequence
  Quasi-synthetic sequence derived from human genome
VGRIVQVLRLLRALRMLK

SEQ ID NO: 10585 - protein, 18 aa, Artificial Sequence
  Quasi-synthetic sequence derived from human genome
LALALIGLIIFCCRKKRR

SEQ ID NO: 10586 - protein, 18 aa, Artificial Sequence
  Quasi-synthetic sequence derived from human genome
LLILSLICKIKLGPVRRK

SEQ ID NO: 10587 - protein, 18 aa, Artificial Sequence
  Quasi-synthetic sequence derived from human genome
LWKAVKRHNLTKRWLMKI

SEQ ID NO: 10588 - protein, 18 aa, Artificial Sequence
  Quasi-synthetic sequence derived from human genome
RYLRRLHFSLKKGRWNLK

SEQ ID NO: 10589 - protein, 18 aa, Artificial Sequence
  Quasi-synthetic sequence derived from human genome
FYGFLGKKFKRYFLQLLK

SEQ ID NO: 10590 - protein, 18 aa, Artificial Sequence
  Quasi-synthetic sequence derived from human genome
VLHLWPKRLLLPRHLRVF

SEQ ID NO: 10591 - protein, 18 aa, Artificial Sequence
  Quasi-synthetic sequence derived from human genome
ALLFLCLLPLIVKHIRKK

SEQ ID NO: 10592 - protein, 18 aa, Artificial Sequence
  Quasi-synthetic sequence derived from human genome
KFGNRIKVLRSRIRFIHL

SEQ ID NO: 10593 - protein, 18 aa, Artificial Sequence
  Quasi-synthetic sequence derived from human genome
IRRLLSFQRYLRSSRFFR

SEQ ID NO: 10594 - protein, 18 aa, Artificial Sequence
  Quasi-synthetic sequence derived from human genome
KIIKNLIKTVIKLAILYR

SEQ ID NO: 10595 - protein, 18 aa, Artificial Sequence
  Quasi-synthetic sequence derived from human genome
IFYLRNMKKKYTKMVKLL

SEQ ID NO: 10596 - protein, 18 aa, Artificial Sequence
  Quasi-synthetic sequence derived from human genome
RLKKIRAHRGLRHFWGLR

SEQ ID NO: 10597 - protein, 18 aa, Artificial Sequence
  Quasi-synthetic sequence derived from human genome
LLLAILLFFAVKYLLRWK

SEQ ID NO: 10598 - protein, 18 aa, Artificial Sequence
  Quasi-synthetic sequence derived from human genome
VFVVILFIGILFIILRKR

SEQ ID NO: 10599 - protein, 18 aa, Artificial Sequence
  Quasi-synthetic sequence derived from human genome
FVLGLLSGFLVWRRCRRR

SEQ ID NO: 10600 - protein, 18 aa, Artificial Sequence
  Quasi-synthetic sequence derived from human genome
KIRLKPKVLLNHFMLCIR

SEQ ID NO: 10601 - protein, 18 aa, Artificial Sequence
  Quasi-synthetic sequence derived from human genome
LKLGGRVKTWKRRWFILT

SEQ ID NO: 10602 - protein, 18 aa, Artificial Sequence
  Quasi-synthetic sequence derived from human genome
VLLALAAWASRWLRRKLR

SEQ ID NO: 10603 - protein, 18 aa, Artificial Sequence
  Quasi-synthetic sequence derived from human genome
LFRAPKLRMRVFGLCFVR

SEQ ID NO: 10604 - protein, 18 aa, Artificial Sequence
  Quasi-synthetic sequence derived from human genome
LRHPVCRLRTLWLKICRL

SEQ ID NO: 10605 - protein, 18 aa, Artificial Sequence
  Quasi-synthetic sequence derived from human genome
VLRSFRLLRVFKLAKSWP

SEQ ID NO: 10606 - protein, 18 aa, Artificial Sequence
  Quasi-synthetic sequence derived from human genome
LFVYLVIRALRLWRTAKL

SEQ ID NO: 10607 - protein, 18 aa, Artificial Sequence
  Quasi-synthetic sequence derived from human genome
SVLKPLRPILAARLRRRL

SEQ ID NO: 10608 - protein, 18 aa, Artificial Sequence
  Quasi-synthetic sequence derived from human genome
RLYMRQTIIKVIKFILII

SEQ ID NO: 10609 - protein, 18 aa, Artificial Sequence
  Quasi-synthetic sequence derived from human genome
FRNRFPLLKVLILQRNKL

SEQ ID NO: 10610 - protein, 18 aa, Artificial Sequence
  Quasi-synthetic sequence derived from human genome
RRLVPFLWLKWPGTRLLL

SEQ ID NO: 10611 - protein, 18 aa, Artificial Sequence
  Quasi-synthetic sequence derived from human genome
KLYVRLFQRKLSWIKMTK

SEQ ID NO: 10612 - protein, 18 aa, Artificial Sequence
  Quasi-synthetic sequence derived from human genome
WMRMISFIRSFCKYRRFM

SEQ ID NO: 10613 - protein, 18 aa, Artificial Sequence
  Quasi-synthetic sequence derived from human genome
MRRRFLSLKKTAILIQRK

SEQ ID NO: 10614 - protein, 18 aa, Artificial Sequence
  Quasi-synthetic sequence derived from human genome
RWRVLRLGAWARWLLVAL

SEQ ID NO: 10615 - protein, 18 aa, Artificial Sequence
  Quasi-synthetic sequence derived from human genome
FRLKICYFMRYWILKFPA

SEQ ID NO: 10616 - protein, 18 aa, Artificial Sequence
  Quasi-synthetic sequence derived from human genome
LIMRIKMCLIKLCKSKAK

SEQ ID NO: 10617 - protein, 18 aa, Artificial Sequence
  Quasi-synthetic sequence derived from human genome
KMRYKTSLVMRKRLRLYR

SEQ ID NO: 10618 - protein, 18 aa, Artificial Sequence
  Quasi-synthetic sequence derived from human genome
WLFLRYKSIVGRRFCFII

SEQ ID NO: 10619 - protein, 18 aa, Artificial Sequence
  Quasi-synthetic sequence derived from human genome
KFRLLGKIAWRSFLLICI

SEQ ID NO: 10620 - protein, 18 aa, Artificial Sequence
  Quasi-synthetic sequence derived from human genome
IRNMSWPRLIRKLRCYLK

SEQ ID NO: 10621 - protein, 18 aa, Artificial Sequence
  Quasi-synthetic sequence derived from human genome
ILTFQWRFYLSFRKLMRW

SEQ ID NO: 10622 - protein, 18 aa, Artificial Sequence
  Quasi-synthetic sequence derived from human genome
RKKVLAPRVNLTFRKILL

SEQ ID NO: 10623 - protein, 18 aa, Artificial Sequence
  Quasi-synthetic sequence derived from human genome
RFRKYLRQLFHRRVAVHL

SEQ ID NO: 10624 - protein, 18 aa, Artificial Sequence
  Quasi-synthetic sequence derived from human genome
CRLPFRALLQIRAMRKKL

SEQ ID NO: 10625 - protein, 18 aa, Artificial Sequence
  Quasi-synthetic sequence derived from human genome
LKRKKPFLHRRRRVRKRK

SEQ ID NO: 10626 - protein, 18 aa, Artificial Sequence
  Quasi-synthetic sequence derived from human genome
LCHKRFQKAFLKIFCIKK

SEQ ID NO: 10627 - protein, 18 aa, Artificial Sequence
  Quasi-synthetic sequence derived from human genome
ARLSRLIFLLRRWAARHV

SEQ ID NO: 10628 - protein, 18 aa, Artificial Sequence
  Quasi-synthetic sequence derived from human genome
LGLLQAIKLYLRRQRLLR

SEQ ID NO: 10629 - protein, 18 aa, Artificial Sequence
  Quasi-synthetic sequence derived from human genome
CWPQLRLLLWKNLTFRRR

SEQ ID NO: 10630 - protein, 18 aa, Artificial Sequence
  Quasi-synthetic sequence derived from human genome
LKKVIINRNHAFIFLKLR

SEQ ID NO: 10631 - protein, 18 aa, Artificial Sequence
  Quasi-synthetic sequence derived from human genome
RLSRLIFLLRRWAARHVH

SEQ ID NO: 10632 - protein, 18 aa, Artificial Sequence
  Quasi-synthetic sequence derived from human genome
KKLRGKKMAPLKIKLGLL

SEQ ID NO: 10633 - protein, 18 aa, Artificial Sequence
  Quasi-synthetic sequence derived from human genome
LKLGGGRVKTWKRRWFIL

SEQ ID NO: 10634 - protein, 18 aa, Artificial Sequence
  Quasi-synthetic sequence derived from human genome
KKRKRAIKLIVTVLAMYL

SEQ ID NO: 10635 - protein, 18 aa, Artificial Sequence
  Quasi-synthetic sequence derived from human genome
RAWKRIFWRQILLTLGLL

SEQ ID NO: 10636 - protein, 18 aa, Artificial Sequence
  Quasi-synthetic sequence derived from human genome
RYRHYFRLLVRTVLLRSL

SEQ ID NO: 10637 - protein, 18 aa, Artificial Sequence
  Quasi-synthetic sequence derived from human genome
KKWKIMKKAALLIQKYYR

SEQ ID NO: 10638 - protein, 18 aa, Artificial Sequence
  Quasi-synthetic sequence derived from human genome
RLRSRALSAFKLRGLLLR

SEQ ID NO: 10639 - protein, 18 aa, Artificial Sequence
  Quasi-synthetic sequence derived from human genome
RRVRSFLRGLPALLLLLL

SEQ ID NO: 10640 - protein, 18 aa, Artificial Sequence
  Quasi-synthetic sequence derived from human genome
RPRRWCPPPFFYRRRFVR

SEQ ID NO: 10641 - protein, 18 aa, Artificial Sequence
  Quasi-synthetic sequence derived from human genome
WRLPRISARAPYRLRRLR

SEQ ID NO: 10642 - protein, 18 aa, Artificial Sequence
  Quasi-synthetic sequence derived from human genome
FVKIKASHNLKKKILRFR

SEQ ID NO: 10643 - protein, 18 aa, Artificial Sequence
  Quasi-synthetic sequence derived from human genome
FPFAIRVFSLLQKKIKKL

SEQ ID NO: 10644 - protein, 18 aa, Artificial Sequence
  Quasi-synthetic sequence derived from human genome
LKLAKIILALKVSRKNLL

SEQ ID NO: 10645 - protein, 18 aa, Artificial Sequence
  Quasi-synthetic sequence derived from human genome
HKLKWWIGYLQRKFKRNL

SEQ ID NO: 10646 - protein, 18 aa, Artificial Sequence
  Quasi-synthetic sequence derived from human genome
KQLVRKILIVIARPARLL

SEQ ID NO: 10647 - protein, 18 aa, Artificial Sequence
  Quasi-synthetic sequence derived from human genome
IFHLLKNFLRLLPKFSLK

SEQ ID NO: 10648 - protein, 18 aa, Artificial Sequence
  Quasi-synthetic sequence derived from human genome
LLKQGHRRKNWKVRKFIL

SEQ ID NO: 10649 - protein, 18 aa, Artificial Sequence
  Quasi-synthetic sequence derived from human genome
RYFLWHTYRWLLLKLLLL

SEQ ID NO: 10650 - protein, 18 aa, Artificial Sequence
  Quasi-synthetic sequence derived from human genome
LILLAIVVLFITLRRSKK

SEQ ID NO: 10651 - protein, 18 aa, Artificial Sequence
  Quasi-synthetic sequence derived from human genome
TRKGIVRVVFFPFFFRWW

SEQ ID NO: 10652 - protein, 18 aa, Artificial Sequence
  Quasi-synthetic sequence derived from human genome
RKIMRFLRRCRHRMRELK

SEQ ID NO: 10653 - protein, 18 aa, Artificial Sequence
  Quasi-synthetic sequence derived from human genome
ALVGVLILFMFRRLRQFR

SEQ ID NO: 10654 - protein, 18 aa, Artificial Sequence
  Quasi-synthetic sequence derived from human genome
LKLFRMRSLRWQLLSIIV

SEQ ID NO: 10655 - protein, 18 aa, Artificial Sequence
  Quasi-synthetic sequence derived from human genome
RIIILKIVHRRIINRFHS

SEQ ID NO: 10656 - protein, 18 aa, Artificial Sequence
  Quasi-synthetic sequence derived from human genome
KLLIQAAIVRIMKMRKVL

SEQ ID NO: 10657 - protein, 18 aa, Artificial Sequence
  Quasi-synthetic sequence derived from human genome
LYSKRLITYRLRHLLRAR

SEQ ID NO: 10658 - protein, 18 aa, Artificial Sequence
  Quasi-synthetic sequence derived from human genome
KRKVLPLRLQNRLFVSWR

SEQ ID NO: 10659 - protein, 18 aa, Artificial Sequence
  Quasi-synthetic sequence derived from human genome
SLKCGLLRSFFRRRRPRL

SEQ ID NO: 10660 - protein, 18 aa, Artificial Sequence
  Quasi-synthetic sequence derived from human genome
AMRRAFHIRLIARRLGWL

SEQ ID NO: 10661 - protein, 18 aa, Artificial Sequence
  Quasi-synthetic sequence derived from human genome
LVLRKARSLLYQFRLLPR

SEQ ID NO: 10662 - protein, 18 aa, Artificial Sequence
  Quasi-synthetic sequence derived from human genome
QWWLKLRPLMKILAKYKA

SEQ ID NO: 10663 - protein, 18 aa, Artificial Sequence
  Quasi-synthetic sequence derived from human genome
LFMYAKRNKRRIMRIFSV

SEQ ID NO: 10664 - protein, 18 aa, Artificial Sequence
  Quasi-synthetic sequence derived from human genome
PWVYLLLRKILLRKFCQV

SEQ ID NO: 10665 - protein, 18 aa, Artificial Sequence
  Quasi-synthetic sequence derived from human genome
RLWLRVLLRLSPMAFRAL

SEQ ID NO: 10666 - protein, 18 aa, Artificial Sequence
  Quasi-synthetic sequence derived from human genome
LLRCPSKKKYKAIRLIFV

SEQ ID NO: 10667 - protein, 18 aa, Artificial Sequence
  Quasi-synthetic sequence derived from human genome
GIGVLILLVRYRKCIKLK

SEQ ID NO: 10668 - protein, 18 aa, Artificial Sequence
  Quasi-synthetic sequence derived from human genome
RKALLIFLVVHRLRWSSK

SEQ ID NO: 10669 - protein, 18 aa, Artificial Sequence
  Quasi-synthetic sequence derived from human genome
LPMKLLRKKIEKRNLKLR

SEQ ID NO: 10670 - protein, 18 aa, Artificial Sequence
  Quasi-synthetic sequence derived from human genome
RARWLRGILLFLFTLKCV

SEQ ID NO: 10671 - protein, 18 aa, Artificial Sequence
  Quasi-synthetic sequence derived from human genome
LGRFSRLVLWFAAFRKLL

SEQ ID NO: 10672 - protein, 18 aa, Artificial Sequence
  Quasi-synthetic sequence derived from human genome
KKMKHLWFFLLLVAAPRW

SEQ ID NO: 10673 - protein, 18 aa, Artificial Sequence
  Quasi-synthetic sequence derived from human genome
MRKKLILFFKRRNHARKQ

SEQ ID NO: 10674 - protein, 18 aa, Artificial Sequence
  Quasi-synthetic sequence derived from human genome
LVKMGGRIKTWRKRWFCF

SEQ ID NO: 10675 - protein, 18 aa, Artificial Sequence
  Quasi-synthetic sequence derived from human genome
LKHLCRLKIRKCMGRLHL

SEQ ID NO: 10676 - protein, 18 aa, Artificial Sequence
  Quasi-synthetic sequence derived from human genome
LRLIILIRIFHLLHQKRQ

SEQ ID NO: 10677 - protein, 18 aa, Artificial Sequence
  Quasi-synthetic sequence derived from human genome
CLTVLYSLIGRKLWRRRR

SEQ ID NO: 10678 - protein, 18 aa, Artificial Sequence
  Quasi-synthetic sequence derived from human genome
RIILLQRWFRVLLCRQHF

SEQ ID NO: 10679 - protein, 18 aa, Artificial Sequence
  Quasi-synthetic sequence derived from human genome
RVLGLLLLLGSRLARVRR

SEQ ID NO: 10680 - protein, 18 aa, Artificial Sequence
  Quasi-synthetic sequence derived from human genome
LAVFLIYKFKRKIPWINI

SEQ ID NO: 10681 - protein, 18 aa, Artificial Sequence
  Quasi-synthetic sequence derived from human genome
SRLWVLYKGVLKRLILLY

SEQ ID NO: 10682 - protein, 18 aa, Artificial Sequence
  Quasi-synthetic sequence derived from human genome
VLKWLYHLYIKTPRKMFR

SEQ ID NO: 10683 - protein, 18 aa, Artificial Sequence
  Quasi-synthetic sequence derived from human genome
LVWWKCKKWALHIVARLF

SEQ ID NO: 10684 - protein, 18 aa, Artificial Sequence
  Quasi-synthetic sequence derived from human genome
WLRWRILRLFPWILLGSL

SEQ ID NO: 10685 - protein, 18 aa, Artificial Sequence
  Quasi-synthetic sequence derived from human genome
AKNIRVWFIKVRKMKAIY

SEQ ID NO: 10686 - protein, 18 aa, Artificial Sequence
  Quasi-synthetic sequence derived from human genome
HPLSRLLWRRLKPLILGK

SEQ ID NO: 10687 - protein, 18 aa, Artificial Sequence
  Quasi-synthetic sequence derived from human genome
VLAVLLTLVFWKLIRSRR

SEQ ID NO: 10688 - protein, 18 aa, Artificial Sequence
  Quasi-synthetic sequence derived from human genome
GHRLLILWRILYKKTLWY

SEQ ID NO: 10689 - protein, 18 aa, Artificial Sequence
  Quasi-synthetic sequence derived from human genome
WVPALLLRRVPLFSLRFR

SEQ ID NO: 10690 - protein, 18 aa, Artificial Sequence
  Quasi-synthetic sequence derived from human genome
PPRRILFIKRFIIYSIRG

SEQ ID NO: 10691 - protein, 18 aa, Artificial Sequence
  Quasi-synthetic sequence derived from human genome
WRKWKQLSRLQRNMILFL

SEQ ID NO: 10692 - protein, 18 aa, Artificial Sequence
  Quasi-synthetic sequence derived from human genome
RRAKRKVTRMILIVAALF

SEQ ID NO: 10693 - protein, 18 aa, Artificial Sequence
  Quasi-synthetic sequence derived from human genome
KRNKLRVYYLSWLRNKIL

SEQ ID NO: 10694 - protein, 18 aa, Artificial Sequence
  Quasi-synthetic sequence derived from human genome
KKNKLRVYYLSWLRNRIL

SEQ ID NO: 10695 - protein, 18 aa, Artificial Sequence
  Quasi-synthetic sequence derived from human genome
ITKFCLFCFWKFARKGKK

SEQ ID NO: 10696 - protein, 18 aa, Artificial Sequence
  Quasi-synthetic sequence derived from human genome
LKERLLAIRRILVIITRK

SEQ ID NO: 10697 - protein, 18 aa, Artificial Sequence
  Quasi-synthetic sequence derived from human genome
AVRIQRRWRGYRVRKYLF

SEQ ID NO: 10698 - protein, 18 aa, Artificial Sequence
  Quasi-synthetic sequence derived from human genome
RRFNIRLIHPVQFVFLRK

SEQ ID NO: 10699 - protein, 18 aa, Artificial Sequence
  Quasi-synthetic sequence derived from human genome
KMFRFFIRRMVKAQSFYW

SEQ ID NO: 10700 - protein, 18 aa, Artificial Sequence
  Quasi-synthetic sequence derived from human genome
GHIFRKVKRRSLRLYARW

SEQ ID NO: 10701 - protein, 18 aa, Artificial Sequence
  Quasi-synthetic sequence derived from human genome
IHRRVLKKNPLKNLRIML

SEQ ID NO: 10702 - protein, 18 aa, Artificial Sequence
  Quasi-synthetic sequence derived from human genome
QVTFLLKIKRTRKGFRLL

SEQ ID NO: 10703 - protein, 18 aa, Artificial Sequence
  Quasi-synthetic sequence derived from human genome
FVFIYVQLWLVLRYRHKR

SEQ ID NO: 10704 - protein, 18 aa, Artificial Sequence
  Quasi-synthetic sequence derived from human genome
KKRLLSWKQQVLKLLRTF

SEQ ID NO: 10705 - protein, 18 aa, Artificial Sequence
  Quasi-synthetic sequence derived from human genome
KLCRIKASKALKKKIRRF

SEQ ID NO: 10706 - protein, 18 aa, Artificial Sequence
  Quasi-synthetic sequence derived from human genome
WRWVLLRLHKAGARVKIM

SEQ ID NO: 10707 - protein, 18 aa, Artificial Sequence
  Quasi-synthetic sequence derived from human genome
RVRRMFRLSAALHLLLLF

SEQ ID NO: 10708 - protein, 18 aa, Artificial Sequence
  Quasi-synthetic sequence derived from human genome
MRRLPRALLLQLRLALLV

SEQ ID NO: 10709 - protein, 18 aa, Artificial Sequence
  Quasi-synthetic sequence derived from human genome
SINSLKKLVLRKLRRKAL

SEQ ID NO: 10710 - protein, 18 aa, Artificial Sequence
  Quasi-synthetic sequence derived from human genome
HVLRRQILLPFRKPLIIF

SEQ ID NO: 10711 - protein, 18 aa, Artificial Sequence
  Quasi-synthetic sequence derived from human genome
IRKKKMCVLRLIQVIRSV

SEQ ID NO: 10712 - protein, 18 aa, Artificial Sequence
  Quasi-synthetic sequence derived from human genome
ARQIQKMRKFYFRRIMRM

SEQ ID NO: 10713 - protein, 18 aa, Artificial Sequence
  Quasi-synthetic sequence derived from human genome
IMKMRPKDLKKRLMVKFR

SEQ ID NO: 10714 - protein, 18 aa, Artificial Sequence
  Quasi-synthetic sequence derived from human genome
RKLARLGLVRCLRLGHRF

SEQ ID NO: 10715 - protein, 18 aa, Artificial Sequence
  Quasi-synthetic sequence derived from human genome
LKRLGFKGVWKGLFARII

SEQ ID NO: 10716 - protein, 18 aa, Artificial Sequence
  Quasi-synthetic sequence derived from human genome
KFSRYWRRWNRFCRRKCR

SEQ ID NO: 10717 - protein, 18 aa, Artificial Sequence
  Quasi-synthetic sequence derived from human genome
LFVKLSRVVGRLRLVFTR

SEQ ID NO: 10718 - protein, 18 aa, Artificial Sequence
  Quasi-synthetic sequence derived from human genome
RRAIRVFFMLRSLSLQLR

SEQ ID NO: 10719 - protein, 18 aa, Artificial Sequence
  Quasi-synthetic sequence derived from human genome
FVAAGLFAYVLRRRRKKL

SEQ ID NO: 10720 - protein, 18 aa, Artificial Sequence
  Quasi-synthetic sequence derived from human genome
FLRFKKGKRCSLVFGLII

SEQ ID NO: 10721 - protein, 18 aa, Artificial Sequence
  Quasi-synthetic sequence derived from human genome
KFIFCTRTLNWKKLRIYL

SEQ ID NO: 10722 - protein, 18 aa, Artificial Sequence
  Quasi-synthetic sequence derived from human genome
RKHTRSWAVLKLLLLLLL

SEQ ID NO: 10723 - protein, 18 aa, Artificial Sequence
  Quasi-synthetic sequence derived from human genome
KIGFRLRNLLKLPKAHKW

SEQ ID NO: 10724 - protein, 18 aa, Artificial Sequence
  Quasi-synthetic sequence derived from human genome
IRYIVLLRSVRPLRLFVY

SEQ ID NO: 10725 - protein, 18 aa, Artificial Sequence
  Quasi-synthetic sequence derived from human genome
FVVITLLKTRGPFRKRLR

SEQ ID NO: 10726 - protein, 18 aa, Artificial Sequence
  Quasi-synthetic sequence derived from human genome
FFYPWFRKALKMMLFGKI

SEQ ID NO: 10727 - protein, 18 aa, Artificial Sequence
  Quasi-synthetic sequence derived from human genome
FKKFDHRYLRKILIRKNL

SEQ ID NO: 10728 - protein, 18 aa, Artificial Sequence
  Quasi-synthetic sequence derived from human genome
KRWIQLFKVITNLVKMLK

SEQ ID NO: 10729 - protein, 18 aa, Artificial Sequence
  Quasi-synthetic sequence derived from human genome
LFLKLRWRITGLIPWLLW

SEQ ID NO: 10730 - protein, 18 aa, Artificial Sequence
  Quasi-synthetic sequence derived from human genome
LRKIWVFLKTAFHARLRC

SEQ ID NO: 10731 - protein, 18 aa, Artificial Sequence
  Quasi-synthetic sequence derived from human genome
FLIMVVVYLRIYVYVKRK

SEQ ID NO: 10732 - protein, 18 aa, Artificial Sequence
  Quasi-synthetic sequence derived from human genome
FCLFCFWKFARKGKKGKR

SEQ ID NO: 10733 - protein, 18 aa, Artificial Sequence
  Quasi-synthetic sequence derived from human genome
FFFFLSGTIWIHILRKRR

SEQ ID NO: 10734 - protein, 18 aa, Artificial Sequence
  Quasi-synthetic sequence derived from human genome
ILVLLAVGGLLFYRWRRR

SEQ ID NO: 10735 - protein, 18 aa, Artificial Sequence
  Quasi-synthetic sequence derived from human genome
AATLFWLLLTLFIRKMKR

SEQ ID NO: 10736 - protein, 18 aa, Artificial Sequence
  Quasi-synthetic sequence derived from human genome
FRRTLILSSGFRLVKKKL

SEQ ID NO: 10737 - protein, 18 aa, Artificial Sequence
  Quasi-synthetic sequence derived from human genome
ICRLPFRALLQIRAVRKK

SEQ ID NO: 10738 - protein, 18 aa, Artificial Sequence
  Quasi-synthetic sequence derived from human genome
KRLKAKNLMYLKQILYLL

SEQ ID NO: 10739 - protein, 18 aa, Artificial Sequence
  Quasi-synthetic sequence derived from human genome
RLWKWLKSPRSWRLGLAL

SEQ ID NO: 10740 - protein, 18 aa, Artificial Sequence
  Quasi-synthetic sequence derived from human genome
LRLLLVKKPSVRSLALKL

SEQ ID NO: 10741 - protein, 18 aa, Artificial Sequence
  Quasi-synthetic sequence derived from human genome
IRLPLRLINISHLIRKIL

SEQ ID NO: 10742 - protein, 18 aa, Artificial Sequence
  Quasi-synthetic sequence derived from human genome
WKIARKWMRRKMGKWPAV

SEQ ID NO: 10743 - protein, 18 aa, Artificial Sequence
  Quasi-synthetic sequence derived from human genome
ILICYLKIVICLRRRNAK

SEQ ID NO: 10744 - protein, 18 aa, Artificial Sequence
  Quasi-synthetic sequence derived from human genome
RRYPRKRCICCFLLGLLL

SEQ ID NO: 10745 - protein, 18 aa, Artificial Sequence
  Quasi-synthetic sequence derived from human genome
VLKKRLKNYYKKQKLMLK

SEQ ID NO: 10746 - protein, 18 aa, Artificial Sequence
  Quasi-synthetic sequence derived from human genome
VLFLRLRSIRCLRNIIHW

SEQ ID NO: 10747 - protein, 18 aa, Artificial Sequence
  Quasi-synthetic sequence derived from human genome
LRAVLRRFFLRIGVVFQI

SEQ ID NO: 10748 - protein, 18 aa, Artificial Sequence
  Quasi-synthetic sequence derived from human genome
WRRKKLYLLFAQHRYISR

SEQ ID NO: 10749 - protein, 18 aa, Artificial Sequence
  Quasi-synthetic sequence derived from human genome
LTILTIWLFKHRRVRFLH

SEQ ID NO: 10750 - protein, 18 aa, Artificial Sequence
  Quasi-synthetic sequence derived from human genome
RLWKIFIQLCLALRYLHK

SEQ ID NO: 10751 - protein, 18 aa, Artificial Sequence
  Quasi-synthetic sequence derived from human genome
KHFLRKIIMVHPKVRFHF

SEQ ID NO: 10752 - protein, 18 aa, Artificial Sequence
  Quasi-synthetic sequence derived from human genome
RVYVLKFKAGSKRLFFWM

SEQ ID NO: 10753 - protein, 18 aa, Artificial Sequence
  Quasi-synthetic sequence derived from human genome
RRSLLRYFYRQLLLFYSK

SEQ ID NO: 10754 - protein, 18 aa, Artificial Sequence
  Quasi-synthetic sequence derived from human genome
KKLRYYARFIVVCLLLNK

SEQ ID NO: 10755 - protein, 18 aa, Artificial Sequence
  Quasi-synthetic sequence derived from human genome
LYKRGALLKGWKPRWFVL

SEQ ID NO: 10756 - protein, 18 aa, Artificial Sequence
  Quasi-synthetic sequence derived from human genome
LRLPRLLSPPLRPRLLLL

SEQ ID NO: 10757 - protein, 18 aa, Artificial Sequence
  Quasi-synthetic sequence derived from human genome
KFWARGRKPWKLAIQILK

SEQ ID NO: 10758 - protein, 18 aa, Artificial Sequence
  Quasi-synthetic sequence derived from human genome
MILIKYRRLRIMTNIYLL

SEQ ID NO: 10759 - protein, 18 aa, Artificial Sequence
  Quasi-synthetic sequence derived from human genome
ILLAIVVLYVALRRQKKK

SEQ ID NO: 10760 - protein, 18 aa, Artificial Sequence
  Quasi-synthetic sequence derived from human genome
LLALRFCGIYGYRLRRKW

SEQ ID NO: 10761 - protein, 18 aa, Artificial Sequence
  Quasi-synthetic sequence derived from human genome
LLMVFVALLVFYITKRKK

SEQ ID NO: 10762 - protein, 18 aa, Artificial Sequence
  Quasi-synthetic sequence derived from human genome
LSLLLILKAGRRWNKYFK

SEQ ID NO: 10763 - protein, 18 aa, Artificial Sequence
  Quasi-synthetic sequence derived from human genome
LLRQHKVWRKCRMRIFTV

SEQ ID NO: 10764 - protein, 18 aa, Artificial Sequence
  Quasi-synthetic sequence derived from human genome
KYIIINRFRGRKNMLVKL

SEQ ID NO: 10765 - protein, 18 aa, Artificial Sequence
  Quasi-synthetic sequence derived from human genome
KKLKILGMPFRNIRSILK

SEQ ID NO: 10766 - protein, 18 aa, Artificial Sequence
  Quasi-synthetic sequence derived from human genome
KRREWLLRKSSLLKKYLL

SEQ ID NO: 10767 - protein, 18 aa, Artificial Sequence
  Quasi-synthetic sequence derived from human genome
LVLIVLLLLPFRCQRRPR

SEQ ID NO: 10768 - protein, 18 aa, Artificial Sequence
  Quasi-synthetic sequence derived from human genome
VFWATRLAKKLLGWLLFK

SEQ ID NO: 10769 - protein, 18 aa, Artificial Sequence
  Quasi-synthetic sequence derived from human genome
AFRAIVALLRAGKLRLLR

SEQ ID NO: 10770 - protein, 18 aa, Artificial Sequence
  Quasi-synthetic sequence derived from human genome
RTLALRALLLLQRLKNRL

SEQ ID NO: 10771 - protein, 18 aa, Artificial Sequence
  Quasi-synthetic sequence derived from human genome
LRYRPKVKFLFGIWPVIL

SEQ ID NO: 10772 - protein, 18 aa, Artificial Sequence
  Quasi-synthetic sequence derived from human genome
WKCYKARKFFLFYRQQKW

SEQ ID NO: 10773 - protein, 18 aa, Artificial Sequence
  Quasi-synthetic sequence derived from human genome
LFHLRLLWRKLLWHQVFF

SEQ ID NO: 10774 - protein, 18 aa, Artificial Sequence
  Quasi-synthetic sequence derived from human genome
WRKRRWIEVYSLLRRAFL

SEQ ID NO: 10775 - protein, 18 aa, Artificial Sequence
  Quasi-synthetic sequence derived from human genome
QIPLGRRFRSLKMWFVFR

SEQ ID NO: 10776 - protein, 18 aa, Artificial Sequence
  Quasi-synthetic sequence derived from human genome
RKKWKMGGMKYIFSLLFF

SEQ ID NO: 10777 - protein, 18 aa, Artificial Sequence
  Quasi-synthetic sequence derived from human genome
KFFLIDFIFKRCPRLRAK

SEQ ID NO: 10778 - protein, 18 aa, Artificial Sequence
  Quasi-synthetic sequence derived from human genome
LATWQVFYLRRFFKAKKL

SEQ ID NO: 10779 - protein, 18 aa, Artificial Sequence
  Quasi-synthetic sequence derived from human genome
KRLLRMGMRLQLLRDRRI

SEQ ID NO: 10780 - protein, 18 aa, Artificial Sequence
  Quasi-synthetic sequence derived from human genome
KRNLRLLVLGRKHMLRRS

SEQ ID NO: 10781 - protein, 18 aa, Artificial Sequence
  Quasi-synthetic sequence derived from human genome
ARLKRKLIRLFGRLCELK

SEQ ID NO: 10782 - protein, 18 aa, Artificial Sequence
  Quasi-synthetic sequence derived from human genome
LRTIFPLFMKSPRKIKKV

SEQ ID NO: 10783 - protein, 18 aa, Artificial Sequence
  Quasi-synthetic sequence derived from human genome
KGLILCLWSKFCRWFQRR

SEQ ID NO: 10784 - protein, 18 aa, Artificial Sequence
  Quasi-synthetic sequence derived from human genome
LRNRLIRKRFLCLGWGLP

SEQ ID NO: 10785 - protein, 18 aa, Artificial Sequence
  Quasi-synthetic sequence derived from human genome
KNWPWMRLFFKIKPLVKS

SEQ ID NO: 10786 - protein, 18 aa, Artificial Sequence
  Quasi-synthetic sequence derived from human genome
IRLGIFLRRYPIARVFVI

SEQ ID NO: 10787 - protein, 18 aa, Artificial Sequence
  Quasi-synthetic sequence derived from human genome
IIVFAMIKIGQLFRKLIR

SEQ ID NO: 10788 - protein, 18 aa, Artificial Sequence
  Quasi-synthetic sequence derived from human genome
YPLIALKALKKALLLYKK

SEQ ID NO: 10789 - protein, 18 aa, Artificial Sequence
  Quasi-synthetic sequence derived from human genome
LALLVFILWKCGFFKRSR

SEQ ID NO: 10790 - protein, 18 aa, Artificial Sequence
  Quasi-synthetic sequence derived from human genome
RRRSLRRLFSRFLLALGS

SEQ ID NO: 10791 - protein, 18 aa, Artificial Sequence
  Quasi-synthetic sequence derived from human genome
LRYIVLVWGINKFTKKLR

SEQ ID NO: 10792 - protein, 18 aa, Artificial Sequence
  Quasi-synthetic sequence derived from human genome
IRMRRIVFAGVILFRLLG

SEQ ID NO: 10793 - protein, 18 aa, Artificial Sequence
  Quasi-synthetic sequence derived from human genome
GFFLWKRALKDRFKYVRR

SEQ ID NO: 10794 - protein, 18 aa, Artificial Sequence
  Quasi-synthetic sequence derived from human genome
AILILAICGLKLQRRWKR

SEQ ID NO: 10795 - protein, 18 aa, Artificial Sequence
  Quasi-synthetic sequence derived from human genome
RRLLRRGTCAFSILFKLF

SEQ ID NO: 10796 - protein, 18 aa, Artificial Sequence
  Quasi-synthetic sequence derived from human genome
LYLTKIHFWLPVLKMIRK

SEQ ID NO: 10797 - protein, 18 aa, Artificial Sequence
  Quasi-synthetic sequence derived from human genome
LVGLFVLLAFLQYRRLRK

SEQ ID NO: 10798 - protein, 18 aa, Artificial Sequence
  Quasi-synthetic sequence derived from human genome
FQRWKKRYFKLRGRTLYY

SEQ ID NO: 10799 - protein, 18 aa, Artificial Sequence
  Quasi-synthetic sequence derived from human genome
WLRVRFGTWNWIWRRCCR

SEQ ID NO: 10800 - protein, 18 aa, Artificial Sequence
  Quasi-synthetic sequence derived from human genome
LRKYFNMRVFRQRTYRIW

SEQ ID NO: 10801 - protein, 18 aa, Artificial Sequence
  Quasi-synthetic sequence derived from human genome
RVLSRTSKFRRLRQLLRR

SEQ ID NO: 10802 - protein, 18 aa, Artificial Sequence
  Quasi-synthetic sequence derived from human genome
LIITGLAYFLLSKRKKRK

SEQ ID NO: 10803 - protein, 18 aa, Artificial Sequence
  Quasi-synthetic sequence derived from human genome
CIWRFAWRKSIKKYHAWR

SEQ ID NO: 10804 - protein, 18 aa, Artificial Sequence
  Quasi-synthetic sequence derived from human genome
WKFLLRLTKGKFAVMNRK

SEQ ID NO: 10805 - protein, 18 aa, Artificial Sequence
  Quasi-synthetic sequence derived from human genome
RFKKKCFKLTRKMPIIGR

SEQ ID NO: 10806 - protein, 18 aa, Artificial Sequence
  Quasi-synthetic sequence derived from human genome
RISLKRPKKCFRNLFHIR

SEQ ID NO: 10807 - protein, 18 aa, Artificial Sequence
  Quasi-synthetic sequence derived from human genome
RKKLILYFKRRNHARKQW

SEQ ID NO: 10808 - protein, 18 aa, Artificial Sequence
  Quasi-synthetic sequence derived from human genome
WRMRVALARALFIRPFML

SEQ ID NO: 10809 - protein, 18 aa, Artificial Sequence
  Quasi-synthetic sequence derived from human genome
KFSGFGKIFKPWKWRKKK

SEQ ID NO: 10810 - protein, 18 aa, Artificial Sequence
  Quasi-synthetic sequence derived from human genome
FFRREIKRRPLFRSCFIL

SEQ ID NO: 10811 - protein, 18 aa, Artificial Sequence
  Quasi-synthetic sequence derived from human genome
KWRKKRMRRLKRKRRKMR

SEQ ID NO: 10812 - protein, 18 aa, Artificial Sequence
  Quasi-synthetic sequence derived from human genome
RLRINRFAWPKVLKISYK

SEQ ID NO: 10813 - protein, 18 aa, Artificial Sequence
  Quasi-synthetic sequence derived from human genome
LRINRFPWPKVLKISYKR

SEQ ID NO: 10814 - protein, 18 aa, Artificial Sequence
  Quasi-synthetic sequence derived from human genome
RSRIPLLRKRRFQLCRCM

SEQ ID NO: 10815 - protein, 18 aa, Artificial Sequence
  Quasi-synthetic sequence derived from human genome
MLRVLCLLRPWRPLRARG

SEQ ID NO: 10816 - protein, 18 aa, Artificial Sequence
  Quasi-synthetic sequence derived from human genome
PEKVTWMRRMRILRRLLR

SEQ ID NO: 10817 - protein, 18 aa, Artificial Sequence
  Quasi-synthetic sequence derived from human genome
VKKWLRQLKNAGKILLLI

SEQ ID NO: 10818 - protein, 18 aa, Artificial Sequence
  Quasi-synthetic sequence derived from human genome
RKLYMKSLLKIFAWATLR

SEQ ID NO: 10819 - protein, 18 aa, Artificial Sequence
  Quasi-synthetic sequence derived from human genome
FRFIFALRLSKKQKKKKQ

SEQ ID NO: 10820 - protein, 18 aa, Artificial Sequence
  Quasi-synthetic sequence derived from human genome
FIYRLFWKSKDRPRRIRM

SEQ ID NO: 10821 - protein, 18 aa, Artificial Sequence
  Quasi-synthetic sequence derived from human genome
KALLRLVSAVNRRRMKLL

SEQ ID NO: 10822 - protein, 18 aa, Artificial Sequence
  Quasi-synthetic sequence derived from human genome
KVLPCIVIKFRYLWLFWF

SEQ ID NO: 10823 - protein, 18 aa, Artificial Sequence
  Quasi-synthetic sequence derived from human genome
RMKLVLRWYLSGFYKKPK

SEQ ID NO: 10824 - protein, 18 aa, Artificial Sequence
  Quasi-synthetic sequence derived from human genome
IRTRLIRKRFLCLGWGLP

SEQ ID NO: 10825 - protein, 18 aa, Artificial Sequence
  Quasi-synthetic sequence derived from human genome
LYGRIFRAARFRIRKTVK

SEQ ID NO: 10826 - protein, 18 aa, Artificial Sequence
  Quasi-synthetic sequence derived from human genome
LMVACRLRLVKQKLKKAR

SEQ ID NO: 10827 - protein, 18 aa, Artificial Sequence
  Quasi-synthetic sequence derived from human genome
FWTQLMLLLWKNFMYRRR

SEQ ID NO: 10828 - protein, 18 aa, Artificial Sequence
  Quasi-synthetic sequence derived from human genome
RVSIAISRMKFLVRRWHR

SEQ ID NO: 10829 - protein, 18 aa, Artificial Sequence
  Quasi-synthetic sequence derived from human genome
FIFIKRDQLWRSYFRKKR

SEQ ID NO: 10830 - protein, 18 aa, Artificial Sequence
  Quasi-synthetic sequence derived from human genome
RKLIQFGLMKNLIRRLQK

SEQ ID NO: 10831 - protein, 18 aa, Artificial Sequence
  Quasi-synthetic sequence derived from human genome
LRSLRFLQILRMLRMDRR

SEQ ID NO: 10832 - protein, 18 aa, Artificial Sequence
  Quasi-synthetic sequence derived from human genome
KLKRKYWWKNCKMWAIGI

SEQ ID NO: 10833 - protein, 18 aa, Artificial Sequence
  Quasi-synthetic sequence derived from human genome
RKIMRFLRRCRHRVKELK

SEQ ID NO: 10834 - protein, 18 aa, Artificial Sequence
  Quasi-synthetic sequence derived from human genome
VLKTLIQFTVKLRLLIKL

SEQ ID NO: 10835 - protein, 18 aa, Artificial Sequence
  Quasi-synthetic sequence derived from human genome
VFRWAILRAFFRAMVAFR

SEQ ID NO: 10836 - protein, 18 aa, Artificial Sequence
  Quasi-synthetic sequence derived from human genome
SLIFLTYVLSFIFRKWRK

SEQ ID NO: 10837 - protein, 18 aa, Artificial Sequence
  Quasi-synthetic sequence derived from human genome
TKRSALCIFKIARKLLFL

SEQ ID NO: 10838 - protein, 18 aa, Artificial Sequence
  Quasi-synthetic sequence derived from human genome
KFNRLPRVLILHLKRYSF

SEQ ID NO: 10839 - protein, 18 aa, Artificial Sequence
  Quasi-synthetic sequence derived from human genome
GVKRLCHIRGKLRKKVWI

SEQ ID NO: 10840 - protein, 18 aa, Artificial Sequence
  Quasi-synthetic sequence derived from human genome
KLAKIGYLVFLRLFIFFL

SEQ ID NO: 10841 - protein, 18 aa, Artificial Sequence
  Quasi-synthetic sequence derived from human genome
ALVLVGLVSWRRRQRRLR

SEQ ID NO: 10842 - protein, 18 aa, Artificial Sequence
  Quasi-synthetic sequence derived from human genome
RRWKKKQLRRPSLLLLGC

SEQ ID NO: 10843 - protein, 18 aa, Artificial Sequence
  Quasi-synthetic sequence derived from human genome
APRLRPVPPVMWRLFRRR

SEQ ID NO: 10844 - protein, 18 aa, Artificial Sequence
  Quasi-synthetic sequence derived from human genome
LIWCLALVLIKWITSKRR

SEQ ID NO: 10845 - protein, 18 aa, Artificial Sequence
  Quasi-synthetic sequence derived from human genome
GRLLIYKQGRKLFPIKLK

SEQ ID NO: 10846 - protein, 18 aa, Artificial Sequence
  Quasi-synthetic sequence derived from human genome
KLLLWACIVCVAFARKRR

SEQ ID NO: 10847 - protein, 18 aa, Artificial Sequence
  Quasi-synthetic sequence derived from human genome
KARRKKIMIIICCVILGI

SEQ ID NO: 10848 - protein, 18 aa, Artificial Sequence
  Quasi-synthetic sequence derived from human genome
IFITVKQRKQYRRLKKLM

SEQ ID NO: 10849 - protein, 18 aa, Artificial Sequence
  Quasi-synthetic sequence derived from human genome
LVRYRKVVILGYRCVVRK

SEQ ID NO: 10850 - protein, 18 aa, Artificial Sequence
  Quasi-synthetic sequence derived from human genome
VVYPLKFFFLRTRRFALM

SEQ ID NO: 10851 - protein, 18 aa, Artificial Sequence
  Quasi-synthetic sequence derived from human genome
IRIRILCCLTFLVKVKSK

SEQ ID NO: 10852 - protein, 18 aa, Artificial Sequence
  Quasi-synthetic sequence derived from human genome
RRRRRREYCKFALLLVLY

SEQ ID NO: 10853 - protein, 18 aa, Artificial Sequence
  Quasi-synthetic sequence derived from human genome
ILYMKPRMKIFLRQKKVT

SEQ ID NO: 10854 - protein, 18 aa, Artificial Sequence
  Quasi-synthetic sequence derived from human genome
LILKRYKIGASRKTFWKR

SEQ ID NO: 10855 - protein, 18 aa, Artificial Sequence
  Quasi-synthetic sequence derived from human genome
LVGVLILFMFRRLRQFRQ

SEQ ID NO: 10856 - protein, 18 aa, Artificial Sequence
  Quasi-synthetic sequence derived from human genome
AKVKLIRLVGIMLLLYVK

SEQ ID NO: 10857 - protein, 18 aa, Artificial Sequence
  Quasi-synthetic sequence derived from human genome
CIVVVVSIWLFRRKSIKK

SEQ ID NO: 10858 - protein, 18 aa, Artificial Sequence
  Quasi-synthetic sequence derived from human genome
RWKPFLYRGRICRRLSVV

SEQ ID NO: 10859 - protein, 18 aa, Artificial Sequence
  Quasi-synthetic sequence derived from human genome
RCRKRKPLLAIGFYLYRM

SEQ ID NO: 10860 - protein, 18 aa, Artificial Sequence
  Quasi-synthetic sequence derived from human genome
KIVKISFKCKQFFIQLRK

SEQ ID NO: 10861 - protein, 18 aa, Artificial Sequence
  Quasi-synthetic sequence derived from human genome
FAFRRKLKIQQSYKKLLR

SEQ ID NO: 10862 - protein, 18 aa, Artificial Sequence
  Quasi-synthetic sequence derived from human genome
WTRVILLNWCAWFLRMKR

SEQ ID NO: 10863 - protein, 18 aa, Artificial Sequence
  Quasi-synthetic sequence derived from human genome
KYPRGVGWRILKVLLWLL

SEQ ID NO: 10864 - protein, 18 aa, Artificial Sequence
  Quasi-synthetic sequence derived from human genome
RKRTVWPRLARVLIVTLL

SEQ ID NO: 10865 - protein, 18 aa, Artificial Sequence
  Quasi-synthetic sequence derived from human genome
KKLKQIFLSVLRHVRYWV

SEQ ID NO: 10866 - protein, 18 aa, Artificial Sequence
  Quasi-synthetic sequence derived from human genome
RLLGHIKNVPLILKRMKL

SEQ ID NO: 10867 - protein, 18 aa, Artificial Sequence
  Quasi-synthetic sequence derived from human genome
FCYLRIWVLVLQARRKAK

SEQ ID NO: 10868 - protein, 18 aa, Artificial Sequence
  Quasi-synthetic sequence derived from human genome
LKKKKKMPKLRFASRIRK

SEQ ID NO: 10869 - protein, 18 aa, Artificial Sequence
  Quasi-synthetic sequence derived from human genome
RKVLELLKVAWKRRLIFT

SEQ ID NO: 10870 - protein, 18 aa, Artificial Sequence
  Quasi-synthetic sequence derived from human genome
VILLVIVVLFVTLRRQKK

SEQ ID NO: 10871 - protein, 18 aa, Artificial Sequence
  Quasi-synthetic sequence derived from human genome
VQMRLKKHRWYKKILKSR

SEQ ID NO: 10872 - protein, 18 aa, Artificial Sequence
  Quasi-synthetic sequence derived from human genome
MLMLLPFLLRHHKVWRKC

SEQ ID NO: 10873 - protein, 18 aa, Artificial Sequence
  Quasi-synthetic sequence derived from human genome
WKLLPLLRSVLRFRLGGL

SEQ ID NO: 10874 - protein, 18 aa, Artificial Sequence
  Quasi-synthetic sequence derived from human genome
LLRFRKQRKKMAKLPKPV

SEQ ID NO: 10875 - protein, 18 aa, Artificial Sequence
  Quasi-synthetic sequence derived from human genome
KLSTIGKIFKPWKWRKKK

SEQ ID NO: 10876 - protein, 18 aa, Artificial Sequence
  Quasi-synthetic sequence derived from human genome
RKLSFKRKHFLIKLHANI

SEQ ID NO: 10877 - protein, 18 aa, Artificial Sequence
  Quasi-synthetic sequence derived from human genome
RIIPFLPGKILFRRSHIR

SEQ ID NO: 10878 - protein, 18 aa, Artificial Sequence
  Quasi-synthetic sequence derived from human genome
LIRKCSRFNFLRFLIRHT

SEQ ID NO: 10879 - protein, 18 aa, Artificial Sequence
  Quasi-synthetic sequence derived from human genome
GLSVLRSFRLLRVFKLAK

SEQ ID NO: 10880 - protein, 18 aa, Artificial Sequence
  Quasi-synthetic sequence derived from human genome
PKLINALRRCFFWRFMFY

SEQ ID NO: 10881 - protein, 18 aa, Artificial Sequence
  Quasi-synthetic sequence derived from human genome
KLSMIRFRYRILRSQHFR

SEQ ID NO: 10882 - protein, 18 aa, Artificial Sequence
  Quasi-synthetic sequence derived from human genome
MFLRRLGGWLPRPWGRRK

SEQ ID NO: 10883 - protein, 18 aa, Artificial Sequence
  Quasi-synthetic sequence derived from human genome
KQIRRPKHVVVKFVVKFF

SEQ ID NO: 10884 - protein, 18 aa, Artificial Sequence
  Quasi-synthetic sequence derived from human genome
LRARRARRCYLLSVALRL

SEQ ID NO: 10885 - protein, 18 aa, Artificial Sequence
  Quasi-synthetic sequence derived from human genome
QIPLSRRFRSVKLWFVIR

SEQ ID NO: 10886 - protein, 18 aa, Artificial Sequence
  Quasi-synthetic sequence derived from human genome
RLLKHVPKIIHLVCKLLL

SEQ ID NO: 10887 - protein, 18 aa, Artificial Sequence
  Quasi-synthetic sequence derived from human genome
WRPRRARGTPLLLLLLLL

SEQ ID NO: 10888 - protein, 18 aa, Artificial Sequence
  Quasi-synthetic sequence derived from human genome
CLKFFRKAKLLHYHMKYF

SEQ ID NO: 10889 - protein, 18 aa, Artificial Sequence
  Quasi-synthetic sequence derived from human genome
LRRLITSLGRSRLWLKAR

SEQ ID NO: 10890 - protein, 18 aa, Artificial Sequence
  Quasi-synthetic sequence derived from human genome
IIIVIVVVLFQHYRKKRW

SEQ ID NO: 10891 - protein, 18 aa, Artificial Sequence
  Quasi-synthetic sequence derived from human genome
MRRLTRRLVLPVFGVLWI

SEQ ID NO: 10892 - protein, 18 aa, Artificial Sequence
  Quasi-synthetic sequence derived from human genome
LLRVRKLLLVVCVPLLLL

SEQ ID NO: 10893 - protein, 18 aa, Artificial Sequence
  Quasi-synthetic sequence derived from human genome
LFKRRRVLNRERRLRHRV

SEQ ID NO: 10894 - protein, 18 aa, Artificial Sequence
  Quasi-synthetic sequence derived from human genome
LFIGLGIFFCVRCRHRRR

SEQ ID NO: 10895 - protein, 18 aa, Artificial Sequence
  Quasi-synthetic sequence derived from human genome
FYVWKRVFQRYAILKYLL

SEQ ID NO: 10896 - protein, 18 aa, Artificial Sequence
  Quasi-synthetic sequence derived from human genome
FLFHQRLFGQLLRLKMFR

SEQ ID NO: 10897 - protein, 18 aa, Artificial Sequence
  Quasi-synthetic sequence derived from human genome
LRRRRPKLKKLKKLLMEN

SEQ ID NO: 10898 - protein, 18 aa, Artificial Sequence
  Quasi-synthetic sequence derived from human genome
VIMILIMVVILQLRRRGK

SEQ ID NO: 10899 - protein, 18 aa, Artificial Sequence
  Quasi-synthetic sequence derived from human genome
RRRSRMLLCFAFLWVLGI

SEQ ID NO: 10900 - protein, 18 aa, Artificial Sequence
  Quasi-synthetic sequence derived from human genome
LGVMRMVKKRAIVKKLPI

SEQ ID NO: 10901 - protein, 18 aa, Artificial Sequence
  Quasi-synthetic sequence derived from human genome
VIILILAFWVLPKYKTRK

SEQ ID NO: 10902 - protein, 18 aa, Artificial Sequence
  Quasi-synthetic sequence derived from human genome
LNLLAKQGLRLLRGLRRR

SEQ ID NO: 10903 - protein, 18 aa, Artificial Sequence
  Quasi-synthetic sequence derived from human genome
MFIVVLVQLCRIKKKKQL

SEQ ID NO: 10904 - protein, 18 aa, Artificial Sequence
  Quasi-synthetic sequence derived from human genome
FIFRKRRKNSGLWSFYFF

SEQ ID NO: 10905 - protein, 18 aa, Artificial Sequence
  Quasi-synthetic sequence derived from human genome
VRRRALARLVLRLNAPLW

SEQ ID NO: 10906 - protein, 18 aa, Artificial Sequence
  Quasi-synthetic sequence derived from human genome
GPARLCLRLLLLLGYRRR

SEQ ID NO: 10907 - protein, 18 aa, Artificial Sequence
  Quasi-synthetic sequence derived from human genome
RSRIPLLRKRRFQLYRSM

SEQ ID NO: 10908 - protein, 18 aa, Artificial Sequence
  Quasi-synthetic sequence derived from human genome
FKAGRNMRRKLFGVLRLK

SEQ ID NO: 10909 - protein, 18 aa, Artificial Sequence
  Quasi-synthetic sequence derived from human genome
KKKGLFRRSLLSGLKLRK

SEQ ID NO: 10910 - protein, 18 aa, Artificial Sequence
  Quasi-synthetic sequence derived from human genome
LKSWWNRMSNRFRKLKLM

SEQ ID NO: 10911 - protein, 18 aa, Artificial Sequence
  Quasi-synthetic sequence derived from human genome
WRQSSILRRWKRNWFALW

SEQ ID NO: 10912 - protein, 18 aa, Artificial Sequence
  Quasi-synthetic sequence derived from human genome
WLWRQSSILRRWKRNWFA

SEQ ID NO: 10913 - protein, 18 aa, Artificial Sequence
  Quasi-synthetic sequence derived from human genome
VKRRVRQLRGLPLLVALL

SEQ ID NO: 10914 - protein, 18 aa, Artificial Sequence
  Quasi-synthetic sequence derived from human genome
PRLLRLSLLWLGLLLVRF

SEQ ID NO: 10915 - protein, 18 aa, Artificial Sequence
  Quasi-synthetic sequence derived from human genome
LRSLRFLQILRMIRMDRR

SEQ ID NO: 10916 - protein, 18 aa, Artificial Sequence
  Quasi-synthetic sequence derived from human genome
WLRVRKARPQLILSRRPR

SEQ ID NO: 10917 - protein, 18 aa, Artificial Sequence
  Quasi-synthetic sequence derived from human genome
LRRKIRELQLRYSLRILI

SEQ ID NO: 10918 - protein, 18 aa, Artificial Sequence
  Quasi-synthetic sequence derived from human genome
RRMRFYIRRMVKTQAFYW

SEQ ID NO: 10919 - protein, 18 aa, Artificial Sequence
  Quasi-synthetic sequence derived from human genome
KMLRRTKRGWMWNQFFLL

SEQ ID NO: 10920 - protein, 18 aa, Artificial Sequence
  Quasi-synthetic sequence derived from human genome
RLYQKYKISRVWWRLPVI

SEQ ID NO: 10921 - protein, 18 aa, Artificial Sequence
  Quasi-synthetic sequence derived from human genome
RLRHPRTRWKNWWVRGIL

SEQ ID NO: 10922 - protein, 18 aa, Artificial Sequence
  Quasi-synthetic sequence derived from human genome
RKKLIIIIVLVVVLLGIL

SEQ ID NO: 10923 - protein, 18 aa, Artificial Sequence
  Quasi-synthetic sequence derived from human genome
KQVYFYLFKLLRKSILQR

SEQ ID NO: 10924 - protein, 18 aa, Artificial Sequence
  Quasi-synthetic sequence derived from human genome
LVRKHHLGRVLRRARALF

SEQ ID NO: 10925 - protein, 18 aa, Artificial Sequence
  Quasi-synthetic sequence derived from human genome
RNRILKLLALKVAAHLKW

SEQ ID NO: 10926 - protein, 18 aa, Artificial Sequence
  Quasi-synthetic sequence derived from human genome
ARRRRPGLLLPGLWLLLL

SEQ ID NO: 10927 - protein, 18 aa, Artificial Sequence
  Quasi-synthetic sequence derived from human genome
LLRKRLRRCIVCIRTRPS

SEQ ID NO: 10928 - protein, 18 aa, Artificial Sequence
  Quasi-synthetic sequence derived from human genome
LKRTPRRIKAIIITVWVI

SEQ ID NO: 10929 - protein, 18 aa, Artificial Sequence
  Quasi-synthetic sequence derived from human genome
LALTALLLVAMICRRRRR

SEQ ID NO: 10930 - protein, 18 aa, Artificial Sequence
  Quasi-synthetic sequence derived from human genome
VFRLMRIFRVLKLARHST

SEQ ID NO: 10931 - protein, 18 aa, Artificial Sequence
  Quasi-synthetic sequence derived from human genome
WVRRVFLDIVPRLLLMKR

SEQ ID NO: 10932 - protein, 18 aa, Artificial Sequence
  Quasi-synthetic sequence derived from human genome
RFYFLFHRPLRLLNLLIL

SEQ ID NO: 10933 - protein, 18 aa, Artificial Sequence
  Quasi-synthetic sequence derived from human genome
RLPLLRRVLKGLQLLLSL

SEQ ID NO: 10934 - protein, 18 aa, Artificial Sequence
  Quasi-synthetic sequence derived from human genome
FLKHKLPLSLYKKVLLIV

SEQ ID NO: 10935 - protein, 18 aa, Artificial Sequence
  Quasi-synthetic sequence derived from human genome
RRLFVRRGQPFTIILYFR

SEQ ID NO: 10936 - protein, 18 aa, Artificial Sequence
  Quasi-synthetic sequence derived from human genome
FKFLYIITKVRGYKTFLR

SEQ ID NO: 10937 - protein, 18 aa, Artificial Sequence
  Quasi-synthetic sequence derived from human genome
GRWSYIRMCKFLRYFFYK

SEQ ID NO: 10938 - protein, 18 aa, Artificial Sequence
  Quasi-synthetic sequence derived from human genome
FWLKMTPFGFRRILNWLK

SEQ ID NO: 10939 - protein, 18 aa, Artificial Sequence
  Quasi-synthetic sequence derived from human genome
RHPLFIWLKMRISKLVPW

SEQ ID NO: 10940 - protein, 18 aa, Artificial Sequence
  Quasi-synthetic sequence derived from human genome
LVAFLLFCLHVLFKKRTK

SEQ ID NO: 10941 - protein, 18 aa, Artificial Sequence
  Quasi-synthetic sequence derived from human genome
HFCIFHRRKMKAIRRSLK

SEQ ID NO: 10942 - protein, 18 aa, Artificial Sequence
  Quasi-synthetic sequence derived from human genome
LRALRLVRRLRGLSQALR

SEQ ID NO: 10943 - protein, 18 aa, Artificial Sequence
  Quasi-synthetic sequence derived from human genome
IIFAVKTSKYFRPIRKRL

SEQ ID NO: 10944 - protein, 18 aa, Artificial Sequence
  Quasi-synthetic sequence derived from human genome
WKKSRKLLGQRLFNKLMK

SEQ ID NO: 10945 - protein, 18 aa, Artificial Sequence
  Quasi-synthetic sequence derived from human genome
RKFFGFKFPGLRVLTYRK

SEQ ID NO: 10946 - protein, 18 aa, Artificial Sequence
  Quasi-synthetic sequence derived from human genome
FFRRAMKRNARLRCPFRK

SEQ ID NO: 10947 - protein, 18 aa, Artificial Sequence
  Quasi-synthetic sequence derived from human genome
TLPLILMHRLRVIMTRRK

SEQ ID NO: 10948 - protein, 18 aa, Artificial Sequence
  Quasi-synthetic sequence derived from human genome
FLRLRWSRFARVLLTRSC

SEQ ID NO: 10949 - protein, 18 aa, Artificial Sequence
  Quasi-synthetic sequence derived from human genome
FLRRLRLWMGLSKVKEFR

SEQ ID NO: 10950 - protein, 18 aa, Artificial Sequence
  Quasi-synthetic sequence derived from human genome
KKKAWYLIAMLLKLAFCL

SEQ ID NO: 10951 - protein, 18 aa, Artificial Sequence
  Quasi-synthetic sequence derived from human genome
RRSKFANLGRIFKPWKWR

SEQ ID NO: 10952 - protein, 18 aa, Artificial Sequence
  Quasi-synthetic sequence derived from human genome
GWRKRCLYFFVLLLMILI

SEQ ID NO: 10953 - protein, 18 aa, Artificial Sequence
  Quasi-synthetic sequence derived from human genome
RIRKFFRGSGRVLAFIFV

SEQ ID NO: 10954 - protein, 18 aa, Artificial Sequence
  Quasi-synthetic sequence derived from human genome
IVISHLRLLLRQLCRRPR

SEQ ID NO: 10955 - protein, 18 aa, Artificial Sequence
  Quasi-synthetic sequence derived from human genome
ILLIAGIIAMICYRKKRK

SEQ ID NO: 10956 - protein, 18 aa, Artificial Sequence
  Quasi-synthetic sequence derived from human genome
RFLKLKYYSIILQSRIRM

SEQ ID NO: 10957 - protein, 18 aa, Artificial Sequence
  Quasi-synthetic sequence derived from human genome
RKNRSRIPLLRKRRFQLY

SEQ ID NO: 10958 - protein, 18 aa, Artificial Sequence
  Quasi-synthetic sequence derived from human genome
LCMKLRWLGLHTFIRHKR

SEQ ID NO: 10959 - protein, 18 aa, Artificial Sequence
  Quasi-synthetic sequence derived from human genome
KVLFKKLLNKIRSQKSLW

SEQ ID NO: 10960 - protein, 18 aa, Artificial Sequence
  Quasi-synthetic sequence derived from human genome
FLTLRHKRPKAKYIIWPR

SEQ ID NO: 10961 - protein, 18 aa, Artificial Sequence
  Quasi-synthetic sequence derived from human genome
YKIIMLNRRHLSFRVIKV

SEQ ID NO: 10962 - protein, 18 aa, Artificial Sequence
  Quasi-synthetic sequence derived from human genome
QVKGKKVWIGIKKLLMLI

SEQ ID NO: 10963 - protein, 18 aa, Artificial Sequence
  Quasi-synthetic sequence derived from human genome
LRSRLLRKQAWKQKWRKK

SEQ ID NO: 10964 - protein, 18 aa, Artificial Sequence
  Quasi-synthetic sequence derived from human genome
YRLRPMLRVFVKPLVLFC

SEQ ID NO: 10965 - protein, 18 aa, Artificial Sequence
  Quasi-synthetic sequence derived from human genome
PKLQKFLKCLYRPILIIF

SEQ ID NO: 10966 - protein, 18 aa, Artificial Sequence
  Quasi-synthetic sequence derived from human genome
MRRRLWLGLAWLLLARAP

SEQ ID NO: 10967 - protein, 18 aa, Artificial Sequence
  Quasi-synthetic sequence derived from human genome
RQIRRPKNVVLRLAVKFF

SEQ ID NO: 10968 - protein, 18 aa, Artificial Sequence
  Quasi-synthetic sequence derived from human genome
LKAKRKVVKMMIIVVMTF

SEQ ID NO: 10969 - protein, 18 aa, Artificial Sequence
  Quasi-synthetic sequence derived from human genome
LLYPKLLPRWPLAKLKLY

SEQ ID NO: 10970 - protein, 18 aa, Artificial Sequence
  Quasi-synthetic sequence derived from human genome
RILRLVRAARGIRTLLFA

SEQ ID NO: 10971 - protein, 18 aa, Artificial Sequence
  Quasi-synthetic sequence derived from human genome
FHLLRRQMVRNFRKPLIV

SEQ ID NO: 10972 - protein, 18 aa, Artificial Sequence
  Quasi-synthetic sequence derived from human genome
LREVLKHLKLKKLKCVII

SEQ ID NO: 10973 - protein, 18 aa, Artificial Sequence
  Quasi-synthetic sequence derived from human genome
LLIIFIVAVLIAYKRKSR

SEQ ID NO: 10974 - protein, 18 aa, Artificial Sequence
  Quasi-synthetic sequence derived from human genome
KLYLQVSWKYKLYLLKIL

SEQ ID NO: 10975 - protein, 18 aa, Artificial Sequence
  Quasi-synthetic sequence derived from human genome
LWRLHWRRLLSKAERRVL

SEQ ID NO: 10976 - protein, 18 aa, Artificial Sequence
  Quasi-synthetic sequence derived from human genome
LRALSWRRLYLSRAKLKA

SEQ ID NO: 10977 - protein, 18 aa, Artificial Sequence
  Quasi-synthetic sequence derived from human genome
YLNRSWLGLRFLRALRLI

SEQ ID NO: 10978 - protein, 18 aa, Artificial Sequence
  Quasi-synthetic sequence derived from human genome
LRRRTILLLYYLLRSPFY

SEQ ID NO: 10979 - protein, 18 aa, Artificial Sequence
  Quasi-synthetic sequence derived from human genome
KYRRRPALGWLARLLRSR

SEQ ID NO: 10980 - protein, 18 aa, Artificial Sequence
  Quasi-synthetic sequence derived from human genome
KDLRVKKNLKKFRYVKLI

SEQ ID NO: 10981 - protein, 18 aa, Artificial Sequence
  Quasi-synthetic sequence derived from human genome
MILVYLRIYLIAKRSNRR

SEQ ID NO: 10982 - protein, 18 aa, Artificial Sequence
  Quasi-synthetic sequence derived from human genome
FFLTSRTRALLRRFPRML

SEQ ID NO: 10983 - protein, 18 aa, Artificial Sequence
  Quasi-synthetic sequence derived from human genome
RWRLNVLRLNFRGCLLRP

SEQ ID NO: 10984 - protein, 18 aa, Artificial Sequence
  Quasi-synthetic sequence derived from human genome
RALLRILCCLLKAICRVL

SEQ ID NO: 10985 - protein, 18 aa, Artificial Sequence
  Quasi-synthetic sequence derived from human genome
LFRIVLKRRLNWIQWASL

SEQ ID NO: 10986 - protein, 18 aa, Artificial Sequence
  Quasi-synthetic sequence derived from human genome
FLGLYINFRHLYKQRRRR

SEQ ID NO: 10987 - protein, 18 aa, Artificial Sequence
  Quasi-synthetic sequence derived from human genome
VRRALQWARYLRHIHRRF

SEQ ID NO: 10988 - protein, 18 aa, Artificial Sequence
  Quasi-synthetic sequence derived from human genome
ALAIYALLSLWYLLRRRR

SEQ ID NO: 10989 - protein, 18 aa, Artificial Sequence
  Quasi-synthetic sequence derived from human genome
IKPILRKLPRIKKHLLNG

SEQ ID NO: 10990 - protein, 18 aa, Artificial Sequence
  Quasi-synthetic sequence derived from human genome
KLSRRWRRWNRFNRRRCR

SEQ ID NO: 10991 - protein, 18 aa, Artificial Sequence
  Quasi-synthetic sequence derived from human genome
RTIARLRLKKIFSGVFVK

SEQ ID NO: 10992 - protein, 18 aa, Artificial Sequence
  Quasi-synthetic sequence derived from human genome
RRNFPALLVRILHKSKLR

SEQ ID NO: 10993 - protein, 18 aa, Artificial Sequence
  Quasi-synthetic sequence derived from human genome
FRLKKVVKWYLSGFYKKP

SEQ ID NO: 10994 - protein, 18 aa, Artificial Sequence
  Quasi-synthetic sequence derived from human genome
RARRLMRPLWLLLAVGVF

SEQ ID NO: 10995 - protein, 18 aa, Artificial Sequence
  Quasi-synthetic sequence derived from human genome
LFRRCRRRLIPHPRRLSP

SEQ ID NO: 10996 - protein, 18 aa, Artificial Sequence
  Quasi-synthetic sequence derived from human genome
KKSRKKMCILVLVLSVII

SEQ ID NO: 10997 - protein, 18 aa, Artificial Sequence
  Quasi-synthetic sequence derived from human genome
MRARRKTAKMLMVVLLVF

SEQ ID NO: 10998 - protein, 18 aa, Artificial Sequence
  Quasi-synthetic sequence derived from human genome
KFRNYFLKILKDLWCVRR

SEQ ID NO: 10999 - protein, 18 aa, Artificial Sequence
  Quasi-synthetic sequence derived from human genome
VQLVKNLRLVKRLYFGLR

SEQ ID NO: 11000 - protein, 18 aa, Artificial Sequence
  Quasi-synthetic sequence derived from human genome
LYRKVKLLNQVRLLRVQL

SEQ ID NO: 11001 - protein, 19 aa, Artificial Sequence
  Quasi-synthetic sequence derived from human genome
LLFLLLVLLLLVRKKRKIK

SEQ ID NO: 11002 - protein, 19 aa, Artificial Sequence
  Quasi-synthetic sequence derived from human genome
LLLRKILLRKFCQMRKRRL

SEQ ID NO: 11003 - protein, 19 aa, Artificial Sequence
  Quasi-synthetic sequence derived from human genome
IRIFKRKKRIKRRALLFLS

SEQ ID NO: 11004 - protein, 19 aa, Artificial Sequence
  Quasi-synthetic sequence derived from human genome
ISRIWVFRLKRRKRIARRL

SEQ ID NO: 11005 - protein, 19 aa, Artificial Sequence
  Quasi-synthetic sequence derived from human genome
RLKKWKGVRWKRLRLLLTI

SEQ ID NO: 11006 - protein, 19 aa, Artificial Sequence
  Quasi-synthetic sequence derived from human genome
LILILLIKKLIIFILKKTR

SEQ ID NO: 11007 - protein, 19 aa, Artificial Sequence
  Quasi-synthetic sequence derived from human genome
RPPLLLRPVKLLRRRFRLL

SEQ ID NO: 11008 - protein, 19 aa, Artificial Sequence
  Quasi-synthetic sequence derived from human genome
FLLLFMKLRWFLKRWRQGK

SEQ ID NO: 11009 - protein, 19 aa, Artificial Sequence
  Quasi-synthetic sequence derived from human genome
RAVLRLRRRVCVLRKRRLL

SEQ ID NO: 11010 - protein, 19 aa, Artificial Sequence
  Quasi-synthetic sequence derived from human genome
FLKMLRFVKCFLRRRKPFV

SEQ ID NO: 11011 - protein, 19 aa, Artificial Sequence
  Quasi-synthetic sequence derived from human genome
IIRIMRVLRIARVLKLLKM

SEQ ID NO: 11012 - protein, 19 aa, Artificial Sequence
  Quasi-synthetic sequence derived from human genome
RALSRRYLRRLLLLLLLLL

SEQ ID NO: 11013 - protein, 19 aa, Artificial Sequence
  Quasi-synthetic sequence derived from human genome
WRFRLLCLLRRWLPRPRAW

SEQ ID NO: 11014 - protein, 19 aa, Artificial Sequence
  Quasi-synthetic sequence derived from human genome
KKLRLFAWRKRWFILRRGQ

SEQ ID NO: 11015 - protein, 19 aa, Artificial Sequence
  Quasi-synthetic sequence derived from human genome
KRKKKKKFCYLCILLLIVL

SEQ ID NO: 11016 - protein, 19 aa, Artificial Sequence
  Quasi-synthetic sequence derived from human genome
AILRIIRLVRVFRIFKLSR

SEQ ID NO: 11017 - protein, 19 aa, Artificial Sequence
  Quasi-synthetic sequence derived from human genome
RLPVKKIRKQMKLLLLLLL

SEQ ID NO: 11018 - protein, 19 aa, Artificial Sequence
  Quasi-synthetic sequence derived from human genome
RFLLLFTFLKKNRKKKLMV

SEQ ID NO: 11019 - protein, 19 aa, Artificial Sequence
  Quasi-synthetic sequence derived from human genome
LRGFFIKRRFRSLRHKIIL

SEQ ID NO: 11020 - protein, 19 aa, Artificial Sequence
  Quasi-synthetic sequence derived from human genome
VKYFYFFKILLRLRLAILK

SEQ ID NO: 11021 - protein, 19 aa, Artificial Sequence
  Quasi-synthetic sequence derived from human genome
LVKRLHKVLRPFLLRRVKV

SEQ ID NO: 11022 - protein, 19 aa, Artificial Sequence
  Quasi-synthetic sequence derived from human genome
LVALLLVVLWIRWKCRRLR

SEQ ID NO: 11023 - protein, 19 aa, Artificial Sequence
  Quasi-synthetic sequence derived from human genome
RWRCRRLRAIYTIMRWFRR

SEQ ID NO: 11024 - protein, 19 aa, Artificial Sequence
  Quasi-synthetic sequence derived from human genome
KVLNINLKRKFIKKRIIII

SEQ ID NO: 11025 - protein, 19 aa, Artificial Sequence
  Quasi-synthetic sequence derived from human genome
LLVLLLCRLRRLRARARAR

SEQ ID NO: 11026 - protein, 19 aa, Artificial Sequence
  Quasi-synthetic sequence derived from human genome
FLRLLRCQCRRRRRRRPLW

SEQ ID NO: 11027 - protein, 19 aa, Artificial Sequence
  Quasi-synthetic sequence derived from human genome
IFKSILFLPCLRKKILKIR

SEQ ID NO: 11028 - protein, 19 aa, Artificial Sequence
  Quasi-synthetic sequence derived from human genome
AILRVIRLVRVFRIFKLSR

SEQ ID NO: 11029 - protein, 19 aa, Artificial Sequence
  Quasi-synthetic sequence derived from human genome
LFRVIRLARIGRILRLIRA

SEQ ID NO: 11030 - protein, 19 aa, Artificial Sequence
  Quasi-synthetic sequence derived from human genome
MIRKFRRSLLQLLCLRLLR

SEQ ID NO: 11031 - protein, 19 aa, Artificial Sequence
  Quasi-synthetic sequence derived from human genome
RFTKILSLLRLLRLSRLIR

SEQ ID NO: 11032 - protein, 19 aa, Artificial Sequence
  Quasi-synthetic sequence derived from human genome
FLLKKRKWPLKGWHKRFFY

SEQ ID NO: 11033 - protein, 19 aa, Artificial Sequence
  Quasi-synthetic sequence derived from human genome
RRLRLQQLRRLRGLLRVLR

SEQ ID NO: 11034 - protein, 19 aa, Artificial Sequence
  Quasi-synthetic sequence derived from human genome
LLILILLLLLFLRRRAVVK

SEQ ID NO: 11035 - protein, 19 aa, Artificial Sequence
  Quasi-synthetic sequence derived from human genome
RRRGFGLFFFLRLHRLLLL

SEQ ID NO: 11036 - protein, 19 aa, Artificial Sequence
  Quasi-synthetic sequence derived from human genome
RLTWKLLLLRRPLYRNLLR

SEQ ID NO: 11037 - protein, 19 aa, Artificial Sequence
  Quasi-synthetic sequence derived from human genome
KVVQILRLMRIFRILKLAR

SEQ ID NO: 11038 - protein, 19 aa, Artificial Sequence
  Quasi-synthetic sequence derived from human genome
LLRRLPKLRKRMRKMCLTF

SEQ ID NO: 11039 - protein, 19 aa, Artificial Sequence
  Quasi-synthetic sequence derived from human genome
IFLLIIIFLTVLLLKLRKR

SEQ ID NO: 11040 - protein, 19 aa, Artificial Sequence
  Quasi-synthetic sequence derived from human genome
RTFRLLRVLKLVRFLPALR

SEQ ID NO: 11041 - protein, 19 aa, Artificial Sequence
  Quasi-synthetic sequence derived from human genome
LVGVLLLFVLLLVVRRRRR

SEQ ID NO: 11042 - protein, 19 aa, Artificial Sequence
  Quasi-synthetic sequence derived from human genome
RLLRLIILLRIFHLFHQKR

SEQ ID NO: 11043 - protein, 19 aa, Artificial Sequence
  Quasi-synthetic sequence derived from human genome
KRALGRRKGVWLRLRKILF

SEQ ID NO: 11044 - protein, 19 aa, Artificial Sequence
  Quasi-synthetic sequence derived from human genome
RALRIVRFTKILSLLRLLR

SEQ ID NO: 11045 - protein, 19 aa, Artificial Sequence
  Quasi-synthetic sequence derived from human genome
FTRRKYLLKALFKALKRLK

SEQ ID NO: 11046 - protein, 19 aa, Artificial Sequence
  Quasi-synthetic sequence derived from human genome
LKVFKSLRALRAIRVLRRL

SEQ ID NO: 11047 - protein, 19 aa, Artificial Sequence
  Quasi-synthetic sequence derived from human genome
ILLIFFFIALVFFLYRRRK

SEQ ID NO: 11048 - protein, 19 aa, Artificial Sequence
  Quasi-synthetic sequence derived from human genome
LVLILKTIRRRLPFSKWRL

SEQ ID NO: 11049 - protein, 19 aa, Artificial Sequence
  Quasi-synthetic sequence derived from human genome
ILLKKYLMKRRWKKNFIAV

SEQ ID NO: 11050 - protein, 19 aa, Artificial Sequence
  Quasi-synthetic sequence derived from human genome
RLLRLIILIRIFHLLHQKR

SEQ ID NO: 11051 - protein, 19 aa, Artificial Sequence
  Quasi-synthetic sequence derived from human genome
FLMVMYFFFRVRSRRWKVK

SEQ ID NO: 11052 - protein, 19 aa, Artificial Sequence
  Quasi-synthetic sequence derived from human genome
RFLKIIRPLRNIFLKKPVF

SEQ ID NO: 11053 - protein, 19 aa, Artificial Sequence
  Quasi-synthetic sequence derived from human genome
LFRVIRLARIGRILRLIRG

SEQ ID NO: 11054 - protein, 19 aa, Artificial Sequence
  Quasi-synthetic sequence derived from human genome
LRVLRVLRPLKTIKRLPKL

SEQ ID NO: 11055 - protein, 19 aa, Artificial Sequence
  Quasi-synthetic sequence derived from human genome
FVIVLLVLRLRRWHKSRLL

SEQ ID NO: 11056 - protein, 19 aa, Artificial Sequence
  Quasi-synthetic sequence derived from human genome
FMLKKRKWPLKGWHKRFFV

SEQ ID NO: 11057 - protein, 19 aa, Artificial Sequence
  Quasi-synthetic sequence derived from human genome
AKLWFKFQRYFRRKPVRFF

SEQ ID NO: 11058 - protein, 19 aa, Artificial Sequence
  Quasi-synthetic sequence derived from human genome
FVILLLALRLRRWHKSRLL

SEQ ID NO: 11059 - protein, 19 aa, Artificial Sequence
  Quasi-synthetic sequence derived from human genome
LLLVVILIVKKSKLAKKRK

SEQ ID NO: 11060 - protein, 19 aa, Artificial Sequence
  Quasi-synthetic sequence derived from human genome
KFIVWRRFKWVIIGLLFLL

SEQ ID NO: 11061 - protein, 19 aa, Artificial Sequence
  Quasi-synthetic sequence derived from human genome
RWFLSPRWILQFRRWARKW

SEQ ID NO: 11062 - protein, 19 aa, Artificial Sequence
  Quasi-synthetic sequence derived from human genome
FKLLILLIGTWALFFRKRR

SEQ ID NO: 11063 - protein, 19 aa, Artificial Sequence
  Quasi-synthetic sequence derived from human genome
WVILMGFSIWLYWRRKKRK

SEQ ID NO: 11064 - protein, 19 aa, Artificial Sequence
  Quasi-synthetic sequence derived from human genome
FRLLLLCRWDKRRWRKIPK

SEQ ID NO: 11065 - protein, 19 aa, Artificial Sequence
  Quasi-synthetic sequence derived from human genome
RRLGSLRWCGRRRLRWRLL

SEQ ID NO: 11066 - protein, 19 aa, Artificial Sequence
  Quasi-synthetic sequence derived from human genome
LKYLLLGRWRKKHLTFRIL

SEQ ID NO: 11067 - protein, 19 aa, Artificial Sequence
  Quasi-synthetic sequence derived from human genome
IRYSLQKLRLVRWLLKKVF

SEQ ID NO: 11068 - protein, 19 aa, Artificial Sequence
  Quasi-synthetic sequence derived from human genome
RRRQRGRLMRRLVRRLRRW

SEQ ID NO: 11069 - protein, 19 aa, Artificial Sequence
  Quasi-synthetic sequence derived from human genome
LMRKDKKKLRRLLKYMFIR

SEQ ID NO: 11070 - protein, 19 aa, Artificial Sequence
  Quasi-synthetic sequence derived from human genome
PRMVILRLLRYIVRLVWRM

SEQ ID NO: 11071 - protein, 19 aa, Artificial Sequence
  Quasi-synthetic sequence derived from human genome
KFMVLLWKNFILKRRRCIA

SEQ ID NO: 11072 - protein, 19 aa, Artificial Sequence
  Quasi-synthetic sequence derived from human genome
MALLRLFRMLRIFKLGKYW

SEQ ID NO: 11073 - protein, 19 aa, Artificial Sequence
  Quasi-synthetic sequence derived from human genome
CVMVFCLILWKWKKKKRPR

SEQ ID NO: 11074 - protein, 19 aa, Artificial Sequence
  Quasi-synthetic sequence derived from human genome
RLRFLKLKRQTKVLLTLLL

SEQ ID NO: 11075 - protein, 19 aa, Artificial Sequence
  Quasi-synthetic sequence derived from human genome
WLLREQKRKKKLRKLLKRL

SEQ ID NO: 11076 - protein, 19 aa, Artificial Sequence
  Quasi-synthetic sequence derived from human genome
WYLIKWIWTHLCKKKMRRK

SEQ ID NO: 11077 - protein, 19 aa, Artificial Sequence
  Quasi-synthetic sequence derived from human genome
MVWRRLLRKRWVLALVFGL

SEQ ID NO: 11078 - protein, 19 aa, Artificial Sequence
  Quasi-synthetic sequence derived from human genome
LLKKRKWPLKGWHKRYFVL

SEQ ID NO: 11079 - protein, 19 aa, Artificial Sequence
  Quasi-synthetic sequence derived from human genome
RRKWAVRIIRKFIKGFISR

SEQ ID NO: 11080 - protein, 19 aa, Artificial Sequence
  Quasi-synthetic sequence derived from human genome
KILGVLRVLRLLRTLRPLR

SEQ ID NO: 11081 - protein, 19 aa, Artificial Sequence
  Quasi-synthetic sequence derived from human genome
LNFPRSPRIRKRFLLRRIL

SEQ ID NO: 11082 - protein, 19 aa, Artificial Sequence
  Quasi-synthetic sequence derived from human genome
ALILIKGSFRILKLIVRRR

SEQ ID NO: 11083 - protein, 19 aa, Artificial Sequence
  Quasi-synthetic sequence derived from human genome
RRKSWRLEFLFLRRRCFLL

SEQ ID NO: 11084 - protein, 19 aa, Artificial Sequence
  Quasi-synthetic sequence derived from human genome
TFRLLRVLKLVRFMPALRR

SEQ ID NO: 11085 - protein, 19 aa, Artificial Sequence
  Quasi-synthetic sequence derived from human genome
RLLLKFIKIMKHLRKLNNF

SEQ ID NO: 11086 - protein, 19 aa, Artificial Sequence
  Quasi-synthetic sequence derived from human genome
KTVILGLLCLLLLWWRRRK

SEQ ID NO: 11087 - protein, 19 aa, Artificial Sequence
  Quasi-synthetic sequence derived from human genome
ILCLVMILYTRRRWCKRRR

SEQ ID NO: 11088 - protein, 19 aa, Artificial Sequence
  Quasi-synthetic sequence derived from human genome
KRMRVKKLPMILALHLKRF

SEQ ID NO: 11089 - protein, 19 aa, Artificial Sequence
  Quasi-synthetic sequence derived from human genome
LGRRKGVWLRLRKILFCVL

SEQ ID NO: 11090 - protein, 19 aa, Artificial Sequence
  Quasi-synthetic sequence derived from human genome
LIVLLCCFCSFLRRRLKRR

SEQ ID NO: 11091 - protein, 19 aa, Artificial Sequence
  Quasi-synthetic sequence derived from human genome
RAFLLRRRFLHLKKAAIVF

SEQ ID NO: 11092 - protein, 19 aa, Artificial Sequence
  Quasi-synthetic sequence derived from human genome
LIQRRFRTLMMRRRFLSLK

SEQ ID NO: 11093 - protein, 19 aa, Artificial Sequence
  Quasi-synthetic sequence derived from human genome
KRSALCIFKIARKLLFLFR

SEQ ID NO: 11094 - protein, 19 aa, Artificial Sequence
  Quasi-synthetic sequence derived from human genome
AVRWLRWKASLIKLRALRR

SEQ ID NO: 11095 - protein, 19 aa, Artificial Sequence
  Quasi-synthetic sequence derived from human genome
LGHRLLKRLLGPKLRRFLK

SEQ ID NO: 11096 - protein, 19 aa, Artificial Sequence
  Quasi-synthetic sequence derived from human genome
LLLIAFIFLIIKSYRKYRR

SEQ ID NO: 11097 - protein, 19 aa, Artificial Sequence
  Quasi-synthetic sequence derived from human genome
IRKRLRCRRKTVLVLMCIL

SEQ ID NO: 11098 - protein, 19 aa, Artificial Sequence
  Quasi-synthetic sequence derived from human genome
WLRRKLRGKRRPVIAFCLL

SEQ ID NO: 11099 - protein, 19 aa, Artificial Sequence
  Quasi-synthetic sequence derived from human genome
KTWIFWKTWIFWKTWIFRK

SEQ ID NO: 11100 - protein, 19 aa, Artificial Sequence
  Quasi-synthetic sequence derived from human genome
LAPFLLWLRKCLRKAKKFV

SEQ ID NO: 11101 - protein, 19 aa, Artificial Sequence
  Quasi-synthetic sequence derived from human genome
RFVRILRIFKLTRHFVGLR

SEQ ID NO: 11102 - protein, 19 aa, Artificial Sequence
  Quasi-synthetic sequence derived from human genome
RTFRKTFKMLLLCRWKKKK

SEQ ID NO: 11103 - protein, 19 aa, Artificial Sequence
  Quasi-synthetic sequence derived from human genome
RISITFFRLFRVMRLVKLL

SEQ ID NO: 11104 - protein, 19 aa, Artificial Sequence
  Quasi-synthetic sequence derived from human genome
LKRLVKLHIKRHYHKKFWK

SEQ ID NO: 11105 - protein, 19 aa, Artificial Sequence
  Quasi-synthetic sequence derived from human genome
FVLVLLALRLRRWHKSRLL

SEQ ID NO: 11106 - protein, 19 aa, Artificial Sequence
  Quasi-synthetic sequence derived from human genome
SLVLRRKALAPRLLLRLLR

SEQ ID NO: 11107 - protein, 19 aa, Artificial Sequence
  Quasi-synthetic sequence derived from human genome
KLLAKKRVVRMLLVIVVLF

SEQ ID NO: 11108 - protein, 19 aa, Artificial Sequence
  Quasi-synthetic sequence derived from human genome
RVLSRISKFRRLRQLLRRR

SEQ ID NO: 11109 - protein, 19 aa, Artificial Sequence
  Quasi-synthetic sequence derived from human genome
ILLVIFLIWRCFLRNKTRR

SEQ ID NO: 11110 - protein, 19 aa, Artificial Sequence
  Quasi-synthetic sequence derived from human genome
VIIITLVVLLLKYRRRHRK

SEQ ID NO: 11111 - protein, 19 aa, Artificial Sequence
  Quasi-synthetic sequence derived from human genome
RVFLQRLLWLLRLLFPRVL

SEQ ID NO: 11112 - protein, 19 aa, Artificial Sequence
  Quasi-synthetic sequence derived from human genome
KRMKVKKLPMILALHLKRF

SEQ ID NO: 11113 - protein, 19 aa, Artificial Sequence
  Quasi-synthetic sequence derived from human genome
MLLILALWKIGFFKRPLKK

SEQ ID NO: 11114 - protein, 19 aa, Artificial Sequence
  Quasi-synthetic sequence derived from human genome
KLKRYAWKRRWFVLRSGRL

SEQ ID NO: 11115 - protein, 19 aa, Artificial Sequence
  Quasi-synthetic sequence derived from human genome
IVLAKKMLRKALKLLNRIF

SEQ ID NO: 11116 - protein, 19 aa, Artificial Sequence
  Quasi-synthetic sequence derived from human genome
WVYLLLRKILLRKFCQIRY

SEQ ID NO: 11117 - protein, 19 aa, Artificial Sequence
  Quasi-synthetic sequence derived from human genome
FVIVLLALRLRRWHKSRLL

SEQ ID NO: 11118 - protein, 19 aa, Artificial Sequence
  Quasi-synthetic sequence derived from human genome
RNIGIWFFWIRLYKIRRGR

SEQ ID NO: 11119 - protein, 19 aa, Artificial Sequence
  Quasi-synthetic sequence derived from human genome
LLRKRYRHRPCRLQFLLLL

SEQ ID NO: 11120 - protein, 19 aa, Artificial Sequence
  Quasi-synthetic sequence derived from human genome
IPLPRFKLKCIFCKKRRKR

SEQ ID NO: 11121 - protein, 19 aa, Artificial Sequence
  Quasi-synthetic sequence derived from human genome
LIRKKFRMMKIPKPILFGL

SEQ ID NO: 11122 - protein, 19 aa, Artificial Sequence
  Quasi-synthetic sequence derived from human genome
ALLFIVRKKRKEKRLKRLR

SEQ ID NO: 11123 - protein, 19 aa, Artificial Sequence
  Quasi-synthetic sequence derived from human genome
KLRRYAWKKRWFILRSGRM

SEQ ID NO: 11124 - protein, 19 aa, Artificial Sequence
  Quasi-synthetic sequence derived from human genome
FRWVRRAWQRIISWVFFWR

SEQ ID NO: 11125 - protein, 19 aa, Artificial Sequence
  Quasi-synthetic sequence derived from human genome
ISKRWTHLVRLLRLIILIR

SEQ ID NO: 11126 - protein, 19 aa, Artificial Sequence
  Quasi-synthetic sequence derived from human genome
RRWRHALHRRLLNRRLLLA

SEQ ID NO: 11127 - protein, 19 aa, Artificial Sequence
  Quasi-synthetic sequence derived from human genome
WWWARAARLARLRFRRSLL

SEQ ID NO: 11128 - protein, 19 aa, Artificial Sequence
  Quasi-synthetic sequence derived from human genome
LKLICFLIPFLLSLKKKMK

SEQ ID NO: 11129 - protein, 19 aa, Artificial Sequence
  Quasi-synthetic sequence derived from human genome
LAILLYLLRLRRIHRRTPR

SEQ ID NO: 11130 - protein, 19 aa, Artificial Sequence
  Quasi-synthetic sequence derived from human genome
LLPPKRRLLPRVRLLPLLL

SEQ ID NO: 11131 - protein, 19 aa, Artificial Sequence
  Quasi-synthetic sequence derived from human genome
RLLWRRLKPLILGKLLFAP

SEQ ID NO: 11132 - protein, 19 aa, Artificial Sequence
  Quasi-synthetic sequence derived from human genome
LSVLRTFRLMRVLKLVRFL

SEQ ID NO: 11133 - protein, 19 aa, Artificial Sequence
  Quasi-synthetic sequence derived from human genome
LVIVLWGIRLLLQRKKKLV

SEQ ID NO: 11134 - protein, 19 aa, Artificial Sequence
  Quasi-synthetic sequence derived from human genome
MLLLWTFLLQRRFVKKRGK

SEQ ID NO: 11135 - protein, 19 aa, Artificial Sequence
  Quasi-synthetic sequence derived from human genome
LFRKGIMKIMVYKIFRILV

SEQ ID NO: 11136 - protein, 19 aa, Artificial Sequence
  Quasi-synthetic sequence derived from human genome
IIQKYWRMYVVRRRYKIRR

SEQ ID NO: 11137 - protein, 19 aa, Artificial Sequence
  Quasi-synthetic sequence derived from human genome
LVLRVLRALRILYVMRLAR

SEQ ID NO: 11138 - protein, 19 aa, Artificial Sequence
  Quasi-synthetic sequence derived from human genome
LLVLALWKLGFFRSARRRR

SEQ ID NO: 11139 - protein, 19 aa, Artificial Sequence
  Quasi-synthetic sequence derived from human genome
VIILFIILLGVIMAKRKRK

SEQ ID NO: 11140 - protein, 19 aa, Artificial Sequence
  Quasi-synthetic sequence derived from human genome
PRWTHLLRLLRLIILLRIF

SEQ ID NO: 11141 - protein, 19 aa, Artificial Sequence
  Quasi-synthetic sequence derived from human genome
CIIQCWWRLILSKILKKRR

SEQ ID NO: 11142 - protein, 19 aa, Artificial Sequence
  Quasi-synthetic sequence derived from human genome
KRIRVLVIRKLVRSVGRLK

SEQ ID NO: 11143 - protein, 19 aa, Artificial Sequence
  Quasi-synthetic sequence derived from human genome
FLILSLLLFMVHRLRQRRR

SEQ ID NO: 11144 - protein, 19 aa, Artificial Sequence
  Quasi-synthetic sequence derived from human genome
YLIRIRKLTLKRQRKLVPL

SEQ ID NO: 11145 - protein, 19 aa, Artificial Sequence
  Quasi-synthetic sequence derived from human genome
LWRRFRWAIILFIILFILL

SEQ ID NO: 11146 - protein, 19 aa, Artificial Sequence
  Quasi-synthetic sequence derived from human genome
LLRFLRLCRSFYITCRRLR

SEQ ID NO: 11147 - protein, 19 aa, Artificial Sequence
  Quasi-synthetic sequence derived from human genome
RKSYPMLKLVRLKLWFPRF

SEQ ID NO: 11148 - protein, 19 aa, Artificial Sequence
  Quasi-synthetic sequence derived from human genome
LKTYLKRFKVMKIKVLRSW

SEQ ID NO: 11149 - protein, 19 aa, Artificial Sequence
  Quasi-synthetic sequence derived from human genome
KTFYYKSRFWLLKLLFRVF

SEQ ID NO: 11150 - protein, 19 aa, Artificial Sequence
  Quasi-synthetic sequence derived from human genome
FCLFIFVLIYVRVFRKSRR

SEQ ID NO: 11151 - protein, 19 aa, Artificial Sequence
  Quasi-synthetic sequence derived from human genome
IVFIKVVQFFRILRIFKLI

SEQ ID NO: 11152 - protein, 19 aa, Artificial Sequence
  Quasi-synthetic sequence derived from human genome
LLLVLLLAAYFFRFRKQRK

SEQ ID NO: 11153 - protein, 19 aa, Artificial Sequence
  Quasi-synthetic sequence derived from human genome
LLLWKNWTLRKRQKIRFVV

SEQ ID NO: 11154 - protein, 19 aa, Artificial Sequence
  Quasi-synthetic sequence derived from human genome
IWKKFLSRPALPFILRLLR

SEQ ID NO: 11155 - protein, 19 aa, Artificial Sequence
  Quasi-synthetic sequence derived from human genome
FANFLMKVLKKKIKRVKKK

SEQ ID NO: 11156 - protein, 19 aa, Artificial Sequence
  Quasi-synthetic sequence derived from human genome
KLKIITYRNLFKKVYLLLK

SEQ ID NO: 11157 - protein, 19 aa, Artificial Sequence
  Quasi-synthetic sequence derived from human genome
RFLLKRGLRNKRIGHFLFW

SEQ ID NO: 11158 - protein, 19 aa, Artificial Sequence
  Quasi-synthetic sequence derived from human genome
KLFKSLLGKKKMRILILSL

SEQ ID NO: 11159 - protein, 19 aa, Artificial Sequence
  Quasi-synthetic sequence derived from human genome
RLLRGLWQRWRRYKYRFVP

SEQ ID NO: 11160 - protein, 19 aa, Artificial Sequence
  Quasi-synthetic sequence derived from human genome
FLLFFLTLRFSVVKRGRKK

SEQ ID NO: 11161 - protein, 19 aa, Artificial Sequence
  Quasi-synthetic sequence derived from human genome
KFKFFFRRNPYFRNKLIVK

SEQ ID NO: 11162 - protein, 19 aa, Artificial Sequence
  Quasi-synthetic sequence derived from human genome
LLFLLLFLLLRRQRHSKHR

SEQ ID NO: 11163 - protein, 19 aa, Artificial Sequence
  Quasi-synthetic sequence derived from human genome
KTVIRSIRILKFLVAKRKF

SEQ ID NO: 11164 - protein, 19 aa, Artificial Sequence
  Quasi-synthetic sequence derived from human genome
LPFLLRHHKVWRKCKMRIF

SEQ ID NO: 11165 - protein, 19 aa, Artificial Sequence
  Quasi-synthetic sequence derived from human genome
FLARYRLVSNKLKKRFLRK

SEQ ID NO: 11166 - protein, 19 aa, Artificial Sequence
  Quasi-synthetic sequence derived from human genome
LVHLLKTVRLLRLLRLLQK

SEQ ID NO: 11167 - protein, 19 aa, Artificial Sequence
  Quasi-synthetic sequence derived from human genome
KYRVVLRRWKSLKLPKKRM

SEQ ID NO: 11168 - protein, 19 aa, Artificial Sequence
  Quasi-synthetic sequence derived from human genome
LINFILFINILRILMRKLR

SEQ ID NO: 11169 - protein, 19 aa, Artificial Sequence
  Quasi-synthetic sequence derived from human genome
PLCFIFICYFKIYIRLKRR

SEQ ID NO: 11170 - protein, 19 aa, Artificial Sequence
  Quasi-synthetic sequence derived from human genome
ILTITVITLLIFLRRRLRK

SEQ ID NO: 11171 - protein, 19 aa, Artificial Sequence
  Quasi-synthetic sequence derived from human genome
LRILRKRNKALRKIRKLQK

SEQ ID NO: 11172 - protein, 19 aa, Artificial Sequence
  Quasi-synthetic sequence derived from human genome
KLQRYAWRKRWFVLRRGRM

SEQ ID NO: 11173 - protein, 19 aa, Artificial Sequence
  Quasi-synthetic sequence derived from human genome
IKLLRNIPRWTHLLRLLRL

SEQ ID NO: 11174 - protein, 19 aa, Artificial Sequence
  Quasi-synthetic sequence derived from human genome
LCIAIVLRFKKTWKLRALK

SEQ ID NO: 11175 - protein, 19 aa, Artificial Sequence
  Quasi-synthetic sequence derived from human genome
LFHRLCKLLFFRIRPIFVF

SEQ ID NO: 11176 - protein, 19 aa, Artificial Sequence
  Quasi-synthetic sequence derived from human genome
IRRLHKVLRPFLLRRLKKE

SEQ ID NO: 11177 - protein, 19 aa, Artificial Sequence
  Quasi-synthetic sequence derived from human genome
KLKRKYWWKNLKMMIILGV

SEQ ID NO: 11178 - protein, 19 aa, Artificial Sequence
  Quasi-synthetic sequence derived from human genome
AHLLKTVRLLRLLRLLPRL

SEQ ID NO: 11179 - protein, 19 aa, Artificial Sequence
  Quasi-synthetic sequence derived from human genome
LILLILVVLFAALKRQRKK

SEQ ID NO: 11180 - protein, 19 aa, Artificial Sequence
  Quasi-synthetic sequence derived from human genome
VLFKKTHRILRRLFNLCKR

SEQ ID NO: 11181 - protein, 19 aa, Artificial Sequence
  Quasi-synthetic sequence derived from human genome
VILLLLLLLLLFLILRHRR

SEQ ID NO: 11182 - protein, 19 aa, Artificial Sequence
  Quasi-synthetic sequence derived from human genome
KRGKRHWKKLWFVIKGKVL

SEQ ID NO: 11183 - protein, 19 aa, Artificial Sequence
  Quasi-synthetic sequence derived from human genome
FKPWKGLKTNFRLLKRRLR

SEQ ID NO: 11184 - protein, 19 aa, Artificial Sequence
  Quasi-synthetic sequence derived from human genome
VLTLLVLILLIVTMRRRKK

SEQ ID NO: 11185 - protein, 19 aa, Artificial Sequence
  Quasi-synthetic sequence derived from human genome
KKRVIRMLIVIVVLFFLCW

SEQ ID NO: 11186 - protein, 19 aa, Artificial Sequence
  Quasi-synthetic sequence derived from human genome
LLLKKIMAILIKRFHHTRR

SEQ ID NO: 11187 - protein, 19 aa, Artificial Sequence
  Quasi-synthetic sequence derived from human genome
RRSRHRLLLLLLRYLVVAL

SEQ ID NO: 11188 - protein, 19 aa, Artificial Sequence
  Quasi-synthetic sequence derived from human genome
RRRRPLFALLLLCALLARL

SEQ ID NO: 11189 - protein, 19 aa, Artificial Sequence
  Quasi-synthetic sequence derived from human genome
LVYARIYVVLKQRRRKRIL

SEQ ID NO: 11190 - protein, 19 aa, Artificial Sequence
  Quasi-synthetic sequence derived from human genome
FLLVLILSSVFLFRLFKRR

SEQ ID NO: 11191 - protein, 19 aa, Artificial Sequence
  Quasi-synthetic sequence derived from human genome
LRVIRLVRVFRIFKLSRHS

SEQ ID NO: 11192 - protein, 19 aa, Artificial Sequence
  Quasi-synthetic sequence derived from human genome
KVGQVLRVMRLMRIFRILK

SEQ ID NO: 11193 - protein, 19 aa, Artificial Sequence
  Quasi-synthetic sequence derived from human genome
IILFLPCISRKLKRIKKGW

SEQ ID NO: 11194 - protein, 19 aa, Artificial Sequence
  Quasi-synthetic sequence derived from human genome
LLLLLLLLFLILRHRRQGK

SEQ ID NO: 11195 - protein, 19 aa, Artificial Sequence
  Quasi-synthetic sequence derived from human genome
LLFIIPKKLMIFLRTVIRL

SEQ ID NO: 11196 - protein, 19 aa, Artificial Sequence
  Quasi-synthetic sequence derived from human genome
LLFIFVKRQIMRFAMKSRR

SEQ ID NO: 11197 - protein, 19 aa, Artificial Sequence
  Quasi-synthetic sequence derived from human genome
LPFLLRQHKVWRKCRMRIF

SEQ ID NO: 11198 - protein, 19 aa, Artificial Sequence
  Quasi-synthetic sequence derived from human genome
LIVVLRIVRYRKSSKLIKK

SEQ ID NO: 11199 - protein, 19 aa, Artificial Sequence
  Quasi-synthetic sequence derived from human genome
RWRLVGLPVHLLFLRFYKR

SEQ ID NO: 11200 - protein, 19 aa, Artificial Sequence
  Quasi-synthetic sequence derived from human genome
VKKLMRKYTVLRLMIRQRL

SEQ ID NO: 11201 - protein, 19 aa, Artificial Sequence
  Quasi-synthetic sequence derived from human genome
KKKYKAIRLIFVIMAVFFI

SEQ ID NO: 11202 - protein, 19 aa, Artificial Sequence
  Quasi-synthetic sequence derived from human genome
RIVRLARIGRILRLVRAAR

SEQ ID NO: 11203 - protein, 19 aa, Artificial Sequence
  Quasi-synthetic sequence derived from human genome
VRARLLRALRLVRRLRGLS

SEQ ID NO: 11204 - protein, 19 aa, Artificial Sequence
  Quasi-synthetic sequence derived from human genome
MKMMLVRRFRVLILMVFLV

SEQ ID NO: 11205 - protein, 19 aa, Artificial Sequence
  Quasi-synthetic sequence derived from human genome
CRRRLIPHPRRLWPFVRRR

SEQ ID NO: 11206 - protein, 19 aa, Artificial Sequence
  Quasi-synthetic sequence derived from human genome
RLRLWALIPWLPRKQRPRI

SEQ ID NO: 11207 - protein, 19 aa, Artificial Sequence
  Quasi-synthetic sequence derived from human genome
LLIIALMLWRLHWRRLLSK

SEQ ID NO: 11208 - protein, 19 aa, Artificial Sequence
  Quasi-synthetic sequence derived from human genome
VSLLLLSLWKLWRVKKFLI

SEQ ID NO: 11209 - protein, 19 aa, Artificial Sequence
  Quasi-synthetic sequence derived from human genome
FLRLKRKFIQMRRPFLERR

SEQ ID NO: 11210 - protein, 19 aa, Artificial Sequence
  Quasi-synthetic sequence derived from human genome
LRIRCVARKFLYLWIRMTF

SEQ ID NO: 11211 - protein, 19 aa, Artificial Sequence
  Quasi-synthetic sequence derived from human genome
LRFLKLRRERRALLCLLLV

SEQ ID NO: 11212 - protein, 19 aa, Artificial Sequence
  Quasi-synthetic sequence derived from human genome
LMIYRLPQVLRLHLKRFRW

SEQ ID NO: 11213 - protein, 19 aa, Artificial Sequence
  Quasi-synthetic sequence derived from human genome
IRIQKTIRGWLLRKKYLRM

SEQ ID NO: 11214 - protein, 19 aa, Artificial Sequence
  Quasi-synthetic sequence derived from human genome
RHRGLLRVRLGRFISRLLL

SEQ ID NO: 11215 - protein, 19 aa, Artificial Sequence
  Quasi-synthetic sequence derived from human genome
RRLVPFLWLKWPGTRLLLR

SEQ ID NO: 11216 - protein, 19 aa, Artificial Sequence
  Quasi-synthetic sequence derived from human genome
RLRLRQRRRRLLIKKMPAA

SEQ ID NO: 11217 - protein, 19 aa, Artificial Sequence
  Quasi-synthetic sequence derived from human genome
LFRWIRKAAFSRLYQLRIR

SEQ ID NO: 11218 - protein, 19 aa, Artificial Sequence
  Quasi-synthetic sequence derived from human genome
FLIRAFRLKKPQRRRYGLL

SEQ ID NO: 11219 - protein, 19 aa, Artificial Sequence
  Quasi-synthetic sequence derived from human genome
FALLSRGRRRRMHVLRRRW

SEQ ID NO: 11220 - protein, 19 aa, Artificial Sequence
  Quasi-synthetic sequence derived from human genome
FHRIRWVFKRRLGLLGRTL

SEQ ID NO: 11221 - protein, 19 aa, Artificial Sequence
  Quasi-synthetic sequence derived from human genome
LVIVFIIIVLYMLRFKKYK

SEQ ID NO: 11222 - protein, 19 aa, Artificial Sequence
  Quasi-synthetic sequence derived from human genome
VKVILHKKRYIYRKIKGWR

SEQ ID NO: 11223 - protein, 19 aa, Artificial Sequence
  Quasi-synthetic sequence derived from human genome
RQRIIKKFQFIKSLRCFWK

SEQ ID NO: 11224 - protein, 19 aa, Artificial Sequence
  Quasi-synthetic sequence derived from human genome
KLWKVKKALKMTIFWRGLM

SEQ ID NO: 11225 - protein, 19 aa, Artificial Sequence
  Quasi-synthetic sequence derived from human genome
LRRLLRLLVLGLWLALLRS

SEQ ID NO: 11226 - protein, 19 aa, Artificial Sequence
  Quasi-synthetic sequence derived from human genome
LLIFRLIWRSVKKWQIIKG

SEQ ID NO: 11227 - protein, 19 aa, Artificial Sequence
  Quasi-synthetic sequence derived from human genome
LIFKVYMFKCVWRCYRLIK

SEQ ID NO: 11228 - protein, 19 aa, Artificial Sequence
  Quasi-synthetic sequence derived from human genome
WCLAFLWGLLILLKYRWRK

SEQ ID NO: 11229 - protein, 19 aa, Artificial Sequence
  Quasi-synthetic sequence derived from human genome
KQNIFLFYVKLRWLLKHWR

SEQ ID NO: 11230 - protein, 19 aa, Artificial Sequence
  Quasi-synthetic sequence derived from human genome
VVKILRVLRVLRPLRAINR

SEQ ID NO: 11231 - protein, 19 aa, Artificial Sequence
  Quasi-synthetic sequence derived from human genome
LLSIKKTLKSLKALLRWKL

SEQ ID NO: 11232 - protein, 19 aa, Artificial Sequence
  Quasi-synthetic sequence derived from human genome
LLKPIQRLLHYRLLLRRLC

SEQ ID NO: 11233 - protein, 19 aa, Artificial Sequence
  Quasi-synthetic sequence derived from human genome
IWLLVLLLHKHRSILLRRL

SEQ ID NO: 11234 - protein, 19 aa, Artificial Sequence
  Quasi-synthetic sequence derived from human genome
LKTKRILRRNLLALIHRMI

SEQ ID NO: 11235 - protein, 19 aa, Artificial Sequence
  Quasi-synthetic sequence derived from human genome
FFLMKRKIIVLMPWLLRLS

SEQ ID NO: 11236 - protein, 19 aa, Artificial Sequence
  Quasi-synthetic sequence derived from human genome
LRRRCFLLTFYLWFLFFSR

SEQ ID NO: 11237 - protein, 19 aa, Artificial Sequence
  Quasi-synthetic sequence derived from human genome
PRWTHLVRLLRLIILIRIF

SEQ ID NO: 11238 - protein, 19 aa, Artificial Sequence
  Quasi-synthetic sequence derived from human genome
KPFFRLQKFLRRTQFLLFF

SEQ ID NO: 11239 - protein, 19 aa, Artificial Sequence
  Quasi-synthetic sequence derived from human genome
KVKRKKNVLRLCCKKLKIF

SEQ ID NO: 11240 - protein, 19 aa, Artificial Sequence
  Quasi-synthetic sequence derived from human genome
FVYFIMRIVNFPKCRRRRL

SEQ ID NO: 11241 - protein, 19 aa, Artificial Sequence
  Quasi-synthetic sequence derived from human genome
RRIILLQRWFRVLLCRQHF

SEQ ID NO: 11242 - protein, 19 aa, Artificial Sequence
  Quasi-synthetic sequence derived from human genome
KKNRKMLVILILFVIIIVL

SEQ ID NO: 11243 - protein, 19 aa, Artificial Sequence
  Quasi-synthetic sequence derived from human genome
VILIILIVIAILLFKRKRT

SEQ ID NO: 11244 - protein, 19 aa, Artificial Sequence
  Quasi-synthetic sequence derived from human genome
FRPKKLLPKAFKQYWFIFK

SEQ ID NO: 11245 - protein, 19 aa, Artificial Sequence
  Quasi-synthetic sequence derived from human genome
LLKYVGHIFRKVKRRSLRL

SEQ ID NO: 11246 - protein, 19 aa, Artificial Sequence
  Quasi-synthetic sequence derived from human genome
LIPKLKGWWQKFRLRSKKR

SEQ ID NO: 11247 - protein, 19 aa, Artificial Sequence
  Quasi-synthetic sequence derived from human genome
FRVIRLARIGRILRLIKGA

SEQ ID NO: 11248 - protein, 19 aa, Artificial Sequence
  Quasi-synthetic sequence derived from human genome
IQKYWRRVLAQRKLLMLKK

SEQ ID NO: 11249 - protein, 19 aa, Artificial Sequence
  Quasi-synthetic sequence derived from human genome
LQLYVRRRKKLPSVLLFKK

SEQ ID NO: 11250 - protein, 19 aa, Artificial Sequence
  Quasi-synthetic sequence derived from human genome
FRSPVFRIFFHKIFIRPLR

SEQ ID NO: 11251 - protein, 19 aa, Artificial Sequence
  Quasi-synthetic sequence derived from human genome
MKLLKLRRNIVKLSLYRHF

SEQ ID NO: 11252 - protein, 19 aa, Artificial Sequence
  Quasi-synthetic sequence derived from human genome
LLLALALGLLVYRKRRAKR

SEQ ID NO: 11253 - protein, 19 aa, Artificial Sequence
  Quasi-synthetic sequence derived from human genome
LRPLVKPKIVKKRTKKFIR

SEQ ID NO: 11254 - protein, 19 aa, Artificial Sequence
  Quasi-synthetic sequence derived from human genome
KIPIFSLFRKWKAFSVWRK

SEQ ID NO: 11255 - protein, 19 aa, Artificial Sequence
  Quasi-synthetic sequence derived from human genome
CWIILMVFSIWLYRHRKKR

SEQ ID NO: 11256 - protein, 19 aa, Artificial Sequence
  Quasi-synthetic sequence derived from human genome
RRISLRKKLKLPIGKRNWL

SEQ ID NO: 11257 - protein, 19 aa, Artificial Sequence
  Quasi-synthetic sequence derived from human genome
RHLRLIHPTKLYKLMLRRF

SEQ ID NO: 11258 - protein, 19 aa, Artificial Sequence
  Quasi-synthetic sequence derived from human genome
FFLRKFKNSRFFPGRIRRV

SEQ ID NO: 11259 - protein, 19 aa, Artificial Sequence
  Quasi-synthetic sequence derived from human genome
LLLLALVAILWKLGFFKRK

SEQ ID NO: 11260 - protein, 19 aa, Artificial Sequence
  Quasi-synthetic sequence derived from human genome
CRFFHFRRLIFTRKGVLRV

SEQ ID NO: 11261 - protein, 19 aa, Artificial Sequence
  Quasi-synthetic sequence derived from human genome
VVQIFRIMRILRILKLARH

SEQ ID NO: 11262 - protein, 19 aa, Artificial Sequence
  Quasi-synthetic sequence derived from human genome
RLKLFFIKNQRSSLRIRLF

SEQ ID NO: 11263 - protein, 19 aa, Artificial Sequence
  Quasi-synthetic sequence derived from human genome
RFYLSFRKLMRWILILVIA

SEQ ID NO: 11264 - protein, 19 aa, Artificial Sequence
  Quasi-synthetic sequence derived from human genome
LLLWPTRLRRSFLAWRRGR

SEQ ID NO: 11265 - protein, 19 aa, Artificial Sequence
  Quasi-synthetic sequence derived from human genome
KLKQFTKILRRKRLLPKRC

SEQ ID NO: 11266 - protein, 19 aa, Artificial Sequence
  Quasi-synthetic sequence derived from human genome
ILLALGALLVLQLIRRRRR

SEQ ID NO: 11267 - protein, 19 aa, Artificial Sequence
  Quasi-synthetic sequence derived from human genome
IKRLARISLVKKLMKKWSV

SEQ ID NO: 11268 - protein, 19 aa, Artificial Sequence
  Quasi-synthetic sequence derived from human genome
LLFVIIFLGVVLVMKKRKL

SEQ ID NO: 11269 - protein, 19 aa, Artificial Sequence
  Quasi-synthetic sequence derived from human genome
LLFQVIRLYQRRRWMIRAL

SEQ ID NO: 11270 - protein, 19 aa, Artificial Sequence
  Quasi-synthetic sequence derived from human genome
KIMVRRCLVTLRPFRLFVL

SEQ ID NO: 11271 - protein, 19 aa, Artificial Sequence
  Quasi-synthetic sequence derived from human genome
RVFFWWLNPLFKIGHKRRL

SEQ ID NO: 11272 - protein, 19 aa, Artificial Sequence
  Quasi-synthetic sequence derived from human genome
KWVPALLLRRVPLFSLRFR

SEQ ID NO: 11273 - protein, 19 aa, Artificial Sequence
  Quasi-synthetic sequence derived from human genome
KRSWPFLRSFRVLRVFKLA

SEQ ID NO: 11274 - protein, 19 aa, Artificial Sequence
  Quasi-synthetic sequence derived from human genome
LILCTRSIVLALRLRKRFL

SEQ ID NO: 11275 - protein, 19 aa, Artificial Sequence
  Quasi-synthetic sequence derived from human genome
RLLGLRRGLRRLRRLWAGP

SEQ ID NO: 11276 - protein, 19 aa, Artificial Sequence
  Quasi-synthetic sequence derived from human genome
VLRVLRPLKTIKRLPKLKA

SEQ ID NO: 11277 - protein, 19 aa, Artificial Sequence
  Quasi-synthetic sequence derived from human genome
KKHVLHLWPKRLLLPRHLR

SEQ ID NO: 11278 - protein, 19 aa, Artificial Sequence
  Quasi-synthetic sequence derived from human genome
KLLAKIAKLQRRIKTVLLF

SEQ ID NO: 11279 - protein, 19 aa, Artificial Sequence
  Quasi-synthetic sequence derived from human genome
RRHYSVKKKLKLIRVLGLF

SEQ ID NO: 11280 - protein, 19 aa, Artificial Sequence
  Quasi-synthetic sequence derived from human genome
LRRFLKPQGHPRLLLWFKR

SEQ ID NO: 11281 - protein, 19 aa, Artificial Sequence
  Quasi-synthetic sequence derived from human genome
SANFLKKVRRLIMKRIVKI

SEQ ID NO: 11282 - protein, 19 aa, Artificial Sequence
  Quasi-synthetic sequence derived from human genome
LYRKNRSRIPLLRKRWFQL

SEQ ID NO: 11283 - protein, 19 aa, Artificial Sequence
  Quasi-synthetic sequence derived from human genome
ILIKRRQQKIRKYTMRRLL

SEQ ID NO: 11284 - protein, 19 aa, Artificial Sequence
  Quasi-synthetic sequence derived from human genome
RLLRLSLLWLGLLLVRFSR

SEQ ID NO: 11285 - protein, 19 aa, Artificial Sequence
  Quasi-synthetic sequence derived from human genome
WLMRRRRRKQRKKKAWIYC

SEQ ID NO: 11286 - protein, 19 aa, Artificial Sequence
  Quasi-synthetic sequence derived from human genome
RKRCIKKFSIQRFPKILVL

SEQ ID NO: 11287 - protein, 19 aa, Artificial Sequence
  Quasi-synthetic sequence derived from human genome
SLFILKLGRRSRLKRAVWI

SEQ ID NO: 11288 - protein, 19 aa, Artificial Sequence
  Quasi-synthetic sequence derived from human genome
FVIVLLALRLWRWHKSRLL

SEQ ID NO: 11289 - protein, 19 aa, Artificial Sequence
  Quasi-synthetic sequence derived from human genome
RTSKFRRLRQLLRRRKKRW

SEQ ID NO: 11290 - protein, 19 aa, Artificial Sequence
  Quasi-synthetic sequence derived from human genome
RYRHYFRLLVRTVLLRSLR

SEQ ID NO: 11291 - protein, 19 aa, Artificial Sequence
  Quasi-synthetic sequence derived from human genome
KRIHLLTRRNFLLGKWIIF

SEQ ID NO: 11292 - protein, 19 aa, Artificial Sequence
  Quasi-synthetic sequence derived from human genome
RLRINRFAWPKILKISYKR

SEQ ID NO: 11293 - protein, 19 aa, Artificial Sequence
  Quasi-synthetic sequence derived from human genome
LINLMKYLQKWKRYRPLWK

SEQ ID NO: 11294 - protein, 19 aa, Artificial Sequence
  Quasi-synthetic sequence derived from human genome
RRLRRLAHLVLFCPFSKRL

SEQ ID NO: 11295 - protein, 19 aa, Artificial Sequence
  Quasi-synthetic sequence derived from human genome
IRVYNKRLKALRKIQKLIK

SEQ ID NO: 11296 - protein, 19 aa, Artificial Sequence
  Quasi-synthetic sequence derived from human genome
LVLIVILVILFKCGFFKRK

SEQ ID NO: 11297 - protein, 19 aa, Artificial Sequence
  Quasi-synthetic sequence derived from human genome
LILLCLLIYYCRRRCLKPR

SEQ ID NO: 11298 - protein, 19 aa, Artificial Sequence
  Quasi-synthetic sequence derived from human genome
LIIGLRKTFWFFFQRHKLK

SEQ ID NO: 11299 - protein, 19 aa, Artificial Sequence
  Quasi-synthetic sequence derived from human genome
LWRRQIYAVATLRFLKLRR

SEQ ID NO: 11300 - protein, 19 aa, Artificial Sequence
  Quasi-synthetic sequence derived from human genome
FVIVLLAHRLRRWHKSRLL

SEQ ID NO: 11301 - protein, 19 aa, Artificial Sequence
  Quasi-synthetic sequence derived from human genome
FLPSRGILKYLKFHLKRIR

SEQ ID NO: 11302 - protein, 19 aa, Artificial Sequence
  Quasi-synthetic sequence derived from human genome
LLKLYMWKMTRFCISRRLI

SEQ ID NO: 11303 - protein, 19 aa, Artificial Sequence
  Quasi-synthetic sequence derived from human genome
WLRALGPWLRVRRGLLVLR

SEQ ID NO: 11304 - protein, 19 aa, Artificial Sequence
  Quasi-synthetic sequence derived from human genome
HLCCRRRRARLRFMKQLRL

SEQ ID NO: 11305 - protein, 19 aa, Artificial Sequence
  Quasi-synthetic sequence derived from human genome
FLLRKKRFGQWTKLLCVIK

SEQ ID NO: 11306 - protein, 19 aa, Artificial Sequence
  Quasi-synthetic sequence derived from human genome
KRLVLRTKLHKLIDFLLRK

SEQ ID NO: 11307 - protein, 19 aa, Artificial Sequence
  Quasi-synthetic sequence derived from human genome
KLSRHLMKVKLKKYTKFLF

SEQ ID NO: 11308 - protein, 19 aa, Artificial Sequence
  Quasi-synthetic sequence derived from human genome
KLFLKKKVVVKICKRKYRG

SEQ ID NO: 11309 - protein, 19 aa, Artificial Sequence
  Quasi-synthetic sequence derived from human genome
RRKALLIFLVVHRLRWSSK

SEQ ID NO: 11310 - protein, 19 aa, Artificial Sequence
  Quasi-synthetic sequence derived from human genome
IILLVIVVLFAALKRQRKK

SEQ ID NO: 11311 - protein, 19 aa, Artificial Sequence
  Quasi-synthetic sequence derived from human genome
IFFLALRLLAYLVLRYRVK

SEQ ID NO: 11312 - protein, 19 aa, Artificial Sequence
  Quasi-synthetic sequence derived from human genome
HLCRLRVRKAIGKYRIKLL

SEQ ID NO: 11313 - protein, 19 aa, Artificial Sequence
  Quasi-synthetic sequence derived from human genome
FFFFFSVGRKFKKFNKVRV

SEQ ID NO: 11314 - protein, 19 aa, Artificial Sequence
  Quasi-synthetic sequence derived from human genome
LLMFIIILLGVMLTIKRRR

SEQ ID NO: 11315 - protein, 19 aa, Artificial Sequence
  Quasi-synthetic sequence derived from human genome
RRFNIRLIHPVQFVFLRKR

SEQ ID NO: 11316 - protein, 19 aa, Artificial Sequence
  Quasi-synthetic sequence derived from human genome
ARRRRRACIALFLVLLFAF

SEQ ID NO: 11317 - protein, 19 aa, Artificial Sequence
  Quasi-synthetic sequence derived from human genome
MVRPHLLKKKILGRVWWLM

SEQ ID NO: 11318 - protein, 19 aa, Artificial Sequence
  Quasi-synthetic sequence derived from human genome
ARLARQYLLPLLRRLARRL

SEQ ID NO: 11319 - protein, 19 aa, Artificial Sequence
  Quasi-synthetic sequence derived from human genome
GRKAPLWLRAKFQRLLFKL

SEQ ID NO: 11320 - protein, 19 aa, Artificial Sequence
  Quasi-synthetic sequence derived from human genome
LGLSRLLFFLLGFLRIRVR

SEQ ID NO: 11321 - protein, 19 aa, Artificial Sequence
  Quasi-synthetic sequence derived from human genome
RKFGNRIKVLRSRIRFIHL

SEQ ID NO: 11322 - protein, 19 aa, Artificial Sequence
  Quasi-synthetic sequence derived from human genome
LLSRKILRLITIRKLFTAI

SEQ ID NO: 11323 - protein, 19 aa, Artificial Sequence
  Quasi-synthetic sequence derived from human genome
VLLLSIAIFQRQKRRKFWK

SEQ ID NO: 11324 - protein, 19 aa, Artificial Sequence
  Quasi-synthetic sequence derived from human genome
ITFFRLFRVMRLVKLLSRG

SEQ ID NO: 11325 - protein, 19 aa, Artificial Sequence
  Quasi-synthetic sequence derived from human genome
RKKMVRRVVCILVWLLAFC

SEQ ID NO: 11326 - protein, 19 aa, Artificial Sequence
  Quasi-synthetic sequence derived from human genome
IIQQYKFLRFRRSLLLLVK

SEQ ID NO: 11327 - protein, 19 aa, Artificial Sequence
  Quasi-synthetic sequence derived from human genome
RRRRPGLLLPGLWLLLLAR

SEQ ID NO: 11328 - protein, 19 aa, Artificial Sequence
  Quasi-synthetic sequence derived from human genome
MLKCILKFFLRALKILIPV

SEQ ID NO: 11329 - protein, 19 aa, Artificial Sequence
  Quasi-synthetic sequence derived from human genome
LAKKIMFFLLIIRKLLNHI

SEQ ID NO: 11330 - protein, 19 aa, Artificial Sequence
  Quasi-synthetic sequence derived from human genome
RRLLILILKIGRRWTELIR

SEQ ID NO: 11331 - protein, 19 aa, Artificial Sequence
  Quasi-synthetic sequence derived from human genome
RRFLSKVYSFPMRKLILFL

SEQ ID NO: 11332 - protein, 19 aa, Artificial Sequence
  Quasi-synthetic sequence derived from human genome
LLKKPKTRRLWSRFPPWRR

SEQ ID NO: 11333 - protein, 19 aa, Artificial Sequence
  Quasi-synthetic sequence derived from human genome
CRRIVVSRGRLRRLLWIGF

SEQ ID NO: 11334 - protein, 19 aa, Artificial Sequence
  Quasi-synthetic sequence derived from human genome
KVFLSSLKFHIRRFIFLFF

SEQ ID NO: 11335 - protein, 19 aa, Artificial Sequence
  Quasi-synthetic sequence derived from human genome
LLAALLLLLLLSRRRTRRP

SEQ ID NO: 11336 - protein, 19 aa, Artificial Sequence
  Quasi-synthetic sequence derived from human genome
ILGLLLLRWRRPALHRPIK

SEQ ID NO: 11337 - protein, 19 aa, Artificial Sequence
  Quasi-synthetic sequence derived from human genome
IFWKRYRFKLIAFMVISII

SEQ ID NO: 11338 - protein, 19 aa, Artificial Sequence
  Quasi-synthetic sequence derived from human genome
LRIANFSNLIFLRIKRRVK

SEQ ID NO: 11339 - protein, 19 aa, Artificial Sequence
  Quasi-synthetic sequence derived from human genome
LRLPKRLRVVYFLARTRLA

SEQ ID NO: 11340 - protein, 19 aa, Artificial Sequence
  Quasi-synthetic sequence derived from human genome
RRRRARLRFMKQKFNIVCL

SEQ ID NO: 11341 - protein, 19 aa, Artificial Sequence
  Quasi-synthetic sequence derived from human genome
KWTRVILLNWCAWFLRMKR

SEQ ID NO: 11342 - protein, 19 aa, Artificial Sequence
  Quasi-synthetic sequence derived from human genome
RVLRIARVLKLLKMAVGMR

SEQ ID NO: 11343 - protein, 19 aa, Artificial Sequence
  Quasi-synthetic sequence derived from human genome
KRRKMSKKLPPVIIKYIII

SEQ ID NO: 11344 - protein, 19 aa, Artificial Sequence
  Quasi-synthetic sequence derived from human genome
VLRCLRPLRIFKLVPQMRK

SEQ ID NO: 11345 - protein, 19 aa, Artificial Sequence
  Quasi-synthetic sequence derived from human genome
LALLVFILWKCGFFKRNKK

SEQ ID NO: 11346 - protein, 19 aa, Artificial Sequence
  Quasi-synthetic sequence derived from human genome
ARRFRRSRRTGRLVVLIIL

SEQ ID NO: 11347 - protein, 19 aa, Artificial Sequence
  Quasi-synthetic sequence derived from human genome
IFFISLRLIAYFVLRYKIR

SEQ ID NO: 11348 - protein, 19 aa, Artificial Sequence
  Quasi-synthetic sequence derived from human genome
RLKNIRKVYGRCMWYRLRL

SEQ ID NO: 11349 - protein, 19 aa, Artificial Sequence
  Quasi-synthetic sequence derived from human genome
RRGLLRLPRRSLLAALFFF

SEQ ID NO: 11350 - protein, 19 aa, Artificial Sequence
  Quasi-synthetic sequence derived from human genome
LSMKKFAVRRFFSVYLRRK

SEQ ID NO: 11351 - protein, 19 aa, Artificial Sequence
  Quasi-synthetic sequence derived from human genome
KLYVRLFQRKLSWIKMTKL

SEQ ID NO: 11352 - protein, 19 aa, Artificial Sequence
  Quasi-synthetic sequence derived from human genome
LKIANFSNLIFLRLKRRVK

SEQ ID NO: 11353 - protein, 19 aa, Artificial Sequence
  Quasi-synthetic sequence derived from human genome
VRQIFIHKLPLYLRLKRPK

SEQ ID NO: 11354 - protein, 19 aa, Artificial Sequence
  Quasi-synthetic sequence derived from human genome
VLRVLRALRILYVMRLARH

SEQ ID NO: 11355 - protein, 19 aa, Artificial Sequence
  Quasi-synthetic sequence derived from human genome
FHLYRAPYFWIKRRILLLI

SEQ ID NO: 11356 - protein, 19 aa, Artificial Sequence
  Quasi-synthetic sequence derived from human genome
LSSRRRRRLALFLARKHLK

SEQ ID NO: 11357 - protein, 19 aa, Artificial Sequence
  Quasi-synthetic sequence derived from human genome
MLRSVWNFLKRHKKKCIFL

SEQ ID NO: 11358 - protein, 19 aa, Artificial Sequence
  Quasi-synthetic sequence derived from human genome
KVRRVFVRKVYTILLIQLL

SEQ ID NO: 11359 - protein, 19 aa, Artificial Sequence
  Quasi-synthetic sequence derived from human genome
KFLFHQRLFGQLLRLKMFR

SEQ ID NO: 11360 - protein, 19 aa, Artificial Sequence
  Quasi-synthetic sequence derived from human genome
RFLKLKKERKSLWTILLLF

SEQ ID NO: 11361 - protein, 19 aa, Artificial Sequence
  Quasi-synthetic sequence derived from human genome
SRISITFFRLFRVMRLVKL

SEQ ID NO: 11362 - protein, 19 aa, Artificial Sequence
  Quasi-synthetic sequence derived from human genome
IVHPLRLRHLRRPRVARLL

SEQ ID NO: 11363 - protein, 19 aa, Artificial Sequence
  Quasi-synthetic sequence derived from human genome
RWRWWQRLLPWRLLQARGF

SEQ ID NO: 11364 - protein, 19 aa, Artificial Sequence
  Quasi-synthetic sequence derived from human genome
FVAVLLGLRLRRWHKSRLL

SEQ ID NO: 11365 - protein, 19 aa, Artificial Sequence
  Quasi-synthetic sequence derived from human genome
KKLVVFRPRLFLLCFGIIF

SEQ ID NO: 11366 - protein, 19 aa, Artificial Sequence
  Quasi-synthetic sequence derived from human genome
KSFFKTLKKRAWAIFLRLC

SEQ ID NO: 11367 - protein, 19 aa, Artificial Sequence
  Quasi-synthetic sequence derived from human genome
LKHLCRLKIRKCMGRLHLR

SEQ ID NO: 11368 - protein, 19 aa, Artificial Sequence
  Quasi-synthetic sequence derived from human genome
ITFFRLFRVMRLVKLLSKG

SEQ ID NO: 11369 - protein, 19 aa, Artificial Sequence
  Quasi-synthetic sequence derived from human genome
YFYCKFLWRCLKFVMRKLT

SEQ ID NO: 11370 - protein, 19 aa, Artificial Sequence
  Quasi-synthetic sequence derived from human genome
LLKLNQLKFRKKKLRFGRS

SEQ ID NO: 11371 - protein, 19 aa, Artificial Sequence
  Quasi-synthetic sequence derived from human genome
RIKKRSRSVFYRLTILILV

SEQ ID NO: 11372 - protein, 19 aa, Artificial Sequence
  Quasi-synthetic sequence derived from human genome
MFPRSFIRLLRSKVSRFLR

SEQ ID NO: 11373 - protein, 19 aa, Artificial Sequence
  Quasi-synthetic sequence derived from human genome
KTIIRKINKMKTLKRKKLL

SEQ ID NO: 11374 - protein, 19 aa, Artificial Sequence
  Quasi-synthetic sequence derived from human genome
LLYSKRLITYRLRHLLRAR

SEQ ID NO: 11375 - protein, 19 aa, Artificial Sequence
  Quasi-synthetic sequence derived from human genome
LKRKIARLGINMLLKMIFV

SEQ ID NO: 11376 - protein, 19 aa, Artificial Sequence
  Quasi-synthetic sequence derived from human genome
KFRRYLSVFFRKHITKRFC

SEQ ID NO: 11377 - protein, 19 aa, Artificial Sequence
  Quasi-synthetic sequence derived from human genome
VFVKIKASHALKKKILRFR

SEQ ID NO: 11378 - protein, 19 aa, Artificial Sequence
  Quasi-synthetic sequence derived from human genome
FRKLFRVYSNFLRGKLKLY

SEQ ID NO: 11379 - protein, 19 aa, Artificial Sequence
  Quasi-synthetic sequence derived from human genome
AKFRRRTCIILALFILFIF

SEQ ID NO: 11380 - protein, 19 aa, Artificial Sequence
  Quasi-synthetic sequence derived from human genome
PFRRKIYYLPRRYKFMSRI

SEQ ID NO: 11381 - protein, 19 aa, Artificial Sequence
  Quasi-synthetic sequence derived from human genome
SKKNIFLLFKKLCSFRYRR

SEQ ID NO: 11382 - protein, 19 aa, Artificial Sequence
  Quasi-synthetic sequence derived from human genome
KRFRAGFKRAFRWCPFIKV

SEQ ID NO: 11383 - protein, 19 aa, Artificial Sequence
  Quasi-synthetic sequence derived from human genome
RRRKTVRLLLANLVIFLLC

SEQ ID NO: 11384 - protein, 19 aa, Artificial Sequence
  Quasi-synthetic sequence derived from human genome
RRLQKFWRVTVKGFFVKKK

SEQ ID NO: 11385 - protein, 19 aa, Artificial Sequence
  Quasi-synthetic sequence derived from human genome
RLIHRVRYRRGLWRTRQIL

SEQ ID NO: 11386 - protein, 19 aa, Artificial Sequence
  Quasi-synthetic sequence derived from human genome
FFIWRRYWRTLVLLLLVLL

SEQ ID NO: 11387 - protein, 19 aa, Artificial Sequence
  Quasi-synthetic sequence derived from human genome
FCLTVLYSLIGRKLWRRRR

SEQ ID NO: 11388 - protein, 19 aa, Artificial Sequence
  Quasi-synthetic sequence derived from human genome
TRLAVIPWGVRKLLRWVRR

SEQ ID NO: 11389 - protein, 19 aa, Artificial Sequence
  Quasi-synthetic sequence derived from human genome
LWVIRVQKRHKMPRMKKLM

SEQ ID NO: 11390 - protein, 19 aa, Artificial Sequence
  Quasi-synthetic sequence derived from human genome
LRLLINESLIKKLRLFFRK

SEQ ID NO: 11391 - protein, 19 aa, Artificial Sequence
  Quasi-synthetic sequence derived from human genome
LFKIYFKINKLHLCKPLIR

SEQ ID NO: 11392 - protein, 19 aa, Artificial Sequence
  Quasi-synthetic sequence derived from human genome
FVTVLLALKLRRWHKSRLL

SEQ ID NO: 11393 - protein, 19 aa, Artificial Sequence
  Quasi-synthetic sequence derived from human genome
KALKQMGLRKLILRLHKLM

SEQ ID NO: 11394 - protein, 19 aa, Artificial Sequence
  Quasi-synthetic sequence derived from human genome
FCLILWKWKKKKRPRNSYK

SEQ ID NO: 11395 - protein, 19 aa, Artificial Sequence
  Quasi-synthetic sequence derived from human genome
RKKLRGKKMAPLKIKLGLL

SEQ ID NO: 11396 - protein, 19 aa, Artificial Sequence
  Quasi-synthetic sequence derived from human genome
PFHERFFRFLLRKLYVFRR

SEQ ID NO: 11397 - protein, 19 aa, Artificial Sequence
  Quasi-synthetic sequence derived from human genome
MVVFINAKIKSLIKLFKKK

SEQ ID NO: 11398 - protein, 19 aa, Artificial Sequence
  Quasi-synthetic sequence derived from human genome
FFLPKPRKLRNRHLRKPLV

SEQ ID NO: 11399 - protein, 19 aa, Artificial Sequence
  Quasi-synthetic sequence derived from human genome
LLALALIGLIIFCCRKKRR

SEQ ID NO: 11400 - protein, 19 aa, Artificial Sequence
  Quasi-synthetic sequence derived from human genome
LLILSLICKIKLGPVRRKL

SEQ ID NO: 11401 - protein, 19 aa, Artificial Sequence
  Quasi-synthetic sequence derived from human genome
LFYGFLGKKFKRYFLQLLK

SEQ ID NO: 11402 - protein, 19 aa, Artificial Sequence
  Quasi-synthetic sequence derived from human genome
KKKKKKKKRQCFAFLIYFR

SEQ ID NO: 11403 - protein, 19 aa, Artificial Sequence
  Quasi-synthetic sequence derived from human genome
KKRKRAIKLIVTVLAMYLI

SEQ ID NO: 11404 - protein, 19 aa, Artificial Sequence
  Quasi-synthetic sequence derived from human genome
WRLPRISARAPYRLRRLRR

SEQ ID NO: 11405 - protein, 19 aa, Artificial Sequence
  Quasi-synthetic sequence derived from human genome
LFLIFLLWKLPSARAKIRI

SEQ ID NO: 11406 - protein, 19 aa, Artificial Sequence
  Quasi-synthetic sequence derived from human genome
LVLLALAAWASRWLRRKLR

SEQ ID NO: 11407 - protein, 19 aa, Artificial Sequence
  Quasi-synthetic sequence derived from human genome
CRAFVKRVIMSRFFKIIMI

SEQ ID NO: 11408 - protein, 19 aa, Artificial Sequence
  Quasi-synthetic sequence derived from human genome
FLAVVILVLMVVKCVRRKK

SEQ ID NO: 11409 - protein, 19 aa, Artificial Sequence
  Quasi-synthetic sequence derived from human genome
SAFFRLFRVMRLIKLLSRA

SEQ ID NO: 11410 - protein, 19 aa, Artificial Sequence
  Quasi-synthetic sequence derived from human genome
LLKQGHRRKNWKVRKFILR

SEQ ID NO: 11411 - protein, 19 aa, Artificial Sequence
  Quasi-synthetic sequence derived from human genome
GILRRKLYIHRVTLRKLLP

SEQ ID NO: 11412 - protein, 19 aa, Artificial Sequence
  Quasi-synthetic sequence derived from human genome
LKSIKYLICTRYKWLIIKI

SEQ ID NO: 11413 - protein, 19 aa, Artificial Sequence
  Quasi-synthetic sequence derived from human genome
WMRMISFIRSFCKYRRFML

SEQ ID NO: 11414 - protein, 19 aa, Artificial Sequence
  Quasi-synthetic sequence derived from human genome
LFVVITLLKTRGPFRKRLR

SEQ ID NO: 11415 - protein, 19 aa, Artificial Sequence
  Quasi-synthetic sequence derived from human genome
ILYRRLLLTKLFIRGWGRP

SEQ ID NO: 11416 - protein, 19 aa, Artificial Sequence
  Quasi-synthetic sequence derived from human genome
LKTYLKRFKVMKPKVLRSW

SEQ ID NO: 11417 - protein, 19 aa, Artificial Sequence
  Quasi-synthetic sequence derived from human genome
YKKHRILKIYHLFVSLLLK

SEQ ID NO: 11418 - protein, 19 aa, Artificial Sequence
  Quasi-synthetic sequence derived from human genome
WRRKKLYLLFAQHRYISRL

SEQ ID NO: 11419 - protein, 19 aa, Artificial Sequence
  Quasi-synthetic sequence derived from human genome
KPYIRKKAVLIMYKVFLKY

SEQ ID NO: 11420 - protein, 19 aa, Artificial Sequence
  Quasi-synthetic sequence derived from human genome
FLLRQHKVWRKCRMRIFTV

SEQ ID NO: 11421 - protein, 19 aa, Artificial Sequence
  Quasi-synthetic sequence derived from human genome
LALTALLLVAMICRRRRRR

SEQ ID NO: 11422 - protein, 19 aa, Artificial Sequence
  Quasi-synthetic sequence derived from human genome
LVIARRALLRFLFRQLLLA

SEQ ID NO: 11423 - protein, 19 aa, Artificial Sequence
  Quasi-synthetic sequence derived from human genome
LFVIFILVVLFIVFRKKVF

SEQ ID NO: 11424 - protein, 19 aa, Artificial Sequence
  Quasi-synthetic sequence derived from human genome
RRRSLRRLFSRFLLALGSR

SEQ ID NO: 11425 - protein, 19 aa, Artificial Sequence
  Quasi-synthetic sequence derived from human genome
KKLKKSIKIIFIVVAAFLV

SEQ ID NO: 11426 - protein, 19 aa, Artificial Sequence
  Quasi-synthetic sequence derived from human genome
RKVFLRLLPQLLRMHVRPL

SEQ ID NO: 11427 - protein, 19 aa, Artificial Sequence
  Quasi-synthetic sequence derived from human genome
RARVLVTRRRVRALIAVLW

SEQ ID NO: 11428 - protein, 19 aa, Artificial Sequence
  Quasi-synthetic sequence derived from human genome
MFPRSFIKLLRSKVSRFLR

SEQ ID NO: 11429 - protein, 19 aa, Artificial Sequence
  Quasi-synthetic sequence derived from human genome
KIRTRLIRKRFLCLGWGLP

SEQ ID NO: 11430 - protein, 19 aa, Artificial Sequence
  Quasi-synthetic sequence derived from human genome
ALKLLRKRSQVWKPKVIRI

SEQ ID NO: 11431 - protein, 19 aa, Artificial Sequence
  Quasi-synthetic sequence derived from human genome
PGLRKTKYRSFRRRLLKFI

SEQ ID NO: 11432 - protein, 19 aa, Artificial Sequence
  Quasi-synthetic sequence derived from human genome
NVKHWPWMKLFFKIKPLLK

SEQ ID NO: 11433 - protein, 19 aa, Artificial Sequence
  Quasi-synthetic sequence derived from human genome
FLIFILFIIVQLFIMKLRK

SEQ ID NO: 11434 - protein, 19 aa, Artificial Sequence
  Quasi-synthetic sequence derived from human genome
VRLRGAILTMAFKKILKLK

SEQ ID NO: 11435 - protein, 19 aa, Artificial Sequence
  Quasi-synthetic sequence derived from human genome
KVIRALLRILCCLLKAICR

SEQ ID NO: 11436 - protein, 19 aa, Artificial Sequence
  Quasi-synthetic sequence derived from human genome
FKLLILLLGSWALFFRRPK

SEQ ID NO: 11437 - protein, 19 aa, Artificial Sequence
  Quasi-synthetic sequence derived from human genome
RIPLQRLKLKCIFCRHRVK

SEQ ID NO: 11438 - protein, 19 aa, Artificial Sequence
  Quasi-synthetic sequence derived from human genome
GILFAVFLILLLMYRMKKK

SEQ ID NO: 11439 - protein, 19 aa, Artificial Sequence
  Quasi-synthetic sequence derived from human genome
WVFILFRKAVFQRLKLWVC

SEQ ID NO: 11440 - protein, 19 aa, Artificial Sequence
  Quasi-synthetic sequence derived from human genome
RIIILKIVHRRIINRFHSF

SEQ ID NO: 11441 - protein, 19 aa, Artificial Sequence
  Quasi-synthetic sequence derived from human genome
RFLPRPIRQQLLYKRRYIF

SEQ ID NO: 11442 - protein, 19 aa, Artificial Sequence
  Quasi-synthetic sequence derived from human genome
IITKFCLFCFWKFARKGKK

SEQ ID NO: 11443 - protein, 19 aa, Artificial Sequence
  Quasi-synthetic sequence derived from human genome
KALKYLFRFIIQSRVLYLR

SEQ ID NO: 11444 - protein, 19 aa, Artificial Sequence
  Quasi-synthetic sequence derived from human genome
RARKKRSRIPLLRKRRFQL

SEQ ID NO: 11445 - protein, 19 aa, Artificial Sequence
  Quasi-synthetic sequence derived from human genome
LRNKQIKVAIKKIMKRIFY

SEQ ID NO: 11446 - protein, 19 aa, Artificial Sequence
  Quasi-synthetic sequence derived from human genome
RAVIKLQSLVRMWRVRWRY

SEQ ID NO: 11447 - protein, 19 aa, Artificial Sequence
  Quasi-synthetic sequence derived from human genome
KGKRWFAFKMMMAKKWAKF

SEQ ID NO: 11448 - protein, 19 aa, Artificial Sequence
  Quasi-synthetic sequence derived from human genome
ILLVLLCLLLYYCRRKCLK

SEQ ID NO: 11449 - protein, 19 aa, Artificial Sequence
  Quasi-synthetic sequence derived from human genome
LVYIKRRLAMCARKLGRIR

SEQ ID NO: 11450 - protein, 19 aa, Artificial Sequence
  Quasi-synthetic sequence derived from human genome
RLRINRFAWPKVLKISYKR

SEQ ID NO: 11451 - protein, 19 aa, Artificial Sequence
  Quasi-synthetic sequence derived from human genome
KIHRRVLKKNPLKNLRIML

SEQ ID NO: 11452 - protein, 19 aa, Artificial Sequence
  Quasi-synthetic sequence derived from human genome
HIRLRLSKLRRCVQWLKVM

SEQ ID NO: 11453 - protein, 19 aa, Artificial Sequence
  Quasi-synthetic sequence derived from human genome
RYNCRVIFLNRKILLIRPK

SEQ ID NO: 11454 - protein, 19 aa, Artificial Sequence
  Quasi-synthetic sequence derived from human genome
RMGAVIKIRFFKIMLVLII

SEQ ID NO: 11455 - protein, 19 aa, Artificial Sequence
  Quasi-synthetic sequence derived from human genome
PRWRRRWFVLKGHTLYWYR

SEQ ID NO: 11456 - protein, 19 aa, Artificial Sequence
  Quasi-synthetic sequence derived from human genome
VNFFIFLKILKLLISKLKA

SEQ ID NO: 11457 - protein, 19 aa, Artificial Sequence
  Quasi-synthetic sequence derived from human genome
FKKKCFKLTRKMPIIGRKI

SEQ ID NO: 11458 - protein, 19 aa, Artificial Sequence
  Quasi-synthetic sequence derived from human genome
RFKKGKIVLLFSLLCWVLF

SEQ ID NO: 11459 - protein, 19 aa, Artificial Sequence
  Quasi-synthetic sequence derived from human genome
LLGLIILLLWKCGFFKRAR

SEQ ID NO: 11460 - protein, 19 aa, Artificial Sequence
  Quasi-synthetic sequence derived from human genome
RRNFWPARLATRLLKLRYL

SEQ ID NO: 11461 - protein, 19 aa, Artificial Sequence
  Quasi-synthetic sequence derived from human genome
KKLPGVMLFKKKKTRKLKI

SEQ ID NO: 11462 - protein, 19 aa, Artificial Sequence
  Quasi-synthetic sequence derived from human genome
IRRMFRVRNCLRGLGLFLL

SEQ ID NO: 11463 - protein, 19 aa, Artificial Sequence
  Quasi-synthetic sequence derived from human genome
RVMRNLFVRKLYLWPRFHV

SEQ ID NO: 11464 - protein, 19 aa, Artificial Sequence
  Quasi-synthetic sequence derived from human genome
VLVKKYQAVLRRKALLIFL

SEQ ID NO: 11465 - protein, 19 aa, Artificial Sequence
  Quasi-synthetic sequence derived from human genome
KKLKQIFLSVLRHVRYWVK

SEQ ID NO: 11466 - protein, 19 aa, Artificial Sequence
  Quasi-synthetic sequence derived from human genome
RLRLRLLALLLLLLAPPAR

SEQ ID NO: 11467 - protein, 19 aa, Artificial Sequence
  Quasi-synthetic sequence derived from human genome
LRMIRKHVRKNYMKFKAKF

SEQ ID NO: 11468 - protein, 19 aa, Artificial Sequence
  Quasi-synthetic sequence derived from human genome
ALLWMWWRRNRRGKLGRLA

SEQ ID NO: 11469 - protein, 19 aa, Artificial Sequence
  Quasi-synthetic sequence derived from human genome
KALLRLVSAVNRRRMKLLL

SEQ ID NO: 11470 - protein, 19 aa, Artificial Sequence
  Quasi-synthetic sequence derived from human genome
VVKRGRKKLLYIFKQPFMR

SEQ ID NO: 11471 - protein, 19 aa, Artificial Sequence
  Quasi-synthetic sequence derived from human genome
WPRYIRLQRQRAILYKRLK

SEQ ID NO: 11472 - protein, 19 aa, Artificial Sequence
  Quasi-synthetic sequence derived from human genome
FNLPRLCIRKFFPKKKCFV

SEQ ID NO: 11473 - protein, 19 aa, Artificial Sequence
  Quasi-synthetic sequence derived from human genome
NLPPRRILFIKRFIIYSIR

SEQ ID NO: 11474 - protein, 19 aa, Artificial Sequence
  Quasi-synthetic sequence derived from human genome
WRKWKQLSRLQRNMILFLL

SEQ ID NO: 11475 - protein, 19 aa, Artificial Sequence
  Quasi-synthetic sequence derived from human genome
VGKIKRLKKSAFVVLILLI

SEQ ID NO: 11476 - protein, 19 aa, Artificial Sequence
  Quasi-synthetic sequence derived from human genome
IARLSRLIFLLRRWAARHV

SEQ ID NO: 11477 - protein, 19 aa, Artificial Sequence
  Quasi-synthetic sequence derived from human genome
PLIKLLFLPRRSRCKFFSL

SEQ ID NO: 11478 - protein, 19 aa, Artificial Sequence
  Quasi-synthetic sequence derived from human genome
KRLFVIRPSRFYDRRFLKL

SEQ ID NO: 11479 - protein, 19 aa, Artificial Sequence
  Quasi-synthetic sequence derived from human genome
RRSYALVSLSFFRKLRLIR

SEQ ID NO: 11480 - protein, 19 aa, Artificial Sequence
  Quasi-synthetic sequence derived from human genome
MPMRKVRSKSWKKLRYFRL

SEQ ID NO: 11481 - protein, 19 aa, Artificial Sequence
  Quasi-synthetic sequence derived from human genome
FFYPWFRRALKYILLGKIF

SEQ ID NO: 11482 - protein, 19 aa, Artificial Sequence
  Quasi-synthetic sequence derived from human genome
KLLMRHQLRKHKILMKVFP

SEQ ID NO: 11483 - protein, 19 aa, Artificial Sequence
  Quasi-synthetic sequence derived from human genome
KFKKFDHRYLRKILIRKNL

SEQ ID NO: 11484 - protein, 19 aa, Artificial Sequence
  Quasi-synthetic sequence derived from human genome
RLKRRVKSVILVVLLGPLL

SEQ ID NO: 11485 - protein, 19 aa, Artificial Sequence
  Quasi-synthetic sequence derived from human genome
FKALLIIYGILVIFRRMMK

SEQ ID NO: 11486 - protein, 19 aa, Artificial Sequence
  Quasi-synthetic sequence derived from human genome
MRKKLILFFKRRNHARKQR

SEQ ID NO: 11487 - protein, 19 aa, Artificial Sequence
  Quasi-synthetic sequence derived from human genome
LRLLRIFKITKYWASLRNL

SEQ ID NO: 11488 - protein, 19 aa, Artificial Sequence
  Quasi-synthetic sequence derived from human genome
LALVLVGLVSWRRRQRRLR

SEQ ID NO: 11489 - protein, 19 aa, Artificial Sequence
  Quasi-synthetic sequence derived from human genome
LVLGVLRMAKKRVIVKKLP

SEQ ID NO: 11490 - protein, 19 aa, Artificial Sequence
  Quasi-synthetic sequence derived from human genome
KRFHPFCLVLRKRKSTLFW

SEQ ID NO: 11491 - protein, 19 aa, Artificial Sequence
  Quasi-synthetic sequence derived from human genome
LGRLLIYKQGRKLFPIKLK

SEQ ID NO: 11492 - protein, 19 aa, Artificial Sequence
  Quasi-synthetic sequence derived from human genome
KFWARGRKPWKLAIQILKI

SEQ ID NO: 11493 - protein, 19 aa, Artificial Sequence
  Quasi-synthetic sequence derived from human genome
FIITKFCLFCFRKLAKKGK

SEQ ID NO: 11494 - protein, 19 aa, Artificial Sequence
  Quasi-synthetic sequence derived from human genome
LKLILKRYKIGASRKTFWK

SEQ ID NO: 11495 - protein, 19 aa, Artificial Sequence
  Quasi-synthetic sequence derived from human genome
IKYIIINRFRGRKNMLVKL

SEQ ID NO: 11496 - protein, 19 aa, Artificial Sequence
  Quasi-synthetic sequence derived from human genome
LRLRKRFLNFFLEKYKRPV

SEQ ID NO: 11497 - protein, 19 aa, Artificial Sequence
  Quasi-synthetic sequence derived from human genome
KKKKVLVWNRVYKVISRML

SEQ ID NO: 11498 - protein, 19 aa, Artificial Sequence
  Quasi-synthetic sequence derived from human genome
MLLKKQLPSVRKLLRRKTL

SEQ ID NO: 11499 - protein, 19 aa, Artificial Sequence
  Quasi-synthetic sequence derived from human genome
RWKPFLYRGRICRRLSVVF

SEQ ID NO: 11500 - protein, 19 aa, Artificial Sequence
  Quasi-synthetic sequence derived from human genome
RSLLVRRRFISLKKATIFV

SEQ ID NO: 11501 - protein, 19 aa, Artificial Sequence
  Quasi-synthetic sequence derived from human genome
VLALLVLLLWKMGFFKRAK

SEQ ID NO: 11502 - protein, 19 aa, Artificial Sequence
  Quasi-synthetic sequence derived from human genome
LKIVKISFKCKQFFIQLRK

SEQ ID NO: 11503 - protein, 19 aa, Artificial Sequence
  Quasi-synthetic sequence derived from human genome
KRNRILKLLALKVAAHLKW

SEQ ID NO: 11504 - protein, 19 aa, Artificial Sequence
  Quasi-synthetic sequence derived from human genome
WPIQAFVKRKVIIFLKKCL

SEQ ID NO: 11505 - protein, 19 aa, Artificial Sequence
  Quasi-synthetic sequence derived from human genome
LVLRKARSLLYQFRLLPRI

SEQ ID NO: 11506 - protein, 19 aa, Artificial Sequence
  Quasi-synthetic sequence derived from human genome
RLWKWLKSPRSWRLGLALL

SEQ ID NO: 11507 - protein, 19 aa, Artificial Sequence
  Quasi-synthetic sequence derived from human genome
LRLLLVKKPSVRSLALKLL

SEQ ID NO: 11508 - protein, 19 aa, Artificial Sequence
  Quasi-synthetic sequence derived from human genome
CQVFLKRFLRLRYGRQRRR

SEQ ID NO: 11509 - protein, 19 aa, Artificial Sequence
  Quasi-synthetic sequence derived from human genome
GRKLWKRFFCFLRRSGLYY

SEQ ID NO: 11510 - protein, 19 aa, Artificial Sequence
  Quasi-synthetic sequence derived from human genome
FILICYLKIVICLRRRNAK

SEQ ID NO: 11511 - protein, 19 aa, Artificial Sequence
  Quasi-synthetic sequence derived from human genome
LRITLRFFASVLIRRIHKV

SEQ ID NO: 11512 - protein, 19 aa, Artificial Sequence
  Quasi-synthetic sequence derived from human genome
LRARRARRCYLLSVALRLL

SEQ ID NO: 11513 - protein, 19 aa, Artificial Sequence
  Quasi-synthetic sequence derived from human genome
RRRFLSLKKTAILIQRKYR

SEQ ID NO: 11514 - protein, 19 aa, Artificial Sequence
  Quasi-synthetic sequence derived from human genome
FLLTKKFRLITVRKIATIL

SEQ ID NO: 11515 - protein, 19 aa, Artificial Sequence
  Quasi-synthetic sequence derived from human genome
RLLAIRRILVIITRKMNSR

SEQ ID NO: 11516 - protein, 19 aa, Artificial Sequence
  Quasi-synthetic sequence derived from human genome
FLRRLITSLGRSRLWLKAR

SEQ ID NO: 11517 - protein, 19 aa, Artificial Sequence
  Quasi-synthetic sequence derived from human genome
RGFLIKMGGKIKTWKKRWF

SEQ ID NO: 11518 - protein, 19 aa, Artificial Sequence
  Quasi-synthetic sequence derived from human genome
RVIHLSLAPKRMKFFFKRY

SEQ ID NO: 11519 - protein, 19 aa, Artificial Sequence
  Quasi-synthetic sequence derived from human genome
RMYLRLRGRCPLLLRCLIY

SEQ ID NO: 11520 - protein, 19 aa, Artificial Sequence
  Quasi-synthetic sequence derived from human genome
LRAWKRIFWRQILLTLGLL

SEQ ID NO: 11521 - protein, 19 aa, Artificial Sequence
  Quasi-synthetic sequence derived from human genome
LLSLLLILKAGRRWNKYFK

SEQ ID NO: 11522 - protein, 19 aa, Artificial Sequence
  Quasi-synthetic sequence derived from human genome
LFKRRVVRRLASLKTRRCR

SEQ ID NO: 11523 - protein, 19 aa, Artificial Sequence
  Quasi-synthetic sequence derived from human genome
IRLVRVFRIFKLSRHSKGL

SEQ ID NO: 11524 - protein, 19 aa, Artificial Sequence
  Quasi-synthetic sequence derived from human genome
RIRRLGFSHRILFANFIKR

SEQ ID NO: 11525 - protein, 19 aa, Artificial Sequence
  Quasi-synthetic sequence derived from human genome
VTLLIYRRLRKPKITWSLR

SEQ ID NO: 11526 - protein, 19 aa, Artificial Sequence
  Quasi-synthetic sequence derived from human genome
LHRMWIQAVKKLRRWKGRV

SEQ ID NO: 11527 - protein, 19 aa, Artificial Sequence
  Quasi-synthetic sequence derived from human genome
RRVRSFLRGLPALLLLLLF

SEQ ID NO: 11528 - protein, 19 aa, Artificial Sequence
  Quasi-synthetic sequence derived from human genome
RILRLIRAAKGIRTLLFAL

SEQ ID NO: 11529 - protein, 19 aa, Artificial Sequence
  Quasi-synthetic sequence derived from human genome
RTLALRALLLLQRLKNRLL

SEQ ID NO: 11530 - protein, 19 aa, Artificial Sequence
  Quasi-synthetic sequence derived from human genome
FILIWRTKKLKHTFLLILC

SEQ ID NO: 11531 - protein, 19 aa, Artificial Sequence
  Quasi-synthetic sequence derived from human genome
RISLKRPKKCFRNLFHIRR

SEQ ID NO: 11532 - protein, 19 aa, Artificial Sequence
  Quasi-synthetic sequence derived from human genome
IIMRFRKRKNFKKKRIVTT

SEQ ID NO: 11533 - protein, 19 aa, Artificial Sequence
  Quasi-synthetic sequence derived from human genome
LLFRWKPLWGVRLRLRPCN

SEQ ID NO: 11534 - protein, 19 aa, Artificial Sequence
  Quasi-synthetic sequence derived from human genome
RKKWKMGGMKYIFSLLFFL

SEQ ID NO: 11535 - protein, 19 aa, Artificial Sequence
  Quasi-synthetic sequence derived from human genome
IRRRSKFANLGRIFKPWKW

SEQ ID NO: 11536 - protein, 19 aa, Artificial Sequence
  Quasi-synthetic sequence derived from human genome
RLKKIRAHRGLRHFWGLRV

SEQ ID NO: 11537 - protein, 19 aa, Artificial Sequence
  Quasi-synthetic sequence derived from human genome
RVIKKKKVIMKKRKKLTLT

SEQ ID NO: 11538 - protein, 19 aa, Artificial Sequence
  Quasi-synthetic sequence derived from human genome
IALLFLCLLPLIVKHIRKK

SEQ ID NO: 11539 - protein, 19 aa, Artificial Sequence
  Quasi-synthetic sequence derived from human genome
FLRIKRRVKSVVLVILLGP

SEQ ID NO: 11540 - protein, 19 aa, Artificial Sequence
  Quasi-synthetic sequence derived from human genome
VAFVLLLFLLLFLLLRRQR

SEQ ID NO: 11541 - protein, 19 aa, Artificial Sequence
  Quasi-synthetic sequence derived from human genome
RRKLLLFKTFSRKVVVVVP

SEQ ID NO: 11542 - protein, 19 aa, Artificial Sequence
  Quasi-synthetic sequence derived from human genome
WCFMFSIWRFAWRKSIKKY

SEQ ID NO: 11543 - protein, 19 aa, Artificial Sequence
  Quasi-synthetic sequence derived from human genome
LTRKGIVRVVFFPFFFRWW

SEQ ID NO: 11544 - protein, 19 aa, Artificial Sequence
  Quasi-synthetic sequence derived from human genome
RYKAAMRRAFHIRLIARRL

SEQ ID NO: 11545 - protein, 19 aa, Artificial Sequence
  Quasi-synthetic sequence derived from human genome
WLLRRRRWAALLVLGLLVA

SEQ ID NO: 11546 - protein, 19 aa, Artificial Sequence
  Quasi-synthetic sequence derived from human genome
SFRTGIKRRILLLIPKWLY

SEQ ID NO: 11547 - protein, 19 aa, Artificial Sequence
  Quasi-synthetic sequence derived from human genome
LALVGVLILFMFRRLRQFR

SEQ ID NO: 11548 - protein, 19 aa, Artificial Sequence
  Quasi-synthetic sequence derived from human genome
KKGSVLKRRLVKLVVNFLF

SEQ ID NO: 11549 - protein, 19 aa, Artificial Sequence
  Quasi-synthetic sequence derived from human genome
LWKHLKSSLRILFRHFFPK

SEQ ID NO: 11550 - protein, 19 aa, Artificial Sequence
  Quasi-synthetic sequence derived from human genome
FIIWLARRLKKGKKSKRSM

SEQ ID NO: 11551 - protein, 19 aa, Artificial Sequence
  Quasi-synthetic sequence derived from human genome
KLRINRFPWPKVLKISYKR

SEQ ID NO: 11552 - protein, 19 aa, Artificial Sequence
  Quasi-synthetic sequence derived from human genome
VAQVLRLMRIFRILKLARH

SEQ ID NO: 11553 - protein, 19 aa, Artificial Sequence
  Quasi-synthetic sequence derived from human genome
WRKRCLYLFVLLLLIILVV

SEQ ID NO: 11554 - protein, 19 aa, Artificial Sequence
  Quasi-synthetic sequence derived from human genome
ILFVYLVIRALRLWRTAKL

SEQ ID NO: 11555 - protein, 19 aa, Artificial Sequence
  Quasi-synthetic sequence derived from human genome
TLRKRTLKVLTFLVLFIFL

SEQ ID NO: 11556 - protein, 19 aa, Artificial Sequence
  Quasi-synthetic sequence derived from human genome
RKQLVLRRGLLLLGVFLIL

SEQ ID NO: 11557 - protein, 19 aa, Artificial Sequence
  Quasi-synthetic sequence derived from human genome
SRLRLLLLLLLPPLLLLLR

SEQ ID NO: 11558 - protein, 19 aa, Artificial Sequence
  Quasi-synthetic sequence derived from human genome
LAILILAICGLKLQRRWKR

SEQ ID NO: 11559 - protein, 19 aa, Artificial Sequence
  Quasi-synthetic sequence derived from human genome
KSINSLKKLVLRKLRRKAL

SEQ ID NO: 11560 - protein, 19 aa, Artificial Sequence
  Quasi-synthetic sequence derived from human genome
KSKIFFLFRLCKKLPFNMM

SEQ ID NO: 11561 - protein, 19 aa, Artificial Sequence
  Quasi-synthetic sequence derived from human genome
RTLSRAKFWPRRRFNFFVL

SEQ ID NO: 11562 - protein, 19 aa, Artificial Sequence
  Quasi-synthetic sequence derived from human genome
ALLLLWRRRQKRRTGALVL

SEQ ID NO: 11563 - protein, 19 aa, Artificial Sequence
  Quasi-synthetic sequence derived from human genome
KFRNYFLKILKDLWCVRRK

SEQ ID NO: 11564 - protein, 19 aa, Artificial Sequence
  Quasi-synthetic sequence derived from human genome
LLRLIILIRIFHLLHQKRQ

SEQ ID NO: 11565 - protein, 19 aa, Artificial Sequence
  Quasi-synthetic sequence derived from human genome
RKGIVRVVFFPFFFRWWLQ

SEQ ID NO: 11566 - protein, 19 aa, Artificial Sequence
  Quasi-synthetic sequence derived from human genome
FFRREIKRRPLFRSCFILL

SEQ ID NO: 11567 - protein, 19 aa, Artificial Sequence
  Quasi-synthetic sequence derived from human genome
KKWRGMKWKKWSIHIVIPK

SEQ ID NO: 11568 - protein, 19 aa, Artificial Sequence
  Quasi-synthetic sequence derived from human genome
WFTSPYKTMKFILWRRFRW

SEQ ID NO: 11569 - protein, 19 aa, Artificial Sequence
  Quasi-synthetic sequence derived from human genome
GVIPTFRVKFLLRLLRGRL

SEQ ID NO: 11570 - protein, 19 aa, Artificial Sequence
  Quasi-synthetic sequence derived from human genome
LSVLRSFRLLRVFKLAKSW

SEQ ID NO: 11571 - protein, 19 aa, Artificial Sequence
  Quasi-synthetic sequence derived from human genome
RKFWWKNVKMIVLICVIVF

SEQ ID NO: 11572 - protein, 19 aa, Artificial Sequence
  Quasi-synthetic sequence derived from human genome
KFCLFCFWKFARKGKKGKR

SEQ ID NO: 11573 - protein, 19 aa, Artificial Sequence
  Quasi-synthetic sequence derived from human genome
WQIPLSRRFRSVKLWFVIR

SEQ ID NO: 11574 - protein, 19 aa, Artificial Sequence
  Quasi-synthetic sequence derived from human genome
FFLCQMLYNRRKILQLKRK

SEQ ID NO: 11575 - protein, 19 aa, Artificial Sequence
  Quasi-synthetic sequence derived from human genome
ACIPVFRLARRRKKILFYC

SEQ ID NO: 11576 - protein, 19 aa, Artificial Sequence
  Quasi-synthetic sequence derived from human genome
IKHFLRKIIMVHPKVRFHF

SEQ ID NO: 11577 - protein, 19 aa, Artificial Sequence
  Quasi-synthetic sequence derived from human genome
RSRRQGSRFLWLLKILVII

SEQ ID NO: 11578 - protein, 19 aa, Artificial Sequence
  Quasi-synthetic sequence derived from human genome
LFVFIYVQLWLVLRYRHKR

SEQ ID NO: 11579 - protein, 19 aa, Artificial Sequence
  Quasi-synthetic sequence derived from human genome
WFVNPLKTFVFFIWRRYWR

SEQ ID NO: 11580 - protein, 19 aa, Artificial Sequence
  Quasi-synthetic sequence derived from human genome
KQVRWKFIKRWKTRYFTLA

SEQ ID NO: 11581 - protein, 19 aa, Artificial Sequence
  Quasi-synthetic sequence derived from human genome
KLLLWACIVCVAFARKRRF

SEQ ID NO: 11582 - protein, 19 aa, Artificial Sequence
  Quasi-synthetic sequence derived from human genome
RHPAWWFMSVKVKLKRKKR

SEQ ID NO: 11583 - protein, 19 aa, Artificial Sequence
  Quasi-synthetic sequence derived from human genome
RKWLKMFKKRQLELYLPKF

SEQ ID NO: 11584 - protein, 19 aa, Artificial Sequence
  Quasi-synthetic sequence derived from human genome
PRRRTTRRWKRWFKFRKRK

SEQ ID NO: 11585 - protein, 19 aa, Artificial Sequence
  Quasi-synthetic sequence derived from human genome
IKFFLIDFIFKRCPRLRAK

SEQ ID NO: 11586 - protein, 19 aa, Artificial Sequence
  Quasi-synthetic sequence derived from human genome
LATWQVFYLRRFFKAKKLI

SEQ ID NO: 11587 - protein, 19 aa, Artificial Sequence
  Quasi-synthetic sequence derived from human genome
RVLSRTSKFRRLRQLLRRR

SEQ ID NO: 11588 - protein, 19 aa, Artificial Sequence
  Quasi-synthetic sequence derived from human genome
LLLLAILLFFAVKYLLRWK

SEQ ID NO: 11589 - protein, 19 aa, Artificial Sequence
  Quasi-synthetic sequence derived from human genome
MAVRIQRRWRGYRVRKYLF

SEQ ID NO: 11590 - protein, 19 aa, Artificial Sequence
  Quasi-synthetic sequence derived from human genome
GYLWAIGKNVWKRWKKRFF

SEQ ID NO: 11591 - protein, 19 aa, Artificial Sequence
  Quasi-synthetic sequence derived from human genome
VKKRKKVLSWPFLMRRLSP

SEQ ID NO: 11592 - protein, 19 aa, Artificial Sequence
  Quasi-synthetic sequence derived from human genome
IHLCCRRRRARLRFMKQFY

SEQ ID NO: 11593 - protein, 19 aa, Artificial Sequence
  Quasi-synthetic sequence derived from human genome
LRKYIYIRSCVVIIQKRFR

SEQ ID NO: 11594 - protein, 19 aa, Artificial Sequence
  Quasi-synthetic sequence derived from human genome
FFYPWFRKALKMMLFGKIF

SEQ ID NO: 11595 - protein, 19 aa, Artificial Sequence
  Quasi-synthetic sequence derived from human genome
LLLFQVIRLYQRRRWTIRA

SEQ ID NO: 11596 - protein, 19 aa, Artificial Sequence
  Quasi-synthetic sequence derived from human genome
RAFMNVKHWPWMKLFFKIK

SEQ ID NO: 11597 - protein, 19 aa, Artificial Sequence
  Quasi-synthetic sequence derived from human genome
NRIRFSKLLLKILFYISIF

SEQ ID NO: 11598 - protein, 19 aa, Artificial Sequence
  Quasi-synthetic sequence derived from human genome
LVGLLIFFLKRRNKKKQQK

SEQ ID NO: 11599 - protein, 19 aa, Artificial Sequence
  Quasi-synthetic sequence derived from human genome
SKKMWIKLRSLLRYMVKQL

SEQ ID NO: 11600 - protein, 19 aa, Artificial Sequence
  Quasi-synthetic sequence derived from human genome
VFFVLFVLSVHYLWKKWKK

SEQ ID NO: 11601 - protein, 19 aa, Artificial Sequence
  Quasi-synthetic sequence derived from human genome
WLRVRKARPQLILSRRPRR

SEQ ID NO: 11602 - protein, 19 aa, Artificial Sequence
  Quasi-synthetic sequence derived from human genome
TVIRAIRIMKFHVAKRKFK

SEQ ID NO: 11603 - protein, 19 aa, Artificial Sequence
  Quasi-synthetic sequence derived from human genome
RLLPRRLIAAWRDRLARRR

SEQ ID NO: 11604 - protein, 19 aa, Artificial Sequence
  Quasi-synthetic sequence derived from human genome
LKTVIRAIRIMKFHVAKRK

SEQ ID NO: 11605 - protein, 19 aa, Artificial Sequence
  Quasi-synthetic sequence derived from human genome
MRKKLILYFKRRNHARKQW

SEQ ID NO: 11606 - protein, 19 aa, Artificial Sequence
  Quasi-synthetic sequence derived from human genome
IKQIRARRKTARMLMIVLL

SEQ ID NO: 11607 - protein, 19 aa, Artificial Sequence
  Quasi-synthetic sequence derived from human genome
FVLFLRLRSIRCLRNIIHW

SEQ ID NO: 11608 - protein, 19 aa, Artificial Sequence
  Quasi-synthetic sequence derived from human genome
ILFKVFLFPRITISKKTKL

SEQ ID NO: 11609 - protein, 19 aa, Artificial Sequence
  Quasi-synthetic sequence derived from human genome
ILFAILLVLVFIKKVAKKP

SEQ ID NO: 11610 - protein, 19 aa, Artificial Sequence
  Quasi-synthetic sequence derived from human genome
KKIPLNALIRRFAHLLVKK

SEQ ID NO: 11611 - protein, 19 aa, Artificial Sequence
  Quasi-synthetic sequence derived from human genome
KCKALTKFKFVFFLRLSRA

SEQ ID NO: 11612 - protein, 19 aa, Artificial Sequence
  Quasi-synthetic sequence derived from human genome
RAGVTLRVLRMMRIFWVIK

SEQ ID NO: 11613 - protein, 19 aa, Artificial Sequence
  Quasi-synthetic sequence derived from human genome
LLFIGLGIFFCVRCRHRRR

SEQ ID NO: 11614 - protein, 19 aa, Artificial Sequence
  Quasi-synthetic sequence derived from human genome
KRMFRRIYRHLRPGGILVL

SEQ ID NO: 11615 - protein, 19 aa, Artificial Sequence
  Quasi-synthetic sequence derived from human genome
VRKKVLAPRVNLTFRKILL

SEQ ID NO: 11616 - protein, 19 aa, Artificial Sequence
  Quasi-synthetic sequence derived from human genome
RFRKYLRQLFHRRVAVHLV

SEQ ID NO: 11617 - protein, 19 aa, Artificial Sequence
  Quasi-synthetic sequence derived from human genome
KRRILFFVVTLVSVFLVWK

SEQ ID NO: 11618 - protein, 19 aa, Artificial Sequence
  Quasi-synthetic sequence derived from human genome
FYYLIMRIKMCLIKLCKSK

SEQ ID NO: 11619 - protein, 19 aa, Artificial Sequence
  Quasi-synthetic sequence derived from human genome
LGPARLCLRLLLLLGYRRR

SEQ ID NO: 11620 - protein, 19 aa, Artificial Sequence
  Quasi-synthetic sequence derived from human genome
FIFRKRRKNSGLWSFYFFF

SEQ ID NO: 11621 - protein, 19 aa, Artificial Sequence
  Quasi-synthetic sequence derived from human genome
IRKLYMKSLLKIFAWATLR

SEQ ID NO: 11622 - protein, 19 aa, Artificial Sequence
  Quasi-synthetic sequence derived from human genome
PYPLVRRRKRRFFGLCCLI

SEQ ID NO: 11623 - protein, 19 aa, Artificial Sequence
  Quasi-synthetic sequence derived from human genome
IWLRLRGLRKYKKTSQRLR

SEQ ID NO: 11624 - protein, 19 aa, Artificial Sequence
  Quasi-synthetic sequence derived from human genome
FKPWKGLQTNFRLLKRRLR

SEQ ID NO: 11625 - protein, 19 aa, Artificial Sequence
  Quasi-synthetic sequence derived from human genome
IAKVKMKFRFLGKLMAKAI

SEQ ID NO: 11626 - protein, 19 aa, Artificial Sequence
  Quasi-synthetic sequence derived from human genome
LLVLIVLLLLPFRCQRRPR

SEQ ID NO: 11627 - protein, 19 aa, Artificial Sequence
  Quasi-synthetic sequence derived from human genome
IFIRILGILLSKLRTRQMR

SEQ ID NO: 11628 - protein, 19 aa, Artificial Sequence
  Quasi-synthetic sequence derived from human genome
WRQSSILRRWKRNWFALWL

SEQ ID NO: 11629 - protein, 19 aa, Artificial Sequence
  Quasi-synthetic sequence derived from human genome
WLWRQSSILRRWKRNWFAL

SEQ ID NO: 11630 - protein, 19 aa, Artificial Sequence
  Quasi-synthetic sequence derived from human genome
IRQIRRPKNVVLRLAVKFF

SEQ ID NO: 11631 - protein, 19 aa, Artificial Sequence
  Quasi-synthetic sequence derived from human genome
LRYRPKVKFLFGIWPVILF

SEQ ID NO: 11632 - protein, 19 aa, Artificial Sequence
  Quasi-synthetic sequence derived from human genome
RKKHLQRPIFRLRCLVKQL

SEQ ID NO: 11633 - protein, 19 aa, Artificial Sequence
  Quasi-synthetic sequence derived from human genome
FWIRLRKHNVTFSKLMRRM

SEQ ID NO: 11634 - protein, 19 aa, Artificial Sequence
  Quasi-synthetic sequence derived from human genome
RAWLARRRFQSIRRFVLNI

SEQ ID NO: 11635 - protein, 19 aa, Artificial Sequence
  Quasi-synthetic sequence derived from human genome
FFRKLLVNKSIRQRRRFTV

SEQ ID NO: 11636 - protein, 19 aa, Artificial Sequence
  Quasi-synthetic sequence derived from human genome
RKLSVLLLLLGRRRVDFRL

SEQ ID NO: 11637 - protein, 19 aa, Artificial Sequence
  Quasi-synthetic sequence derived from human genome
RALLLWGRRLRPLLRAPAL

SEQ ID NO: 11638 - protein, 19 aa, Artificial Sequence
  Quasi-synthetic sequence derived from human genome
IFLGLYINFRHLYKQRRRR

SEQ ID NO: 11639 - protein, 19 aa, Artificial Sequence
  Quasi-synthetic sequence derived from human genome
RYFLWHTYRWLLLKLLLLL

SEQ ID NO: 11640 - protein, 19 aa, Artificial Sequence
  Quasi-synthetic sequence derived from human genome
FWKLVNKKWMLTLLRIITI

SEQ ID NO: 11641 - protein, 19 aa, Artificial Sequence
  Quasi-synthetic sequence derived from human genome
FKFLYIITKVRGYKTFLRL

SEQ ID NO: 11642 - protein, 19 aa, Artificial Sequence
  Quasi-synthetic sequence derived from human genome
YKVLYRVALAILKFFHKVR

SEQ ID NO: 11643 - protein, 19 aa, Artificial Sequence
  Quasi-synthetic sequence derived from human genome
LHSKVILAIRRAKNLRRLL

SEQ ID NO: 11644 - protein, 19 aa, Artificial Sequence
  Quasi-synthetic sequence derived from human genome
LFLRRLRLWMGLSKVKEFR

SEQ ID NO: 11645 - protein, 19 aa, Artificial Sequence
  Quasi-synthetic sequence derived from human genome
LRAFCGILYMKPRMKIFLR

SEQ ID NO: 11646 - protein, 19 aa, Artificial Sequence
  Quasi-synthetic sequence derived from human genome
LKSFLILPFQRITRLKLLL

SEQ ID NO: 11647 - protein, 19 aa, Artificial Sequence
  Quasi-synthetic sequence derived from human genome
FIVISHLRLLLRQLCRRPR

SEQ ID NO: 11648 - protein, 19 aa, Artificial Sequence
  Quasi-synthetic sequence derived from human genome
LWYMKMMWAWLQAKRKPRK

SEQ ID NO: 11649 - protein, 19 aa, Artificial Sequence
  Quasi-synthetic sequence derived from human genome
WKIARKWMRRKMGKWPAVV

SEQ ID NO: 11650 - protein, 19 aa, Artificial Sequence
  Quasi-synthetic sequence derived from human genome
RLRVNLRLVINRLKLLEKK

SEQ ID NO: 11651 - protein, 19 aa, Artificial Sequence
  Quasi-synthetic sequence derived from human genome
RHLPRVAGHIKKRLFMFRF

SEQ ID NO: 11652 - protein, 19 aa, Artificial Sequence
  Quasi-synthetic sequence derived from human genome
IIRLPLRLINISHLIRKIL

SEQ ID NO: 11653 - protein, 19 aa, Artificial Sequence
  Quasi-synthetic sequence derived from human genome
LYNFSKLKKSRKWLKSILL

SEQ ID NO: 11654 - protein, 19 aa, Artificial Sequence
  Quasi-synthetic sequence derived from human genome
WRMRVALARALFIRPFMLL

SEQ ID NO: 11655 - protein, 19 aa, Artificial Sequence
  Quasi-synthetic sequence derived from human genome
RTKVKTIKMFLILNLLFLL

SEQ ID NO: 11656 - protein, 19 aa, Artificial Sequence
  Quasi-synthetic sequence derived from human genome
RRRLIPHPRRLSPVVIRRI

SEQ ID NO: 11657 - protein, 19 aa, Artificial Sequence
  Quasi-synthetic sequence derived from human genome
LLLLYKRHKGRKLTVPVRR

SEQ ID NO: 11658 - protein, 19 aa, Artificial Sequence
  Quasi-synthetic sequence derived from human genome
LRYWLHYLHPILRRQRLRY

SEQ ID NO: 11659 - protein, 19 aa, Artificial Sequence
  Quasi-synthetic sequence derived from human genome
ARRRRLGVHLLHRALLVFL

SEQ ID NO: 11660 - protein, 19 aa, Artificial Sequence
  Quasi-synthetic sequence derived from human genome
MRFRIYKRKVLILTLVVAA

SEQ ID NO: 11661 - protein, 19 aa, Artificial Sequence
  Quasi-synthetic sequence derived from human genome
VLVRGLLLLIPFLILLRKL

SEQ ID NO: 11662 - protein, 19 aa, Artificial Sequence
  Quasi-synthetic sequence derived from human genome
LWLRWRILRLFPWILLGSL

SEQ ID NO: 11663 - protein, 19 aa, Artificial Sequence
  Quasi-synthetic sequence derived from human genome
FFLTSRTRALLRRFPRMLL

SEQ ID NO: 11664 - protein, 19 aa, Artificial Sequence
  Quasi-synthetic sequence derived from human genome
PYLLGRKRRWSKCKIRVFV

SEQ ID NO: 11665 - protein, 19 aa, Artificial Sequence
  Quasi-synthetic sequence derived from human genome
FAFRRKLKIQQSYKKLLRK

SEQ ID NO: 11666 - protein, 19 aa, Artificial Sequence
  Quasi-synthetic sequence derived from human genome
LRKRFGGRRIRLYLSVLSL

SEQ ID NO: 11667 - protein, 19 aa, Artificial Sequence
  Quasi-synthetic sequence derived from human genome
YLVKMGGKIKSWKKRWFVF

SEQ ID NO: 11668 - protein, 19 aa, Artificial Sequence
  Quasi-synthetic sequence derived from human genome
FRLKKVVKWYLSGFYKKPK

SEQ ID NO: 11669 - protein, 19 aa, Artificial Sequence
  Quasi-synthetic sequence derived from human genome
LRLLLFFRFKRTLDRICVL

SEQ ID NO: 11670 - protein, 19 aa, Artificial Sequence
  Quasi-synthetic sequence derived from human genome
RLLLVHGRWSYIRMCKFLR

SEQ ID NO: 11671 - protein, 19 aa, Artificial Sequence
  Quasi-synthetic sequence derived from human genome
GRRFRSLKMWFVFRMYGVK

SEQ ID NO: 11672 - protein, 19 aa, Artificial Sequence
  Quasi-synthetic sequence derived from human genome
QLKRMKIIKHFIKIALHCR

SEQ ID NO: 11673 - protein, 19 aa, Artificial Sequence
  Quasi-synthetic sequence derived from human genome
LVLKTLIQFTVKLRLLIKL

SEQ ID NO: 11674 - protein, 19 aa, Artificial Sequence
  Quasi-synthetic sequence derived from human genome
KKSRKKMCILVLVLSVIIL

SEQ ID NO: 11675 - protein, 19 aa, Artificial Sequence
  Quasi-synthetic sequence derived from human genome
LLLLLYKYKQKPKYQVRWK

SEQ ID NO: 11676 - protein, 19 aa, Artificial Sequence
  Quasi-synthetic sequence derived from human genome
KEQKLLKRLRLLPALLILR

SEQ ID NO: 11677 - protein, 19 aa, Artificial Sequence
  Quasi-synthetic sequence derived from human genome
LVIGLVLCKRKRRTKTIRR

SEQ ID NO: 11678 - protein, 19 aa, Artificial Sequence
  Quasi-synthetic sequence derived from human genome
RLARIGRILRLIKGAKGIR

SEQ ID NO: 11679 - protein, 19 aa, Artificial Sequence
  Quasi-synthetic sequence derived from human genome
FFLRKFRNSRFLGGKARRI

SEQ ID NO: 11680 - protein, 19 aa, Artificial Sequence
  Quasi-synthetic sequence derived from human genome
IRLGIFLRRYPIARVFVII

SEQ ID NO: 11681 - protein, 19 aa, Artificial Sequence
  Quasi-synthetic sequence derived from human genome
IVLGFLFKRFLRIQRLFPP

SEQ ID NO: 11682 - protein, 19 aa, Artificial Sequence
  Quasi-synthetic sequence derived from human genome
RKLRRACLVVSLCISWRRR

SEQ ID NO: 11683 - protein, 19 aa, Artificial Sequence
  Quasi-synthetic sequence derived from human genome
LARKECLKFLIKRLAKIVR

SEQ ID NO: 11684 - protein, 19 aa, Artificial Sequence
  Quasi-synthetic sequence derived from human genome
RRLQHRLRLRAQMRLRRLN

SEQ ID NO: 11685 - protein, 19 aa, Artificial Sequence
  Quasi-synthetic sequence derived from human genome
GKLGLLEFKILWKKLKKWM

SEQ ID NO: 11686 - protein, 19 aa, Artificial Sequence
  Quasi-synthetic sequence derived from human genome
FQKLLKLFYIKKLKPLYNY

SEQ ID NO: 11687 - protein, 19 aa, Artificial Sequence
  Quasi-synthetic sequence derived from human genome
RRKKKCKICKLRSFFRKLN

SEQ ID NO: 11688 - protein, 19 aa, Artificial Sequence
  Quasi-synthetic sequence derived from human genome
LLRFRKQRKKMAKLPKPVV

SEQ ID NO: 11689 - protein, 19 aa, Artificial Sequence
  Quasi-synthetic sequence derived from human genome
RKNRSRIPLLRKRRFQLYR

SEQ ID NO: 11690 - protein, 19 aa, Artificial Sequence
  Quasi-synthetic sequence derived from human genome
LTVLVIICYKAIKRKPLRK

SEQ ID NO: 11691 - protein, 19 aa, Artificial Sequence
  Quasi-synthetic sequence derived from human genome
KQKVKYLTFRFIFALRLSK

SEQ ID NO: 11692 - protein, 19 aa, Artificial Sequence
  Quasi-synthetic sequence derived from human genome
WALFFRRPKASLPRVFVLR

SEQ ID NO: 11693 - protein, 19 aa, Artificial Sequence
  Quasi-synthetic sequence derived from human genome
LLRHLVPAAALRRKRKALW

SEQ ID NO: 11694 - protein, 19 aa, Artificial Sequence
  Quasi-synthetic sequence derived from human genome
RLLLVHGRWSYVRICKFLR

SEQ ID NO: 11695 - protein, 19 aa, Artificial Sequence
  Quasi-synthetic sequence derived from human genome
RILRLIRGAKGIRTLLFAL

SEQ ID NO: 11696 - protein, 19 aa, Artificial Sequence
  Quasi-synthetic sequence derived from human genome
FGISVLRALRLLRIFKVTK

SEQ ID NO: 11697 - protein, 19 aa, Artificial Sequence
  Quasi-synthetic sequence derived from human genome
LIMCNIKLLKALRVRKKMS

SEQ ID NO: 11698 - protein, 19 aa, Artificial Sequence
  Quasi-synthetic sequence derived from human genome
KKLKILGMPFRNIRSILKM

SEQ ID NO: 11699 - protein, 19 aa, Artificial Sequence
  Quasi-synthetic sequence derived from human genome
LVLKRLGFKGVWKGLFARI

SEQ ID NO: 11700 - protein, 19 aa, Artificial Sequence
  Quasi-synthetic sequence derived from human genome
LFKRRRVLNRERRLRHRVV

SEQ ID NO: 11701 - protein, 19 aa, Artificial Sequence
  Quasi-synthetic sequence derived from human genome
KLVFLPLRLVWKEVILRKI

SEQ ID NO: 11702 - protein, 19 aa, Artificial Sequence
  Quasi-synthetic sequence derived from human genome
KPLRRRVIWLIGQWISVKF

SEQ ID NO: 11703 - protein, 19 aa, Artificial Sequence
  Quasi-synthetic sequence derived from human genome
LTALWYRRQRLLARTLRLW

SEQ ID NO: 11704 - protein, 19 aa, Artificial Sequence
  Quasi-synthetic sequence derived from human genome
LFLKLRWRITGLIPWLLWL

SEQ ID NO: 11705 - protein, 19 aa, Artificial Sequence
  Quasi-synthetic sequence derived from human genome
RPPVPPPPRRRRRRRLLFW

SEQ ID NO: 11706 - protein, 19 aa, Artificial Sequence
  Quasi-synthetic sequence derived from human genome
RFLCGKEIKKKKCIFRLRI

SEQ ID NO: 11707 - protein, 19 aa, Artificial Sequence
  Quasi-synthetic sequence derived from human genome
RFLKLKYYSIILQSRIRMI

SEQ ID NO: 11708 - protein, 19 aa, Artificial Sequence
  Quasi-synthetic sequence derived from human genome
IWRFAWRKSIKKYHAWRSR

SEQ ID NO: 11709 - protein, 19 aa, Artificial Sequence
  Quasi-synthetic sequence derived from human genome
RLLRALRVLYVMRLARHSL

SEQ ID NO: 11710 - protein, 19 aa, Artificial Sequence
  Quasi-synthetic sequence derived from human genome
QVKIWFQNRRMKKKRVVLR

SEQ ID NO: 11711 - protein, 19 aa, Artificial Sequence
  Quasi-synthetic sequence derived from human genome
KKQKIIKMLLIVALLFILS

SEQ ID NO: 11712 - protein, 19 aa, Artificial Sequence
  Quasi-synthetic sequence derived from human genome
WRPRRARGTPLLLLLLLLL

SEQ ID NO: 11713 - protein, 19 aa, Artificial Sequence
  Quasi-synthetic sequence derived from human genome
ILILAFWVLPKYKTRKAMR

SEQ ID NO: 11714 - protein, 19 aa, Artificial Sequence
  Quasi-synthetic sequence derived from human genome
LLAKVMRFERFGRRRVIIK

SEQ ID NO: 11715 - protein, 19 aa, Artificial Sequence
  Quasi-synthetic sequence derived from human genome
RVRLLKLKHERKALLALLL

SEQ ID NO: 11716 - protein, 19 aa, Artificial Sequence
  Quasi-synthetic sequence derived from human genome
RYLLYRAQRAIRLRHALRL

SEQ ID NO: 11717 - protein, 19 aa, Artificial Sequence
  Quasi-synthetic sequence derived from human genome
VGIGVLILLVRYRKCIKLK

SEQ ID NO: 11718 - protein, 19 aa, Artificial Sequence
  Quasi-synthetic sequence derived from human genome
LLVVAVFCILWNWNKRKKR

SEQ ID NO: 11719 - protein, 19 aa, Artificial Sequence
  Quasi-synthetic sequence derived from human genome
CIIILLILVLMFVVWMKRR

SEQ ID NO: 11720 - protein, 19 aa, Artificial Sequence
  Quasi-synthetic sequence derived from human genome
RKIMRFLRRCRHRVKELKK

SEQ ID NO: 11721 - protein, 19 aa, Artificial Sequence
  Quasi-synthetic sequence derived from human genome
KRRVFFRNIKILIPATWKA

SEQ ID NO: 11722 - protein, 19 aa, Artificial Sequence
  Quasi-synthetic sequence derived from human genome
KKRHRAVRVIFTIMIVYFL

SEQ ID NO: 11723 - protein, 19 aa, Artificial Sequence
  Quasi-synthetic sequence derived from human genome
FLNLQKKYPIKSRKLLRVL

SEQ ID NO: 11724 - protein, 19 aa, Artificial Sequence
  Quasi-synthetic sequence derived from human genome
KFKFFFQRNPYFRNKLIVK

SEQ ID NO: 11725 - protein, 19 aa, Artificial Sequence
  Quasi-synthetic sequence derived from human genome
KRLKTKAVRMIAIVLAIFL

SEQ ID NO: 11726 - protein, 19 aa, Artificial Sequence
  Quasi-synthetic sequence derived from human genome
LGVRVLLRFQRKLSVLLLL

SEQ ID NO: 11727 - protein, 19 aa, Artificial Sequence
  Quasi-synthetic sequence derived from human genome
LVVKKLRYYARFIVVCLLL

SEQ ID NO: 11728 - protein, 19 aa, Artificial Sequence
  Quasi-synthetic sequence derived from human genome
KIIMLNRRYLSFRVIKVNK

SEQ ID NO: 11729 - protein, 19 aa, Artificial Sequence
  Quasi-synthetic sequence derived from human genome
IMILVYLRIYLIAKRSNRR

SEQ ID NO: 11730 - protein, 19 aa, Artificial Sequence
  Quasi-synthetic sequence derived from human genome
KQLYAYKMLMAKKWVKFKR

SEQ ID NO: 11731 - protein, 19 aa, Artificial Sequence
  Quasi-synthetic sequence derived from human genome
RLPKTRSGKVMRRLLRKII

SEQ ID NO: 11732 - protein, 19 aa, Artificial Sequence
  Quasi-synthetic sequence derived from human genome
KKIKKVQSFMRGWLCRRKW

SEQ ID NO: 11733 - protein, 19 aa, Artificial Sequence
  Quasi-synthetic sequence derived from human genome
LAVRYNRVGILRRILRTLR

SEQ ID NO: 11734 - protein, 19 aa, Artificial Sequence
  Quasi-synthetic sequence derived from human genome
KKWCRSILRRTSLILARVF

SEQ ID NO: 11735 - protein, 19 aa, Artificial Sequence
  Quasi-synthetic sequence derived from human genome
NISRILKNLVFRILKKCYR

SEQ ID NO: 11736 - protein, 19 aa, Artificial Sequence
  Quasi-synthetic sequence derived from human genome
MLIITGLAYFLLSKRKKRK

SEQ ID NO: 11737 - protein, 19 aa, Artificial Sequence
  Quasi-synthetic sequence derived from human genome
KRLHRSLLNRIILAPMRFF

SEQ ID NO: 11738 - protein, 19 aa, Artificial Sequence
  Quasi-synthetic sequence derived from human genome
IKKGFLNWMNLWKFIKIRS

SEQ ID NO: 11739 - protein, 19 aa, Artificial Sequence
  Quasi-synthetic sequence derived from human genome
ALCLLLPLLLLGGWKRWRR

SEQ ID NO: 11740 - protein, 19 aa, Artificial Sequence
  Quasi-synthetic sequence derived from human genome
LRRLSSKKNIRKQRMKILF

SEQ ID NO: 11741 - protein, 19 aa, Artificial Sequence
  Quasi-synthetic sequence derived from human genome
RLPLLRRVLKGLQLLLSLL

SEQ ID NO: 11742 - protein, 19 aa, Artificial Sequence
  Quasi-synthetic sequence derived from human genome
FLRFKKGKRCSLVFGLIIM

SEQ ID NO: 11743 - protein, 19 aa, Artificial Sequence
  Quasi-synthetic sequence derived from human genome
VKIKKVLKSTKLKIFRGKR

SEQ ID NO: 11744 - protein, 19 aa, Artificial Sequence
  Quasi-synthetic sequence derived from human genome
RKRVNQLRGILKLLQLLKV

SEQ ID NO: 11745 - protein, 19 aa, Artificial Sequence
  Quasi-synthetic sequence derived from human genome
FVFFRKLTTIFPLNWKYRK

SEQ ID NO: 11746 - protein, 19 aa, Artificial Sequence
  Quasi-synthetic sequence derived from human genome
FAWLRRYIKWPLLPPKNIK

SEQ ID NO: 11747 - protein, 19 aa, Artificial Sequence
  Quasi-synthetic sequence derived from human genome
LLTLTILTIWLFKHRRVRF

SEQ ID NO: 11748 - protein, 19 aa, Artificial Sequence
  Quasi-synthetic sequence derived from human genome
FVGLAVFLIYKFKRKIPWI

SEQ ID NO: 11749 - protein, 19 aa, Artificial Sequence
  Quasi-synthetic sequence derived from human genome
RMPEKVTWMRRMRILRRLL

SEQ ID NO: 11750 - protein, 19 aa, Artificial Sequence
  Quasi-synthetic sequence derived from human genome
KMFRFFIRRMVKAQSFYWV

SEQ ID NO: 11751 - protein, 19 aa, Artificial Sequence
  Quasi-synthetic sequence derived from human genome
LRKIWVFLKTAFHARLRCM

SEQ ID NO: 11752 - protein, 19 aa, Artificial Sequence
  Quasi-synthetic sequence derived from human genome
ITAVLLVLIFVLRKRIKLT

SEQ ID NO: 11753 - protein, 19 aa, Artificial Sequence
  Quasi-synthetic sequence derived from human genome
LAIFLYLLRLRRIHHRQTR

SEQ ID NO: 11754 - protein, 19 aa, Artificial Sequence
  Quasi-synthetic sequence derived from human genome
RLWSHRSYKARLPLRLFLI

SEQ ID NO: 11755 - protein, 19 aa, Artificial Sequence
  Quasi-synthetic sequence derived from human genome
YKRKVLPLRLQNRLFVSWR

SEQ ID NO: 11756 - protein, 19 aa, Artificial Sequence
  Quasi-synthetic sequence derived from human genome
LSYRSLRRRVRRLRRLTAR

SEQ ID NO: 11757 - protein, 19 aa, Artificial Sequence
  Quasi-synthetic sequence derived from human genome
ARRRCRRVLYWIPVVFITL

SEQ ID NO: 11758 - protein, 19 aa, Artificial Sequence
  Quasi-synthetic sequence derived from human genome
IVILLVIVVLFVTLRRQKK

SEQ ID NO: 11759 - protein, 19 aa, Artificial Sequence
  Quasi-synthetic sequence derived from human genome
LWKVKKALKMTIFWRGLMP

SEQ ID NO: 11760 - protein, 19 aa, Artificial Sequence
  Quasi-synthetic sequence derived from human genome
IIIQRAYRRYLLKQKVKKV

SEQ ID NO: 11761 - protein, 19 aa, Artificial Sequence
  Quasi-synthetic sequence derived from human genome
RWVKTVFLKLLPQVLLMRW

SEQ ID NO: 11762 - protein, 19 aa, Artificial Sequence
  Quasi-synthetic sequence derived from human genome
WKKSRKLLGQRLFNKLMKM

SEQ ID NO: 11763 - protein, 19 aa, Artificial Sequence
  Quasi-synthetic sequence derived from human genome
WVKRCFLHKLPTFLFMKRP

SEQ ID NO: 11764 - protein, 19 aa, Artificial Sequence
  Quasi-synthetic sequence derived from human genome
WKFLLRLTKGKFAVMNRKV

SEQ ID NO: 11765 - protein, 19 aa, Artificial Sequence
  Quasi-synthetic sequence derived from human genome
LFVKLSRVVGRLRLVFTRV

SEQ ID NO: 11766 - protein, 19 aa, Artificial Sequence
  Quasi-synthetic sequence derived from human genome
TALWVLIAYILYRKKIFWK

SEQ ID NO: 11767 - protein, 19 aa, Artificial Sequence
  Quasi-synthetic sequence derived from human genome
RPLLTRFFKLQFFYVPVKR

SEQ ID NO: 11768 - protein, 19 aa, Artificial Sequence
  Quasi-synthetic sequence derived from human genome
RLWKRRWFVLSGHCLFYYK

SEQ ID NO: 11769 - protein, 19 aa, Artificial Sequence
  Quasi-synthetic sequence derived from human genome
LLLRLVCLKPPRRKKPACR

SEQ ID NO: 11770 - protein, 19 aa, Artificial Sequence
  Quasi-synthetic sequence derived from human genome
VLILLAIVVLFITLRRSKK

SEQ ID NO: 11771 - protein, 19 aa, Artificial Sequence
  Quasi-synthetic sequence derived from human genome
KKVQLVRLVGMMLLIFARK

SEQ ID NO: 11772 - protein, 19 aa, Artificial Sequence
  Quasi-synthetic sequence derived from human genome
FVLLFFVGCGVLLSRKRRR

SEQ ID NO: 11773 - protein, 19 aa, Artificial Sequence
  Quasi-synthetic sequence derived from human genome
KFRKYILQLFKTCRGLFVL

SEQ ID NO: 11774 - protein, 19 aa, Artificial Sequence
  Quasi-synthetic sequence derived from human genome
FKRKHFLIKLHANILVLCK

SEQ ID NO: 11775 - protein, 19 aa, Artificial Sequence
  Quasi-synthetic sequence derived from human genome
KRRFLKAWLEYLQVRRVKR

SEQ ID NO: 11776 - protein, 19 aa, Artificial Sequence
  Quasi-synthetic sequence derived from human genome
VFIYRLFWKSKDRPRRIRM

SEQ ID NO: 11777 - protein, 19 aa, Artificial Sequence
  Quasi-synthetic sequence derived from human genome
LLFRIVLKRRLNWIQWASL

SEQ ID NO: 11778 - protein, 19 aa, Artificial Sequence
  Quasi-synthetic sequence derived from human genome
KVLPCIVIKFRYLWLFWFL

SEQ ID NO: 11779 - protein, 19 aa, Artificial Sequence
  Quasi-synthetic sequence derived from human genome
RKRKRWLYWQPILTKMGFM

SEQ ID NO: 11780 - protein, 19 aa, Artificial Sequence
  Quasi-synthetic sequence derived from human genome
IFLATLACLCPVWRRRRKR

SEQ ID NO: 11781 - protein, 19 aa, Artificial Sequence
  Quasi-synthetic sequence derived from human genome
LALAIYALLSLWYLLRRRR

SEQ ID NO: 11782 - protein, 19 aa, Artificial Sequence
  Quasi-synthetic sequence derived from human genome
RLRFHKVKALPLVSWSRRL

SEQ ID NO: 11783 - protein, 19 aa, Artificial Sequence
  Quasi-synthetic sequence derived from human genome
ILGILVLLLLPVKKTQRRK

SEQ ID NO: 11784 - protein, 19 aa, Artificial Sequence
  Quasi-synthetic sequence derived from human genome
RILRLIKGAKGIRTLLFAL

SEQ ID NO: 11785 - protein, 19 aa, Artificial Sequence
  Quasi-synthetic sequence derived from human genome
RPFKASLLNIIKRWSLLFK

SEQ ID NO: 11786 - protein, 19 aa, Artificial Sequence
  Quasi-synthetic sequence derived from human genome
RTLHGLKLGALRKLRKWKK

SEQ ID NO: 11787 - protein, 19 aa, Artificial Sequence
  Quasi-synthetic sequence derived from human genome
RVSIAISRMKFLVRRWHRV

SEQ ID NO: 11788 - protein, 19 aa, Artificial Sequence
  Quasi-synthetic sequence derived from human genome
KRHRSSFRNRFPLLKVLIL

SEQ ID NO: 11789 - protein, 19 aa, Artificial Sequence
  Quasi-synthetic sequence derived from human genome
RSFMNVKHWPWMKLFFKIK

SEQ ID NO: 11790 - protein, 19 aa, Artificial Sequence
  Quasi-synthetic sequence derived from human genome
HYWKKVLPLLKIIKKKNSI

SEQ ID NO: 11791 - protein, 19 aa, Artificial Sequence
  Quasi-synthetic sequence derived from human genome
CLLLRVFRSGKRLKKTRKY

SEQ ID NO: 11792 - protein, 19 aa, Artificial Sequence
  Quasi-synthetic sequence derived from human genome
TIKLLPLRTFRVFRALKAI

SEQ ID NO: 11793 - protein, 19 aa, Artificial Sequence
  Quasi-synthetic sequence derived from human genome
LFFTILVLSYFRYMRIYRR

SEQ ID NO: 11794 - protein, 19 aa, Artificial Sequence
  Quasi-synthetic sequence derived from human genome
CLMSFFLLILSLRRHIRRM

SEQ ID NO: 11795 - protein, 19 aa, Artificial Sequence
  Quasi-synthetic sequence derived from human genome
RFPALVLYIVFIFAMKKKF

SEQ ID NO: 11796 - protein, 19 aa, Artificial Sequence
  Quasi-synthetic sequence derived from human genome
RFRKRDKVLFYGRKIMRKV

SEQ ID NO: 11797 - protein, 19 aa, Artificial Sequence
  Quasi-synthetic sequence derived from human genome
KKMKHLWFFLLLVAAPRWV

SEQ ID NO: 11798 - protein, 19 aa, Artificial Sequence
  Quasi-synthetic sequence derived from human genome
IMFLMLLRRFRSRYWSPGR

SEQ ID NO: 11799 - protein, 19 aa, Artificial Sequence
  Quasi-synthetic sequence derived from human genome
VILLAIVVLYVALRRQKKK

SEQ ID NO: 11800 - protein, 19 aa, Artificial Sequence
  Quasi-synthetic sequence derived from human genome
VLLALRFCGIYGYRLRRKW

SEQ ID NO: 11801 - protein, 19 aa, Artificial Sequence
  Quasi-synthetic sequence derived from human genome
HIVRFWAKHRWGLPLRVLK

SEQ ID NO: 11802 - protein, 19 aa, Artificial Sequence
  Quasi-synthetic sequence derived from human genome
LFILLCCLYRLCKKSKPIK

SEQ ID NO: 11803 - protein, 19 aa, Artificial Sequence
  Quasi-synthetic sequence derived from human genome
VRFWAKHRWGLPLRVLKPI

SEQ ID NO: 11804 - protein, 19 aa, Artificial Sequence
  Quasi-synthetic sequence derived from human genome
NVKHWPWMKLYFKIKPLLK

SEQ ID NO: 11805 - protein, 19 aa, Artificial Sequence
  Quasi-synthetic sequence derived from human genome
LVLLALLGVIIAKKYFFKK

SEQ ID NO: 11806 - protein, 19 aa, Artificial Sequence
  Quasi-synthetic sequence derived from human genome
FKAFRRTFKRKFKILKESW

SEQ ID NO: 11807 - protein, 19 aa, Artificial Sequence
  Quasi-synthetic sequence derived from human genome
KFYRGEFRWLWRQRIRLYL

SEQ ID NO: 11808 - protein, 19 aa, Artificial Sequence
  Quasi-synthetic sequence derived from human genome
VSRLWVLYKGVLKRLILLY

SEQ ID NO: 11809 - protein, 19 aa, Artificial Sequence
  Quasi-synthetic sequence derived from human genome
RMRTRLVRKRFLCLGWGLP

SEQ ID NO: 11810 - protein, 19 aa, Artificial Sequence
  Quasi-synthetic sequence derived from human genome
FSRNLILTYNLRKRIVFRK

SEQ ID NO: 11811 - protein, 19 aa, Artificial Sequence
  Quasi-synthetic sequence derived from human genome
LLLQKAWRGTLARWRCRRL

SEQ ID NO: 11812 - protein, 19 aa, Artificial Sequence
  Quasi-synthetic sequence derived from human genome
KRKWAAQTIRRLIRGFVLR

SEQ ID NO: 11813 - protein, 19 aa, Artificial Sequence
  Quasi-synthetic sequence derived from human genome
WRKRRWIEVYSLLRRAFLV

SEQ ID NO: 11814 - protein, 19 aa, Artificial Sequence
  Quasi-synthetic sequence derived from human genome
RFRKYLRHFFHRHLLMHLG

SEQ ID NO: 11815 - protein, 19 aa, Artificial Sequence
  Quasi-synthetic sequence derived from human genome
WKRLLIARRSRKGFFAQIV

SEQ ID NO: 11816 - protein, 19 aa, Artificial Sequence
  Quasi-synthetic sequence derived from human genome
KKAIKYQSKARRKLMFIII

SEQ ID NO: 11817 - protein, 19 aa, Artificial Sequence
  Quasi-synthetic sequence derived from human genome
LLLLGFFLWLKKRKQIKDL

SEQ ID NO: 11818 - protein, 19 aa, Artificial Sequence
  Quasi-synthetic sequence derived from human genome
RKQTFMAMLLKLRQRVLFL

SEQ ID NO: 11819 - protein, 19 aa, Artificial Sequence
  Quasi-synthetic sequence derived from human genome
KYLLSATKLRQFVILRKKK

SEQ ID NO: 11820 - protein, 19 aa, Artificial Sequence
  Quasi-synthetic sequence derived from human genome
KLMVQAWPFRRLPLRPLIK

SEQ ID NO: 11821 - protein, 19 aa, Artificial Sequence
  Quasi-synthetic sequence derived from human genome
WWLKLRPLMKILAKYKASY

SEQ ID NO: 11822 - protein, 19 aa, Artificial Sequence
  Quasi-synthetic sequence derived from human genome
YRLYMRQTIIKVIKFILII

SEQ ID NO: 11823 - protein, 19 aa, Artificial Sequence
  Quasi-synthetic sequence derived from human genome
LCLCLILLRVRSCRRKAAR

SEQ ID NO: 11824 - protein, 19 aa, Artificial Sequence
  Quasi-synthetic sequence derived from human genome
LLMNRRKFLYQFKNVRWAK

SEQ ID NO: 11825 - protein, 19 aa, Artificial Sequence
  Quasi-synthetic sequence derived from human genome
AIRIKKPIKTKFRLPVFNW

SEQ ID NO: 11826 - protein, 19 aa, Artificial Sequence
  Quasi-synthetic sequence derived from human genome
AAKLKRKYWWKNCKMMIML

SEQ ID NO: 11827 - protein, 19 aa, Artificial Sequence
  Quasi-synthetic sequence derived from human genome
SFGKLFRKSFLRNRLFRGL

SEQ ID NO: 11828 - protein, 19 aa, Artificial Sequence
  Quasi-synthetic sequence derived from human genome
RFMLLFSRQGKLRLQKWYL

SEQ ID NO: 11829 - protein, 19 aa, Artificial Sequence
  Quasi-synthetic sequence derived from human genome
LKRKKPFLHRRRRVRKRKH

SEQ ID NO: 11830 - protein, 19 aa, Artificial Sequence
  Quasi-synthetic sequence derived from human genome
FRRTLILSSGFRLVKKKLY

SEQ ID NO: 11831 - protein, 19 aa, Artificial Sequence
  Quasi-synthetic sequence derived from human genome
LKIVNFSRLIFHHLKRKAK

SEQ ID NO: 11832 - protein, 19 aa, Artificial Sequence
  Quasi-synthetic sequence derived from human genome
RYLLILSPLRYKLRMTPLR

SEQ ID NO: 11833 - protein, 19 aa, Artificial Sequence
  Quasi-synthetic sequence derived from human genome
KAKVNVNLLIFLLNKKFLR

SEQ ID NO: 11834 - protein, 19 aa, Artificial Sequence
  Quasi-synthetic sequence derived from human genome
YVQMRLKKHRWYKKILKSR

SEQ ID NO: 11835 - protein, 19 aa, Artificial Sequence
  Quasi-synthetic sequence derived from human genome
ITIPRKRMFTPRKLKLTLF

SEQ ID NO: 11836 - protein, 19 aa, Artificial Sequence
  Quasi-synthetic sequence derived from human genome
FVVVTRWRFKKAPLLLHYR

SEQ ID NO: 11837 - protein, 19 aa, Artificial Sequence
  Quasi-synthetic sequence derived from human genome
LSLLRLLRLSRLIRYIHQW

SEQ ID NO: 11838 - protein, 19 aa, Artificial Sequence
  Quasi-synthetic sequence derived from human genome
RYLRVKIPLRYKMVVTPRR

SEQ ID NO: 11839 - protein, 19 aa, Artificial Sequence
  Quasi-synthetic sequence derived from human genome
KLVLRRLRTIIRKKQKIQN

SEQ ID NO: 11840 - protein, 19 aa, Artificial Sequence
  Quasi-synthetic sequence derived from human genome
RMWRIRRRYCQVLNAVRII

SEQ ID NO: 11841 - protein, 19 aa, Artificial Sequence
  Quasi-synthetic sequence derived from human genome
RRRLGRLWNRLFHRPRAPR

SEQ ID NO: 11842 - protein, 19 aa, Artificial Sequence
  Quasi-synthetic sequence derived from human genome
LVLRRILRRAVRFSMEILK

SEQ ID NO: 11843 - protein, 19 aa, Artificial Sequence
  Quasi-synthetic sequence derived from human genome
VVALGIGLFMRRRHIVRKR

SEQ ID NO: 11844 - protein, 19 aa, Artificial Sequence
  Quasi-synthetic sequence derived from human genome
FLLRPRSHKSRVKGFLRLK

SEQ ID NO: 11845 - protein, 19 aa, Artificial Sequence
  Quasi-synthetic sequence derived from human genome
FLVIFYCYIRKRCLKLKSP

SEQ ID NO: 11846 - protein, 19 aa, Artificial Sequence
  Quasi-synthetic sequence derived from human genome
FLYKLAQLFRWIRKAAFSR

SEQ ID NO: 11847 - protein, 19 aa, Artificial Sequence
  Quasi-synthetic sequence derived from human genome
INRFLMRKRLLFPALVTLL

SEQ ID NO: 11848 - protein, 19 aa, Artificial Sequence
  Quasi-synthetic sequence derived from human genome
LGVMRMVKKRAIVKKLPIV

SEQ ID NO: 11849 - protein, 19 aa, Artificial Sequence
  Quasi-synthetic sequence derived from human genome
LRSFRLLRVFKLAKSWPTL

SEQ ID NO: 11850 - protein, 19 aa, Artificial Sequence
  Quasi-synthetic sequence derived from human genome
LYNWNLPPRRILFIKRFII

SEQ ID NO: 11851 - protein, 19 aa, Artificial Sequence
  Quasi-synthetic sequence derived from human genome
RRRRVLQTLVWFLLTLLLA

SEQ ID NO: 11852 - protein, 19 aa, Artificial Sequence
  Quasi-synthetic sequence derived from human genome
IRIVLFLQKVWRGTLARMR

SEQ ID NO: 11853 - protein, 19 aa, Artificial Sequence
  Quasi-synthetic sequence derived from human genome
LRRPRVRDRLPILLQRRMR

SEQ ID NO: 11854 - protein, 19 aa, Artificial Sequence
  Quasi-synthetic sequence derived from human genome
LLFLLLFLLLRHRHQSKHR

SEQ ID NO: 11855 - protein, 19 aa, Artificial Sequence
  Quasi-synthetic sequence derived from human genome
MHLCCRRRRARLRFMKQFY

SEQ ID NO: 11856 - protein, 19 aa, Artificial Sequence
  Quasi-synthetic sequence derived from human genome
FLYWRGRRIQNKRAMRRYL

SEQ ID NO: 11857 - protein, 19 aa, Artificial Sequence
  Quasi-synthetic sequence derived from human genome
LLRKLGVKLVQRLGLTFLK

SEQ ID NO: 11858 - protein, 19 aa, Artificial Sequence
  Quasi-synthetic sequence derived from human genome
RLFRAARLIKLLRQGYTIR

SEQ ID NO: 11859 - protein, 19 aa, Artificial Sequence
  Quasi-synthetic sequence derived from human genome
LLKMGSQVKTWKRRWFVLR

SEQ ID NO: 11860 - protein, 19 aa, Artificial Sequence
  Quasi-synthetic sequence derived from human genome
KLKWWIGYLQRKFKRNLSV

SEQ ID NO: 11861 - protein, 19 aa, Artificial Sequence
  Quasi-synthetic sequence derived from human genome
LYRKNRSRIPLLRKPWFQL

SEQ ID NO: 11862 - protein, 19 aa, Artificial Sequence
  Quasi-synthetic sequence derived from human genome
VAATLFWLLLTLFIRKMKR

SEQ ID NO: 11863 - protein, 19 aa, Artificial Sequence
  Quasi-synthetic sequence derived from human genome
FVIVLLALRLQRWHKSRLL

SEQ ID NO: 11864 - protein, 19 aa, Artificial Sequence
  Quasi-synthetic sequence derived from human genome
FKRKKLQLLTKKPLYLHLH

SEQ ID NO: 11865 - protein, 19 aa, Artificial Sequence
  Quasi-synthetic sequence derived from human genome
IIIFTVVLILLKMYNRKMR

SEQ ID NO: 11866 - protein, 19 aa, Artificial Sequence
  Quasi-synthetic sequence derived from human genome
FKKHFMALIFSAKRLKIIP

SEQ ID NO: 11867 - protein, 19 aa, Artificial Sequence
  Quasi-synthetic sequence derived from human genome
RKRCKREILKFAQYLLRLL

SEQ ID NO: 11868 - protein, 19 aa, Artificial Sequence
  Quasi-synthetic sequence derived from human genome
VLKIRRRKMNHHKYRKLVK

SEQ ID NO: 11869 - protein, 19 aa, Artificial Sequence
  Quasi-synthetic sequence derived from human genome
KFYVVIRRRPLFYVVSLLL

SEQ ID NO: 11870 - protein, 19 aa, Artificial Sequence
  Quasi-synthetic sequence derived from human genome
IARLVLKSKNGIHLRLRRL

SEQ ID NO: 11871 - protein, 19 aa, Artificial Sequence
  Quasi-synthetic sequence derived from human genome
IFITVKQRKQYRRLKKLMY

SEQ ID NO: 11872 - protein, 19 aa, Artificial Sequence
  Quasi-synthetic sequence derived from human genome
RFSRISMKLPRIPLRRQKL

SEQ ID NO: 11873 - protein, 19 aa, Artificial Sequence
  Quasi-synthetic sequence derived from human genome
LFRSRSKRRHRTVKLIFAI

SEQ ID NO: 11874 - protein, 19 aa, Artificial Sequence
  Quasi-synthetic sequence derived from human genome
FLRGLRYLHPLKKWPMRSR

SEQ ID NO: 11875 - protein, 19 aa, Artificial Sequence
  Quasi-synthetic sequence derived from human genome
PFRLIRKMFSFKVSRWMGL

SEQ ID NO: 11876 - protein, 19 aa, Artificial Sequence
  Quasi-synthetic sequence derived from human genome
RIIWHKFKQWVIPWHLNKR

SEQ ID NO: 11877 - protein, 19 aa, Artificial Sequence
  Quasi-synthetic sequence derived from human genome
MLALLVFILWKCGFFKRSR

SEQ ID NO: 11878 - protein, 19 aa, Artificial Sequence
  Quasi-synthetic sequence derived from human genome
KWKKFAKHMFFLSFCFYFF

SEQ ID NO: 11879 - protein, 19 aa, Artificial Sequence
  Quasi-synthetic sequence derived from human genome
FKPYVVRLAKLLRKRAKKN

SEQ ID NO: 11880 - protein, 19 aa, Artificial Sequence
  Quasi-synthetic sequence derived from human genome
RGWLVRKRFLEQRAKIRLL

SEQ ID NO: 11881 - protein, 19 aa, Artificial Sequence
  Quasi-synthetic sequence derived from human genome
VMILIKYRRLRIMTNIYLL

SEQ ID NO: 11882 - protein, 19 aa, Artificial Sequence
  Quasi-synthetic sequence derived from human genome
LTKIHFWLPVLKMIRKKQM

SEQ ID NO: 11883 - protein, 19 aa, Artificial Sequence
  Quasi-synthetic sequence derived from human genome
KARRKKIMIIICCVILGIV

SEQ ID NO: 11884 - protein, 19 aa, Artificial Sequence
  Quasi-synthetic sequence derived from human genome
LKRRVRSVILVILLGTLIF

SEQ ID NO: 11885 - protein, 19 aa, Artificial Sequence
  Quasi-synthetic sequence derived from human genome
LMVFVALLVFYITKRKKQR

SEQ ID NO: 11886 - protein, 19 aa, Artificial Sequence
  Quasi-synthetic sequence derived from human genome
RLARIGRVLRLIRGAKGIR

SEQ ID NO: 11887 - protein, 19 aa, Artificial Sequence
  Quasi-synthetic sequence derived from human genome
RLLRNKKRKARGTMVRWLR

SEQ ID NO: 11888 - protein, 19 aa, Artificial Sequence
  Quasi-synthetic sequence derived from human genome
ALARLCFLLGRLCSRRLKL

SEQ ID NO: 11889 - protein, 19 aa, Artificial Sequence
  Quasi-synthetic sequence derived from human genome
APWVKRLFLQKLPKLLCMK

SEQ ID NO: 11890 - protein, 19 aa, Artificial Sequence
  Quasi-synthetic sequence derived from human genome
FAYVLRRRRKKLPFRSKRQ

SEQ ID NO: 11891 - protein, 19 aa, Artificial Sequence
  Quasi-synthetic sequence derived from human genome
RARWLRGILLFLFTLKCVY

SEQ ID NO: 11892 - protein, 19 aa, Artificial Sequence
  Quasi-synthetic sequence derived from human genome
FKRTTFLKKHRMLGRLKYK

SEQ ID NO: 11893 - protein, 19 aa, Artificial Sequence
  Quasi-synthetic sequence derived from human genome
MKVDFIRLKSYRLRARLKR

SEQ ID NO: 11894 - protein, 19 aa, Artificial Sequence
  Quasi-synthetic sequence derived from human genome
KVLNMWCCCFFKRRKRKTI

SEQ ID NO: 11895 - protein, 19 aa, Artificial Sequence
  Quasi-synthetic sequence derived from human genome
VVFIICIVIAILLYKRKRA

SEQ ID NO: 11896 - protein, 19 aa, Artificial Sequence
  Quasi-synthetic sequence derived from human genome
LKWRVKKVVLVLLLVTSVF

SEQ ID NO: 11897 - protein, 19 aa, Artificial Sequence
  Quasi-synthetic sequence derived from human genome
KIIMLNRRHLSFRVIKVNR

SEQ ID NO: 11898 - protein, 19 aa, Artificial Sequence
  Quasi-synthetic sequence derived from human genome
VRKRTVWPRLARVLIVTLL

SEQ ID NO: 11899 - protein, 19 aa, Artificial Sequence
  Quasi-synthetic sequence derived from human genome
LRKLYVFRRSFLMTCISLR

SEQ ID NO: 11900 - protein, 19 aa, Artificial Sequence
  Quasi-synthetic sequence derived from human genome
LRLLRIFKVTKYWSSLRNL

SEQ ID NO: 11901 - protein, 19 aa, Artificial Sequence
  Quasi-synthetic sequence derived from human genome
LQRCFFLLKPFRARDWKRR

SEQ ID NO: 11902 - protein, 19 aa, Artificial Sequence
  Quasi-synthetic sequence derived from human genome
VIIVFAMIKIGQLFRKLIR

SEQ ID NO: 11903 - protein, 19 aa, Artificial Sequence
  Quasi-synthetic sequence derived from human genome
VQKKVALAKKLLAKLRFLA

SEQ ID NO: 11904 - protein, 19 aa, Artificial Sequence
  Quasi-synthetic sequence derived from human genome
LLYQFRMNFRRRRRLMELL

SEQ ID NO: 11905 - protein, 19 aa, Artificial Sequence
  Quasi-synthetic sequence derived from human genome
IRMRRIVFAGVILFRLLGV

SEQ ID NO: 11906 - protein, 19 aa, Artificial Sequence
  Quasi-synthetic sequence derived from human genome
SCLGFILAIPLRRKVKKLL

SEQ ID NO: 11907 - protein, 19 aa, Artificial Sequence
  Quasi-synthetic sequence derived from human genome
KGVLMFKKRRRRARKYTLV

SEQ ID NO: 11908 - protein, 19 aa, Artificial Sequence
  Quasi-synthetic sequence derived from human genome
FRARFRRLWPCGRRRRHRA

SEQ ID NO: 11909 - protein, 19 aa, Artificial Sequence
  Quasi-synthetic sequence derived from human genome
KGVLFRIFIIWAISSWFRR

SEQ ID NO: 11910 - protein, 19 aa, Artificial Sequence
  Quasi-synthetic sequence derived from human genome
RLYYKLGRKLCRRDYLRLF

SEQ ID NO: 11911 - protein, 19 aa, Artificial Sequence
  Quasi-synthetic sequence derived from human genome
IRLMLKYQKILWKVPSFLI

SEQ ID NO: 11912 - protein, 19 aa, Artificial Sequence
  Quasi-synthetic sequence derived from human genome
LMKQRRKPPGFLALVKLLR

SEQ ID NO: 11913 - protein, 19 aa, Artificial Sequence
  Quasi-synthetic sequence derived from human genome
FLKQRPTKLKSLIRLVKHW

SEQ ID NO: 11914 - protein, 19 aa, Artificial Sequence
  Quasi-synthetic sequence derived from human genome
KSSRPRVLLRWWLGWRQLL

SEQ ID NO: 11915 - protein, 19 aa, Artificial Sequence
  Quasi-synthetic sequence derived from human genome
RHRCRKRKPLLAIGFYLYR

SEQ ID NO: 11916 - protein, 19 aa, Artificial Sequence
  Quasi-synthetic sequence derived from human genome
IISKYRVRIRSKKWYSILV

SEQ ID NO: 11917 - protein, 19 aa, Artificial Sequence
  Quasi-synthetic sequence derived from human genome
FIPFFKYCLLRKSFTCWKK

SEQ ID NO: 11918 - protein, 19 aa, Artificial Sequence
  Quasi-synthetic sequence derived from human genome
RKLIQFGLMKNLIRRLQKY

SEQ ID NO: 11919 - protein, 19 aa, Artificial Sequence
  Quasi-synthetic sequence derived from human genome
IRKLRCYLKEMKNLRKLVF

SEQ ID NO: 11920 - protein, 19 aa, Artificial Sequence
  Quasi-synthetic sequence derived from human genome
FVISITTIIVIFLNRRRRR

SEQ ID NO: 11921 - protein, 19 aa, Artificial Sequence
  Quasi-synthetic sequence derived from human genome
KVIRMLIMPRRNFPIAMIR

SEQ ID NO: 11922 - protein, 19 aa, Artificial Sequence
  Quasi-synthetic sequence derived from human genome
LLLCLLHKRRRALGLHGKK

SEQ ID NO: 11923 - protein, 19 aa, Artificial Sequence
  Quasi-synthetic sequence derived from human genome
ALHRMWIQAVKKLRRWKGR

SEQ ID NO: 11924 - protein, 19 aa, Artificial Sequence
  Quasi-synthetic sequence derived from human genome
RTIARLRLKKIFSGVFVKV

SEQ ID NO: 11925 - protein, 19 aa, Artificial Sequence
  Quasi-synthetic sequence derived from human genome
IFLAHHFKRKRGKKKGKIL

SEQ ID NO: 11926 - protein, 19 aa, Artificial Sequence
  Quasi-synthetic sequence derived from human genome
INRKLKKHLCLYLALKPRM

SEQ ID NO: 11927 - protein, 19 aa, Artificial Sequence
  Quasi-synthetic sequence derived from human genome
GFRWLIFRIMLGAGLIKIR

SEQ ID NO: 11928 - protein, 19 aa, Artificial Sequence
  Quasi-synthetic sequence derived from human genome
RKVLKLLLVAWDRRLIFAI

SEQ ID NO: 11929 - protein, 19 aa, Artificial Sequence
  Quasi-synthetic sequence derived from human genome
RVLRRLPNRIPSLRMLRSF

SEQ ID NO: 11930 - protein, 19 aa, Artificial Sequence
  Quasi-synthetic sequence derived from human genome
MPQKRLKRTLIRKVFNLYL

SEQ ID NO: 11931 - protein, 19 aa, Artificial Sequence
  Quasi-synthetic sequence derived from human genome
RICRPLLIVEKQKLLLKKR

SEQ ID NO: 11932 - protein, 19 aa, Artificial Sequence
  Quasi-synthetic sequence derived from human genome
LVRIFRKKKRICHSFSSLF

SEQ ID NO: 11933 - protein, 19 aa, Artificial Sequence
  Quasi-synthetic sequence derived from human genome
KLISRIWVYNHYRWIIWKL

SEQ ID NO: 11934 - protein, 19 aa, Artificial Sequence
  Quasi-synthetic sequence derived from human genome
SLRKKRLKKFPWSLWVWTT

SEQ ID NO: 11935 - protein, 19 aa, Artificial Sequence
  Quasi-synthetic sequence derived from human genome
LKLGPIKKKDLKKLVLYLK

SEQ ID NO: 11936 - protein, 19 aa, Artificial Sequence
  Quasi-synthetic sequence derived from human genome
WRRRPKRLSAVVCALLWVL

SEQ ID NO: 11937 - protein, 19 aa, Artificial Sequence
  Quasi-synthetic sequence derived from human genome
FSPTLFRVIRLARIGRILR

SEQ ID NO: 11938 - protein, 19 aa, Artificial Sequence
  Quasi-synthetic sequence derived from human genome
IFNRPWFLRTMVRYRLTKI

SEQ ID NO: 11939 - protein, 19 aa, Artificial Sequence
  Quasi-synthetic sequence derived from human genome
KGKVIKLLKEKFHFKKIIM

SEQ ID NO: 11940 - protein, 19 aa, Artificial Sequence
  Quasi-synthetic sequence derived from human genome
KKFGWVKKYVIVSSKKILF

SEQ ID NO: 11941 - protein, 19 aa, Artificial Sequence
  Quasi-synthetic sequence derived from human genome
FRYLGKRNIIRKIAAAFKF

SEQ ID NO: 11942 - protein, 19 aa, Artificial Sequence
  Quasi-synthetic sequence derived from human genome
RKLGIFRRCWLVFKKASSK

SEQ ID NO: 11943 - protein, 19 aa, Artificial Sequence
  Quasi-synthetic sequence derived from human genome
LLLLLLISLLCLYWKARKL

SEQ ID NO: 11944 - protein, 19 aa, Artificial Sequence
  Quasi-synthetic sequence derived from human genome
LVHSFLKKLLGKKLTRCLK

SEQ ID NO: 11945 - protein, 19 aa, Artificial Sequence
  Quasi-synthetic sequence derived from human genome
KIFKKLPGFKKIHVLGFRP

SEQ ID NO: 11946 - protein, 19 aa, Artificial Sequence
  Quasi-synthetic sequence derived from human genome
RWRTKHILSYALCLLKKLI

SEQ ID NO: 11947 - protein, 19 aa, Artificial Sequence
  Quasi-synthetic sequence derived from human genome
LKRRVKSVILVMLLGPLLF

SEQ ID NO: 11948 - protein, 19 aa, Artificial Sequence
  Quasi-synthetic sequence derived from human genome
LLIWRCLFHLPIALLLKLR

SEQ ID NO: 11949 - protein, 19 aa, Artificial Sequence
  Quasi-synthetic sequence derived from human genome
LLKDKFIPKRIIIIARYYR

SEQ ID NO: 11950 - protein, 19 aa, Artificial Sequence
  Quasi-synthetic sequence derived from human genome
LLPLRMPLSRWQRRLRRAA

SEQ ID NO: 11951 - protein, 19 aa, Artificial Sequence
  Quasi-synthetic sequence derived from human genome
LLRRKVRLAQPYVGVFLKR

SEQ ID NO: 11952 - protein, 19 aa, Artificial Sequence
  Quasi-synthetic sequence derived from human genome
LLKPIVKQIRRPKHVVVKF

SEQ ID NO: 11953 - protein, 19 aa, Artificial Sequence
  Quasi-synthetic sequence derived from human genome
KFLRNKAIIRHRPALVKVI

SEQ ID NO: 11954 - protein, 19 aa, Artificial Sequence
  Quasi-synthetic sequence derived from human genome
RLGIHLIRRKIVKPKHHVL

SEQ ID NO: 11955 - protein, 19 aa, Artificial Sequence
  Quasi-synthetic sequence derived from human genome
LRLCRPYRLAAGVKFRVLR

SEQ ID NO: 11956 - protein, 19 aa, Artificial Sequence
  Quasi-synthetic sequence derived from human genome
IGWRIRKKYFLMKIKNQPK

SEQ ID NO: 11957 - protein, 19 aa, Artificial Sequence
  Quasi-synthetic sequence derived from human genome
KINKKLKSITMLRKKIVHF

SEQ ID NO: 11958 - protein, 19 aa, Artificial Sequence
  Quasi-synthetic sequence derived from human genome
LLLSALGLIICCVKKKKKK

SEQ ID NO: 11959 - protein, 19 aa, Artificial Sequence
  Quasi-synthetic sequence derived from human genome
SKLATLGRIFKPWKWRKKK

SEQ ID NO: 11960 - protein, 19 aa, Artificial Sequence
  Quasi-synthetic sequence derived from human genome
IPRLEKILRNKAKIKFIIK

SEQ ID NO: 11961 - protein, 19 aa, Artificial Sequence
  Quasi-synthetic sequence derived from human genome
LLKTARLLRLVRVARKLDR

SEQ ID NO: 11962 - protein, 19 aa, Artificial Sequence
  Quasi-synthetic sequence derived from human genome
LLAVLVFVMYRMGFFKRVR

SEQ ID NO: 11963 - protein, 19 aa, Artificial Sequence
  Quasi-synthetic sequence derived from human genome
RRRALARLVLRLNAPLWAL

SEQ ID NO: 11964 - protein, 19 aa, Artificial Sequence
  Quasi-synthetic sequence derived from human genome
FIGGSFILKKKGLLRLARK

SEQ ID NO: 11965 - protein, 19 aa, Artificial Sequence
  Quasi-synthetic sequence derived from human genome
RQVSRSPRVRLLLLLLLLL

SEQ ID NO: 11966 - protein, 19 aa, Artificial Sequence
  Quasi-synthetic sequence derived from human genome
LLWFRRLYIIFSRYMRINS

SEQ ID NO: 11967 - protein, 19 aa, Artificial Sequence
  Quasi-synthetic sequence derived from human genome
VSLIFLTYVLSFIFRKWRK

SEQ ID NO: 11968 - protein, 19 aa, Artificial Sequence
  Quasi-synthetic sequence derived from human genome
KLINALRRCFFWRFMFYGI

SEQ ID NO: 11969 - protein, 19 aa, Artificial Sequence
  Quasi-synthetic sequence derived from human genome
PSLRIARFRFRAFHFLNRF

SEQ ID NO: 11970 - protein, 19 aa, Artificial Sequence
  Quasi-synthetic sequence derived from human genome
KKILQLIKSQKFLNKLVIL

SEQ ID NO: 11971 - protein, 19 aa, Artificial Sequence
  Quasi-synthetic sequence derived from human genome
FKLLLHRPFFRCAILMFQR

SEQ ID NO: 11972 - protein, 19 aa, Artificial Sequence
  Quasi-synthetic sequence derived from human genome
IFYLRNMKKKYTKMVKLLH

SEQ ID NO: 11973 - protein, 19 aa, Artificial Sequence
  Quasi-synthetic sequence derived from human genome
FVKHRPTKLKSLLRLVKHW

SEQ ID NO: 11974 - protein, 19 aa, Artificial Sequence
  Quasi-synthetic sequence derived from human genome
CFLLPSLFHLRLLWRKLLW

SEQ ID NO: 11975 - protein, 19 aa, Artificial Sequence
  Quasi-synthetic sequence derived from human genome
LVKRKRTKGKKLLLSIGVL

SEQ ID NO: 11976 - protein, 19 aa, Artificial Sequence
  Quasi-synthetic sequence derived from human genome
LKWLREILICRNKFLLKNK

SEQ ID NO: 11977 - protein, 19 aa, Artificial Sequence
  Quasi-synthetic sequence derived from human genome
MRAKWRKKRMRRLKRKRRK

SEQ ID NO: 11978 - protein, 19 aa, Artificial Sequence
  Quasi-synthetic sequence derived from human genome
KPTRYQKIMKRLIKRYVLK

SEQ ID NO: 11979 - protein, 19 aa, Artificial Sequence
  Quasi-synthetic sequence derived from human genome
LVLYIRKKKRLEKLRHQLM

SEQ ID NO: 11980 - protein, 19 aa, Artificial Sequence
  Quasi-synthetic sequence derived from human genome
KLFRAARLIKLLRQGYTIR

SEQ ID NO: 11981 - protein, 19 aa, Artificial Sequence
  Quasi-synthetic sequence derived from human genome
LWTRLRTLRAPELRRLRRR

SEQ ID NO: 11982 - protein, 19 aa, Artificial Sequence
  Quasi-synthetic sequence derived from human genome
VVYPLKFFFLRTRRFALMV

SEQ ID NO: 11983 - protein, 19 aa, Artificial Sequence
  Quasi-synthetic sequence derived from human genome
LKRRVKSVVLVILLGPLLF

SEQ ID NO: 11984 - protein, 19 aa, Artificial Sequence
  Quasi-synthetic sequence derived from human genome
RKRITGRKRLSKGFWSLLF

SEQ ID NO: 11985 - protein, 19 aa, Artificial Sequence
  Quasi-synthetic sequence derived from human genome
IIKFVKPFVHLIRRAINKY

SEQ ID NO: 11986 - protein, 19 aa, Artificial Sequence
  Quasi-synthetic sequence derived from human genome
FRVFHLSLWRLMKKVQITK

SEQ ID NO: 11987 - protein, 19 aa, Artificial Sequence
  Quasi-synthetic sequence derived from human genome
AFMLFRKRLGSMILAFRPR

SEQ ID NO: 11988 - protein, 19 aa, Artificial Sequence
  Quasi-synthetic sequence derived from human genome
KNHKKAKAIKLILLVVIVF

SEQ ID NO: 11989 - protein, 19 aa, Artificial Sequence
  Quasi-synthetic sequence derived from human genome
KKKWKKTCCLPSFVIFLFI

SEQ ID NO: 11990 - protein, 19 aa, Artificial Sequence
  Quasi-synthetic sequence derived from human genome
IKIYIVLRRRRKRVNTKRS

SEQ ID NO: 11991 - protein, 19 aa, Artificial Sequence
  Quasi-synthetic sequence derived from human genome
LRKRVNAALVIQKYWRRVL

SEQ ID NO: 11992 - protein, 19 aa, Artificial Sequence
  Quasi-synthetic sequence derived from human genome
WLFLSRKTSLRKRSLKHLV

SEQ ID NO: 11993 - protein, 19 aa, Artificial Sequence
  Quasi-synthetic sequence derived from human genome
KRLLSWKQQVLKLLRTFPR

SEQ ID NO: 11994 - protein, 19 aa, Artificial Sequence
  Quasi-synthetic sequence derived from human genome
LRVKIRKLKNKASVLQKRL

SEQ ID NO: 11995 - protein, 19 aa, Artificial Sequence
  Quasi-synthetic sequence derived from human genome
LMRMLSLKSLKKQMKKVKK

SEQ ID NO: 11996 - protein, 19 aa, Artificial Sequence
  Quasi-synthetic sequence derived from human genome
FLRFMACLLKGYRVFLRPL

SEQ ID NO: 11997 - protein, 19 aa, Artificial Sequence
  Quasi-synthetic sequence derived from human genome
LKRSLILSSRHGIRRKLIK

SEQ ID NO: 11998 - protein, 19 aa, Artificial Sequence
  Quasi-synthetic sequence derived from human genome
FFRLALPRIRKGSRLQYWL

SEQ ID NO: 11999 - protein, 19 aa, Artificial Sequence
  Quasi-synthetic sequence derived from human genome
LRLFRRLLLAALLLVIVWT

SEQ ID NO: 12000 - protein, 19 aa, Artificial Sequence
  Quasi-synthetic sequence derived from human genome
RYKGWRGRLKFARKPLCML

SEQ ID NO: 12001 - protein, 20 aa, Artificial Sequence
  Quasi-synthetic sequence derived from human genome
LLLRKILLRKFCQMRKRRLR

SEQ ID NO: 12002 - protein, 20 aa, Artificial Sequence
  Quasi-synthetic sequence derived from human genome
ALLFLLLVLLLLVRKKRKIK

SEQ ID NO: 12003 - protein, 20 aa, Artificial Sequence
  Quasi-synthetic sequence derived from human genome
RPPLLLRPVKLLRRRFRLLL

SEQ ID NO: 12004 - protein, 20 aa, Artificial Sequence
  Quasi-synthetic sequence derived from human genome
LLILILLIKKLIIFILKKTR

SEQ ID NO: 12005 - protein, 20 aa, Artificial Sequence
  Quasi-synthetic sequence derived from human genome
LLIIIFLTVLLLKLRKRHRK

SEQ ID NO: 12006 - protein, 20 aa, Artificial Sequence
  Quasi-synthetic sequence derived from human genome
VALLLVVLWIRWKCRRLRIR

SEQ ID NO: 12007 - protein, 20 aa, Artificial Sequence
  Quasi-synthetic sequence derived from human genome
VRAVLRLRRRVCVLRKRRLL

SEQ ID NO: 12008 - protein, 20 aa, Artificial Sequence
  Quasi-synthetic sequence derived from human genome
WRFRLLCLLRRWLPRPRAWF

SEQ ID NO: 12009 - protein, 20 aa, Artificial Sequence
  Quasi-synthetic sequence derived from human genome
LRGFFIKRRFRSLRHKIILL

SEQ ID NO: 12010 - protein, 20 aa, Artificial Sequence
  Quasi-synthetic sequence derived from human genome
FAILRIIRLVRVFRIFKLSR

SEQ ID NO: 12011 - protein, 20 aa, Artificial Sequence
  Quasi-synthetic sequence derived from human genome
RALSRRYLRRLLLLLLLLLL

SEQ ID NO: 12012 - protein, 20 aa, Artificial Sequence
  Quasi-synthetic sequence derived from human genome
RPPRLKKWKGVRWKRLRLLL

SEQ ID NO: 12013 - protein, 20 aa, Artificial Sequence
  Quasi-synthetic sequence derived from human genome
RRVVQIFRIMRILRILKLAR

SEQ ID NO: 12014 - protein, 20 aa, Artificial Sequence
  Quasi-synthetic sequence derived from human genome
RWRRLRLQQLRRLRGLLRVL

SEQ ID NO: 12015 - protein, 20 aa, Artificial Sequence
  Quasi-synthetic sequence derived from human genome
RLPVKKIRKQMKLLLLLLLL

SEQ ID NO: 12016 - protein, 20 aa, Artificial Sequence
  Quasi-synthetic sequence derived from human genome
RTFRLLRVLKLVRFLPALRR

SEQ ID NO: 12017 - protein, 20 aa, Artificial Sequence
  Quasi-synthetic sequence derived from human genome
FVIFILVVLFIVFRKKVFRK

SEQ ID NO: 12018 - protein, 20 aa, Artificial Sequence
  Quasi-synthetic sequence derived from human genome
FAKLSIKWMIKIRKRYLKRR

SEQ ID NO: 12019 - protein, 20 aa, Artificial Sequence
  Quasi-synthetic sequence derived from human genome
KFILWRRFRWAIILFIILFI

SEQ ID NO: 12020 - protein, 20 aa, Artificial Sequence
  Quasi-synthetic sequence derived from human genome
FLRVVRFVRILRIFKLTRHF

SEQ ID NO: 12021 - protein, 20 aa, Artificial Sequence
  Quasi-synthetic sequence derived from human genome
LIFKSILFLPCLRKKILKIR

SEQ ID NO: 12022 - protein, 20 aa, Artificial Sequence
  Quasi-synthetic sequence derived from human genome
FLRLLRCQCRRRRRRRPLWR

SEQ ID NO: 12023 - protein, 20 aa, Artificial Sequence
  Quasi-synthetic sequence derived from human genome
LAILRVIRLVRVFRIFKLSR

SEQ ID NO: 12024 - protein, 20 aa, Artificial Sequence
  Quasi-synthetic sequence derived from human genome
IVTLLVYIKIYIVLRRRRKR

SEQ ID NO: 12025 - protein, 20 aa, Artificial Sequence
  Quasi-synthetic sequence derived from human genome
KYFYFFKILLRLRLAILKYL

SEQ ID NO: 12026 - protein, 20 aa, Artificial Sequence
  Quasi-synthetic sequence derived from human genome
RILKVFKSLRALRAIRVLRR

SEQ ID NO: 12027 - protein, 20 aa, Artificial Sequence
  Quasi-synthetic sequence derived from human genome
AFLKMLRFVKCFLRRRKPFV

SEQ ID NO: 12028 - protein, 20 aa, Artificial Sequence
  Quasi-synthetic sequence derived from human genome
FLMRKDKKKLRRLLKYMFIR

SEQ ID NO: 12029 - protein, 20 aa, Artificial Sequence
  Quasi-synthetic sequence derived from human genome
FMLKKRKWPLKGWHKRFFVL

SEQ ID NO: 12030 - protein, 20 aa, Artificial Sequence
  Quasi-synthetic sequence derived from human genome
RALRIVRFTKILSLLRLLRL

SEQ ID NO: 12031 - protein, 20 aa, Artificial Sequence
  Quasi-synthetic sequence derived from human genome
RRKYLLKALFKALKRLKSLR

SEQ ID NO: 12032 - protein, 20 aa, Artificial Sequence
  Quasi-synthetic sequence derived from human genome
RRRGFGLFFFLRLHRLLLLF

SEQ ID NO: 12033 - protein, 20 aa, Artificial Sequence
  Quasi-synthetic sequence derived from human genome
RTFRLLRVLKLVRFMPALRR

SEQ ID NO: 12034 - protein, 20 aa, Artificial Sequence
  Quasi-synthetic sequence derived from human genome
MLLILALWKIGFFKRPLKKK

SEQ ID NO: 12035 - protein, 20 aa, Artificial Sequence
  Quasi-synthetic sequence derived from human genome
VKVLNINLKRKFIKKRIIII

SEQ ID NO: 12036 - protein, 20 aa, Artificial Sequence
  Quasi-synthetic sequence derived from human genome
FFKTLKKRAWAIFLRLCLKK

SEQ ID NO: 12037 - protein, 20 aa, Artificial Sequence
  Quasi-synthetic sequence derived from human genome
LRWFLSPRWILQFRRWARKW

SEQ ID NO: 12038 - protein, 20 aa, Artificial Sequence
  Quasi-synthetic sequence derived from human genome
RRRLGSLRWCGRRRLRWRLL

SEQ ID NO: 12039 - protein, 20 aa, Artificial Sequence
  Quasi-synthetic sequence derived from human genome
LKRLVKLHIKRHYHKKFWKL

SEQ ID NO: 12040 - protein, 20 aa, Artificial Sequence
  Quasi-synthetic sequence derived from human genome
VIICVMVFCLILWKWKKKKR

SEQ ID NO: 12041 - protein, 20 aa, Artificial Sequence
  Quasi-synthetic sequence derived from human genome
MRRHFRMKLRNLFTKFIRKF

SEQ ID NO: 12042 - protein, 20 aa, Artificial Sequence
  Quasi-synthetic sequence derived from human genome
ILVGVLLLFVLLLVVRRRRR

SEQ ID NO: 12043 - protein, 20 aa, Artificial Sequence
  Quasi-synthetic sequence derived from human genome
LWYLIKWIWTHLCKKKMRRK

SEQ ID NO: 12044 - protein, 20 aa, Artificial Sequence
  Quasi-synthetic sequence derived from human genome
MKRALGRRKGVWLRLRKILF

SEQ ID NO: 12045 - protein, 20 aa, Artificial Sequence
  Quasi-synthetic sequence derived from human genome
ILKTIRRRLPFSKWRLAFRF

SEQ ID NO: 12046 - protein, 20 aa, Artificial Sequence
  Quasi-synthetic sequence derived from human genome
RQRGRLMRRLVRRLRRWGLL

SEQ ID NO: 12047 - protein, 20 aa, Artificial Sequence
  Quasi-synthetic sequence derived from human genome
VKRLLIKKLPRVLAIQLKRF

SEQ ID NO: 12048 - protein, 20 aa, Artificial Sequence
  Quasi-synthetic sequence derived from human genome
KFMVLLWKNFILKRRRCIAL

SEQ ID NO: 12049 - protein, 20 aa, Artificial Sequence
  Quasi-synthetic sequence derived from human genome
KLWFKFQRYFRRKPVRFFTF

SEQ ID NO: 12050 - protein, 20 aa, Artificial Sequence
  Quasi-synthetic sequence derived from human genome
LRIVRFTKILSLLRLLRLSR

SEQ ID NO: 12051 - protein, 20 aa, Artificial Sequence
  Quasi-synthetic sequence derived from human genome
VRFTKILSLLRLLRLSRLIR

SEQ ID NO: 12052 - protein, 20 aa, Artificial Sequence
  Quasi-synthetic sequence derived from human genome
KKKKKFCYLCILLLIVLFIL

SEQ ID NO: 12053 - protein, 20 aa, Artificial Sequence
  Quasi-synthetic sequence derived from human genome
LLFMKLRWFLKRWRQGKVLP

SEQ ID NO: 12054 - protein, 20 aa, Artificial Sequence
  Quasi-synthetic sequence derived from human genome
QKLLKRLRLLPALLILRAFK

SEQ ID NO: 12055 - protein, 20 aa, Artificial Sequence
  Quasi-synthetic sequence derived from human genome
KRMRVKKLPMILALHLKRFK

SEQ ID NO: 12056 - protein, 20 aa, Artificial Sequence
  Quasi-synthetic sequence derived from human genome
RRLKSQILLKKYLMKRRWKK

SEQ ID NO: 12057 - protein, 20 aa, Artificial Sequence
  Quasi-synthetic sequence derived from human genome
LIQRRFRTLMMRRRFLSLKK

SEQ ID NO: 12058 - protein, 20 aa, Artificial Sequence
  Quasi-synthetic sequence derived from human genome
RIRVIKKKKVIMKKRKKLTL

SEQ ID NO: 12059 - protein, 20 aa, Artificial Sequence
  Quasi-synthetic sequence derived from human genome
IRIMRVLRIARVLKLLKMAV

SEQ ID NO: 12060 - protein, 20 aa, Artificial Sequence
  Quasi-synthetic sequence derived from human genome
ILLIKKLIIFILKKTREKKK

SEQ ID NO: 12061 - protein, 20 aa, Artificial Sequence
  Quasi-synthetic sequence derived from human genome
LAVIVLVALLLLWRRRQKRR

SEQ ID NO: 12062 - protein, 20 aa, Artificial Sequence
  Quasi-synthetic sequence derived from human genome
KRWTHLVRLLRLIILIRIFH

SEQ ID NO: 12063 - protein, 20 aa, Artificial Sequence
  Quasi-synthetic sequence derived from human genome
WKTWIFWKTWIFWKTWIFRK

SEQ ID NO: 12064 - protein, 20 aa, Artificial Sequence
  Quasi-synthetic sequence derived from human genome
LKTVILGLLCLLLLWWRRRK

SEQ ID NO: 12065 - protein, 20 aa, Artificial Sequence
  Quasi-synthetic sequence derived from human genome
KFIVWRRFKWVIIGLLFLLI

SEQ ID NO: 12066 - protein, 20 aa, Artificial Sequence
  Quasi-synthetic sequence derived from human genome
KKLRLFAWRKRWFILRRGQT

SEQ ID NO: 12067 - protein, 20 aa, Artificial Sequence
  Quasi-synthetic sequence derived from human genome
KRMKVKKLPMILALHLKRFK

SEQ ID NO: 12068 - protein, 20 aa, Artificial Sequence
  Quasi-synthetic sequence derived from human genome
LLRKRYRHRPCRLQFLLLLL

SEQ ID NO: 12069 - protein, 20 aa, Artificial Sequence
  Quasi-synthetic sequence derived from human genome
RLLRGLWQRWRRYKYRFVPW

SEQ ID NO: 12070 - protein, 20 aa, Artificial Sequence
  Quasi-synthetic sequence derived from human genome
RRKARRLLKTVLMILLAFLV

SEQ ID NO: 12071 - protein, 20 aa, Artificial Sequence
  Quasi-synthetic sequence derived from human genome
RVLLRFQRKLSVLLLLLGRR

SEQ ID NO: 12072 - protein, 20 aa, Artificial Sequence
  Quasi-synthetic sequence derived from human genome
VRLLRLIILIRIFHLLHQKR

SEQ ID NO: 12073 - protein, 20 aa, Artificial Sequence
  Quasi-synthetic sequence derived from human genome
LARWRCRRLRAIYTIMRWFR

SEQ ID NO: 12074 - protein, 20 aa, Artificial Sequence
  Quasi-synthetic sequence derived from human genome
WMLLFKPLVLRRQYLRRKHL

SEQ ID NO: 12075 - protein, 20 aa, Artificial Sequence
  Quasi-synthetic sequence derived from human genome
MRVLSRISKFRRLRQLLRRR

SEQ ID NO: 12076 - protein, 20 aa, Artificial Sequence
  Quasi-synthetic sequence derived from human genome
KLLAKKRVVRMLLVIVVLFF

SEQ ID NO: 12077 - protein, 20 aa, Artificial Sequence
  Quasi-synthetic sequence derived from human genome
FALRRKKKKTIKMLMLVVVL

SEQ ID NO: 12078 - protein, 20 aa, Artificial Sequence
  Quasi-synthetic sequence derived from human genome
IRNIGIWFFWIRLYKIRRGR

SEQ ID NO: 12079 - protein, 20 aa, Artificial Sequence
  Quasi-synthetic sequence derived from human genome
IILLVIFLIWRCFLRNKTRR

SEQ ID NO: 12080 - protein, 20 aa, Artificial Sequence
  Quasi-synthetic sequence derived from human genome
ILCLVMILYTRRRWCKRRRV

SEQ ID NO: 12081 - protein, 20 aa, Artificial Sequence
  Quasi-synthetic sequence derived from human genome
WLRRKLRGKRRPVIAFCLLM

SEQ ID NO: 12082 - protein, 20 aa, Artificial Sequence
  Quasi-synthetic sequence derived from human genome
LLLRFLRLCRSFYITCRRLR

SEQ ID NO: 12083 - protein, 20 aa, Artificial Sequence
  Quasi-synthetic sequence derived from human genome
FFRWVRRAWQRIISWVFFWR

SEQ ID NO: 12084 - protein, 20 aa, Artificial Sequence
  Quasi-synthetic sequence derived from human genome
LLMLVLYGRIFRAARFRIRK

SEQ ID NO: 12085 - protein, 20 aa, Artificial Sequence
  Quasi-synthetic sequence derived from human genome
RLRFLKLKRQTKVLLTLLLV

SEQ ID NO: 12086 - protein, 20 aa, Artificial Sequence
  Quasi-synthetic sequence derived from human genome
KILGMLRVLRLLRTLRPLRV

SEQ ID NO: 12087 - protein, 20 aa, Artificial Sequence
  Quasi-synthetic sequence derived from human genome
IFFFIALVFFLYRRRKGSRK

SEQ ID NO: 12088 - protein, 20 aa, Artificial Sequence
  Quasi-synthetic sequence derived from human genome
RFLLKRGLRNKRIGHFLFWF

SEQ ID NO: 12089 - protein, 20 aa, Artificial Sequence
  Quasi-synthetic sequence derived from human genome
LFALLSRGRRRRMHVLRRRW

SEQ ID NO: 12090 - protein, 20 aa, Artificial Sequence
  Quasi-synthetic sequence derived from human genome
KILGVLRVLRLLRTLRPLRV

SEQ ID NO: 12091 - protein, 20 aa, Artificial Sequence
  Quasi-synthetic sequence derived from human genome
LRVIRLVRVFRIFKLSRHSK

SEQ ID NO: 12092 - protein, 20 aa, Artificial Sequence
  Quasi-synthetic sequence derived from human genome
KIILFLPCISRKLKRIKKGW

SEQ ID NO: 12093 - protein, 20 aa, Artificial Sequence
  Quasi-synthetic sequence derived from human genome
LLCIAIVLRFKKTWKLRALK

SEQ ID NO: 12094 - protein, 20 aa, Artificial Sequence
  Quasi-synthetic sequence derived from human genome
LFCLFIFVLIYVRVFRKSRR

SEQ ID NO: 12095 - protein, 20 aa, Artificial Sequence
  Quasi-synthetic sequence derived from human genome
LRIIRFLPLFKIIVPILIRI

SEQ ID NO: 12096 - protein, 20 aa, Artificial Sequence
  Quasi-synthetic sequence derived from human genome
RFVRILRIFKLTRHFVGLRV

SEQ ID NO: 12097 - protein, 20 aa, Artificial Sequence
  Quasi-synthetic sequence derived from human genome
LLLLVLLLAAYFFRFRKQRK

SEQ ID NO: 12098 - protein, 20 aa, Artificial Sequence
  Quasi-synthetic sequence derived from human genome
LKVLFKKTHRILRRLFNLCK

SEQ ID NO: 12099 - protein, 20 aa, Artificial Sequence
  Quasi-synthetic sequence derived from human genome
LYRAPYFWIKRRILLLIPKW

SEQ ID NO: 12100 - protein, 20 aa, Artificial Sequence
  Quasi-synthetic sequence derived from human genome
LLLFLLFFLFRLLLRFLRLC

SEQ ID NO: 12101 - protein, 20 aa, Artificial Sequence
  Quasi-synthetic sequence derived from human genome
LALFMLMALVLLQRKLWRRR

SEQ ID NO: 12102 - protein, 20 aa, Artificial Sequence
  Quasi-synthetic sequence derived from human genome
FRVIRLARIGRILRLIRGAK

SEQ ID NO: 12103 - protein, 20 aa, Artificial Sequence
  Quasi-synthetic sequence derived from human genome
LLLFLLLFLLLRRQRHSKHR

SEQ ID NO: 12104 - protein, 20 aa, Artificial Sequence
  Quasi-synthetic sequence derived from human genome
KVGQVLRVMRLMRIFRILKL

SEQ ID NO: 12105 - protein, 20 aa, Artificial Sequence
  Quasi-synthetic sequence derived from human genome
RHRGLLRVRLGRFISRLLLW

SEQ ID NO: 12106 - protein, 20 aa, Artificial Sequence
  Quasi-synthetic sequence derived from human genome
KLKRKYWWKNLKMMIILGVI

SEQ ID NO: 12107 - protein, 20 aa, Artificial Sequence
  Quasi-synthetic sequence derived from human genome
LVHLLKTVRLLRLLRLLQKL

SEQ ID NO: 12108 - protein, 20 aa, Artificial Sequence
  Quasi-synthetic sequence derived from human genome
RNIPRWTHLLRLLRLIILLR

SEQ ID NO: 12109 - protein, 20 aa, Artificial Sequence
  Quasi-synthetic sequence derived from human genome
LWAIGKNVWKRWKKRFFVLV

SEQ ID NO: 12110 - protein, 20 aa, Artificial Sequence
  Quasi-synthetic sequence derived from human genome
RFLKIIRPLRNIFLKKPVFA

SEQ ID NO: 12111 - protein, 20 aa, Artificial Sequence
  Quasi-synthetic sequence derived from human genome
IRQRIIKKFQFIKSLRCFWK

SEQ ID NO: 12112 - protein, 20 aa, Artificial Sequence
  Quasi-synthetic sequence derived from human genome
CWVILMGFSIWLYWRRKKRK

SEQ ID NO: 12113 - protein, 20 aa, Artificial Sequence
  Quasi-synthetic sequence derived from human genome
LAAMVWRRLLRKRWVLALVF

SEQ ID NO: 12114 - protein, 20 aa, Artificial Sequence
  Quasi-synthetic sequence derived from human genome
FRVIRLARIGRILRLIKGAK

SEQ ID NO: 12115 - protein, 20 aa, Artificial Sequence
  Quasi-synthetic sequence derived from human genome
KKKKKKKKRQCFAFLIYFRL

SEQ ID NO: 12116 - protein, 20 aa, Artificial Sequence
  Quasi-synthetic sequence derived from human genome
FLAFVIVLLVLRLRRWHKSR

SEQ ID NO: 12117 - protein, 20 aa, Artificial Sequence
  Quasi-synthetic sequence derived from human genome
RSPRIRKRFLLRRILEMLFF

SEQ ID NO: 12118 - protein, 20 aa, Artificial Sequence
  Quasi-synthetic sequence derived from human genome
LAFVILLLALRLRRWHKSRL

SEQ ID NO: 12119 - protein, 20 aa, Artificial Sequence
  Quasi-synthetic sequence derived from human genome
FINLSFLRLFRAARLIKLLR

SEQ ID NO: 12120 - protein, 20 aa, Artificial Sequence
  Quasi-synthetic sequence derived from human genome
KRHLRLIHPTKLYKLMLRRF

SEQ ID NO: 12121 - protein, 20 aa, Artificial Sequence
  Quasi-synthetic sequence derived from human genome
KVVQFFRILRIFKLIAPKLL

SEQ ID NO: 12122 - protein, 20 aa, Artificial Sequence
  Quasi-synthetic sequence derived from human genome
LQKLRLVRWLLKKVFQCRRA

SEQ ID NO: 12123 - protein, 20 aa, Artificial Sequence
  Quasi-synthetic sequence derived from human genome
RKSYPMLKLVRLKLWFPRFM

SEQ ID NO: 12124 - protein, 20 aa, Artificial Sequence
  Quasi-synthetic sequence derived from human genome
LRVLRPLKTIKRLPKLKAVF

SEQ ID NO: 12125 - protein, 20 aa, Artificial Sequence
  Quasi-synthetic sequence derived from human genome
LKLFRPKKLLPKAFKQYWFI

SEQ ID NO: 12126 - protein, 20 aa, Artificial Sequence
  Quasi-synthetic sequence derived from human genome
LTLAPFLLWLRKCLRKAKKF

SEQ ID NO: 12127 - protein, 20 aa, Artificial Sequence
  Quasi-synthetic sequence derived from human genome
LRFLKLRRERRALLCLLLVL

SEQ ID NO: 12128 - protein, 20 aa, Artificial Sequence
  Quasi-synthetic sequence derived from human genome
LKLICFLIPFLLSLKKKMKV

SEQ ID NO: 12129 - protein, 20 aa, Artificial Sequence
  Quasi-synthetic sequence derived from human genome
PLFFLMKRKIIVLMPWLLRL

SEQ ID NO: 12130 - protein, 20 aa, Artificial Sequence
  Quasi-synthetic sequence derived from human genome
IRIMRVLRIARVLKLLKMAT

SEQ ID NO: 12131 - protein, 20 aa, Artificial Sequence
  Quasi-synthetic sequence derived from human genome
LLLLALALGLLVYRKRRAKR

SEQ ID NO: 12132 - protein, 20 aa, Artificial Sequence
  Quasi-synthetic sequence derived from human genome
RKFRRSLLQLLCLRLLRCQR

SEQ ID NO: 12133 - protein, 20 aa, Artificial Sequence
  Quasi-synthetic sequence derived from human genome
KLRRFLKPQGHPRLLLWFKR

SEQ ID NO: 12134 - protein, 20 aa, Artificial Sequence
  Quasi-synthetic sequence derived from human genome
LKQNIFLFYVKLRWLLKHWR

SEQ ID NO: 12135 - protein, 20 aa, Artificial Sequence
  Quasi-synthetic sequence derived from human genome
HLLKKRKWPLKGWHKRYFVL

SEQ ID NO: 12136 - protein, 20 aa, Artificial Sequence
  Quasi-synthetic sequence derived from human genome
AIQRRKWAVRIIRKFIKGFI

SEQ ID NO: 12137 - protein, 20 aa, Artificial Sequence
  Quasi-synthetic sequence derived from human genome
VVIILFIILLGVIMAKRKRK

SEQ ID NO: 12138 - protein, 20 aa, Artificial Sequence
  Quasi-synthetic sequence derived from human genome
LKIKRLRKKFAQKMLRKARR

SEQ ID NO: 12139 - protein, 20 aa, Artificial Sequence
  Quasi-synthetic sequence derived from human genome
KPFFRLQKFLRRTQFLLFFL

SEQ ID NO: 12140 - protein, 20 aa, Artificial Sequence
  Quasi-synthetic sequence derived from human genome
WMRRMRILRRLLRRYRESKK

SEQ ID NO: 12141 - protein, 20 aa, Artificial Sequence
  Quasi-synthetic sequence derived from human genome
RIQKTIRGWLLRKKYLRMRK

SEQ ID NO: 12142 - protein, 20 aa, Artificial Sequence
  Quasi-synthetic sequence derived from human genome
VLVYARIYVVLKQRRRKRIL

SEQ ID NO: 12143 - protein, 20 aa, Artificial Sequence
  Quasi-synthetic sequence derived from human genome
LGHRLLKRLLGPKLRRFLKP

SEQ ID NO: 12144 - protein, 20 aa, Artificial Sequence
  Quasi-synthetic sequence derived from human genome
VFRIFFHKIFIRPLRYRSRC

SEQ ID NO: 12145 - protein, 20 aa, Artificial Sequence
  Quasi-synthetic sequence derived from human genome
RILINLMKYLQKWKRYRPLW

SEQ ID NO: 12146 - protein, 20 aa, Artificial Sequence
  Quasi-synthetic sequence derived from human genome
LLLIIALMLWRLHWRRLLSK

SEQ ID NO: 12147 - protein, 20 aa, Artificial Sequence
  Quasi-synthetic sequence derived from human genome
AILGLWKIARKWMRRKMGKW

SEQ ID NO: 12148 - protein, 20 aa, Artificial Sequence
  Quasi-synthetic sequence derived from human genome
NFLKKVRRLIMKRIVKISKC

SEQ ID NO: 12149 - protein, 20 aa, Artificial Sequence
  Quasi-synthetic sequence derived from human genome
FRVIRLARIGRVLRLIRGAK

SEQ ID NO: 12150 - protein, 20 aa, Artificial Sequence
  Quasi-synthetic sequence derived from human genome
LKFLAKCRKKKKLFAPWRGL

SEQ ID NO: 12151 - protein, 20 aa, Artificial Sequence
  Quasi-synthetic sequence derived from human genome
VLIVVLRIVRYRKSSKLIKK

SEQ ID NO: 12152 - protein, 20 aa, Artificial Sequence
  Quasi-synthetic sequence derived from human genome
LLVIVFIIIVLYMLRFKKYK

SEQ ID NO: 12153 - protein, 20 aa, Artificial Sequence
  Quasi-synthetic sequence derived from human genome
LIPKLKGWWQKFRLRSKKRK

SEQ ID NO: 12154 - protein, 20 aa, Artificial Sequence
  Quasi-synthetic sequence derived from human genome
RLKNIRKVYGRCMWYRLRLL

SEQ ID NO: 12155 - protein, 20 aa, Artificial Sequence
  Quasi-synthetic sequence derived from human genome
KRGKRHWKKLWFVIKGKVLY

SEQ ID NO: 12156 - protein, 20 aa, Artificial Sequence
  Quasi-synthetic sequence derived from human genome
LRLMRIFRILKLARHSVGLR

SEQ ID NO: 12157 - protein, 20 aa, Artificial Sequence
  Quasi-synthetic sequence derived from human genome
LLILSLICKIKLGPVRRKLK

SEQ ID NO: 12158 - protein, 20 aa, Artificial Sequence
  Quasi-synthetic sequence derived from human genome
LRRKALLIFLVVHRLRWSSK

SEQ ID NO: 12159 - protein, 20 aa, Artificial Sequence
  Quasi-synthetic sequence derived from human genome
VLRTFRLMRVLKLVRFLPAL

SEQ ID NO: 12160 - protein, 20 aa, Artificial Sequence
  Quasi-synthetic sequence derived from human genome
FWCLAFLWGLLILLKYRWRK

SEQ ID NO: 12161 - protein, 20 aa, Artificial Sequence
  Quasi-synthetic sequence derived from human genome
LIGLLKTARLLRLVRVARKL

SEQ ID NO: 12162 - protein, 20 aa, Artificial Sequence
  Quasi-synthetic sequence derived from human genome
RARRRRPLFALLLLCALLAR

SEQ ID NO: 12163 - protein, 20 aa, Artificial Sequence
  Quasi-synthetic sequence derived from human genome
LVLRRKALAPRLLLRLLRSP

SEQ ID NO: 12164 - protein, 20 aa, Artificial Sequence
  Quasi-synthetic sequence derived from human genome
FRFLLRKLYVFRRSFLMTCI

SEQ ID NO: 12165 - protein, 20 aa, Artificial Sequence
  Quasi-synthetic sequence derived from human genome
WVFRLKRRKRIARRLVDTLR

SEQ ID NO: 12166 - protein, 20 aa, Artificial Sequence
  Quasi-synthetic sequence derived from human genome
FLRRRCFLLTFYLWFLFFSR

SEQ ID NO: 12167 - protein, 20 aa, Artificial Sequence
  Quasi-synthetic sequence derived from human genome
FRRFNIRLIHPVQFVFLRKR

SEQ ID NO: 12168 - protein, 20 aa, Artificial Sequence
  Quasi-synthetic sequence derived from human genome
LLLFQVIRLYQRRRWMIRAL

SEQ ID NO: 12169 - protein, 20 aa, Artificial Sequence
  Quasi-synthetic sequence derived from human genome
KKRIKRRALLFLSYILTHFI

SEQ ID NO: 12170 - protein, 20 aa, Artificial Sequence
  Quasi-synthetic sequence derived from human genome
AFVLVLLALRLRRWHKSRLL

SEQ ID NO: 12171 - protein, 20 aa, Artificial Sequence
  Quasi-synthetic sequence derived from human genome
RWTHLVRLLRLIILIRIFHL

SEQ ID NO: 12172 - protein, 20 aa, Artificial Sequence
  Quasi-synthetic sequence derived from human genome
LFKRRVVRRLASLKTRRCRL

SEQ ID NO: 12173 - protein, 20 aa, Artificial Sequence
  Quasi-synthetic sequence derived from human genome
LRKTKYRSFRRRLLKFIPGL

SEQ ID NO: 12174 - protein, 20 aa, Artificial Sequence
  Quasi-synthetic sequence derived from human genome
LRKRIHRPRRRTTRRWKRWF

SEQ ID NO: 12175 - protein, 20 aa, Artificial Sequence
  Quasi-synthetic sequence derived from human genome
KFFKRKPKVLGVVRILIALM

SEQ ID NO: 12176 - protein, 20 aa, Artificial Sequence
  Quasi-synthetic sequence derived from human genome
VLLFIFVKRQIMRFAMKSRR

SEQ ID NO: 12177 - protein, 20 aa, Artificial Sequence
  Quasi-synthetic sequence derived from human genome
LTLRFSVVKRGRKKLLYIFK

SEQ ID NO: 12178 - protein, 20 aa, Artificial Sequence
  Quasi-synthetic sequence derived from human genome
GKRWFAFKMMMAKKWAKFLR

SEQ ID NO: 12179 - protein, 20 aa, Artificial Sequence
  Quasi-synthetic sequence derived from human genome
LVLLLSIAIFQRQKRRKFWK

SEQ ID NO: 12180 - protein, 20 aa, Artificial Sequence
  Quasi-synthetic sequence derived from human genome
VLILLILVVLFAALKRQRKK

SEQ ID NO: 12181 - protein, 20 aa, Artificial Sequence
  Quasi-synthetic sequence derived from human genome
KYLLLGRWRKKHLTFRILNL

SEQ ID NO: 12182 - protein, 20 aa, Artificial Sequence
  Quasi-synthetic sequence derived from human genome
IVLAKKMLRKALKLLNRIFP

SEQ ID NO: 12183 - protein, 20 aa, Artificial Sequence
  Quasi-synthetic sequence derived from human genome
RVFLQRLLWLLRLLFPRVLC

SEQ ID NO: 12184 - protein, 20 aa, Artificial Sequence
  Quasi-synthetic sequence derived from human genome
RKRRKMSKKLPPVIIKYIII

SEQ ID NO: 12185 - protein, 20 aa, Artificial Sequence
  Quasi-synthetic sequence derived from human genome
FVRILRIFKLTRHFVGLRVL

SEQ ID NO: 12186 - protein, 20 aa, Artificial Sequence
  Quasi-synthetic sequence derived from human genome
FRVIRLARIGRILRLVKGAK

SEQ ID NO: 12187 - protein, 20 aa, Artificial Sequence
  Quasi-synthetic sequence derived from human genome
LLLMVACRLRLVKQKLKKAR

SEQ ID NO: 12188 - protein, 20 aa, Artificial Sequence
  Quasi-synthetic sequence derived from human genome
RRRARLRFMKQKFNIVCLKI

SEQ ID NO: 12189 - protein, 20 aa, Artificial Sequence
  Quasi-synthetic sequence derived from human genome
LLRIANFSNLIFLRIKRRVK

SEQ ID NO: 12190 - protein, 20 aa, Artificial Sequence
  Quasi-synthetic sequence derived from human genome
WVYLLLRKILLRKFCQIRYH

SEQ ID NO: 12191 - protein, 20 aa, Artificial Sequence
  Quasi-synthetic sequence derived from human genome
VKRLLIKKLPPVLAIQLKRF

SEQ ID NO: 12192 - protein, 20 aa, Artificial Sequence
  Quasi-synthetic sequence derived from human genome
RRRCRRVLYWIPVVFITLLL

SEQ ID NO: 12193 - protein, 20 aa, Artificial Sequence
  Quasi-synthetic sequence derived from human genome
AFVIVLLALRLRRWHKSRLL

SEQ ID NO: 12194 - protein, 20 aa, Artificial Sequence
  Quasi-synthetic sequence derived from human genome
LLKIANFSNLIFLRLKRRVK

SEQ ID NO: 12195 - protein, 20 aa, Artificial Sequence
  Quasi-synthetic sequence derived from human genome
KKAKAIKLILLVVIVFFLFW

SEQ ID NO: 12196 - protein, 20 aa, Artificial Sequence
  Quasi-synthetic sequence derived from human genome
WLRALGPWLRVRRGLLVLRL

SEQ ID NO: 12197 - protein, 20 aa, Artificial Sequence
  Quasi-synthetic sequence derived from human genome
KKNRKMLVILILFVIIIVLI

SEQ ID NO: 12198 - protein, 20 aa, Artificial Sequence
  Quasi-synthetic sequence derived from human genome
TALLLLLGFFLWLKKRKQIK

SEQ ID NO: 12199 - protein, 20 aa, Artificial Sequence
  Quasi-synthetic sequence derived from human genome
LKTFVFFIWRRYWRTLVLLL

SEQ ID NO: 12200 - protein, 20 aa, Artificial Sequence
  Quasi-synthetic sequence derived from human genome
VKILRVLRVLRPLRAINRAK

SEQ ID NO: 12201 - protein, 20 aa, Artificial Sequence
  Quasi-synthetic sequence derived from human genome
KKRVIRMLIVIVVLFFLCWM

SEQ ID NO: 12202 - protein, 20 aa, Artificial Sequence
  Quasi-synthetic sequence derived from human genome
LQALLLKRFLLARRSRRGLF

SEQ ID NO: 12203 - protein, 20 aa, Artificial Sequence
  Quasi-synthetic sequence derived from human genome
WLLREQKRKKKLRKLLKRLQ

SEQ ID NO: 12204 - protein, 20 aa, Artificial Sequence
  Quasi-synthetic sequence derived from human genome
LLMVSLLLLSLWKLWRVKKF

SEQ ID NO: 12205 - protein, 20 aa, Artificial Sequence
  Quasi-synthetic sequence derived from human genome
WWWARAARLARLRFRRSLLP

SEQ ID NO: 12206 - protein, 20 aa, Artificial Sequence
  Quasi-synthetic sequence derived from human genome
LWVIRVQKRHKMPRMKKLMR

SEQ ID NO: 12207 - protein, 20 aa, Artificial Sequence
  Quasi-synthetic sequence derived from human genome
RIKKRSRSVFYRLTILILVF

SEQ ID NO: 12208 - protein, 20 aa, Artificial Sequence
  Quasi-synthetic sequence derived from human genome
LKTYLKRFKVMKIKVLRSWC

SEQ ID NO: 12209 - protein, 20 aa, Artificial Sequence
  Quasi-synthetic sequence derived from human genome
IRLARIGRILRLIRAAKGIR

SEQ ID NO: 12210 - protein, 20 aa, Artificial Sequence
  Quasi-synthetic sequence derived from human genome
LLKVIRKKLVRKTLDMIKKI

SEQ ID NO: 12211 - protein, 20 aa, Artificial Sequence
  Quasi-synthetic sequence derived from human genome
IHRRVLKKNPLKNLRIMLKL

SEQ ID NO: 12212 - protein, 20 aa, Artificial Sequence
  Quasi-synthetic sequence derived from human genome
LLALAAWASRWLRRKLRARR

SEQ ID NO: 12213 - protein, 20 aa, Artificial Sequence
  Quasi-synthetic sequence derived from human genome
RLLLKFIKIMKHLRKLNNFN

SEQ ID NO: 12214 - protein, 20 aa, Artificial Sequence
  Quasi-synthetic sequence derived from human genome
IRKRLRCRRKTVLVLMCILT

SEQ ID NO: 12215 - protein, 20 aa, Artificial Sequence
  Quasi-synthetic sequence derived from human genome
ILHKKRYIYRKIKGWRPVLM

SEQ ID NO: 12216 - protein, 20 aa, Artificial Sequence
  Quasi-synthetic sequence derived from human genome
LSRHLMKVKLKKYTKFLFVR

SEQ ID NO: 12217 - protein, 20 aa, Artificial Sequence
  Quasi-synthetic sequence derived from human genome
IQAFVKRKVIIFLKKCLLCK

SEQ ID NO: 12218 - protein, 20 aa, Artificial Sequence
  Quasi-synthetic sequence derived from human genome
LKKKKKMPKLRFASRIRKIR

SEQ ID NO: 12219 - protein, 20 aa, Artificial Sequence
  Quasi-synthetic sequence derived from human genome
KVGLVLRVLRALRILYVMRL

SEQ ID NO: 12220 - protein, 20 aa, Artificial Sequence
  Quasi-synthetic sequence derived from human genome
RRHYSVKKKLKLIRVLGLFM

SEQ ID NO: 12221 - protein, 20 aa, Artificial Sequence
  Quasi-synthetic sequence derived from human genome
IIILLVIVVLFAALKRQRKK

SEQ ID NO: 12222 - protein, 20 aa, Artificial Sequence
  Quasi-synthetic sequence derived from human genome
RKGVWLRLRKILFCVLGLYI

SEQ ID NO: 12223 - protein, 20 aa, Artificial Sequence
  Quasi-synthetic sequence derived from human genome
GLIVLLCCFCSFLRRRLKRR

SEQ ID NO: 12224 - protein, 20 aa, Artificial Sequence
  Quasi-synthetic sequence derived from human genome
RNLRLPKRLRVVYFLARTRL

SEQ ID NO: 12225 - protein, 20 aa, Artificial Sequence
  Quasi-synthetic sequence derived from human genome
VLIFKVYMFKCVWRCYRLIK

SEQ ID NO: 12226 - protein, 20 aa, Artificial Sequence
  Quasi-synthetic sequence derived from human genome
IQLLLWKNWTLRKRQKIRFV

SEQ ID NO: 12227 - protein, 20 aa, Artificial Sequence
  Quasi-synthetic sequence derived from human genome
ALLVLALWKLGFFRSARRRR

SEQ ID NO: 12228 - protein, 20 aa, Artificial Sequence
  Quasi-synthetic sequence derived from human genome
PLLPPKRRLLPRVRLLPLLL

SEQ ID NO: 12229 - protein, 20 aa, Artificial Sequence
  Quasi-synthetic sequence derived from human genome
RLFVIRPSRFYDRRFLKLLR

SEQ ID NO: 12230 - protein, 20 aa, Artificial Sequence
  Quasi-synthetic sequence derived from human genome
RRFRRSRRTGRLVVLIILTF

SEQ ID NO: 12231 - protein, 20 aa, Artificial Sequence
  Quasi-synthetic sequence derived from human genome
GLWRMQVFAMARLRFLKLKR

SEQ ID NO: 12232 - protein, 20 aa, Artificial Sequence
  Quasi-synthetic sequence derived from human genome
LALTALLLVAMICRRRRRRK

SEQ ID NO: 12233 - protein, 20 aa, Artificial Sequence
  Quasi-synthetic sequence derived from human genome
PLRILRKRNKALRKIRKLQK

SEQ ID NO: 12234 - protein, 20 aa, Artificial Sequence
  Quasi-synthetic sequence derived from human genome
NRISITFFRLFRVMRLVKLL

SEQ ID NO: 12235 - protein, 20 aa, Artificial Sequence
  Quasi-synthetic sequence derived from human genome
SRISITFFRLFRVMRLVKLL

SEQ ID NO: 12236 - protein, 20 aa, Artificial Sequence
  Quasi-synthetic sequence derived from human genome
RIPLQRLKLKCIFCRHRVKR

SEQ ID NO: 12237 - protein, 20 aa, Artificial Sequence
  Quasi-synthetic sequence derived from human genome
LQLRGSGRKLWKRFFCFLRR

SEQ ID NO: 12238 - protein, 20 aa, Artificial Sequence
  Quasi-synthetic sequence derived from human genome
IRRLLILILKIGRRWTELIR

SEQ ID NO: 12239 - protein, 20 aa, Artificial Sequence
  Quasi-synthetic sequence derived from human genome
LRARVLVTRRRVRALIAVLW

SEQ ID NO: 12240 - protein, 20 aa, Artificial Sequence
  Quasi-synthetic sequence derived from human genome
KFRRYLSVFFRKHITKRFCK

SEQ ID NO: 12241 - protein, 20 aa, Artificial Sequence
  Quasi-synthetic sequence derived from human genome
FLARYRLVSNKLKKRFLRKP

SEQ ID NO: 12242 - protein, 20 aa, Artificial Sequence
  Quasi-synthetic sequence derived from human genome
LVLLLCRLRRLRARARARAA

SEQ ID NO: 12243 - protein, 20 aa, Artificial Sequence
  Quasi-synthetic sequence derived from human genome
FFFFSVGRKFKKFNKVRVVR

SEQ ID NO: 12244 - protein, 20 aa, Artificial Sequence
  Quasi-synthetic sequence derived from human genome
IFRKVKRRSLRLYARWQSRW

SEQ ID NO: 12245 - protein, 20 aa, Artificial Sequence
  Quasi-synthetic sequence derived from human genome
LRRLLRLLVLGLWLALLRSV

SEQ ID NO: 12246 - protein, 20 aa, Artificial Sequence
  Quasi-synthetic sequence derived from human genome
KVRFLKLKKERKSLWTILLL

SEQ ID NO: 12247 - protein, 20 aa, Artificial Sequence
  Quasi-synthetic sequence derived from human genome
RIVQVLRLLRALRMLKLGRH

SEQ ID NO: 12248 - protein, 20 aa, Artificial Sequence
  Quasi-synthetic sequence derived from human genome
WLKIVKISFKCKQFFIQLRK

SEQ ID NO: 12249 - protein, 20 aa, Artificial Sequence
  Quasi-synthetic sequence derived from human genome
LLTLFHRLCKLLFFRIRPIF

SEQ ID NO: 12250 - protein, 20 aa, Artificial Sequence
  Quasi-synthetic sequence derived from human genome
LLKWPLRFVIIHKRCVYYFK

SEQ ID NO: 12251 - protein, 20 aa, Artificial Sequence
  Quasi-synthetic sequence derived from human genome
LRLLINESLIKKLRLFFRKF

SEQ ID NO: 12252 - protein, 20 aa, Artificial Sequence
  Quasi-synthetic sequence derived from human genome
LVRHKFNRLPRVLILHLKRY

SEQ ID NO: 12253 - protein, 20 aa, Artificial Sequence
  Quasi-synthetic sequence derived from human genome
AFLLRRRFLHLKKAAIVFQK

SEQ ID NO: 12254 - protein, 20 aa, Artificial Sequence
  Quasi-synthetic sequence derived from human genome
LAKKIMFFLLIIRKLLNHIL

SEQ ID NO: 12255 - protein, 20 aa, Artificial Sequence
  Quasi-synthetic sequence derived from human genome
MRRLRRLAHLVLFCPFSKRL

SEQ ID NO: 12256 - protein, 20 aa, Artificial Sequence
  Quasi-synthetic sequence derived from human genome
FNLPRLCIRKFFPKKKCFVF

SEQ ID NO: 12257 - protein, 20 aa, Artificial Sequence
  Quasi-synthetic sequence derived from human genome
IFLLFKKLCSFRYRRDLLRL

SEQ ID NO: 12258 - protein, 20 aa, Artificial Sequence
  Quasi-synthetic sequence derived from human genome
RRIVVSRGRLRRLLWIGFTL

SEQ ID NO: 12259 - protein, 20 aa, Artificial Sequence
  Quasi-synthetic sequence derived from human genome
LLVRRRFISLKKATIFVQRK

SEQ ID NO: 12260 - protein, 20 aa, Artificial Sequence
  Quasi-synthetic sequence derived from human genome
RLISVKNYRMIKKRKGLRLI

SEQ ID NO: 12261 - protein, 20 aa, Artificial Sequence
  Quasi-synthetic sequence derived from human genome
CILTITVITLLIFLRRRLRK

SEQ ID NO: 12262 - protein, 20 aa, Artificial Sequence
  Quasi-synthetic sequence derived from human genome
RIIRLVRVFRIFKLSRHSKG

SEQ ID NO: 12263 - protein, 20 aa, Artificial Sequence
  Quasi-synthetic sequence derived from human genome
RHLKTKRILRRNLLALIHRM

SEQ ID NO: 12264 - protein, 20 aa, Artificial Sequence
  Quasi-synthetic sequence derived from human genome
VILLALGALLVLQLIRRRRR

SEQ ID NO: 12265 - protein, 20 aa, Artificial Sequence
  Quasi-synthetic sequence derived from human genome
SLIRKKFRMMKIPKPILFGL

SEQ ID NO: 12266 - protein, 20 aa, Artificial Sequence
  Quasi-synthetic sequence derived from human genome
RRRRRRRRRRDLLLSQLCFL

SEQ ID NO: 12267 - protein, 20 aa, Artificial Sequence
  Quasi-synthetic sequence derived from human genome
RIRCVARKFLYLWIRMTFGR

SEQ ID NO: 12268 - protein, 20 aa, Artificial Sequence
  Quasi-synthetic sequence derived from human genome
LIRFLPRPIRQQLLYKRRYI

SEQ ID NO: 12269 - protein, 20 aa, Artificial Sequence
  Quasi-synthetic sequence derived from human genome
ALRGLSYRSLRRRVRRLRRL

SEQ ID NO: 12270 - protein, 20 aa, Artificial Sequence
  Quasi-synthetic sequence derived from human genome
RFKKKCFKLTRKMPIIGRKI

SEQ ID NO: 12271 - protein, 20 aa, Artificial Sequence
  Quasi-synthetic sequence derived from human genome
VCLYFYCKFLWRCLKFVMRK

SEQ ID NO: 12272 - protein, 20 aa, Artificial Sequence
  Quasi-synthetic sequence derived from human genome
LLVLLCLLLYYCRRKCLKPR

SEQ ID NO: 12273 - protein, 20 aa, Artificial Sequence
  Quasi-synthetic sequence derived from human genome
CVLTLLVLILLIVTMRRRKK

SEQ ID NO: 12274 - protein, 20 aa, Artificial Sequence
  Quasi-synthetic sequence derived from human genome
IRRRSKFANLGRIFKPWKWR

SEQ ID NO: 12275 - protein, 20 aa, Artificial Sequence
  Quasi-synthetic sequence derived from human genome
RLKKIRAHRGLRHFWGLRVR

SEQ ID NO: 12276 - protein, 20 aa, Artificial Sequence
  Quasi-synthetic sequence derived from human genome
RRNFWPARLATRLLKLRYLI

SEQ ID NO: 12277 - protein, 20 aa, Artificial Sequence
  Quasi-synthetic sequence derived from human genome
LSRLLFFLLGFLRIRVRGQR

SEQ ID NO: 12278 - protein, 20 aa, Artificial Sequence
  Quasi-synthetic sequence derived from human genome
KKLVVFRPRLFLLCFGIIFL

SEQ ID NO: 12279 - protein, 20 aa, Artificial Sequence
  Quasi-synthetic sequence derived from human genome
LKRFKVMKPKVLRSWCRQIL

SEQ ID NO: 12280 - protein, 20 aa, Artificial Sequence
  Quasi-synthetic sequence derived from human genome
YIWLLVLLLHKHRSILLRRL

SEQ ID NO: 12281 - protein, 20 aa, Artificial Sequence
  Quasi-synthetic sequence derived from human genome
LCLLLPLLLLGGWKRWRRGR

SEQ ID NO: 12282 - protein, 20 aa, Artificial Sequence
  Quasi-synthetic sequence derived from human genome
IRRSYALVSLSFFRKLRLIR

SEQ ID NO: 12283 - protein, 20 aa, Artificial Sequence
  Quasi-synthetic sequence derived from human genome
TMLLLWTFLLQRRFVKKRGK

SEQ ID NO: 12284 - protein, 20 aa, Artificial Sequence
  Quasi-synthetic sequence derived from human genome
KKFWIQKLPKVLCLHLKRFH

SEQ ID NO: 12285 - protein, 20 aa, Artificial Sequence
  Quasi-synthetic sequence derived from human genome
RLRLRQRRRRLLIKKMPAAA

SEQ ID NO: 12286 - protein, 20 aa, Artificial Sequence
  Quasi-synthetic sequence derived from human genome
ARISSAFFRLFRVMRLIKLL

SEQ ID NO: 12287 - protein, 20 aa, Artificial Sequence
  Quasi-synthetic sequence derived from human genome
LGLLAALLLLLLLSRRRTRR

SEQ ID NO: 12288 - protein, 20 aa, Artificial Sequence
  Quasi-synthetic sequence derived from human genome
KKNPKLINALRRCFFWRFMF

SEQ ID NO: 12289 - protein, 20 aa, Artificial Sequence
  Quasi-synthetic sequence derived from human genome
KYLTFRFIFALRLSKKQKKK

SEQ ID NO: 12290 - protein, 20 aa, Artificial Sequence
  Quasi-synthetic sequence derived from human genome
IIKYIIINRFRGRKNMLVKL

SEQ ID NO: 12291 - protein, 20 aa, Artificial Sequence
  Quasi-synthetic sequence derived from human genome
KKIKKVQSFLRGWLCRRKWK

SEQ ID NO: 12292 - protein, 20 aa, Artificial Sequence
  Quasi-synthetic sequence derived from human genome
LLRTLSRAKFWPRRRFNFFV

SEQ ID NO: 12293 - protein, 20 aa, Artificial Sequence
  Quasi-synthetic sequence derived from human genome
KWPRYIRLQRQRAILYKRLK

SEQ ID NO: 12294 - protein, 20 aa, Artificial Sequence
  Quasi-synthetic sequence derived from human genome
VFCLILWKWKKKKRPRNSYK

SEQ ID NO: 12295 - protein, 20 aa, Artificial Sequence
  Quasi-synthetic sequence derived from human genome
VLILLCLLIYYCRRRCLKPR

SEQ ID NO: 12296 - protein, 20 aa, Artificial Sequence
  Quasi-synthetic sequence derived from human genome
LIILLLWKCGFFKRARTRAL

SEQ ID NO: 12297 - protein, 20 aa, Artificial Sequence
  Quasi-synthetic sequence derived from human genome
ARRSRHRLLLLLLRYLVVAL

SEQ ID NO: 12298 - protein, 20 aa, Artificial Sequence
  Quasi-synthetic sequence derived from human genome
WKKFLSRPALPFILRLLRGL

SEQ ID NO: 12299 - protein, 20 aa, Artificial Sequence
  Quasi-synthetic sequence derived from human genome
KVILKKKKKLLLLQKKEWTW

SEQ ID NO: 12300 - protein, 20 aa, Artificial Sequence
  Quasi-synthetic sequence derived from human genome
WKKIPLNALIRRFAHLLVKK

SEQ ID NO: 12301 - protein, 20 aa, Artificial Sequence
  Quasi-synthetic sequence derived from human genome
MPFRRKIYYLPRRYKFMSRI

SEQ ID NO: 12302 - protein, 20 aa, Artificial Sequence
  Quasi-synthetic sequence derived from human genome
FLRLKRRVKSVILVVLLGPL

SEQ ID NO: 12303 - protein, 20 aa, Artificial Sequence
  Quasi-synthetic sequence derived from human genome
SRILKNLVFRILKKCYRGRF

SEQ ID NO: 12304 - protein, 20 aa, Artificial Sequence
  Quasi-synthetic sequence derived from human genome
MARRRRRACIALFLVLLFAF

SEQ ID NO: 12305 - protein, 20 aa, Artificial Sequence
  Quasi-synthetic sequence derived from human genome
KPLRRRVIWLIGQWISVKFK

SEQ ID NO: 12306 - protein, 20 aa, Artificial Sequence
  Quasi-synthetic sequence derived from human genome
LLLLRWRRPALHRPIKVNLL

SEQ ID NO: 12307 - protein, 20 aa, Artificial Sequence
  Quasi-synthetic sequence derived from human genome
NYWELRRRRPKLKKLKKLLM

SEQ ID NO: 12308 - protein, 20 aa, Artificial Sequence
  Quasi-synthetic sequence derived from human genome
LRSLLNWRTKLRRYVAKKLK

SEQ ID NO: 12309 - protein, 20 aa, Artificial Sequence
  Quasi-synthetic sequence derived from human genome
VKKLPGVMLFKKKKTRKLKI

SEQ ID NO: 12310 - protein, 20 aa, Artificial Sequence
  Quasi-synthetic sequence derived from human genome
FIKQLVRKILIVIARPARLL

SEQ ID NO: 12311 - protein, 20 aa, Artificial Sequence
  Quasi-synthetic sequence derived from human genome
RIRVLVIRKLVRSVGRLKSK

SEQ ID NO: 12312 - protein, 20 aa, Artificial Sequence
  Quasi-synthetic sequence derived from human genome
VKRKKNVLRLCCKKLKIFAM

SEQ ID NO: 12313 - protein, 20 aa, Artificial Sequence
  Quasi-synthetic sequence derived from human genome
SFLILSLLLFMVHRLRQRRR

SEQ ID NO: 12314 - protein, 20 aa, Artificial Sequence
  Quasi-synthetic sequence derived from human genome
QYLIRIRKLTLKRQRKLVPL

SEQ ID NO: 12315 - protein, 20 aa, Artificial Sequence
  Quasi-synthetic sequence derived from human genome
PRLRLWALIPWLPRKQRPRI

SEQ ID NO: 12316 - protein, 20 aa, Artificial Sequence
  Quasi-synthetic sequence derived from human genome
ARWRLVGLPVHLLFLRFYKR

SEQ ID NO: 12317 - protein, 20 aa, Artificial Sequence
  Quasi-synthetic sequence derived from human genome
LRKPKRVPSIYKLKLRPRIR

SEQ ID NO: 12318 - protein, 20 aa, Artificial Sequence
  Quasi-synthetic sequence derived from human genome
AVILLLLLLLLLFLILRHRR

SEQ ID NO: 12319 - protein, 20 aa, Artificial Sequence
  Quasi-synthetic sequence derived from human genome
RLWKWLKSPRSWRLGLALLL

SEQ ID NO: 12320 - protein, 20 aa, Artificial Sequence
  Quasi-synthetic sequence derived from human genome
LVFVIVLLALRLWRWHKSRL

SEQ ID NO: 12321 - protein, 20 aa, Artificial Sequence
  Quasi-synthetic sequence derived from human genome
RFRKYLRHFFHRHLLMHLGR

SEQ ID NO: 12322 - protein, 20 aa, Artificial Sequence
  Quasi-synthetic sequence derived from human genome
IRKKHLQRPIFRLRCLVKQL

SEQ ID NO: 12323 - protein, 20 aa, Artificial Sequence
  Quasi-synthetic sequence derived from human genome
MRRFLSKVYSFPMRKLILFL

SEQ ID NO: 12324 - protein, 20 aa, Artificial Sequence
  Quasi-synthetic sequence derived from human genome
KIKRLKKSAFVVLILLITAK

SEQ ID NO: 12325 - protein, 20 aa, Artificial Sequence
  Quasi-synthetic sequence derived from human genome
LKRMFRRIYRHLRPGGILVL

SEQ ID NO: 12326 - protein, 20 aa, Artificial Sequence
  Quasi-synthetic sequence derived from human genome
RVRLRALRLALLILLTFILC

SEQ ID NO: 12327 - protein, 20 aa, Artificial Sequence
  Quasi-synthetic sequence derived from human genome
RKILRLITIRKLFTAIGVLF

SEQ ID NO: 12328 - protein, 20 aa, Artificial Sequence
  Quasi-synthetic sequence derived from human genome
IKKIKKVQSFMRGWLCRRKW

SEQ ID NO: 12329 - protein, 20 aa, Artificial Sequence
  Quasi-synthetic sequence derived from human genome
RKKMVRRVVCILVWLLAFCV

SEQ ID NO: 12330 - protein, 20 aa, Artificial Sequence
  Quasi-synthetic sequence derived from human genome
LFRKWKAFSVWRKNVRSKKI

SEQ ID NO: 12331 - protein, 20 aa, Artificial Sequence
  Quasi-synthetic sequence derived from human genome
RKKWKMGGMKYIFSLLFFLL

SEQ ID NO: 12332 - protein, 20 aa, Artificial Sequence
  Quasi-synthetic sequence derived from human genome
FLRIKRRVKSVVLVILLGPL

SEQ ID NO: 12333 - protein, 20 aa, Artificial Sequence
  Quasi-synthetic sequence derived from human genome
KKKLRRLLKYMFIRDYKSKI

SEQ ID NO: 12334 - protein, 20 aa, Artificial Sequence
  Quasi-synthetic sequence derived from human genome
DRRILWITLRTWKKFVKFMK

SEQ ID NO: 12335 - protein, 20 aa, Artificial Sequence
  Quasi-synthetic sequence derived from human genome
MLALLVFILWKCGFFKRNKK

SEQ ID NO: 12336 - protein, 20 aa, Artificial Sequence
  Quasi-synthetic sequence derived from human genome
KLWKVKKALKMTIFWRGLMP

SEQ ID NO: 12337 - protein, 20 aa, Artificial Sequence
  Quasi-synthetic sequence derived from human genome
MKMMLVRRFRVLILMVFLVA

SEQ ID NO: 12338 - protein, 20 aa, Artificial Sequence
  Quasi-synthetic sequence derived from human genome
LAKALFLLPCISRRLARIRR

SEQ ID NO: 12339 - protein, 20 aa, Artificial Sequence
  Quasi-synthetic sequence derived from human genome
ALRPLVKPKIVKKRTKKFIR

SEQ ID NO: 12340 - protein, 20 aa, Artificial Sequence
  Quasi-synthetic sequence derived from human genome
RKYLRQLFHRRVAVHLVKWL

SEQ ID NO: 12341 - protein, 20 aa, Artificial Sequence
  Quasi-synthetic sequence derived from human genome
LFLCLLPLIVKHIRKKQAKK

SEQ ID NO: 12342 - protein, 20 aa, Artificial Sequence
  Quasi-synthetic sequence derived from human genome
RDVLGFLRVVRFVRILRIFK

SEQ ID NO: 12343 - protein, 20 aa, Artificial Sequence
  Quasi-synthetic sequence derived from human genome
MRWRWWQRLLPWRLLQARGF

SEQ ID NO: 12344 - protein, 20 aa, Artificial Sequence
  Quasi-synthetic sequence derived from human genome
RLRVNLRLVINRLKLLEKKK

SEQ ID NO: 12345 - protein, 20 aa, Artificial Sequence
  Quasi-synthetic sequence derived from human genome
RARRGLLRLPRRSLLAALFF

SEQ ID NO: 12346 - protein, 20 aa, Artificial Sequence
  Quasi-synthetic sequence derived from human genome
RRRKKLPSVLLFKKPSPFIF

SEQ ID NO: 12347 - protein, 20 aa, Artificial Sequence
  Quasi-synthetic sequence derived from human genome
MVSLRKKRLKKFPWSLWVWT

SEQ ID NO: 12348 - protein, 20 aa, Artificial Sequence
  Quasi-synthetic sequence derived from human genome
RSRRQGSRFLWLLKILVIIL

SEQ ID NO: 12349 - protein, 20 aa, Artificial Sequence
  Quasi-synthetic sequence derived from human genome
LCRRLQKFWRVTVKGFFVKK

SEQ ID NO: 12350 - protein, 20 aa, Artificial Sequence
  Quasi-synthetic sequence derived from human genome
LFILLCCLYRLCKKSKPIKK

SEQ ID NO: 12351 - protein, 20 aa, Artificial Sequence
  Quasi-synthetic sequence derived from human genome
MRVLSRTSKFRRLRQLLRRR

SEQ ID NO: 12352 - protein, 20 aa, Artificial Sequence
  Quasi-synthetic sequence derived from human genome
WLRVRKARPQLILSRRPRRR

SEQ ID NO: 12353 - protein, 20 aa, Artificial Sequence
  Quasi-synthetic sequence derived from human genome
FRQCRRRLIPHPRRLWPFVR

SEQ ID NO: 12354 - protein, 20 aa, Artificial Sequence
  Quasi-synthetic sequence derived from human genome
LWLIQWLLLKYKSIISRRFF

SEQ ID NO: 12355 - protein, 20 aa, Artificial Sequence
  Quasi-synthetic sequence derived from human genome
WLWRQSSILRRWKRNWFALW

SEQ ID NO: 12356 - protein, 20 aa, Artificial Sequence
  Quasi-synthetic sequence derived from human genome
PKLKQFTKILRRKRLLPKRC

SEQ ID NO: 12357 - protein, 20 aa, Artificial Sequence
  Quasi-synthetic sequence derived from human genome
VLLLLLLGLLRPLRRRSCLL

SEQ ID NO: 12358 - protein, 20 aa, Artificial Sequence
  Quasi-synthetic sequence derived from human genome
LVLALLVLLLWKMGFFKRAK

SEQ ID NO: 12359 - protein, 20 aa, Artificial Sequence
  Quasi-synthetic sequence derived from human genome
IIRQIRRPKNVVLRLAVKFF

SEQ ID NO: 12360 - protein, 20 aa, Artificial Sequence
  Quasi-synthetic sequence derived from human genome
LFSSLKVVRLLRLGRVARKL

SEQ ID NO: 12361 - protein, 20 aa, Artificial Sequence
  Quasi-synthetic sequence derived from human genome
LLRCPSKKKYKAIRLIFVIM

SEQ ID NO: 12362 - protein, 20 aa, Artificial Sequence
  Quasi-synthetic sequence derived from human genome
FLTVLVIICYKAIKRKPLRK

SEQ ID NO: 12363 - protein, 20 aa, Artificial Sequence
  Quasi-synthetic sequence derived from human genome
KRISLKRPKKCFRNLFHIRR

SEQ ID NO: 12364 - protein, 20 aa, Artificial Sequence
  Quasi-synthetic sequence derived from human genome
KFRRRTCIILALFILFIFSL

SEQ ID NO: 12365 - protein, 20 aa, Artificial Sequence
  Quasi-synthetic sequence derived from human genome
LRLMRIFRILKLARHSTGLR

SEQ ID NO: 12366 - protein, 20 aa, Artificial Sequence
  Quasi-synthetic sequence derived from human genome
LLRLIILLRIFHLFHQKRQL

SEQ ID NO: 12367 - protein, 20 aa, Artificial Sequence
  Quasi-synthetic sequence derived from human genome
FLGKKFKRYFLQLLKYIPPK

SEQ ID NO: 12368 - protein, 20 aa, Artificial Sequence
  Quasi-synthetic sequence derived from human genome
KRKARGYLRLVPLFVLLALL

SEQ ID NO: 12369 - protein, 20 aa, Artificial Sequence
  Quasi-synthetic sequence derived from human genome
RAGVTLRVLRMMRIFWVIKL

SEQ ID NO: 12370 - protein, 20 aa, Artificial Sequence
  Quasi-synthetic sequence derived from human genome
FGAHLLKTVRLLRLLRLLPR

SEQ ID NO: 12371 - protein, 20 aa, Artificial Sequence
  Quasi-synthetic sequence derived from human genome
RIGRILRLVRAARGIRTLLF

SEQ ID NO: 12372 - protein, 20 aa, Artificial Sequence
  Quasi-synthetic sequence derived from human genome
LLLAKVMRFERFGRRRVIIK

SEQ ID NO: 12373 - protein, 20 aa, Artificial Sequence
  Quasi-synthetic sequence derived from human genome
VRVLSRTSKFRRLRQLLRRR

SEQ ID NO: 12374 - protein, 20 aa, Artificial Sequence
  Quasi-synthetic sequence derived from human genome
MRAKWRKKRMRRLKRKRRKM

SEQ ID NO: 12375 - protein, 20 aa, Artificial Sequence
  Quasi-synthetic sequence derived from human genome
VFILLLLVVILIVKKSKLAK

SEQ ID NO: 12376 - protein, 20 aa, Artificial Sequence
  Quasi-synthetic sequence derived from human genome
RFLCGKEIKKKKCIFRLRIR

SEQ ID NO: 12377 - protein, 20 aa, Artificial Sequence
  Quasi-synthetic sequence derived from human genome
LLGPARLCLRLLLLLGYRRR

SEQ ID NO: 12378 - protein, 20 aa, Artificial Sequence
  Quasi-synthetic sequence derived from human genome
RKRLHFKLCKKSSILVHKLL

SEQ ID NO: 12379 - protein, 20 aa, Artificial Sequence
  Quasi-synthetic sequence derived from human genome
RRVRSFLRGLPALLLLLLFL

SEQ ID NO: 12380 - protein, 20 aa, Artificial Sequence
  Quasi-synthetic sequence derived from human genome
VACRFFHFRRLIFTRKGVLR

SEQ ID NO: 12381 - protein, 20 aa, Artificial Sequence
  Quasi-synthetic sequence derived from human genome
KDVLGFLRVVRFVRILRIFK

SEQ ID NO: 12382 - protein, 20 aa, Artificial Sequence
  Quasi-synthetic sequence derived from human genome
LTRKGIVRVVFFPFFFRWWL

SEQ ID NO: 12383 - protein, 20 aa, Artificial Sequence
  Quasi-synthetic sequence derived from human genome
LRALLLWGRRLRPLLRAPAL

SEQ ID NO: 12384 - protein, 20 aa, Artificial Sequence
  Quasi-synthetic sequence derived from human genome
AIKRLARISLVKKLMKKWSV

SEQ ID NO: 12385 - protein, 20 aa, Artificial Sequence
  Quasi-synthetic sequence derived from human genome
NKIIQFIRHWRQWNRIFRWK

SEQ ID NO: 12386 - protein, 20 aa, Artificial Sequence
  Quasi-synthetic sequence derived from human genome
KYAKVKLIRLVGIMLLLYVK

SEQ ID NO: 12387 - protein, 20 aa, Artificial Sequence
  Quasi-synthetic sequence derived from human genome
RKQLVLRRGLLLLGVFLILL

SEQ ID NO: 12388 - protein, 20 aa, Artificial Sequence
  Quasi-synthetic sequence derived from human genome
LLLLLYKYKQKPKYQVRWKI

SEQ ID NO: 12389 - protein, 20 aa, Artificial Sequence
  Quasi-synthetic sequence derived from human genome
HLRIFRIPRRPRKLTLKGYR

SEQ ID NO: 12390 - protein, 20 aa, Artificial Sequence
  Quasi-synthetic sequence derived from human genome
LLAIFVALFFLTKKRRQRQR

SEQ ID NO: 12391 - protein, 20 aa, Artificial Sequence
  Quasi-synthetic sequence derived from human genome
AVVLLLLLLLLLFLILRHRR

SEQ ID NO: 12392 - protein, 20 aa, Artificial Sequence
  Quasi-synthetic sequence derived from human genome
LYALGQKVWKRWKKRYFVLV

SEQ ID NO: 12393 - protein, 20 aa, Artificial Sequence
  Quasi-synthetic sequence derived from human genome
RIGRILRLIRGAKGIRTLLF

SEQ ID NO: 12394 - protein, 20 aa, Artificial Sequence
  Quasi-synthetic sequence derived from human genome
WKFLLRLTKGKFAVMNRKVL

SEQ ID NO: 12395 - protein, 20 aa, Artificial Sequence
  Quasi-synthetic sequence derived from human genome
RGFLIKMGGKIKTWKKRWFV

SEQ ID NO: 12396 - protein, 20 aa, Artificial Sequence
  Quasi-synthetic sequence derived from human genome
LKSIKYLICTRYKWLIIKIV

SEQ ID NO: 12397 - protein, 20 aa, Artificial Sequence
  Quasi-synthetic sequence derived from human genome
LRLFRMLRIFKLGKYWPTFQ

SEQ ID NO: 12398 - protein, 20 aa, Artificial Sequence
  Quasi-synthetic sequence derived from human genome
RRMFRVRNCLRGLGLFLLVF

SEQ ID NO: 12399 - protein, 20 aa, Artificial Sequence
  Quasi-synthetic sequence derived from human genome
IILFKVFLFPRITISKKTKL

SEQ ID NO: 12400 - protein, 20 aa, Artificial Sequence
  Quasi-synthetic sequence derived from human genome
RKRCIKKFSIQRFPKILVLH

SEQ ID NO: 12401 - protein, 20 aa, Artificial Sequence
  Quasi-synthetic sequence derived from human genome
MNVKHWPWMKLFFKIKPLLK

SEQ ID NO: 12402 - protein, 20 aa, Artificial Sequence
  Quasi-synthetic sequence derived from human genome
AIRVYNKRLKALRKIQKLIK

SEQ ID NO: 12403 - protein, 20 aa, Artificial Sequence
  Quasi-synthetic sequence derived from human genome
VYKKHRILKIYHLFVSLLLK

SEQ ID NO: 12404 - protein, 20 aa, Artificial Sequence
  Quasi-synthetic sequence derived from human genome
IRYLLYRAQRAIRLRHALRL

SEQ ID NO: 12405 - protein, 20 aa, Artificial Sequence
  Quasi-synthetic sequence derived from human genome
WKRRILFFVVTLVSVFLVWK

SEQ ID NO: 12406 - protein, 20 aa, Artificial Sequence
  Quasi-synthetic sequence derived from human genome
RRPPVPPPPRRRRRRRLLFW

SEQ ID NO: 12407 - protein, 20 aa, Artificial Sequence
  Quasi-synthetic sequence derived from human genome
FFHVLRRQILLPFRKPLIIF

SEQ ID NO: 12408 - protein, 20 aa, Artificial Sequence
  Quasi-synthetic sequence derived from human genome
YLAVIGRMRTRLVRKRFLCL

SEQ ID NO: 12409 - protein, 20 aa, Artificial Sequence
  Quasi-synthetic sequence derived from human genome
VLALVLVGLVSWRRRQRRLR

SEQ ID NO: 12410 - protein, 20 aa, Artificial Sequence
  Quasi-synthetic sequence derived from human genome
QQVKIWFQNRRMKKKRLLLR

SEQ ID NO: 12411 - protein, 20 aa, Artificial Sequence
  Quasi-synthetic sequence derived from human genome
KKRKKGLRIKGKRRRKKLIL

SEQ ID NO: 12412 - protein, 20 aa, Artificial Sequence
  Quasi-synthetic sequence derived from human genome
RAVRNLKKKLLPWQRRGLLR

SEQ ID NO: 12413 - protein, 20 aa, Artificial Sequence
  Quasi-synthetic sequence derived from human genome
KVARKFWWKNVKMIVLICVI

SEQ ID NO: 12414 - protein, 20 aa, Artificial Sequence
  Quasi-synthetic sequence derived from human genome
VRKVFLRLLPQLLRMHVRPL

SEQ ID NO: 12415 - protein, 20 aa, Artificial Sequence
  Quasi-synthetic sequence derived from human genome
AKWVPALLLRRVPLFSLRFR

SEQ ID NO: 12416 - protein, 20 aa, Artificial Sequence
  Quasi-synthetic sequence derived from human genome
IFTVVLILLKMYNRKMRTRR

SEQ ID NO: 12417 - protein, 20 aa, Artificial Sequence
  Quasi-synthetic sequence derived from human genome
RSKLSLIRKFRLFPRPQVKL

SEQ ID NO: 12418 - protein, 20 aa, Artificial Sequence
  Quasi-synthetic sequence derived from human genome
WKRLLIARRSRKGFFAQIVL

SEQ ID NO: 12419 - protein, 20 aa, Artificial Sequence
  Quasi-synthetic sequence derived from human genome
KVIRALLRILCCLLKAICRV

SEQ ID NO: 12420 - protein, 20 aa, Artificial Sequence
  Quasi-synthetic sequence derived from human genome
RMPQKKKLRSKLKPIFPLIL

SEQ ID NO: 12421 - protein, 20 aa, Artificial Sequence
  Quasi-synthetic sequence derived from human genome
KIWLRLRGLRKYKKTSQRLR

SEQ ID NO: 12422 - protein, 20 aa, Artificial Sequence
  Quasi-synthetic sequence derived from human genome
RRLYYKLGRKLCRRDYLRLF

SEQ ID NO: 12423 - protein, 20 aa, Artificial Sequence
  Quasi-synthetic sequence derived from human genome
FLALLRPFISSKFTRKIRFL

SEQ ID NO: 12424 - protein, 20 aa, Artificial Sequence
  Quasi-synthetic sequence derived from human genome
VLFLIFLLWKLPSARAKIRI

SEQ ID NO: 12425 - protein, 20 aa, Artificial Sequence
  Quasi-synthetic sequence derived from human genome
LRLPRLLSPPLRPRLLLLLL

SEQ ID NO: 12426 - protein, 20 aa, Artificial Sequence
  Quasi-synthetic sequence derived from human genome
LVKRKRTKGKKLLLSIGVLL

SEQ ID NO: 12427 - protein, 20 aa, Artificial Sequence
  Quasi-synthetic sequence derived from human genome
LVVALGIGLFMRRRHIVRKR

SEQ ID NO: 12428 - protein, 20 aa, Artificial Sequence
  Quasi-synthetic sequence derived from human genome
LVIVFIIIVLYMLRFKKYKQ

SEQ ID NO: 12429 - protein, 20 aa, Artificial Sequence
  Quasi-synthetic sequence derived from human genome
LVRGLLLLIPFLILLRKLIF

SEQ ID NO: 12430 - protein, 20 aa, Artificial Sequence
  Quasi-synthetic sequence derived from human genome
LQKKFNKLKKKKKALLALKK

SEQ ID NO: 12431 - protein, 20 aa, Artificial Sequence
  Quasi-synthetic sequence derived from human genome
LRVLRVLRPLRAINRAKGLK

SEQ ID NO: 12432 - protein, 20 aa, Artificial Sequence
  Quasi-synthetic sequence derived from human genome
VIRLVRVFRIFKLSRHSKGL

SEQ ID NO: 12433 - protein, 20 aa, Artificial Sequence
  Quasi-synthetic sequence derived from human genome
ALWRRQIYAVATLRFLKLRR

SEQ ID NO: 12434 - protein, 20 aa, Artificial Sequence
  Quasi-synthetic sequence derived from human genome
KYWRRVLAQRKLLMLKKEKL

SEQ ID NO: 12435 - protein, 20 aa, Artificial Sequence
  Quasi-synthetic sequence derived from human genome
WQIPLGRRFRSLKMWFVFRM

SEQ ID NO: 12436 - protein, 20 aa, Artificial Sequence
  Quasi-synthetic sequence derived from human genome
LFFRRPKASLPRVFVLRALL

SEQ ID NO: 12437 - protein, 20 aa, Artificial Sequence
  Quasi-synthetic sequence derived from human genome
LRLFRAARLIKLLRQGYTIR

SEQ ID NO: 12438 - protein, 20 aa, Artificial Sequence
  Quasi-synthetic sequence derived from human genome
RKAPLWLRAKFQRLLFKLGC

SEQ ID NO: 12439 - protein, 20 aa, Artificial Sequence
  Quasi-synthetic sequence derived from human genome
KKSRKKMCILVLVLSVIILI

SEQ ID NO: 12440 - protein, 20 aa, Artificial Sequence
  Quasi-synthetic sequence derived from human genome
AHLCRLRVRKAIGKYRIKLL

SEQ ID NO: 12441 - protein, 20 aa, Artificial Sequence
  Quasi-synthetic sequence derived from human genome
PRLLRLSLLWLGLLLVRFSR

SEQ ID NO: 12442 - protein, 20 aa, Artificial Sequence
  Quasi-synthetic sequence derived from human genome
FIFICYFKIYIRLKRRNNMM

SEQ ID NO: 12443 - protein, 20 aa, Artificial Sequence
  Quasi-synthetic sequence derived from human genome
LFVLSVHYLWKKWKKHQKKL

SEQ ID NO: 12444 - protein, 20 aa, Artificial Sequence
  Quasi-synthetic sequence derived from human genome
INAFNWAKVRKLSFKRKRFL

SEQ ID NO: 12445 - protein, 20 aa, Artificial Sequence
  Quasi-synthetic sequence derived from human genome
KKIWQKQFRWPKNRLQILKF

SEQ ID NO: 12446 - protein, 20 aa, Artificial Sequence
  Quasi-synthetic sequence derived from human genome
LNKRFRAGFKRAFRWCPFIK

SEQ ID NO: 12447 - protein, 20 aa, Artificial Sequence
  Quasi-synthetic sequence derived from human genome
FLRGLRYLHPLKKWPMRSRL

SEQ ID NO: 12448 - protein, 20 aa, Artificial Sequence
  Quasi-synthetic sequence derived from human genome
VLRCIRLLRIFKITKYWTSL

SEQ ID NO: 12449 - protein, 20 aa, Artificial Sequence
  Quasi-synthetic sequence derived from human genome
RPLVLKTLIQFTVKLRLLIK

SEQ ID NO: 12450 - protein, 20 aa, Artificial Sequence
  Quasi-synthetic sequence derived from human genome
MLRLLLVKKPSVRSLALKLL

SEQ ID NO: 12451 - protein, 20 aa, Artificial Sequence
  Quasi-synthetic sequence derived from human genome
MLKKLSSKVMTKVIKKKIIL

SEQ ID NO: 12452 - protein, 20 aa, Artificial Sequence
  Quasi-synthetic sequence derived from human genome
KQIRARRKTARMLMIVLLVF

SEQ ID NO: 12453 - protein, 20 aa, Artificial Sequence
  Quasi-synthetic sequence derived from human genome
WRCALWHRVWQGRRRARRRL

SEQ ID NO: 12454 - protein, 20 aa, Artificial Sequence
  Quasi-synthetic sequence derived from human genome
KIIRTIFKRLKSFICPKLHM

SEQ ID NO: 12455 - protein, 20 aa, Artificial Sequence
  Quasi-synthetic sequence derived from human genome
LRPRRQKALRMILAVVLVFF

SEQ ID NO: 12456 - protein, 20 aa, Artificial Sequence
  Quasi-synthetic sequence derived from human genome
LAFVIVLLAHRLRRWHKSRL

SEQ ID NO: 12457 - protein, 20 aa, Artificial Sequence
  Quasi-synthetic sequence derived from human genome
LILKRYKIGASRKTFWKRKK

SEQ ID NO: 12458 - protein, 20 aa, Artificial Sequence
  Quasi-synthetic sequence derived from human genome
VLGVLRMAKKRVIVKKLPIV

SEQ ID NO: 12459 - protein, 20 aa, Artificial Sequence
  Quasi-synthetic sequence derived from human genome
RRIVFAGVILFRLLGVILFR

SEQ ID NO: 12460 - protein, 20 aa, Artificial Sequence
  Quasi-synthetic sequence derived from human genome
FSRNLILTYNLRKRIVFRKI

SEQ ID NO: 12461 - protein, 20 aa, Artificial Sequence
  Quasi-synthetic sequence derived from human genome
LLLILKAGRRWNKYFKSRRP

SEQ ID NO: 12462 - protein, 20 aa, Artificial Sequence
  Quasi-synthetic sequence derived from human genome
RFLKLKYYSIILQSRIRMII

SEQ ID NO: 12463 - protein, 20 aa, Artificial Sequence
  Quasi-synthetic sequence derived from human genome
RRLRKNLKSLIIVHPSWFIR

SEQ ID NO: 12464 - protein, 20 aa, Artificial Sequence
  Quasi-synthetic sequence derived from human genome
RRLRKNLKSFIIVHPSWFIR

SEQ ID NO: 12465 - protein, 20 aa, Artificial Sequence
  Quasi-synthetic sequence derived from human genome
RLRKRVNAALVIQKYWRRVL

SEQ ID NO: 12466 - protein, 20 aa, Artificial Sequence
  Quasi-synthetic sequence derived from human genome
RGRRKKKCKICKLRSFFRKL

SEQ ID NO: 12467 - protein, 20 aa, Artificial Sequence
  Quasi-synthetic sequence derived from human genome
VGILFAVFLILLLMYRMKKK

SEQ ID NO: 12468 - protein, 20 aa, Artificial Sequence
  Quasi-synthetic sequence derived from human genome
LLKTVRLLRLLRLLQKLERY

SEQ ID NO: 12469 - protein, 20 aa, Artificial Sequence
  Quasi-synthetic sequence derived from human genome
RVRLLKLKHERKALLALLLI

SEQ ID NO: 12470 - protein, 20 aa, Artificial Sequence
  Quasi-synthetic sequence derived from human genome
AARLARQYLLPLLRRLARRL

SEQ ID NO: 12471 - protein, 20 aa, Artificial Sequence
  Quasi-synthetic sequence derived from human genome
LRLLLFFRFKRTLDRICVLF

SEQ ID NO: 12472 - protein, 20 aa, Artificial Sequence
  Quasi-synthetic sequence derived from human genome
NLLFLHLKRRVRSVILVILL

SEQ ID NO: 12473 - protein, 20 aa, Artificial Sequence
  Quasi-synthetic sequence derived from human genome
FKRLHKLVNSTRRVRKKLIR

SEQ ID NO: 12474 - protein, 20 aa, Artificial Sequence
  Quasi-synthetic sequence derived from human genome
MRLRLRLLALLLLLLAPPAR

SEQ ID NO: 12475 - protein, 20 aa, Artificial Sequence
  Quasi-synthetic sequence derived from human genome
IVGIGVLILLVRYRKCIKLK

SEQ ID NO: 12476 - protein, 20 aa, Artificial Sequence
  Quasi-synthetic sequence derived from human genome
ILLVVAVFCILWNWNKRKKR

SEQ ID NO: 12477 - protein, 20 aa, Artificial Sequence
  Quasi-synthetic sequence derived from human genome
RCARRRRPGLLLPGLWLLLL

SEQ ID NO: 12478 - protein, 20 aa, Artificial Sequence
  Quasi-synthetic sequence derived from human genome
LLRFRKQRKKMAKLPKPVVV

SEQ ID NO: 12479 - protein, 20 aa, Artificial Sequence
  Quasi-synthetic sequence derived from human genome
RLFLKNYSKTRFGYRIKWRI

SEQ ID NO: 12480 - protein, 20 aa, Artificial Sequence
  Quasi-synthetic sequence derived from human genome
FVYFIMRIVNFPKCRRRRLQ

SEQ ID NO: 12481 - protein, 20 aa, Artificial Sequence
  Quasi-synthetic sequence derived from human genome
IVKQIRRPKHVVVKFVVKFF

SEQ ID NO: 12482 - protein, 20 aa, Artificial Sequence
  Quasi-synthetic sequence derived from human genome
RRNFMNIRPVKLKNLILLVK

SEQ ID NO: 12483 - protein, 20 aa, Artificial Sequence
  Quasi-synthetic sequence derived from human genome
VRTWWRWLTFWRRLQSAFLK

SEQ ID NO: 12484 - protein, 20 aa, Artificial Sequence
  Quasi-synthetic sequence derived from human genome
TMKLLKLRRNIVKLSLYRHF

SEQ ID NO: 12485 - protein, 20 aa, Artificial Sequence
  Quasi-synthetic sequence derived from human genome
FLLLLAILLFFAVKYLLRWK

SEQ ID NO: 12486 - protein, 20 aa, Artificial Sequence
  Quasi-synthetic sequence derived from human genome
KLFKRRRVLNRERRLRHRVV

SEQ ID NO: 12487 - protein, 20 aa, Artificial Sequence
  Quasi-synthetic sequence derived from human genome
SLLAIFIKMCLWLWKQFLKR

SEQ ID NO: 12488 - protein, 20 aa, Artificial Sequence
  Quasi-synthetic sequence derived from human genome
IFVFFRKLTTIFPLNWKYRK

SEQ ID NO: 12489 - protein, 20 aa, Artificial Sequence
  Quasi-synthetic sequence derived from human genome
MVRPHLLKKKILGRVWWLMP

SEQ ID NO: 12490 - protein, 20 aa, Artificial Sequence
  Quasi-synthetic sequence derived from human genome
LLKPVFLQRNLKKFRRRWQS

SEQ ID NO: 12491 - protein, 20 aa, Artificial Sequence
  Quasi-synthetic sequence derived from human genome
LSRKILRLITIRKLFTAIGK

SEQ ID NO: 12492 - protein, 20 aa, Artificial Sequence
  Quasi-synthetic sequence derived from human genome
KFLRNKAIIRHRPALVKVIL

SEQ ID NO: 12493 - protein, 20 aa, Artificial Sequence
  Quasi-synthetic sequence derived from human genome
IAKVKMKFRFLGKLMAKAIM

SEQ ID NO: 12494 - protein, 20 aa, Artificial Sequence
  Quasi-synthetic sequence derived from human genome
LRIARVLKLLKMAVGMRALL

SEQ ID NO: 12495 - protein, 20 aa, Artificial Sequence
  Quasi-synthetic sequence derived from human genome
LKLMVQAWPFRRLPLRPLIK

SEQ ID NO: 12496 - protein, 20 aa, Artificial Sequence
  Quasi-synthetic sequence derived from human genome
FYPWVNILKISFKRKKFFIH

SEQ ID NO: 12497 - protein, 20 aa, Artificial Sequence
  Quasi-synthetic sequence derived from human genome
CIFVLLVLVLLILSMRRHRK

SEQ ID NO: 12498 - protein, 20 aa, Artificial Sequence
  Quasi-synthetic sequence derived from human genome
KLVFLPLRLVWKEVILRKIL

SEQ ID NO: 12499 - protein, 20 aa, Artificial Sequence
  Quasi-synthetic sequence derived from human genome
LRLHCGLWVRRKAGYKKKLW

SEQ ID NO: 12500 - protein, 20 aa, Artificial Sequence
  Quasi-synthetic sequence derived from human genome
KLMKQRRKPPGFLALVKLLR

SEQ ID NO: 12501 - protein, 20 aa, Artificial Sequence
  Quasi-synthetic sequence derived from human genome
FCLILWKWKKKKRPRNSYKC

SEQ ID NO: 12502 - protein, 20 aa, Artificial Sequence
  Quasi-synthetic sequence derived from human genome
FWKRYRFKLIAFMVISIIAL

SEQ ID NO: 12503 - protein, 20 aa, Artificial Sequence
  Quasi-synthetic sequence derived from human genome
IIQQYKFLRFRRSLLLLVKH

SEQ ID NO: 12504 - protein, 20 aa, Artificial Sequence
  Quasi-synthetic sequence derived from human genome
IFEKLFKSLLGKKKMRILIL

SEQ ID NO: 12505 - protein, 20 aa, Artificial Sequence
  Quasi-synthetic sequence derived from human genome
FIFYLRNMKKKYTKMVKLLH

SEQ ID NO: 12506 - protein, 20 aa, Artificial Sequence
  Quasi-synthetic sequence derived from human genome
WRPRRARGTPLLLLLLLLLL

SEQ ID NO: 12507 - protein, 20 aa, Artificial Sequence
  Quasi-synthetic sequence derived from human genome
CTRSIVLALRLRKRFLNFFL

SEQ ID NO: 12508 - protein, 20 aa, Artificial Sequence
  Quasi-synthetic sequence derived from human genome
IMILGLICLLRWRRRKGQQR

SEQ ID NO: 12509 - protein, 20 aa, Artificial Sequence
  Quasi-synthetic sequence derived from human genome
MIFLGLYINFRHLYKQRRRR

SEQ ID NO: 12510 - protein, 20 aa, Artificial Sequence
  Quasi-synthetic sequence derived from human genome
LSRRFRSVKLWFVIRSFGVK

SEQ ID NO: 12511 - protein, 20 aa, Artificial Sequence
  Quasi-synthetic sequence derived from human genome
LKLFRAARLIKLLRQGYTIR

SEQ ID NO: 12512 - protein, 20 aa, Artificial Sequence
  Quasi-synthetic sequence derived from human genome
KAAMRRAFHIRLIARRLGWL

SEQ ID NO: 12513 - protein, 20 aa, Artificial Sequence
  Quasi-synthetic sequence derived from human genome
FPVKKCSAFQFFKKRVRRWI

SEQ ID NO: 12514 - protein, 20 aa, Artificial Sequence
  Quasi-synthetic sequence derived from human genome
RRKMMFMGFIRLGVWYNFFR

SEQ ID NO: 12515 - protein, 20 aa, Artificial Sequence
  Quasi-synthetic sequence derived from human genome
FLYKLAQLFRWIRKAAFSRL

SEQ ID NO: 12516 - protein, 20 aa, Artificial Sequence
  Quasi-synthetic sequence derived from human genome
LLQLKGKKHVLHLWPKRLLL

SEQ ID NO: 12517 - protein, 20 aa, Artificial Sequence
  Quasi-synthetic sequence derived from human genome
MKLLLWACIVCVAFARKRRF

SEQ ID NO: 12518 - protein, 20 aa, Artificial Sequence
  Quasi-synthetic sequence derived from human genome
CLLKQGHRRKNWKVRKFILR

SEQ ID NO: 12519 - protein, 20 aa, Artificial Sequence
  Quasi-synthetic sequence derived from human genome
RIRRLGFSHRILFANFIKRY

SEQ ID NO: 12520 - protein, 20 aa, Artificial Sequence
  Quasi-synthetic sequence derived from human genome
IRPFKASLLNIIKRWSLLFK

SEQ ID NO: 12521 - protein, 20 aa, Artificial Sequence
  Quasi-synthetic sequence derived from human genome
FLFKRFLRIQRLFPPVPQIK

SEQ ID NO: 12522 - protein, 20 aa, Artificial Sequence
  Quasi-synthetic sequence derived from human genome
KRRLSLYLTKIHFWLPVLKM

SEQ ID NO: 12523 - protein, 20 aa, Artificial Sequence
  Quasi-synthetic sequence derived from human genome
KIFKKLPGFKKIHVLGFRPK

SEQ ID NO: 12524 - protein, 20 aa, Artificial Sequence
  Quasi-synthetic sequence derived from human genome
VRQIFIHKLPLYLRLKRPKP

SEQ ID NO: 12525 - protein, 20 aa, Artificial Sequence
  Quasi-synthetic sequence derived from human genome
FIRRRINKIQLIKGPNRILL

SEQ ID NO: 12526 - protein, 20 aa, Artificial Sequence
  Quasi-synthetic sequence derived from human genome
RLKLFFIKNQRSSLRIRLFN

SEQ ID NO: 12527 - protein, 20 aa, Artificial Sequence
  Quasi-synthetic sequence derived from human genome
VVVSLVCLILLVKIKLKQRR

SEQ ID NO: 12528 - protein, 20 aa, Artificial Sequence
  Quasi-synthetic sequence derived from human genome
LQLLRICRVLRSLKLLAQFR

SEQ ID NO: 12529 - protein, 20 aa, Artificial Sequence
  Quasi-synthetic sequence derived from human genome
ILFSLIVGLLTYWFLFRKKK

SEQ ID NO: 12530 - protein, 20 aa, Artificial Sequence
  Quasi-synthetic sequence derived from human genome
QLAKRNLRLLVLGRKHMLRR

SEQ ID NO: 12531 - protein, 20 aa, Artificial Sequence
  Quasi-synthetic sequence derived from human genome
IPRLEKILRNKAKIKFIIKK

SEQ ID NO: 12532 - protein, 20 aa, Artificial Sequence
  Quasi-synthetic sequence derived from human genome
RYFLWHTYRWLLLKLLLLLL

SEQ ID NO: 12533 - protein, 20 aa, Artificial Sequence
  Quasi-synthetic sequence derived from human genome
LLLFQVIRLYQRRRWTIRAM

SEQ ID NO: 12534 - protein, 20 aa, Artificial Sequence
  Quasi-synthetic sequence derived from human genome
FRLMRIFRVLKLARHSTGLR

SEQ ID NO: 12535 - protein, 20 aa, Artificial Sequence
  Quasi-synthetic sequence derived from human genome
KKGSVLKRRLVKLVVNFLFY

SEQ ID NO: 12536 - protein, 20 aa, Artificial Sequence
  Quasi-synthetic sequence derived from human genome
IVRFWAKHRWGLPLRVLKPI

SEQ ID NO: 12537 - protein, 20 aa, Artificial Sequence
  Quasi-synthetic sequence derived from human genome
LFLRAVLHVLKAKRLGIWLF

SEQ ID NO: 12538 - protein, 20 aa, Artificial Sequence
  Quasi-synthetic sequence derived from human genome
LRKKLKLPIGKRNWLKRSSL

SEQ ID NO: 12539 - protein, 20 aa, Artificial Sequence
  Quasi-synthetic sequence derived from human genome
LLYRVRRFDLLKRILKMDRK

SEQ ID NO: 12540 - protein, 20 aa, Artificial Sequence
  Quasi-synthetic sequence derived from human genome
SLLLWPTRLRRSFLAWRRGR

SEQ ID NO: 12541 - protein, 20 aa, Artificial Sequence
  Quasi-synthetic sequence derived from human genome
LLLQSFKRRFLAARALRSFR

SEQ ID NO: 12542 - protein, 20 aa, Artificial Sequence
  Quasi-synthetic sequence derived from human genome
LEALPWVLRWLRSRRRRPRR

SEQ ID NO: 12543 - protein, 20 aa, Artificial Sequence
  Quasi-synthetic sequence derived from human genome
LLMVFVALLVFYITKRKKQR

SEQ ID NO: 12544 - protein, 20 aa, Artificial Sequence
  Quasi-synthetic sequence derived from human genome
LLFKFKQLKMPVRALLRLAP

SEQ ID NO: 12545 - protein, 20 aa, Artificial Sequence
  Quasi-synthetic sequence derived from human genome
RRAKRKVTRMILIVAALFCL

SEQ ID NO: 12546 - protein, 20 aa, Artificial Sequence
  Quasi-synthetic sequence derived from human genome
KKRLLSWKQQVLKLLRTFPR

SEQ ID NO: 12547 - protein, 20 aa, Artificial Sequence
  Quasi-synthetic sequence derived from human genome
FRNYFLKILKDLWCVRRKYK

SEQ ID NO: 12548 - protein, 20 aa, Artificial Sequence
  Quasi-synthetic sequence derived from human genome
TLLLFILLLVTVLLAARRRR

SEQ ID NO: 12549 - protein, 20 aa, Artificial Sequence
  Quasi-synthetic sequence derived from human genome
IRKLYMKSLLKIFAWATLRM

SEQ ID NO: 12550 - protein, 20 aa, Artificial Sequence
  Quasi-synthetic sequence derived from human genome
VLRRQILLPFRKPLIIFTPK

SEQ ID NO: 12551 - protein, 20 aa, Artificial Sequence
  Quasi-synthetic sequence derived from human genome
WRLPRISARAPYRLRRLRRH

SEQ ID NO: 12552 - protein, 20 aa, Artificial Sequence
  Quasi-synthetic sequence derived from human genome
FPLRKPRKAHKYLRLSRKKF

SEQ ID NO: 12553 - protein, 20 aa, Artificial Sequence
  Quasi-synthetic sequence derived from human genome
GKIMVRRCLVTLRPFRLFVL

SEQ ID NO: 12554 - protein, 20 aa, Artificial Sequence
  Quasi-synthetic sequence derived from human genome
SRVFFWWLNPLFKIGHKRRL

SEQ ID NO: 12555 - protein, 20 aa, Artificial Sequence
  Quasi-synthetic sequence derived from human genome
FLAFVAVLLGLRLRRWHKSR

SEQ ID NO: 12556 - protein, 20 aa, Artificial Sequence
  Quasi-synthetic sequence derived from human genome
RLSKQLLLRNFIRMKRCVMV

SEQ ID NO: 12557 - protein, 20 aa, Artificial Sequence
  Quasi-synthetic sequence derived from human genome
KKRKRAIKLIVTVLAMYLIC

SEQ ID NO: 12558 - protein, 20 aa, Artificial Sequence
  Quasi-synthetic sequence derived from human genome
MFSIWRFAWRKSIKKYHAWR

SEQ ID NO: 12559 - protein, 20 aa, Artificial Sequence
  Quasi-synthetic sequence derived from human genome
IFIGGSFILKKKGLLRLARK

SEQ ID NO: 12560 - protein, 20 aa, Artificial Sequence
  Quasi-synthetic sequence derived from human genome
GRSVHYWKKVLPLLKIIKKK

SEQ ID NO: 12561 - protein, 20 aa, Artificial Sequence
  Quasi-synthetic sequence derived from human genome
IFFISLRLIAYFVLRYKIRA

SEQ ID NO: 12562 - protein, 20 aa, Artificial Sequence
  Quasi-synthetic sequence derived from human genome
VTLRKRTLKVLTFLVLFIFL

SEQ ID NO: 12563 - protein, 20 aa, Artificial Sequence
  Quasi-synthetic sequence derived from human genome
KPFLFLLKKKIPSPVKLAFI

SEQ ID NO: 12564 - protein, 20 aa, Artificial Sequence
  Quasi-synthetic sequence derived from human genome
LFVISITTIIVIFLNRRRRR

SEQ ID NO: 12565 - protein, 20 aa, Artificial Sequence
  Quasi-synthetic sequence derived from human genome
RQVMKMRPKDLWKRLMIKFR

SEQ ID NO: 12566 - protein, 20 aa, Artificial Sequence
  Quasi-synthetic sequence derived from human genome
VAAGLFAYVLRRRRKKLPFR

SEQ ID NO: 12567 - protein, 20 aa, Artificial Sequence
  Quasi-synthetic sequence derived from human genome
PRARKKRSRIPLLRKRRFQL

SEQ ID NO: 12568 - protein, 20 aa, Artificial Sequence
  Quasi-synthetic sequence derived from human genome
LLFFTILVLSYFRYMRIYRR

SEQ ID NO: 12569 - protein, 20 aa, Artificial Sequence
  Quasi-synthetic sequence derived from human genome
LSFRKLMRWILILVIALWFI

SEQ ID NO: 12570 - protein, 20 aa, Artificial Sequence
  Quasi-synthetic sequence derived from human genome
KKMKHLWFFLLLVAAPRWVL

SEQ ID NO: 12571 - protein, 20 aa, Artificial Sequence
  Quasi-synthetic sequence derived from human genome
KRFLKHAGKWSLRWFLSPRW

SEQ ID NO: 12572 - protein, 20 aa, Artificial Sequence
  Quasi-synthetic sequence derived from human genome
LLKMSGKVKSWKRRWFVLKG

SEQ ID NO: 12573 - protein, 20 aa, Artificial Sequence
  Quasi-synthetic sequence derived from human genome
VPLRQRRQLLLQKLLQRRRK

SEQ ID NO: 12574 - protein, 20 aa, Artificial Sequence
  Quasi-synthetic sequence derived from human genome
KKPRTFIIKLIKWLMIAIPA

SEQ ID NO: 12575 - protein, 20 aa, Artificial Sequence
  Quasi-synthetic sequence derived from human genome
LRLKNVSLKVQRKKMLLQLR

SEQ ID NO: 12576 - protein, 20 aa, Artificial Sequence
  Quasi-synthetic sequence derived from human genome
FGILIKRRQQKIRKYTMRRL

SEQ ID NO: 12577 - protein, 20 aa, Artificial Sequence
  Quasi-synthetic sequence derived from human genome
FSPTLFRVIRLARIGRILRL

SEQ ID NO: 12578 - protein, 20 aa, Artificial Sequence
  Quasi-synthetic sequence derived from human genome
RMLIMPRRNFPIAMIRPKWK

SEQ ID NO: 12579 - protein, 20 aa, Artificial Sequence
  Quasi-synthetic sequence derived from human genome
RLRHLRRPRVARLLCLGVWA

SEQ ID NO: 12580 - protein, 20 aa, Artificial Sequence
  Quasi-synthetic sequence derived from human genome
LRVKLTVRYKRVTTHRRIWL

SEQ ID NO: 12581 - protein, 20 aa, Artificial Sequence
  Quasi-synthetic sequence derived from human genome
NKKNWRRVYKSLLLLAYLIR

SEQ ID NO: 12582 - protein, 20 aa, Artificial Sequence
  Quasi-synthetic sequence derived from human genome
WPFLRSFRVLRVFKLAKSWP

SEQ ID NO: 12583 - protein, 20 aa, Artificial Sequence
  Quasi-synthetic sequence derived from human genome
FYPWFRKALKMMLFGKIFQK

SEQ ID NO: 12584 - protein, 20 aa, Artificial Sequence
  Quasi-synthetic sequence derived from human genome
KKLKILGMPFRNIRSILKMV

SEQ ID NO: 12585 - protein, 20 aa, Artificial Sequence
  Quasi-synthetic sequence derived from human genome
RYRFRKRDKVLFYGRKIMRK

SEQ ID NO: 12586 - protein, 20 aa, Artificial Sequence
  Quasi-synthetic sequence derived from human genome
LLKLYMWKMTRFCISRRLIT

SEQ ID NO: 12587 - protein, 20 aa, Artificial Sequence
  Quasi-synthetic sequence derived from human genome
VLRCVRLLRIFKITRYWNSL

SEQ ID NO: 12588 - protein, 20 aa, Artificial Sequence
  Quasi-synthetic sequence derived from human genome
GKRIHLLTRRNFLLGKWIIF

SEQ ID NO: 12589 - protein, 20 aa, Artificial Sequence
  Quasi-synthetic sequence derived from human genome
RLRRVIAAFYFPKREKKRIL

SEQ ID NO: 12590 - protein, 20 aa, Artificial Sequence
  Quasi-synthetic sequence derived from human genome
KYVLARRRLVKVINNRAKLL

SEQ ID NO: 12591 - protein, 20 aa, Artificial Sequence
  Quasi-synthetic sequence derived from human genome
RLRINRFAWPKILKISYKRS

SEQ ID NO: 12592 - protein, 20 aa, Artificial Sequence
  Quasi-synthetic sequence derived from human genome
LLLRLVCLKPPRRKKPACRV

SEQ ID NO: 12593 - protein, 20 aa, Artificial Sequence
  Quasi-synthetic sequence derived from human genome
LLRRPFRQVLAGMVHRLLKR

SEQ ID NO: 12594 - protein, 20 aa, Artificial Sequence
  Quasi-synthetic sequence derived from human genome
RRPRGSTARTLLRLLLRLLL

SEQ ID NO: 12595 - protein, 20 aa, Artificial Sequence
  Quasi-synthetic sequence derived from human genome
KRLAVLRLFWVLTVLSLKFV

SEQ ID NO: 12596 - protein, 20 aa, Artificial Sequence
  Quasi-synthetic sequence derived from human genome
RRRKWIRYRRYKSRDIWAKI

SEQ ID NO: 12597 - protein, 20 aa, Artificial Sequence
  Quasi-synthetic sequence derived from human genome
LFKIYFKINKLHLCKPLIRA

SEQ ID NO: 12598 - protein, 20 aa, Artificial Sequence
  Quasi-synthetic sequence derived from human genome
FAFMLFRKRLGSMILAFRPR

SEQ ID NO: 12599 - protein, 20 aa, Artificial Sequence
  Quasi-synthetic sequence derived from human genome
AFVTVLLALKLRRWHKSRLL

SEQ ID NO: 12600 - protein, 20 aa, Artificial Sequence
  Quasi-synthetic sequence derived from human genome
FLKILKLLISKLKAHQMCFR

SEQ ID NO: 12601 - protein, 20 aa, Artificial Sequence
  Quasi-synthetic sequence derived from human genome
RFRRLWPCGRRRRHRARRAL

SEQ ID NO: 12602 - protein, 20 aa, Artificial Sequence
  Quasi-synthetic sequence derived from human genome
KVRRQRPRRRVCWALVAVLL

SEQ ID NO: 12603 - protein, 20 aa, Artificial Sequence
  Quasi-synthetic sequence derived from human genome
RLRGAILTMAFKKILKLKNI

SEQ ID NO: 12604 - protein, 20 aa, Artificial Sequence
  Quasi-synthetic sequence derived from human genome
WYLRSLVQNLLLIRRFKKTI

SEQ ID NO: 12605 - protein, 20 aa, Artificial Sequence
  Quasi-synthetic sequence derived from human genome
CRVIFLNRKILLIRPKMALA

SEQ ID NO: 12606 - protein, 20 aa, Artificial Sequence
  Quasi-synthetic sequence derived from human genome
LCIIILLILVLMFVVWMKRR

SEQ ID NO: 12607 - protein, 20 aa, Artificial Sequence
  Quasi-synthetic sequence derived from human genome
PLFVVITLLKTRGPFRKRLR

SEQ ID NO: 12608 - protein, 20 aa, Artificial Sequence
  Quasi-synthetic sequence derived from human genome
KFKFFFQRNPYFRNKLIVKV

SEQ ID NO: 12609 - protein, 20 aa, Artificial Sequence
  Quasi-synthetic sequence derived from human genome
LYPLLIKKHWLWTRKCFVCK

SEQ ID NO: 12610 - protein, 20 aa, Artificial Sequence
  Quasi-synthetic sequence derived from human genome
RRRRVLQTLVWFLLTLLLAL

SEQ ID NO: 12611 - protein, 20 aa, Artificial Sequence
  Quasi-synthetic sequence derived from human genome
KLKQRVVLLAILLVIFIFTK

SEQ ID NO: 12612 - protein, 20 aa, Artificial Sequence
  Quasi-synthetic sequence derived from human genome
RNVQKKVALAKKLLAKLRFL

SEQ ID NO: 12613 - protein, 20 aa, Artificial Sequence
  Quasi-synthetic sequence derived from human genome
RAVIKLQSLVRMWRVRWRYC

SEQ ID NO: 12614 - protein, 20 aa, Artificial Sequence
  Quasi-synthetic sequence derived from human genome
RRLSIKMKKLPELRRRLSLR

SEQ ID NO: 12615 - protein, 20 aa, Artificial Sequence
  Quasi-synthetic sequence derived from human genome
LRNKRRRMQVRVKLGKFQLL

SEQ ID NO: 12616 - protein, 20 aa, Artificial Sequence
  Quasi-synthetic sequence derived from human genome
LKRFQLTKLPPYLIFCIKRF

SEQ ID NO: 12617 - protein, 20 aa, Artificial Sequence
  Quasi-synthetic sequence derived from human genome
NKRLVLRTKLHKLIDFLLRK

SEQ ID NO: 12618 - protein, 20 aa, Artificial Sequence
  Quasi-synthetic sequence derived from human genome
FLLRPRSHKSRVKGFLRLKM

SEQ ID NO: 12619 - protein, 20 aa, Artificial Sequence
  Quasi-synthetic sequence derived from human genome
RKFLQMKRRKYGFIYKTHLF

SEQ ID NO: 12620 - protein, 20 aa, Artificial Sequence
  Quasi-synthetic sequence derived from human genome
AASLVFFIYMISFIFRKRRK

SEQ ID NO: 12621 - protein, 20 aa, Artificial Sequence
  Quasi-synthetic sequence derived from human genome
VFFLTSRTRALLRRFPRMLL

SEQ ID NO: 12622 - protein, 20 aa, Artificial Sequence
  Quasi-synthetic sequence derived from human genome
IILKIVHRRIINRFHSFLLF

SEQ ID NO: 12623 - protein, 20 aa, Artificial Sequence
  Quasi-synthetic sequence derived from human genome
KHLYNWNLPPRRILFIKRFI

SEQ ID NO: 12624 - protein, 20 aa, Artificial Sequence
  Quasi-synthetic sequence derived from human genome
WVKRHRSSFRNRFPLLKVLI

SEQ ID NO: 12625 - protein, 20 aa, Artificial Sequence
  Quasi-synthetic sequence derived from human genome
KPYIRKKAVLIMYKVFLKYP

SEQ ID NO: 12626 - protein, 20 aa, Artificial Sequence
  Quasi-synthetic sequence derived from human genome
FKRKGKLSTIGKIFKPWKWR

SEQ ID NO: 12627 - protein, 20 aa, Artificial Sequence
  Quasi-synthetic sequence derived from human genome
IKFFLIDFIFKRCPRLRAKY

SEQ ID NO: 12628 - protein, 20 aa, Artificial Sequence
  Quasi-synthetic sequence derived from human genome
LMLALLVFILWKCGFFKRSR

SEQ ID NO: 12629 - protein, 20 aa, Artificial Sequence
  Quasi-synthetic sequence derived from human genome
IVVLRPLQLLRLFKLKERYR

SEQ ID NO: 12630 - protein, 20 aa, Artificial Sequence
  Quasi-synthetic sequence derived from human genome
ILPFQRITRLKLLLQNILKR

SEQ ID NO: 12631 - protein, 20 aa, Artificial Sequence
  Quasi-synthetic sequence derived from human genome
VKYLLSATKLRQFVILRKKK

SEQ ID NO: 12632 - protein, 20 aa, Artificial Sequence
  Quasi-synthetic sequence derived from human genome
KIGFRLRNLLKLPKAHKWCI

SEQ ID NO: 12633 - protein, 20 aa, Artificial Sequence
  Quasi-synthetic sequence derived from human genome
RKGLRFLHFPYLLTLQLKRF

SEQ ID NO: 12634 - protein, 20 aa, Artificial Sequence
  Quasi-synthetic sequence derived from human genome
KRKRITGRKRLSKGFWSLLF

SEQ ID NO: 12635 - protein, 20 aa, Artificial Sequence
  Quasi-synthetic sequence derived from human genome
IYRLPQVLRLHLKRFRWSGR

SEQ ID NO: 12636 - protein, 20 aa, Artificial Sequence
  Quasi-synthetic sequence derived from human genome
KIRTRLIRKRFLCLGWGLPA

SEQ ID NO: 12637 - protein, 20 aa, Artificial Sequence
  Quasi-synthetic sequence derived from human genome
RARWLRGILLFLFTLKCVYL

SEQ ID NO: 12638 - protein, 20 aa, Artificial Sequence
  Quasi-synthetic sequence derived from human genome
APRRLLLALHRRLRGLRRAA

SEQ ID NO: 12639 - protein, 20 aa, Artificial Sequence
  Quasi-synthetic sequence derived from human genome
GLLMFIIILLGVMLTIKRRR

SEQ ID NO: 12640 - protein, 20 aa, Artificial Sequence
  Quasi-synthetic sequence derived from human genome
LALGLLQAIKLYLRRQRLLR

SEQ ID NO: 12641 - protein, 20 aa, Artificial Sequence
  Quasi-synthetic sequence derived from human genome
RSIRILKFLVAKRKFKETLR

SEQ ID NO: 12642 - protein, 20 aa, Artificial Sequence
  Quasi-synthetic sequence derived from human genome
LVIRALRLWRTAKLQVTLKK

SEQ ID NO: 12643 - protein, 20 aa, Artificial Sequence
  Quasi-synthetic sequence derived from human genome
VPKLCRIKASKALKKKIRRF

SEQ ID NO: 12644 - protein, 20 aa, Artificial Sequence
  Quasi-synthetic sequence derived from human genome
RRYTYLAKAVLRRIVSKIFR

SEQ ID NO: 12645 - protein, 20 aa, Artificial Sequence
  Quasi-synthetic sequence derived from human genome
LFRRCRRRLIPHPRRLSPVV

SEQ ID NO: 12646 - protein, 20 aa, Artificial Sequence
  Quasi-synthetic sequence derived from human genome
KLLKVIRKKLVHKTLDMIKK

SEQ ID NO: 12647 - protein, 20 aa, Artificial Sequence
  Quasi-synthetic sequence derived from human genome
MLKCILKFFLRALKILIPVT

SEQ ID NO: 12648 - protein, 20 aa, Artificial Sequence
  Quasi-synthetic sequence derived from human genome
KLKRKYWWKNCKMMIMLGAI

SEQ ID NO: 12649 - protein, 20 aa, Artificial Sequence
  Quasi-synthetic sequence derived from human genome
LMALKKRTKDKLFQFLKLRK

SEQ ID NO: 12650 - protein, 20 aa, Artificial Sequence
  Quasi-synthetic sequence derived from human genome
NIKAGKAFLRLKRKFIQMRR

SEQ ID NO: 12651 - protein, 20 aa, Artificial Sequence
  Quasi-synthetic sequence derived from human genome
RLLRRTLMRYVNLTSLLIFR

SEQ ID NO: 12652 - protein, 20 aa, Artificial Sequence
  Quasi-synthetic sequence derived from human genome
KKKWKKTCCLPSFVIFLFII

SEQ ID NO: 12653 - protein, 20 aa, Artificial Sequence
  Quasi-synthetic sequence derived from human genome
LWKRPFGRPSAKWSRRFFII

SEQ ID NO: 12654 - protein, 20 aa, Artificial Sequence
  Quasi-synthetic sequence derived from human genome
KFKKFDHRYLRKILIRKNLP

SEQ ID NO: 12655 - protein, 20 aa, Artificial Sequence
  Quasi-synthetic sequence derived from human genome
RLIFHHLKRKAKSVVLVIVL

SEQ ID NO: 12656 - protein, 20 aa, Artificial Sequence
  Quasi-synthetic sequence derived from human genome
LLGRLPWRVASGARRFRRWL

SEQ ID NO: 12657 - protein, 20 aa, Artificial Sequence
  Quasi-synthetic sequence derived from human genome
RRVLLVMSKAKRKWVSVRPL

SEQ ID NO: 12658 - protein, 20 aa, Artificial Sequence
  Quasi-synthetic sequence derived from human genome
WVFILFRKAVFQRLKLWVCC

SEQ ID NO: 12659 - protein, 20 aa, Artificial Sequence
  Quasi-synthetic sequence derived from human genome
CWRKWKQLSRLQRNMILFLL

SEQ ID NO: 12660 - protein, 20 aa, Artificial Sequence
  Quasi-synthetic sequence derived from human genome
INFLIFIRILGILLSKLRTR

SEQ ID NO: 12661 - protein, 20 aa, Artificial Sequence
  Quasi-synthetic sequence derived from human genome
IIRLPLRLINISHLIRKILV

SEQ ID NO: 12662 - protein, 20 aa, Artificial Sequence
  Quasi-synthetic sequence derived from human genome
LRCLRVLLLGKNRIKKISNL

SEQ ID NO: 12663 - protein, 20 aa, Artificial Sequence
  Quasi-synthetic sequence derived from human genome
KIFFLFRLCKKLPFNMMSWL

SEQ ID NO: 12664 - protein, 20 aa, Artificial Sequence
  Quasi-synthetic sequence derived from human genome
LFRSRSKRRHRTVKLIFAIV

SEQ ID NO: 12665 - protein, 20 aa, Artificial Sequence
  Quasi-synthetic sequence derived from human genome
LKIMPKKKRLSAGRVPLILF

SEQ ID NO: 12666 - protein, 20 aa, Artificial Sequence
  Quasi-synthetic sequence derived from human genome
RHRCRKRKPLLAIGFYLYRM

SEQ ID NO: 12667 - protein, 20 aa, Artificial Sequence
  Quasi-synthetic sequence derived from human genome
KRLKTKAVRMIAIVLAIFLV

SEQ ID NO: 12668 - protein, 20 aa, Artificial Sequence
  Quasi-synthetic sequence derived from human genome
LLKCRCRMLFNDLKVFLLRR

SEQ ID NO: 12669 - protein, 20 aa, Artificial Sequence
  Quasi-synthetic sequence derived from human genome
VHKFLQLRFWGWWKLYNKVK

SEQ ID NO: 12670 - protein, 20 aa, Artificial Sequence
  Quasi-synthetic sequence derived from human genome
RIKTSIFSLFRAPKLRMRVF

SEQ ID NO: 12671 - protein, 20 aa, Artificial Sequence
  Quasi-synthetic sequence derived from human genome
KRWIQLFKVITNLVKMLKSR

SEQ ID NO: 12672 - protein, 20 aa, Artificial Sequence
  Quasi-synthetic sequence derived from human genome
RRRFLSLKKTAILIQRKYRA

SEQ ID NO: 12673 - protein, 20 aa, Artificial Sequence
  Quasi-synthetic sequence derived from human genome
FLKPIAKLFSVIKNKLSRKL

SEQ ID NO: 12674 - protein, 20 aa, Artificial Sequence
  Quasi-synthetic sequence derived from human genome
LSGFLVIFYCYIRKRCLKLK

SEQ ID NO: 12675 - protein, 20 aa, Artificial Sequence
  Quasi-synthetic sequence derived from human genome
LKRRVKSVILVMLLGPLLFL

SEQ ID NO: 12676 - protein, 20 aa, Artificial Sequence
  Quasi-synthetic sequence derived from human genome
GGILALLILILLLLLFLRRR

SEQ ID NO: 12677 - protein, 20 aa, Artificial Sequence
  Quasi-synthetic sequence derived from human genome
LRLGSMKCTLLLILLRQWKR

SEQ ID NO: 12678 - protein, 20 aa, Artificial Sequence
  Quasi-synthetic sequence derived from human genome
RRRTRFVFQKALRSLRRYPL

SEQ ID NO: 12679 - protein, 20 aa, Artificial Sequence
  Quasi-synthetic sequence derived from human genome
VKRLHKVLRPFLLRRVKVDV

SEQ ID NO: 12680 - protein, 20 aa, Artificial Sequence
  Quasi-synthetic sequence derived from human genome
YLWKLVKGIFHLTQIKKVRK

SEQ ID NO: 12681 - protein, 20 aa, Artificial Sequence
  Quasi-synthetic sequence derived from human genome
ALSRKVAKLVHFLLLKYRAR

SEQ ID NO: 12682 - protein, 20 aa, Artificial Sequence
  Quasi-synthetic sequence derived from human genome
RRMALSMIERRKRWRTIKLL

SEQ ID NO: 12683 - protein, 20 aa, Artificial Sequence
  Quasi-synthetic sequence derived from human genome
RFRLSSHFIRHRRAHMRRRL

SEQ ID NO: 12684 - protein, 20 aa, Artificial Sequence
  Quasi-synthetic sequence derived from human genome
FLRRLGGWLPRPWGRRKPMR

SEQ ID NO: 12685 - protein, 20 aa, Artificial Sequence
  Quasi-synthetic sequence derived from human genome
VLKIRRRKMNHHKYRKLVKK

SEQ ID NO: 12686 - protein, 20 aa, Artificial Sequence
  Quasi-synthetic sequence derived from human genome
RIRFSKLLLKILFYISIFSY

SEQ ID NO: 12687 - protein, 20 aa, Artificial Sequence
  Quasi-synthetic sequence derived from human genome
KMFRFFIRRMVKAQSFYWVV

SEQ ID NO: 12688 - protein, 20 aa, Artificial Sequence
  Quasi-synthetic sequence derived from human genome
FRMRKARQYYLKMYKAIIVI

SEQ ID NO: 12689 - protein, 20 aa, Artificial Sequence
  Quasi-synthetic sequence derived from human genome
RLGRILKIHRNGKLLLRQVI

SEQ ID NO: 12690 - protein, 20 aa, Artificial Sequence
  Quasi-synthetic sequence derived from human genome
RVMRNLFVRKLYLWPRFHVA

SEQ ID NO: 12691 - protein, 20 aa, Artificial Sequence
  Quasi-synthetic sequence derived from human genome
KFRNYLLVFFQKHIAKRFCK

SEQ ID NO: 12692 - protein, 20 aa, Artificial Sequence
  Quasi-synthetic sequence derived from human genome
GISVLRALRLLRIFKVTKYW

SEQ ID NO: 12693 - protein, 20 aa, Artificial Sequence
  Quasi-synthetic sequence derived from human genome
IRAFMNVKHWPWMKLYFKIK

SEQ ID NO: 12694 - protein, 20 aa, Artificial Sequence
  Quasi-synthetic sequence derived from human genome
WRRLRASLRLTVWAPLLPLR

SEQ ID NO: 12695 - protein, 20 aa, Artificial Sequence
  Quasi-synthetic sequence derived from human genome
YYLIMRIKMCLIKLCKSKAK

SEQ ID NO: 12696 - protein, 20 aa, Artificial Sequence
  Quasi-synthetic sequence derived from human genome
RIHRRGPKILLLLLFFGVVL

SEQ ID NO: 12697 - protein, 20 aa, Artificial Sequence
  Quasi-synthetic sequence derived from human genome
PFKRFLRKKSKPKKCVKKFV

SEQ ID NO: 12698 - protein, 20 aa, Artificial Sequence
  Quasi-synthetic sequence derived from human genome
WMGRLKMRKNSWLKIIISII

SEQ ID NO: 12699 - protein, 20 aa, Artificial Sequence
  Quasi-synthetic sequence derived from human genome
KIKKVLKSTKLKIFRGKRTL

SEQ ID NO: 12700 - protein, 20 aa, Artificial Sequence
  Quasi-synthetic sequence derived from human genome
FLVKRGHIVHNWKARWFILR

SEQ ID NO: 12701 - protein, 20 aa, Artificial Sequence
  Quasi-synthetic sequence derived from human genome
IARLSRLIFLLRRWAARHVH

SEQ ID NO: 12702 - protein, 20 aa, Artificial Sequence
  Quasi-synthetic sequence derived from human genome
IKGVLFRIFIIWAISSWFRR

SEQ ID NO: 12703 - protein, 20 aa, Artificial Sequence
  Quasi-synthetic sequence derived from human genome
RWKPFLYRGRICRRLSVVFA

SEQ ID NO: 12704 - protein, 20 aa, Artificial Sequence
  Quasi-synthetic sequence derived from human genome
RFAKLLLRLPALRSIGLKCL

SEQ ID NO: 12705 - protein, 20 aa, Artificial Sequence
  Quasi-synthetic sequence derived from human genome
HPLIKLLFLPRRSRCKFFSL

SEQ ID NO: 12706 - protein, 20 aa, Artificial Sequence
  Quasi-synthetic sequence derived from human genome
RWIRGFLVRKNLSPVFFHKK

SEQ ID NO: 12707 - protein, 20 aa, Artificial Sequence
  Quasi-synthetic sequence derived from human genome
KRALKVKQAMLQLYVLKLLK

SEQ ID NO: 12708 - protein, 20 aa, Artificial Sequence
  Quasi-synthetic sequence derived from human genome
RTGRRKSWRLEFLFLRRRCF

SEQ ID NO: 12709 - protein, 20 aa, Artificial Sequence
  Quasi-synthetic sequence derived from human genome
ALLVILACVLWKKRIKPIVW

SEQ ID NO: 12710 - protein, 20 aa, Artificial Sequence
  Quasi-synthetic sequence derived from human genome
LSMKKFAVRRFFSVYLRRKS

SEQ ID NO: 12711 - protein, 20 aa, Artificial Sequence
  Quasi-synthetic sequence derived from human genome
ALHRMWIQAVKKLRRWKGRV

SEQ ID NO: 12712 - protein, 20 aa, Artificial Sequence
  Quasi-synthetic sequence derived from human genome
KPRLYQKYKISRVWWRLPVI

SEQ ID NO: 12713 - protein, 20 aa, Artificial Sequence
  Quasi-synthetic sequence derived from human genome
QKLYVRLFQRKLSWIKMTKL

SEQ ID NO: 12714 - protein, 20 aa, Artificial Sequence
  Quasi-synthetic sequence derived from human genome
MLLKRSGKWLKTWKKKYVTL

SEQ ID NO: 12715 - protein, 20 aa, Artificial Sequence
  Quasi-synthetic sequence derived from human genome
RLLLVHGRWSYIRMCKFLRY

SEQ ID NO: 12716 - protein, 20 aa, Artificial Sequence
  Quasi-synthetic sequence derived from human genome
WLRFHKKKWQLQARQRLARR

SEQ ID NO: 12717 - protein, 20 aa, Artificial Sequence
  Quasi-synthetic sequence derived from human genome
MNVKHWPWMKLYFKIKPLLK

SEQ ID NO: 12718 - protein, 20 aa, Artificial Sequence
  Quasi-synthetic sequence derived from human genome
YKIIMLNRRYLSFRVIKVNK

SEQ ID NO: 12719 - protein, 20 aa, Artificial Sequence
  Quasi-synthetic sequence derived from human genome
FFKYCLLRKSFTCWKKNVRL

SEQ ID NO: 12720 - protein, 20 aa, Artificial Sequence
  Quasi-synthetic sequence derived from human genome
RIRLFNFSLKLLSCLLYIIR

SEQ ID NO: 12721 - protein, 20 aa, Artificial Sequence
  Quasi-synthetic sequence derived from human genome
RRRRLCLQLYFLWLGCVVLW

SEQ ID NO: 12722 - protein, 20 aa, Artificial Sequence
  Quasi-synthetic sequence derived from human genome
RWKILWFIPFRQRQPLRVPY

SEQ ID NO: 12723 - protein, 20 aa, Artificial Sequence
  Quasi-synthetic sequence derived from human genome
GLSSRRRRRLALFLARKHLK

SEQ ID NO: 12724 - protein, 20 aa, Artificial Sequence
  Quasi-synthetic sequence derived from human genome
YKKWCRSILRRTSLILARVF

SEQ ID NO: 12725 - protein, 20 aa, Artificial Sequence
  Quasi-synthetic sequence derived from human genome
IRKLLLTLPRSVLIVMRYLF

SEQ ID NO: 12726 - protein, 20 aa, Artificial Sequence
  Quasi-synthetic sequence derived from human genome
LKIRVRKLQKERITILLPKR

SEQ ID NO: 12727 - protein, 20 aa, Artificial Sequence
  Quasi-synthetic sequence derived from human genome
MLRSVWNFLKRHKKKCIFLG

SEQ ID NO: 12728 - protein, 20 aa, Artificial Sequence
  Quasi-synthetic sequence derived from human genome
ALRARRARRCYLLSVALRLL

SEQ ID NO: 12729 - protein, 20 aa, Artificial Sequence
  Quasi-synthetic sequence derived from human genome
RILRSAKLSLIQFFSKMKKW

SEQ ID NO: 12730 - protein, 20 aa, Artificial Sequence
  Quasi-synthetic sequence derived from human genome
LLFAVSRRKVKMVEFLLKKK

SEQ ID NO: 12731 - protein, 20 aa, Artificial Sequence
  Quasi-synthetic sequence derived from human genome
LLRKKIEKRNLKLRQRNLKF

SEQ ID NO: 12732 - protein, 20 aa, Artificial Sequence
  Quasi-synthetic sequence derived from human genome
FLRRLRLWMGLSKVKEFRHK

SEQ ID NO: 12733 - protein, 20 aa, Artificial Sequence
  Quasi-synthetic sequence derived from human genome
RLWVSRLLRHRKAQLLLVNL

SEQ ID NO: 12734 - protein, 20 aa, Artificial Sequence
  Quasi-synthetic sequence derived from human genome
LRQVSLRRNRLRALPRALFR

SEQ ID NO: 12735 - protein, 20 aa, Artificial Sequence
  Quasi-synthetic sequence derived from human genome
NFIFLHLKRRVKSVILVMLL

SEQ ID NO: 12736 - protein, 20 aa, Artificial Sequence
  Quasi-synthetic sequence derived from human genome
LWALRLWGALRLGAVILRWR

SEQ ID NO: 12737 - protein, 20 aa, Artificial Sequence
  Quasi-synthetic sequence derived from human genome
LTFAVYVRRKSIKKKRALRR

SEQ ID NO: 12738 - protein, 20 aa, Artificial Sequence
  Quasi-synthetic sequence derived from human genome
HVTLLIYRRLRKPKITWSLR

SEQ ID NO: 12739 - protein, 20 aa, Artificial Sequence
  Quasi-synthetic sequence derived from human genome
LALGVMRMVKKRAIVKKLPI

SEQ ID NO: 12740 - protein, 20 aa, Artificial Sequence
  Quasi-synthetic sequence derived from human genome
MRFMLLFSRQGKLRLQKWYL

SEQ ID NO: 12741 - protein, 20 aa, Artificial Sequence
  Quasi-synthetic sequence derived from human genome
TFRKLFRVYSNFLRGKLKLY

SEQ ID NO: 12742 - protein, 20 aa, Artificial Sequence
  Quasi-synthetic sequence derived from human genome
LVVIILILAFWVLPKYKTRK

SEQ ID NO: 12743 - protein, 20 aa, Artificial Sequence
  Quasi-synthetic sequence derived from human genome
LVRGWLVRKRFLEQRAKIRL

SEQ ID NO: 12744 - protein, 20 aa, Artificial Sequence
  Quasi-synthetic sequence derived from human genome
RRRPAWLPVRLRSWAWLPVW

SEQ ID NO: 12745 - protein, 20 aa, Artificial Sequence
  Quasi-synthetic sequence derived from human genome
LVLRKARSLLYQFRLLPRIP

SEQ ID NO: 12746 - protein, 20 aa, Artificial Sequence
  Quasi-synthetic sequence derived from human genome
ATIIQKYWRMYVVRRRYKIR

SEQ ID NO: 12747 - protein, 20 aa, Artificial Sequence
  Quasi-synthetic sequence derived from human genome
LRALLKRKHRFILLRSPGNK

SEQ ID NO: 12748 - protein, 20 aa, Artificial Sequence
  Quasi-synthetic sequence derived from human genome
SITFFRLFRVMRLVKLLSKG

SEQ ID NO: 12749 - protein, 20 aa, Artificial Sequence
  Quasi-synthetic sequence derived from human genome
IVILLVTVVLFAALRRQRKK

SEQ ID NO: 12750 - protein, 20 aa, Artificial Sequence
  Quasi-synthetic sequence derived from human genome
LLPRRRRCFPARAPLLRVAL

SEQ ID NO: 12751 - protein, 20 aa, Artificial Sequence
  Quasi-synthetic sequence derived from human genome
RVQRRPWGAWLSARLWKWLK

SEQ ID NO: 12752 - protein, 20 aa, Artificial Sequence
  Quasi-synthetic sequence derived from human genome
WTHLVRLLRLIILIRIFHLL

SEQ ID NO: 12753 - protein, 20 aa, Artificial Sequence
  Quasi-synthetic sequence derived from human genome
LKFHIRRFIFLFFILVIGIY

SEQ ID NO: 12754 - protein, 20 aa, Artificial Sequence
  Quasi-synthetic sequence derived from human genome
CLAILILAICGLKLQRRWKR

SEQ ID NO: 12755 - protein, 20 aa, Artificial Sequence
  Quasi-synthetic sequence derived from human genome
LCLIFKVKKRSILISSRHFW

SEQ ID NO: 12756 - protein, 20 aa, Artificial Sequence
  Quasi-synthetic sequence derived from human genome
YKTIVKKILAKLKRARSKKL

SEQ ID NO: 12757 - protein, 20 aa, Artificial Sequence
  Quasi-synthetic sequence derived from human genome
KNIRVWFIKVRKMKAIYHTL

SEQ ID NO: 12758 - protein, 20 aa, Artificial Sequence
  Quasi-synthetic sequence derived from human genome
LCRLKIRKCMGRLHLRCPVF

SEQ ID NO: 12759 - protein, 20 aa, Artificial Sequence
  Quasi-synthetic sequence derived from human genome
LVFLLMVAVYTRIFFYVRRR

SEQ ID NO: 12760 - protein, 20 aa, Artificial Sequence
  Quasi-synthetic sequence derived from human genome
NLIFLHLKRRVKSVVLVILL

SEQ ID NO: 12761 - protein, 20 aa, Artificial Sequence
  Quasi-synthetic sequence derived from human genome
VLLLLLLGLLRPLRRRCGAL

SEQ ID NO: 12762 - protein, 20 aa, Artificial Sequence
  Quasi-synthetic sequence derived from human genome
ALLFIVRKKRKEKRLKRLRD

SEQ ID NO: 12763 - protein, 20 aa, Artificial Sequence
  Quasi-synthetic sequence derived from human genome
RKKVLAPRVNLTFRKILLTK

SEQ ID NO: 12764 - protein, 20 aa, Artificial Sequence
  Quasi-synthetic sequence derived from human genome
AKNFALKPRMRKIFSRLIYI

SEQ ID NO: 12765 - protein, 20 aa, Artificial Sequence
  Quasi-synthetic sequence derived from human genome
MVVFINAKIKSLIKLFKKKT

SEQ ID NO: 12766 - protein, 20 aa, Artificial Sequence
  Quasi-synthetic sequence derived from human genome
VFVGLAVFLIYKFKRKIPWI

SEQ ID NO: 12767 - protein, 20 aa, Artificial Sequence
  Quasi-synthetic sequence derived from human genome
KVKRTIVFLLWLLVALLLIL

SEQ ID NO: 12768 - protein, 20 aa, Artificial Sequence
  Quasi-synthetic sequence derived from human genome
ITAVLLVLIFVLRKRIKLTV

SEQ ID NO: 12769 - protein, 20 aa, Artificial Sequence
  Quasi-synthetic sequence derived from human genome
RLGIHLIRRKIVKPKHHVLM

SEQ ID NO: 12770 - protein, 20 aa, Artificial Sequence
  Quasi-synthetic sequence derived from human genome
KKVKRLLSFQRYFHASRLLR

SEQ ID NO: 12771 - protein, 20 aa, Artificial Sequence
  Quasi-synthetic sequence derived from human genome
FKQWVIPWHLNKRYNRKRFF

SEQ ID NO: 12772 - protein, 20 aa, Artificial Sequence
  Quasi-synthetic sequence derived from human genome
LLVVRKLLRTNSRFVKVVLM

SEQ ID NO: 12773 - protein, 20 aa, Artificial Sequence
  Quasi-synthetic sequence derived from human genome
LRAKVVVTKGRVKLVIFVIW

SEQ ID NO: 12774 - protein, 20 aa, Artificial Sequence
  Quasi-synthetic sequence derived from human genome
LFFRKRRADMPRVFVFRALL

SEQ ID NO: 12775 - protein, 20 aa, Artificial Sequence
  Quasi-synthetic sequence derived from human genome
TLLALALIGLIIFCCRKKRR

SEQ ID NO: 12776 - protein, 20 aa, Artificial Sequence
  Quasi-synthetic sequence derived from human genome
LLKIANFSNLIFLHLKRRVK

SEQ ID NO: 12777 - protein, 20 aa, Artificial Sequence
  Quasi-synthetic sequence derived from human genome
RGRLPRRLLLLLALWVQAAR

SEQ ID NO: 12778 - protein, 20 aa, Artificial Sequence
  Quasi-synthetic sequence derived from human genome
RLLFQRLLPCGVIKFRYIWI

SEQ ID NO: 12779 - protein, 20 aa, Artificial Sequence
  Quasi-synthetic sequence derived from human genome
FLLYLTIIFLHIYKRKNVLK

SEQ ID NO: 12780 - protein, 20 aa, Artificial Sequence
  Quasi-synthetic sequence derived from human genome
RYLRRRLVPRYRLQLLGIAC

SEQ ID NO: 12781 - protein, 20 aa, Artificial Sequence
  Quasi-synthetic sequence derived from human genome
RKRHKVWYKKFFHHLLHITV

SEQ ID NO: 12782 - protein, 20 aa, Artificial Sequence
  Quasi-synthetic sequence derived from human genome
ILLLLVLLILCFIKRSKGGK

SEQ ID NO: 12783 - protein, 20 aa, Artificial Sequence
  Quasi-synthetic sequence derived from human genome
LRKYIYIRSCVVIIQKRFRC

SEQ ID NO: 12784 - protein, 20 aa, Artificial Sequence
  Quasi-synthetic sequence derived from human genome
GRLIHRVRYRRGLWRTRQIL

SEQ ID NO: 12785 - protein, 20 aa, Artificial Sequence
  Quasi-synthetic sequence derived from human genome
ILFRRAVLRRLQPRLSTRPR

SEQ ID NO: 12786 - protein, 20 aa, Artificial Sequence
  Quasi-synthetic sequence derived from human genome
LTFVLGLLSGFLVWRRCRRR

SEQ ID NO: 12787 - protein, 20 aa, Artificial Sequence
  Quasi-synthetic sequence derived from human genome
FLLVLYLNRKGIKKWMHNIR

SEQ ID NO: 12788 - protein, 20 aa, Artificial Sequence
  Quasi-synthetic sequence derived from human genome
LYVLKLLKLQTKYLGRQWRK

SEQ ID NO: 12789 - protein, 20 aa, Artificial Sequence
  Quasi-synthetic sequence derived from human genome
WLRWRILRLFPWILLGSLMI

SEQ ID NO: 12790 - protein, 20 aa, Artificial Sequence
  Quasi-synthetic sequence derived from human genome
KFLLLYALLKLSLIRGKSLL

SEQ ID NO: 12791 - protein, 20 aa, Artificial Sequence
  Quasi-synthetic sequence derived from human genome
IRLGIFLRRYPIARVFVIIY

SEQ ID NO: 12792 - protein, 20 aa, Artificial Sequence
  Quasi-synthetic sequence derived from human genome
CFFRKLLVNKSIRQRRRFTV

SEQ ID NO: 12793 - protein, 20 aa, Artificial Sequence
  Quasi-synthetic sequence derived from human genome
LRRTLWSLVAFPKLKRQVLL

SEQ ID NO: 12794 - protein, 20 aa, Artificial Sequence
  Quasi-synthetic sequence derived from human genome
VLRSFRLLRVFKLAKSWPTL

SEQ ID NO: 12795 - protein, 20 aa, Artificial Sequence
  Quasi-synthetic sequence derived from human genome
LLLVVTTVVCWVWICRKRKR

SEQ ID NO: 12796 - protein, 20 aa, Artificial Sequence
  Quasi-synthetic sequence derived from human genome
LTLKQFVRRQQVLLLYRRIL

SEQ ID NO: 12797 - protein, 20 aa, Artificial Sequence
  Quasi-synthetic sequence derived from human genome
LRVFRVFRIFKFSRHSQGLR

SEQ ID NO: 12798 - protein, 20 aa, Artificial Sequence
  Quasi-synthetic sequence derived from human genome
LMALARLCFLLGRLCSRRLK

SEQ ID NO: 12799 - protein, 20 aa, Artificial Sequence
  Quasi-synthetic sequence derived from human genome
FRYLGKRNIIRKIAAAFKFV

SEQ ID NO: 12800 - protein, 20 aa, Artificial Sequence
  Quasi-synthetic sequence derived from human genome
KLKVVKHLIRIKPLKLPQGL

SEQ ID NO: 12801 - protein, 20 aa, Artificial Sequence
  Quasi-synthetic sequence derived from human genome
RHPLFIWLKMRISKLVPWMI

SEQ ID NO: 12802 - protein, 20 aa, Artificial Sequence
  Quasi-synthetic sequence derived from human genome
KNFLQICKKILCRLFRVFVH

SEQ ID NO: 12803 - protein, 20 aa, Artificial Sequence
  Quasi-synthetic sequence derived from human genome
VPLFCWLRATFWLLATKRRK

SEQ ID NO: 12804 - protein, 20 aa, Artificial Sequence
  Quasi-synthetic sequence derived from human genome
FQRWKKRYFKLRGRTLYYAK

SEQ ID NO: 12805 - protein, 20 aa, Artificial Sequence
  Quasi-synthetic sequence derived from human genome
VLLLSALGLIICCVKKKKKK

SEQ ID NO: 12806 - protein, 20 aa, Artificial Sequence
  Quasi-synthetic sequence derived from human genome
RRIRLYLSVLSLFLYIFTKI

SEQ ID NO: 12807 - protein, 20 aa, Artificial Sequence
  Quasi-synthetic sequence derived from human genome
VFRFKVLILAYAVCRLRHWW

SEQ ID NO: 12808 - protein, 20 aa, Artificial Sequence
  Quasi-synthetic sequence derived from human genome
MIRKHVRKNYMKFKAKFSLI

SEQ ID NO: 12809 - protein, 20 aa, Artificial Sequence
  Quasi-synthetic sequence derived from human genome
IRPWKRKGRTLFRRLLFQSP

SEQ ID NO: 12810 - protein, 20 aa, Artificial Sequence
  Quasi-synthetic sequence derived from human genome
FFRREIKRRPLFRSCFILLP

SEQ ID NO: 12811 - protein, 20 aa, Artificial Sequence
  Quasi-synthetic sequence derived from human genome
ILSSVFLFRLFKRRQGRIFP

SEQ ID NO: 12812 - protein, 20 aa, Artificial Sequence
  Quasi-synthetic sequence derived from human genome
LVGLLIFFLKRRNKKKQQKP

SEQ ID NO: 12813 - protein, 20 aa, Artificial Sequence
  Quasi-synthetic sequence derived from human genome
FILYFKPSVFRCIALRWVRL

SEQ ID NO: 12814 - protein, 20 aa, Artificial Sequence
  Quasi-synthetic sequence derived from human genome
FLKLLKPPLLWSHGLIRIIR

SEQ ID NO: 12815 - protein, 20 aa, Artificial Sequence
  Quasi-synthetic sequence derived from human genome
ALALVGVLILFMFRRLRQFR

SEQ ID NO: 12816 - protein, 20 aa, Artificial Sequence
  Quasi-synthetic sequence derived from human genome
RIIQLAVINFLAKQRLRKRV

SEQ ID NO: 12817 - protein, 20 aa, Artificial Sequence
  Quasi-synthetic sequence derived from human genome
HKLKTMKHLLLLLLCVFLVK

SEQ ID NO: 12818 - protein, 20 aa, Artificial Sequence
  Quasi-synthetic sequence derived from human genome
IIAVLGLMFYCKKRCKAKRL

SEQ ID NO: 12819 - protein, 20 aa, Artificial Sequence
  Quasi-synthetic sequence derived from human genome
ALCNRTFRKTFKMLLLCRWK

SEQ ID NO: 12820 - protein, 20 aa, Artificial Sequence
  Quasi-synthetic sequence derived from human genome
LCFLLPSLFHLRLLWRKLLW

SEQ ID NO: 12821 - protein, 20 aa, Artificial Sequence
  Quasi-synthetic sequence derived from human genome
IFCVLIAIMVKVNFQRKKWR

SEQ ID NO: 12822 - protein, 20 aa, Artificial Sequence
  Quasi-synthetic sequence derived from human genome
IKKVLKSTKLKIFRGKRTLY

SEQ ID NO: 12823 - protein, 20 aa, Artificial Sequence
  Quasi-synthetic sequence derived from human genome
RRLNKRRFPGLRLFGHRKAI

SEQ ID NO: 12824 - protein, 20 aa, Artificial Sequence
  Quasi-synthetic sequence derived from human genome
ILLKLAKFKIGFLRLGQIQK

SEQ ID NO: 12825 - protein, 20 aa, Artificial Sequence
  Quasi-synthetic sequence derived from human genome
FWIRLRKHNVTFSKLMRRMC

SEQ ID NO: 12826 - protein, 20 aa, Artificial Sequence
  Quasi-synthetic sequence derived from human genome
FLLKIKRTRKGFRLLNPHPK

SEQ ID NO: 12827 - protein, 20 aa, Artificial Sequence
  Quasi-synthetic sequence derived from human genome
LTKRREWLLRKSSLLKKYLL

SEQ ID NO: 12828 - protein, 20 aa, Artificial Sequence
  Quasi-synthetic sequence derived from human genome
KYKKVQLVRLVGMMLLIFAR

SEQ ID NO: 12829 - protein, 20 aa, Artificial Sequence
  Quasi-synthetic sequence derived from human genome
RALKLLPCSYKLWYRYLKAR

SEQ ID NO: 12830 - protein, 20 aa, Artificial Sequence
  Quasi-synthetic sequence derived from human genome
IILFTILPFFLLHRWCSKKK

SEQ ID NO: 12831 - protein, 20 aa, Artificial Sequence
  Quasi-synthetic sequence derived from human genome
RKKVIAFTLCAARLLFFLIF

SEQ ID NO: 12832 - protein, 20 aa, Artificial Sequence
  Quasi-synthetic sequence derived from human genome
WMRMISFIRSFCKYRRFMLN

SEQ ID NO: 12833 - protein, 20 aa, Artificial Sequence
  Quasi-synthetic sequence derived from human genome
PFKPWKGLQTNFRLLKRRLR

SEQ ID NO: 12834 - protein, 20 aa, Artificial Sequence
  Quasi-synthetic sequence derived from human genome
KRYLLKRLNLIWNIYSTIIR

SEQ ID NO: 12835 - protein, 20 aa, Artificial Sequence
  Quasi-synthetic sequence derived from human genome
GCKFKFFFRRNPYFRNKLIV

SEQ ID NO: 12836 - protein, 20 aa, Artificial Sequence
  Quasi-synthetic sequence derived from human genome
LVIARRALLRFLFRQLLLAT

SEQ ID NO: 12837 - protein, 20 aa, Artificial Sequence
  Quasi-synthetic sequence derived from human genome
FKALLWKNWLCRLRNPVLFL

SEQ ID NO: 12838 - protein, 20 aa, Artificial Sequence
  Quasi-synthetic sequence derived from human genome
LRLFRRLLLAALLLVIVWTL

SEQ ID NO: 12839 - protein, 20 aa, Artificial Sequence
  Quasi-synthetic sequence derived from human genome
FLVKVKSKALLKNRLLPPLL

SEQ ID NO: 12840 - protein, 20 aa, Artificial Sequence
  Quasi-synthetic sequence derived from human genome
WKKLFKPCASQRLFLPLILK

SEQ ID NO: 12841 - protein, 20 aa, Artificial Sequence
  Quasi-synthetic sequence derived from human genome
RFKRQQHALRNRRLLRKVIK

SEQ ID NO: 12842 - protein, 20 aa, Artificial Sequence
  Quasi-synthetic sequence derived from human genome
LKKRIKSVVLVILLGPLVFL

SEQ ID NO: 12843 - protein, 20 aa, Artificial Sequence
  Quasi-synthetic sequence derived from human genome
RIRRLLPSLIGRHFYQRKKV

SEQ ID NO: 12844 - protein, 20 aa, Artificial Sequence
  Quasi-synthetic sequence derived from human genome
ILLLMLIFLRQRIRIAIALL

SEQ ID NO: 12845 - protein, 20 aa, Artificial Sequence
  Quasi-synthetic sequence derived from human genome
ILMLARRKERLPLYLRLLQR

SEQ ID NO: 12846 - protein, 20 aa, Artificial Sequence
  Quasi-synthetic sequence derived from human genome
RRNFVNIRPAKLKNLILLVK

SEQ ID NO: 12847 - protein, 20 aa, Artificial Sequence
  Quasi-synthetic sequence derived from human genome
LRALPRYRLLRDLPRLLRAL

SEQ ID NO: 12848 - protein, 20 aa, Artificial Sequence
  Quasi-synthetic sequence derived from human genome
KLVLRWYLSGFYKKPKGIKK

SEQ ID NO: 12849 - protein, 20 aa, Artificial Sequence
  Quasi-synthetic sequence derived from human genome
IVYRLYMRQTIIKVIKFILI

SEQ ID NO: 12850 - protein, 20 aa, Artificial Sequence
  Quasi-synthetic sequence derived from human genome
MRVLSRTSKFRRRKQLLRRR

SEQ ID NO: 12851 - protein, 20 aa, Artificial Sequence
  Quasi-synthetic sequence derived from human genome
VMVGIRRIFAFICRKHRIQR

SEQ ID NO: 12852 - protein, 20 aa, Artificial Sequence
  Quasi-synthetic sequence derived from human genome
FVRQKFIIRSKIITYIRSFL

SEQ ID NO: 12853 - protein, 20 aa, Artificial Sequence
  Quasi-synthetic sequence derived from human genome
VLRCVRLLRIFKVTRHWASL

SEQ ID NO: 12854 - protein, 20 aa, Artificial Sequence
  Quasi-synthetic sequence derived from human genome
WPFIAQWLVYLYYQRRRRKL

SEQ ID NO: 12855 - protein, 20 aa, Artificial Sequence
  Quasi-synthetic sequence derived from human genome
RTLYLRYRPKVKFLFGIWPV

SEQ ID NO: 12856 - protein, 20 aa, Artificial Sequence
  Quasi-synthetic sequence derived from human genome
RRRIKLLGILMMANVFIYFI

SEQ ID NO: 12857 - protein, 20 aa, Artificial Sequence
  Quasi-synthetic sequence derived from human genome
LKKIIKRKHTLPNYKIRFKP

SEQ ID NO: 12858 - protein, 20 aa, Artificial Sequence
  Quasi-synthetic sequence derived from human genome
CLVLLLLALILPLLFYLRKR

SEQ ID NO: 12859 - protein, 20 aa, Artificial Sequence
  Quasi-synthetic sequence derived from human genome
RWRRKRRWRRVRKAGPRDLL

SEQ ID NO: 12860 - protein, 20 aa, Artificial Sequence
  Quasi-synthetic sequence derived from human genome
LIVLSLSTFHIHKRRMKKRK

SEQ ID NO: 12861 - protein, 20 aa, Artificial Sequence
  Quasi-synthetic sequence derived from human genome
GLLDRRKLLWAIHHWKKIKK

SEQ ID NO: 12862 - protein, 20 aa, Artificial Sequence
  Quasi-synthetic sequence derived from human genome
KRRAKIQKLKYFIKIFYNNK

SEQ ID NO: 12863 - protein, 20 aa, Artificial Sequence
  Quasi-synthetic sequence derived from human genome
IPLRYIVLVWGINKFTKKLR

SEQ ID NO: 12864 - protein, 20 aa, Artificial Sequence
  Quasi-synthetic sequence derived from human genome
LHRLLGHIKNVPLILKRMKL

SEQ ID NO: 12865 - protein, 20 aa, Artificial Sequence
  Quasi-synthetic sequence derived from human genome
RRKTVRLLLANLVIFLLCFV

SEQ ID NO: 12866 - protein, 20 aa, Artificial Sequence
  Quasi-synthetic sequence derived from human genome
LLYFLLSWVTKFIYRKIKSL

SEQ ID NO: 12867 - protein, 20 aa, Artificial Sequence
  Quasi-synthetic sequence derived from human genome
LRRYAWKKRWFILRSGRMSG

SEQ ID NO: 12868 - protein, 20 aa, Artificial Sequence
  Quasi-synthetic sequence derived from human genome
AILRVSLMWRGRNFRVLKYF

SEQ ID NO: 12869 - protein, 20 aa, Artificial Sequence
  Quasi-synthetic sequence derived from human genome
YCVVIIQKNYRAFLLRRRFL

SEQ ID NO: 12870 - protein, 20 aa, Artificial Sequence
  Quasi-synthetic sequence derived from human genome
MKFYVVIRRRPLFYVVSLLL

SEQ ID NO: 12871 - protein, 20 aa, Artificial Sequence
  Quasi-synthetic sequence derived from human genome
ARKNRSRIPLLRKRRFQLYR

SEQ ID NO: 12872 - protein, 20 aa, Artificial Sequence
  Quasi-synthetic sequence derived from human genome
LSLKLAKIILALKVSRKNLL

SEQ ID NO: 12873 - protein, 20 aa, Artificial Sequence
  Quasi-synthetic sequence derived from human genome
LLAWCRRSRGLKALRLCRAL

SEQ ID NO: 12874 - protein, 20 aa, Artificial Sequence
  Quasi-synthetic sequence derived from human genome
LFLRLRSIRCLRNIIHWNLI

SEQ ID NO: 12875 - protein, 20 aa, Artificial Sequence
  Quasi-synthetic sequence derived from human genome
MKGRRRRRREYCKFALLLVL

SEQ ID NO: 12876 - protein, 20 aa, Artificial Sequence
  Quasi-synthetic sequence derived from human genome
IFLFILRCLEMNCRKKLMRK

SEQ ID NO: 12877 - protein, 20 aa, Artificial Sequence
  Quasi-synthetic sequence derived from human genome
INTFNWSKVRKLSFKRKRFL

SEQ ID NO: 12878 - protein, 20 aa, Artificial Sequence
  Quasi-synthetic sequence derived from human genome
LVAVALVVRKVKLRNLQKKR

SEQ ID NO: 12879 - protein, 20 aa, Artificial Sequence
  Quasi-synthetic sequence derived from human genome
RLLCKRLSHPGCKLRVLWLF

SEQ ID NO: 12880 - protein, 20 aa, Artificial Sequence
  Quasi-synthetic sequence derived from human genome
MKWKKFAKHMFFLSFCFYFF

SEQ ID NO: 12881 - protein, 20 aa, Artificial Sequence
  Quasi-synthetic sequence derived from human genome
SFLIFILFIIVQLFIMKLRK

SEQ ID NO: 12882 - protein, 20 aa, Artificial Sequence
  Quasi-synthetic sequence derived from human genome
PVLYAFVSLKFRKNFWKLVK

SEQ ID NO: 12883 - protein, 20 aa, Artificial Sequence
  Quasi-synthetic sequence derived from human genome
LLLLYKRHKGRKLTVPVRRH

SEQ ID NO: 12884 - protein, 20 aa, Artificial Sequence
  Quasi-synthetic sequence derived from human genome
IRHPRTFLSKILTSKFLRRW

SEQ ID NO: 12885 - protein, 20 aa, Artificial Sequence
  Quasi-synthetic sequence derived from human genome
LLLVFTVALYAQRRWQKRRR

SEQ ID NO: 12886 - protein, 20 aa, Artificial Sequence
  Quasi-synthetic sequence derived from human genome
FWMLFKALLIIYGILVIFRR

SEQ ID NO: 12887 - protein, 20 aa, Artificial Sequence
  Quasi-synthetic sequence derived from human genome
YSLRNKQIKVAIKKIMKRIF

SEQ ID NO: 12888 - protein, 20 aa, Artificial Sequence
  Quasi-synthetic sequence derived from human genome
LKRRILRVVAHCNKPKYKIL

SEQ ID NO: 12889 - protein, 20 aa, Artificial Sequence
  Quasi-synthetic sequence derived from human genome
YKIIMLNRRHLSFRVIKVNR

SEQ ID NO: 12890 - protein, 20 aa, Artificial Sequence
  Quasi-synthetic sequence derived from human genome
LKKFLRKLHLPRDLPQKKKL

SEQ ID NO: 12891 - protein, 20 aa, Artificial Sequence
  Quasi-synthetic sequence derived from human genome
FIFRKRRKNSGLWSFYFFFA

SEQ ID NO: 12892 - protein, 20 aa, Artificial Sequence
  Quasi-synthetic sequence derived from human genome
LFQKGMLKRVKKLLDLLVKF

SEQ ID NO: 12893 - protein, 20 aa, Artificial Sequence
  Quasi-synthetic sequence derived from human genome
VRRRALARLVLRLNAPLWAL

SEQ ID NO: 12894 - protein, 20 aa, Artificial Sequence
  Quasi-synthetic sequence derived from human genome
LRLRRRHRCGGSLLSRRWVL

SEQ ID NO: 12895 - protein, 20 aa, Artificial Sequence
  Quasi-synthetic sequence derived from human genome
RLRINRFAWPKVLKISYKRN

SEQ ID NO: 12896 - protein, 20 aa, Artificial Sequence
  Quasi-synthetic sequence derived from human genome
RVRFLNLKKTIIKFQAHVRK

SEQ ID NO: 12897 - protein, 20 aa, Artificial Sequence
  Quasi-synthetic sequence derived from human genome
RTLLKKVWKVWRSVVQKQWK

SEQ ID NO: 12898 - protein, 20 aa, Artificial Sequence
  Quasi-synthetic sequence derived from human genome
VIVLWGIRLLLQRKKKLVST

SEQ ID NO: 12899 - protein, 20 aa, Artificial Sequence
  Quasi-synthetic sequence derived from human genome
RKLLAAINAFRQVRLKHRKL

SEQ ID NO: 12900 - protein, 20 aa, Artificial Sequence
  Quasi-synthetic sequence derived from human genome
KKILQLIKSQKFLNKLVILV

SEQ ID NO: 12901 - protein, 20 aa, Artificial Sequence
  Quasi-synthetic sequence derived from human genome
LRIARFRFRAFHFLNRFPSV

SEQ ID NO: 12902 - protein, 20 aa, Artificial Sequence
  Quasi-synthetic sequence derived from human genome
GPRWRRRWFVLKGHTLYWYR

SEQ ID NO: 12903 - protein, 20 aa, Artificial Sequence
  Quasi-synthetic sequence derived from human genome
LWYMKMMWAWLQAKRKPRKA

SEQ ID NO: 12904 - protein, 20 aa, Artificial Sequence
  Quasi-synthetic sequence derived from human genome
FLKQRPTKLKSLIRLVKHWY

SEQ ID NO: 12905 - protein, 20 aa, Artificial Sequence
  Quasi-synthetic sequence derived from human genome
RARRRRTFCLLVVIVVVFAV

SEQ ID NO: 12906 - protein, 20 aa, Artificial Sequence
  Quasi-synthetic sequence derived from human genome
VVMILIKYRRLRIMTNIYLL

SEQ ID NO: 12907 - protein, 20 aa, Artificial Sequence
  Quasi-synthetic sequence derived from human genome
MRFRIYKRKVLILTLVVAAC

SEQ ID NO: 12908 - protein, 20 aa, Artificial Sequence
  Quasi-synthetic sequence derived from human genome
LLCGLVALLGWSWLRRRRAR

SEQ ID NO: 12909 - protein, 20 aa, Artificial Sequence
  Quasi-synthetic sequence derived from human genome
LLIAGIIAMICYRKKRKGKL

SEQ ID NO: 12910 - protein, 20 aa, Artificial Sequence
  Quasi-synthetic sequence derived from human genome
ARCRAYLVRKAFRHRLWAVL

SEQ ID NO: 12911 - protein, 20 aa, Artificial Sequence
  Quasi-synthetic sequence derived from human genome
KKWKIMKKAALLIQKYYRAY

SEQ ID NO: 12912 - protein, 20 aa, Artificial Sequence
  Quasi-synthetic sequence derived from human genome
TIFFILLIIFLSWIILKHRK

SEQ ID NO: 12913 - protein, 20 aa, Artificial Sequence
  Quasi-synthetic sequence derived from human genome
RALRSRLLRKQAWKQKWRKK

SEQ ID NO: 12914 - protein, 20 aa, Artificial Sequence
  Quasi-synthetic sequence derived from human genome
WEVYLVLWAVRKHLRRLYRR

SEQ ID NO: 12915 - protein, 20 aa, Artificial Sequence
  Quasi-synthetic sequence derived from human genome
LLSDKLVLRRLRTIIRKKQK

SEQ ID NO: 12916 - protein, 20 aa, Artificial Sequence
  Quasi-synthetic sequence derived from human genome
LRRLFNLCKRCHRQPRFRLP

SEQ ID NO: 12917 - protein, 20 aa, Artificial Sequence
  Quasi-synthetic sequence derived from human genome
NKKLKQIFLSVLRHVRYWVK

SEQ ID NO: 12918 - protein, 20 aa, Artificial Sequence
  Quasi-synthetic sequence derived from human genome
VAALILFLVALLARVLVKRK

SEQ ID NO: 12919 - protein, 20 aa, Artificial Sequence
  Quasi-synthetic sequence derived from human genome
LLSPSKIKTFLSLVWKRRIL

SEQ ID NO: 12920 - protein, 20 aa, Artificial Sequence
  Quasi-synthetic sequence derived from human genome
IRAFMGVKNWPWMKLYFKIK

SEQ ID NO: 12921 - protein, 20 aa, Artificial Sequence
  Quasi-synthetic sequence derived from human genome
LRRLLPPLLLLLLSLPPRAR

SEQ ID NO: 12922 - protein, 20 aa, Artificial Sequence
  Quasi-synthetic sequence derived from human genome
YKVLYRVALAILKFFHKVRA

SEQ ID NO: 12923 - protein, 20 aa, Artificial Sequence
  Quasi-synthetic sequence derived from human genome
SHPLSRLLWRRLKPLILGKL

SEQ ID NO: 12924 - protein, 20 aa, Artificial Sequence
  Quasi-synthetic sequence derived from human genome
FNLPRLCIQKFFPKKKCFIF

SEQ ID NO: 12925 - protein, 20 aa, Artificial Sequence
  Quasi-synthetic sequence derived from human genome
LIRSRLRKVPRFKTMFSNLI

SEQ ID NO: 12926 - protein, 20 aa, Artificial Sequence
  Quasi-synthetic sequence derived from human genome
FARAKWKKAVRVTTLMKRLR

SEQ ID NO: 12927 - protein, 20 aa, Artificial Sequence
  Quasi-synthetic sequence derived from human genome
SKALLRLVSAVNRRRMKLLL

SEQ ID NO: 12928 - protein, 20 aa, Artificial Sequence
  Quasi-synthetic sequence derived from human genome
VKFRSLVHAYVSRRRYLKLR

SEQ ID NO: 12929 - protein, 20 aa, Artificial Sequence
  Quasi-synthetic sequence derived from human genome
RRPPRVMRLLGWWQVLLWVL

SEQ ID NO: 12930 - protein, 20 aa, Artificial Sequence
  Quasi-synthetic sequence derived from human genome
RIRLFNFSLKLLTCLLYIVR

SEQ ID NO: 12931 - protein, 20 aa, Artificial Sequence
  Quasi-synthetic sequence derived from human genome
KQRIIPFLPGKILFRRSHIR

SEQ ID NO: 12932 - protein, 20 aa, Artificial Sequence
  Quasi-synthetic sequence derived from human genome
IKLFGVLRQRTGSLKILRLK

SEQ ID NO: 12933 - protein, 20 aa, Artificial Sequence
  Quasi-synthetic sequence derived from human genome
VHSKKRLKPLIPGLRKKLKR

SEQ ID NO: 12934 - protein, 20 aa, Artificial Sequence
  Quasi-synthetic sequence derived from human genome
FTPKKRKLFGNKKRKSFFLR

SEQ ID NO: 12935 - protein, 20 aa, Artificial Sequence
  Quasi-synthetic sequence derived from human genome
MPMRKVRSKSWKKLRYFRLQ

SEQ ID NO: 12936 - protein, 20 aa, Artificial Sequence
  Quasi-synthetic sequence derived from human genome
LFFPPLRRLILFKGARYYVL

SEQ ID NO: 12937 - protein, 20 aa, Artificial Sequence
  Quasi-synthetic sequence derived from human genome
GFFYPWFRRALKYILLGKIF

SEQ ID NO: 12938 - protein, 20 aa, Artificial Sequence
  Quasi-synthetic sequence derived from human genome
LKKKPRIVLPWWCVYVAWFL

SEQ ID NO: 12939 - protein, 20 aa, Artificial Sequence
  Quasi-synthetic sequence derived from human genome
KKFGWVKKYVIVSSKKILFY

SEQ ID NO: 12940 - protein, 20 aa, Artificial Sequence
  Quasi-synthetic sequence derived from human genome
KLLMRHQLRKHKILMKVFPN

SEQ ID NO: 12941 - protein, 20 aa, Artificial Sequence
  Quasi-synthetic sequence derived from human genome
LFLTLWLLSLLKLLNVRRLF

SEQ ID NO: 12942 - protein, 20 aa, Artificial Sequence
  Quasi-synthetic sequence derived from human genome
LRIFINVSRFFCVQLKKMVR

SEQ ID NO: 12943 - protein, 20 aa, Artificial Sequence
  Quasi-synthetic sequence derived from human genome
PFIVISHLRLLLRQLCRRPR

SEQ ID NO: 12944 - protein, 20 aa, Artificial Sequence
  Quasi-synthetic sequence derived from human genome
LVYFVVRTVRMRRRNRKTRR

SEQ ID NO: 12945 - protein, 20 aa, Artificial Sequence
  Quasi-synthetic sequence derived from human genome
RLLRVFKLAKSWPTLNMLIK

SEQ ID NO: 12946 - protein, 20 aa, Artificial Sequence
  Quasi-synthetic sequence derived from human genome
RRRLRLGPRGLPLLLSGLLL

SEQ ID NO: 12947 - protein, 20 aa, Artificial Sequence
  Quasi-synthetic sequence derived from human genome
IIILGCLALFLLLQRKNLRR

SEQ ID NO: 12948 - protein, 20 aa, Artificial Sequence
  Quasi-synthetic sequence derived from human genome
LKRKKPFLHRRRRVRKRKHH

SEQ ID NO: 12949 - protein, 20 aa, Artificial Sequence
  Quasi-synthetic sequence derived from human genome
IRILKFLVAKRKFKETLRPY

SEQ ID NO: 12950 - protein, 20 aa, Artificial Sequence
  Quasi-synthetic sequence derived from human genome
KTVLHRIYGKFLGLRAFIRK

SEQ ID NO: 12951 - protein, 20 aa, Artificial Sequence
  Quasi-synthetic sequence derived from human genome
RSKINKTKVLKMIFVHLIIF

SEQ ID NO: 12952 - protein, 20 aa, Artificial Sequence
  Quasi-synthetic sequence derived from human genome
MACWPQLRLLLWKNLTFRRR

SEQ ID NO: 12953 - protein, 20 aa, Artificial Sequence
  Quasi-synthetic sequence derived from human genome
FLIILGKILLNILTLGMRRK

SEQ ID NO: 12954 - protein, 20 aa, Artificial Sequence
  Quasi-synthetic sequence derived from human genome
ILYGFLSYRFKQGFRRVLLR

SEQ ID NO: 12955 - protein, 20 aa, Artificial Sequence
  Quasi-synthetic sequence derived from human genome
VVTRWRFKKAPLLLHYRPKM

SEQ ID NO: 12956 - protein, 20 aa, Artificial Sequence
  Quasi-synthetic sequence derived from human genome
WRRRPNCGIRLPRIRRWRSV

SEQ ID NO: 12957 - protein, 20 aa, Artificial Sequence
  Quasi-synthetic sequence derived from human genome
SVRTKQIRLGILHKFVLRRR

SEQ ID NO: 12958 - protein, 20 aa, Artificial Sequence
  Quasi-synthetic sequence derived from human genome
RLCGRFSRISMKLPRIPLRR

SEQ ID NO: 12959 - protein, 20 aa, Artificial Sequence
  Quasi-synthetic sequence derived from human genome
VRIQRRWRGYRVRKYLFNYY

SEQ ID NO: 12960 - protein, 20 aa, Artificial Sequence
  Quasi-synthetic sequence derived from human genome
PARRRRLGVHLLHRALLVFL

SEQ ID NO: 12961 - protein, 20 aa, Artificial Sequence
  Quasi-synthetic sequence derived from human genome
WRRRKSLWLALSASWLLLVL

SEQ ID NO: 12962 - protein, 20 aa, Artificial Sequence
  Quasi-synthetic sequence derived from human genome
VPLGFILICYLKIVICLRRR

SEQ ID NO: 12963 - protein, 20 aa, Artificial Sequence
  Quasi-synthetic sequence derived from human genome
LIRVIGRGSYAKVLLVRLKK

SEQ ID NO: 12964 - protein, 20 aa, Artificial Sequence
  Quasi-synthetic sequence derived from human genome
KVILAIRRAKNLRRLLYVSC

SEQ ID NO: 12965 - protein, 20 aa, Artificial Sequence
  Quasi-synthetic sequence derived from human genome
SFGISVLRALRLLRIFKITK

SEQ ID NO: 12966 - protein, 20 aa, Artificial Sequence
  Quasi-synthetic sequence derived from human genome
LIRIFRKGVIAVLAANRLKI

SEQ ID NO: 12967 - protein, 20 aa, Artificial Sequence
  Quasi-synthetic sequence derived from human genome
ITPFWKLVNKKWMLTLLRII

SEQ ID NO: 12968 - protein, 20 aa, Artificial Sequence
  Quasi-synthetic sequence derived from human genome
LGLRRGLRRLRRLWAGPRVQ

SEQ ID NO: 12969 - protein, 20 aa, Artificial Sequence
  Quasi-synthetic sequence derived from human genome
RMVLVRNKKVGVIFRLIQLV

SEQ ID NO: 12970 - protein, 20 aa, Artificial Sequence
  Quasi-synthetic sequence derived from human genome
IIRNKIRAIGKMARVFSILR

SEQ ID NO: 12971 - protein, 20 aa, Artificial Sequence
  Quasi-synthetic sequence derived from human genome
RRERRELRRRTILLLYYLLR

SEQ ID NO: 12972 - protein, 20 aa, Artificial Sequence
  Quasi-synthetic sequence derived from human genome
VLLFLWRSFRSVRSRLYVGR

SEQ ID NO: 12973 - protein, 20 aa, Artificial Sequence
  Quasi-synthetic sequence derived from human genome
VLFFLWRSFRSVRSRLYVGR

SEQ ID NO: 12974 - protein, 20 aa, Artificial Sequence
  Quasi-synthetic sequence derived from human genome
LVKRARLVRVHAYIISYLKK

SEQ ID NO: 12975 - protein, 20 aa, Artificial Sequence
  Quasi-synthetic sequence derived from human genome
PLSLVVKKKRCFLFPRYKFT

SEQ ID NO: 12976 - protein, 20 aa, Artificial Sequence
  Quasi-synthetic sequence derived from human genome
WKKLFKPCAAQRLFLPVILK

SEQ ID NO: 12977 - protein, 20 aa, Artificial Sequence
  Quasi-synthetic sequence derived from human genome
IVQVMRKQKTINRFLMRKRL

SEQ ID NO: 12978 - protein, 20 aa, Artificial Sequence
  Quasi-synthetic sequence derived from human genome
KRHKMPRMKKLMRNRMKLRK

SEQ ID NO: 12979 - protein, 20 aa, Artificial Sequence
  Quasi-synthetic sequence derived from human genome
IYIRKRRPSKPHMFPKILMK

SEQ ID NO: 12980 - protein, 20 aa, Artificial Sequence
  Quasi-synthetic sequence derived from human genome
VIWAYWLGLKVRREYRKFFR

SEQ ID NO: 12981 - protein, 20 aa, Artificial Sequence
  Quasi-synthetic sequence derived from human genome
FLRKIIMVHPKVRFHFSVKV

SEQ ID NO: 12982 - protein, 20 aa, Artificial Sequence
  Quasi-synthetic sequence derived from human genome
YLRLLFFIHDRRKMRPARLV

SEQ ID NO: 12983 - protein, 20 aa, Artificial Sequence
  Quasi-synthetic sequence derived from human genome
RKRLGPRAGFRFWPPFFPRR

SEQ ID NO: 12984 - protein, 20 aa, Artificial Sequence
  Quasi-synthetic sequence derived from human genome
LKRFSVRYLRPARSLVFPWF

SEQ ID NO: 12985 - protein, 20 aa, Artificial Sequence
  Quasi-synthetic sequence derived from human genome
LKIYLSRHISILFYLKILYK

SEQ ID NO: 12986 - protein, 20 aa, Artificial Sequence
  Quasi-synthetic sequence derived from human genome
FIMLFCITMKRQIKHMIKYR

SEQ ID NO: 12987 - protein, 20 aa, Artificial Sequence
  Quasi-synthetic sequence derived from human genome
MRARRKTAKMLMVVLLVFAL

SEQ ID NO: 12988 - protein, 20 aa, Artificial Sequence
  Quasi-synthetic sequence derived from human genome
KFFIAGFRRSMRLCRRKSHL

SEQ ID NO: 12989 - protein, 20 aa, Artificial Sequence
  Quasi-synthetic sequence derived from human genome
LRCGARRVFIVFRKGFVNIR

SEQ ID NO: 12990 - protein, 20 aa, Artificial Sequence
  Quasi-synthetic sequence derived from human genome
MRVLSRTSKFRRLRELLRRR

SEQ ID NO: 12991 - protein, 20 aa, Artificial Sequence
  Quasi-synthetic sequence derived from human genome
SLKIYAPLYLIAAILRKRKL

SEQ ID NO: 12992 - protein, 20 aa, Artificial Sequence
  Quasi-synthetic sequence derived from human genome
RLRHPRTRWKNWWVRGILTL

SEQ ID NO: 12993 - protein, 20 aa, Artificial Sequence
  Quasi-synthetic sequence derived from human genome
IAVFVVILFIGILFIILRKR

SEQ ID NO: 12994 - protein, 20 aa, Artificial Sequence
  Quasi-synthetic sequence derived from human genome
RQVSRSPRVRLLLLLLLLLV

SEQ ID NO: 12995 - protein, 20 aa, Artificial Sequence
  Quasi-synthetic sequence derived from human genome
RIIKTLSKTKNLRLLILVGR

SEQ ID NO: 12996 - protein, 20 aa, Artificial Sequence
  Quasi-synthetic sequence derived from human genome
KKKPVPVLLGSLLKRKMLPR

SEQ ID NO: 12997 - protein, 20 aa, Artificial Sequence
  Quasi-synthetic sequence derived from human genome
RRRLNRGLRRKQHSLLKRLR

SEQ ID NO: 12998 - protein, 20 aa, Artificial Sequence
  Quasi-synthetic sequence derived from human genome
VFKLLLHRPFFRCAILMFQR

SEQ ID NO: 12999 - protein, 20 aa, Artificial Sequence
  Quasi-synthetic sequence derived from human genome
LSFFFFFFFFRWSLARLPRL

SEQ ID NO: 13000 - protein, 20 aa, Artificial Sequence
  Quasi-synthetic sequence derived from human genome
WRGFHWRQKFLRVKRSAICI

SEQ ID NO: 13001 - protein, 21 aa, Artificial Sequence
  Quasi-synthetic sequence derived from human genome
LALLFLLLVLLLLVRKKRKIK

SEQ ID NO: 13002 - protein, 21 aa, Artificial Sequence
  Quasi-synthetic sequence derived from human genome
YLLLRKILLRKFCQMRKRRLR

SEQ ID NO: 13003 - protein, 21 aa, Artificial Sequence
  Quasi-synthetic sequence derived from human genome
RALSRRYLRRLLLLLLLLLLR

SEQ ID NO: 13004 - protein, 21 aa, Artificial Sequence
  Quasi-synthetic sequence derived from human genome
RFRLLCLLRRWLPRPRAWFIR

SEQ ID NO: 13005 - protein, 21 aa, Artificial Sequence
  Quasi-synthetic sequence derived from human genome
FLLIIIFLTVLLLKLRKRHRK

SEQ ID NO: 13006 - protein, 21 aa, Artificial Sequence
  Quasi-synthetic sequence derived from human genome
KRFLLLFTFLKKNRKKKLMVF

SEQ ID NO: 13007 - protein, 21 aa, Artificial Sequence
  Quasi-synthetic sequence derived from human genome
LVALLLVVLWIRWKCRRLRIR

SEQ ID NO: 13008 - protein, 21 aa, Artificial Sequence
  Quasi-synthetic sequence derived from human genome
RWRRLRLQQLRRLRGLLRVLR

SEQ ID NO: 13009 - protein, 21 aa, Artificial Sequence
  Quasi-synthetic sequence derived from human genome
FLLLFMKLRWFLKRWRQGKVL

SEQ ID NO: 13010 - protein, 21 aa, Artificial Sequence
  Quasi-synthetic sequence derived from human genome
LRTFRLLRVLKLVRFLPALRR

SEQ ID NO: 13011 - protein, 21 aa, Artificial Sequence
  Quasi-synthetic sequence derived from human genome
LLLFLLFFLFRLLLRFLRLCR

SEQ ID NO: 13012 - protein, 21 aa, Artificial Sequence
  Quasi-synthetic sequence derived from human genome
RKKKKKFCYLCILLLIVLFIL

SEQ ID NO: 13013 - protein, 21 aa, Artificial Sequence
  Quasi-synthetic sequence derived from human genome
FRILKVFKSLRALRAIRVLRR

SEQ ID NO: 13014 - protein, 21 aa, Artificial Sequence
  Quasi-synthetic sequence derived from human genome
ARPPLLLRPVKLLRRRFRLLL

SEQ ID NO: 13015 - protein, 21 aa, Artificial Sequence
  Quasi-synthetic sequence derived from human genome
LFVIFILVVLFIVFRKKVFRK

SEQ ID NO: 13016 - protein, 21 aa, Artificial Sequence
  Quasi-synthetic sequence derived from human genome
FIVTLLVYIKIYIVLRRRRKR

SEQ ID NO: 13017 - protein, 21 aa, Artificial Sequence
  Quasi-synthetic sequence derived from human genome
VRRVVQIFRIMRILRILKLAR

SEQ ID NO: 13018 - protein, 21 aa, Artificial Sequence
  Quasi-synthetic sequence derived from human genome
LRTFRLLRVLKLVRFMPALRR

SEQ ID NO: 13019 - protein, 21 aa, Artificial Sequence
  Quasi-synthetic sequence derived from human genome
KTMKFILWRRFRWAIILFIIL

SEQ ID NO: 13020 - protein, 21 aa, Artificial Sequence
  Quasi-synthetic sequence derived from human genome
PVRAVLRLRRRVCVLRKRRLL

SEQ ID NO: 13021 - protein, 21 aa, Artificial Sequence
  Quasi-synthetic sequence derived from human genome
RLKKWKGVRWKRLRLLLTIQK

SEQ ID NO: 13022 - protein, 21 aa, Artificial Sequence
  Quasi-synthetic sequence derived from human genome
KYFYFFKILLRLRLAILKYLF

SEQ ID NO: 13023 - protein, 21 aa, Artificial Sequence
  Quasi-synthetic sequence derived from human genome
LILKTIRRRLPFSKWRLAFRF

SEQ ID NO: 13024 - protein, 21 aa, Artificial Sequence
  Quasi-synthetic sequence derived from human genome
RCLRGFFIKRRFRSLRHKIIL

SEQ ID NO: 13025 - protein, 21 aa, Artificial Sequence
  Quasi-synthetic sequence derived from human genome
LMLLILALWKIGFFKRPLKKK

SEQ ID NO: 13026 - protein, 21 aa, Artificial Sequence
  Quasi-synthetic sequence derived from human genome
KLWFKFQRYFRRKPVRFFTFL

SEQ ID NO: 13027 - protein, 21 aa, Artificial Sequence
  Quasi-synthetic sequence derived from human genome
RVLLRFQRKLSVLLLLLGRRR

SEQ ID NO: 13028 - protein, 21 aa, Artificial Sequence
  Quasi-synthetic sequence derived from human genome
RRRGFGLFFFLRLHRLLLLFL

SEQ ID NO: 13029 - protein, 21 aa, Artificial Sequence
  Quasi-synthetic sequence derived from human genome
KFFRWVRRAWQRIISWVFFWR

SEQ ID NO: 13030 - protein, 21 aa, Artificial Sequence
  Quasi-synthetic sequence derived from human genome
IICVMVFCLILWKWKKKKRPR

SEQ ID NO: 13031 - protein, 21 aa, Artificial Sequence
  Quasi-synthetic sequence derived from human genome
VLIFKSILFLPCLRKKILKIR

SEQ ID NO: 13032 - protein, 21 aa, Artificial Sequence
  Quasi-synthetic sequence derived from human genome
LRIVRFTKILSLLRLLRLSRL

SEQ ID NO: 13033 - protein, 21 aa, Artificial Sequence
  Quasi-synthetic sequence derived from human genome
VFMIRKFRRSLLQLLCLRLLR

SEQ ID NO: 13034 - protein, 21 aa, Artificial Sequence
  Quasi-synthetic sequence derived from human genome
LILLIKKLIIFILKKTREKKK

SEQ ID NO: 13035 - protein, 21 aa, Artificial Sequence
  Quasi-synthetic sequence derived from human genome
LARWRCRRLRAIYTIMRWFRR

SEQ ID NO: 13036 - protein, 21 aa, Artificial Sequence
  Quasi-synthetic sequence derived from human genome
FAILRIIRLVRVFRIFKLSRH

SEQ ID NO: 13037 - protein, 21 aa, Artificial Sequence
  Quasi-synthetic sequence derived from human genome
LFVLLLVVRRRRREQRLKRLR

SEQ ID NO: 13038 - protein, 21 aa, Artificial Sequence
  Quasi-synthetic sequence derived from human genome
PRLPVKKIRKQMKLLLLLLLL

SEQ ID NO: 13039 - protein, 21 aa, Artificial Sequence
  Quasi-synthetic sequence derived from human genome
VRIRVIKKKKVIMKKRKKLTL

SEQ ID NO: 13040 - protein, 21 aa, Artificial Sequence
  Quasi-synthetic sequence derived from human genome
LLAVIVLVALLLLWRRRQKRR

SEQ ID NO: 13041 - protein, 21 aa, Artificial Sequence
  Quasi-synthetic sequence derived from human genome
FALRRKKKKTIKMLMLVVVLF

SEQ ID NO: 13042 - protein, 21 aa, Artificial Sequence
  Quasi-synthetic sequence derived from human genome
RLLRGLWQRWRRYKYRFVPWI

SEQ ID NO: 13043 - protein, 21 aa, Artificial Sequence
  Quasi-synthetic sequence derived from human genome
RVFLQRLLWLLRLLFPRVLCR

SEQ ID NO: 13044 - protein, 21 aa, Artificial Sequence
  Quasi-synthetic sequence derived from human genome
LIFLLLAVLLWKMGFFRRRYK

SEQ ID NO: 13045 - protein, 21 aa, Artificial Sequence
  Quasi-synthetic sequence derived from human genome
KRWTHLVRLLRLIILIRIFHL

SEQ ID NO: 13046 - protein, 21 aa, Artificial Sequence
  Quasi-synthetic sequence derived from human genome
LKVLFKKTHRILRRLFNLCKR

SEQ ID NO: 13047 - protein, 21 aa, Artificial Sequence
  Quasi-synthetic sequence derived from human genome
FVIIFLGVVLVMKKRKLAKKR

SEQ ID NO: 13048 - protein, 21 aa, Artificial Sequence
  Quasi-synthetic sequence derived from human genome
WLRRKLRGKRRPVIAFCLLMI

SEQ ID NO: 13049 - protein, 21 aa, Artificial Sequence
  Quasi-synthetic sequence derived from human genome
KFMVLLWKNFILKRRRCIALV

SEQ ID NO: 13050 - protein, 21 aa, Artificial Sequence
  Quasi-synthetic sequence derived from human genome
IKRLRKKFAQKMLRKARRKLI

SEQ ID NO: 13051 - protein, 21 aa, Artificial Sequence
  Quasi-synthetic sequence derived from human genome
LAILRVIRLVRVFRIFKLSRH

SEQ ID NO: 13052 - protein, 21 aa, Artificial Sequence
  Quasi-synthetic sequence derived from human genome
LLLMLVLYGRIFRAARFRIRK

SEQ ID NO: 13053 - protein, 21 aa, Artificial Sequence
  Quasi-synthetic sequence derived from human genome
LVRLLRLIILIRIFHLLHQKR

SEQ ID NO: 13054 - protein, 21 aa, Artificial Sequence
  Quasi-synthetic sequence derived from human genome
RLRFLKLKRQTKVLLTLLLVF

SEQ ID NO: 13055 - protein, 21 aa, Artificial Sequence
  Quasi-synthetic sequence derived from human genome
LIFFFIALVFFLYRRRKGSRK

SEQ ID NO: 13056 - protein, 21 aa, Artificial Sequence
  Quasi-synthetic sequence derived from human genome
KLLAKKRVVRMLLVIVVLFFL

SEQ ID NO: 13057 - protein, 21 aa, Artificial Sequence
  Quasi-synthetic sequence derived from human genome
RFLKIIRPLRNIFLKKPVFAK

SEQ ID NO: 13058 - protein, 21 aa, Artificial Sequence
  Quasi-synthetic sequence derived from human genome
RFLLKRGLRNKRIGHFLFWFL

SEQ ID NO: 13059 - protein, 21 aa, Artificial Sequence
  Quasi-synthetic sequence derived from human genome
MRVLSRISKFRRLRQLLRRRK

SEQ ID NO: 13060 - protein, 21 aa, Artificial Sequence
  Quasi-synthetic sequence derived from human genome
ILRVIRLVRVFRIFKLSRHSK

SEQ ID NO: 13061 - protein, 21 aa, Artificial Sequence
  Quasi-synthetic sequence derived from human genome
LFRVIRLARIGRILRLIRGAK

SEQ ID NO: 13062 - protein, 21 aa, Artificial Sequence
  Quasi-synthetic sequence derived from human genome
LLFLLFFLTLRFSVVKRGRKK

SEQ ID NO: 13063 - protein, 21 aa, Artificial Sequence
  Quasi-synthetic sequence derived from human genome
FFHVKVLNINLKRKFIKKRII

SEQ ID NO: 13064 - protein, 21 aa, Artificial Sequence
  Quasi-synthetic sequence derived from human genome
KRMRVKKLPMILALHLKRFKY

SEQ ID NO: 13065 - protein, 21 aa, Artificial Sequence
  Quasi-synthetic sequence derived from human genome
LKRFKVMKIKVLRSWCRQILK

SEQ ID NO: 13066 - protein, 21 aa, Artificial Sequence
  Quasi-synthetic sequence derived from human genome
FAKLSIKWMIKIRKRYLKRRG

SEQ ID NO: 13067 - protein, 21 aa, Artificial Sequence
  Quasi-synthetic sequence derived from human genome
KILGMLRVLRLLRTLRPLRVI

SEQ ID NO: 13068 - protein, 21 aa, Artificial Sequence
  Quasi-synthetic sequence derived from human genome
FIILLVIFLIWRCFLRNKTRR

SEQ ID NO: 13069 - protein, 21 aa, Artificial Sequence
  Quasi-synthetic sequence derived from human genome
ILGKIILFLPCISRKLKRIKK

SEQ ID NO: 13070 - protein, 21 aa, Artificial Sequence
  Quasi-synthetic sequence derived from human genome
RFVRILRIFKLTRHFVGLRVL

SEQ ID NO: 13071 - protein, 21 aa, Artificial Sequence
  Quasi-synthetic sequence derived from human genome
KILGVLRVLRLLRTLRPLRVI

SEQ ID NO: 13072 - protein, 21 aa, Artificial Sequence
  Quasi-synthetic sequence derived from human genome
RRHFRMKLRNLFTKFIRKFGF

SEQ ID NO: 13073 - protein, 21 aa, Artificial Sequence
  Quasi-synthetic sequence derived from human genome
KLFRPKKLLPKAFKQYWFIFK

SEQ ID NO: 13074 - protein, 21 aa, Artificial Sequence
  Quasi-synthetic sequence derived from human genome
LFRVIRLARIGRILRLIKGAK

SEQ ID NO: 13075 - protein, 21 aa, Artificial Sequence
  Quasi-synthetic sequence derived from human genome
KTMKFIVWRRFKWVIIGLLFL

SEQ ID NO: 13076 - protein, 21 aa, Artificial Sequence
  Quasi-synthetic sequence derived from human genome
LRVLRVLRPLKTIKRLPKLKA

SEQ ID NO: 13077 - protein, 21 aa, Artificial Sequence
  Quasi-synthetic sequence derived from human genome
FTRRKYLLKALFKALKRLKSL

SEQ ID NO: 13078 - protein, 21 aa, Artificial Sequence
  Quasi-synthetic sequence derived from human genome
RALGRRKGVWLRLRKILFCVL

SEQ ID NO: 13079 - protein, 21 aa, Artificial Sequence
  Quasi-synthetic sequence derived from human genome
LLRKRYRHRPCRLQFLLLLLM

SEQ ID NO: 13080 - protein, 21 aa, Artificial Sequence
  Quasi-synthetic sequence derived from human genome
PRRRLGSLRWCGRRRLRWRLL

SEQ ID NO: 13081 - protein, 21 aa, Artificial Sequence
  Quasi-synthetic sequence derived from human genome
KRMKVKKLPMILALHLKRFKY

SEQ ID NO: 13082 - protein, 21 aa, Artificial Sequence
  Quasi-synthetic sequence derived from human genome
WMRRMRILRRLLRRYRESKKI

SEQ ID NO: 13083 - protein, 21 aa, Artificial Sequence
  Quasi-synthetic sequence derived from human genome
RGRLMRRLVRRLRRWGLLPRT

SEQ ID NO: 13084 - protein, 21 aa, Artificial Sequence
  Quasi-synthetic sequence derived from human genome
IIILLLIFLRKRILIAIALIK

SEQ ID NO: 13085 - protein, 21 aa, Artificial Sequence
  Quasi-synthetic sequence derived from human genome
MKILLLCLCLILLRVRSCRRK

SEQ ID NO: 13086 - protein, 21 aa, Artificial Sequence
  Quasi-synthetic sequence derived from human genome
RWFLSPRWILQFRRWARKWSR

SEQ ID NO: 13087 - protein, 21 aa, Artificial Sequence
  Quasi-synthetic sequence derived from human genome
HLKRLVKLHIKRHYHKKFWKL

SEQ ID NO: 13088 - protein, 21 aa, Artificial Sequence
  Quasi-synthetic sequence derived from human genome
LLLLLVLLLAAYFFRFRKQRK

SEQ ID NO: 13089 - protein, 21 aa, Artificial Sequence
  Quasi-synthetic sequence derived from human genome
LKSQILLKKYLMKRRWKKNFI

SEQ ID NO: 13090 - protein, 21 aa, Artificial Sequence
  Quasi-synthetic sequence derived from human genome
VLKTVILGLLCLLLLWWRRRK

SEQ ID NO: 13091 - protein, 21 aa, Artificial Sequence
  Quasi-synthetic sequence derived from human genome
LYRAPYFWIKRRILLLIPKWL

SEQ ID NO: 13092 - protein, 21 aa, Artificial Sequence
  Quasi-synthetic sequence derived from human genome
LWYLIKWIWTHLCKKKMRRKP

SEQ ID NO: 13093 - protein, 21 aa, Artificial Sequence
  Quasi-synthetic sequence derived from human genome
RILINLMKYLQKWKRYRPLWK

SEQ ID NO: 13094 - protein, 21 aa, Artificial Sequence
  Quasi-synthetic sequence derived from human genome
LRNIPRWTHLLRLLRLIILLR

SEQ ID NO: 13095 - protein, 21 aa, Artificial Sequence
  Quasi-synthetic sequence derived from human genome
RISITFFRLFRVMRLVKLLSR

SEQ ID NO: 13096 - protein, 21 aa, Artificial Sequence
  Quasi-synthetic sequence derived from human genome
LLTLAPFLLWLRKCLRKAKKF

SEQ ID NO: 13097 - protein, 21 aa, Artificial Sequence
  Quasi-synthetic sequence derived from human genome
YWKTWIFWKTWIFWKTWIFRK

SEQ ID NO: 13098 - protein, 21 aa, Artificial Sequence
  Quasi-synthetic sequence derived from human genome
KAIQRRKWAVRIIRKFIKGFI

SEQ ID NO: 13099 - protein, 21 aa, Artificial Sequence
  Quasi-synthetic sequence derived from human genome
GFMLKKRKWPLKGWHKRFFVL

SEQ ID NO: 13100 - protein, 21 aa, Artificial Sequence
  Quasi-synthetic sequence derived from human genome
LAFVIVLLVLRLRRWHKSRLL

SEQ ID NO: 13101 - protein, 21 aa, Artificial Sequence
  Quasi-synthetic sequence derived from human genome
KKKYKAIRLIFVIMAVFFIFW

SEQ ID NO: 13102 - protein, 21 aa, Artificial Sequence
  Quasi-synthetic sequence derived from human genome
LAFVILLLALRLRRWHKSRLL

SEQ ID NO: 13103 - protein, 21 aa, Artificial Sequence
  Quasi-synthetic sequence derived from human genome
LGIGLFMRRRHIVRKRTLRRL

SEQ ID NO: 13104 - protein, 21 aa, Artificial Sequence
  Quasi-synthetic sequence derived from human genome
TIIRIMRVLRIARVLKLLKMA

SEQ ID NO: 13105 - protein, 21 aa, Artificial Sequence
  Quasi-synthetic sequence derived from human genome
ILLLLALALGLLVYRKRRAKR

SEQ ID NO: 13106 - protein, 21 aa, Artificial Sequence
  Quasi-synthetic sequence derived from human genome
QKLLKRLRLLPALLILRAFKP

SEQ ID NO: 13107 - protein, 21 aa, Artificial Sequence
  Quasi-synthetic sequence derived from human genome
KSLRVLRVLRPLKTIKRLPKL

SEQ ID NO: 13108 - protein, 21 aa, Artificial Sequence
  Quasi-synthetic sequence derived from human genome
LFRVIRLARIGRILRLVKGAK

SEQ ID NO: 13109 - protein, 21 aa, Artificial Sequence
  Quasi-synthetic sequence derived from human genome
IRLKNIRKVYGRCMWYRLRLL

SEQ ID NO: 13110 - protein, 21 aa, Artificial Sequence
  Quasi-synthetic sequence derived from human genome
LLLLMVACRLRLVKQKLKKAR

SEQ ID NO: 13111 - protein, 21 aa, Artificial Sequence
  Quasi-synthetic sequence derived from human genome
RLLRLIILLRIFHLFHQKRQL

SEQ ID NO: 13112 - protein, 21 aa, Artificial Sequence
  Quasi-synthetic sequence derived from human genome
KSFFKTLKKRAWAIFLRLCLK

SEQ ID NO: 13113 - protein, 21 aa, Artificial Sequence
  Quasi-synthetic sequence derived from human genome
KKKKKKKKKRQCFAFLIYFRL

SEQ ID NO: 13114 - protein, 21 aa, Artificial Sequence
  Quasi-synthetic sequence derived from human genome
FRSPVFRIFFHKIFIRPLRYR

SEQ ID NO: 13115 - protein, 21 aa, Artificial Sequence
  Quasi-synthetic sequence derived from human genome
WVILMGFSIWLYWRRKKRKGL

SEQ ID NO: 13116 - protein, 21 aa, Artificial Sequence
  Quasi-synthetic sequence derived from human genome
RARRRRPLFALLLLCALLARL

SEQ ID NO: 13117 - protein, 21 aa, Artificial Sequence
  Quasi-synthetic sequence derived from human genome
KKRIKRRALLFLSYILTHFIF

SEQ ID NO: 13118 - protein, 21 aa, Artificial Sequence
  Quasi-synthetic sequence derived from human genome
KGKRWFAFKMMMAKKWAKFLR

SEQ ID NO: 13119 - protein, 21 aa, Artificial Sequence
  Quasi-synthetic sequence derived from human genome
RNIGIWFFWIRLYKIRRGRTR

SEQ ID NO: 13120 - protein, 21 aa, Artificial Sequence
  Quasi-synthetic sequence derived from human genome
VLFCLFIFVLIYVRVFRKSRR

SEQ ID NO: 13121 - protein, 21 aa, Artificial Sequence
  Quasi-synthetic sequence derived from human genome
FVLLFIFVKRQIMRFAMKSRR

SEQ ID NO: 13122 - protein, 21 aa, Artificial Sequence
  Quasi-synthetic sequence derived from human genome
RLLRLIILIRIFHLLHQKRQL

SEQ ID NO: 13123 - protein, 21 aa, Artificial Sequence
  Quasi-synthetic sequence derived from human genome
MLALFMLMALVLLQRKLWRRR

SEQ ID NO: 13124 - protein, 21 aa, Artificial Sequence
  Quasi-synthetic sequence derived from human genome
RRRRARLRFMKQKFNIVCLKI

SEQ ID NO: 13125 - protein, 21 aa, Artificial Sequence
  Quasi-synthetic sequence derived from human genome
MKRHLRLIHPTKLYKLMLRRF

SEQ ID NO: 13126 - protein, 21 aa, Artificial Sequence
  Quasi-synthetic sequence derived from human genome
TVKRLLIKKLPRVLAIQLKRF

SEQ ID NO: 13127 - protein, 21 aa, Artificial Sequence
  Quasi-synthetic sequence derived from human genome
RAFLLRRRFLHLKKAAIVFQK

SEQ ID NO: 13128 - protein, 21 aa, Artificial Sequence
  Quasi-synthetic sequence derived from human genome
LKAAIRAVRILQFRLYKKKFK

SEQ ID NO: 13129 - protein, 21 aa, Artificial Sequence
  Quasi-synthetic sequence derived from human genome
LSILCLVMILYTRRRWCKRRR

SEQ ID NO: 13130 - protein, 21 aa, Artificial Sequence
  Quasi-synthetic sequence derived from human genome
ILRLMRIFRILKLARHSVGLR

SEQ ID NO: 13131 - protein, 21 aa, Artificial Sequence
  Quasi-synthetic sequence derived from human genome
VFILLLLVVILIVKKSKLAKK

SEQ ID NO: 13132 - protein, 21 aa, Artificial Sequence
  Quasi-synthetic sequence derived from human genome
FRNLRLPKRLRVVYFLARTRL

SEQ ID NO: 13133 - protein, 21 aa, Artificial Sequence
  Quasi-synthetic sequence derived from human genome
VLLLFLLLFLLLRRQRHSKHR

SEQ ID NO: 13134 - protein, 21 aa, Artificial Sequence
  Quasi-synthetic sequence derived from human genome
RFRSLLVRRRFISLKKATIFV

SEQ ID NO: 13135 - protein, 21 aa, Artificial Sequence
  Quasi-synthetic sequence derived from human genome
LLALTALLLVAMICRRRRRRK

SEQ ID NO: 13136 - protein, 21 aa, Artificial Sequence
  Quasi-synthetic sequence derived from human genome
PWMLLFKPLVLRRQYLRRKHL

SEQ ID NO: 13137 - protein, 21 aa, Artificial Sequence
  Quasi-synthetic sequence derived from human genome
FLQLRGSGRKLWKRFFCFLRR

SEQ ID NO: 13138 - protein, 21 aa, Artificial Sequence
  Quasi-synthetic sequence derived from human genome
VLIPKLKGWWQKFRLRSKKRK

SEQ ID NO: 13139 - protein, 21 aa, Artificial Sequence
  Quasi-synthetic sequence derived from human genome
RRKSWRLEFLFLRRRCFLLTF

SEQ ID NO: 13140 - protein, 21 aa, Artificial Sequence
  Quasi-synthetic sequence derived from human genome
WGLIVLLCCFCSFLRRRLKRR

SEQ ID NO: 13141 - protein, 21 aa, Artificial Sequence
  Quasi-synthetic sequence derived from human genome
FLAFVLVLLALRLRRWHKSRL

SEQ ID NO: 13142 - protein, 21 aa, Artificial Sequence
  Quasi-synthetic sequence derived from human genome
FFFFFSVGRKFKKFNKVRVVR

SEQ ID NO: 13143 - protein, 21 aa, Artificial Sequence
  Quasi-synthetic sequence derived from human genome
RGSLRRLLRLLVLGLWLALLR

SEQ ID NO: 13144 - protein, 21 aa, Artificial Sequence
  Quasi-synthetic sequence derived from human genome
LLALAAWASRWLRRKLRARRK

SEQ ID NO: 13145 - protein, 21 aa, Artificial Sequence
  Quasi-synthetic sequence derived from human genome
LRTFRLMRVLKLVRFLPALQR

SEQ ID NO: 13146 - protein, 21 aa, Artificial Sequence
  Quasi-synthetic sequence derived from human genome
IKKIKKVQSFLRGWLCRRKWK

SEQ ID NO: 13147 - protein, 21 aa, Artificial Sequence
  Quasi-synthetic sequence derived from human genome
LLRFLRLCRSFYITCRRLRCF

SEQ ID NO: 13148 - protein, 21 aa, Artificial Sequence
  Quasi-synthetic sequence derived from human genome
YLWAIGKNVWKRWKKRFFVLV

SEQ ID NO: 13149 - protein, 21 aa, Artificial Sequence
  Quasi-synthetic sequence derived from human genome
LRNIPRWTHLVRLLRLIILIR

SEQ ID NO: 13150 - protein, 21 aa, Artificial Sequence
  Quasi-synthetic sequence derived from human genome
LALLVLALWKLGFFRSARRRR

SEQ ID NO: 13151 - protein, 21 aa, Artificial Sequence
  Quasi-synthetic sequence derived from human genome
PLFALLSRGRRRRMHVLRRRW

SEQ ID NO: 13152 - protein, 21 aa, Artificial Sequence
  Quasi-synthetic sequence derived from human genome
KVILHKKRYIYRKIKGWRPVL

SEQ ID NO: 13153 - protein, 21 aa, Artificial Sequence
  Quasi-synthetic sequence derived from human genome
YLRIIRFLPLFKIIVPILIRI

SEQ ID NO: 13154 - protein, 21 aa, Artificial Sequence
  Quasi-synthetic sequence derived from human genome
FLAFVIVLLALRLRRWHKSRL

SEQ ID NO: 13155 - protein, 21 aa, Artificial Sequence
  Quasi-synthetic sequence derived from human genome
RIIRLVRVFRIFKLSRHSKGL

SEQ ID NO: 13156 - protein, 21 aa, Artificial Sequence
  Quasi-synthetic sequence derived from human genome
WLRVRKARPQLILSRRPRRRL

SEQ ID NO: 13157 - protein, 21 aa, Artificial Sequence
  Quasi-synthetic sequence derived from human genome
RISSAFFRLFRVMRLIKLLSR

SEQ ID NO: 13158 - protein, 21 aa, Artificial Sequence
  Quasi-synthetic sequence derived from human genome
LRCLRPLRIFKLVPQMRKVVR

SEQ ID NO: 13159 - protein, 21 aa, Artificial Sequence
  Quasi-synthetic sequence derived from human genome
FFWCLAFLWGLLILLKYRWRK

SEQ ID NO: 13160 - protein, 21 aa, Artificial Sequence
  Quasi-synthetic sequence derived from human genome
IFRKVKRRSLRLYARWQSRWR

SEQ ID NO: 13161 - protein, 21 aa, Artificial Sequence
  Quasi-synthetic sequence derived from human genome
TLRVLRMMRIFWVIKLARHFI

SEQ ID NO: 13162 - protein, 21 aa, Artificial Sequence
  Quasi-synthetic sequence derived from human genome
LGSLVLRRKALAPRLLLRLLR

SEQ ID NO: 13163 - protein, 21 aa, Artificial Sequence
  Quasi-synthetic sequence derived from human genome
MVWRRLLRKRWVLALVFGLSL

SEQ ID NO: 13164 - protein, 21 aa, Artificial Sequence
  Quasi-synthetic sequence derived from human genome
LRRRCFLLTFYLWFLFFSRFL

SEQ ID NO: 13165 - protein, 21 aa, Artificial Sequence
  Quasi-synthetic sequence derived from human genome
KIRRSYALVSLSFFRKLRLIR

SEQ ID NO: 13166 - protein, 21 aa, Artificial Sequence
  Quasi-synthetic sequence derived from human genome
RKQLMIYRLPQVLRLHLKRFR

SEQ ID NO: 13167 - protein, 21 aa, Artificial Sequence
  Quasi-synthetic sequence derived from human genome
IFIITKFCLFCFRKLAKKGKK

SEQ ID NO: 13168 - protein, 21 aa, Artificial Sequence
  Quasi-synthetic sequence derived from human genome
KKLRLFAWRKRWFILRRGQTS

SEQ ID NO: 13169 - protein, 21 aa, Artificial Sequence
  Quasi-synthetic sequence derived from human genome
KRRLVLGLREVLKHLKLKKLK

SEQ ID NO: 13170 - protein, 21 aa, Artificial Sequence
  Quasi-synthetic sequence derived from human genome
VGQVLRVMRLMRIFRILKLAR

SEQ ID NO: 13171 - protein, 21 aa, Artificial Sequence
  Quasi-synthetic sequence derived from human genome
RHLKTKRILRRNLLALIHRMI

SEQ ID NO: 13172 - protein, 21 aa, Artificial Sequence
  Quasi-synthetic sequence derived from human genome
RFRKYLRQLFHRRVAVHLVKW

SEQ ID NO: 13173 - protein, 21 aa, Artificial Sequence
  Quasi-synthetic sequence derived from human genome
LFIIVQLFIMKLRKAHVIWKK

SEQ ID NO: 13174 - protein, 21 aa, Artificial Sequence
  Quasi-synthetic sequence derived from human genome
LLPPKRRLLPRVRLLPLLLAL

SEQ ID NO: 13175 - protein, 21 aa, Artificial Sequence
  Quasi-synthetic sequence derived from human genome
KKFWIQKLPKVLCLHLKRFHW

SEQ ID NO: 13176 - protein, 21 aa, Artificial Sequence
  Quasi-synthetic sequence derived from human genome
LIRFLPRPIRQQLLYKRRYIF

SEQ ID NO: 13177 - protein, 21 aa, Artificial Sequence
  Quasi-synthetic sequence derived from human genome
IFIITKFCLFCFWKFARKGKK

SEQ ID NO: 13178 - protein, 21 aa, Artificial Sequence
  Quasi-synthetic sequence derived from human genome
LRKRIHRPRRRTTRRWKRWFK

SEQ ID NO: 13179 - protein, 21 aa, Artificial Sequence
  Quasi-synthetic sequence derived from human genome
LGRVAQVLRLMRIFRILKLAR

SEQ ID NO: 13180 - protein, 21 aa, Artificial Sequence
  Quasi-synthetic sequence derived from human genome
VLRRKALLIFLVVHRLRWSSK

SEQ ID NO: 13181 - protein, 21 aa, Artificial Sequence
  Quasi-synthetic sequence derived from human genome
RVSKKNIFLLFKKLCSFRYRR

SEQ ID NO: 13182 - protein, 21 aa, Artificial Sequence
  Quasi-synthetic sequence derived from human genome
RRNFWPARLATRLLKLRYLIL

SEQ ID NO: 13183 - protein, 21 aa, Artificial Sequence
  Quasi-synthetic sequence derived from human genome
LLMVSLLLLSLWKLWRVKKFL

SEQ ID NO: 13184 - protein, 21 aa, Artificial Sequence
  Quasi-synthetic sequence derived from human genome
LKRFKVMKPKVLRSWCRQILK

SEQ ID NO: 13185 - protein, 21 aa, Artificial Sequence
  Quasi-synthetic sequence derived from human genome
KLKRKYWWKNLKMMIILGVIC

SEQ ID NO: 13186 - protein, 21 aa, Artificial Sequence
  Quasi-synthetic sequence derived from human genome
NRTFRKTFKMLLLCRWKKKKV

SEQ ID NO: 13187 - protein, 21 aa, Artificial Sequence
  Quasi-synthetic sequence derived from human genome
LSRTSKFRRLRQLLRRRKKRW

SEQ ID NO: 13188 - protein, 21 aa, Artificial Sequence
  Quasi-synthetic sequence derived from human genome
LLRTLSRAKFWPRRRFNFFVL

SEQ ID NO: 13189 - protein, 21 aa, Artificial Sequence
  Quasi-synthetic sequence derived from human genome
RALRGLSYRSLRRRVRRLRRL

SEQ ID NO: 13190 - protein, 21 aa, Artificial Sequence
  Quasi-synthetic sequence derived from human genome
ISRILKNLVFRILKKCYRGRF

SEQ ID NO: 13191 - protein, 21 aa, Artificial Sequence
  Quasi-synthetic sequence derived from human genome
VVKILRVLRVLRPLRAINRAK

SEQ ID NO: 13192 - protein, 21 aa, Artificial Sequence
  Quasi-synthetic sequence derived from human genome
PRHRGLLRVRLGRFISRLLLW

SEQ ID NO: 13193 - protein, 21 aa, Artificial Sequence
  Quasi-synthetic sequence derived from human genome
LIRKKFRMMKIPKPILFGLNI

SEQ ID NO: 13194 - protein, 21 aa, Artificial Sequence
  Quasi-synthetic sequence derived from human genome
LKLILKRYKIGASRKTFWKRK

SEQ ID NO: 13195 - protein, 21 aa, Artificial Sequence
  Quasi-synthetic sequence derived from human genome
VIRYSLQKLRLVRWLLKKVFQ

SEQ ID NO: 13196 - protein, 21 aa, Artificial Sequence
  Quasi-synthetic sequence derived from human genome
FLMVMYFFFRVRSRRWKVKHH

SEQ ID NO: 13197 - protein, 21 aa, Artificial Sequence
  Quasi-synthetic sequence derived from human genome
KRLISVKNYRMIKKRKGLRLI

SEQ ID NO: 13198 - protein, 21 aa, Artificial Sequence
  Quasi-synthetic sequence derived from human genome
LFRQCRRRLIPHPRRLWPFVR

SEQ ID NO: 13199 - protein, 21 aa, Artificial Sequence
  Quasi-synthetic sequence derived from human genome
ILLLMLIFLRQRIRIAIALLK

SEQ ID NO: 13200 - protein, 21 aa, Artificial Sequence
  Quasi-synthetic sequence derived from human genome
VLRALRLLRIFKVTKYWASLR

SEQ ID NO: 13201 - protein, 21 aa, Artificial Sequence
  Quasi-synthetic sequence derived from human genome
VIRLARIGRILRLIRAAKGIR

SEQ ID NO: 13202 - protein, 21 aa, Artificial Sequence
  Quasi-synthetic sequence derived from human genome
RIPLQRLKLKCIFCRHRVKRV

SEQ ID NO: 13203 - protein, 21 aa, Artificial Sequence
  Quasi-synthetic sequence derived from human genome
FGRKSYPMLKLVRLKLWFPRF

SEQ ID NO: 13204 - protein, 21 aa, Artificial Sequence
  Quasi-synthetic sequence derived from human genome
IPLLLFRWKPLWGVRLRLRPC

SEQ ID NO: 13205 - protein, 21 aa, Artificial Sequence
  Quasi-synthetic sequence derived from human genome
KIKRLKKSAFVVLILLITAKL

SEQ ID NO: 13206 - protein, 21 aa, Artificial Sequence
  Quasi-synthetic sequence derived from human genome
VCLYFYCKFLWRCLKFVMRKL

SEQ ID NO: 13207 - protein, 21 aa, Artificial Sequence
  Quasi-synthetic sequence derived from human genome
FVKWPRYIRLQRQRAILYKRL

SEQ ID NO: 13208 - protein, 21 aa, Artificial Sequence
  Quasi-synthetic sequence derived from human genome
IRRRSKFANLGRIFKPWKWRK

SEQ ID NO: 13209 - protein, 21 aa, Artificial Sequence
  Quasi-synthetic sequence derived from human genome
LLLAKVMRFERFGRRRVIIKK

SEQ ID NO: 13210 - protein, 21 aa, Artificial Sequence
  Quasi-synthetic sequence derived from human genome
RIIILKIVHRRIINRFHSFLL

SEQ ID NO: 13211 - protein, 21 aa, Artificial Sequence
  Quasi-synthetic sequence derived from human genome
LKKKKKMPKLRFASRIRKIRK

SEQ ID NO: 13212 - protein, 21 aa, Artificial Sequence
  Quasi-synthetic sequence derived from human genome
LVYARIYVVLKQRRRKRILTR

SEQ ID NO: 13213 - protein, 21 aa, Artificial Sequence
  Quasi-synthetic sequence derived from human genome
FRRFNIRLIHPVQFVFLRKRY

SEQ ID NO: 13214 - protein, 21 aa, Artificial Sequence
  Quasi-synthetic sequence derived from human genome
LLGLLAALLLLLLLSRRRTRR

SEQ ID NO: 13215 - protein, 21 aa, Artificial Sequence
  Quasi-synthetic sequence derived from human genome
KFWRRYGKLSRHLMKVKLKKY

SEQ ID NO: 13216 - protein, 21 aa, Artificial Sequence
  Quasi-synthetic sequence derived from human genome
RRRKKLPSVLLFKKPSPFIFI

SEQ ID NO: 13217 - protein, 21 aa, Artificial Sequence
  Quasi-synthetic sequence derived from human genome
PRSPRIRKRFLLRRILEMLFF

SEQ ID NO: 13218 - protein, 21 aa, Artificial Sequence
  Quasi-synthetic sequence derived from human genome
LLFLCLLPLIVKHIRKKQAKK

SEQ ID NO: 13219 - protein, 21 aa, Artificial Sequence
  Quasi-synthetic sequence derived from human genome
LVLILLCLLIYYCRRRCLKPR

SEQ ID NO: 13220 - protein, 21 aa, Artificial Sequence
  Quasi-synthetic sequence derived from human genome
FFLMKRKIIVLMPWLLRLSVL

SEQ ID NO: 13221 - protein, 21 aa, Artificial Sequence
  Quasi-synthetic sequence derived from human genome
LRVIRLVRVFRIFKLSRHSKG

SEQ ID NO: 13222 - protein, 21 aa, Artificial Sequence
  Quasi-synthetic sequence derived from human genome
RVIRLVRVFRIFKLSRHSKGL

SEQ ID NO: 13223 - protein, 21 aa, Artificial Sequence
  Quasi-synthetic sequence derived from human genome
RGFLIKMGGKIKTWKKRWFVF

SEQ ID NO: 13224 - protein, 21 aa, Artificial Sequence
  Quasi-synthetic sequence derived from human genome
IQAFVKRKVIIFLKKCLLCKV

SEQ ID NO: 13225 - protein, 21 aa, Artificial Sequence
  Quasi-synthetic sequence derived from human genome
RARRGLLRLPRRSLLAALFFF

SEQ ID NO: 13226 - protein, 21 aa, Artificial Sequence
  Quasi-synthetic sequence derived from human genome
IVLAKKMLRKALKLLNRIFPY

SEQ ID NO: 13227 - protein, 21 aa, Artificial Sequence
  Quasi-synthetic sequence derived from human genome
RLKRRVKSVILVVLLGPLLFL

SEQ ID NO: 13228 - protein, 21 aa, Artificial Sequence
  Quasi-synthetic sequence derived from human genome
MGLWRMQVFAMARLRFLKLKR

SEQ ID NO: 13229 - protein, 21 aa, Artificial Sequence
  Quasi-synthetic sequence derived from human genome
TLLCIAIVLRFKKTWKLRALK

SEQ ID NO: 13230 - protein, 21 aa, Artificial Sequence
  Quasi-synthetic sequence derived from human genome
ILLVLLCLLLYYCRRKCLKPR

SEQ ID NO: 13231 - protein, 21 aa, Artificial Sequence
  Quasi-synthetic sequence derived from human genome
RKRCIKKFSIQRFPKILVLHL

SEQ ID NO: 13232 - protein, 21 aa, Artificial Sequence
  Quasi-synthetic sequence derived from human genome
IQLLLWKNWTLRKRQKIRFVV

SEQ ID NO: 13233 - protein, 21 aa, Artificial Sequence
  Quasi-synthetic sequence derived from human genome
LLARKECLKFLIKRLAKIVRL

SEQ ID NO: 13234 - protein, 21 aa, Artificial Sequence
  Quasi-synthetic sequence derived from human genome
RIRVLVIRKLVRSVGRLKSKK

SEQ ID NO: 13235 - protein, 21 aa, Artificial Sequence
  Quasi-synthetic sequence derived from human genome
KVKRKKNVLRLCCKKLKIFAM

SEQ ID NO: 13236 - protein, 21 aa, Artificial Sequence
  Quasi-synthetic sequence derived from human genome
LCRRLQKFWRVTVKGFFVKKK

SEQ ID NO: 13237 - protein, 21 aa, Artificial Sequence
  Quasi-synthetic sequence derived from human genome
RSKLSLIRKFRLFPRPQVKLF

SEQ ID NO: 13238 - protein, 21 aa, Artificial Sequence
  Quasi-synthetic sequence derived from human genome
YLLKIANFSNLIFLRLKRRVK

SEQ ID NO: 13239 - protein, 21 aa, Artificial Sequence
  Quasi-synthetic sequence derived from human genome
RAALKFLAKCRKKKKLFAPWR

SEQ ID NO: 13240 - protein, 21 aa, Artificial Sequence
  Quasi-synthetic sequence derived from human genome
PKLRRFLKPQGHPRLLLWFKR

SEQ ID NO: 13241 - protein, 21 aa, Artificial Sequence
  Quasi-synthetic sequence derived from human genome
RIQKTIRGWLLRKKYLRMRKA

SEQ ID NO: 13242 - protein, 21 aa, Artificial Sequence
  Quasi-synthetic sequence derived from human genome
IWKKFLSRPALPFILRLLRGL

SEQ ID NO: 13243 - protein, 21 aa, Artificial Sequence
  Quasi-synthetic sequence derived from human genome
KVFLSSLKFHIRRFIFLFFIL

SEQ ID NO: 13244 - protein, 21 aa, Artificial Sequence
  Quasi-synthetic sequence derived from human genome
RKKWKMGGMKYIFSLLFFLLL

SEQ ID NO: 13245 - protein, 21 aa, Artificial Sequence
  Quasi-synthetic sequence derived from human genome
LLLCRLRRLRARARARAAARL

SEQ ID NO: 13246 - protein, 21 aa, Artificial Sequence
  Quasi-synthetic sequence derived from human genome
LKLICFLIPFLLSLKKKMKVP

SEQ ID NO: 13247 - protein, 21 aa, Artificial Sequence
  Quasi-synthetic sequence derived from human genome
RRFLSKVYSFPMRKLILFLVF

SEQ ID NO: 13248 - protein, 21 aa, Artificial Sequence
  Quasi-synthetic sequence derived from human genome
IKKIKKVQSFMRGWLCRRKWK

SEQ ID NO: 13249 - protein, 21 aa, Artificial Sequence
  Quasi-synthetic sequence derived from human genome
MKKKKKVLVWNRVYKVISRML

SEQ ID NO: 13250 - protein, 21 aa, Artificial Sequence
  Quasi-synthetic sequence derived from human genome
KKLPGVMLFKKKKTRKLKIAL

SEQ ID NO: 13251 - protein, 21 aa, Artificial Sequence
  Quasi-synthetic sequence derived from human genome
KKNRKMLVILILFVIIIVLIV

SEQ ID NO: 13252 - protein, 21 aa, Artificial Sequence
  Quasi-synthetic sequence derived from human genome
LLLLRWRRPALHRPIKVNLLI

SEQ ID NO: 13253 - protein, 21 aa, Artificial Sequence
  Quasi-synthetic sequence derived from human genome
LAHLCRLRVRKAIGKYRIKLL

SEQ ID NO: 13254 - protein, 21 aa, Artificial Sequence
  Quasi-synthetic sequence derived from human genome
FSPLRILRKRNKALRKIRKLQ

SEQ ID NO: 13255 - protein, 21 aa, Artificial Sequence
  Quasi-synthetic sequence derived from human genome
CKRGKRHWKKLWFVIKGKVLY

SEQ ID NO: 13256 - protein, 21 aa, Artificial Sequence
  Quasi-synthetic sequence derived from human genome
RRWRHALHRRLLNRRLLLAVT

SEQ ID NO: 13257 - protein, 21 aa, Artificial Sequence
  Quasi-synthetic sequence derived from human genome
LLAIFVALFFLTKKRRQRQRL

SEQ ID NO: 13258 - protein, 21 aa, Artificial Sequence
  Quasi-synthetic sequence derived from human genome
ANFLKKVRRLIMKRIVKISKC

SEQ ID NO: 13259 - protein, 21 aa, Artificial Sequence
  Quasi-synthetic sequence derived from human genome
RDVLGFLRVVRFVRILRIFKL

SEQ ID NO: 13260 - protein, 21 aa, Artificial Sequence
  Quasi-synthetic sequence derived from human genome
ALKFLAKCRKKKKLFAPWRGL

SEQ ID NO: 13261 - protein, 21 aa, Artificial Sequence
  Quasi-synthetic sequence derived from human genome
LLLILKAGRRWNKYFKSRRPL

SEQ ID NO: 13262 - protein, 21 aa, Artificial Sequence
  Quasi-synthetic sequence derived from human genome
RKRISLKRPKKCFRNLFHIRR

SEQ ID NO: 13263 - protein, 21 aa, Artificial Sequence
  Quasi-synthetic sequence derived from human genome
KKLVVFRPRLFLLCFGIIFLI

SEQ ID NO: 13264 - protein, 21 aa, Artificial Sequence
  Quasi-synthetic sequence derived from human genome
LFVLSVHYLWKKWKKHQKKLK

SEQ ID NO: 13265 - protein, 21 aa, Artificial Sequence
  Quasi-synthetic sequence derived from human genome
LMMRRRFLSLKKTAILIQRKY

SEQ ID NO: 13266 - protein, 21 aa, Artificial Sequence
  Quasi-synthetic sequence derived from human genome
AVVIILFIILLGVIMAKRKRK

SEQ ID NO: 13267 - protein, 21 aa, Artificial Sequence
  Quasi-synthetic sequence derived from human genome
AILGLWKIARKWMRRKMGKWP

SEQ ID NO: 13268 - protein, 21 aa, Artificial Sequence
  Quasi-synthetic sequence derived from human genome
LVLLLLALILPLLFYLRKRNK

SEQ ID NO: 13269 - protein, 21 aa, Artificial Sequence
  Quasi-synthetic sequence derived from human genome
SLVHLLKTVRLLRLLRLLQKL

SEQ ID NO: 13270 - protein, 21 aa, Artificial Sequence
  Quasi-synthetic sequence derived from human genome
WLWRQSSILRRWKRNWFALWL

SEQ ID NO: 13271 - protein, 21 aa, Artificial Sequence
  Quasi-synthetic sequence derived from human genome
LIFLRIKRRVKSVVLVILLGP

SEQ ID NO: 13272 - protein, 21 aa, Artificial Sequence
  Quasi-synthetic sequence derived from human genome
LVLALVLVGLVSWRRRQRRLR

SEQ ID NO: 13273 - protein, 21 aa, Artificial Sequence
  Quasi-synthetic sequence derived from human genome
VLRALRLLRIFKVTKYWSSLR

SEQ ID NO: 13274 - protein, 21 aa, Artificial Sequence
  Quasi-synthetic sequence derived from human genome
FGPLCFIFICYFKIYIRLKRR

SEQ ID NO: 13275 - protein, 21 aa, Artificial Sequence
  Quasi-synthetic sequence derived from human genome
AKPFFRLQKFLRRTQFLLFFL

SEQ ID NO: 13276 - protein, 21 aa, Artificial Sequence
  Quasi-synthetic sequence derived from human genome
LWKRLLIARRSRKGFFAQIVL

SEQ ID NO: 13277 - protein, 21 aa, Artificial Sequence
  Quasi-synthetic sequence derived from human genome
FGILIKRRQQKIRKYTMRRLL

SEQ ID NO: 13278 - protein, 21 aa, Artificial Sequence
  Quasi-synthetic sequence derived from human genome
FLVFVIVLLALRLWRWHKSRL

SEQ ID NO: 13279 - protein, 21 aa, Artificial Sequence
  Quasi-synthetic sequence derived from human genome
FLLKPVFLQRNLKKFRRRWQS

SEQ ID NO: 13280 - protein, 21 aa, Artificial Sequence
  Quasi-synthetic sequence derived from human genome
KQIRQRIIKKFQFIKSLRCFW

SEQ ID NO: 13281 - protein, 21 aa, Artificial Sequence
  Quasi-synthetic sequence derived from human genome
RIRCVARKFLYLWIRMTFGRV

SEQ ID NO: 13282 - protein, 21 aa, Artificial Sequence
  Quasi-synthetic sequence derived from human genome
VKVILKKKKKLLLLQKKEWTW

SEQ ID NO: 13283 - protein, 21 aa, Artificial Sequence
  Quasi-synthetic sequence derived from human genome
RLLFFLLGFLRIRVRGQRASR

SEQ ID NO: 13284 - protein, 21 aa, Artificial Sequence
  Quasi-synthetic sequence derived from human genome
FGAHLLKTVRLLRLLRLLPRL

SEQ ID NO: 13285 - protein, 21 aa, Artificial Sequence
  Quasi-synthetic sequence derived from human genome
KKLRRLLKYMFIRDYKSKIVK

SEQ ID NO: 13286 - protein, 21 aa, Artificial Sequence
  Quasi-synthetic sequence derived from human genome
LLLGPARLCLRLLLLLGYRRR

SEQ ID NO: 13287 - protein, 21 aa, Artificial Sequence
  Quasi-synthetic sequence derived from human genome
FVYFIMRIVNFPKCRRRRLQK

SEQ ID NO: 13288 - protein, 21 aa, Artificial Sequence
  Quasi-synthetic sequence derived from human genome
INAFNWAKVRKLSFKRKRFLI

SEQ ID NO: 13289 - protein, 21 aa, Artificial Sequence
  Quasi-synthetic sequence derived from human genome
VLLLSIAIFQRQKRRKFWKAK

SEQ ID NO: 13290 - protein, 21 aa, Artificial Sequence
  Quasi-synthetic sequence derived from human genome
KDVLGFLRVVRFVRILRIFKL

SEQ ID NO: 13291 - protein, 21 aa, Artificial Sequence
  Quasi-synthetic sequence derived from human genome
FLRLFRAARLIKLLRQGYTIR

SEQ ID NO: 13292 - protein, 21 aa, Artificial Sequence
  Quasi-synthetic sequence derived from human genome
LRNKRRRMQVRVKLGKFQLLL

SEQ ID NO: 13293 - protein, 21 aa, Artificial Sequence
  Quasi-synthetic sequence derived from human genome
TLLAKHWKLLPLLRSVLRFRL

SEQ ID NO: 13294 - protein, 21 aa, Artificial Sequence
  Quasi-synthetic sequence derived from human genome
FIFYLRNMKKKYTKMVKLLHK

SEQ ID NO: 13295 - protein, 21 aa, Artificial Sequence
  Quasi-synthetic sequence derived from human genome
LVLGVLRMAKKRVIVKKLPIV

SEQ ID NO: 13296 - protein, 21 aa, Artificial Sequence
  Quasi-synthetic sequence derived from human genome
FFSGLIILLIFRLIWRSVKKW

SEQ ID NO: 13297 - protein, 21 aa, Artificial Sequence
  Quasi-synthetic sequence derived from human genome
LPWVLRWLRSRRRRPRREALF

SEQ ID NO: 13298 - protein, 21 aa, Artificial Sequence
  Quasi-synthetic sequence derived from human genome
RLFLKNYSKTRFGYRIKWRII

SEQ ID NO: 13299 - protein, 21 aa, Artificial Sequence
  Quasi-synthetic sequence derived from human genome
LKSIKYLICTRYKWLIIKIVL

SEQ ID NO: 13300 - protein, 21 aa, Artificial Sequence
  Quasi-synthetic sequence derived from human genome
KGSVLKRRLVKLVVNFLFYFR

SEQ ID NO: 13301 - protein, 21 aa, Artificial Sequence
  Quasi-synthetic sequence derived from human genome
NFINLSFLRLFRAARLIKLLR

SEQ ID NO: 13302 - protein, 21 aa, Artificial Sequence
  Quasi-synthetic sequence derived from human genome
IIFTVVLILLKMYNRKMRTRR

SEQ ID NO: 13303 - protein, 21 aa, Artificial Sequence
  Quasi-synthetic sequence derived from human genome
MRVLSRTSKFRRLRQLLRRRK

SEQ ID NO: 13304 - protein, 21 aa, Artificial Sequence
  Quasi-synthetic sequence derived from human genome
FIILFKVFLFPRITISKKTKL

SEQ ID NO: 13305 - protein, 21 aa, Artificial Sequence
  Quasi-synthetic sequence derived from human genome
LTFAVYVRRKSIKKKRALRRF

SEQ ID NO: 13306 - protein, 21 aa, Artificial Sequence
  Quasi-synthetic sequence derived from human genome
FMNVKHWPWMKLFFKIKPLLK

SEQ ID NO: 13307 - protein, 21 aa, Artificial Sequence
  Quasi-synthetic sequence derived from human genome
MRRPPVPPPPRRRRRRRLLFW

SEQ ID NO: 13308 - protein, 21 aa, Artificial Sequence
  Quasi-synthetic sequence derived from human genome
CVLILLILVVLFAALKRQRKK

SEQ ID NO: 13309 - protein, 21 aa, Artificial Sequence
  Quasi-synthetic sequence derived from human genome
KVVQFFRILRIFKLIAPKLLQ

SEQ ID NO: 13310 - protein, 21 aa, Artificial Sequence
  Quasi-synthetic sequence derived from human genome
TLRFLKLRRERRALLCLLLVL

SEQ ID NO: 13311 - protein, 21 aa, Artificial Sequence
  Quasi-synthetic sequence derived from human genome
LRRNFMNIRPVKLKNLILLVK

SEQ ID NO: 13312 - protein, 21 aa, Artificial Sequence
  Quasi-synthetic sequence derived from human genome
RHWQIPLGRRFRSLKMWFVFR

SEQ ID NO: 13313 - protein, 21 aa, Artificial Sequence
  Quasi-synthetic sequence derived from human genome
LTLFHRLCKLLFFRIRPIFVF

SEQ ID NO: 13314 - protein, 21 aa, Artificial Sequence
  Quasi-synthetic sequence derived from human genome
FVAAGLFAYVLRRRRKKLPFR

SEQ ID NO: 13315 - protein, 21 aa, Artificial Sequence
  Quasi-synthetic sequence derived from human genome
WVRQIFIHKLPLYLRLKRPKP

SEQ ID NO: 13316 - protein, 21 aa, Artificial Sequence
  Quasi-synthetic sequence derived from human genome
KYLLLGRWRKKHLTFRILNLP

SEQ ID NO: 13317 - protein, 21 aa, Artificial Sequence
  Quasi-synthetic sequence derived from human genome
LLLFQVIRLYQRRRWMIRALH

SEQ ID NO: 13318 - protein, 21 aa, Artificial Sequence
  Quasi-synthetic sequence derived from human genome
LLVLALLVLLLWKMGFFKRAK

SEQ ID NO: 13319 - protein, 21 aa, Artificial Sequence
  Quasi-synthetic sequence derived from human genome
WKVLKVVAKVIRALLRILCCL

SEQ ID NO: 13320 - protein, 21 aa, Artificial Sequence
  Quasi-synthetic sequence derived from human genome
RYKPLRRRVIWLIGQWISVKF

SEQ ID NO: 13321 - protein, 21 aa, Artificial Sequence
  Quasi-synthetic sequence derived from human genome
MARRSRHRLLLLLLRYLVVAL

SEQ ID NO: 13322 - protein, 21 aa, Artificial Sequence
  Quasi-synthetic sequence derived from human genome
RFLCGKEIKKKKCIFRLRIRV

SEQ ID NO: 13323 - protein, 21 aa, Artificial Sequence
  Quasi-synthetic sequence derived from human genome
KITQYLIRIRKLTLKRQRKLV

SEQ ID NO: 13324 - protein, 21 aa, Artificial Sequence
  Quasi-synthetic sequence derived from human genome
LLLQSFKRRFLAARALRSFRW

SEQ ID NO: 13325 - protein, 21 aa, Artificial Sequence
  Quasi-synthetic sequence derived from human genome
RLRRVIAAFYFPKREKKRILF

SEQ ID NO: 13326 - protein, 21 aa, Artificial Sequence
  Quasi-synthetic sequence derived from human genome
IKQIRARRKTARMLMIVLLVF

SEQ ID NO: 13327 - protein, 21 aa, Artificial Sequence
  Quasi-synthetic sequence derived from human genome
RVLRIARVLKLLKMAVGMRAL

SEQ ID NO: 13328 - protein, 21 aa, Artificial Sequence
  Quasi-synthetic sequence derived from human genome
FLKLFRAARLIKLLRQGYTIR

SEQ ID NO: 13329 - protein, 21 aa, Artificial Sequence
  Quasi-synthetic sequence derived from human genome
RIAVLKWLYHLYIKTPRKMFR

SEQ ID NO: 13330 - protein, 21 aa, Artificial Sequence
  Quasi-synthetic sequence derived from human genome
LVFILLLLVVILIVKKSKLAK

SEQ ID NO: 13331 - protein, 21 aa, Artificial Sequence
  Quasi-synthetic sequence derived from human genome
LRLFRMLRIFKLGKYWPTFQI

SEQ ID NO: 13332 - protein, 21 aa, Artificial Sequence
  Quasi-synthetic sequence derived from human genome
IRRMFRVRNCLRGLGLFLLVF

SEQ ID NO: 13333 - protein, 21 aa, Artificial Sequence
  Quasi-synthetic sequence derived from human genome
FIPLRYIILIWGINKFTKKLR

SEQ ID NO: 13334 - protein, 21 aa, Artificial Sequence
  Quasi-synthetic sequence derived from human genome
RSWPFLRSFRVLRVFKLAKSW

SEQ ID NO: 13335 - protein, 21 aa, Artificial Sequence
  Quasi-synthetic sequence derived from human genome
RLLWFKVKKMPLTEYLKRIKL

SEQ ID NO: 13336 - protein, 21 aa, Artificial Sequence
  Quasi-synthetic sequence derived from human genome
RRKMSKKLPPVIIKYIIINRF

SEQ ID NO: 13337 - protein, 21 aa, Artificial Sequence
  Quasi-synthetic sequence derived from human genome
CRRHYSVKKKLKLIRVLGLFM

SEQ ID NO: 13338 - protein, 21 aa, Artificial Sequence
  Quasi-synthetic sequence derived from human genome
KKSRKKMCILVLVLSVIILIL

SEQ ID NO: 13339 - protein, 21 aa, Artificial Sequence
  Quasi-synthetic sequence derived from human genome
RLKLFFIKNQRSSLRIRLFNF

SEQ ID NO: 13340 - protein, 21 aa, Artificial Sequence
  Quasi-synthetic sequence derived from human genome
RPLVLKTLIQFTVKLRLLIKL

SEQ ID NO: 13341 - protein, 21 aa, Artificial Sequence
  Quasi-synthetic sequence derived from human genome
LKQNIFLFYVKLRWLLKHWRQ

SEQ ID NO: 13342 - protein, 21 aa, Artificial Sequence
  Quasi-synthetic sequence derived from human genome
GHLLKKRKWPLKGWHKRYFVL

SEQ ID NO: 13343 - protein, 21 aa, Artificial Sequence
  Quasi-synthetic sequence derived from human genome
VGLVLRVLRALRILYVMRLAR

SEQ ID NO: 13344 - protein, 21 aa, Artificial Sequence
  Quasi-synthetic sequence derived from human genome
ARRRCRRVLYWIPVVFITLLL

SEQ ID NO: 13345 - protein, 21 aa, Artificial Sequence
  Quasi-synthetic sequence derived from human genome
LAFVIVLLAHRLRRWHKSRLL

SEQ ID NO: 13346 - protein, 21 aa, Artificial Sequence
  Quasi-synthetic sequence derived from human genome
RSRRISLRKKLKLPIGKRNWL

SEQ ID NO: 13347 - protein, 21 aa, Artificial Sequence
  Quasi-synthetic sequence derived from human genome
LQALLLKRFLLARRSRRGLFA

SEQ ID NO: 13348 - protein, 21 aa, Artificial Sequence
  Quasi-synthetic sequence derived from human genome
RFLLGRLPWRVASGARRFRRW

SEQ ID NO: 13349 - protein, 21 aa, Artificial Sequence
  Quasi-synthetic sequence derived from human genome
IGRSVHYWKKVLPLLKIIKKK

SEQ ID NO: 13350 - protein, 21 aa, Artificial Sequence
  Quasi-synthetic sequence derived from human genome
MRAKWRKKRMRRLKRKRRKMR

SEQ ID NO: 13351 - protein, 21 aa, Artificial Sequence
  Quasi-synthetic sequence derived from human genome
PWLRALGPWLRVRRGLLVLRL

SEQ ID NO: 13352 - protein, 21 aa, Artificial Sequence
  Quasi-synthetic sequence derived from human genome
FLTLCFGLIARRKKIMKLCMK

SEQ ID NO: 13353 - protein, 21 aa, Artificial Sequence
  Quasi-synthetic sequence derived from human genome
HLLSIKKTLKSLKALLRWKLV

SEQ ID NO: 13354 - protein, 21 aa, Artificial Sequence
  Quasi-synthetic sequence derived from human genome
IRKRLRCRRKTVLVLMCILTA

SEQ ID NO: 13355 - protein, 21 aa, Artificial Sequence
  Quasi-synthetic sequence derived from human genome
WWWARAARLARLRFRRSLLPP

SEQ ID NO: 13356 - protein, 21 aa, Artificial Sequence
  Quasi-synthetic sequence derived from human genome
RIKKRSRSVFYRLTILILVFA

SEQ ID NO: 13357 - protein, 21 aa, Artificial Sequence
  Quasi-synthetic sequence derived from human genome
RPLRARVLVTRRRVRALIAVL

SEQ ID NO: 13358 - protein, 21 aa, Artificial Sequence
  Quasi-synthetic sequence derived from human genome
FPVKKCSAFQFFKKRVRRWIK

SEQ ID NO: 13359 - protein, 21 aa, Artificial Sequence
  Quasi-synthetic sequence derived from human genome
RVRLLKLKHERKALLALLLIL

SEQ ID NO: 13360 - protein, 21 aa, Artificial Sequence
  Quasi-synthetic sequence derived from human genome
RLSKQLLLRNFIRMKRCVMVL

SEQ ID NO: 13361 - protein, 21 aa, Artificial Sequence
  Quasi-synthetic sequence derived from human genome
KKRKRAIKLIVTVLAMYLICF

SEQ ID NO: 13362 - protein, 21 aa, Artificial Sequence
  Quasi-synthetic sequence derived from human genome
FMFSIWRFAWRKSIKKYHAWR

SEQ ID NO: 13363 - protein, 21 aa, Artificial Sequence
  Quasi-synthetic sequence derived from human genome
LIFKVYMFKCVWRCYRLIKCM

SEQ ID NO: 13364 - protein, 21 aa, Artificial Sequence
  Quasi-synthetic sequence derived from human genome
RLRGAILTMAFKKILKLKNIK

SEQ ID NO: 13365 - protein, 21 aa, Artificial Sequence
  Quasi-synthetic sequence derived from human genome
HKKAKAIKLILLVVIVFFLFW

SEQ ID NO: 13366 - protein, 21 aa, Artificial Sequence
  Quasi-synthetic sequence derived from human genome
RNLRLPKRLRVVYFLARTRLA

SEQ ID NO: 13367 - protein, 21 aa, Artificial Sequence
  Quasi-synthetic sequence derived from human genome
IMIFLGLYINFRHLYKQRRRR

SEQ ID NO: 13368 - protein, 21 aa, Artificial Sequence
  Quasi-synthetic sequence derived from human genome
KIFKKLPGFKKIHVLGFRPKK

SEQ ID NO: 13369 - protein, 21 aa, Artificial Sequence
  Quasi-synthetic sequence derived from human genome
WKRRILFFVVTLVSVFLVWKF

SEQ ID NO: 13370 - protein, 21 aa, Artificial Sequence
  Quasi-synthetic sequence derived from human genome
VLFILLCCLYRLCKKSKPIKK

SEQ ID NO: 13371 - protein, 21 aa, Artificial Sequence
  Quasi-synthetic sequence derived from human genome
IFVVTKFCLFCFWKFARKGKK

SEQ ID NO: 13372 - protein, 21 aa, Artificial Sequence
  Quasi-synthetic sequence derived from human genome
QAVRWLRWKASLIKLRALRRP

SEQ ID NO: 13373 - protein, 21 aa, Artificial Sequence
  Quasi-synthetic sequence derived from human genome
LFYGFLGKKFKRYFLQLLKYI

SEQ ID NO: 13374 - protein, 21 aa, Artificial Sequence
  Quasi-synthetic sequence derived from human genome
RRNVQKKVALAKKLLAKLRFL

SEQ ID NO: 13375 - protein, 21 aa, Artificial Sequence
  Quasi-synthetic sequence derived from human genome
CIIILLVIVVLFAALKRQRKK

SEQ ID NO: 13376 - protein, 21 aa, Artificial Sequence
  Quasi-synthetic sequence derived from human genome
RRKFLQMKRRKYGFIYKTHLF

SEQ ID NO: 13377 - protein, 21 aa, Artificial Sequence
  Quasi-synthetic sequence derived from human genome
MAKKRVIRMLIVIVVLFFLCW

SEQ ID NO: 13378 - protein, 21 aa, Artificial Sequence
  Quasi-synthetic sequence derived from human genome
WLQLLRICRVLRSLKLLAQFR

SEQ ID NO: 13379 - protein, 21 aa, Artificial Sequence
  Quasi-synthetic sequence derived from human genome
ARRFRRSRRTGRLVVLIILTF

SEQ ID NO: 13380 - protein, 21 aa, Artificial Sequence
  Quasi-synthetic sequence derived from human genome
RLLRCQCRRRRRRRPLWRVYG

SEQ ID NO: 13381 - protein, 21 aa, Artificial Sequence
  Quasi-synthetic sequence derived from human genome
FKRLHKLVNSTRRVRKKLIRV

SEQ ID NO: 13382 - protein, 21 aa, Artificial Sequence
  Quasi-synthetic sequence derived from human genome
RRPRGSTARTLLRLLLRLLLF

SEQ ID NO: 13383 - protein, 21 aa, Artificial Sequence
  Quasi-synthetic sequence derived from human genome
YWRMYVVRRRYKIRRAATIVL

SEQ ID NO: 13384 - protein, 21 aa, Artificial Sequence
  Quasi-synthetic sequence derived from human genome
RRMALSMIERRKRWRTIKLLL

SEQ ID NO: 13385 - protein, 21 aa, Artificial Sequence
  Quasi-synthetic sequence derived from human genome
KLLRFRKQRKKMAKLPKPVVV

SEQ ID NO: 13386 - protein, 21 aa, Artificial Sequence
  Quasi-synthetic sequence derived from human genome
RFRKYLRHFFHRHLLMHLGRY

SEQ ID NO: 13387 - protein, 21 aa, Artificial Sequence
  Quasi-synthetic sequence derived from human genome
LCTRSIVLALRLRKRFLNFFL

SEQ ID NO: 13388 - protein, 21 aa, Artificial Sequence
  Quasi-synthetic sequence derived from human genome
RRLSLYLTKIHFWLPVLKMIR

SEQ ID NO: 13389 - protein, 21 aa, Artificial Sequence
  Quasi-synthetic sequence derived from human genome
LRLPRLLSPPLRPRLLLLLLL

SEQ ID NO: 13390 - protein, 21 aa, Artificial Sequence
  Quasi-synthetic sequence derived from human genome
KKRLLSWKQQVLKLLRTFPRK

SEQ ID NO: 13391 - protein, 21 aa, Artificial Sequence
  Quasi-synthetic sequence derived from human genome
QVLIVVLRIVRYRKSSKLIKK

SEQ ID NO: 13392 - protein, 21 aa, Artificial Sequence
  Quasi-synthetic sequence derived from human genome
RPHLLKKKILGRVWWLMPVVL

SEQ ID NO: 13393 - protein, 21 aa, Artificial Sequence
  Quasi-synthetic sequence derived from human genome
LLVIVFIIIVLYMLRFKKYKQ

SEQ ID NO: 13394 - protein, 21 aa, Artificial Sequence
  Quasi-synthetic sequence derived from human genome
SLLVIVFIIIVLYMLRFKKYK

SEQ ID NO: 13395 - protein, 21 aa, Artificial Sequence
  Quasi-synthetic sequence derived from human genome
IKPFKRFLRKKSKPKKCVKKF

SEQ ID NO: 13396 - protein, 21 aa, Artificial Sequence
  Quasi-synthetic sequence derived from human genome
LGISVLRCIRLLRIFKITKYW

SEQ ID NO: 13397 - protein, 21 aa, Artificial Sequence
  Quasi-synthetic sequence derived from human genome
LLVFVPHMRRFLSRKKIRHHI

SEQ ID NO: 13398 - protein, 21 aa, Artificial Sequence
  Quasi-synthetic sequence derived from human genome
RKGVWLRLRKILFCVLGLYIA

SEQ ID NO: 13399 - protein, 21 aa, Artificial Sequence
  Quasi-synthetic sequence derived from human genome
LFIITKCCLFCFWKFARKGKK

SEQ ID NO: 13400 - protein, 21 aa, Artificial Sequence
  Quasi-synthetic sequence derived from human genome
VRYNCRVIFLNRKILLIRPKM

SEQ ID NO: 13401 - protein, 21 aa, Artificial Sequence
  Quasi-synthetic sequence derived from human genome
RPFTRFRTAVRVVIAILRLRF

SEQ ID NO: 13402 - protein, 21 aa, Artificial Sequence
  Quasi-synthetic sequence derived from human genome
KLSRKQLVLRRGLLLLGVFLI

SEQ ID NO: 13403 - protein, 21 aa, Artificial Sequence
  Quasi-synthetic sequence derived from human genome
VACRFFHFRRLIFTRKGVLRV

SEQ ID NO: 13404 - protein, 21 aa, Artificial Sequence
  Quasi-synthetic sequence derived from human genome
LWKRPFGRPSAKWSRRFFIIK

SEQ ID NO: 13405 - protein, 21 aa, Artificial Sequence
  Quasi-synthetic sequence derived from human genome
WVKRHRSSFRNRFPLLKVLIL

SEQ ID NO: 13406 - protein, 21 aa, Artificial Sequence
  Quasi-synthetic sequence derived from human genome
IRSIRILKFLVAKRKFKETLR

SEQ ID NO: 13407 - protein, 21 aa, Artificial Sequence
  Quasi-synthetic sequence derived from human genome
LFRRCRRRLIPHPRRLSPVVI

SEQ ID NO: 13408 - protein, 21 aa, Artificial Sequence
  Quasi-synthetic sequence derived from human genome
KLRLKNVSLKVQRKKMLLQLR

SEQ ID NO: 13409 - protein, 21 aa, Artificial Sequence
  Quasi-synthetic sequence derived from human genome
KLLKVIRKKLVHKTLDMIKKI

SEQ ID NO: 13410 - protein, 21 aa, Artificial Sequence
  Quasi-synthetic sequence derived from human genome
VTVLGIMILGLICLLRWRRRK

SEQ ID NO: 13411 - protein, 21 aa, Artificial Sequence
  Quasi-synthetic sequence derived from human genome
KRFLKHAGKWSLRWFLSPRWI

SEQ ID NO: 13412 - protein, 21 aa, Artificial Sequence
  Quasi-synthetic sequence derived from human genome
LKKIIKRKHTLPNYKIRFKPF

SEQ ID NO: 13413 - protein, 21 aa, Artificial Sequence
  Quasi-synthetic sequence derived from human genome
HLFRKGIMKIMVYKIFRILVP

SEQ ID NO: 13414 - protein, 21 aa, Artificial Sequence
  Quasi-synthetic sequence derived from human genome
VKRLPKTRSGKVMRRLLRKII

SEQ ID NO: 13415 - protein, 21 aa, Artificial Sequence
  Quasi-synthetic sequence derived from human genome
FKFKQLKMPVRALLRLAPLLL

SEQ ID NO: 13416 - protein, 21 aa, Artificial Sequence
  Quasi-synthetic sequence derived from human genome
KIRTRLIRKRFLCLGWGLPAL

SEQ ID NO: 13417 - protein, 21 aa, Artificial Sequence
  Quasi-synthetic sequence derived from human genome
RRIVFAGVILFRLLGVILFRL

SEQ ID NO: 13418 - protein, 21 aa, Artificial Sequence
  Quasi-synthetic sequence derived from human genome
ARRRRRRRRRRDLLLSQLCFL

SEQ ID NO: 13419 - protein, 21 aa, Artificial Sequence
  Quasi-synthetic sequence derived from human genome
KYKKVQLVRLVGMMLLIFARK

SEQ ID NO: 13420 - protein, 21 aa, Artificial Sequence
  Quasi-synthetic sequence derived from human genome
RFLLRKLYVFRRSFLMTCISL

SEQ ID NO: 13421 - protein, 21 aa, Artificial Sequence
  Quasi-synthetic sequence derived from human genome
WVFRLKRRKRIARRLVDTLRN

SEQ ID NO: 13422 - protein, 21 aa, Artificial Sequence
  Quasi-synthetic sequence derived from human genome
VLVKRKRTKGKKLLLSIGVLL

SEQ ID NO: 13423 - protein, 21 aa, Artificial Sequence
  Quasi-synthetic sequence derived from human genome
LKGKKHVLHLWPKRLLLPRHL

SEQ ID NO: 13424 - protein, 21 aa, Artificial Sequence
  Quasi-synthetic sequence derived from human genome
INPTIIRIMRVLRIARVLKLL

SEQ ID NO: 13425 - protein, 21 aa, Artificial Sequence
  Quasi-synthetic sequence derived from human genome
LAFVAVLLGLRLRRWHKSRLL

SEQ ID NO: 13426 - protein, 21 aa, Artificial Sequence
  Quasi-synthetic sequence derived from human genome
LFKRRVVRRLASLKTRRCRLS

SEQ ID NO: 13427 - protein, 21 aa, Artificial Sequence
  Quasi-synthetic sequence derived from human genome
CRRIVVSRGRLRRLLWIGFTL

SEQ ID NO: 13428 - protein, 21 aa, Artificial Sequence
  Quasi-synthetic sequence derived from human genome
GLRKTKYRSFRRRLLKFIPGL

SEQ ID NO: 13429 - protein, 21 aa, Artificial Sequence
  Quasi-synthetic sequence derived from human genome
KFFKRKPKVLGVVRILIALMS

SEQ ID NO: 13430 - protein, 21 aa, Artificial Sequence
  Quasi-synthetic sequence derived from human genome
LRLLLFFRFKRTLDRICVLFL

SEQ ID NO: 13431 - protein, 21 aa, Artificial Sequence
  Quasi-synthetic sequence derived from human genome
KRKARGYLRLVPLFVLLALLV

SEQ ID NO: 13432 - protein, 21 aa, Artificial Sequence
  Quasi-synthetic sequence derived from human genome
WRPRRARGTPLLLLLLLLLLW

SEQ ID NO: 13433 - protein, 21 aa, Artificial Sequence
  Quasi-synthetic sequence derived from human genome
PWLKIVKISFKCKQFFIQLRK

SEQ ID NO: 13434 - protein, 21 aa, Artificial Sequence
  Quasi-synthetic sequence derived from human genome
LNKRFRAGFKRAFRWCPFIKV

SEQ ID NO: 13435 - protein, 21 aa, Artificial Sequence
  Quasi-synthetic sequence derived from human genome
VKKIWQKQFRWPKNRLQILKF

SEQ ID NO: 13436 - protein, 21 aa, Artificial Sequence
  Quasi-synthetic sequence derived from human genome
RWIRGFLVRKNLSPVFFHKKK

SEQ ID NO: 13437 - protein, 21 aa, Artificial Sequence
  Quasi-synthetic sequence derived from human genome
LKIMPKKKRLSAGRVPLILFL

SEQ ID NO: 13438 - protein, 21 aa, Artificial Sequence
  Quasi-synthetic sequence derived from human genome
ALVRHKFNRLPRVLILHLKRY

SEQ ID NO: 13439 - protein, 21 aa, Artificial Sequence
  Quasi-synthetic sequence derived from human genome
TVKRLLIKKLPPVLAIQLKRF

SEQ ID NO: 13440 - protein, 21 aa, Artificial Sequence
  Quasi-synthetic sequence derived from human genome
FFSPTLFRVIRLARIGRILRL

SEQ ID NO: 13441 - protein, 21 aa, Artificial Sequence
  Quasi-synthetic sequence derived from human genome
FVRILRIFKLTRHFVGLRVLG

SEQ ID NO: 13442 - protein, 21 aa, Artificial Sequence
  Quasi-synthetic sequence derived from human genome
WVYLLLRKILLRKFCQIRYHT

SEQ ID NO: 13443 - protein, 21 aa, Artificial Sequence
  Quasi-synthetic sequence derived from human genome
VFCLILWKWKKKKRPRNSYKC

SEQ ID NO: 13444 - protein, 21 aa, Artificial Sequence
  Quasi-synthetic sequence derived from human genome
RLIHRVRYRRGLWRTRQILNL

SEQ ID NO: 13445 - protein, 21 aa, Artificial Sequence
  Quasi-synthetic sequence derived from human genome
WLLLRKAPGGFMGPRWRRRWF

SEQ ID NO: 13446 - protein, 21 aa, Artificial Sequence
  Quasi-synthetic sequence derived from human genome
LLLWTFLLQRRFVKKRGKTGL

SEQ ID NO: 13447 - protein, 21 aa, Artificial Sequence
  Quasi-synthetic sequence derived from human genome
LSMKKFAVRRFFSVYLRRKSR

SEQ ID NO: 13448 - protein, 21 aa, Artificial Sequence
  Quasi-synthetic sequence derived from human genome
VAVILLLLLLLLLFLILRHRR

SEQ ID NO: 13449 - protein, 21 aa, Artificial Sequence
  Quasi-synthetic sequence derived from human genome
RERLLLKFIKIMKHLRKLNNF

SEQ ID NO: 13450 - protein, 21 aa, Artificial Sequence
  Quasi-synthetic sequence derived from human genome
FFYPWFRKALKMMLFGKIFQK

SEQ ID NO: 13451 - protein, 21 aa, Artificial Sequence
  Quasi-synthetic sequence derived from human genome
LRMIRKHVRKNYMKFKAKFSL

SEQ ID NO: 13452 - protein, 21 aa, Artificial Sequence
  Quasi-synthetic sequence derived from human genome
LVKRLHKVLRPFLLRRVKVDV

SEQ ID NO: 13453 - protein, 21 aa, Artificial Sequence
  Quasi-synthetic sequence derived from human genome
LLKLYMWKMTRFCISRRLITF

SEQ ID NO: 13454 - protein, 21 aa, Artificial Sequence
  Quasi-synthetic sequence derived from human genome
RKRRRLLSIIVVLVVTFALCW

SEQ ID NO: 13455 - protein, 21 aa, Artificial Sequence
  Quasi-synthetic sequence derived from human genome
DTALLRLLGLRRGLRRLRRLW

SEQ ID NO: 13456 - protein, 21 aa, Artificial Sequence
  Quasi-synthetic sequence derived from human genome
KFRRRTCIILALFILFIFSLM

SEQ ID NO: 13457 - protein, 21 aa, Artificial Sequence
  Quasi-synthetic sequence derived from human genome
LVSACIPVFRLARRRKKILFY

SEQ ID NO: 13458 - protein, 21 aa, Artificial Sequence
  Quasi-synthetic sequence derived from human genome
RTWWRWLTFWRRLQSAFLKNR

SEQ ID NO: 13459 - protein, 21 aa, Artificial Sequence
  Quasi-synthetic sequence derived from human genome
FYYLIMRIKMCLIKLCKSKAK

SEQ ID NO: 13460 - protein, 21 aa, Artificial Sequence
  Quasi-synthetic sequence derived from human genome
FLAFVTVLLALKLRRWHKSRL

SEQ ID NO: 13461 - protein, 21 aa, Artificial Sequence
  Quasi-synthetic sequence derived from human genome
LKRALKVKQAMLQLYVLKLLK

SEQ ID NO: 13462 - protein, 21 aa, Artificial Sequence
  Quasi-synthetic sequence derived from human genome
LKRRLLQPSRRVKRSRRRPLL

SEQ ID NO: 13463 - protein, 21 aa, Artificial Sequence
  Quasi-synthetic sequence derived from human genome
KIMVRRCLVTLRPFRLFVLGI

SEQ ID NO: 13464 - protein, 21 aa, Artificial Sequence
  Quasi-synthetic sequence derived from human genome
YMKWRRKSAYWKALKVFKLPV

SEQ ID NO: 13465 - protein, 21 aa, Artificial Sequence
  Quasi-synthetic sequence derived from human genome
KPPRLRLWALIPWLPRKQRPR

SEQ ID NO: 13466 - protein, 21 aa, Artificial Sequence
  Quasi-synthetic sequence derived from human genome
FLKRFQLTKLPPYLIFCIKRF

SEQ ID NO: 13467 - protein, 21 aa, Artificial Sequence
  Quasi-synthetic sequence derived from human genome
LLALCLLLPLLLLGGWKRWRR

SEQ ID NO: 13468 - protein, 21 aa, Artificial Sequence
  Quasi-synthetic sequence derived from human genome
IFIVTKCCLFCFWKFARKAKK

SEQ ID NO: 13469 - protein, 21 aa, Artificial Sequence
  Quasi-synthetic sequence derived from human genome
RYRFRKRDKVLFYGRKIMRKV

SEQ ID NO: 13470 - protein, 21 aa, Artificial Sequence
  Quasi-synthetic sequence derived from human genome
MAKWVPALLLRRVPLFSLRFR

SEQ ID NO: 13471 - protein, 21 aa, Artificial Sequence
  Quasi-synthetic sequence derived from human genome
IAKVRFLKLKKERKSLWTILL

SEQ ID NO: 13472 - protein, 21 aa, Artificial Sequence
  Quasi-synthetic sequence derived from human genome
VRRRKWIRYRRYKSRDIWAKI

SEQ ID NO: 13473 - protein, 21 aa, Artificial Sequence
  Quasi-synthetic sequence derived from human genome
PRPAARRKARRLLKTVLMILL

SEQ ID NO: 13474 - protein, 21 aa, Artificial Sequence
  Quasi-synthetic sequence derived from human genome
ISLLAIFIKMCLWLWKQFLKR

SEQ ID NO: 13475 - protein, 21 aa, Artificial Sequence
  Quasi-synthetic sequence derived from human genome
FIVVLRPLQLLRLFKLKERYR

SEQ ID NO: 13476 - protein, 21 aa, Artificial Sequence
  Quasi-synthetic sequence derived from human genome
LILPFQRITRLKLLLQNILKR

SEQ ID NO: 13477 - protein, 21 aa, Artificial Sequence
  Quasi-synthetic sequence derived from human genome
KKLAVLCYRCLSLLYLRMFKL

SEQ ID NO: 13478 - protein, 21 aa, Artificial Sequence
  Quasi-synthetic sequence derived from human genome
KFKKFDHRYLRKILIRKNLPK

SEQ ID NO: 13479 - protein, 21 aa, Artificial Sequence
  Quasi-synthetic sequence derived from human genome
RRFRLSSHFIRHRRAHMRRRL

SEQ ID NO: 13480 - protein, 21 aa, Artificial Sequence
  Quasi-synthetic sequence derived from human genome
KFKQWVIPWHLNKRYNRKRFF

SEQ ID NO: 13481 - protein, 21 aa, Artificial Sequence
  Quasi-synthetic sequence derived from human genome
LVRGWLVRKRFLEQRAKIRLL

SEQ ID NO: 13482 - protein, 21 aa, Artificial Sequence
  Quasi-synthetic sequence derived from human genome
KVARKFWWKNVKMIVLICVIV

SEQ ID NO: 13483 - protein, 21 aa, Artificial Sequence
  Quasi-synthetic sequence derived from human genome
LRKPKRVPSIYKLKLRPRIRP

SEQ ID NO: 13484 - protein, 21 aa, Artificial Sequence
  Quasi-synthetic sequence derived from human genome
LFVIRPSRFYDRRFLKLLRFY

SEQ ID NO: 13485 - protein, 21 aa, Artificial Sequence
  Quasi-synthetic sequence derived from human genome
LKVSIRAVCVMRFLVSKRKFK

SEQ ID NO: 13486 - protein, 21 aa, Artificial Sequence
  Quasi-synthetic sequence derived from human genome
YLYALGQKVWKRWKKRYFVLV

SEQ ID NO: 13487 - protein, 21 aa, Artificial Sequence
  Quasi-synthetic sequence derived from human genome
KKKRKKGLRIKGKRRRKKLIL

SEQ ID NO: 13488 - protein, 21 aa, Artificial Sequence
  Quasi-synthetic sequence derived from human genome
LGISVLRCVRLLRIFKITRYW

SEQ ID NO: 13489 - protein, 21 aa, Artificial Sequence
  Quasi-synthetic sequence derived from human genome
GLWVIRVQKRHKMPRMKKLMR

SEQ ID NO: 13490 - protein, 21 aa, Artificial Sequence
  Quasi-synthetic sequence derived from human genome
ILFRRAVLRRLQPRLSTRPRR

SEQ ID NO: 13491 - protein, 21 aa, Artificial Sequence
  Quasi-synthetic sequence derived from human genome
LKQFTKILRRKRLLPKRCNKK

SEQ ID NO: 13492 - protein, 21 aa, Artificial Sequence
  Quasi-synthetic sequence derived from human genome
KLKQFTKILRRKRLLPKRCNK

SEQ ID NO: 13493 - protein, 21 aa, Artificial Sequence
  Quasi-synthetic sequence derived from human genome
LAVIGRMRTRLVRKRFLCLGW

SEQ ID NO: 13494 - protein, 21 aa, Artificial Sequence
  Quasi-synthetic sequence derived from human genome
YWKFLLRLTKGKFAVMNRKVL

SEQ ID NO: 13495 - protein, 21 aa, Artificial Sequence
  Quasi-synthetic sequence derived from human genome
LFKIYFKINKLHLCKPLIRAI

SEQ ID NO: 13496 - protein, 21 aa, Artificial Sequence
  Quasi-synthetic sequence derived from human genome
LRLRQRRRRLLIKKMPAAATI

SEQ ID NO: 13497 - protein, 21 aa, Artificial Sequence
  Quasi-synthetic sequence derived from human genome
IYLWKLVKGIFHLTQIKKVRK

SEQ ID NO: 13498 - protein, 21 aa, Artificial Sequence
  Quasi-synthetic sequence derived from human genome
ACVLTLLVLILLIVTMRRRKK

SEQ ID NO: 13499 - protein, 21 aa, Artificial Sequence
  Quasi-synthetic sequence derived from human genome
LKRRILRVVAHCNKPKYKILL

SEQ ID NO: 13500 - protein, 21 aa, Artificial Sequence
  Quasi-synthetic sequence derived from human genome
IFLKILKLLISKLKAHQMCFR

SEQ ID NO: 13501 - protein, 21 aa, Artificial Sequence
  Quasi-synthetic sequence derived from human genome
WWRRLRASLRLTVWAPLLPLR

SEQ ID NO: 13502 - protein, 21 aa, Artificial Sequence
  Quasi-synthetic sequence derived from human genome
LFFRRPKASLPRVFVLRALLM

SEQ ID NO: 13503 - protein, 21 aa, Artificial Sequence
  Quasi-synthetic sequence derived from human genome
IVLFIRVCEKNIKRFRKLLPR

SEQ ID NO: 13504 - protein, 21 aa, Artificial Sequence
  Quasi-synthetic sequence derived from human genome
FRDTFRLLLLCRWDKRRWRKI

SEQ ID NO: 13505 - protein, 21 aa, Artificial Sequence
  Quasi-synthetic sequence derived from human genome
RKRHKVWYKKFFHHLLHITVL

SEQ ID NO: 13506 - protein, 21 aa, Artificial Sequence
  Quasi-synthetic sequence derived from human genome
KKGYLLKKGKGKRWKNLYFIL

SEQ ID NO: 13507 - protein, 21 aa, Artificial Sequence
  Quasi-synthetic sequence derived from human genome
WSRFKKKCFKLTRKMPIIGRK

SEQ ID NO: 13508 - protein, 21 aa, Artificial Sequence
  Quasi-synthetic sequence derived from human genome
FKRKGKLSTIGKIFKPWKWRK

SEQ ID NO: 13509 - protein, 21 aa, Artificial Sequence
  Quasi-synthetic sequence derived from human genome
KSRFWLLKLLFRVFTAPFHKV

SEQ ID NO: 13510 - protein, 21 aa, Artificial Sequence
  Quasi-synthetic sequence derived from human genome
ITGVKVKRIIKVNNRILRLKF

SEQ ID NO: 13511 - protein, 21 aa, Artificial Sequence
  Quasi-synthetic sequence derived from human genome
LLSGFLVIFYCYIRKRCLKLK

SEQ ID NO: 13512 - protein, 21 aa, Artificial Sequence
  Quasi-synthetic sequence derived from human genome
KHLYNWNLPPRRILFIKRFII

SEQ ID NO: 13513 - protein, 21 aa, Artificial Sequence
  Quasi-synthetic sequence derived from human genome
PWKKIPLNALIRRFAHLLVKK

SEQ ID NO: 13514 - protein, 21 aa, Artificial Sequence
  Quasi-synthetic sequence derived from human genome
FSVVKRGRKKLLYIFKQPFMR

SEQ ID NO: 13515 - protein, 21 aa, Artificial Sequence
  Quasi-synthetic sequence derived from human genome
LVKFRSLVHAYVSRRRYLKLR

SEQ ID NO: 13516 - protein, 21 aa, Artificial Sequence
  Quasi-synthetic sequence derived from human genome
ACIPVFRLARRRKKILFYCHF

SEQ ID NO: 13517 - protein, 21 aa, Artificial Sequence
  Quasi-synthetic sequence derived from human genome
FVLVHSFLKKLLGKKLTRCLK

SEQ ID NO: 13518 - protein, 21 aa, Artificial Sequence
  Quasi-synthetic sequence derived from human genome
GCKFKFFFRRNPYFRNKLIVK

SEQ ID NO: 13519 - protein, 21 aa, Artificial Sequence
  Quasi-synthetic sequence derived from human genome
KMFRFFIRRMVKAQSFYWVVL

SEQ ID NO: 13520 - protein, 21 aa, Artificial Sequence
  Quasi-synthetic sequence derived from human genome
AALRPLVKPKIVKKRTKKFIR

SEQ ID NO: 13521 - protein, 21 aa, Artificial Sequence
  Quasi-synthetic sequence derived from human genome
LKVFYKFINLNRYKIRHTRKK

SEQ ID NO: 13522 - protein, 21 aa, Artificial Sequence
  Quasi-synthetic sequence derived from human genome
WMGRLKMRKNSWLKIIISIIL

SEQ ID NO: 13523 - protein, 21 aa, Artificial Sequence
  Quasi-synthetic sequence derived from human genome
RYKAAMRRAFHIRLIARRLGW

SEQ ID NO: 13524 - protein, 21 aa, Artificial Sequence
  Quasi-synthetic sequence derived from human genome
LRPRRQKALRMILAVVLVFFV

SEQ ID NO: 13525 - protein, 21 aa, Artificial Sequence
  Quasi-synthetic sequence derived from human genome
KLRQVSLRRNRLRALPRALFR

SEQ ID NO: 13526 - protein, 21 aa, Artificial Sequence
  Quasi-synthetic sequence derived from human genome
KAFLALLRPFISSKFTRKIRF

SEQ ID NO: 13527 - protein, 21 aa, Artificial Sequence
  Quasi-synthetic sequence derived from human genome
KKSKAVRLIFVIMIIFFLFWT

SEQ ID NO: 13528 - protein, 21 aa, Artificial Sequence
  Quasi-synthetic sequence derived from human genome
IRRLLILILKIGRRWTELIRT

SEQ ID NO: 13529 - protein, 21 aa, Artificial Sequence
  Quasi-synthetic sequence derived from human genome
LFVVITLLKTRGPFRKRLRQL

SEQ ID NO: 13530 - protein, 21 aa, Artificial Sequence
  Quasi-synthetic sequence derived from human genome
RLLLVHGRWSYIRMCKFLRYF

SEQ ID NO: 13531 - protein, 21 aa, Artificial Sequence
  Quasi-synthetic sequence derived from human genome
KFLGLRAFIRKQINNIFLRFI

SEQ ID NO: 13532 - protein, 21 aa, Artificial Sequence
  Quasi-synthetic sequence derived from human genome
RRRRVLQTLVWFLLTLLLALF

SEQ ID NO: 13533 - protein, 21 aa, Artificial Sequence
  Quasi-synthetic sequence derived from human genome
FMNVKHWPWMKLYFKIKPLLK

SEQ ID NO: 13534 - protein, 21 aa, Artificial Sequence
  Quasi-synthetic sequence derived from human genome
LVWLRFHKKKWQLQARQRLAR

SEQ ID NO: 13535 - protein, 21 aa, Artificial Sequence
  Quasi-synthetic sequence derived from human genome
LLLFLIVVLLGLFAWHRRRQK

SEQ ID NO: 13536 - protein, 21 aa, Artificial Sequence
  Quasi-synthetic sequence derived from human genome
LRRNFVNIRPAKLKNLILLVK

SEQ ID NO: 13537 - protein, 21 aa, Artificial Sequence
  Quasi-synthetic sequence derived from human genome
INTFNWSKVRKLSFKRKRFLI

SEQ ID NO: 13538 - protein, 21 aa, Artificial Sequence
  Quasi-synthetic sequence derived from human genome
SWRRKKLYLLFAQHRYISRLF

SEQ ID NO: 13539 - protein, 21 aa, Artificial Sequence
  Quasi-synthetic sequence derived from human genome
RKAPLWLRAKFQRLLFKLGCY

SEQ ID NO: 13540 - protein, 21 aa, Artificial Sequence
  Quasi-synthetic sequence derived from human genome
LKLLRKRSQVWKPKVIRISAR

SEQ ID NO: 13541 - protein, 21 aa, Artificial Sequence
  Quasi-synthetic sequence derived from human genome
NSRISITFFRLFRVMRLVKLL

SEQ ID NO: 13542 - protein, 21 aa, Artificial Sequence
  Quasi-synthetic sequence derived from human genome
SNRISITFFRLFRVMRLVKLL

SEQ ID NO: 13543 - protein, 21 aa, Artificial Sequence
  Quasi-synthetic sequence derived from human genome
RLWVSRLLRHRKAQLLLVNLL

SEQ ID NO: 13544 - protein, 21 aa, Artificial Sequence
  Quasi-synthetic sequence derived from human genome
LKLMVQAWPFRRLPLRPLIKM

SEQ ID NO: 13545 - protein, 21 aa, Artificial Sequence
  Quasi-synthetic sequence derived from human genome
RYFLWHTYRWLLLKLLLLLLL

SEQ ID NO: 13546 - protein, 21 aa, Artificial Sequence
  Quasi-synthetic sequence derived from human genome
IYSLRNKQIKVAIKKIMKRIF

SEQ ID NO: 13547 - protein, 21 aa, Artificial Sequence
  Quasi-synthetic sequence derived from human genome
VKIKKVLKSTKLKIFRGKRTL

SEQ ID NO: 13548 - protein, 21 aa, Artificial Sequence
  Quasi-synthetic sequence derived from human genome
VFRLMRIFRVLKLARHSTGLR

SEQ ID NO: 13549 - protein, 21 aa, Artificial Sequence
  Quasi-synthetic sequence derived from human genome
WVYILFRRAVLRRLQPRLSTR

SEQ ID NO: 13550 - protein, 21 aa, Artificial Sequence
  Quasi-synthetic sequence derived from human genome
RLIRKMFSFKVSRWMGLACFR

SEQ ID NO: 13551 - protein, 21 aa, Artificial Sequence
  Quasi-synthetic sequence derived from human genome
LWGFRWLIFRIMLGAGLIKIR

SEQ ID NO: 13552 - protein, 21 aa, Artificial Sequence
  Quasi-synthetic sequence derived from human genome
VAVVLLLLLLLLLFLILRHRR

SEQ ID NO: 13553 - protein, 21 aa, Artificial Sequence
  Quasi-synthetic sequence derived from human genome
MPRLLRLSLLWLGLLLVRFSR

SEQ ID NO: 13554 - protein, 21 aa, Artificial Sequence
  Quasi-synthetic sequence derived from human genome
FLRGLRYLHPLKKWPMRSRLY

SEQ ID NO: 13555 - protein, 21 aa, Artificial Sequence
  Quasi-synthetic sequence derived from human genome
RRRPAWLPVRLRSWAWLPVWL

SEQ ID NO: 13556 - protein, 21 aa, Artificial Sequence
  Quasi-synthetic sequence derived from human genome
LRLLLVKKPSVRSLALKLLAF

SEQ ID NO: 13557 - protein, 21 aa, Artificial Sequence
  Quasi-synthetic sequence derived from human genome
IACLLLRVFRSGKRLKKTRKY

SEQ ID NO: 13558 - protein, 21 aa, Artificial Sequence
  Quasi-synthetic sequence derived from human genome
FLARYRLVSNKLKKRFLRKPN

SEQ ID NO: 13559 - protein, 21 aa, Artificial Sequence
  Quasi-synthetic sequence derived from human genome
KKKVKRLLSFQRYFHASRLLR

SEQ ID NO: 13560 - protein, 21 aa, Artificial Sequence
  Quasi-synthetic sequence derived from human genome
KKILHLLFLKRRDWDCFWKRK

SEQ ID NO: 13561 - protein, 21 aa, Artificial Sequence
  Quasi-synthetic sequence derived from human genome
VNIKAGKAFLRLKRKFIQMRR

SEQ ID NO: 13562 - protein, 21 aa, Artificial Sequence
  Quasi-synthetic sequence derived from human genome
IWLRLRGLRKYKKTSQRLRSL

SEQ ID NO: 13563 - protein, 21 aa, Artificial Sequence
  Quasi-synthetic sequence derived from human genome
RKLLAAINAFRQVRLKHRKLR

SEQ ID NO: 13564 - protein, 21 aa, Artificial Sequence
  Quasi-synthetic sequence derived from human genome
LKWRVKKVVLVLLLVTSVFLF

SEQ ID NO: 13565 - protein, 21 aa, Artificial Sequence
  Quasi-synthetic sequence derived from human genome
RLLLLLLLLLLRHTRQGWALR

SEQ ID NO: 13566 - protein, 21 aa, Artificial Sequence
  Quasi-synthetic sequence derived from human genome
LRVFRVFRIFKFSRHSQGLRI

SEQ ID NO: 13567 - protein, 21 aa, Artificial Sequence
  Quasi-synthetic sequence derived from human genome
LLLLVFTVALYAQRRWQKRRR

SEQ ID NO: 13568 - protein, 21 aa, Artificial Sequence
  Quasi-synthetic sequence derived from human genome
VLLLLAGGSLAFILLRVRRRR

SEQ ID NO: 13569 - protein, 21 aa, Artificial Sequence
  Quasi-synthetic sequence derived from human genome
RKILRLITIRKLFTAIGVLFP

SEQ ID NO: 13570 - protein, 21 aa, Artificial Sequence
  Quasi-synthetic sequence derived from human genome
RLWKLLSPARLARRAHRSKWL

SEQ ID NO: 13571 - protein, 21 aa, Artificial Sequence
  Quasi-synthetic sequence derived from human genome
FRHKVLILFKLILLEKKVLFY

SEQ ID NO: 13572 - protein, 21 aa, Artificial Sequence
  Quasi-synthetic sequence derived from human genome
RIVQVLRLLRALRMLKLGRHS

SEQ ID NO: 13573 - protein, 21 aa, Artificial Sequence
  Quasi-synthetic sequence derived from human genome
LFFRKRRADMPRVFVFRALLL

SEQ ID NO: 13574 - protein, 21 aa, Artificial Sequence
  Quasi-synthetic sequence derived from human genome
KNFNLPRLCIRKFFPKKKCFV

SEQ ID NO: 13575 - protein, 21 aa, Artificial Sequence
  Quasi-synthetic sequence derived from human genome
MPKWTRVILLNWCAWFLRMKR

SEQ ID NO: 13576 - protein, 21 aa, Artificial Sequence
  Quasi-synthetic sequence derived from human genome
QLLKWPLRFVIIHKRCVYYFK

SEQ ID NO: 13577 - protein, 21 aa, Artificial Sequence
  Quasi-synthetic sequence derived from human genome
WVFILFRKAVFQRLKLWVCCL

SEQ ID NO: 13578 - protein, 21 aa, Artificial Sequence
  Quasi-synthetic sequence derived from human genome
LLKYKAFIRIPIPTRRHTFRR

SEQ ID NO: 13579 - protein, 21 aa, Artificial Sequence
  Quasi-synthetic sequence derived from human genome
MKMMLVRRFRVLILMVFLVAC

SEQ ID NO: 13580 - protein, 21 aa, Artificial Sequence
  Quasi-synthetic sequence derived from human genome
FSLRLLINESLIKKLRLFFRK

SEQ ID NO: 13581 - protein, 21 aa, Artificial Sequence
  Quasi-synthetic sequence derived from human genome
RKFGNRIKVLRSRIRFIHLVT

SEQ ID NO: 13582 - protein, 21 aa, Artificial Sequence
  Quasi-synthetic sequence derived from human genome
NLAKKIMFFLLIIRKLLNHIL

SEQ ID NO: 13583 - protein, 21 aa, Artificial Sequence
  Quasi-synthetic sequence derived from human genome
MRRLRRLAHLVLFCPFSKRLQ

SEQ ID NO: 13584 - protein, 21 aa, Artificial Sequence
  Quasi-synthetic sequence derived from human genome
YVPLRQRRQLLLQKLLQRRRK

SEQ ID NO: 13585 - protein, 21 aa, Artificial Sequence
  Quasi-synthetic sequence derived from human genome
KLLRKKIEKRNLKLRQRNLKF

SEQ ID NO: 13586 - protein, 21 aa, Artificial Sequence
  Quasi-synthetic sequence derived from human genome
LVPLFCWLRATFWLLATKRRK

SEQ ID NO: 13587 - protein, 21 aa, Artificial Sequence
  Quasi-synthetic sequence derived from human genome
IKYIIINRFRGRKNMLVKLGK

SEQ ID NO: 13588 - protein, 21 aa, Artificial Sequence
  Quasi-synthetic sequence derived from human genome
LYHCQVFLKRFLRLRYGRQRR

SEQ ID NO: 13589 - protein, 21 aa, Artificial Sequence
  Quasi-synthetic sequence derived from human genome
IYIRKRRPSKPHMFPKILMKI

SEQ ID NO: 13590 - protein, 21 aa, Artificial Sequence
  Quasi-synthetic sequence derived from human genome
KVKLKKYTKFLFVRDPFVRLI

SEQ ID NO: 13591 - protein, 21 aa, Artificial Sequence
  Quasi-synthetic sequence derived from human genome
KLINALRRCFFWRFMFYGIFL

SEQ ID NO: 13592 - protein, 21 aa, Artificial Sequence
  Quasi-synthetic sequence derived from human genome
KPIIRQIRRPKNVVLRLAVKF

SEQ ID NO: 13593 - protein, 21 aa, Artificial Sequence
  Quasi-synthetic sequence derived from human genome
PKQKVKYLTFRFIFALRLSKK

SEQ ID NO: 13594 - protein, 21 aa, Artificial Sequence
  Quasi-synthetic sequence derived from human genome
AMRWRWWQRLLPWRLLQARGF

SEQ ID NO: 13595 - protein, 21 aa, Artificial Sequence
  Quasi-synthetic sequence derived from human genome
KKLKKSIKIIFIVVAAFLVSW

SEQ ID NO: 13596 - protein, 21 aa, Artificial Sequence
  Quasi-synthetic sequence derived from human genome
IRQHSALTRLRLRNVFRRFLR

SEQ ID NO: 13597 - protein, 21 aa, Artificial Sequence
  Quasi-synthetic sequence derived from human genome
ARGVRKVFLRLLPQLLRMHVR

SEQ ID NO: 13598 - protein, 21 aa, Artificial Sequence
  Quasi-synthetic sequence derived from human genome
RRRRRACIALFLVLLFAFGTL

SEQ ID NO: 13599 - protein, 21 aa, Artificial Sequence
  Quasi-synthetic sequence derived from human genome
VLVRGLLLLIPFLILLRKLIF

SEQ ID NO: 13600 - protein, 21 aa, Artificial Sequence
  Quasi-synthetic sequence derived from human genome
MFLRRLGGWLPRPWGRRKPMR

SEQ ID NO: 13601 - protein, 21 aa, Artificial Sequence
  Quasi-synthetic sequence derived from human genome
LSSRRRRRLALFLARKHLKNV

SEQ ID NO: 13602 - protein, 21 aa, Artificial Sequence
  Quasi-synthetic sequence derived from human genome
LIKPFGARKKRSWYLTWKYKL

SEQ ID NO: 13603 - protein, 21 aa, Artificial Sequence
  Quasi-synthetic sequence derived from human genome
RRRVRPSIRLLSPVLSLILLL

SEQ ID NO: 13604 - protein, 21 aa, Artificial Sequence
  Quasi-synthetic sequence derived from human genome
GVILLALGALLVLQLIRRRRR

SEQ ID NO: 13605 - protein, 21 aa, Artificial Sequence
  Quasi-synthetic sequence derived from human genome
LKRYLLKRLNLIWNIYSTIIR

SEQ ID NO: 13606 - protein, 21 aa, Artificial Sequence
  Quasi-synthetic sequence derived from human genome
RIQRRWRGYRVRKYLFNYYYL

SEQ ID NO: 13607 - protein, 21 aa, Artificial Sequence
  Quasi-synthetic sequence derived from human genome
LQQRRLQHRLRLRAQMRLRRL

SEQ ID NO: 13608 - protein, 21 aa, Artificial Sequence
  Quasi-synthetic sequence derived from human genome
LLCIIILLILVLMFVVWMKRR

SEQ ID NO: 13609 - protein, 21 aa, Artificial Sequence
  Quasi-synthetic sequence derived from human genome
LWLIQWLLLKYKSIISRRFFC

SEQ ID NO: 13610 - protein, 21 aa, Artificial Sequence
  Quasi-synthetic sequence derived from human genome
LLFIVRKKRKEKRLKRLRDAK

SEQ ID NO: 13611 - protein, 21 aa, Artificial Sequence
  Quasi-synthetic sequence derived from human genome
RQRFLKLKYYSIILQSRIRMI

SEQ ID NO: 13612 - protein, 21 aa, Artificial Sequence
  Quasi-synthetic sequence derived from human genome
KLLLWACIVCVAFARKRRFPF

SEQ ID NO: 13613 - protein, 21 aa, Artificial Sequence
  Quasi-synthetic sequence derived from human genome
IRRRKMNHHKYRKLVKKTRFL

SEQ ID NO: 13614 - protein, 21 aa, Artificial Sequence
  Quasi-synthetic sequence derived from human genome
LRIRLFNFSLKLLSCLLYIIR

SEQ ID NO: 13615 - protein, 21 aa, Artificial Sequence
  Quasi-synthetic sequence derived from human genome
LFRSRSKRRHRTVKLIFAIVV

SEQ ID NO: 13616 - protein, 21 aa, Artificial Sequence
  Quasi-synthetic sequence derived from human genome
YRQVMKMRPKDLWKRLMIKFR

SEQ ID NO: 13617 - protein, 21 aa, Artificial Sequence
  Quasi-synthetic sequence derived from human genome
LILTLLRFSFDLRTMRRRKIL

SEQ ID NO: 13618 - protein, 21 aa, Artificial Sequence
  Quasi-synthetic sequence derived from human genome
LYYRRAHRRFVTKKALCIRVF

SEQ ID NO: 13619 - protein, 21 aa, Artificial Sequence
  Quasi-synthetic sequence derived from human genome
RIIKTLSKTKNLRLLILVGRL

SEQ ID NO: 13620 - protein, 21 aa, Artificial Sequence
  Quasi-synthetic sequence derived from human genome
VNKRLVLRTKLHKLIDFLLRK

SEQ ID NO: 13621 - protein, 21 aa, Artificial Sequence
  Quasi-synthetic sequence derived from human genome
LARIGRILRLVRAARGIRTLL

SEQ ID NO: 13622 - protein, 21 aa, Artificial Sequence
  Quasi-synthetic sequence derived from human genome
YFIRRRINKIQLIKGPNRILL

SEQ ID NO: 13623 - protein, 21 aa, Artificial Sequence
  Quasi-synthetic sequence derived from human genome
WRLNVLRLNFRGCLLRPKTFR

SEQ ID NO: 13624 - protein, 21 aa, Artificial Sequence
  Quasi-synthetic sequence derived from human genome
FLILSLLLFMVHRLRQRRRER

SEQ ID NO: 13625 - protein, 21 aa, Artificial Sequence
  Quasi-synthetic sequence derived from human genome
IFLLVLYLNRKGIKKWMHNIR

SEQ ID NO: 13626 - protein, 21 aa, Artificial Sequence
  Quasi-synthetic sequence derived from human genome
KKKTFKGLIRIFRKGVIAVLA

SEQ ID NO: 13627 - protein, 21 aa, Artificial Sequence
  Quasi-synthetic sequence derived from human genome
ILLIAGIIAMICYRKKRKGKL

SEQ ID NO: 13628 - protein, 21 aa, Artificial Sequence
  Quasi-synthetic sequence derived from human genome
RLKKIRAHRGLRHFWGLRVRG

SEQ ID NO: 13629 - protein, 21 aa, Artificial Sequence
  Quasi-synthetic sequence derived from human genome
RLKIKQILPTIYKRKNLSLFL

SEQ ID NO: 13630 - protein, 21 aa, Artificial Sequence
  Quasi-synthetic sequence derived from human genome
LYCVVIIQKNYRAFLLRRRFL

SEQ ID NO: 13631 - protein, 21 aa, Artificial Sequence
  Quasi-synthetic sequence derived from human genome
LLVVIILILAFWVLPKYKTRK

SEQ ID NO: 13632 - protein, 21 aa, Artificial Sequence
  Quasi-synthetic sequence derived from human genome
MILFSLIVGLLTYWFLFRKKK

SEQ ID NO: 13633 - protein, 21 aa, Artificial Sequence
  Quasi-synthetic sequence derived from human genome
YLRVKLTVRYKRVTTHRRIWL

SEQ ID NO: 13634 - protein, 21 aa, Artificial Sequence
  Quasi-synthetic sequence derived from human genome
ILQKYARAWLARRRFQSIRRF

SEQ ID NO: 13635 - protein, 21 aa, Artificial Sequence
  Quasi-synthetic sequence derived from human genome
VITLLIFLRRRLRKQARAHGK

SEQ ID NO: 13636 - protein, 21 aa, Artificial Sequence
  Quasi-synthetic sequence derived from human genome
RMKLVLRWYLSGFYKKPKGIK

SEQ ID NO: 13637 - protein, 21 aa, Artificial Sequence
  Quasi-synthetic sequence derived from human genome
LIFLFILRCLEMNCRKKLMRK

SEQ ID NO: 13638 - protein, 21 aa, Artificial Sequence
  Quasi-synthetic sequence derived from human genome
VKKKIKPTLPLRIFINVSRFF

SEQ ID NO: 13639 - protein, 21 aa, Artificial Sequence
  Quasi-synthetic sequence derived from human genome
LFLRAVLHVLKAKRLGIWLFM

SEQ ID NO: 13640 - protein, 21 aa, Artificial Sequence
  Quasi-synthetic sequence derived from human genome
LLRKLGVKLVQRLGLTFLKPK

SEQ ID NO: 13641 - protein, 21 aa, Artificial Sequence
  Quasi-synthetic sequence derived from human genome
LKKFLRKLHLPRDLPQKKKLK

SEQ ID NO: 13642 - protein, 21 aa, Artificial Sequence
  Quasi-synthetic sequence derived from human genome
KALLRLVSAVNRRRMKLLLGI

SEQ ID NO: 13643 - protein, 21 aa, Artificial Sequence
  Quasi-synthetic sequence derived from human genome
LIYSLRKKDVKRAIRKVMLKR

SEQ ID NO: 13644 - protein, 21 aa, Artificial Sequence
  Quasi-synthetic sequence derived from human genome
RARKNRSRIPLLRKRRFQLYR

SEQ ID NO: 13645 - protein, 21 aa, Artificial Sequence
  Quasi-synthetic sequence derived from human genome
IIKLFGVLRQRTGSLKILRLK

SEQ ID NO: 13646 - protein, 21 aa, Artificial Sequence
  Quasi-synthetic sequence derived from human genome
LLVFLLMVAVYTRIFFYVRRR

SEQ ID NO: 13647 - protein, 21 aa, Artificial Sequence
  Quasi-synthetic sequence derived from human genome
VLLLLLLGLLRPLRRRSCLLA

SEQ ID NO: 13648 - protein, 21 aa, Artificial Sequence
  Quasi-synthetic sequence derived from human genome
LKLKVMDLRGKFKRPPLRRVR

SEQ ID NO: 13649 - protein, 21 aa, Artificial Sequence
  Quasi-synthetic sequence derived from human genome
LLIYKDRLRINRFAWPKILKI

SEQ ID NO: 13650 - protein, 21 aa, Artificial Sequence
  Quasi-synthetic sequence derived from human genome
LYPLLIKKHWLWTRKCFVCKM

SEQ ID NO: 13651 - protein, 21 aa, Artificial Sequence
  Quasi-synthetic sequence derived from human genome
FSLFRKWKAFSVWRKNVRSKK

SEQ ID NO: 13652 - protein, 21 aa, Artificial Sequence
  Quasi-synthetic sequence derived from human genome
RAVRNLKKKLLPWQRRGLLRA

SEQ ID NO: 13653 - protein, 21 aa, Artificial Sequence
  Quasi-synthetic sequence derived from human genome
WRRRPNCGIRLPRIRRWRSVR

SEQ ID NO: 13654 - protein, 21 aa, Artificial Sequence
  Quasi-synthetic sequence derived from human genome
RLRKILFCVLGLYIAIPFLIK

SEQ ID NO: 13655 - protein, 21 aa, Artificial Sequence
  Quasi-synthetic sequence derived from human genome
FLYKLAQLFRWIRKAAFSRLY

SEQ ID NO: 13656 - protein, 21 aa, Artificial Sequence
  Quasi-synthetic sequence derived from human genome
LRKSLICNKKILLTPRRRQRL

SEQ ID NO: 13657 - protein, 21 aa, Artificial Sequence
  Quasi-synthetic sequence derived from human genome
LRRLFNLCKRCHRQPRFRLPK

SEQ ID NO: 13658 - protein, 21 aa, Artificial Sequence
  Quasi-synthetic sequence derived from human genome
VLKLFRMRSLRWQLLSIIVLM

SEQ ID NO: 13659 - protein, 21 aa, Artificial Sequence
  Quasi-synthetic sequence derived from human genome
KTLRKWLKMFKKRQLELYLPK

SEQ ID NO: 13660 - protein, 21 aa, Artificial Sequence
  Quasi-synthetic sequence derived from human genome
LLLCGLVALLGWSWLRRRRAR

SEQ ID NO: 13661 - protein, 21 aa, Artificial Sequence
  Quasi-synthetic sequence derived from human genome
RVFFLFDNLLVYCKRKHRRLK

SEQ ID NO: 13662 - protein, 21 aa, Artificial Sequence
  Quasi-synthetic sequence derived from human genome
FCYIFWKRYRFKLIAFMVISI

SEQ ID NO: 13663 - protein, 21 aa, Artificial Sequence
  Quasi-synthetic sequence derived from human genome
MVTLRKRTLKVLTFLVLFIFL

SEQ ID NO: 13664 - protein, 21 aa, Artificial Sequence
  Quasi-synthetic sequence derived from human genome
AKDVLGFLRVVRFVRILRIFK

SEQ ID NO: 13665 - protein, 21 aa, Artificial Sequence
  Quasi-synthetic sequence derived from human genome
RILRLIRGAKGIRTLLFALMM

SEQ ID NO: 13666 - protein, 21 aa, Artificial Sequence
  Quasi-synthetic sequence derived from human genome
SKFKLLSSLPRWRRIAQKIIR

SEQ ID NO: 13667 - protein, 21 aa, Artificial Sequence
  Quasi-synthetic sequence derived from human genome
LRALLLWGRRLRPLLRAPALA

SEQ ID NO: 13668 - protein, 21 aa, Artificial Sequence
  Quasi-synthetic sequence derived from human genome
KFWARGRKPWKLAIQILKIAM

SEQ ID NO: 13669 - protein, 21 aa, Artificial Sequence
  Quasi-synthetic sequence derived from human genome
KFLLLYALLKLSLIRGKSLLF

SEQ ID NO: 13670 - protein, 21 aa, Artificial Sequence
  Quasi-synthetic sequence derived from human genome
LLSPSKIKTFLSLVWKRRILF

SEQ ID NO: 13671 - protein, 21 aa, Artificial Sequence
  Quasi-synthetic sequence derived from human genome
AKYAKVKLIRLVGIMLLLYVK

SEQ ID NO: 13672 - protein, 21 aa, Artificial Sequence
  Quasi-synthetic sequence derived from human genome
VFLLLLAILLFFAVKYLLRWK

SEQ ID NO: 13673 - protein, 21 aa, Artificial Sequence
  Quasi-synthetic sequence derived from human genome
MLLFFTILVLSYFRYMRIYRR

SEQ ID NO: 13674 - protein, 21 aa, Artificial Sequence
  Quasi-synthetic sequence derived from human genome
LLIYKQGRKLFPIKLKNKKGL

SEQ ID NO: 13675 - protein, 21 aa, Artificial Sequence
  Quasi-synthetic sequence derived from human genome
LRRKRKALWAHLFSSLRGYLK

SEQ ID NO: 13676 - protein, 21 aa, Artificial Sequence
  Quasi-synthetic sequence derived from human genome
KFFFLRTRRFALMVSLSIWIL

SEQ ID NO: 13677 - protein, 21 aa, Artificial Sequence
  Quasi-synthetic sequence derived from human genome
IWPFIAQWLVYLYYQRRRRKL

SEQ ID NO: 13678 - protein, 21 aa, Artificial Sequence
  Quasi-synthetic sequence derived from human genome
SLLLGVARSLWMLLKLRQRLR

SEQ ID NO: 13679 - protein, 21 aa, Artificial Sequence
  Quasi-synthetic sequence derived from human genome
RHLRRPRVARLLCLGVWALIL

SEQ ID NO: 13680 - protein, 21 aa, Artificial Sequence
  Quasi-synthetic sequence derived from human genome
RTLYLRYRPKVKFLFGIWPVI

SEQ ID NO: 13681 - protein, 21 aa, Artificial Sequence
  Quasi-synthetic sequence derived from human genome
FLFLILIRRALSASQKKKVII

SEQ ID NO: 13682 - protein, 21 aa, Artificial Sequence
  Quasi-synthetic sequence derived from human genome
PRRVRSFLRGLPALLLLLLFL

SEQ ID NO: 13683 - protein, 21 aa, Artificial Sequence
  Quasi-synthetic sequence derived from human genome
VRIKTSIFSLFRAPKLRMRVF

SEQ ID NO: 13684 - protein, 21 aa, Artificial Sequence
  Quasi-synthetic sequence derived from human genome
RSRLLLLLCIFLGTLRGFRAR

SEQ ID NO: 13685 - protein, 21 aa, Artificial Sequence
  Quasi-synthetic sequence derived from human genome
FRLLRVFKLAKSWPTLNMLIK

SEQ ID NO: 13686 - protein, 21 aa, Artificial Sequence
  Quasi-synthetic sequence derived from human genome
LKRALKVKQAMMQLYVLKLLK

SEQ ID NO: 13687 - protein, 21 aa, Artificial Sequence
  Quasi-synthetic sequence derived from human genome
RHPLFIWLKMRISKLVPWMIL

SEQ ID NO: 13688 - protein, 21 aa, Artificial Sequence
  Quasi-synthetic sequence derived from human genome
TIRKKHLQRPIFRLRCLVKQL

SEQ ID NO: 13689 - protein, 21 aa, Artificial Sequence
  Quasi-synthetic sequence derived from human genome
ILTLMRMLSLKSLKKQMKKVK

SEQ ID NO: 13690 - protein, 21 aa, Artificial Sequence
  Quasi-synthetic sequence derived from human genome
LRMPLSRWQRRLRRAARRQVL

SEQ ID NO: 13691 - protein, 21 aa, Artificial Sequence
  Quasi-synthetic sequence derived from human genome
LGGILALLILILLLLLFLRRR

SEQ ID NO: 13692 - protein, 21 aa, Artificial Sequence
  Quasi-synthetic sequence derived from human genome
VFFLTSRTRALLRRFPRMLLV

SEQ ID NO: 13693 - protein, 21 aa, Artificial Sequence
  Quasi-synthetic sequence derived from human genome
LRALLKRKHRFILLRSPGNKV

SEQ ID NO: 13694 - protein, 21 aa, Artificial Sequence
  Quasi-synthetic sequence derived from human genome
WYWRRRPKRLSAVVCALLWVL

SEQ ID NO: 13695 - protein, 21 aa, Artificial Sequence
  Quasi-synthetic sequence derived from human genome
FRLKKVVKWYLSGFYKKPKGL

SEQ ID NO: 13696 - protein, 21 aa, Artificial Sequence
  Quasi-synthetic sequence derived from human genome
LKKVQALKKSKLLLPITYRFK

SEQ ID NO: 13697 - protein, 21 aa, Artificial Sequence
  Quasi-synthetic sequence derived from human genome
FMGVKNWPWMKLYFKIKPLLK

SEQ ID NO: 13698 - protein, 21 aa, Artificial Sequence
  Quasi-synthetic sequence derived from human genome
LKLLKPPLLWSHGLIRIIRAK

SEQ ID NO: 13699 - protein, 21 aa, Artificial Sequence
  Quasi-synthetic sequence derived from human genome
YIGRSVHYWKKVLPLLKIIKK

SEQ ID NO: 13700 - protein, 21 aa, Artificial Sequence
  Quasi-synthetic sequence derived from human genome
NNYWELRRRRPKLKKLKKLLM

SEQ ID NO: 13701 - protein, 21 aa, Artificial Sequence
  Quasi-synthetic sequence derived from human genome
LALALVGVLILFMFRRLRQFR

SEQ ID NO: 13702 - protein, 21 aa, Artificial Sequence
  Quasi-synthetic sequence derived from human genome
IVLCKQNELRIRIKMRKLILR

SEQ ID NO: 13703 - protein, 21 aa, Artificial Sequence
  Quasi-synthetic sequence derived from human genome
MVFVALLVFYITKRKKQRSRR

SEQ ID NO: 13704 - protein, 21 aa, Artificial Sequence
  Quasi-synthetic sequence derived from human genome
FHKLKTMKHLLLLLLCVFLVK

SEQ ID NO: 13705 - protein, 21 aa, Artificial Sequence
  Quasi-synthetic sequence derived from human genome
RLGRILKIHRNGKLLLRQVIV

SEQ ID NO: 13706 - protein, 21 aa, Artificial Sequence
  Quasi-synthetic sequence derived from human genome
RIFRPRKLTLKGYRQHWVVFK

SEQ ID NO: 13707 - protein, 21 aa, Artificial Sequence
  Quasi-synthetic sequence derived from human genome
VRKKVLAPRVNLTFRKILLTK

SEQ ID NO: 13708 - protein, 21 aa, Artificial Sequence
  Quasi-synthetic sequence derived from human genome
RGYLVKMGGKIKSWKKRWFVF

SEQ ID NO: 13709 - protein, 21 aa, Artificial Sequence
  Quasi-synthetic sequence derived from human genome
KIVQVMRKQKTINRFLMRKRL

SEQ ID NO: 13710 - protein, 21 aa, Artificial Sequence
  Quasi-synthetic sequence derived from human genome
RILRSAKLSLIQFFSKMKKWM

SEQ ID NO: 13711 - protein, 21 aa, Artificial Sequence
  Quasi-synthetic sequence derived from human genome
WVIRVQKRHKMPRMKKLMRNR

SEQ ID NO: 13712 - protein, 21 aa, Artificial Sequence
  Quasi-synthetic sequence derived from human genome
LASRHFRARFRRLWPCGRRRR

SEQ ID NO: 13713 - protein, 21 aa, Artificial Sequence
  Quasi-synthetic sequence derived from human genome
LKLMVQSWPFRRLPLRPLIKM

SEQ ID NO: 13714 - protein, 21 aa, Artificial Sequence
  Quasi-synthetic sequence derived from human genome
LTPYPLVRRRKRRFFGLCCLI

SEQ ID NO: 13715 - protein, 21 aa, Artificial Sequence
  Quasi-synthetic sequence derived from human genome
FKGLPKVLPKLPKRVIVQRIL

SEQ ID NO: 13716 - protein, 21 aa, Artificial Sequence
  Quasi-synthetic sequence derived from human genome
RFRFRAFHFLNRFPSVYLRCK

SEQ ID NO: 13717 - protein, 21 aa, Artificial Sequence
  Quasi-synthetic sequence derived from human genome
LIQALWKGYLVRSLLRSKKKR

SEQ ID NO: 13718 - protein, 21 aa, Artificial Sequence
  Quasi-synthetic sequence derived from human genome
KVLFKKLLNKIRSQKSLWTIK

SEQ ID NO: 13719 - protein, 21 aa, Artificial Sequence
  Quasi-synthetic sequence derived from human genome
LVYLRLLFFIHDRRKMRPARL

SEQ ID NO: 13720 - protein, 21 aa, Artificial Sequence
  Quasi-synthetic sequence derived from human genome
QARWRLVGLPVHLLFLRFYKR

SEQ ID NO: 13721 - protein, 21 aa, Artificial Sequence
  Quasi-synthetic sequence derived from human genome
IFPWALGKNWRKLFPNFLKLR

SEQ ID NO: 13722 - protein, 21 aa, Artificial Sequence
  Quasi-synthetic sequence derived from human genome
RARKKRSRIPLLRKRRFQLGR

SEQ ID NO: 13723 - protein, 21 aa, Artificial Sequence
  Quasi-synthetic sequence derived from human genome
LMALKKRTKDKLFQFLKLRKY

SEQ ID NO: 13724 - protein, 21 aa, Artificial Sequence
  Quasi-synthetic sequence derived from human genome
ILFQKGMLKRVKKLLDLLVKF

SEQ ID NO: 13725 - protein, 21 aa, Artificial Sequence
  Quasi-synthetic sequence derived from human genome
VLVYFVVRTVRMRRRNRKTRR

SEQ ID NO: 13726 - protein, 21 aa, Artificial Sequence
  Quasi-synthetic sequence derived from human genome
IFLLYLTIIFLHIYKRKNVLK

SEQ ID NO: 13727 - protein, 21 aa, Artificial Sequence
  Quasi-synthetic sequence derived from human genome
KFKFFFQRNPYFRNKLIVKVY

SEQ ID NO: 13728 - protein, 21 aa, Artificial Sequence
  Quasi-synthetic sequence derived from human genome
KGRKVLKLLLVAWDRRLIFAI

SEQ ID NO: 13729 - protein, 21 aa, Artificial Sequence
  Quasi-synthetic sequence derived from human genome
VHLLKTVRLLRLLRLLQKLER

SEQ ID NO: 13730 - protein, 21 aa, Artificial Sequence
  Quasi-synthetic sequence derived from human genome
FFPPLRRLILFKGARYYVLAR

SEQ ID NO: 13731 - protein, 21 aa, Artificial Sequence
  Quasi-synthetic sequence derived from human genome
KFLGLRAFIRKQINNIFLRFV

SEQ ID NO: 13732 - protein, 21 aa, Artificial Sequence
  Quasi-synthetic sequence derived from human genome
TKLWKVKKALKMTIFWRGLMP

SEQ ID NO: 13733 - protein, 21 aa, Artificial Sequence
  Quasi-synthetic sequence derived from human genome
RFPWPKVLKISYKRSSFFIKI

SEQ ID NO: 13734 - protein, 21 aa, Artificial Sequence
  Quasi-synthetic sequence derived from human genome
LVCGIVLGFLFKRFLRIQRLF

SEQ ID NO: 13735 - protein, 21 aa, Artificial Sequence
  Quasi-synthetic sequence derived from human genome
MKLKQRVVLLAILLVIFIFTK

SEQ ID NO: 13736 - protein, 21 aa, Artificial Sequence
  Quasi-synthetic sequence derived from human genome
KSKIFFLFRLCKKLPFNMMSW

SEQ ID NO: 13737 - protein, 21 aa, Artificial Sequence
  Quasi-synthetic sequence derived from human genome
KKVLNLLKGAFPARLKKVLIV

SEQ ID NO: 13738 - protein, 21 aa, Artificial Sequence
  Quasi-synthetic sequence derived from human genome
GLKRMFRRIYRHLRPGGILVL

SEQ ID NO: 13739 - protein, 21 aa, Artificial Sequence
  Quasi-synthetic sequence derived from human genome
LCRLKIRKCMGRLHLRCPVFM

SEQ ID NO: 13740 - protein, 21 aa, Artificial Sequence
  Quasi-synthetic sequence derived from human genome
RALHIRKLLLTLPRSVLIVMR

SEQ ID NO: 13741 - protein, 21 aa, Artificial Sequence
  Quasi-synthetic sequence derived from human genome
AQLFRWIRKAAFSRLYQLRIR

SEQ ID NO: 13742 - protein, 21 aa, Artificial Sequence
  Quasi-synthetic sequence derived from human genome
FVGILLFLILVGLLIFFLKRR

SEQ ID NO: 13743 - protein, 21 aa, Artificial Sequence
  Quasi-synthetic sequence derived from human genome
LKRRYSFRLHIGRNIARPWKL

SEQ ID NO: 13744 - protein, 21 aa, Artificial Sequence
  Quasi-synthetic sequence derived from human genome
WLLVLLLHKHRSILLRRLCSL

SEQ ID NO: 13745 - protein, 21 aa, Artificial Sequence
  Quasi-synthetic sequence derived from human genome
LLRRVTRNLVRNKLAVITRLL

SEQ ID NO: 13746 - protein, 21 aa, Artificial Sequence
  Quasi-synthetic sequence derived from human genome
FVKVVKNKAYFKRYQVKFRRR

SEQ ID NO: 13747 - protein, 21 aa, Artificial Sequence
  Quasi-synthetic sequence derived from human genome
RWLNKLMKLLQRLPNSVVRRL

SEQ ID NO: 13748 - protein, 21 aa, Artificial Sequence
  Quasi-synthetic sequence derived from human genome
RRFPLRMSRRGMVRKSRAWVL

SEQ ID NO: 13749 - protein, 21 aa, Artificial Sequence
  Quasi-synthetic sequence derived from human genome
SRKKMVRRVVCILVWLLAFCV

SEQ ID NO: 13750 - protein, 21 aa, Artificial Sequence
  Quasi-synthetic sequence derived from human genome
WQKRRFLKAWLEYLQVRRVKR

SEQ ID NO: 13751 - protein, 21 aa, Artificial Sequence
  Quasi-synthetic sequence derived from human genome
LALGVMRMVKKRAIVKKLPIV

SEQ ID NO: 13752 - protein, 21 aa, Artificial Sequence
  Quasi-synthetic sequence derived from human genome
AALWRRQIYAVATLRFLKLRR

SEQ ID NO: 13753 - protein, 21 aa, Artificial Sequence
  Quasi-synthetic sequence derived from human genome
KIGFRLRNLLKLPKAHKWCIY

SEQ ID NO: 13754 - protein, 21 aa, Artificial Sequence
  Quasi-synthetic sequence derived from human genome
RILRLIKGAKGIRTLLFALMM

SEQ ID NO: 13755 - protein, 21 aa, Artificial Sequence
  Quasi-synthetic sequence derived from human genome
LIVLSLSTFHIHKRRMKKRKM

SEQ ID NO: 13756 - protein, 21 aa, Artificial Sequence
  Quasi-synthetic sequence derived from human genome
RLRVNLRLVINRLKLLEKKKT

SEQ ID NO: 13757 - protein, 21 aa, Artificial Sequence
  Quasi-synthetic sequence derived from human genome
RLLRVFKLAKSWPTLNMLIKI

SEQ ID NO: 13758 - protein, 21 aa, Artificial Sequence
  Quasi-synthetic sequence derived from human genome
MLMLLPFLLKQHKVWRKCSIR

SEQ ID NO: 13759 - protein, 21 aa, Artificial Sequence
  Quasi-synthetic sequence derived from human genome
LKFRKKKLRFGRSRIHEWGLF

SEQ ID NO: 13760 - protein, 21 aa, Artificial Sequence
  Quasi-synthetic sequence derived from human genome
WKKSRKLLGQRLFNKLMKMTF

SEQ ID NO: 13761 - protein, 21 aa, Artificial Sequence
  Quasi-synthetic sequence derived from human genome
RYLRRRLVPRYRLQLLGIACM

SEQ ID NO: 13762 - protein, 21 aa, Artificial Sequence
  Quasi-synthetic sequence derived from human genome
SDRRILWITLRTWKKFVKFMK

SEQ ID NO: 13763 - protein, 21 aa, Artificial Sequence
  Quasi-synthetic sequence derived from human genome
LLWMNPFVGFRFRRLPTRPRK

SEQ ID NO: 13764 - protein, 21 aa, Artificial Sequence
  Quasi-synthetic sequence derived from human genome
VLLLFLLLFLLLRHRHQSKHR

SEQ ID NO: 13765 - protein, 21 aa, Artificial Sequence
  Quasi-synthetic sequence derived from human genome
KINTFNWAKIRKLSFKRKHFL

SEQ ID NO: 13766 - protein, 21 aa, Artificial Sequence
  Quasi-synthetic sequence derived from human genome
PFPPTLFRIVRLARIGRILRL

SEQ ID NO: 13767 - protein, 21 aa, Artificial Sequence
  Quasi-synthetic sequence derived from human genome
NLVDIFSKVRIFGLKKRRLRR

SEQ ID NO: 13768 - protein, 21 aa, Artificial Sequence
  Quasi-synthetic sequence derived from human genome
RLRKRVNAALVIQKYWRRVLA

SEQ ID NO: 13769 - protein, 21 aa, Artificial Sequence
  Quasi-synthetic sequence derived from human genome
MVSLRKKRLKKFPWSLWVWTT

SEQ ID NO: 13770 - protein, 21 aa, Artificial Sequence
  Quasi-synthetic sequence derived from human genome
YLVIRALRLWRTAKLQVTLKK

SEQ ID NO: 13771 - protein, 21 aa, Artificial Sequence
  Quasi-synthetic sequence derived from human genome
FLNLQKKYPIKSRKLLRVLQR

SEQ ID NO: 13772 - protein, 21 aa, Artificial Sequence
  Quasi-synthetic sequence derived from human genome
KVKFDIRYIVLLRSVRPLRLF

SEQ ID NO: 13773 - protein, 21 aa, Artificial Sequence
  Quasi-synthetic sequence derived from human genome
HKFLQLRFWGWWKLYNKVKPL

SEQ ID NO: 13774 - protein, 21 aa, Artificial Sequence
  Quasi-synthetic sequence derived from human genome
IPYLLGRKRRWSKCKIRVFVG

SEQ ID NO: 13775 - protein, 21 aa, Artificial Sequence
  Quasi-synthetic sequence derived from human genome
MVVFINAKIKSLIKLFKKKTV

SEQ ID NO: 13776 - protein, 21 aa, Artificial Sequence
  Quasi-synthetic sequence derived from human genome
RVMRNLFVRKLYLWPRFHVAV

SEQ ID NO: 13777 - protein, 21 aa, Artificial Sequence
  Quasi-synthetic sequence derived from human genome
FAKTWRVHAIFKNVKMKKKII

SEQ ID NO: 13778 - protein, 21 aa, Artificial Sequence
  Quasi-synthetic sequence derived from human genome
VILVSFGLFMYAKRNKRRIMR

SEQ ID NO: 13779 - protein, 21 aa, Artificial Sequence
  Quasi-synthetic sequence derived from human genome
WKELIMCNIKLLKALRVRKKM

SEQ ID NO: 13780 - protein, 21 aa, Artificial Sequence
  Quasi-synthetic sequence derived from human genome
IVYRLYMRQTIIKVIKFILII

SEQ ID NO: 13781 - protein, 21 aa, Artificial Sequence
  Quasi-synthetic sequence derived from human genome
RRYLDWRALMKRKRMKANIKL

SEQ ID NO: 13782 - protein, 21 aa, Artificial Sequence
  Quasi-synthetic sequence derived from human genome
IFLMVLYLNRRGIQRWMRNLR

SEQ ID NO: 13783 - protein, 21 aa, Artificial Sequence
  Quasi-synthetic sequence derived from human genome
WLRKSPPEKKLKRYAWKRRWF

SEQ ID NO: 13784 - protein, 21 aa, Artificial Sequence
  Quasi-synthetic sequence derived from human genome
MMRFMLLFSRQGKLRLQKWYL

SEQ ID NO: 13785 - protein, 21 aa, Artificial Sequence
  Quasi-synthetic sequence derived from human genome
YAASLVFFIYMISFIFRKRRK

SEQ ID NO: 13786 - protein, 21 aa, Artificial Sequence
  Quasi-synthetic sequence derived from human genome
LLLGYRRRCPPLLRGLVQRWR

SEQ ID NO: 13787 - protein, 21 aa, Artificial Sequence
  Quasi-synthetic sequence derived from human genome
LRIRLFNFSLKLLTCLLYIVR

SEQ ID NO: 13788 - protein, 21 aa, Artificial Sequence
  Quasi-synthetic sequence derived from human genome
KIQDYHILTRKRIRYRFRRFI

SEQ ID NO: 13789 - protein, 21 aa, Artificial Sequence
  Quasi-synthetic sequence derived from human genome
WQIPLSRRFRSVKLWFVIRSF

SEQ ID NO: 13790 - protein, 21 aa, Artificial Sequence
  Quasi-synthetic sequence derived from human genome
HIAATLIQRRFRTLMMRRRFL

SEQ ID NO: 13791 - protein, 21 aa, Artificial Sequence
  Quasi-synthetic sequence derived from human genome
RRLLPPLLLLLLSLPPRARAK

SEQ ID NO: 13792 - protein, 21 aa, Artificial Sequence
  Quasi-synthetic sequence derived from human genome
KHFLRKIIMVHPKVRFHFSVK

SEQ ID NO: 13793 - protein, 21 aa, Artificial Sequence
  Quasi-synthetic sequence derived from human genome
LPAARLARQYLLPLLRRLARR

SEQ ID NO: 13794 - protein, 21 aa, Artificial Sequence
  Quasi-synthetic sequence derived from human genome
RMLNMLIVFRFLRIIPSMKLM

SEQ ID NO: 13795 - protein, 21 aa, Artificial Sequence
  Quasi-synthetic sequence derived from human genome
KYQSKARRKLMFIIICVIVLL

SEQ ID NO: 13796 - protein, 21 aa, Artificial Sequence
  Quasi-synthetic sequence derived from human genome
ITALLFLCLALIIMKILPKRR

SEQ ID NO: 13797 - protein, 21 aa, Artificial Sequence
  Quasi-synthetic sequence derived from human genome
RNAIFHLLKNFLRLLPKFSLK

SEQ ID NO: 13798 - protein, 21 aa, Artificial Sequence
  Quasi-synthetic sequence derived from human genome
RYGKRLKAKNLMYLKQILYLL

SEQ ID NO: 13799 - protein, 21 aa, Artificial Sequence
  Quasi-synthetic sequence derived from human genome
KRPVLGYRNLNLFKLFRLVHK

SEQ ID NO: 13800 - protein, 21 aa, Artificial Sequence
  Quasi-synthetic sequence derived from human genome
MRVLSRTSKFRRLRELLRRRK

SEQ ID NO: 13801 - protein, 21 aa, Artificial Sequence
  Quasi-synthetic sequence derived from human genome
RAWMIQCWWRTLVQRRIRQRR

SEQ ID NO: 13802 - protein, 21 aa, Artificial Sequence
  Quasi-synthetic sequence derived from human genome
KLDILYRRLLLTKLFIRGWGR

SEQ ID NO: 13803 - protein, 21 aa, Artificial Sequence
  Quasi-synthetic sequence derived from human genome
LIFKVKKRSILISSRHFWTIL

SEQ ID NO: 13804 - protein, 21 aa, Artificial Sequence
  Quasi-synthetic sequence derived from human genome
IKRKRPFVLKKKRGRKRRRIN

SEQ ID NO: 13805 - protein, 21 aa, Artificial Sequence
  Quasi-synthetic sequence derived from human genome
RRFLVTLRIRRACGPPRVRVF

SEQ ID NO: 13806 - protein, 21 aa, Artificial Sequence
  Quasi-synthetic sequence derived from human genome
IFCLVFWVLKGLRPRVPKGLK

SEQ ID NO: 13807 - protein, 21 aa, Artificial Sequence
  Quasi-synthetic sequence derived from human genome
LLGWQANRLRRRYLDWRKRRL

SEQ ID NO: 13808 - protein, 21 aa, Artificial Sequence
  Quasi-synthetic sequence derived from human genome
PIVKQIRRPKHVVVKFVVKFF

SEQ ID NO: 13809 - protein, 21 aa, Artificial Sequence
  Quasi-synthetic sequence derived from human genome
LFLIILGKILLNILTLGMRRK

SEQ ID NO: 13810 - protein, 21 aa, Artificial Sequence
  Quasi-synthetic sequence derived from human genome
LHCSVLKPLRPILAARLRRRL

SEQ ID NO: 13811 - protein, 21 aa, Artificial Sequence
  Quasi-synthetic sequence derived from human genome
LFVKLSRVVGRLRLVFTRVPF

SEQ ID NO: 13812 - protein, 21 aa, Artificial Sequence
  Quasi-synthetic sequence derived from human genome
WRRRKSLWLALSASWLLLVLL

SEQ ID NO: 13813 - protein, 21 aa, Artificial Sequence
  Quasi-synthetic sequence derived from human genome
RIPLLRKRRFQLGRSMNLRAR

SEQ ID NO: 13814 - protein, 21 aa, Artificial Sequence
  Quasi-synthetic sequence derived from human genome
WLYTHPLIKLLFLPRRSRCKF

SEQ ID NO: 13815 - protein, 21 aa, Artificial Sequence
  Quasi-synthetic sequence derived from human genome
FVPLGFILICYLKIVICLRRR

SEQ ID NO: 13816 - protein, 21 aa, Artificial Sequence
  Quasi-synthetic sequence derived from human genome
FLLHLLVRRSRFVLFYTTRPR

SEQ ID NO: 13817 - protein, 21 aa, Artificial Sequence
  Quasi-synthetic sequence derived from human genome
MRVLSRTSKFRRRKQLLRRRK

SEQ ID NO: 13818 - protein, 21 aa, Artificial Sequence
  Quasi-synthetic sequence derived from human genome
RIFRIPRRPRKLTLKGYRQHW

SEQ ID NO: 13819 - protein, 21 aa, Artificial Sequence
  Quasi-synthetic sequence derived from human genome
SLFSSLKVVRLLRLGRVARKL

SEQ ID NO: 13820 - protein, 21 aa, Artificial Sequence
  Quasi-synthetic sequence derived from human genome
LRRQILLPFRKPLIIFTPKSL

SEQ ID NO: 13821 - protein, 21 aa, Artificial Sequence
  Quasi-synthetic sequence derived from human genome
LPFPLRKPRKAHKYLRLSRKK

SEQ ID NO: 13822 - protein, 21 aa, Artificial Sequence
  Quasi-synthetic sequence derived from human genome
GILRRKLYIHRVTLRKLLPGV

SEQ ID NO: 13823 - protein, 21 aa, Artificial Sequence
  Quasi-synthetic sequence derived from human genome
LRLLLWKNLTFRRRQTCQLLL

SEQ ID NO: 13824 - protein, 21 aa, Artificial Sequence
  Quasi-synthetic sequence derived from human genome
AILLVVAVFCILWNWNKRKKR

SEQ ID NO: 13825 - protein, 21 aa, Artificial Sequence
  Quasi-synthetic sequence derived from human genome
LRLSKLRRCVQWLKVMGLFAF

SEQ ID NO: 13826 - protein, 21 aa, Artificial Sequence
  Quasi-synthetic sequence derived from human genome
ARCARRRRPGLLLPGLWLLLL

SEQ ID NO: 13827 - protein, 21 aa, Artificial Sequence
  Quasi-synthetic sequence derived from human genome
LLKIYLSRHISILFYLKILYK

SEQ ID NO: 13828 - protein, 21 aa, Artificial Sequence
  Quasi-synthetic sequence derived from human genome
AWGWLLRRRRWAALLVLGLLV

SEQ ID NO: 13829 - protein, 21 aa, Artificial Sequence
  Quasi-synthetic sequence derived from human genome
LSACIIQCWWRLILSKILKKR

SEQ ID NO: 13830 - protein, 21 aa, Artificial Sequence
  Quasi-synthetic sequence derived from human genome
AIKRLARISLVKKLMKKWSVT

SEQ ID NO: 13831 - protein, 21 aa, Artificial Sequence
  Quasi-synthetic sequence derived from human genome
LRLFRRLLLAALLLVIVWTLF

SEQ ID NO: 13832 - protein, 21 aa, Artificial Sequence
  Quasi-synthetic sequence derived from human genome
LLIAMKELKARKIPIIIRRYL

SEQ ID NO: 13833 - protein, 21 aa, Artificial Sequence
  Quasi-synthetic sequence derived from human genome
IITVIGLAVALVLYIRKKKRL

SEQ ID NO: 13834 - protein, 21 aa, Artificial Sequence
  Quasi-synthetic sequence derived from human genome
RPFLKRAILVLSYVLVILYFR

SEQ ID NO: 13835 - protein, 21 aa, Artificial Sequence
  Quasi-synthetic sequence derived from human genome
LLWMLWYVGRSSAHRRLFRLK

SEQ ID NO: 13836 - protein, 21 aa, Artificial Sequence
  Quasi-synthetic sequence derived from human genome
RIMAKDLVRTRRYVRKFVLMR

SEQ ID NO: 13837 - protein, 21 aa, Artificial Sequence
  Quasi-synthetic sequence derived from human genome
IPIARLVLKSKNGIHLRLRRL

SEQ ID NO: 13838 - protein, 21 aa, Artificial Sequence
  Quasi-synthetic sequence derived from human genome
CSLLLWPTRLRRSFLAWRRGR

SEQ ID NO: 13839 - protein, 21 aa, Artificial Sequence
  Quasi-synthetic sequence derived from human genome
KQGVIKSLKIKYRHCLIKKFL

SEQ ID NO: 13840 - protein, 21 aa, Artificial Sequence
  Quasi-synthetic sequence derived from human genome
FVFKLLLHRPFFRCAILMFQR

SEQ ID NO: 13841 - protein, 21 aa, Artificial Sequence
  Quasi-synthetic sequence derived from human genome
IKLLPLRTFRVFRALKAISVV

SEQ ID NO: 13842 - protein, 21 aa, Artificial Sequence
  Quasi-synthetic sequence derived from human genome
VMVGIRRIFAFICRKHRIQRV

SEQ ID NO: 13843 - protein, 21 aa, Artificial Sequence
  Quasi-synthetic sequence derived from human genome
YLSFRKLMRWILILVIALWFI

SEQ ID NO: 13844 - protein, 21 aa, Artificial Sequence
  Quasi-synthetic sequence derived from human genome
LRKRFGGIRIPIILAVLYLFI

SEQ ID NO: 13845 - protein, 21 aa, Artificial Sequence
  Quasi-synthetic sequence derived from human genome
RAWKRIFWRQILLTLGLLGLF

SEQ ID NO: 13846 - protein, 21 aa, Artificial Sequence
  Quasi-synthetic sequence derived from human genome
RISMKLPRIPLRRQKLPKVVV

SEQ ID NO: 13847 - protein, 21 aa, Artificial Sequence
  Quasi-synthetic sequence derived from human genome
KRKQYVKSLSRVLKVKGFFLI

SEQ ID NO: 13848 - protein, 21 aa, Artificial Sequence
  Quasi-synthetic sequence derived from human genome
IPRLEKILRNKAKIKFIIKKP

SEQ ID NO: 13849 - protein, 21 aa, Artificial Sequence
  Quasi-synthetic sequence derived from human genome
LVSLLSAWIVARLRMRNFKRL

SEQ ID NO: 13850 - protein, 21 aa, Artificial Sequence
  Quasi-synthetic sequence derived from human genome
FGIRKLYMKSLLKIFAWATLR

SEQ ID NO: 13851 - protein, 21 aa, Artificial Sequence
  Quasi-synthetic sequence derived from human genome
RRAKRKVTRMILIVAALFCLC

SEQ ID NO: 13852 - protein, 21 aa, Artificial Sequence
  Quasi-synthetic sequence derived from human genome
RIHRRGPKILLLLLFFGVVLV

SEQ ID NO: 13853 - protein, 21 aa, Artificial Sequence
  Quasi-synthetic sequence derived from human genome
AILLVLIVLLLLPFRCQRRPR

SEQ ID NO: 13854 - protein, 21 aa, Artificial Sequence
  Quasi-synthetic sequence derived from human genome
PKFLSHFKRKFIIHRGKRKAV

SEQ ID NO: 13855 - protein, 21 aa, Artificial Sequence
  Quasi-synthetic sequence derived from human genome
LRHASLKVIWKVMSILKGRKF

SEQ ID NO: 13856 - protein, 21 aa, Artificial Sequence
  Quasi-synthetic sequence derived from human genome
MRLRLRLLALLLLLLAPPARA

SEQ ID NO: 13857 - protein, 21 aa, Artificial Sequence
  Quasi-synthetic sequence derived from human genome
LRARVRPLFCALLLSLGRFVR

SEQ ID NO: 13858 - protein, 21 aa, Artificial Sequence
  Quasi-synthetic sequence derived from human genome
LRNRLIRKRFLCLGWGLPALV

SEQ ID NO: 13859 - protein, 21 aa, Artificial Sequence
  Quasi-synthetic sequence derived from human genome
VIKGVLFRIFIIWAISSWFRR

SEQ ID NO: 13860 - protein, 21 aa, Artificial Sequence
  Quasi-synthetic sequence derived from human genome
RIKKPIKTKFRLPVFNWTALK

SEQ ID NO: 13861 - protein, 21 aa, Artificial Sequence
  Quasi-synthetic sequence derived from human genome
RFSRISMKLPRIPLRRQKLPK

SEQ ID NO: 13862 - protein, 21 aa, Artificial Sequence
  Quasi-synthetic sequence derived from human genome
MGPRWRRRWFVLKGHTLYWYR

SEQ ID NO: 13863 - protein, 21 aa, Artificial Sequence
  Quasi-synthetic sequence derived from human genome
LKLRHWQWWRVFTKVKPLLQV

SEQ ID NO: 13864 - protein, 21 aa, Artificial Sequence
  Quasi-synthetic sequence derived from human genome
HRLWSHRSYKARLPLRLFLII

SEQ ID NO: 13865 - protein, 21 aa, Artificial Sequence
  Quasi-synthetic sequence derived from human genome
RALRRLWDRVLGPARRWRRPL

SEQ ID NO: 13866 - protein, 21 aa, Artificial Sequence
  Quasi-synthetic sequence derived from human genome
LLIQAFVRGWKARKNYRKYFR

SEQ ID NO: 13867 - protein, 21 aa, Artificial Sequence
  Quasi-synthetic sequence derived from human genome
KKWCRSILRRTSLILARVFGL

SEQ ID NO: 13868 - protein, 21 aa, Artificial Sequence
  Quasi-synthetic sequence derived from human genome
CIVILLAIVVLYVALRRQKKK

SEQ ID NO: 13869 - protein, 21 aa, Artificial Sequence
  Quasi-synthetic sequence derived from human genome
SLTRKGIVRVVFFPFFFRWWL

SEQ ID NO: 13870 - protein, 21 aa, Artificial Sequence
  Quasi-synthetic sequence derived from human genome
RYLLILSPLRYKLRMTPLRAL

SEQ ID NO: 13871 - protein, 21 aa, Artificial Sequence
  Quasi-synthetic sequence derived from human genome
YFTPKKRKLFGNKKRKSFFLR

SEQ ID NO: 13872 - protein, 21 aa, Artificial Sequence
  Quasi-synthetic sequence derived from human genome
RRTRFVFQKALRSLRRYPLPL

SEQ ID NO: 13873 - protein, 21 aa, Artificial Sequence
  Quasi-synthetic sequence derived from human genome
LLMNRRKFLYQFKNVRWAKGR

SEQ ID NO: 13874 - protein, 21 aa, Artificial Sequence
  Quasi-synthetic sequence derived from human genome
FFVVLLFLWRSFRSVRSRLYV

SEQ ID NO: 13875 - protein, 21 aa, Artificial Sequence
  Quasi-synthetic sequence derived from human genome
VWHKTVRGRPKLSRKWYRILK

SEQ ID NO: 13876 - protein, 21 aa, Artificial Sequence
  Quasi-synthetic sequence derived from human genome
FVSPTLFRVIRLARIGRVLRL

SEQ ID NO: 13877 - protein, 21 aa, Artificial Sequence
  Quasi-synthetic sequence derived from human genome
RRKMMFMGFIRLGVWYNFFRA

SEQ ID NO: 13878 - protein, 21 aa, Artificial Sequence
  Quasi-synthetic sequence derived from human genome
VIRHPRTFLSKILTSKFLRRW

SEQ ID NO: 13879 - protein, 21 aa, Artificial Sequence
  Quasi-synthetic sequence derived from human genome
FFWMLFKALLIIYGILVIFRR

SEQ ID NO: 13880 - protein, 21 aa, Artificial Sequence
  Quasi-synthetic sequence derived from human genome
LLYPLCHKRFQKAFLKIFCIK

SEQ ID NO: 13881 - protein, 21 aa, Artificial Sequence
  Quasi-synthetic sequence derived from human genome
LSITWLLLGALLWMWWRRNRR

SEQ ID NO: 13882 - protein, 21 aa, Artificial Sequence
  Quasi-synthetic sequence derived from human genome
LGICIVVVVSIWLFRRKSIKK

SEQ ID NO: 13883 - protein, 21 aa, Artificial Sequence
  Quasi-synthetic sequence derived from human genome
MKRRRRRDILRVQLVRIFELL

SEQ ID NO: 13884 - protein, 21 aa, Artificial Sequence
  Quasi-synthetic sequence derived from human genome
RRLGFSHRILFANFIKRYYLL

SEQ ID NO: 13885 - protein, 21 aa, Artificial Sequence
  Quasi-synthetic sequence derived from human genome
LLFVFVLRCMELKCGKKRMRK

SEQ ID NO: 13886 - protein, 21 aa, Artificial Sequence
  Quasi-synthetic sequence derived from human genome
LLYRVRRFDLLKRILKMDRKA

SEQ ID NO: 13887 - protein, 21 aa, Artificial Sequence
  Quasi-synthetic sequence derived from human genome
KLKRKYWWKNCKMWAIGITVL

SEQ ID NO: 13888 - protein, 21 aa, Artificial Sequence
  Quasi-synthetic sequence derived from human genome
FLGLGRFSRLVLWFAAFRKLL

SEQ ID NO: 13889 - protein, 21 aa, Artificial Sequence
  Quasi-synthetic sequence derived from human genome
RFRSAVRVSIAISRMKFLVRR

SEQ ID NO: 13890 - protein, 21 aa, Artificial Sequence
  Quasi-synthetic sequence derived from human genome
KRKSKKNIRKQRMKILFNVVL

SEQ ID NO: 13891 - protein, 21 aa, Artificial Sequence
  Quasi-synthetic sequence derived from human genome
WFVNPLKTFVFFIWRRYWRTL

SEQ ID NO: 13892 - protein, 21 aa, Artificial Sequence
  Quasi-synthetic sequence derived from human genome
LLLALIILIILFSLSQRKRHR

SEQ ID NO: 13893 - protein, 21 aa, Artificial Sequence
  Quasi-synthetic sequence derived from human genome
FLPLVVTLLVRYRHYFRLLVR

SEQ ID NO: 13894 - protein, 21 aa, Artificial Sequence
  Quasi-synthetic sequence derived from human genome
RICRPLLIVEKQKLLLKKRHI

SEQ ID NO: 13895 - protein, 21 aa, Artificial Sequence
  Quasi-synthetic sequence derived from human genome
ILFLFCLMVLVESRKPKRKRW

SEQ ID NO: 13896 - protein, 21 aa, Artificial Sequence
  Quasi-synthetic sequence derived from human genome
ILKPVQKLFAIIVGRGIRKWW

SEQ ID NO: 13897 - protein, 21 aa, Artificial Sequence
  Quasi-synthetic sequence derived from human genome
CSRVFFWWLNPLFKIGHKRRL

SEQ ID NO: 13898 - protein, 21 aa, Artificial Sequence
  Quasi-synthetic sequence derived from human genome
ILLKLAKFKIGFLRLGQIQKV

SEQ ID NO: 13899 - protein, 21 aa, Artificial Sequence
  Quasi-synthetic sequence derived from human genome
YRQIMKMRPKDLKKRLMVKFR

SEQ ID NO: 13900 - protein, 21 aa, Artificial Sequence
  Quasi-synthetic sequence derived from human genome
FFRRKLIDAVGFSPLRILRKR

SEQ ID NO: 13901 - protein, 21 aa, Artificial Sequence
  Quasi-synthetic sequence derived from human genome
RISKSKFSRYWRRWNRFCRRK

SEQ ID NO: 13902 - protein, 21 aa, Artificial Sequence
  Quasi-synthetic sequence derived from human genome
IVRYSFKKQWSLGFIPKLKRK

SEQ ID NO: 13903 - protein, 21 aa, Artificial Sequence
  Quasi-synthetic sequence derived from human genome
KLARHLFKIQKNLPKSRKVLL

SEQ ID NO: 13904 - protein, 21 aa, Artificial Sequence
  Quasi-synthetic sequence derived from human genome
MLHRLLGHIKNVPLILKRMKL

SEQ ID NO: 13905 - protein, 21 aa, Artificial Sequence
  Quasi-synthetic sequence derived from human genome
KRKQKRFLQMTLLFTVALIFL

SEQ ID NO: 13906 - protein, 21 aa, Artificial Sequence
  Quasi-synthetic sequence derived from human genome
RHPAWWFMSVKVKLKRKKRQK

SEQ ID NO: 13907 - protein, 21 aa, Artificial Sequence
  Quasi-synthetic sequence derived from human genome
CKPFLFLLKKKIPSPVKLAFI

SEQ ID NO: 13908 - protein, 21 aa, Artificial Sequence
  Quasi-synthetic sequence derived from human genome
RRRRRREYCKFALLLVLYTLV

SEQ ID NO: 13909 - protein, 21 aa, Artificial Sequence
  Quasi-synthetic sequence derived from human genome
LGEVRARLLRALRLVRRLRGL

SEQ ID NO: 13910 - protein, 21 aa, Artificial Sequence
  Quasi-synthetic sequence derived from human genome
CKKLKILGMPFRNIRSILKMV

SEQ ID NO: 13911 - protein, 21 aa, Artificial Sequence
  Quasi-synthetic sequence derived from human genome
RVLRLIRGAKGIRTLLFALMM

SEQ ID NO: 13912 - protein, 21 aa, Artificial Sequence
  Quasi-synthetic sequence derived from human genome
LLFQVIRLYQRRRWTIRAMHL

SEQ ID NO: 13913 - protein, 21 aa, Artificial Sequence
  Quasi-synthetic sequence derived from human genome
IAVLLALRFCGIYGYRLRRKW

SEQ ID NO: 13914 - protein, 21 aa, Artificial Sequence
  Quasi-synthetic sequence derived from human genome
FFVWLFVCPWMRRKITGKLQK

SEQ ID NO: 13915 - protein, 21 aa, Artificial Sequence
  Quasi-synthetic sequence derived from human genome
HIVRFWAKHRWGLPLRVLKPI

SEQ ID NO: 13916 - protein, 21 aa, Artificial Sequence
  Quasi-synthetic sequence derived from human genome
LINFFIFVRIVQLLVAKLRAR

SEQ ID NO: 13917 - protein, 21 aa, Artificial Sequence
  Quasi-synthetic sequence derived from human genome
KIRRGRTRPQALLFLCMILLL

SEQ ID NO: 13918 - protein, 21 aa, Artificial Sequence
  Quasi-synthetic sequence derived from human genome
FLKFNTIPPLRKYMLVFKGKR

SEQ ID NO: 13919 - protein, 21 aa, Artificial Sequence
  Quasi-synthetic sequence derived from human genome
IRLGIFLRRYPIARVFVIIYM

SEQ ID NO: 13920 - protein, 21 aa, Artificial Sequence
  Quasi-synthetic sequence derived from human genome
PLIKQKMWLKLGLAITARKIR

SEQ ID NO: 13921 - protein, 21 aa, Artificial Sequence
  Quasi-synthetic sequence derived from human genome
FAWPKILKISYKRSNFYIKIR

SEQ ID NO: 13922 - protein, 21 aa, Artificial Sequence
  Quasi-synthetic sequence derived from human genome
ISFIFRKRRKNSGLWSFYFFF

SEQ ID NO: 13923 - protein, 21 aa, Artificial Sequence
  Quasi-synthetic sequence derived from human genome
KILKILITFRISNYFKYVPLK

SEQ ID NO: 13924 - protein, 21 aa, Artificial Sequence
  Quasi-synthetic sequence derived from human genome
NVYKKHRILKIYHLFVSLLLK

SEQ ID NO: 13925 - protein, 21 aa, Artificial Sequence
  Quasi-synthetic sequence derived from human genome
KLARKMALRRAFTHWKHYMLL

SEQ ID NO: 13926 - protein, 21 aa, Artificial Sequence
  Quasi-synthetic sequence derived from human genome
KVRSRYSFIQALVRRIRGLLR

SEQ ID NO: 13927 - protein, 21 aa, Artificial Sequence
  Quasi-synthetic sequence derived from human genome
CLRKRIWEKIALRKKELFKVR

SEQ ID NO: 13928 - protein, 21 aa, Artificial Sequence
  Quasi-synthetic sequence derived from human genome
LMCKKMKHLWFFLLLVAAPRW

SEQ ID NO: 13929 - protein, 21 aa, Artificial Sequence
  Quasi-synthetic sequence derived from human genome
RKFFPKKKCFVFDRPVHRRKL

SEQ ID NO: 13930 - protein, 21 aa, Artificial Sequence
  Quasi-synthetic sequence derived from human genome
LCLSFMLLFSLWRQSCRRRKL

SEQ ID NO: 13931 - protein, 21 aa, Artificial Sequence
  Quasi-synthetic sequence derived from human genome
IRTIFKRLKSFICPKLHMGFK

SEQ ID NO: 13932 - protein, 21 aa, Artificial Sequence
  Quasi-synthetic sequence derived from human genome
ILYCRIYSLVRTRSRRLTFRK

SEQ ID NO: 13933 - protein, 21 aa, Artificial Sequence
  Quasi-synthetic sequence derived from human genome
RLPLLRRVLKGLQLLLSLLAF

SEQ ID NO: 13934 - protein, 21 aa, Artificial Sequence
  Quasi-synthetic sequence derived from human genome
KFRAKGRKPCKLMLQVVKILV

SEQ ID NO: 13935 - protein, 21 aa, Artificial Sequence
  Quasi-synthetic sequence derived from human genome
ARRLSIKMKKLPELRRRLSLR

SEQ ID NO: 13936 - protein, 21 aa, Artificial Sequence
  Quasi-synthetic sequence derived from human genome
FKFLQRLLLVHGRWSYLRMCK

SEQ ID NO: 13937 - protein, 21 aa, Artificial Sequence
  Quasi-synthetic sequence derived from human genome
FLILKVAVGTRLHRVPVKIKR

SEQ ID NO: 13938 - protein, 21 aa, Artificial Sequence
  Quasi-synthetic sequence derived from human genome
RLWMWSWKHIRKHRQKVKQYK

SEQ ID NO: 13939 - protein, 21 aa, Artificial Sequence
  Quasi-synthetic sequence derived from human genome
LYPKVAKIRLNLGKKRKMVKV

SEQ ID NO: 13940 - protein, 21 aa, Artificial Sequence
  Quasi-synthetic sequence derived from human genome
RHYHKKFWKLGAVIFFFIIVL

SEQ ID NO: 13941 - protein, 21 aa, Artificial Sequence
  Quasi-synthetic sequence derived from human genome
LLPLVAFLLFCLHVLFKKRTK

SEQ ID NO: 13942 - protein, 21 aa, Artificial Sequence
  Quasi-synthetic sequence derived from human genome
VLFLIFLLWKLPSARAKIRIT

SEQ ID NO: 13943 - protein, 21 aa, Artificial Sequence
  Quasi-synthetic sequence derived from human genome
FVRKIIFKNPFILIQSTKRVK

SEQ ID NO: 13944 - protein, 21 aa, Artificial Sequence
  Quasi-synthetic sequence derived from human genome
YIIAVLGLMFYCKKRCKAKRL

SEQ ID NO: 13945 - protein, 21 aa, Artificial Sequence
  Quasi-synthetic sequence derived from human genome
LIKPRLRSLAPRKLVIISKGL

SEQ ID NO: 13946 - protein, 21 aa, Artificial Sequence
  Quasi-synthetic sequence derived from human genome
RRYFKRVVLAARTKRGHLVLK

SEQ ID NO: 13947 - protein, 21 aa, Artificial Sequence
  Quasi-synthetic sequence derived from human genome
KKKKPLKLGPIKKKDLKKLVL

SEQ ID NO: 13948 - protein, 21 aa, Artificial Sequence
  Quasi-synthetic sequence derived from human genome
RLILFLFCLMVLVESRKPKRK

SEQ ID NO: 13949 - protein, 21 aa, Artificial Sequence
  Quasi-synthetic sequence derived from human genome
WRRYWRTLVLLLLVLLTVFLL

SEQ ID NO: 13950 - protein, 21 aa, Artificial Sequence
  Quasi-synthetic sequence derived from human genome
KVSSFTHHIFLWLRWRILRLF

SEQ ID NO: 13951 - protein, 21 aa, Artificial Sequence
  Quasi-synthetic sequence derived from human genome
VRLLCKRLSHPGCKLRVLWLF

SEQ ID NO: 13952 - protein, 21 aa, Artificial Sequence
  Quasi-synthetic sequence derived from human genome
FIALIIAGFVLYLYKHRRRPK

SEQ ID NO: 13953 - protein, 21 aa, Artificial Sequence
  Quasi-synthetic sequence derived from human genome
RTMPQKRLKRTLIRKVFNLYL

SEQ ID NO: 13954 - protein, 21 aa, Artificial Sequence
  Quasi-synthetic sequence derived from human genome
KVRRQRPRRRVCWALVAVLLA

SEQ ID NO: 13955 - protein, 21 aa, Artificial Sequence
  Quasi-synthetic sequence derived from human genome
PVPKLCRIKASKALKKKIRRF

SEQ ID NO: 13956 - protein, 21 aa, Artificial Sequence
  Quasi-synthetic sequence derived from human genome
KLKKWIKILEAKTKQLPKFFL

SEQ ID NO: 13957 - protein, 21 aa, Artificial Sequence
  Quasi-synthetic sequence derived from human genome
IRKINKMKTLKRKKLLNQILS

SEQ ID NO: 13958 - protein, 21 aa, Artificial Sequence
  Quasi-synthetic sequence derived from human genome
RLWPCGRRRRHRARRALRRVR

SEQ ID NO: 13959 - protein, 21 aa, Artificial Sequence
  Quasi-synthetic sequence derived from human genome
RIAYMLVVHGRAIRQLKRLLK

SEQ ID NO: 13960 - protein, 21 aa, Artificial Sequence
  Quasi-synthetic sequence derived from human genome
KYRARRQIPWKLGLQILKIVM

SEQ ID NO: 13961 - protein, 21 aa, Artificial Sequence
  Quasi-synthetic sequence derived from human genome
RRRLNRGLRRKQHSLLKRLRK

SEQ ID NO: 13962 - protein, 21 aa, Artificial Sequence
  Quasi-synthetic sequence derived from human genome
RFRKFPFFTRPLLSKWCPKSL

SEQ ID NO: 13963 - protein, 21 aa, Artificial Sequence
  Quasi-synthetic sequence derived from human genome
LLRALRVLYVMRLARHSLGLR

SEQ ID NO: 13964 - protein, 21 aa, Artificial Sequence
  Quasi-synthetic sequence derived from human genome
YLLKIANFSNLIFLHLKRRVK

SEQ ID NO: 13965 - protein, 21 aa, Artificial Sequence
  Quasi-synthetic sequence derived from human genome
PKRKRITGRKRLSKGFWSLLF

SEQ ID NO: 13966 - protein, 21 aa, Artificial Sequence
  Quasi-synthetic sequence derived from human genome
RRMRFYIRRMVKTQAFYWTVL

SEQ ID NO: 13967 - protein, 21 aa, Artificial Sequence
  Quasi-synthetic sequence derived from human genome
ATLLLFILLLVTVLLAARRRR

SEQ ID NO: 13968 - protein, 21 aa, Artificial Sequence
  Quasi-synthetic sequence derived from human genome
RNFRKWIFYVFLCFGVLYVKL

SEQ ID NO: 13969 - protein, 21 aa, Artificial Sequence
  Quasi-synthetic sequence derived from human genome
RFLGVLYPLSSKRWRRRRYAV

SEQ ID NO: 13970 - protein, 21 aa, Artificial Sequence
  Quasi-synthetic sequence derived from human genome
GRRLYYKLGRKLCRRDYLRLF

SEQ ID NO: 13971 - protein, 21 aa, Artificial Sequence
  Quasi-synthetic sequence derived from human genome
FLRFKKGKRCSLVFGLIIMTL

SEQ ID NO: 13972 - protein, 21 aa, Artificial Sequence
  Quasi-synthetic sequence derived from human genome
LLKIVNFSRLIFHHLKRKAKS

SEQ ID NO: 13973 - protein, 21 aa, Artificial Sequence
  Quasi-synthetic sequence derived from human genome
FLLRPRSHKSRVKGFLRLKMA

SEQ ID NO: 13974 - protein, 21 aa, Artificial Sequence
  Quasi-synthetic sequence derived from human genome
ILAIRSILLVIPFPFTLRRLK

SEQ ID NO: 13975 - protein, 21 aa, Artificial Sequence
  Quasi-synthetic sequence derived from human genome
LLLLLPPRLLARPSLLLRRSL

SEQ ID NO: 13976 - protein, 21 aa, Artificial Sequence
  Quasi-synthetic sequence derived from human genome
RRPAGSRLRLLLLLLLPPLLL

SEQ ID NO: 13977 - protein, 21 aa, Artificial Sequence
  Quasi-synthetic sequence derived from human genome
RIFINVSRFFCVQLKKMVRLM

SEQ ID NO: 13978 - protein, 21 aa, Artificial Sequence
  Quasi-synthetic sequence derived from human genome
IVLWGIRLLLQRKKKLVSTSK

SEQ ID NO: 13979 - protein, 21 aa, Artificial Sequence
  Quasi-synthetic sequence derived from human genome
PRRQLYLPMLFKVRLLMVSRM

SEQ ID NO: 13980 - protein, 21 aa, Artificial Sequence
  Quasi-synthetic sequence derived from human genome
FRALRFLFSMERNRPLFKRLF

SEQ ID NO: 13981 - protein, 21 aa, Artificial Sequence
  Quasi-synthetic sequence derived from human genome
KIILALKVSRKNLLNVCKLIF

SEQ ID NO: 13982 - protein, 21 aa, Artificial Sequence
  Quasi-synthetic sequence derived from human genome
FNAVKNWSWMKLFFKMKPLLR

SEQ ID NO: 13983 - protein, 21 aa, Artificial Sequence
  Quasi-synthetic sequence derived from human genome
FILFLTLWLLSLLKLLNVRRL

SEQ ID NO: 13984 - protein, 21 aa, Artificial Sequence
  Quasi-synthetic sequence derived from human genome
ILIYKNRVRMNTFPWLKIVKI

SEQ ID NO: 13985 - protein, 21 aa, Artificial Sequence
  Quasi-synthetic sequence derived from human genome
CIKMQKTIRMWLCKRRHKPRI

SEQ ID NO: 13986 - protein, 21 aa, Artificial Sequence
  Quasi-synthetic sequence derived from human genome
WRRRSCWRKWKQLSRLQRNMI

SEQ ID NO: 13987 - protein, 21 aa, Artificial Sequence
  Quasi-synthetic sequence derived from human genome
RRRIKLLGILMMANVFIYFIM

SEQ ID NO: 13988 - protein, 21 aa, Artificial Sequence
  Quasi-synthetic sequence derived from human genome
FRVLLVKIRSGRRSVRMYNKI

SEQ ID NO: 13989 - protein, 21 aa, Artificial Sequence
  Quasi-synthetic sequence derived from human genome
ILLVLMAVVLASLIYRRRLMK

SEQ ID NO: 13990 - protein, 21 aa, Artificial Sequence
  Quasi-synthetic sequence derived from human genome
RRLKRKLIVRQAKRDRGLPLF

SEQ ID NO: 13991 - protein, 21 aa, Artificial Sequence
  Quasi-synthetic sequence derived from human genome
RKFIKKRIIIISNYSKRNSLL

SEQ ID NO: 13992 - protein, 21 aa, Artificial Sequence
  Quasi-synthetic sequence derived from human genome
LQKKFNKLKKKKKALLALKKQ

SEQ ID NO: 13993 - protein, 21 aa, Artificial Sequence
  Quasi-synthetic sequence derived from human genome
PVKYLLSATKLRQFVILRKKK

SEQ ID NO: 13994 - protein, 21 aa, Artificial Sequence
  Quasi-synthetic sequence derived from human genome
KSRLRRTMLVAKVTCIIIWLL

SEQ ID NO: 13995 - protein, 21 aa, Artificial Sequence
  Quasi-synthetic sequence derived from human genome
IPLRYIILIWGINKFTKKLRN

SEQ ID NO: 13996 - protein, 21 aa, Artificial Sequence
  Quasi-synthetic sequence derived from human genome
RLWGALRLGAVILRWRYHALR

SEQ ID NO: 13997 - protein, 21 aa, Artificial Sequence
  Quasi-synthetic sequence derived from human genome
FWGKKPWSRKKKILWQLGTLI

SEQ ID NO: 13998 - protein, 21 aa, Artificial Sequence
  Quasi-synthetic sequence derived from human genome
WRKRCLYFFVLLLMILILVNL

SEQ ID NO: 13999 - protein, 21 aa, Artificial Sequence
  Quasi-synthetic sequence derived from human genome
KIRLNNAIWRAWYIQYVKRRK

SEQ ID NO: 14000 - protein, 21 aa, Artificial Sequence
  Quasi-synthetic sequence derived from human genome
LKRSLILSSRHGIRRKLIKQL

SEQ ID NO: 14001 - protein, 22 aa, Artificial Sequence
  Quasi-synthetic sequence derived from human genome
WRFRLLCLLRRWLPRPRAWFIR

SEQ ID NO: 14002 - protein, 22 aa, Artificial Sequence
  Quasi-synthetic sequence derived from human genome
VLALLFLLLVLLLLVRKKRKIK

SEQ ID NO: 14003 - protein, 22 aa, Artificial Sequence
  Quasi-synthetic sequence derived from human genome
KRFLLLFTFLKKNRKKKLMVFF

SEQ ID NO: 14004 - protein, 22 aa, Artificial Sequence
  Quasi-synthetic sequence derived from human genome
KRKKKKKFCYLCILLLIVLFIL

SEQ ID NO: 14005 - protein, 22 aa, Artificial Sequence
  Quasi-synthetic sequence derived from human genome
TILIIRRLHKVLRPFLLRRLKK

SEQ ID NO: 14006 - protein, 22 aa, Artificial Sequence
  Quasi-synthetic sequence derived from human genome
IFLLIIIFLTVLLLKLRKRHRK

SEQ ID NO: 14007 - protein, 22 aa, Artificial Sequence
  Quasi-synthetic sequence derived from human genome
RPPLLLRPVKLLRRRFRLLLAL

SEQ ID NO: 14008 - protein, 22 aa, Artificial Sequence
  Quasi-synthetic sequence derived from human genome
RIVRFTKILSLLRLLRLSRLIR

SEQ ID NO: 14009 - protein, 22 aa, Artificial Sequence
  Quasi-synthetic sequence derived from human genome
FILLLLVVILIVKKSKLAKKRK

SEQ ID NO: 14010 - protein, 22 aa, Artificial Sequence
  Quasi-synthetic sequence derived from human genome
SRALSRRYLRRLLLLLLLLLLR

SEQ ID NO: 14011 - protein, 22 aa, Artificial Sequence
  Quasi-synthetic sequence derived from human genome
ARWRRLRLQQLRRLRGLLRVLR

SEQ ID NO: 14012 - protein, 22 aa, Artificial Sequence
  Quasi-synthetic sequence derived from human genome
LLFVLLLVVRRRRREQRLKRLR

SEQ ID NO: 14013 - protein, 22 aa, Artificial Sequence
  Quasi-synthetic sequence derived from human genome
FIVTLLVYIKIYIVLRRRRKRV

SEQ ID NO: 14014 - protein, 22 aa, Artificial Sequence
  Quasi-synthetic sequence derived from human genome
RFLLKRGLRNKRIGHFLFWFLR

SEQ ID NO: 14015 - protein, 22 aa, Artificial Sequence
  Quasi-synthetic sequence derived from human genome
FLRLLRCQCRRRRRRRPLWRVY

SEQ ID NO: 14016 - protein, 22 aa, Artificial Sequence
  Quasi-synthetic sequence derived from human genome
VLFVIFILVVLFIVFRKKVFRK

SEQ ID NO: 14017 - protein, 22 aa, Artificial Sequence
  Quasi-synthetic sequence derived from human genome
ILILLIKKLIIFILKKTREKKK

SEQ ID NO: 14018 - protein, 22 aa, Artificial Sequence
  Quasi-synthetic sequence derived from human genome
KYFYFFKILLRLRLAILKYLFI

SEQ ID NO: 14019 - protein, 22 aa, Artificial Sequence
  Quasi-synthetic sequence derived from human genome
FLLLFMKLRWFLKRWRQGKVLP

SEQ ID NO: 14020 - protein, 22 aa, Artificial Sequence
  Quasi-synthetic sequence derived from human genome
VLILKTIRRRLPFSKWRLAFRF

SEQ ID NO: 14021 - protein, 22 aa, Artificial Sequence
  Quasi-synthetic sequence derived from human genome
QLVALLLVVLWIRWKCRRLRIR

SEQ ID NO: 14022 - protein, 22 aa, Artificial Sequence
  Quasi-synthetic sequence derived from human genome
FVIIFLGVVLVMKKRKLAKKRK

SEQ ID NO: 14023 - protein, 22 aa, Artificial Sequence
  Quasi-synthetic sequence derived from human genome
KLLKRLRLLPALLILRAFKPHR

SEQ ID NO: 14024 - protein, 22 aa, Artificial Sequence
  Quasi-synthetic sequence derived from human genome
VRVLLRFQRKLSVLLLLLGRRR

SEQ ID NO: 14025 - protein, 22 aa, Artificial Sequence
  Quasi-synthetic sequence derived from human genome
WLRRKLRGKRRPVIAFCLLMIL

SEQ ID NO: 14026 - protein, 22 aa, Artificial Sequence
  Quasi-synthetic sequence derived from human genome
RFRTAVRVVIAILRLRFLVKKW

SEQ ID NO: 14027 - protein, 22 aa, Artificial Sequence
  Quasi-synthetic sequence derived from human genome
MKFFRWVRRAWQRIISWVFFWR

SEQ ID NO: 14028 - protein, 22 aa, Artificial Sequence
  Quasi-synthetic sequence derived from human genome
AFNWAKVRKLSFKRKRFLIKLR

SEQ ID NO: 14029 - protein, 22 aa, Artificial Sequence
  Quasi-synthetic sequence derived from human genome
LLRLLGLRRGLRRLRRLWAGPR

SEQ ID NO: 14030 - protein, 22 aa, Artificial Sequence
  Quasi-synthetic sequence derived from human genome
TLLLFLLFFLFRLLLRFLRLCR

SEQ ID NO: 14031 - protein, 22 aa, Artificial Sequence
  Quasi-synthetic sequence derived from human genome
RRRGFGLFFFLRLHRLLLLFLV

SEQ ID NO: 14032 - protein, 22 aa, Artificial Sequence
  Quasi-synthetic sequence derived from human genome
VVLIFKSILFLPCLRKKILKIR

SEQ ID NO: 14033 - protein, 22 aa, Artificial Sequence
  Quasi-synthetic sequence derived from human genome
KGFLLKKRKWPLKGWHKRFFYL

SEQ ID NO: 14034 - protein, 22 aa, Artificial Sequence
  Quasi-synthetic sequence derived from human genome
VRRVVQIFRIMRILRILKLARH

SEQ ID NO: 14035 - protein, 22 aa, Artificial Sequence
  Quasi-synthetic sequence derived from human genome
FTRRKYLLKALFKALKRLKSLR

SEQ ID NO: 14036 - protein, 22 aa, Artificial Sequence
  Quasi-synthetic sequence derived from human genome
KRALGRRKGVWLRLRKILFCVL

SEQ ID NO: 14037 - protein, 22 aa, Artificial Sequence
  Quasi-synthetic sequence derived from human genome
FKRKKRIKRRALLFLSYILTHF

SEQ ID NO: 14038 - protein, 22 aa, Artificial Sequence
  Quasi-synthetic sequence derived from human genome
LKLFRPKKLLPKAFKQYWFIFK

SEQ ID NO: 14039 - protein, 22 aa, Artificial Sequence
  Quasi-synthetic sequence derived from human genome
LLFLLFFLTLRFSVVKRGRKKL

SEQ ID NO: 14040 - protein, 22 aa, Artificial Sequence
  Quasi-synthetic sequence derived from human genome
KRWTHLVRLLRLIILIRIFHLL

SEQ ID NO: 14041 - protein, 22 aa, Artificial Sequence
  Quasi-synthetic sequence derived from human genome
LKIKRLRKKFAQKMLRKARRKL

SEQ ID NO: 14042 - protein, 22 aa, Artificial Sequence
  Quasi-synthetic sequence derived from human genome
MPRLPVKKIRKQMKLLLLLLLL

SEQ ID NO: 14043 - protein, 22 aa, Artificial Sequence
  Quasi-synthetic sequence derived from human genome
ILIFLLLAVLLWKMGFFRRRYK

SEQ ID NO: 14044 - protein, 22 aa, Artificial Sequence
  Quasi-synthetic sequence derived from human genome
RFFRFLLRKLYVFRRSFLMTCI

SEQ ID NO: 14045 - protein, 22 aa, Artificial Sequence
  Quasi-synthetic sequence derived from human genome
RVVRFVRILRIFKLTRHFVGLR

SEQ ID NO: 14046 - protein, 22 aa, Artificial Sequence
  Quasi-synthetic sequence derived from human genome
RWRCRRLRAIYTIMRWFRRHKV

SEQ ID NO: 14047 - protein, 22 aa, Artificial Sequence
  Quasi-synthetic sequence derived from human genome
YVFMIRKFRRSLLQLLCLRLLR

SEQ ID NO: 14048 - protein, 22 aa, Artificial Sequence
  Quasi-synthetic sequence derived from human genome
APVRAVLRLRRRVCVLRKRRLL

SEQ ID NO: 14049 - protein, 22 aa, Artificial Sequence
  Quasi-synthetic sequence derived from human genome
RLLRVLKLVRFLPALRRQLVVL

SEQ ID NO: 14050 - protein, 22 aa, Artificial Sequence
  Quasi-synthetic sequence derived from human genome
VCGISRIWVFRLKRRKRIARRL

SEQ ID NO: 14051 - protein, 22 aa, Artificial Sequence
  Quasi-synthetic sequence derived from human genome
RILINLMKYLQKWKRYRPLWKL

SEQ ID NO: 14052 - protein, 22 aa, Artificial Sequence
  Quasi-synthetic sequence derived from human genome
LKVFKSLRALRAIRVLRRLSFL

SEQ ID NO: 14053 - protein, 22 aa, Artificial Sequence
  Quasi-synthetic sequence derived from human genome
LLRKRYRHRPCRLQFLLLLLML

SEQ ID NO: 14054 - protein, 22 aa, Artificial Sequence
  Quasi-synthetic sequence derived from human genome
VRFTKILSLLRLLRLSRLIRYI

SEQ ID NO: 14055 - protein, 22 aa, Artificial Sequence
  Quasi-synthetic sequence derived from human genome
LGIGLFMRRRHIVRKRTLRRLL

SEQ ID NO: 14056 - protein, 22 aa, Artificial Sequence
  Quasi-synthetic sequence derived from human genome
LRKRIHRPRRRTTRRWKRWFKF

SEQ ID NO: 14057 - protein, 22 aa, Artificial Sequence
  Quasi-synthetic sequence derived from human genome
YFALRRKKKKTIKMLMLVVVLF

SEQ ID NO: 14058 - protein, 22 aa, Artificial Sequence
  Quasi-synthetic sequence derived from human genome
RKAIQRRKWAVRIIRKFIKGFI

SEQ ID NO: 14059 - protein, 22 aa, Artificial Sequence
  Quasi-synthetic sequence derived from human genome
AKLWFKFQRYFRRKPVRFFTFL

SEQ ID NO: 14060 - protein, 22 aa, Artificial Sequence
  Quasi-synthetic sequence derived from human genome
KRMRVKKLPMILALHLKRFKYM

SEQ ID NO: 14061 - protein, 22 aa, Artificial Sequence
  Quasi-synthetic sequence derived from human genome
KFIVWRRFKWVIIGLLFLLILL

SEQ ID NO: 14062 - protein, 22 aa, Artificial Sequence
  Quasi-synthetic sequence derived from human genome
MRRHFRMKLRNLFTKFIRKFGF

SEQ ID NO: 14063 - protein, 22 aa, Artificial Sequence
  Quasi-synthetic sequence derived from human genome
IKSLRVLRVLRPLKTIKRLPKL

SEQ ID NO: 14064 - protein, 22 aa, Artificial Sequence
  Quasi-synthetic sequence derived from human genome
KFMVLLWKNFILKRRRCIALVV

SEQ ID NO: 14065 - protein, 22 aa, Artificial Sequence
  Quasi-synthetic sequence derived from human genome
HVRIRVIKKKKVIMKKRKKLTL

SEQ ID NO: 14066 - protein, 22 aa, Artificial Sequence
  Quasi-synthetic sequence derived from human genome
HLLRLLRLIILLRIFHLFHQKR

SEQ ID NO: 14067 - protein, 22 aa, Artificial Sequence
  Quasi-synthetic sequence derived from human genome
VILGKIILFLPCISRKLKRIKK

SEQ ID NO: 14068 - protein, 22 aa, Artificial Sequence
  Quasi-synthetic sequence derived from human genome
RIMKRHLRLIHPTKLYKLMLRR

SEQ ID NO: 14069 - protein, 22 aa, Artificial Sequence
  Quasi-synthetic sequence derived from human genome
LLRNIPRWTHLLRLLRLIILLR

SEQ ID NO: 14070 - protein, 22 aa, Artificial Sequence
  Quasi-synthetic sequence derived from human genome
RLKKWKGVRWKRLRLLLTIQKG

SEQ ID NO: 14071 - protein, 22 aa, Artificial Sequence
  Quasi-synthetic sequence derived from human genome
LLSILCLVMILYTRRRWCKRRR

SEQ ID NO: 14072 - protein, 22 aa, Artificial Sequence
  Quasi-synthetic sequence derived from human genome
RLLRVLKLVRFMPALRRQLVVL

SEQ ID NO: 14073 - protein, 22 aa, Artificial Sequence
  Quasi-synthetic sequence derived from human genome
KRLFVIRPSRFYDRRFLKLLRF

SEQ ID NO: 14074 - protein, 22 aa, Artificial Sequence
  Quasi-synthetic sequence derived from human genome
IRNIGIWFFWIRLYKIRRGRTR

SEQ ID NO: 14075 - protein, 22 aa, Artificial Sequence
  Quasi-synthetic sequence derived from human genome
LMLLPFLLRQHKVWRKCRMRIF

SEQ ID NO: 14076 - protein, 22 aa, Artificial Sequence
  Quasi-synthetic sequence derived from human genome
ALLAVIVLVALLLLWRRRQKRR

SEQ ID NO: 14077 - protein, 22 aa, Artificial Sequence
  Quasi-synthetic sequence derived from human genome
FFIAFFLRKFKNSRFFPGRIRR

SEQ ID NO: 14078 - protein, 22 aa, Artificial Sequence
  Quasi-synthetic sequence derived from human genome
PYKTMKFILWRRFRWAIILFII

SEQ ID NO: 14079 - protein, 22 aa, Artificial Sequence
  Quasi-synthetic sequence derived from human genome
RLLRGLWQRWRRYKYRFVPWIA

SEQ ID NO: 14080 - protein, 22 aa, Artificial Sequence
  Quasi-synthetic sequence derived from human genome
MSLAILRVIRLVRVFRIFKLSR

SEQ ID NO: 14081 - protein, 22 aa, Artificial Sequence
  Quasi-synthetic sequence derived from human genome
LKVLFKKTHRILRRLFNLCKRC

SEQ ID NO: 14082 - protein, 22 aa, Artificial Sequence
  Quasi-synthetic sequence derived from human genome
RKQLMIYRLPQVLRLHLKRFRW

SEQ ID NO: 14083 - protein, 22 aa, Artificial Sequence
  Quasi-synthetic sequence derived from human genome
RIMRVLRIARVLKLLKMAVGMR

SEQ ID NO: 14084 - protein, 22 aa, Artificial Sequence
  Quasi-synthetic sequence derived from human genome
LLLRFLRLCRSFYITCRRLRCF

SEQ ID NO: 14085 - protein, 22 aa, Artificial Sequence
  Quasi-synthetic sequence derived from human genome
IFIITKFCLFCFRKLAKKGKKK

SEQ ID NO: 14086 - protein, 22 aa, Artificial Sequence
  Quasi-synthetic sequence derived from human genome
RFRKYLRQLFHRRVAVHLVKWL

SEQ ID NO: 14087 - protein, 22 aa, Artificial Sequence
  Quasi-synthetic sequence derived from human genome
FVLLLFLLLFLLLRRQRHSKHR

SEQ ID NO: 14088 - protein, 22 aa, Artificial Sequence
  Quasi-synthetic sequence derived from human genome
FLLRRRFLHLKKAAIVFQKQLR

SEQ ID NO: 14089 - protein, 22 aa, Artificial Sequence
  Quasi-synthetic sequence derived from human genome
IVLFCLFIFVLIYVRVFRKSRR

SEQ ID NO: 14090 - protein, 22 aa, Artificial Sequence
  Quasi-synthetic sequence derived from human genome
PLLLMLVLYGRIFRAARFRIRK

SEQ ID NO: 14091 - protein, 22 aa, Artificial Sequence
  Quasi-synthetic sequence derived from human genome
LFRQCRRRLIPHPRRLWPFVRR

SEQ ID NO: 14092 - protein, 22 aa, Artificial Sequence
  Quasi-synthetic sequence derived from human genome
ARLRFLKLKRQTKVLLTLLLVF

SEQ ID NO: 14093 - protein, 22 aa, Artificial Sequence
  Quasi-synthetic sequence derived from human genome
AILRVIRLVRVFRIFKLSRHSK

SEQ ID NO: 14094 - protein, 22 aa, Artificial Sequence
  Quasi-synthetic sequence derived from human genome
GLIILLIFRLIWRSVKKWQIIK

SEQ ID NO: 14095 - protein, 22 aa, Artificial Sequence
  Quasi-synthetic sequence derived from human genome
HLVRLLRLIILIRIFHLLHQKR

SEQ ID NO: 14096 - protein, 22 aa, Artificial Sequence
  Quasi-synthetic sequence derived from human genome
LYRAPYFWIKRRILLLIPKWLY

SEQ ID NO: 14097 - protein, 22 aa, Artificial Sequence
  Quasi-synthetic sequence derived from human genome
RFVKWPRYIRLQRQRAILYKRL

SEQ ID NO: 14098 - protein, 22 aa, Artificial Sequence
  Quasi-synthetic sequence derived from human genome
LLIPYLLGRKRRWSKCKIRVFV

SEQ ID NO: 14099 - protein, 22 aa, Artificial Sequence
  Quasi-synthetic sequence derived from human genome
RILKNLVFRILKKCYRGRFQLI

SEQ ID NO: 14100 - protein, 22 aa, Artificial Sequence
  Quasi-synthetic sequence derived from human genome
RYSLQKLRLVRWLLKKVFQCRR

SEQ ID NO: 14101 - protein, 22 aa, Artificial Sequence
  Quasi-synthetic sequence derived from human genome
LLRNIPRWTHLVRLLRLIILIR

SEQ ID NO: 14102 - protein, 22 aa, Artificial Sequence
  Quasi-synthetic sequence derived from human genome
RWLLRTKRLHWSRLLFLLGMLI

SEQ ID NO: 14103 - protein, 22 aa, Artificial Sequence
  Quasi-synthetic sequence derived from human genome
LVLLALAAWASRWLRRKLRARR

SEQ ID NO: 14104 - protein, 22 aa, Artificial Sequence
  Quasi-synthetic sequence derived from human genome
NRVFLQRLLWLLRLLFPRVLCR

SEQ ID NO: 14105 - protein, 22 aa, Artificial Sequence
  Quasi-synthetic sequence derived from human genome
LIRIRKLTLKRQRKLVPLSKKV

SEQ ID NO: 14106 - protein, 22 aa, Artificial Sequence
  Quasi-synthetic sequence derived from human genome
LLLKKIMAILIKRFHHTRRNWK

SEQ ID NO: 14107 - protein, 22 aa, Artificial Sequence
  Quasi-synthetic sequence derived from human genome
IFRKVKRRSLRLYARWQSRWRK

SEQ ID NO: 14108 - protein, 22 aa, Artificial Sequence
  Quasi-synthetic sequence derived from human genome
LRVLRMMRIFWVIKLARHFIGL

SEQ ID NO: 14109 - protein, 22 aa, Artificial Sequence
  Quasi-synthetic sequence derived from human genome
RSLKQNIFLFYVKLRWLLKHWR

SEQ ID NO: 14110 - protein, 22 aa, Artificial Sequence
  Quasi-synthetic sequence derived from human genome
KKKKKKRQCFAFLIYFRLGIKM

SEQ ID NO: 14111 - protein, 22 aa, Artificial Sequence
  Quasi-synthetic sequence derived from human genome
LRKILLRKFCQMRKRRLREQFW

SEQ ID NO: 14112 - protein, 22 aa, Artificial Sequence
  Quasi-synthetic sequence derived from human genome
LLTLLLIAFIFLIIKSYRKYRR

SEQ ID NO: 14113 - protein, 22 aa, Artificial Sequence
  Quasi-synthetic sequence derived from human genome
AHLKRLVKLHIKRHYHKKFWKL

SEQ ID NO: 14114 - protein, 22 aa, Artificial Sequence
  Quasi-synthetic sequence derived from human genome
RCIKKFSIQRFPKILVLHLKRF

SEQ ID NO: 14115 - protein, 22 aa, Artificial Sequence
  Quasi-synthetic sequence derived from human genome
LTFAVYVRRKSIKKKRALRRFL

SEQ ID NO: 14116 - protein, 22 aa, Artificial Sequence
  Quasi-synthetic sequence derived from human genome
LCVPWMLLFKPLVLRRQYLRRK

SEQ ID NO: 14117 - protein, 22 aa, Artificial Sequence
  Quasi-synthetic sequence derived from human genome
LFRIVRLARIGRILRLVRAARG

SEQ ID NO: 14118 - protein, 22 aa, Artificial Sequence
  Quasi-synthetic sequence derived from human genome
LMRRPPVPPPPRRRRRRRLLFW

SEQ ID NO: 14119 - protein, 22 aa, Artificial Sequence
  Quasi-synthetic sequence derived from human genome
TLFRVIRLARIGRILRLIRGAK

SEQ ID NO: 14120 - protein, 22 aa, Artificial Sequence
  Quasi-synthetic sequence derived from human genome
FFWCLAFLWGLLILLKYRWRKL

SEQ ID NO: 14121 - protein, 22 aa, Artificial Sequence
  Quasi-synthetic sequence derived from human genome
AVKTVIRSIRILKFLVAKRKFK

SEQ ID NO: 14122 - protein, 22 aa, Artificial Sequence
  Quasi-synthetic sequence derived from human genome
VLRRIILLQRWFRVLLCRQHFL

SEQ ID NO: 14123 - protein, 22 aa, Artificial Sequence
  Quasi-synthetic sequence derived from human genome
IMKKKKKVLVWNRVYKVISRML

SEQ ID NO: 14124 - protein, 22 aa, Artificial Sequence
  Quasi-synthetic sequence derived from human genome
IVFIKVVQFFRILRIFKLIAPK

SEQ ID NO: 14125 - protein, 22 aa, Artificial Sequence
  Quasi-synthetic sequence derived from human genome
RKKGLRIKGKRRRKKLILAKKF

SEQ ID NO: 14126 - protein, 22 aa, Artificial Sequence
  Quasi-synthetic sequence derived from human genome
FLFLRRRCFLLTFYLWFLFFSR

SEQ ID NO: 14127 - protein, 22 aa, Artificial Sequence
  Quasi-synthetic sequence derived from human genome
KVGLVLRVLRALRILYVMRLAR

SEQ ID NO: 14128 - protein, 22 aa, Artificial Sequence
  Quasi-synthetic sequence derived from human genome
ILFIIVQLFIMKLRKAHVIWKK

SEQ ID NO: 14129 - protein, 22 aa, Artificial Sequence
  Quasi-synthetic sequence derived from human genome
LCNRTFRKTFKMLLLCRWKKKK

SEQ ID NO: 14130 - protein, 22 aa, Artificial Sequence
  Quasi-synthetic sequence derived from human genome
FRRFNIRLIHPVQFVFLRKRYL

SEQ ID NO: 14131 - protein, 22 aa, Artificial Sequence
  Quasi-synthetic sequence derived from human genome
RRKGVWLRLRKILFCVLGLYIA

SEQ ID NO: 14132 - protein, 22 aa, Artificial Sequence
  Quasi-synthetic sequence derived from human genome
WRRLLRKRWVLALVFGLSLVYF

SEQ ID NO: 14133 - protein, 22 aa, Artificial Sequence
  Quasi-synthetic sequence derived from human genome
WRFYLSFRKLMRWILILVIALW

SEQ ID NO: 14134 - protein, 22 aa, Artificial Sequence
  Quasi-synthetic sequence derived from human genome
FPRSPRIRKRFLLRRILEMLFF

SEQ ID NO: 14135 - protein, 22 aa, Artificial Sequence
  Quasi-synthetic sequence derived from human genome
VLRTFRLMRVLKLVRFLPALQR

SEQ ID NO: 14136 - protein, 22 aa, Artificial Sequence
  Quasi-synthetic sequence derived from human genome
RFLRLHCGLWVRRKAGYKKKLW

SEQ ID NO: 14137 - protein, 22 aa, Artificial Sequence
  Quasi-synthetic sequence derived from human genome
LLLILKAGRRWNKYFKSRRPLF

SEQ ID NO: 14138 - protein, 22 aa, Artificial Sequence
  Quasi-synthetic sequence derived from human genome
IFGRKSYPMLKLVRLKLWFPRF

SEQ ID NO: 14139 - protein, 22 aa, Artificial Sequence
  Quasi-synthetic sequence derived from human genome
KRFKVMKIKVLRSWCRQILKGL

SEQ ID NO: 14140 - protein, 22 aa, Artificial Sequence
  Quasi-synthetic sequence derived from human genome
RCKRGKRHWKKLWFVIKGKVLY

SEQ ID NO: 14141 - protein, 22 aa, Artificial Sequence
  Quasi-synthetic sequence derived from human genome
LLLLLLLLYKYKQKPKYQVRWK

SEQ ID NO: 14142 - protein, 22 aa, Artificial Sequence
  Quasi-synthetic sequence derived from human genome
LKLILKRYKIGASRKTFWKRKK

SEQ ID NO: 14143 - protein, 22 aa, Artificial Sequence
  Quasi-synthetic sequence derived from human genome
LLCILTITVITLLIFLRRRLRK

SEQ ID NO: 14144 - protein, 22 aa, Artificial Sequence
  Quasi-synthetic sequence derived from human genome
LRKILLRKFCQMRKRRLREQLI

SEQ ID NO: 14145 - protein, 22 aa, Artificial Sequence
  Quasi-synthetic sequence derived from human genome
LLLKRFLLARRSRRGLFAQIVL

SEQ ID NO: 14146 - protein, 22 aa, Artificial Sequence
  Quasi-synthetic sequence derived from human genome
LLVRRRFISLKKATIFVQRKYR

SEQ ID NO: 14147 - protein, 22 aa, Artificial Sequence
  Quasi-synthetic sequence derived from human genome
KKRLISVKNYRMIKKRKGLRLI

SEQ ID NO: 14148 - protein, 22 aa, Artificial Sequence
  Quasi-synthetic sequence derived from human genome
KKGSVLKRRLVKLVVNFLFYFR

SEQ ID NO: 14149 - protein, 22 aa, Artificial Sequence
  Quasi-synthetic sequence derived from human genome
RRMGAVIKIRFFKIMLVLIICW

SEQ ID NO: 14150 - protein, 22 aa, Artificial Sequence
  Quasi-synthetic sequence derived from human genome
TLFRVIRLARIGRILRLIKGAK

SEQ ID NO: 14151 - protein, 22 aa, Artificial Sequence
  Quasi-synthetic sequence derived from human genome
MLGSLVLRRKALAPRLLLRLLR

SEQ ID NO: 14152 - protein, 22 aa, Artificial Sequence
  Quasi-synthetic sequence derived from human genome
KIRKLSFKRKHFLIKLHANILV

SEQ ID NO: 14153 - protein, 22 aa, Artificial Sequence
  Quasi-synthetic sequence derived from human genome
LFVLSVHYLWKKWKKHQKKLKK

SEQ ID NO: 14154 - protein, 22 aa, Artificial Sequence
  Quasi-synthetic sequence derived from human genome
KRCNRRLKSQILLKKYLMKRRW

SEQ ID NO: 14155 - protein, 22 aa, Artificial Sequence
  Quasi-synthetic sequence derived from human genome
GYVKIRSRKLGIFRRCWLVFKK

SEQ ID NO: 14156 - protein, 22 aa, Artificial Sequence
  Quasi-synthetic sequence derived from human genome
RIIILKIVHRRIINRFHSFLLF

SEQ ID NO: 14157 - protein, 22 aa, Artificial Sequence
  Quasi-synthetic sequence derived from human genome
IRRRSKFANLGRIFKPWKWRKK

SEQ ID NO: 14158 - protein, 22 aa, Artificial Sequence
  Quasi-synthetic sequence derived from human genome
LLKLNQLKFRKKKLRFGRSRIH

SEQ ID NO: 14159 - protein, 22 aa, Artificial Sequence
  Quasi-synthetic sequence derived from human genome
CRRRRARLRFMKQKFNIVCLKI

SEQ ID NO: 14160 - protein, 22 aa, Artificial Sequence
  Quasi-synthetic sequence derived from human genome
KILRVLRVLRPLRAINRAKGLK

SEQ ID NO: 14161 - protein, 22 aa, Artificial Sequence
  Quasi-synthetic sequence derived from human genome
FLRLKRRVKSVILVVLLGPLLF

SEQ ID NO: 14162 - protein, 22 aa, Artificial Sequence
  Quasi-synthetic sequence derived from human genome
RVIRLARIGRILRLIKGAKGIR

SEQ ID NO: 14163 - protein, 22 aa, Artificial Sequence
  Quasi-synthetic sequence derived from human genome
FILLVLLCLLLYYCRRKCLKPR

SEQ ID NO: 14164 - protein, 22 aa, Artificial Sequence
  Quasi-synthetic sequence derived from human genome
FSPTLFRVIRLARIGRILRLIR

SEQ ID NO: 14165 - protein, 22 aa, Artificial Sequence
  Quasi-synthetic sequence derived from human genome
ILLMVSLLLLSLWKLWRVKKFL

SEQ ID NO: 14166 - protein, 22 aa, Artificial Sequence
  Quasi-synthetic sequence derived from human genome
AILLLLALALGLLVYRKRRAKR

SEQ ID NO: 14167 - protein, 22 aa, Artificial Sequence
  Quasi-synthetic sequence derived from human genome
ARLCLRLLLLLGYRRRCPPLLR

SEQ ID NO: 14168 - protein, 22 aa, Artificial Sequence
  Quasi-synthetic sequence derived from human genome
RRKMSKKLPPVIIKYIIINRFR

SEQ ID NO: 14169 - protein, 22 aa, Artificial Sequence
  Quasi-synthetic sequence derived from human genome
IFNRSFRTGIKRRILLLIPKWL

SEQ ID NO: 14170 - protein, 22 aa, Artificial Sequence
  Quasi-synthetic sequence derived from human genome
LLWKRLLIARRSRKGFFAQIVL

SEQ ID NO: 14171 - protein, 22 aa, Artificial Sequence
  Quasi-synthetic sequence derived from human genome
VILLLLLLLLLFLILRHRRQGK

SEQ ID NO: 14172 - protein, 22 aa, Artificial Sequence
  Quasi-synthetic sequence derived from human genome
LRIRCVARKFLYLWIRMTFGRV

SEQ ID NO: 14173 - protein, 22 aa, Artificial Sequence
  Quasi-synthetic sequence derived from human genome
RLLFFLLGFLRIRVRGQRASRL

SEQ ID NO: 14174 - protein, 22 aa, Artificial Sequence
  Quasi-synthetic sequence derived from human genome
NFLKKVRRLIMKRIVKISKCNL

SEQ ID NO: 14175 - protein, 22 aa, Artificial Sequence
  Quasi-synthetic sequence derived from human genome
RPLRARVLVTRRRVRALIAVLW

SEQ ID NO: 14176 - protein, 22 aa, Artificial Sequence
  Quasi-synthetic sequence derived from human genome
FLRIKRRVKSVVLVILLGPLLF

SEQ ID NO: 14177 - protein, 22 aa, Artificial Sequence
  Quasi-synthetic sequence derived from human genome
PTVIICVMVFCLILWKWKKKKR

SEQ ID NO: 14178 - protein, 22 aa, Artificial Sequence
  Quasi-synthetic sequence derived from human genome
YRHLKTKRILRRNLLALIHRMI

SEQ ID NO: 14179 - protein, 22 aa, Artificial Sequence
  Quasi-synthetic sequence derived from human genome
LKGKKHVLHLWPKRLLLPRHLR

SEQ ID NO: 14180 - protein, 22 aa, Artificial Sequence
  Quasi-synthetic sequence derived from human genome
RTAILGLWKIARKWMRRKMGKW

SEQ ID NO: 14181 - protein, 22 aa, Artificial Sequence
  Quasi-synthetic sequence derived from human genome
KLRRFLKPQGHPRLLLWFKRGL

SEQ ID NO: 14182 - protein, 22 aa, Artificial Sequence
  Quasi-synthetic sequence derived from human genome
RFLLGRLPWRVASGARRFRRWL

SEQ ID NO: 14183 - protein, 22 aa, Artificial Sequence
  Quasi-synthetic sequence derived from human genome
ALYFLIRAFRLKKPQRRRYGLL

SEQ ID NO: 14184 - protein, 22 aa, Artificial Sequence
  Quasi-synthetic sequence derived from human genome
PRARRRRPLFALLLLCALLARL

SEQ ID NO: 14185 - protein, 22 aa, Artificial Sequence
  Quasi-synthetic sequence derived from human genome
KKLAVLCYRCLSLLYLRMFKLK

SEQ ID NO: 14186 - protein, 22 aa, Artificial Sequence
  Quasi-synthetic sequence derived from human genome
LKKIIKRKHTLPNYKIRFKPFF

SEQ ID NO: 14187 - protein, 22 aa, Artificial Sequence
  Quasi-synthetic sequence derived from human genome
LLLMVACRLRLVKQKLKKARPI

SEQ ID NO: 14188 - protein, 22 aa, Artificial Sequence
  Quasi-synthetic sequence derived from human genome
LFFLMKRKIIVLMPWLLRLSVL

SEQ ID NO: 14189 - protein, 22 aa, Artificial Sequence
  Quasi-synthetic sequence derived from human genome
VKKLPGVMLFKKKKTRKLKIAL

SEQ ID NO: 14190 - protein, 22 aa, Artificial Sequence
  Quasi-synthetic sequence derived from human genome
WAAHWLMRRRRRKQRKKKAWIY

SEQ ID NO: 14191 - protein, 22 aa, Artificial Sequence
  Quasi-synthetic sequence derived from human genome
FSPLRILRKRNKALRKIRKLQK

SEQ ID NO: 14192 - protein, 22 aa, Artificial Sequence
  Quasi-synthetic sequence derived from human genome
KKKLRRLLKYMFIRDYKSKIVK

SEQ ID NO: 14193 - protein, 22 aa, Artificial Sequence
  Quasi-synthetic sequence derived from human genome
RRMALSMIERRKRWRTIKLLLR

SEQ ID NO: 14194 - protein, 22 aa, Artificial Sequence
  Quasi-synthetic sequence derived from human genome
LRLPKRLRVVYFLARTRLAQRL

SEQ ID NO: 14195 - protein, 22 aa, Artificial Sequence
  Quasi-synthetic sequence derived from human genome
SRISITFFRLFRVMRLVKLLSR

SEQ ID NO: 14196 - protein, 22 aa, Artificial Sequence
  Quasi-synthetic sequence derived from human genome
RISITFFRLFRVMRLVKLLSRG

SEQ ID NO: 14197 - protein, 22 aa, Artificial Sequence
  Quasi-synthetic sequence derived from human genome
PLWVRQIFIHKLPLYLRLKRPK

SEQ ID NO: 14198 - protein, 22 aa, Artificial Sequence
  Quasi-synthetic sequence derived from human genome
VRRRKKLPSVLLFKKPSPFIFI

SEQ ID NO: 14199 - protein, 22 aa, Artificial Sequence
  Quasi-synthetic sequence derived from human genome
VMVFCLILWKWKKKKRPRNSYK

SEQ ID NO: 14200 - protein, 22 aa, Artificial Sequence
  Quasi-synthetic sequence derived from human genome
KKNIFLLFKKLCSFRYRRDLLR

SEQ ID NO: 14201 - protein, 22 aa, Artificial Sequence
  Quasi-synthetic sequence derived from human genome
LRLFRAARLIKLLRQGYTIRIL

SEQ ID NO: 14202 - protein, 22 aa, Artificial Sequence
  Quasi-synthetic sequence derived from human genome
FLRLFRAARLIKLLRQGYTIRI

SEQ ID NO: 14203 - protein, 22 aa, Artificial Sequence
  Quasi-synthetic sequence derived from human genome
WGMLRIPRPLIMIRAFRIYFRF

SEQ ID NO: 14204 - protein, 22 aa, Artificial Sequence
  Quasi-synthetic sequence derived from human genome
RLQARRFRRSRRTGRLVVLIIL

SEQ ID NO: 14205 - protein, 22 aa, Artificial Sequence
  Quasi-synthetic sequence derived from human genome
IRIVLFLQKVWRGTLARMRYKR

SEQ ID NO: 14206 - protein, 22 aa, Artificial Sequence
  Quasi-synthetic sequence derived from human genome
LKKKKKMPKLRFASRIRKIRKK

SEQ ID NO: 14207 - protein, 22 aa, Artificial Sequence
  Quasi-synthetic sequence derived from human genome
LILSRRPRRRLGSLRWCGRRRL

SEQ ID NO: 14208 - protein, 22 aa, Artificial Sequence
  Quasi-synthetic sequence derived from human genome
LQVLIVVLRIVRYRKSSKLIKK

SEQ ID NO: 14209 - protein, 22 aa, Artificial Sequence
  Quasi-synthetic sequence derived from human genome
LFRRCRRRLIPHPRRLSPVVIR

SEQ ID NO: 14210 - protein, 22 aa, Artificial Sequence
  Quasi-synthetic sequence derived from human genome
RARLLRALRLVRRLRGLSQALR

SEQ ID NO: 14211 - protein, 22 aa, Artificial Sequence
  Quasi-synthetic sequence derived from human genome
FNKFWRRYGKLSRHLMKVKLKK

SEQ ID NO: 14212 - protein, 22 aa, Artificial Sequence
  Quasi-synthetic sequence derived from human genome
LKTFVFFIWRRYWRTLVLLLLV

SEQ ID NO: 14213 - protein, 22 aa, Artificial Sequence
  Quasi-synthetic sequence derived from human genome
MGKVVQILRLMRIFRILKLARH

SEQ ID NO: 14214 - protein, 22 aa, Artificial Sequence
  Quasi-synthetic sequence derived from human genome
MRARRGLLRLPRRSLLAALFFF

SEQ ID NO: 14215 - protein, 22 aa, Artificial Sequence
  Quasi-synthetic sequence derived from human genome
LRRRNVQKKVALAKKLLAKLRF

SEQ ID NO: 14216 - protein, 22 aa, Artificial Sequence
  Quasi-synthetic sequence derived from human genome
FFFFFSVGRKFKKFNKVRVVRA

SEQ ID NO: 14217 - protein, 22 aa, Artificial Sequence
  Quasi-synthetic sequence derived from human genome
KGHLFRKGIMKIMVYKIFRILV

SEQ ID NO: 14218 - protein, 22 aa, Artificial Sequence
  Quasi-synthetic sequence derived from human genome
IFFILNSIIVYKLRRKSNFRLR

SEQ ID NO: 14219 - protein, 22 aa, Artificial Sequence
  Quasi-synthetic sequence derived from human genome
RLPKRLRVVYFLARTRLAQRLI

SEQ ID NO: 14220 - protein, 22 aa, Artificial Sequence
  Quasi-synthetic sequence derived from human genome
LLLLLLLLLFLILRHRRQGKHW

SEQ ID NO: 14221 - protein, 22 aa, Artificial Sequence
  Quasi-synthetic sequence derived from human genome
APLFALLSRGRRRRMHVLRRRW

SEQ ID NO: 14222 - protein, 22 aa, Artificial Sequence
  Quasi-synthetic sequence derived from human genome
IKVFLSSLKFHIRRFIFLFFIL

SEQ ID NO: 14223 - protein, 22 aa, Artificial Sequence
  Quasi-synthetic sequence derived from human genome
QLMKTIIRKINKMKTLKRKKLL

SEQ ID NO: 14224 - protein, 22 aa, Artificial Sequence
  Quasi-synthetic sequence derived from human genome
LIMIFLGLYINFRHLYKQRRRR

SEQ ID NO: 14225 - protein, 22 aa, Artificial Sequence
  Quasi-synthetic sequence derived from human genome
LFKALLIIYGILVIFRRMMKSR

SEQ ID NO: 14226 - protein, 22 aa, Artificial Sequence
  Quasi-synthetic sequence derived from human genome
FLKLFRAARLIKLLRQGYTIRI

SEQ ID NO: 14227 - protein, 22 aa, Artificial Sequence
  Quasi-synthetic sequence derived from human genome
KTWIFWKTWIFWKTWIFRKTYI

SEQ ID NO: 14228 - protein, 22 aa, Artificial Sequence
  Quasi-synthetic sequence derived from human genome
KIKTFLSLVWKRRILFFVVTLV

SEQ ID NO: 14229 - protein, 22 aa, Artificial Sequence
  Quasi-synthetic sequence derived from human genome
LLFQVIRLYQRRRWMIRALHLF

SEQ ID NO: 14230 - protein, 22 aa, Artificial Sequence
  Quasi-synthetic sequence derived from human genome
KYWRMYVVRRRYKIRRAATIVL

SEQ ID NO: 14231 - protein, 22 aa, Artificial Sequence
  Quasi-synthetic sequence derived from human genome
FVRQIQLLLWKNWTLRKRQKIR

SEQ ID NO: 14232 - protein, 22 aa, Artificial Sequence
  Quasi-synthetic sequence derived from human genome
ARGSLRRLLRLLVLGLWLALLR

SEQ ID NO: 14233 - protein, 22 aa, Artificial Sequence
  Quasi-synthetic sequence derived from human genome
VLLLLAGGSLAFILLRVRRRRK

SEQ ID NO: 14234 - protein, 22 aa, Artificial Sequence
  Quasi-synthetic sequence derived from human genome
RRPRGSTARTLLRLLLRLLLFL

SEQ ID NO: 14235 - protein, 22 aa, Artificial Sequence
  Quasi-synthetic sequence derived from human genome
KMPKWTRVILLNWCAWFLRMKR

SEQ ID NO: 14236 - protein, 22 aa, Artificial Sequence
  Quasi-synthetic sequence derived from human genome
VILAKALFLLPCISRRLARIRR

SEQ ID NO: 14237 - protein, 22 aa, Artificial Sequence
  Quasi-synthetic sequence derived from human genome
IFLTLCFGLIARRKKIMKLCMK

SEQ ID NO: 14238 - protein, 22 aa, Artificial Sequence
  Quasi-synthetic sequence derived from human genome
RAGVTLRVLRMMRIFWVIKLAR

SEQ ID NO: 14239 - protein, 22 aa, Artificial Sequence
  Quasi-synthetic sequence derived from human genome
LLRRLPKLRKRMRKMCLTFMKE

SEQ ID NO: 14240 - protein, 22 aa, Artificial Sequence
  Quasi-synthetic sequence derived from human genome
ALLVLLVAPPLLRRAGRLRWRR

SEQ ID NO: 14241 - protein, 22 aa, Artificial Sequence
  Quasi-synthetic sequence derived from human genome
LRKTKYRSFRRRLLKFIPGLNR

SEQ ID NO: 14242 - protein, 22 aa, Artificial Sequence
  Quasi-synthetic sequence derived from human genome
ACIRIQKTIRGWLLRKKYLRMR

SEQ ID NO: 14243 - protein, 22 aa, Artificial Sequence
  Quasi-synthetic sequence derived from human genome
GKWSLRWFLSPRWILQFRRWAR

SEQ ID NO: 14244 - protein, 22 aa, Artificial Sequence
  Quasi-synthetic sequence derived from human genome
KKARSRTVAKKLVVFRPRLFLL

SEQ ID NO: 14245 - protein, 22 aa, Artificial Sequence
  Quasi-synthetic sequence derived from human genome
IKPFKRFLRKKSKPKKCVKKFV

SEQ ID NO: 14246 - protein, 22 aa, Artificial Sequence
  Quasi-synthetic sequence derived from human genome
KKRYIYRKIKGWRPVLMMCVVL

SEQ ID NO: 14247 - protein, 22 aa, Artificial Sequence
  Quasi-synthetic sequence derived from human genome
RPAARRKARRLLKTVLMILLAF

SEQ ID NO: 14248 - protein, 22 aa, Artificial Sequence
  Quasi-synthetic sequence derived from human genome
IVLFILLCCLYRLCKKSKPIKK

SEQ ID NO: 14249 - protein, 22 aa, Artificial Sequence
  Quasi-synthetic sequence derived from human genome
TMLALFMLMALVLLQRKLWRRR

SEQ ID NO: 14250 - protein, 22 aa, Artificial Sequence
  Quasi-synthetic sequence derived from human genome
VLLAIFVALFFLTKKRRQRQRL

SEQ ID NO: 14251 - protein, 22 aa, Artificial Sequence
  Quasi-synthetic sequence derived from human genome
LQRGTRLRLRQRRRRLLIKKMP

SEQ ID NO: 14252 - protein, 22 aa, Artificial Sequence
  Quasi-synthetic sequence derived from human genome
MRVLSRTSKFRRLRQLLRRRKK

SEQ ID NO: 14253 - protein, 22 aa, Artificial Sequence
  Quasi-synthetic sequence derived from human genome
LRFLKLRRERRALLCLLLVLGI

SEQ ID NO: 14254 - protein, 22 aa, Artificial Sequence
  Quasi-synthetic sequence derived from human genome
RVIRLARIGRILRLVKGAKGIR

SEQ ID NO: 14255 - protein, 22 aa, Artificial Sequence
  Quasi-synthetic sequence derived from human genome
YLRIIRFLPLFKIIVPILIRIA

SEQ ID NO: 14256 - protein, 22 aa, Artificial Sequence
  Quasi-synthetic sequence derived from human genome
GKGKRWFAFKMMMAKKWAKFLR

SEQ ID NO: 14257 - protein, 22 aa, Artificial Sequence
  Quasi-synthetic sequence derived from human genome
MRKKWKMGGMKYIFSLLFFLLL

SEQ ID NO: 14258 - protein, 22 aa, Artificial Sequence
  Quasi-synthetic sequence derived from human genome
KRWLGRWRRKRRWRRVRKAGPR

SEQ ID NO: 14259 - protein, 22 aa, Artificial Sequence
  Quasi-synthetic sequence derived from human genome
KFFKRKPKVLGVVRILIALMSL

SEQ ID NO: 14260 - protein, 22 aa, Artificial Sequence
  Quasi-synthetic sequence derived from human genome
AKVRFLKLKKERKSLWTILLLF

SEQ ID NO: 14261 - protein, 22 aa, Artificial Sequence
  Quasi-synthetic sequence derived from human genome
LCLLGRLLIYKQGRKLFPIKLK

SEQ ID NO: 14262 - protein, 22 aa, Artificial Sequence
  Quasi-synthetic sequence derived from human genome
KVKKIWQKQFRWPKNRLQILKF

SEQ ID NO: 14263 - protein, 22 aa, Artificial Sequence
  Quasi-synthetic sequence derived from human genome
FVLLFIFVKRQIMRFAMKSRRG

SEQ ID NO: 14264 - protein, 22 aa, Artificial Sequence
  Quasi-synthetic sequence derived from human genome
MRRFLSKVYSFPMRKLILFLVF

SEQ ID NO: 14265 - protein, 22 aa, Artificial Sequence
  Quasi-synthetic sequence derived from human genome
VTLLIWVPVKVILHKKRYIYRK

SEQ ID NO: 14266 - protein, 22 aa, Artificial Sequence
  Quasi-synthetic sequence derived from human genome
RVMRLMRIFRILKLARHSTGLR

SEQ ID NO: 14267 - protein, 22 aa, Artificial Sequence
  Quasi-synthetic sequence derived from human genome
RLFSKKIFCCLFFITLFFIRLL

SEQ ID NO: 14268 - protein, 22 aa, Artificial Sequence
  Quasi-synthetic sequence derived from human genome
RARRRRRRRRRRDLLLSQLCFL

SEQ ID NO: 14269 - protein, 22 aa, Artificial Sequence
  Quasi-synthetic sequence derived from human genome
SRRISLRKKLKLPIGKRNWLKR

SEQ ID NO: 14270 - protein, 22 aa, Artificial Sequence
  Quasi-synthetic sequence derived from human genome
LKALKYLFRFIIQSRVLYLRFY

SEQ ID NO: 14271 - protein, 22 aa, Artificial Sequence
  Quasi-synthetic sequence derived from human genome
ILVVKRLPKTRSGKVMRRLLRK

SEQ ID NO: 14272 - protein, 22 aa, Artificial Sequence
  Quasi-synthetic sequence derived from human genome
LFKRRVVRRLASLKTRRCRLSR

SEQ ID NO: 14273 - protein, 22 aa, Artificial Sequence
  Quasi-synthetic sequence derived from human genome
LWAIGKNVWKRWKKRFFVLVQV

SEQ ID NO: 14274 - protein, 22 aa, Artificial Sequence
  Quasi-synthetic sequence derived from human genome
VRLFLKNYSKTRFGYRIKWRII

SEQ ID NO: 14275 - protein, 22 aa, Artificial Sequence
  Quasi-synthetic sequence derived from human genome
RRHYSVKKKLKLIRVLGLFMGL

SEQ ID NO: 14276 - protein, 22 aa, Artificial Sequence
  Quasi-synthetic sequence derived from human genome
KPPRLRLWALIPWLPRKQRPRI

SEQ ID NO: 14277 - protein, 22 aa, Artificial Sequence
  Quasi-synthetic sequence derived from human genome
ILLILSLICKIKLGPVRRKLKS

SEQ ID NO: 14278 - protein, 22 aa, Artificial Sequence
  Quasi-synthetic sequence derived from human genome
RWLRWKASLIKLRALRRPGGVL

SEQ ID NO: 14279 - protein, 22 aa, Artificial Sequence
  Quasi-synthetic sequence derived from human genome
RIRIYKLNRRKRYRCLALKGFH

SEQ ID NO: 14280 - protein, 22 aa, Artificial Sequence
  Quasi-synthetic sequence derived from human genome
VFVAAGLFAYVLRRRRKKLPFR

SEQ ID NO: 14281 - protein, 22 aa, Artificial Sequence
  Quasi-synthetic sequence derived from human genome
IVQVMRKQKTINRFLMRKRLLF

SEQ ID NO: 14282 - protein, 22 aa, Artificial Sequence
  Quasi-synthetic sequence derived from human genome
PILLLGTPLHLLHRHRRRLRRR

SEQ ID NO: 14283 - protein, 22 aa, Artificial Sequence
  Quasi-synthetic sequence derived from human genome
MAKPFFRLQKFLRRTQFLLFFL

SEQ ID NO: 14284 - protein, 22 aa, Artificial Sequence
  Quasi-synthetic sequence derived from human genome
PLLPPKRRLLPRVRLLPLLLAL

SEQ ID NO: 14285 - protein, 22 aa, Artificial Sequence
  Quasi-synthetic sequence derived from human genome
LWVIRVQKRHKMPRMKKLMRNR

SEQ ID NO: 14286 - protein, 22 aa, Artificial Sequence
  Quasi-synthetic sequence derived from human genome
KVLNINLKRKFIKKRIIIISNY

SEQ ID NO: 14287 - protein, 22 aa, Artificial Sequence
  Quasi-synthetic sequence derived from human genome
LSILINFILFINILRILMRKLR

SEQ ID NO: 14288 - protein, 22 aa, Artificial Sequence
  Quasi-synthetic sequence derived from human genome
ITWLLLGALLWMWWRRNRRGKL

SEQ ID NO: 14289 - protein, 22 aa, Artificial Sequence
  Quasi-synthetic sequence derived from human genome
LGRVAQVLRLMRIFRILKLARH

SEQ ID NO: 14290 - protein, 22 aa, Artificial Sequence
  Quasi-synthetic sequence derived from human genome
VAVVIILFIILLGVIMAKRKRK

SEQ ID NO: 14291 - protein, 22 aa, Artificial Sequence
  Quasi-synthetic sequence derived from human genome
AVLRRKALLIFLVVHRLRWSSK

SEQ ID NO: 14292 - protein, 22 aa, Artificial Sequence
  Quasi-synthetic sequence derived from human genome
RWRLNVLRLNFRGCLLRPKTFR

SEQ ID NO: 14293 - protein, 22 aa, Artificial Sequence
  Quasi-synthetic sequence derived from human genome
VKFKRLHKLVNSTRRVRKKLIR

SEQ ID NO: 14294 - protein, 22 aa, Artificial Sequence
  Quasi-synthetic sequence derived from human genome
IITKFCLFCFWKFARKGKKGKR

SEQ ID NO: 14295 - protein, 22 aa, Artificial Sequence
  Quasi-synthetic sequence derived from human genome
KVFILFLTLWLLSLLKLLNVRR

SEQ ID NO: 14296 - protein, 22 aa, Artificial Sequence
  Quasi-synthetic sequence derived from human genome
PRRNFWPARLATRLLKLRYLIL

SEQ ID NO: 14297 - protein, 22 aa, Artificial Sequence
  Quasi-synthetic sequence derived from human genome
IGYLKLICFLIPFLLSLKKKMK

SEQ ID NO: 14298 - protein, 22 aa, Artificial Sequence
  Quasi-synthetic sequence derived from human genome
LLFKFKQLKMPVRALLRLAPLL

SEQ ID NO: 14299 - protein, 22 aa, Artificial Sequence
  Quasi-synthetic sequence derived from human genome
FLQLRGSGRKLWKRFFCFLRRS

SEQ ID NO: 14300 - protein, 22 aa, Artificial Sequence
  Quasi-synthetic sequence derived from human genome
NTFNWSKVRKLSFKRKRFLIKL

SEQ ID NO: 14301 - protein, 22 aa, Artificial Sequence
  Quasi-synthetic sequence derived from human genome
KCALVRHKFNRLPRVLILHLKR

SEQ ID NO: 14302 - protein, 22 aa, Artificial Sequence
  Quasi-synthetic sequence derived from human genome
RHWQIPLGRRFRSLKMWFVFRM

SEQ ID NO: 14303 - protein, 22 aa, Artificial Sequence
  Quasi-synthetic sequence derived from human genome
MAGIPLLLFRWKPLWGVRLRLR

SEQ ID NO: 14304 - protein, 22 aa, Artificial Sequence
  Quasi-synthetic sequence derived from human genome
LGMLRVLRLLRTLRPLRVISRA

SEQ ID NO: 14305 - protein, 22 aa, Artificial Sequence
  Quasi-synthetic sequence derived from human genome
KKNRKMLVILILFVIIIVLIVV

SEQ ID NO: 14306 - protein, 22 aa, Artificial Sequence
  Quasi-synthetic sequence derived from human genome
IIKTLLRCPSKKKYKAIRLIFV

SEQ ID NO: 14307 - protein, 22 aa, Artificial Sequence
  Quasi-synthetic sequence derived from human genome
KRKARGYLRLVPLFVLLALLVL

SEQ ID NO: 14308 - protein, 22 aa, Artificial Sequence
  Quasi-synthetic sequence derived from human genome
RRRCRRVLYWIPVVFITLLLGW

SEQ ID NO: 14309 - protein, 22 aa, Artificial Sequence
  Quasi-synthetic sequence derived from human genome
IVLALRLRKRFLNFFLEKYKRP

SEQ ID NO: 14310 - protein, 22 aa, Artificial Sequence
  Quasi-synthetic sequence derived from human genome
HLLRTLSRAKFWPRRRFNFFVL

SEQ ID NO: 14311 - protein, 22 aa, Artificial Sequence
  Quasi-synthetic sequence derived from human genome
KLICFLIPFLLSLKKKMKVPYL

SEQ ID NO: 14312 - protein, 22 aa, Artificial Sequence
  Quasi-synthetic sequence derived from human genome
RIGRILRLIRAAKGIRTLLFAL

SEQ ID NO: 14313 - protein, 22 aa, Artificial Sequence
  Quasi-synthetic sequence derived from human genome
LAKKMLRKALKLLNRIFPYNLI

SEQ ID NO: 14314 - protein, 22 aa, Artificial Sequence
  Quasi-synthetic sequence derived from human genome
LFKKHFMALIFSAKRLKIIPFI

SEQ ID NO: 14315 - protein, 22 aa, Artificial Sequence
  Quasi-synthetic sequence derived from human genome
LGVLRVLRLLRTLRPLRVISRA

SEQ ID NO: 14316 - protein, 22 aa, Artificial Sequence
  Quasi-synthetic sequence derived from human genome
LIRKKFRMMKIPKPILFGLNIA

SEQ ID NO: 14317 - protein, 22 aa, Artificial Sequence
  Quasi-synthetic sequence derived from human genome
AMFFLLVLILSSVFLFRLFKRR

SEQ ID NO: 14318 - protein, 22 aa, Artificial Sequence
  Quasi-synthetic sequence derived from human genome
RRQILLPFRKPLIIFTPKSLLR

SEQ ID NO: 14319 - protein, 22 aa, Artificial Sequence
  Quasi-synthetic sequence derived from human genome
LYHCQVFLKRFLRLRYGRQRRR

SEQ ID NO: 14320 - protein, 22 aa, Artificial Sequence
  Quasi-synthetic sequence derived from human genome
IRKFFPKKKCFVFDLPIHRRKL

SEQ ID NO: 14321 - protein, 22 aa, Artificial Sequence
  Quasi-synthetic sequence derived from human genome
RLRLSKLRRCVQWLKVMGLFAF

SEQ ID NO: 14322 - protein, 22 aa, Artificial Sequence
  Quasi-synthetic sequence derived from human genome
LRLPRLLSPPLRPRLLLLLLLL

SEQ ID NO: 14323 - protein, 22 aa, Artificial Sequence
  Quasi-synthetic sequence derived from human genome
KNHKKAKAIKLILLVVIVFFLF

SEQ ID NO: 14324 - protein, 22 aa, Artificial Sequence
  Quasi-synthetic sequence derived from human genome
LSACIIQCWWRLILSKILKKRR

SEQ ID NO: 14325 - protein, 22 aa, Artificial Sequence
  Quasi-synthetic sequence derived from human genome
VRLRGAILTMAFKKILKLKNIK

SEQ ID NO: 14326 - protein, 22 aa, Artificial Sequence
  Quasi-synthetic sequence derived from human genome
KAFLALLRPFISSKFTRKIRFL

SEQ ID NO: 14327 - protein, 22 aa, Artificial Sequence
  Quasi-synthetic sequence derived from human genome
RIIRLVRVFRIFKLSRHSKGLQ

SEQ ID NO: 14328 - protein, 22 aa, Artificial Sequence
  Quasi-synthetic sequence derived from human genome
CRGFLIKMGGKIKTWKKRWFVF

SEQ ID NO: 14329 - protein, 22 aa, Artificial Sequence
  Quasi-synthetic sequence derived from human genome
FLGKKFKRYFLQLLKYIPPKAK

SEQ ID NO: 14330 - protein, 22 aa, Artificial Sequence
  Quasi-synthetic sequence derived from human genome
IIVLLLQKAWRGTLARWRCRRL

SEQ ID NO: 14331 - protein, 22 aa, Artificial Sequence
  Quasi-synthetic sequence derived from human genome
PVLAVILIILIVIAILLFKRKR

SEQ ID NO: 14332 - protein, 22 aa, Artificial Sequence
  Quasi-synthetic sequence derived from human genome
FIILFKVFLFPRITISKKTKLV

SEQ ID NO: 14333 - protein, 22 aa, Artificial Sequence
  Quasi-synthetic sequence derived from human genome
KRLKKSAFVVLILLITAKLLVL

SEQ ID NO: 14334 - protein, 22 aa, Artificial Sequence
  Quasi-synthetic sequence derived from human genome
KFVVVTRWRFKKAPLLLHYRPK

SEQ ID NO: 14335 - protein, 22 aa, Artificial Sequence
  Quasi-synthetic sequence derived from human genome
KKRVIRMLIVIVVLFFLCWMPI

SEQ ID NO: 14336 - protein, 22 aa, Artificial Sequence
  Quasi-synthetic sequence derived from human genome
LPFPLRKPRKAHKYLRLSRKKF

SEQ ID NO: 14337 - protein, 22 aa, Artificial Sequence
  Quasi-synthetic sequence derived from human genome
FGLVKLFKFPCLKRGAKFRKYV

SEQ ID NO: 14338 - protein, 22 aa, Artificial Sequence
  Quasi-synthetic sequence derived from human genome
RIFGKLVFLPLRLVWKEVILRK

SEQ ID NO: 14339 - protein, 22 aa, Artificial Sequence
  Quasi-synthetic sequence derived from human genome
FIKRRFRSLRHKIILLQSRARG

SEQ ID NO: 14340 - protein, 22 aa, Artificial Sequence
  Quasi-synthetic sequence derived from human genome
FRLIRKMFSFKVSRWMGLACFR

SEQ ID NO: 14341 - protein, 22 aa, Artificial Sequence
  Quasi-synthetic sequence derived from human genome
RGPRHRGLLRVRLGRFISRLLL

SEQ ID NO: 14342 - protein, 22 aa, Artificial Sequence
  Quasi-synthetic sequence derived from human genome
RFPWPKVLKISYKRSSFFIKIR

SEQ ID NO: 14343 - protein, 22 aa, Artificial Sequence
  Quasi-synthetic sequence derived from human genome
KVARKFWWKNVKMIVLICVIVF

SEQ ID NO: 14344 - protein, 22 aa, Artificial Sequence
  Quasi-synthetic sequence derived from human genome
RFKVMKPKVLRSWCRQILKGLL

SEQ ID NO: 14345 - protein, 22 aa, Artificial Sequence
  Quasi-synthetic sequence derived from human genome
RRIVFAGVILFRLLGVILFRLL

SEQ ID NO: 14346 - protein, 22 aa, Artificial Sequence
  Quasi-synthetic sequence derived from human genome
RLFRMLRIFKLGKYWPTFQILM

SEQ ID NO: 14347 - protein, 22 aa, Artificial Sequence
  Quasi-synthetic sequence derived from human genome
LRVFRVFRIFKFSRHSQGLRIL

SEQ ID NO: 14348 - protein, 22 aa, Artificial Sequence
  Quasi-synthetic sequence derived from human genome
WLPRMPQKKKLRSKLKPIFPLI

SEQ ID NO: 14349 - protein, 22 aa, Artificial Sequence
  Quasi-synthetic sequence derived from human genome
LLLLLVFTVALYAQRRWQKRRR

SEQ ID NO: 14350 - protein, 22 aa, Artificial Sequence
  Quasi-synthetic sequence derived from human genome
RIKKRSRSVFYRLTILILVFAV

SEQ ID NO: 14351 - protein, 22 aa, Artificial Sequence
  Quasi-synthetic sequence derived from human genome
LRLLLFFRFKRTLDRICVLFLL

SEQ ID NO: 14352 - protein, 22 aa, Artificial Sequence
  Quasi-synthetic sequence derived from human genome
FIFLKILKLLISKLKAHQMCFR

SEQ ID NO: 14353 - protein, 22 aa, Artificial Sequence
  Quasi-synthetic sequence derived from human genome
WPRLIRKLRCYLKEMKNLRKLV

SEQ ID NO: 14354 - protein, 22 aa, Artificial Sequence
  Quasi-synthetic sequence derived from human genome
IKYIIINRFRGRKNMLVKLGKI

SEQ ID NO: 14355 - protein, 22 aa, Artificial Sequence
  Quasi-synthetic sequence derived from human genome
IHKLRLKLRKKLKAEKKKLAAL

SEQ ID NO: 14356 - protein, 22 aa, Artificial Sequence
  Quasi-synthetic sequence derived from human genome
LALCLLLPLLLLGGWKRWRRGR

SEQ ID NO: 14357 - protein, 22 aa, Artificial Sequence
  Quasi-synthetic sequence derived from human genome
VLWKRPFGRPSAKWSRRFFIIK

SEQ ID NO: 14358 - protein, 22 aa, Artificial Sequence
  Quasi-synthetic sequence derived from human genome
KTLRKWLKMFKKRQLELYLPKF

SEQ ID NO: 14359 - protein, 22 aa, Artificial Sequence
  Quasi-synthetic sequence derived from human genome
ALLFLCLLPLIVKHIRKKQAKK

SEQ ID NO: 14360 - protein, 22 aa, Artificial Sequence
  Quasi-synthetic sequence derived from human genome
VIFVVTKFCLFCFWKFARKGKK

SEQ ID NO: 14361 - protein, 22 aa, Artificial Sequence
  Quasi-synthetic sequence derived from human genome
ISTALLLLLGFFLWLKKRKQIK

SEQ ID NO: 14362 - protein, 22 aa, Artificial Sequence
  Quasi-synthetic sequence derived from human genome
ALLGLLAALLLLLLLSRRRTRR

SEQ ID NO: 14363 - protein, 22 aa, Artificial Sequence
  Quasi-synthetic sequence derived from human genome
TKKFWIQKLPKVLCLHLKRFHW

SEQ ID NO: 14364 - protein, 22 aa, Artificial Sequence
  Quasi-synthetic sequence derived from human genome
MAALRPLVKPKIVKKRTKKFIR

SEQ ID NO: 14365 - protein, 22 aa, Artificial Sequence
  Quasi-synthetic sequence derived from human genome
TLIRFLPRPIRQQLLYKRRYIF

SEQ ID NO: 14366 - protein, 22 aa, Artificial Sequence
  Quasi-synthetic sequence derived from human genome
VGILLFLILVGLLIFFLKRRNK

SEQ ID NO: 14367 - protein, 22 aa, Artificial Sequence
  Quasi-synthetic sequence derived from human genome
QNMSLAILRIIRLVRVFRIFKL

SEQ ID NO: 14368 - protein, 22 aa, Artificial Sequence
  Quasi-synthetic sequence derived from human genome
RKAPLWLRAKFQRLLFKLGCYI

SEQ ID NO: 14369 - protein, 22 aa, Artificial Sequence
  Quasi-synthetic sequence derived from human genome
LLKFNQLKFRKKKLKFCKSHIH

SEQ ID NO: 14370 - protein, 22 aa, Artificial Sequence
  Quasi-synthetic sequence derived from human genome
YIGRSVHYWKKVLPLLKIIKKK

SEQ ID NO: 14371 - protein, 22 aa, Artificial Sequence
  Quasi-synthetic sequence derived from human genome
RFRLSSHFIRHRRAHMRRRLYI

SEQ ID NO: 14372 - protein, 22 aa, Artificial Sequence
  Quasi-synthetic sequence derived from human genome
PGARRRQRGRLMRRLVRRLRRW

SEQ ID NO: 14373 - protein, 22 aa, Artificial Sequence
  Quasi-synthetic sequence derived from human genome
LRALRLLRIFKVTKYWSSLRNL

SEQ ID NO: 14374 - protein, 22 aa, Artificial Sequence
  Quasi-synthetic sequence derived from human genome
LLAIFIKMCLWLWKQFLKRGSK

SEQ ID NO: 14375 - protein, 22 aa, Artificial Sequence
  Quasi-synthetic sequence derived from human genome
HPLSRLLWRRLKPLILGKLLFA

SEQ ID NO: 14376 - protein, 22 aa, Artificial Sequence
  Quasi-synthetic sequence derived from human genome
RLQQRRLQHRLRLRAQMRLRRL

SEQ ID NO: 14377 - protein, 22 aa, Artificial Sequence
  Quasi-synthetic sequence derived from human genome
RGVRKVFLRLLPQLLRMHVRPL

SEQ ID NO: 14378 - protein, 22 aa, Artificial Sequence
  Quasi-synthetic sequence derived from human genome
ALLARKECLKFLIKRLAKIVRL

SEQ ID NO: 14379 - protein, 22 aa, Artificial Sequence
  Quasi-synthetic sequence derived from human genome
IRKRLRCRRKTVLVLMCILTAY

SEQ ID NO: 14380 - protein, 22 aa, Artificial Sequence
  Quasi-synthetic sequence derived from human genome
LRIFRPRKLTLKGYRQHWVVFK

SEQ ID NO: 14381 - protein, 22 aa, Artificial Sequence
  Quasi-synthetic sequence derived from human genome
IFLLIILSYIKIGKNLLRISKR

SEQ ID NO: 14382 - protein, 22 aa, Artificial Sequence
  Quasi-synthetic sequence derived from human genome
RLILFLFCLMVLVESRKPKRKR

SEQ ID NO: 14383 - protein, 22 aa, Artificial Sequence
  Quasi-synthetic sequence derived from human genome
GPLAPRPRRRRSLRRLFSRFLL

SEQ ID NO: 14384 - protein, 22 aa, Artificial Sequence
  Quasi-synthetic sequence derived from human genome
VSPTLFRVIRLARIGRVLRLIR

SEQ ID NO: 14385 - protein, 22 aa, Artificial Sequence
  Quasi-synthetic sequence derived from human genome
RLLLVHGRWSYIRMCKFLRYFF

SEQ ID NO: 14386 - protein, 22 aa, Artificial Sequence
  Quasi-synthetic sequence derived from human genome
LVLRVLRALRILYVMRLARHSL

SEQ ID NO: 14387 - protein, 22 aa, Artificial Sequence
  Quasi-synthetic sequence derived from human genome
YRLLWFKVKKMPLTEYLKRIKL

SEQ ID NO: 14388 - protein, 22 aa, Artificial Sequence
  Quasi-synthetic sequence derived from human genome
LAFIKQLVRKILIVIARPARLL

SEQ ID NO: 14389 - protein, 22 aa, Artificial Sequence
  Quasi-synthetic sequence derived from human genome
RIIKTLSKTKNLRLLILVGRLF

SEQ ID NO: 14390 - protein, 22 aa, Artificial Sequence
  Quasi-synthetic sequence derived from human genome
AGIFLLVVVFVLCRKMISRKKK

SEQ ID NO: 14391 - protein, 22 aa, Artificial Sequence
  Quasi-synthetic sequence derived from human genome
FVNKRLVLRTKLHKLIDFLLRK

SEQ ID NO: 14392 - protein, 22 aa, Artificial Sequence
  Quasi-synthetic sequence derived from human genome
LVIVGIGVLILLVRYRKCIKLK

SEQ ID NO: 14393 - protein, 22 aa, Artificial Sequence
  Quasi-synthetic sequence derived from human genome
VLIFKVYMFKCVWRCYRLIKCM

SEQ ID NO: 14394 - protein, 22 aa, Artificial Sequence
  Quasi-synthetic sequence derived from human genome
LLYPLCHKRFQKAFLKIFCIKK

SEQ ID NO: 14395 - protein, 22 aa, Artificial Sequence
  Quasi-synthetic sequence derived from human genome
RALRGLSYRSLRRRVRRLRRLT

SEQ ID NO: 14396 - protein, 22 aa, Artificial Sequence
  Quasi-synthetic sequence derived from human genome
KKRVVRMLLVIVVLFFLCWLPV

SEQ ID NO: 14397 - protein, 22 aa, Artificial Sequence
  Quasi-synthetic sequence derived from human genome
LQRAALKFLAKCRKKKKLFAPW

SEQ ID NO: 14398 - protein, 22 aa, Artificial Sequence
  Quasi-synthetic sequence derived from human genome
ILLRIFHLFHQKRQLEKLIRRR

SEQ ID NO: 14399 - protein, 22 aa, Artificial Sequence
  Quasi-synthetic sequence derived from human genome
LLVIMFLMLLRRFRSRYWSPGR

SEQ ID NO: 14400 - protein, 22 aa, Artificial Sequence
  Quasi-synthetic sequence derived from human genome
FKRKGKLSTIGKIFKPWKWRKK

SEQ ID NO: 14401 - protein, 22 aa, Artificial Sequence
  Quasi-synthetic sequence derived from human genome
RLLLVHGRWSYVRICKFLRYFF

SEQ ID NO: 14402 - protein, 22 aa, Artificial Sequence
  Quasi-synthetic sequence derived from human genome
LLRKAPGGFMGPRWRRRWFVLK

SEQ ID NO: 14403 - protein, 22 aa, Artificial Sequence
  Quasi-synthetic sequence derived from human genome
RRWRHALHRRLLNRRLLLAVTP

SEQ ID NO: 14404 - protein, 22 aa, Artificial Sequence
  Quasi-synthetic sequence derived from human genome
KIWLRLRGLRKYKKTSQRLRSL

SEQ ID NO: 14405 - protein, 22 aa, Artificial Sequence
  Quasi-synthetic sequence derived from human genome
RYNCRVIFLNRKILLIRPKMAL

SEQ ID NO: 14406 - protein, 22 aa, Artificial Sequence
  Quasi-synthetic sequence derived from human genome
LVLKRLGFKGVWKGLFARIIMI

SEQ ID NO: 14407 - protein, 22 aa, Artificial Sequence
  Quasi-synthetic sequence derived from human genome
FSIWRFAWRKSIKKYHAWRSRR

SEQ ID NO: 14408 - protein, 22 aa, Artificial Sequence
  Quasi-synthetic sequence derived from human genome
KIRTRLIRKRFLCLGWGLPALV

SEQ ID NO: 14409 - protein, 22 aa, Artificial Sequence
  Quasi-synthetic sequence derived from human genome
VWLQLLRICRVLRSLKLLAQFR

SEQ ID NO: 14410 - protein, 22 aa, Artificial Sequence
  Quasi-synthetic sequence derived from human genome
KRFKVMKPKVLRSWCRQILKGL

SEQ ID NO: 14411 - protein, 22 aa, Artificial Sequence
  Quasi-synthetic sequence derived from human genome
RRVIFIADKLRYPPWLLLLKRL

SEQ ID NO: 14412 - protein, 22 aa, Artificial Sequence
  Quasi-synthetic sequence derived from human genome
LSRTSKFRRLRQLLRRRKKRWQ

SEQ ID NO: 14413 - protein, 22 aa, Artificial Sequence
  Quasi-synthetic sequence derived from human genome
FLLLVVRKLLRTNSRFVKVVLM

SEQ ID NO: 14414 - protein, 22 aa, Artificial Sequence
  Quasi-synthetic sequence derived from human genome
LCYIWLLVLLLHKHRSILLRRL

SEQ ID NO: 14415 - protein, 22 aa, Artificial Sequence
  Quasi-synthetic sequence derived from human genome
FLSYRFKQGFRRVLLRPSRRVR

SEQ ID NO: 14416 - protein, 22 aa, Artificial Sequence
  Quasi-synthetic sequence derived from human genome
WLRKSPPEKKLRRYAWKKRWFI

SEQ ID NO: 14417 - protein, 22 aa, Artificial Sequence
  Quasi-synthetic sequence derived from human genome
LQLLKWPLRFVIIHKRCVYYFK

SEQ ID NO: 14418 - protein, 22 aa, Artificial Sequence
  Quasi-synthetic sequence derived from human genome
LLLLALILPLLFYLRKRNKTGK

SEQ ID NO: 14419 - protein, 22 aa, Artificial Sequence
  Quasi-synthetic sequence derived from human genome
KRARRPGARALRLVLGIVLLFW

SEQ ID NO: 14420 - protein, 22 aa, Artificial Sequence
  Quasi-synthetic sequence derived from human genome
KLKQFTKILRRKRLLPKRCNKK

SEQ ID NO: 14421 - protein, 22 aa, Artificial Sequence
  Quasi-synthetic sequence derived from human genome
VRPHLLKKKILGRVWWLMPVVL

SEQ ID NO: 14422 - protein, 22 aa, Artificial Sequence
  Quasi-synthetic sequence derived from human genome
FFSLRLLINESLIKKLRLFFRK

SEQ ID NO: 14423 - protein, 22 aa, Artificial Sequence
  Quasi-synthetic sequence derived from human genome
RIGRILRLIRGAKGIRTLLFAL

SEQ ID NO: 14424 - protein, 22 aa, Artificial Sequence
  Quasi-synthetic sequence derived from human genome
ILLLTLTILTIWLFKHRRVRFL

SEQ ID NO: 14425 - protein, 22 aa, Artificial Sequence
  Quasi-synthetic sequence derived from human genome
LLLLRWRRPALHRPIKVNLLIP

SEQ ID NO: 14426 - protein, 22 aa, Artificial Sequence
  Quasi-synthetic sequence derived from human genome
MKLLRKKIEKRNLKLRQRNLKF

SEQ ID NO: 14427 - protein, 22 aa, Artificial Sequence
  Quasi-synthetic sequence derived from human genome
IKRAQGRKRFGMKNFKKRWFRL

SEQ ID NO: 14428 - protein, 22 aa, Artificial Sequence
  Quasi-synthetic sequence derived from human genome
MMRRRFLSLKKTAILIQRKYRA

SEQ ID NO: 14429 - protein, 22 aa, Artificial Sequence
  Quasi-synthetic sequence derived from human genome
VIFLAHHFKRKRGKKKGKILPW

SEQ ID NO: 14430 - protein, 22 aa, Artificial Sequence
  Quasi-synthetic sequence derived from human genome
KKLKKSIKIIFIVVAAFLVSWL

SEQ ID NO: 14431 - protein, 22 aa, Artificial Sequence
  Quasi-synthetic sequence derived from human genome
WRALRRLWDRVLGPARRWRRPL

SEQ ID NO: 14432 - protein, 22 aa, Artificial Sequence
  Quasi-synthetic sequence derived from human genome
VCLYFYCKFLWRCLKFVMRKLT

SEQ ID NO: 14433 - protein, 22 aa, Artificial Sequence
  Quasi-synthetic sequence derived from human genome
ALVLALVLVGLVSWRRRQRRLR

SEQ ID NO: 14434 - protein, 22 aa, Artificial Sequence
  Quasi-synthetic sequence derived from human genome
SVLRALRLLRIFKVTKYWASLR

SEQ ID NO: 14435 - protein, 22 aa, Artificial Sequence
  Quasi-synthetic sequence derived from human genome
FLVIFPMFTFPKKLPPRHKKKK

SEQ ID NO: 14436 - protein, 22 aa, Artificial Sequence
  Quasi-synthetic sequence derived from human genome
RLRLRLLALLLLLLAPPARAPK

SEQ ID NO: 14437 - protein, 22 aa, Artificial Sequence
  Quasi-synthetic sequence derived from human genome
FRLKKVVKWYLSGFYKKPKGLK

SEQ ID NO: 14438 - protein, 22 aa, Artificial Sequence
  Quasi-synthetic sequence derived from human genome
FFKGLPKVLPKLPKRVIVQRIL

SEQ ID NO: 14439 - protein, 22 aa, Artificial Sequence
  Quasi-synthetic sequence derived from human genome
LLKRYLLKRLNLIWNIYSTIIR

SEQ ID NO: 14440 - protein, 22 aa, Artificial Sequence
  Quasi-synthetic sequence derived from human genome
PKSFVYFIMRIVNFPKCRRRRL

SEQ ID NO: 14441 - protein, 22 aa, Artificial Sequence
  Quasi-synthetic sequence derived from human genome
LKRRYSFRLHIGRNIARPWKLI

SEQ ID NO: 14442 - protein, 22 aa, Artificial Sequence
  Quasi-synthetic sequence derived from human genome
LLVFVPHMRRFLSRKKIRHHIY

SEQ ID NO: 14443 - protein, 22 aa, Artificial Sequence
  Quasi-synthetic sequence derived from human genome
RFRSAVRVSIAISRMKFLVRRW

SEQ ID NO: 14444 - protein, 22 aa, Artificial Sequence
  Quasi-synthetic sequence derived from human genome
FLIFIRILGILLSKLRTRQMRC

SEQ ID NO: 14445 - protein, 22 aa, Artificial Sequence
  Quasi-synthetic sequence derived from human genome
RFAWPKILKISYKRSNFYIKIR

SEQ ID NO: 14446 - protein, 22 aa, Artificial Sequence
  Quasi-synthetic sequence derived from human genome
RIARFRFRAFHFLNRFPSVYLR

SEQ ID NO: 14447 - protein, 22 aa, Artificial Sequence
  Quasi-synthetic sequence derived from human genome
LAQLFRWIRKAAFSRLYQLRIR

SEQ ID NO: 14448 - protein, 22 aa, Artificial Sequence
  Quasi-synthetic sequence derived from human genome
IVKKGYLLKKGKGKRWKNLYFI

SEQ ID NO: 14449 - protein, 22 aa, Artificial Sequence
  Quasi-synthetic sequence derived from human genome
WRRRSCWRKWKQLSRLQRNMIL

SEQ ID NO: 14450 - protein, 22 aa, Artificial Sequence
  Quasi-synthetic sequence derived from human genome
WVIAAARQIQKMRKFYFRRIMR

SEQ ID NO: 14451 - protein, 22 aa, Artificial Sequence
  Quasi-synthetic sequence derived from human genome
LLLAKVMRFERFGRRRVIIKKG

SEQ ID NO: 14452 - protein, 22 aa, Artificial Sequence
  Quasi-synthetic sequence derived from human genome
LKWRVKKVVLVLLLVTSVFLFL

SEQ ID NO: 14453 - protein, 22 aa, Artificial Sequence
  Quasi-synthetic sequence derived from human genome
IIFGILFAILLVLVFIKKVAKK

SEQ ID NO: 14454 - protein, 22 aa, Artificial Sequence
  Quasi-synthetic sequence derived from human genome
PWVLRWLRSRRRRPRREALFFP

SEQ ID NO: 14455 - protein, 22 aa, Artificial Sequence
  Quasi-synthetic sequence derived from human genome
VRKFCVHFLQKKIFRAWFNMVR

SEQ ID NO: 14456 - protein, 22 aa, Artificial Sequence
  Quasi-synthetic sequence derived from human genome
RRNFMNIRPVKLKNLILLVKHW

SEQ ID NO: 14457 - protein, 22 aa, Artificial Sequence
  Quasi-synthetic sequence derived from human genome
LVYARIYVVLKQRRRKRILTRQ

SEQ ID NO: 14458 - protein, 22 aa, Artificial Sequence
  Quasi-synthetic sequence derived from human genome
ILKRALKVKQAMMQLYVLKLLK

SEQ ID NO: 14459 - protein, 22 aa, Artificial Sequence
  Quasi-synthetic sequence derived from human genome
KLRHASLKVIWKVMSILKGRKF

SEQ ID NO: 14460 - protein, 22 aa, Artificial Sequence
  Quasi-synthetic sequence derived from human genome
IFSLFRAPKLRMRVFGLCFVRF

SEQ ID NO: 14461 - protein, 22 aa, Artificial Sequence
  Quasi-synthetic sequence derived from human genome
RRRKTVRLLLANLVIFLLCFVP

SEQ ID NO: 14462 - protein, 22 aa, Artificial Sequence
  Quasi-synthetic sequence derived from human genome
LPRQRARKRTKVLSLAKRILRF

SEQ ID NO: 14463 - protein, 22 aa, Artificial Sequence
  Quasi-synthetic sequence derived from human genome
RVLGLLLLLGSRLARVRRALAR

SEQ ID NO: 14464 - protein, 22 aa, Artificial Sequence
  Quasi-synthetic sequence derived from human genome
RMYLRLRGRCPLLLRCLIYTLW

SEQ ID NO: 14465 - protein, 22 aa, Artificial Sequence
  Quasi-synthetic sequence derived from human genome
RRRRVLQTLVWFLLTLLLALFI

SEQ ID NO: 14466 - protein, 22 aa, Artificial Sequence
  Quasi-synthetic sequence derived from human genome
CILVVLLAIFLYLLRLRRIHHR

SEQ ID NO: 14467 - protein, 22 aa, Artificial Sequence
  Quasi-synthetic sequence derived from human genome
AKDVLGFLRVVRFVRILRIFKL

SEQ ID NO: 14468 - protein, 22 aa, Artificial Sequence
  Quasi-synthetic sequence derived from human genome
RRRVRPSIRLLSPVLSLILLLI

SEQ ID NO: 14469 - protein, 22 aa, Artificial Sequence
  Quasi-synthetic sequence derived from human genome
GYVKMKSRKLGIYRRCWLVFRK

SEQ ID NO: 14470 - protein, 22 aa, Artificial Sequence
  Quasi-synthetic sequence derived from human genome
RFLCGKEIKKKKCIFRLRIRVP

SEQ ID NO: 14471 - protein, 22 aa, Artificial Sequence
  Quasi-synthetic sequence derived from human genome
LAFKFLYIITKVRGYKTFLRLF

SEQ ID NO: 14472 - protein, 22 aa, Artificial Sequence
  Quasi-synthetic sequence derived from human genome
KLLLWACIVCVAFARKRRFPFI

SEQ ID NO: 14473 - protein, 22 aa, Artificial Sequence
  Quasi-synthetic sequence derived from human genome
KICAFLLRKKRFGQWTKLLCVI

SEQ ID NO: 14474 - protein, 22 aa, Artificial Sequence
  Quasi-synthetic sequence derived from human genome
LSLLLGVARSLWMLLKLRQRLR

SEQ ID NO: 14475 - protein, 22 aa, Artificial Sequence
  Quasi-synthetic sequence derived from human genome
RTLYLRYRPKVKFLFGIWPVIL

SEQ ID NO: 14476 - protein, 22 aa, Artificial Sequence
  Quasi-synthetic sequence derived from human genome
FFMARVFMRMKLPRSLALLPRL

SEQ ID NO: 14477 - protein, 22 aa, Artificial Sequence
  Quasi-synthetic sequence derived from human genome
RRRTRFVFQKALRSLRRYPLPL

SEQ ID NO: 14478 - protein, 22 aa, Artificial Sequence
  Quasi-synthetic sequence derived from human genome
LLMNRRKFLYQFKNVRWAKGRR

SEQ ID NO: 14479 - protein, 22 aa, Artificial Sequence
  Quasi-synthetic sequence derived from human genome
GTLLCIAIVLRFKKTWKLRALK

SEQ ID NO: 14480 - protein, 22 aa, Artificial Sequence
  Quasi-synthetic sequence derived from human genome
LPAARLARQYLLPLLRRLARRL

SEQ ID NO: 14481 - protein, 22 aa, Artificial Sequence
  Quasi-synthetic sequence derived from human genome
FLILSLLLFMVHRLRQRRRERI

SEQ ID NO: 14482 - protein, 22 aa, Artificial Sequence
  Quasi-synthetic sequence derived from human genome
IRKFFPKKKCFVFDRPVHRRKL

SEQ ID NO: 14483 - protein, 22 aa, Artificial Sequence
  Quasi-synthetic sequence derived from human genome
FAKTWRVHAIFKNVKMKKKIIK

SEQ ID NO: 14484 - protein, 22 aa, Artificial Sequence
  Quasi-synthetic sequence derived from human genome
RRAKRKVTRMILIVAALFCLCW

SEQ ID NO: 14485 - protein, 22 aa, Artificial Sequence
  Quasi-synthetic sequence derived from human genome
KRPVLGYRNLNLFKLFRLVHKL

SEQ ID NO: 14486 - protein, 22 aa, Artificial Sequence
  Quasi-synthetic sequence derived from human genome
WVIRVQKRHKMPRMKKLMRNRM

SEQ ID NO: 14487 - protein, 22 aa, Artificial Sequence
  Quasi-synthetic sequence derived from human genome
FVKVVKNKAYFKRYQVKFRRRR

SEQ ID NO: 14488 - protein, 22 aa, Artificial Sequence
  Quasi-synthetic sequence derived from human genome
VKIKKVLKSTKLKIFRGKRTLY

SEQ ID NO: 14489 - protein, 22 aa, Artificial Sequence
  Quasi-synthetic sequence derived from human genome
PLKSIKYLICTRYKWLIIKIVL

SEQ ID NO: 14490 - protein, 22 aa, Artificial Sequence
  Quasi-synthetic sequence derived from human genome
FLLGKCFKKGLKGKGFVLLVKL

SEQ ID NO: 14491 - protein, 22 aa, Artificial Sequence
  Quasi-synthetic sequence derived from human genome
WKRYRFKLIAFMVISIIALMLF

SEQ ID NO: 14492 - protein, 22 aa, Artificial Sequence
  Quasi-synthetic sequence derived from human genome
LMKVKLKKYTKFLFVRDPFVRL

SEQ ID NO: 14493 - protein, 22 aa, Artificial Sequence
  Quasi-synthetic sequence derived from human genome
KFRRRTCIILALFILFIFSLMM

SEQ ID NO: 14494 - protein, 22 aa, Artificial Sequence
  Quasi-synthetic sequence derived from human genome
KIGIYGWRKRCLYLFVLLLLII

SEQ ID NO: 14495 - protein, 22 aa, Artificial Sequence
  Quasi-synthetic sequence derived from human genome
LQKYARAWLARRRFQSIRRFVL

SEQ ID NO: 14496 - protein, 22 aa, Artificial Sequence
  Quasi-synthetic sequence derived from human genome
KKIKKVQSFMRGWLCRRKWKTI

SEQ ID NO: 14497 - protein, 22 aa, Artificial Sequence
  Quasi-synthetic sequence derived from human genome
FRHKVLILFKLILLEKKVLFYI

SEQ ID NO: 14498 - protein, 22 aa, Artificial Sequence
  Quasi-synthetic sequence derived from human genome
LVHLLKTVRLLRLLRLLQKLDR

SEQ ID NO: 14499 - protein, 22 aa, Artificial Sequence
  Quasi-synthetic sequence derived from human genome
LCSLLLWPTRLRRSFLAWRRGR

SEQ ID NO: 14500 - protein, 22 aa, Artificial Sequence
  Quasi-synthetic sequence derived from human genome
FFRRPKASLPRVFVLRALLMVL

SEQ ID NO: 14501 - protein, 22 aa, Artificial Sequence
  Quasi-synthetic sequence derived from human genome
LKSARYFLWHTYRWLLLKLLLL

SEQ ID NO: 14502 - protein, 22 aa, Artificial Sequence
  Quasi-synthetic sequence derived from human genome
GPKLRRFLKPQGHPRLLLWFKR

SEQ ID NO: 14503 - protein, 22 aa, Artificial Sequence
  Quasi-synthetic sequence derived from human genome
LSRISKFRRLRQLLRRRKKTRQ

SEQ ID NO: 14504 - protein, 22 aa, Artificial Sequence
  Quasi-synthetic sequence derived from human genome
LLLVVIILILAFWVLPKYKTRK

SEQ ID NO: 14505 - protein, 22 aa, Artificial Sequence
  Quasi-synthetic sequence derived from human genome
RKKMVRRVVCILVWLLAFCVSL

SEQ ID NO: 14506 - protein, 22 aa, Artificial Sequence
  Quasi-synthetic sequence derived from human genome
IIWPFIAQWLVYLYYQRRRRKL

SEQ ID NO: 14507 - protein, 22 aa, Artificial Sequence
  Quasi-synthetic sequence derived from human genome
RRRPARTLGLLLLVVLGFLVLR

SEQ ID NO: 14508 - protein, 22 aa, Artificial Sequence
  Quasi-synthetic sequence derived from human genome
AKVIRALLRILCCLLKAICRVL

SEQ ID NO: 14509 - protein, 22 aa, Artificial Sequence
  Quasi-synthetic sequence derived from human genome
FRVLLVKIRSGRRSVRMYNKIF

SEQ ID NO: 14510 - protein, 22 aa, Artificial Sequence
  Quasi-synthetic sequence derived from human genome
WWRTLVQRRIRQRRQALLRVYV

SEQ ID NO: 14511 - protein, 22 aa, Artificial Sequence
  Quasi-synthetic sequence derived from human genome
RLLLLLCIFLGTLRGFRARQIR

SEQ ID NO: 14512 - protein, 22 aa, Artificial Sequence
  Quasi-synthetic sequence derived from human genome
FRLLRVFKLAKSWPTLNMLIKI

SEQ ID NO: 14513 - protein, 22 aa, Artificial Sequence
  Quasi-synthetic sequence derived from human genome
LLLCRLRRLRARARARAAARLS

SEQ ID NO: 14514 - protein, 22 aa, Artificial Sequence
  Quasi-synthetic sequence derived from human genome
MWMGRLKMRKNSWLKIIISIIL

SEQ ID NO: 14515 - protein, 22 aa, Artificial Sequence
  Quasi-synthetic sequence derived from human genome
WMRRMRILRRLLRRYRESKKID

SEQ ID NO: 14516 - protein, 22 aa, Artificial Sequence
  Quasi-synthetic sequence derived from human genome
AATLIQRRFRTLMMRRRFLSLK

SEQ ID NO: 14517 - protein, 22 aa, Artificial Sequence
  Quasi-synthetic sequence derived from human genome
VKHLYNWNLPPRRILFIKRFII

SEQ ID NO: 14518 - protein, 22 aa, Artificial Sequence
  Quasi-synthetic sequence derived from human genome
ITWPIQAFVKRKVIIFLKKCLL

SEQ ID NO: 14519 - protein, 22 aa, Artificial Sequence
  Quasi-synthetic sequence derived from human genome
KLKEKQVRWKFIKRWKTRYFTL

SEQ ID NO: 14520 - protein, 22 aa, Artificial Sequence
  Quasi-synthetic sequence derived from human genome
GLNKIIQFIRHWRQWNRIFRWK

SEQ ID NO: 14521 - protein, 22 aa, Artificial Sequence
  Quasi-synthetic sequence derived from human genome
IKHFLRKIIMVHPKVRFHFSVK

SEQ ID NO: 14522 - protein, 22 aa, Artificial Sequence
  Quasi-synthetic sequence derived from human genome
LGLGLLHALLLVLLLCRLRRLR

SEQ ID NO: 14523 - protein, 22 aa, Artificial Sequence
  Quasi-synthetic sequence derived from human genome
IVRYSFKKQWSLGFIPKLKRKI

SEQ ID NO: 14524 - protein, 22 aa, Artificial Sequence
  Quasi-synthetic sequence derived from human genome
IRRLLILILKIGRRWTELIRTM

SEQ ID NO: 14525 - protein, 22 aa, Artificial Sequence
  Quasi-synthetic sequence derived from human genome
YLAVIGRMRTRLVRKRFLCLGW

SEQ ID NO: 14526 - protein, 22 aa, Artificial Sequence
  Quasi-synthetic sequence derived from human genome
WNIRAFMAVKNWPWMRLFFKIK

SEQ ID NO: 14527 - protein, 22 aa, Artificial Sequence
  Quasi-synthetic sequence derived from human genome
WLMKALFKTFYMVLLKSFLLKL

SEQ ID NO: 14528 - protein, 22 aa, Artificial Sequence
  Quasi-synthetic sequence derived from human genome
HKFLQLRFWGWWKLYNKVKPLL

SEQ ID NO: 14529 - protein, 22 aa, Artificial Sequence
  Quasi-synthetic sequence derived from human genome
QNIFHFLYRKNRSRIPLLRKRW

SEQ ID NO: 14530 - protein, 22 aa, Artificial Sequence
  Quasi-synthetic sequence derived from human genome
RLRKILFCVLGLYIAIPFLIKL

SEQ ID NO: 14531 - protein, 22 aa, Artificial Sequence
  Quasi-synthetic sequence derived from human genome
GCFLVVLLAILLYLLRLRRIHR

SEQ ID NO: 14532 - protein, 22 aa, Artificial Sequence
  Quasi-synthetic sequence derived from human genome
LWLIQWLLLKYKSIISRRFFCI

SEQ ID NO: 14533 - protein, 22 aa, Artificial Sequence
  Quasi-synthetic sequence derived from human genome
VGRIVQVLRLLRALRMLKLGRH

SEQ ID NO: 14534 - protein, 22 aa, Artificial Sequence
  Quasi-synthetic sequence derived from human genome
KVRSRYSFIQALVRRIRGLLRI

SEQ ID NO: 14535 - protein, 22 aa, Artificial Sequence
  Quasi-synthetic sequence derived from human genome
KKAIKYQSKARRKLMFIIICVI

SEQ ID NO: 14536 - protein, 22 aa, Artificial Sequence
  Quasi-synthetic sequence derived from human genome
RRKKLYLLFAQHRYISRLFSVL

SEQ ID NO: 14537 - protein, 22 aa, Artificial Sequence
  Quasi-synthetic sequence derived from human genome
LVVKKLRYYARFIVVCLLLNKM

SEQ ID NO: 14538 - protein, 22 aa, Artificial Sequence
  Quasi-synthetic sequence derived from human genome
RRPPRLRLCARLPDFFLLLLFR

SEQ ID NO: 14539 - protein, 22 aa, Artificial Sequence
  Quasi-synthetic sequence derived from human genome
ILVIVGLTFAVYVRRKSIKKKR

SEQ ID NO: 14540 - protein, 22 aa, Artificial Sequence
  Quasi-synthetic sequence derived from human genome
LKFFFLRTRRFALMVSLSIWIL

SEQ ID NO: 14541 - protein, 22 aa, Artificial Sequence
  Quasi-synthetic sequence derived from human genome
RVRLRALRLALLILLTFILCWT

SEQ ID NO: 14542 - protein, 22 aa, Artificial Sequence
  Quasi-synthetic sequence derived from human genome
RRRRRREYCKFALLLVLYTLVL

SEQ ID NO: 14543 - protein, 22 aa, Artificial Sequence
  Quasi-synthetic sequence derived from human genome
ALKFLAKCRKKKKLFAPWRGLQ

SEQ ID NO: 14544 - protein, 22 aa, Artificial Sequence
  Quasi-synthetic sequence derived from human genome
FTTLLIACLLLRVFRSGKRLKK

SEQ ID NO: 14545 - protein, 22 aa, Artificial Sequence
  Quasi-synthetic sequence derived from human genome
RPLVLKTLIQFTVKLRLLIKLP

SEQ ID NO: 14546 - protein, 22 aa, Artificial Sequence
  Quasi-synthetic sequence derived from human genome
MLRLLLVKKPSVRSLALKLLAF

SEQ ID NO: 14547 - protein, 22 aa, Artificial Sequence
  Quasi-synthetic sequence derived from human genome
LRRLLPPLLLLLLSLPPRARAK

SEQ ID NO: 14548 - protein, 22 aa, Artificial Sequence
  Quasi-synthetic sequence derived from human genome
KKRLLSWKQQVLKLLRTFPRKA

SEQ ID NO: 14549 - protein, 22 aa, Artificial Sequence
  Quasi-synthetic sequence derived from human genome
KRRYLDWRALMKRKRMKANIKL

SEQ ID NO: 14550 - protein, 22 aa, Artificial Sequence
  Quasi-synthetic sequence derived from human genome
YGIIKLFRYPCLRKGAKFRKYI

SEQ ID NO: 14551 - protein, 22 aa, Artificial Sequence
  Quasi-synthetic sequence derived from human genome
RKPLSGRTPRLVYKWFLLIYKL

SEQ ID NO: 14552 - protein, 22 aa, Artificial Sequence
  Quasi-synthetic sequence derived from human genome
YFIVVLRPLQLLRLFKLKERYR

SEQ ID NO: 14553 - protein, 22 aa, Artificial Sequence
  Quasi-synthetic sequence derived from human genome
FLLKPIQRLLHYRLLLRRLCGH

SEQ ID NO: 14554 - protein, 22 aa, Artificial Sequence
  Quasi-synthetic sequence derived from human genome
YFSPTLFRVIRLARIGRILRLI

SEQ ID NO: 14555 - protein, 22 aa, Artificial Sequence
  Quasi-synthetic sequence derived from human genome
LRRQWKCVQRRCLRHLAHRLRR

SEQ ID NO: 14556 - protein, 22 aa, Artificial Sequence
  Quasi-synthetic sequence derived from human genome
IPLSRRFRSVKLWFVIRSFGVK

SEQ ID NO: 14557 - protein, 22 aa, Artificial Sequence
  Quasi-synthetic sequence derived from human genome
GWLWRQSSILRRWKRNWFALWL

SEQ ID NO: 14558 - protein, 22 aa, Artificial Sequence
  Quasi-synthetic sequence derived from human genome
WLYTHPLIKLLFLPRRSRCKFF

SEQ ID NO: 14559 - protein, 22 aa, Artificial Sequence
  Quasi-synthetic sequence derived from human genome
KRILFLYNDLLKKRAAFTKLRR

SEQ ID NO: 14560 - protein, 22 aa, Artificial Sequence
  Quasi-synthetic sequence derived from human genome
AIILLLLLIIALMLWRLHWRRL

SEQ ID NO: 14561 - protein, 22 aa, Artificial Sequence
  Quasi-synthetic sequence derived from human genome
TLAPFLLWLRKCLRKAKKFVPA

SEQ ID NO: 14562 - protein, 22 aa, Artificial Sequence
  Quasi-synthetic sequence derived from human genome
LAILLVVAVFCILWNWNKRKKR

SEQ ID NO: 14563 - protein, 22 aa, Artificial Sequence
  Quasi-synthetic sequence derived from human genome
KKFWKLGAVIFFFIIVLVLMQR

SEQ ID NO: 14564 - protein, 22 aa, Artificial Sequence
  Quasi-synthetic sequence derived from human genome
RIGRVLRLIRGAKGIRTLLFAL

SEQ ID NO: 14565 - protein, 22 aa, Artificial Sequence
  Quasi-synthetic sequence derived from human genome
RRKMMFMGFIRLGVWYNFFRAW

SEQ ID NO: 14566 - protein, 22 aa, Artificial Sequence
  Quasi-synthetic sequence derived from human genome
AALTLQRCLRGFFIKRRFRSLR

SEQ ID NO: 14567 - protein, 22 aa, Artificial Sequence
  Quasi-synthetic sequence derived from human genome
MLLILALWKIGFFKRPLKKKME

SEQ ID NO: 14568 - protein, 22 aa, Artificial Sequence
  Quasi-synthetic sequence derived from human genome
IARLRAVQRKARFAKLKVCVFK

SEQ ID NO: 14569 - protein, 22 aa, Artificial Sequence
  Quasi-synthetic sequence derived from human genome
RFRKFPFFTRPLLSKWCPKSLF

SEQ ID NO: 14570 - protein, 22 aa, Artificial Sequence
  Quasi-synthetic sequence derived from human genome
KIRISKIRGKSLRRKRSMGFII

SEQ ID NO: 14571 - protein, 22 aa, Artificial Sequence
  Quasi-synthetic sequence derived from human genome
IQKYWRRVLAQRKLLMLKKEKL

SEQ ID NO: 14572 - protein, 22 aa, Artificial Sequence
  Quasi-synthetic sequence derived from human genome
IFILLLVFVLIIRGQSKKYAKK

SEQ ID NO: 14573 - protein, 22 aa, Artificial Sequence
  Quasi-synthetic sequence derived from human genome
MLLLFLIVVLLGLFAWHRRRQK

SEQ ID NO: 14574 - protein, 22 aa, Artificial Sequence
  Quasi-synthetic sequence derived from human genome
LFFRKRRADMPRVFVFRALLLV

SEQ ID NO: 14575 - protein, 22 aa, Artificial Sequence
  Quasi-synthetic sequence derived from human genome
LKRFQLTKLPPYLIFCIKRFTK

SEQ ID NO: 14576 - protein, 22 aa, Artificial Sequence
  Quasi-synthetic sequence derived from human genome
KCLRKRIWEKIALRKKELFKVR

SEQ ID NO: 14577 - protein, 22 aa, Artificial Sequence
  Quasi-synthetic sequence derived from human genome
VTIRKKHLQRPIFRLRCLVKQL

SEQ ID NO: 14578 - protein, 22 aa, Artificial Sequence
  Quasi-synthetic sequence derived from human genome
CLNKRFRAGFKRAFRWCPFIKV

SEQ ID NO: 14579 - protein, 22 aa, Artificial Sequence
  Quasi-synthetic sequence derived from human genome
CVRRRKWIRYRRYKSRDIWAKI

SEQ ID NO: 14580 - protein, 22 aa, Artificial Sequence
  Quasi-synthetic sequence derived from human genome
ALLFVFIYVQLWLVLRYRHKRL

SEQ ID NO: 14581 - protein, 22 aa, Artificial Sequence
  Quasi-synthetic sequence derived from human genome
FGISVLRALRLLRIFKITKYWA

SEQ ID NO: 14582 - protein, 22 aa, Artificial Sequence
  Quasi-synthetic sequence derived from human genome
KKFIWNHGITLPLKNVRKRRFR

SEQ ID NO: 14583 - protein, 22 aa, Artificial Sequence
  Quasi-synthetic sequence derived from human genome
RRRRRACIALFLVLLFAFGTLM

SEQ ID NO: 14584 - protein, 22 aa, Artificial Sequence
  Quasi-synthetic sequence derived from human genome
KLKQRVVLLAILLVIFIFTKVF

SEQ ID NO: 14585 - protein, 22 aa, Artificial Sequence
  Quasi-synthetic sequence derived from human genome
LLLLGLIILLLWKCGFFKRART

SEQ ID NO: 14586 - protein, 22 aa, Artificial Sequence
  Quasi-synthetic sequence derived from human genome
RLYCLKIHGLSSLWRLFRGKKW

SEQ ID NO: 14587 - protein, 22 aa, Artificial Sequence
  Quasi-synthetic sequence derived from human genome
LLRKLGVKLVQRLGLTFLKPKV

SEQ ID NO: 14588 - protein, 22 aa, Artificial Sequence
  Quasi-synthetic sequence derived from human genome
RRKKGLLLRPVAPLRTRPPLLI

SEQ ID NO: 14589 - protein, 22 aa, Artificial Sequence
  Quasi-synthetic sequence derived from human genome
RRLRKNLKSLIIVHPSWFIRTL

SEQ ID NO: 14590 - protein, 22 aa, Artificial Sequence
  Quasi-synthetic sequence derived from human genome
KLLAKIAKLQRRIKTVLLFQRN

SEQ ID NO: 14591 - protein, 22 aa, Artificial Sequence
  Quasi-synthetic sequence derived from human genome
LKKFLRKLHLPRDLPQKKKLKY

SEQ ID NO: 14592 - protein, 22 aa, Artificial Sequence
  Quasi-synthetic sequence derived from human genome
KIFFRYQTFRFIWLTKPPGRRL

SEQ ID NO: 14593 - protein, 22 aa, Artificial Sequence
  Quasi-synthetic sequence derived from human genome
GVIGFLFAIFLILLLVYRMRKK

SEQ ID NO: 14594 - protein, 22 aa, Artificial Sequence
  Quasi-synthetic sequence derived from human genome
FGIPRLEKILRNKAKIKFIIKK

SEQ ID NO: 14595 - protein, 22 aa, Artificial Sequence
  Quasi-synthetic sequence derived from human genome
WLRKSPPEKKLKRYAWKRRWFV

SEQ ID NO: 14596 - protein, 22 aa, Artificial Sequence
  Quasi-synthetic sequence derived from human genome
ILLCIIILLILVLMFVVWMKRR

SEQ ID NO: 14597 - protein, 22 aa, Artificial Sequence
  Quasi-synthetic sequence derived from human genome
TLLAKHWKLLPLLRSVLRFRLG

SEQ ID NO: 14598 - protein, 22 aa, Artificial Sequence
  Quasi-synthetic sequence derived from human genome
FLRLKRKFIQMRRPFLERRDLI

SEQ ID NO: 14599 - protein, 22 aa, Artificial Sequence
  Quasi-synthetic sequence derived from human genome
KIIRTIFKRLKSFICPKLHMGF

SEQ ID NO: 14600 - protein, 22 aa, Artificial Sequence
  Quasi-synthetic sequence derived from human genome
VSTMLLLWTFLLQRRFVKKRGK

SEQ ID NO: 14601 - protein, 22 aa, Artificial Sequence
  Quasi-synthetic sequence derived from human genome
LKIMPKKKRLSAGRVPLILFLC

SEQ ID NO: 14602 - protein, 22 aa, Artificial Sequence
  Quasi-synthetic sequence derived from human genome
KAFRDTFRLLLLCRWDKRRWRK

SEQ ID NO: 14603 - protein, 22 aa, Artificial Sequence
  Quasi-synthetic sequence derived from human genome
RLKIRKCMGRLHLRCPVFMSFL

SEQ ID NO: 14604 - protein, 22 aa, Artificial Sequence
  Quasi-synthetic sequence derived from human genome
KFLGLRAFIRKQINNIFLRFIY

SEQ ID NO: 14605 - protein, 22 aa, Artificial Sequence
  Quasi-synthetic sequence derived from human genome
LLRLVSAVNRRRMKLLLGIALL

SEQ ID NO: 14606 - protein, 22 aa, Artificial Sequence
  Quasi-synthetic sequence derived from human genome
FLKPIAKLFSVIKNKLSRKLLC

SEQ ID NO: 14607 - protein, 22 aa, Artificial Sequence
  Quasi-synthetic sequence derived from human genome
LLLVLVLLVALRARFWKQSRGK

SEQ ID NO: 14608 - protein, 22 aa, Artificial Sequence
  Quasi-synthetic sequence derived from human genome
GILLLLALVAILWKLGFFKRKY

SEQ ID NO: 14609 - protein, 22 aa, Artificial Sequence
  Quasi-synthetic sequence derived from human genome
FFIIFIVFISRKCCPPTLRRIR

SEQ ID NO: 14610 - protein, 22 aa, Artificial Sequence
  Quasi-synthetic sequence derived from human genome
KAKYKKVQLVRLVGMMLLIFAR

SEQ ID NO: 14611 - protein, 22 aa, Artificial Sequence
  Quasi-synthetic sequence derived from human genome
IKKELVVLRLASLLFKRFLSLR

SEQ ID NO: 14612 - protein, 22 aa, Artificial Sequence
  Quasi-synthetic sequence derived from human genome
TFTRRLVPFLWLKWPGTRLLLR

SEQ ID NO: 14613 - protein, 22 aa, Artificial Sequence
  Quasi-synthetic sequence derived from human genome
FIVGLLILLSRRFRCGGNKKRR

SEQ ID NO: 14614 - protein, 22 aa, Artificial Sequence
  Quasi-synthetic sequence derived from human genome
RRMFRVRNCLRGLGLFLLVFSF

SEQ ID NO: 14615 - protein, 22 aa, Artificial Sequence
  Quasi-synthetic sequence derived from human genome
LLFQVIRLYQRRRWTIRAMHLF

SEQ ID NO: 14616 - protein, 22 aa, Artificial Sequence
  Quasi-synthetic sequence derived from human genome
VLVYFVVRTVRMRRRNRKTRRY

SEQ ID NO: 14617 - protein, 22 aa, Artificial Sequence
  Quasi-synthetic sequence derived from human genome
WWARAARLARLRFRRSLLPPQR

SEQ ID NO: 14618 - protein, 22 aa, Artificial Sequence
  Quasi-synthetic sequence derived from human genome
LRRLHYVPATKVFLSFRRPFWR

SEQ ID NO: 14619 - protein, 22 aa, Artificial Sequence
  Quasi-synthetic sequence derived from human genome
KFWARGRKPWKLAIQILKIAMV

SEQ ID NO: 14620 - protein, 22 aa, Artificial Sequence
  Quasi-synthetic sequence derived from human genome
PRYRFRKRDKVLFYGRKIMRKV

SEQ ID NO: 14621 - protein, 22 aa, Artificial Sequence
  Quasi-synthetic sequence derived from human genome
KLKKWIKILEAKTKQLPKFFLI

SEQ ID NO: 14622 - protein, 22 aa, Artificial Sequence
  Quasi-synthetic sequence derived from human genome
LLVIVFIIIVLYMLRFKKYKQA

SEQ ID NO: 14623 - protein, 22 aa, Artificial Sequence
  Quasi-synthetic sequence derived from human genome
FRRGRSFLLRSWHHLMKRVQIK

SEQ ID NO: 14624 - protein, 22 aa, Artificial Sequence
  Quasi-synthetic sequence derived from human genome
KLGLLEFKILWKKLKKWMDIFR

SEQ ID NO: 14625 - protein, 22 aa, Artificial Sequence
  Quasi-synthetic sequence derived from human genome
AVTVLGIMILGLICLLRWRRRK

SEQ ID NO: 14626 - protein, 22 aa, Artificial Sequence
  Quasi-synthetic sequence derived from human genome
KVPRKKVNVKVFIIIAVFFICF

SEQ ID NO: 14627 - protein, 22 aa, Artificial Sequence
  Quasi-synthetic sequence derived from human genome
RFAWPKVLKISYKRNNFYIKIR

SEQ ID NO: 14628 - protein, 22 aa, Artificial Sequence
  Quasi-synthetic sequence derived from human genome
RRLRRLAHLVLFCPFSKRLQGR

SEQ ID NO: 14629 - protein, 22 aa, Artificial Sequence
  Quasi-synthetic sequence derived from human genome
WHKFKQWVIPWHLNKRYNRKRF

SEQ ID NO: 14630 - protein, 22 aa, Artificial Sequence
  Quasi-synthetic sequence derived from human genome
KKWGMLFLVNQLFKIYFKINKL

SEQ ID NO: 14631 - protein, 22 aa, Artificial Sequence
  Quasi-synthetic sequence derived from human genome
LLFLIILGKILLNILTLGMRRK

SEQ ID NO: 14632 - protein, 22 aa, Artificial Sequence
  Quasi-synthetic sequence derived from human genome
LLVQRTIARLRLKKIFSGVFVK

SEQ ID NO: 14633 - protein, 22 aa, Artificial Sequence
  Quasi-synthetic sequence derived from human genome
FCLIVLSLSTFHIHKRRMKKRK

SEQ ID NO: 14634 - protein, 22 aa, Artificial Sequence
  Quasi-synthetic sequence derived from human genome
LFNINRKLKKHLCLYLALKPRM

SEQ ID NO: 14635 - protein, 22 aa, Artificial Sequence
  Quasi-synthetic sequence derived from human genome
LPINPTIIRIMRVLRIARVLKL

SEQ ID NO: 14636 - protein, 22 aa, Artificial Sequence
  Quasi-synthetic sequence derived from human genome
MIILSHIYIIIMRLSGRCRKKR

SEQ ID NO: 14637 - protein, 22 aa, Artificial Sequence
  Quasi-synthetic sequence derived from human genome
KIVKSIVEKKPRTFIIKLIKWL

SEQ ID NO: 14638 - protein, 22 aa, Artificial Sequence
  Quasi-synthetic sequence derived from human genome
LLLKIYLSRHISILFYLKILYK

SEQ ID NO: 14639 - protein, 22 aa, Artificial Sequence
  Quasi-synthetic sequence derived from human genome
LKNIRKVYGRCMWYRLRLLKPQ

SEQ ID NO: 14640 - protein, 22 aa, Artificial Sequence
  Quasi-synthetic sequence derived from human genome
ILGICIVVVVSIWLFRRKSIKK

SEQ ID NO: 14641 - protein, 22 aa, Artificial Sequence
  Quasi-synthetic sequence derived from human genome
RRLRKNLKSFIIVHPSWFIRTI

SEQ ID NO: 14642 - protein, 22 aa, Artificial Sequence
  Quasi-synthetic sequence derived from human genome
MARRSRHRLLLLLLRYLVVALG

SEQ ID NO: 14643 - protein, 22 aa, Artificial Sequence
  Quasi-synthetic sequence derived from human genome
FLFRLFKRRQGRIFPEGKMWKL

SEQ ID NO: 14644 - protein, 22 aa, Artificial Sequence
  Quasi-synthetic sequence derived from human genome
LLLQSFKRRFLAARALRSFRWQ

SEQ ID NO: 14645 - protein, 22 aa, Artificial Sequence
  Quasi-synthetic sequence derived from human genome
RPFLKRAILVLSYVLVILYFRL

SEQ ID NO: 14646 - protein, 22 aa, Artificial Sequence
  Quasi-synthetic sequence derived from human genome
IVFLLLLAILLFFAVKYLLRWK

SEQ ID NO: 14647 - protein, 22 aa, Artificial Sequence
  Quasi-synthetic sequence derived from human genome
LLFFTILVLSYFRYMRIYRRYI

SEQ ID NO: 14648 - protein, 22 aa, Artificial Sequence
  Quasi-synthetic sequence derived from human genome
KLRHWQWWRLFTKVKPLLQVTR

SEQ ID NO: 14649 - protein, 22 aa, Artificial Sequence
  Quasi-synthetic sequence derived from human genome
IQRKLRRACLVVSLCISWRRRV

SEQ ID NO: 14650 - protein, 22 aa, Artificial Sequence
  Quasi-synthetic sequence derived from human genome
RFSRISMKLPRIPLRRQKLPKV

SEQ ID NO: 14651 - protein, 22 aa, Artificial Sequence
  Quasi-synthetic sequence derived from human genome
KQRLRKRVNAALVIQKYWRRVL

SEQ ID NO: 14652 - protein, 22 aa, Artificial Sequence
  Quasi-synthetic sequence derived from human genome
LRIFINVSRFFCVQLKKMVRLM

SEQ ID NO: 14653 - protein, 22 aa, Artificial Sequence
  Quasi-synthetic sequence derived from human genome
KPRHRCRKRKPLLAIGFYLYRM

SEQ ID NO: 14654 - protein, 22 aa, Artificial Sequence
  Quasi-synthetic sequence derived from human genome
KYVLARRRLVKVINNRAKLLSL

SEQ ID NO: 14655 - protein, 22 aa, Artificial Sequence
  Quasi-synthetic sequence derived from human genome
RLRINRFAWPKILKISYKRSNF

SEQ ID NO: 14656 - protein, 22 aa, Artificial Sequence
  Quasi-synthetic sequence derived from human genome
FVRILRIFKLTRHFVGLRVLGH

SEQ ID NO: 14657 - protein, 22 aa, Artificial Sequence
  Quasi-synthetic sequence derived from human genome
LVRGGWLWRQSSILRRWKRNWF

SEQ ID NO: 14658 - protein, 22 aa, Artificial Sequence
  Quasi-synthetic sequence derived from human genome
LRAWKRIFWRQILLTLGLLGLF

SEQ ID NO: 14659 - protein, 22 aa, Artificial Sequence
  Quasi-synthetic sequence derived from human genome
LLLVFLVACFINRKCQKQRKKK

SEQ ID NO: 14660 - protein, 22 aa, Artificial Sequence
  Quasi-synthetic sequence derived from human genome
GLKMLMKRALKFKDPLLMKMIR

SEQ ID NO: 14661 - protein, 22 aa, Artificial Sequence
  Quasi-synthetic sequence derived from human genome
ILGGILALLILILLLLLFLRRR

SEQ ID NO: 14662 - protein, 22 aa, Artificial Sequence
  Quasi-synthetic sequence derived from human genome
LLPRRRRCFPARAPLLRVALCL

SEQ ID NO: 14663 - protein, 22 aa, Artificial Sequence
  Quasi-synthetic sequence derived from human genome
KMMLVRRFRVLILMVFLVACAL

SEQ ID NO: 14664 - protein, 22 aa, Artificial Sequence
  Quasi-synthetic sequence derived from human genome
VRRFLVTLRIRRACGPPRVRVF

SEQ ID NO: 14665 - protein, 22 aa, Artificial Sequence
  Quasi-synthetic sequence derived from human genome
LRLWGALRLGAVILRWRYHALR

SEQ ID NO: 14666 - protein, 22 aa, Artificial Sequence
  Quasi-synthetic sequence derived from human genome
KKQKIIKMLLIVALLFILSWLP

SEQ ID NO: 14667 - protein, 22 aa, Artificial Sequence
  Quasi-synthetic sequence derived from human genome
WRPRRARGTPLLLLLLLLLLWP

SEQ ID NO: 14668 - protein, 22 aa, Artificial Sequence
  Quasi-synthetic sequence derived from human genome
AFFYPWFRKALKMMLFGKIFQK

SEQ ID NO: 14669 - protein, 22 aa, Artificial Sequence
  Quasi-synthetic sequence derived from human genome
MKQGVIKSLKIKYRHCLIKKFL

SEQ ID NO: 14670 - protein, 22 aa, Artificial Sequence
  Quasi-synthetic sequence derived from human genome
HKFKQWVIPWHLNKRYNRKRFF

SEQ ID NO: 14671 - protein, 22 aa, Artificial Sequence
  Quasi-synthetic sequence derived from human genome
FRLQFNNKRRLRRPYYPRKALL

SEQ ID NO: 14672 - protein, 22 aa, Artificial Sequence
  Quasi-synthetic sequence derived from human genome
KIRRGRTRPQALLFLCMILLLI

SEQ ID NO: 14673 - protein, 22 aa, Artificial Sequence
  Quasi-synthetic sequence derived from human genome
KRMVSWSFHKLKTMKHLLLLLL

SEQ ID NO: 14674 - protein, 22 aa, Artificial Sequence
  Quasi-synthetic sequence derived from human genome
CRPLNKKWRGMKWKKWSIHIVI

SEQ ID NO: 14675 - protein, 22 aa, Artificial Sequence
  Quasi-synthetic sequence derived from human genome
VFVFHRLKIKQILPTIYKRKNL

SEQ ID NO: 14676 - protein, 22 aa, Artificial Sequence
  Quasi-synthetic sequence derived from human genome
QKKSRKKMCILVLVLSVIILIL

SEQ ID NO: 14677 - protein, 22 aa, Artificial Sequence
  Quasi-synthetic sequence derived from human genome
VFLFLILIRRALSASQKKKVII

SEQ ID NO: 14678 - protein, 22 aa, Artificial Sequence
  Quasi-synthetic sequence derived from human genome
FFRREIKRRPLFRSCFILLPYL

SEQ ID NO: 14679 - protein, 22 aa, Artificial Sequence
  Quasi-synthetic sequence derived from human genome
KPKRKRITGRKRLSKGFWSLLF

SEQ ID NO: 14680 - protein, 22 aa, Artificial Sequence
  Quasi-synthetic sequence derived from human genome
LLRKVRAKETRKRALSRLKLKL

SEQ ID NO: 14681 - protein, 22 aa, Artificial Sequence
  Quasi-synthetic sequence derived from human genome
LRIRLFNFSLKLLSCLLYIIRV

SEQ ID NO: 14682 - protein, 22 aa, Artificial Sequence
  Quasi-synthetic sequence derived from human genome
IIYSIKTKQIRQRIIKKFQFIK

SEQ ID NO: 14683 - protein, 22 aa, Artificial Sequence
  Quasi-synthetic sequence derived from human genome
RQQGPRVRRGISRLWLRVLLRL

SEQ ID NO: 14684 - protein, 22 aa, Artificial Sequence
  Quasi-synthetic sequence derived from human genome
RYLRRRLVPRYRLQLLGIACMV

SEQ ID NO: 14685 - protein, 22 aa, Artificial Sequence
  Quasi-synthetic sequence derived from human genome
RLKLFFIKNQRSSLRIRLFNFS

SEQ ID NO: 14686 - protein, 22 aa, Artificial Sequence
  Quasi-synthetic sequence derived from human genome
FKERLKLFFIKNQRSSLRIRLF

SEQ ID NO: 14687 - protein, 22 aa, Artificial Sequence
  Quasi-synthetic sequence derived from human genome
ILLIVLKNVRRRSARRNLSCRR

SEQ ID NO: 14688 - protein, 22 aa, Artificial Sequence
  Quasi-synthetic sequence derived from human genome
LPPRRILFIKHFIIYSIPRYVR

SEQ ID NO: 14689 - protein, 22 aa, Artificial Sequence
  Quasi-synthetic sequence derived from human genome
LRKRTLKVLTFLVLFIFLTSFF

SEQ ID NO: 14690 - protein, 22 aa, Artificial Sequence
  Quasi-synthetic sequence derived from human genome
KKRKRAIKLIVTVLAMYLICFT

SEQ ID NO: 14691 - protein, 22 aa, Artificial Sequence
  Quasi-synthetic sequence derived from human genome
FRLMRIFRVLKLARHSTGLRSL

SEQ ID NO: 14692 - protein, 22 aa, Artificial Sequence
  Quasi-synthetic sequence derived from human genome
LLLLFYVVRYCWLRRQAALQRR

SEQ ID NO: 14693 - protein, 22 aa, Artificial Sequence
  Quasi-synthetic sequence derived from human genome
IKSLIRKFTCKLFGKLNIIYLL

SEQ ID NO: 14694 - protein, 22 aa, Artificial Sequence
  Quasi-synthetic sequence derived from human genome
LRDLLFARGAPAWLRRRYLRLR

SEQ ID NO: 14695 - protein, 22 aa, Artificial Sequence
  Quasi-synthetic sequence derived from human genome
RILCCLTFLVKVKSKALLKNRL

SEQ ID NO: 14696 - protein, 22 aa, Artificial Sequence
  Quasi-synthetic sequence derived from human genome
RCYRKYKQLTWIALKFALYKKM

SEQ ID NO: 14697 - protein, 22 aa, Artificial Sequence
  Quasi-synthetic sequence derived from human genome
LACIFVLLVLVLLILSMRRHRK

SEQ ID NO: 14698 - protein, 22 aa, Artificial Sequence
  Quasi-synthetic sequence derived from human genome
VKRHRSSFRNRFPLLKVLILQR

SEQ ID NO: 14699 - protein, 22 aa, Artificial Sequence
  Quasi-synthetic sequence derived from human genome
KLLIFLALALFLATVLYIVKKR

SEQ ID NO: 14700 - protein, 22 aa, Artificial Sequence
  Quasi-synthetic sequence derived from human genome
RSVHYWKKVLPLLKIIKKKNSI

SEQ ID NO: 14701 - protein, 22 aa, Artificial Sequence
  Quasi-synthetic sequence derived from human genome
LKRRILRVVAHCNKPKYKILLH

SEQ ID NO: 14702 - protein, 22 aa, Artificial Sequence
  Quasi-synthetic sequence derived from human genome
MRAKWRKKRMRRLKRKRRKMRQ

SEQ ID NO: 14703 - protein, 22 aa, Artificial Sequence
  Quasi-synthetic sequence derived from human genome
LILPFQRITRLKLLVQNILKRV

SEQ ID NO: 14704 - protein, 22 aa, Artificial Sequence
  Quasi-synthetic sequence derived from human genome
RSPRVRLLLLLLLLLVVPWGVR

SEQ ID NO: 14705 - protein, 22 aa, Artificial Sequence
  Quasi-synthetic sequence derived from human genome
VRIMAKDLVRTRRYVRKFVLMR

SEQ ID NO: 14706 - protein, 22 aa, Artificial Sequence
  Quasi-synthetic sequence derived from human genome
VRGWLVRKRFLEQRAKIRLLHF

SEQ ID NO: 14707 - protein, 22 aa, Artificial Sequence
  Quasi-synthetic sequence derived from human genome
LVVVLGVVFGILIKRRQQKIRK

SEQ ID NO: 14708 - protein, 22 aa, Artificial Sequence
  Quasi-synthetic sequence derived from human genome
MAKWVPALLLRRVPLFSLRFRP

SEQ ID NO: 14709 - protein, 22 aa, Artificial Sequence
  Quasi-synthetic sequence derived from human genome
KFRRYLSVFFRKHITKRFCKQC

SEQ ID NO: 14710 - protein, 22 aa, Artificial Sequence
  Quasi-synthetic sequence derived from human genome
RFWAKHRWGLPLRVLKPIQCFK

SEQ ID NO: 14711 - protein, 22 aa, Artificial Sequence
  Quasi-synthetic sequence derived from human genome
LFIIPKKLMIFLRTVIRLERKT

SEQ ID NO: 14712 - protein, 22 aa, Artificial Sequence
  Quasi-synthetic sequence derived from human genome
LVKMGGKIKSWKKRWFVFDRLK

SEQ ID NO: 14713 - protein, 22 aa, Artificial Sequence
  Quasi-synthetic sequence derived from human genome
LVYLRLLFFIHDRRKMRPARLV

SEQ ID NO: 14714 - protein, 22 aa, Artificial Sequence
  Quasi-synthetic sequence derived from human genome
SMFYLLRIANFSNLIFLRIKRR

SEQ ID NO: 14715 - protein, 22 aa, Artificial Sequence
  Quasi-synthetic sequence derived from human genome
GFPVKKCSAFQFFKKRVRRWIK

SEQ ID NO: 14716 - protein, 22 aa, Artificial Sequence
  Quasi-synthetic sequence derived from human genome
LLVFLLMVAVYTRIFFYVRRRV

SEQ ID NO: 14717 - protein, 22 aa, Artificial Sequence
  Quasi-synthetic sequence derived from human genome
LIGLLKTARLLRLVRVARKLDR

SEQ ID NO: 14718 - protein, 22 aa, Artificial Sequence
  Quasi-synthetic sequence derived from human genome
LGFILICYLKIVICLRRRNAKV

SEQ ID NO: 14719 - protein, 22 aa, Artificial Sequence
  Quasi-synthetic sequence derived from human genome
QATSLAILRVIRLVRVFRIFKL

SEQ ID NO: 14720 - protein, 22 aa, Artificial Sequence
  Quasi-synthetic sequence derived from human genome
LVKFRSLVHAYVSRRRYLKLRA

SEQ ID NO: 14721 - protein, 22 aa, Artificial Sequence
  Quasi-synthetic sequence derived from human genome
YRKVLYCVVIIQKNYRAFLLRR

SEQ ID NO: 14722 - protein, 22 aa, Artificial Sequence
  Quasi-synthetic sequence derived from human genome
KHFLRKIIMVHPKVRFHFSVKV

SEQ ID NO: 14723 - protein, 22 aa, Artificial Sequence
  Quasi-synthetic sequence derived from human genome
SHLIFFIFYLRNMKKKYTKMVK

SEQ ID NO: 14724 - protein, 22 aa, Artificial Sequence
  Quasi-synthetic sequence derived from human genome
LFLIPRNPPPRLKSKKWSKKFF

SEQ ID NO: 14725 - protein, 22 aa, Artificial Sequence
  Quasi-synthetic sequence derived from human genome
KKKKIVKYGMGGLIILFLIAII

SEQ ID NO: 14726 - protein, 22 aa, Artificial Sequence
  Quasi-synthetic sequence derived from human genome
RLKRLRNIHYLFNTALFLIAWR

SEQ ID NO: 14727 - protein, 22 aa, Artificial Sequence
  Quasi-synthetic sequence derived from human genome
VTLLWKHLKSSLRILFRHFFPK

SEQ ID NO: 14728 - protein, 22 aa, Artificial Sequence
  Quasi-synthetic sequence derived from human genome
LKKRTKDKLFQFLKLRKYSIKV

SEQ ID NO: 14729 - protein, 22 aa, Artificial Sequence
  Quasi-synthetic sequence derived from human genome
FIITKCCLFCFWKFARKGKKGK

SEQ ID NO: 14730 - protein, 22 aa, Artificial Sequence
  Quasi-synthetic sequence derived from human genome
KRFHPFCLVLRKRKSTLFWGAR

SEQ ID NO: 14731 - protein, 22 aa, Artificial Sequence
  Quasi-synthetic sequence derived from human genome
RFIRHKCKQRFTKITQYLIRIR

SEQ ID NO: 14732 - protein, 22 aa, Artificial Sequence
  Quasi-synthetic sequence derived from human genome
LKSAPSKKMWIKLRSLLRYMVK

SEQ ID NO: 14733 - protein, 22 aa, Artificial Sequence
  Quasi-synthetic sequence derived from human genome
WKKSRKLLGQRLFNKLMKMTFY

SEQ ID NO: 14734 - protein, 22 aa, Artificial Sequence
  Quasi-synthetic sequence derived from human genome
VVLVRGLLLLIPFLILLRKLIF

SEQ ID NO: 14735 - protein, 22 aa, Artificial Sequence
  Quasi-synthetic sequence derived from human genome
VFRIFFHKIFIRPLRYRSRCSN

SEQ ID NO: 14736 - protein, 22 aa, Artificial Sequence
  Quasi-synthetic sequence derived from human genome
KFLLLYALLKLSLIRGKSLLFV

SEQ ID NO: 14737 - protein, 22 aa, Artificial Sequence
  Quasi-synthetic sequence derived from human genome
ILEKLKIITYRNLFKKVYLLLK

SEQ ID NO: 14738 - protein, 22 aa, Artificial Sequence
  Quasi-synthetic sequence derived from human genome
RLLILWRILYKKTLWYQAQLNR

SEQ ID NO: 14739 - protein, 22 aa, Artificial Sequence
  Quasi-synthetic sequence derived from human genome
FRRYRGAIARKRIRLGRKYVIS

SEQ ID NO: 14740 - protein, 22 aa, Artificial Sequence
  Quasi-synthetic sequence derived from human genome
RKFLQMKRRKYGFIYKTHLFGR

SEQ ID NO: 14741 - protein, 22 aa, Artificial Sequence
  Quasi-synthetic sequence derived from human genome
ALKLLRKRSQVWKPKVIRISAR

SEQ ID NO: 14742 - protein, 22 aa, Artificial Sequence
  Quasi-synthetic sequence derived from human genome
TTLIGLLKTARLLRLVRVARKL

SEQ ID NO: 14743 - protein, 22 aa, Artificial Sequence
  Quasi-synthetic sequence derived from human genome
FIPFFKYCLLRKSFTCWKKNVR

SEQ ID NO: 14744 - protein, 22 aa, Artificial Sequence
  Quasi-synthetic sequence derived from human genome
ACIPVFRLARRRKKILFYCHFP

SEQ ID NO: 14745 - protein, 22 aa, Artificial Sequence
  Quasi-synthetic sequence derived from human genome
RIPLLRKRRFQLCRCMNPRARK

SEQ ID NO: 14746 - protein, 22 aa, Artificial Sequence
  Quasi-synthetic sequence derived from human genome
KKYRKYYYKSPKPLLRPFLCRI

SEQ ID NO: 14747 - protein, 22 aa, Artificial Sequence
  Quasi-synthetic sequence derived from human genome
KKLKILGMPFRNIRSILKMVNL

SEQ ID NO: 14748 - protein, 22 aa, Artificial Sequence
  Quasi-synthetic sequence derived from human genome
VRHPLFIWLKMRISKLVPWMIL

SEQ ID NO: 14749 - protein, 22 aa, Artificial Sequence
  Quasi-synthetic sequence derived from human genome
LRAPRKKIHRRVLKKNPLKNLR

SEQ ID NO: 14750 - protein, 22 aa, Artificial Sequence
  Quasi-synthetic sequence derived from human genome
LLILLRLWRVARIINGIIISVK

SEQ ID NO: 14751 - protein, 22 aa, Artificial Sequence
  Quasi-synthetic sequence derived from human genome
IFEKLFKSLLGKKKMRILILSL

SEQ ID NO: 14752 - protein, 22 aa, Artificial Sequence
  Quasi-synthetic sequence derived from human genome
LFNKAKVNVNLLIFLLNKKFLR

SEQ ID NO: 14753 - protein, 22 aa, Artificial Sequence
  Quasi-synthetic sequence derived from human genome
LLLWVKQRKDLLHLCCKKLKIL

SEQ ID NO: 14754 - protein, 22 aa, Artificial Sequence
  Quasi-synthetic sequence derived from human genome
FIKILLKRGGVKVSTKNLIKLF

SEQ ID NO: 14755 - protein, 22 aa, Artificial Sequence
  Quasi-synthetic sequence derived from human genome
MNPRARKKRSRIPLLRKRRFQL

SEQ ID NO: 14756 - protein, 22 aa, Artificial Sequence
  Quasi-synthetic sequence derived from human genome
LILAIRSILLVIPFPFTLRRLK

SEQ ID NO: 14757 - protein, 22 aa, Artificial Sequence
  Quasi-synthetic sequence derived from human genome
RRPAGSRLRLLLLLLLPPLLLL

SEQ ID NO: 14758 - protein, 22 aa, Artificial Sequence
  Quasi-synthetic sequence derived from human genome
FWKKKKSMIGMSTKLWKVKKAL

SEQ ID NO: 14759 - protein, 22 aa, Artificial Sequence
  Quasi-synthetic sequence derived from human genome
VRRNSKLATLGRIFKPWKWRKK

SEQ ID NO: 14760 - protein, 22 aa, Artificial Sequence
  Quasi-synthetic sequence derived from human genome
KLAKRLKPLKVRRIKSEKLHLK

SEQ ID NO: 14761 - protein, 22 aa, Artificial Sequence
  Quasi-synthetic sequence derived from human genome
ILINFFIFVRIVQLLVAKLRAR

SEQ ID NO: 14762 - protein, 22 aa, Artificial Sequence
  Quasi-synthetic sequence derived from human genome
RLRGGERLLFLFSRMLLVAKRR

SEQ ID NO: 14763 - protein, 22 aa, Artificial Sequence
  Quasi-synthetic sequence derived from human genome
CWIILMVFSIWLYRHRKKRNGL

SEQ ID NO: 14764 - protein, 22 aa, Artificial Sequence
  Quasi-synthetic sequence derived from human genome
LINPTKTFYYKSRFWLLKLLFR

SEQ ID NO: 14765 - protein, 22 aa, Artificial Sequence
  Quasi-synthetic sequence derived from human genome
RRIFIQLMKRFGLKATTKINWK

SEQ ID NO: 14766 - protein, 22 aa, Artificial Sequence
  Quasi-synthetic sequence derived from human genome
RYAAIVHPLRLRHLRRPRVARL

SEQ ID NO: 14767 - protein, 22 aa, Artificial Sequence
  Quasi-synthetic sequence derived from human genome
FIVTKCCLFCFWKFARKAKKGK

SEQ ID NO: 14768 - protein, 22 aa, Artificial Sequence
  Quasi-synthetic sequence derived from human genome
LGFLFKRFLRIQRLFPPVPQIK

SEQ ID NO: 14769 - protein, 22 aa, Artificial Sequence
  Quasi-synthetic sequence derived from human genome
VILYCRIYSLVRTRSRRLTFRK

SEQ ID NO: 14770 - protein, 22 aa, Artificial Sequence
  Quasi-synthetic sequence derived from human genome
KFRAKGRKPCKLMLQVVKILVV

SEQ ID NO: 14771 - protein, 22 aa, Artificial Sequence
  Quasi-synthetic sequence derived from human genome
KKHIKHHCNKVLLRVRMLYYLK

SEQ ID NO: 14772 - protein, 22 aa, Artificial Sequence
  Quasi-synthetic sequence derived from human genome
LYSRAVRNLKKKLLPWQRRGLL

SEQ ID NO: 14773 - protein, 22 aa, Artificial Sequence
  Quasi-synthetic sequence derived from human genome
RLPLLRRVLKGLQLLLSLLAFI

SEQ ID NO: 14774 - protein, 22 aa, Artificial Sequence
  Quasi-synthetic sequence derived from human genome
WLCGKLLGVVARWLRGARKVKK

SEQ ID NO: 14775 - protein, 22 aa, Artificial Sequence
  Quasi-synthetic sequence derived from human genome
KVGIYGWRKRCLYFFVLLLMIL

SEQ ID NO: 14776 - protein, 22 aa, Artificial Sequence
  Quasi-synthetic sequence derived from human genome
RRMRGAPARLLLPLLPWLLLLL

SEQ ID NO: 14777 - protein, 22 aa, Artificial Sequence
  Quasi-synthetic sequence derived from human genome
FIKVLWNILKPLISHKFGKKVI

SEQ ID NO: 14778 - protein, 22 aa, Artificial Sequence
  Quasi-synthetic sequence derived from human genome
KMRYKTSLVMRKRLRLYRNTLK

SEQ ID NO: 14779 - protein, 22 aa, Artificial Sequence
  Quasi-synthetic sequence derived from human genome
SLRRTRLILFVLLLFGIYGLLK

SEQ ID NO: 14780 - protein, 22 aa, Artificial Sequence
  Quasi-synthetic sequence derived from human genome
IKVSSFTHHIFLWLRWRILRLF

SEQ ID NO: 14781 - protein, 22 aa, Artificial Sequence
  Quasi-synthetic sequence derived from human genome
KMLRLRLPNLKMVRLRVSFSAV

SEQ ID NO: 14782 - protein, 22 aa, Artificial Sequence
  Quasi-synthetic sequence derived from human genome
PYVPLRQRRQLLLQKLLQRRRK

SEQ ID NO: 14783 - protein, 22 aa, Artificial Sequence
  Quasi-synthetic sequence derived from human genome
LRQVSLRRNRLRALPRALFRNL

SEQ ID NO: 14784 - protein, 22 aa, Artificial Sequence
  Quasi-synthetic sequence derived from human genome
PFLRGLRYLHPLKKWPMRSRLY

SEQ ID NO: 14785 - protein, 22 aa, Artificial Sequence
  Quasi-synthetic sequence derived from human genome
LSVKIRVMPSSFFLLLRFFLRI

SEQ ID NO: 14786 - protein, 22 aa, Artificial Sequence
  Quasi-synthetic sequence derived from human genome
LLFLHLKRRVRSVILVILLGTL

SEQ ID NO: 14787 - protein, 22 aa, Artificial Sequence
  Quasi-synthetic sequence derived from human genome
LFLIPRNPPPRLKSKKWSKKFI

SEQ ID NO: 14788 - protein, 22 aa, Artificial Sequence
  Quasi-synthetic sequence derived from human genome
IILVLCLRLLQSRCPRVLPKKL

SEQ ID NO: 14789 - protein, 22 aa, Artificial Sequence
  Quasi-synthetic sequence derived from human genome
LRRVVWIFCRTRLILSIVCLMI

SEQ ID NO: 14790 - protein, 22 aa, Artificial Sequence
  Quasi-synthetic sequence derived from human genome
RFIKIIEVKNKKLVELLRRKVR

SEQ ID NO: 14791 - protein, 22 aa, Artificial Sequence
  Quasi-synthetic sequence derived from human genome
LLIKKLIIFILKKTREKKKECL

SEQ ID NO: 14792 - protein, 22 aa, Artificial Sequence
  Quasi-synthetic sequence derived from human genome
RLGIHLIRRKIVKPKHHVLMSR

SEQ ID NO: 14793 - protein, 22 aa, Artificial Sequence
  Quasi-synthetic sequence derived from human genome
LFSKLTSKLTRRNMSFRFIKRL

SEQ ID NO: 14794 - protein, 22 aa, Artificial Sequence
  Quasi-synthetic sequence derived from human genome
LALLAWCRRSRGLKALRLCRAL

SEQ ID NO: 14795 - protein, 22 aa, Artificial Sequence
  Quasi-synthetic sequence derived from human genome
AKKILHLLFLKRRDWDCFWKRK

SEQ ID NO: 14796 - protein, 22 aa, Artificial Sequence
  Quasi-synthetic sequence derived from human genome
RWKILWFIPFRQRQPLRVPYHF

SEQ ID NO: 14797 - protein, 22 aa, Artificial Sequence
  Quasi-synthetic sequence derived from human genome
KRLLKFLHIFGSLLPRPSFLYR

SEQ ID NO: 14798 - protein, 22 aa, Artificial Sequence
  Quasi-synthetic sequence derived from human genome
IRHLNRIVTIIQKWWRSFLGRK

SEQ ID NO: 14799 - protein, 22 aa, Artificial Sequence
  Quasi-synthetic sequence derived from human genome
LIQGLSFVTRRRIRRTVRRALR

SEQ ID NO: 14800 - protein, 22 aa, Artificial Sequence
  Quasi-synthetic sequence derived from human genome
LLVPLVYTIKRHKWSVLKSRKL

SEQ ID NO: 14801 - protein, 22 aa, Artificial Sequence
  Quasi-synthetic sequence derived from human genome
LYALGQKVWKRWKKRYFVLVQV

SEQ ID NO: 14802 - protein, 22 aa, Artificial Sequence
  Quasi-synthetic sequence derived from human genome
AKKGSLSVLRSFRLLRVFKLAK

SEQ ID NO: 14803 - protein, 22 aa, Artificial Sequence
  Quasi-synthetic sequence derived from human genome
LMKRRWKKNFIAVSAANRFKKI

SEQ ID NO: 14804 - protein, 22 aa, Artificial Sequence
  Quasi-synthetic sequence derived from human genome
LLVSLGVAIHLCCRRRRARLRF

SEQ ID NO: 14805 - protein, 22 aa, Artificial Sequence
  Quasi-synthetic sequence derived from human genome
KFLGLRAFIRKQINNIFLRFVY

SEQ ID NO: 14806 - protein, 22 aa, Artificial Sequence
  Quasi-synthetic sequence derived from human genome
QLAALCYRCLALLYWRMFRLKR

SEQ ID NO: 14807 - protein, 22 aa, Artificial Sequence
  Quasi-synthetic sequence derived from human genome
ALKLMVQAWPFRRLPLRPLIKM

SEQ ID NO: 14808 - protein, 22 aa, Artificial Sequence
  Quasi-synthetic sequence derived from human genome
FMLKKRKWPLKGWHKRFFVLDN

SEQ ID NO: 14809 - protein, 22 aa, Artificial Sequence
  Quasi-synthetic sequence derived from human genome
EGFMLKKRKWPLKGWHKRFFVL

SEQ ID NO: 14810 - protein, 22 aa, Artificial Sequence
  Quasi-synthetic sequence derived from human genome
IFLAIILFPFGFICCFALRKRR

SEQ ID NO: 14811 - protein, 22 aa, Artificial Sequence
  Quasi-synthetic sequence derived from human genome
RWKKVQWCSLSVIKLKNKIKYR

SEQ ID NO: 14812 - protein, 22 aa, Artificial Sequence
  Quasi-synthetic sequence derived from human genome
RALHIRKLLLTLPRSVLIVMRY

SEQ ID NO: 14813 - protein, 22 aa, Artificial Sequence
  Quasi-synthetic sequence derived from human genome
LRPLARLRPPGMLLRALLLLLL

SEQ ID NO: 14814 - protein, 22 aa, Artificial Sequence
  Quasi-synthetic sequence derived from human genome
PRARKNRSRIPLLRKRRFQLYR

SEQ ID NO: 14815 - protein, 22 aa, Artificial Sequence
  Quasi-synthetic sequence derived from human genome
RIPLLRKRRFQLYRSMNPRARK

SEQ ID NO: 14816 - protein, 22 aa, Artificial Sequence
  Quasi-synthetic sequence derived from human genome
VKIPFTILLFFLLHRWCSNKKK

SEQ ID NO: 14817 - protein, 22 aa, Artificial Sequence
  Quasi-synthetic sequence derived from human genome
RRRPAWLPVRLRSWAWLPVWLH

SEQ ID NO: 14818 - protein, 22 aa, Artificial Sequence
  Quasi-synthetic sequence derived from human genome
LLVLLLAAYFFRFRKQRKAVVS

SEQ ID NO: 14819 - protein, 22 aa, Artificial Sequence
  Quasi-synthetic sequence derived from human genome
IVWFKYQKYPFWPAVIKSIRRK

SEQ ID NO: 14820 - protein, 22 aa, Artificial Sequence
  Quasi-synthetic sequence derived from human genome
RRIVVSRGRLRRLLWIGFTLTA

SEQ ID NO: 14821 - protein, 22 aa, Artificial Sequence
  Quasi-synthetic sequence derived from human genome
IALRFPALVLYIVFIFAMKKKF

SEQ ID NO: 14822 - protein, 22 aa, Artificial Sequence
  Quasi-synthetic sequence derived from human genome
LLVLTCCFCICKKCLFKKKNKK

SEQ ID NO: 14823 - protein, 22 aa, Artificial Sequence
  Quasi-synthetic sequence derived from human genome
FLLNVSMFIVVLVQLCRIKKKK

SEQ ID NO: 14824 - protein, 22 aa, Artificial Sequence
  Quasi-synthetic sequence derived from human genome
KKHLKHQCNKVLLRVRMLYYLR

SEQ ID NO: 14825 - protein, 22 aa, Artificial Sequence
  Quasi-synthetic sequence derived from human genome
LLLLLISLLCLYWKARKLSTLR

SEQ ID NO: 14826 - protein, 22 aa, Artificial Sequence
  Quasi-synthetic sequence derived from human genome
WIWWRMLRQVLRRGLQSFCHRL

SEQ ID NO: 14827 - protein, 22 aa, Artificial Sequence
  Quasi-synthetic sequence derived from human genome
LRNRLIRKRFLCLGWGLPALVV

SEQ ID NO: 14828 - protein, 22 aa, Artificial Sequence
  Quasi-synthetic sequence derived from human genome
IAHFKRTTFLKKHRMLGRLKYK

SEQ ID NO: 14829 - protein, 22 aa, Artificial Sequence
  Quasi-synthetic sequence derived from human genome
RQEALILIKGSFRILKLIVRRR

SEQ ID NO: 14830 - protein, 22 aa, Artificial Sequence
  Quasi-synthetic sequence derived from human genome
LPLVAFLLFCLHVLFKKRTKSK

SEQ ID NO: 14831 - protein, 22 aa, Artificial Sequence
  Quasi-synthetic sequence derived from human genome
KVALIFPVLVLLTVFIFVVRKK

SEQ ID NO: 14832 - protein, 22 aa, Artificial Sequence
  Quasi-synthetic sequence derived from human genome
FRFYYHMFGKRIYRLAIYQRIW

SEQ ID NO: 14833 - protein, 22 aa, Artificial Sequence
  Quasi-synthetic sequence derived from human genome
LSMKKFAVRRFFSVYLRRKSRS

SEQ ID NO: 14834 - protein, 22 aa, Artificial Sequence
  Quasi-synthetic sequence derived from human genome
LRIRLFNFSLKLLTCLLYIVRV

SEQ ID NO: 14835 - protein, 22 aa, Artificial Sequence
  Quasi-synthetic sequence derived from human genome
MFLRRLGGWLPRPWGRRKPMRP

SEQ ID NO: 14836 - protein, 22 aa, Artificial Sequence
  Quasi-synthetic sequence derived from human genome
FKGLIRIFRKGVIAVLAANRLK

SEQ ID NO: 14837 - protein, 22 aa, Artificial Sequence
  Quasi-synthetic sequence derived from human genome
MILKPVQKLFAIIVGRGIRKWW

SEQ ID NO: 14838 - protein, 22 aa, Artificial Sequence
  Quasi-synthetic sequence derived from human genome
YRLGGFRVCHKLIFMIIQKLFR

SEQ ID NO: 14839 - protein, 22 aa, Artificial Sequence
  Quasi-synthetic sequence derived from human genome
RLWKIFIQLCLALRYLHKEKRI

SEQ ID NO: 14840 - protein, 22 aa, Artificial Sequence
  Quasi-synthetic sequence derived from human genome
LLLKRSRIPIFKADRPFIYFLR

SEQ ID NO: 14841 - protein, 22 aa, Artificial Sequence
  Quasi-synthetic sequence derived from human genome
PLIKPFGARKKRSWYLTWKYKL

SEQ ID NO: 14842 - protein, 22 aa, Artificial Sequence
  Quasi-synthetic sequence derived from human genome
WVLLALALLAWCRRSRGLKALR

SEQ ID NO: 14843 - protein, 22 aa, Artificial Sequence
  Quasi-synthetic sequence derived from human genome
LKKKPRIVLPWWCVYVAWFLVF

SEQ ID NO: 14844 - protein, 22 aa, Artificial Sequence
  Quasi-synthetic sequence derived from human genome
FLRRADTRRWKKKQLRRPSLLL

SEQ ID NO: 14845 - protein, 22 aa, Artificial Sequence
  Quasi-synthetic sequence derived from human genome
SIPRKRISLKRPKKCFRNLFHI

SEQ ID NO: 14846 - protein, 22 aa, Artificial Sequence
  Quasi-synthetic sequence derived from human genome
RARRKTARMLMIVLLVFAICYL

SEQ ID NO: 14847 - protein, 22 aa, Artificial Sequence
  Quasi-synthetic sequence derived from human genome
LFLYLGSGGWRFIRVFIKTIRR

SEQ ID NO: 14848 - protein, 22 aa, Artificial Sequence
  Quasi-synthetic sequence derived from human genome
FIITKCLFCVWKFVRTGKKGKR

SEQ ID NO: 14849 - protein, 22 aa, Artificial Sequence
  Quasi-synthetic sequence derived from human genome
RPWWRKRFVSAMPKAPIPFRKK

SEQ ID NO: 14850 - protein, 22 aa, Artificial Sequence
  Quasi-synthetic sequence derived from human genome
MKRKQKRFLQMTLLFTVALIFL

SEQ ID NO: 14851 - protein, 22 aa, Artificial Sequence
  Quasi-synthetic sequence derived from human genome
KLIIYLFSQNNRIRFSKLLLKI

SEQ ID NO: 14852 - protein, 22 aa, Artificial Sequence
  Quasi-synthetic sequence derived from human genome
RLPPILIIHLKRFQFVNGRWIK

SEQ ID NO: 14853 - protein, 22 aa, Artificial Sequence
  Quasi-synthetic sequence derived from human genome
LATLGVALLFIVRKKRKEKRLK

SEQ ID NO: 14854 - protein, 22 aa, Artificial Sequence
  Quasi-synthetic sequence derived from human genome
IRKLQKSTHLLIRKLPFSRLAR

SEQ ID NO: 14855 - protein, 22 aa, Artificial Sequence
  Quasi-synthetic sequence derived from human genome
RKMNHHKYRKLVKKTRFLRRKV

SEQ ID NO: 14856 - protein, 22 aa, Artificial Sequence
  Quasi-synthetic sequence derived from human genome
RRLSSKKNIRKQRMKILFNVVL

SEQ ID NO: 14857 - protein, 22 aa, Artificial Sequence
  Quasi-synthetic sequence derived from human genome
KYRARRQIPWKLGLQILKIVMV

SEQ ID NO: 14858 - protein, 22 aa, Artificial Sequence
  Quasi-synthetic sequence derived from human genome
RLLLLLLLLLLRHTRQGWALRP

SEQ ID NO: 14859 - protein, 22 aa, Artificial Sequence
  Quasi-synthetic sequence derived from human genome
RRLTRRLVLPVFGVLWITVLLF

SEQ ID NO: 14860 - protein, 22 aa, Artificial Sequence
  Quasi-synthetic sequence derived from human genome
IILLLLVLLILCFIKRSKGGKY

SEQ ID NO: 14861 - protein, 22 aa, Artificial Sequence
  Quasi-synthetic sequence derived from human genome
KKKRMVVPAALKVVRLKPTRKF

SEQ ID NO: 14862 - protein, 22 aa, Artificial Sequence
  Quasi-synthetic sequence derived from human genome
LRVSLMWRGRNFRVLKYFTRSL

SEQ ID NO: 14863 - protein, 22 aa, Artificial Sequence
  Quasi-synthetic sequence derived from human genome
SFYYLIMRIKMCLIKLCKSKAK

SEQ ID NO: 14864 - protein, 22 aa, Artificial Sequence
  Quasi-synthetic sequence derived from human genome
LTLCFLTLRHKRPKAKYIIWPR

SEQ ID NO: 14865 - protein, 22 aa, Artificial Sequence
  Quasi-synthetic sequence derived from human genome
LKRPARLPCSHIFCKKCILRWL

SEQ ID NO: 14866 - protein, 22 aa, Artificial Sequence
  Quasi-synthetic sequence derived from human genome
PLIYSLRKKDVKRAIRKVMLKR

SEQ ID NO: 14867 - protein, 22 aa, Artificial Sequence
  Quasi-synthetic sequence derived from human genome
RLRTVLKNLSLLKLLKSSNRRI

SEQ ID NO: 14868 - protein, 22 aa, Artificial Sequence
  Quasi-synthetic sequence derived from human genome
LILPFQRITRLKLLLQNILKRT

SEQ ID NO: 14869 - protein, 22 aa, Artificial Sequence
  Quasi-synthetic sequence derived from human genome
PIIRQIRRPKNVVLRLAVKFFP

SEQ ID NO: 14870 - protein, 22 aa, Artificial Sequence
  Quasi-synthetic sequence derived from human genome
KLQRNRLAKTKKPFKIIVTIII

SEQ ID NO: 14871 - protein, 22 aa, Artificial Sequence
  Quasi-synthetic sequence derived from human genome
GKIMVRRCLVTLRPFRLFVLGI

SEQ ID NO: 14872 - protein, 22 aa, Artificial Sequence
  Quasi-synthetic sequence derived from human genome
IIRFLQQRLKKAVPYNRMKLMI

SEQ ID NO: 14873 - protein, 22 aa, Artificial Sequence
  Quasi-synthetic sequence derived from human genome
RLKVIVGALLRSVKKLVNVIIL

SEQ ID NO: 14874 - protein, 22 aa, Artificial Sequence
  Quasi-synthetic sequence derived from human genome
LLVIPVVVLLAIAIFIRWKKSR

SEQ ID NO: 14875 - protein, 22 aa, Artificial Sequence
  Quasi-synthetic sequence derived from human genome
LLLKFIKIMKHLRKLNNFNSYL

SEQ ID NO: 14876 - protein, 22 aa, Artificial Sequence
  Quasi-synthetic sequence derived from human genome
RRKFFWCYRLLSTYVTKTRYLF

SEQ ID NO: 14877 - protein, 22 aa, Artificial Sequence
  Quasi-synthetic sequence derived from human genome
KHRKLKLWNKYRISNIPSLIFL

SEQ ID NO: 14878 - protein, 22 aa, Artificial Sequence
  Quasi-synthetic sequence derived from human genome
RLLRRRHMPLRLAMVGCAFVLF

SEQ ID NO: 14879 - protein, 22 aa, Artificial Sequence
  Quasi-synthetic sequence derived from human genome
GYVRIRSRRLGIYQRCWLVFKK

SEQ ID NO: 14880 - protein, 22 aa, Artificial Sequence
  Quasi-synthetic sequence derived from human genome
RKLLLTLPRSVLIVMRYLFAFL

SEQ ID NO: 14881 - protein, 22 aa, Artificial Sequence
  Quasi-synthetic sequence derived from human genome
FIKFFGEQILILWKFALLRKRI

SEQ ID NO: 14882 - protein, 22 aa, Artificial Sequence
  Quasi-synthetic sequence derived from human genome
LLALCLCLIFFIVKTHRRKAAR

SEQ ID NO: 14883 - protein, 22 aa, Artificial Sequence
  Quasi-synthetic sequence derived from human genome
AAMRWRWWQRLLPWRLLQARGF

SEQ ID NO: 14884 - protein, 22 aa, Artificial Sequence
  Quasi-synthetic sequence derived from human genome
LFIFTFFAMLALVLHQKRKRLF

SEQ ID NO: 14885 - protein, 22 aa, Artificial Sequence
  Quasi-synthetic sequence derived from human genome
KRKKNVLRLCCKKLKIFAMPMQ

SEQ ID NO: 14886 - protein, 22 aa, Artificial Sequence
  Quasi-synthetic sequence derived from human genome
LRSVWNFLKRHKKKCIFLGTVL

SEQ ID NO: 14887 - protein, 22 aa, Artificial Sequence
  Quasi-synthetic sequence derived from human genome
YLFVKLSRVVGRLRLVFTRVPF

SEQ ID NO: 14888 - protein, 22 aa, Artificial Sequence
  Quasi-synthetic sequence derived from human genome
WGVILFVYLVIRALRLWRTAKL

SEQ ID NO: 14889 - protein, 22 aa, Artificial Sequence
  Quasi-synthetic sequence derived from human genome
LKKLKSAERLFLLIKKQFPLII

SEQ ID NO: 14890 - protein, 22 aa, Artificial Sequence
  Quasi-synthetic sequence derived from human genome
LMRRVRRFQIAQYKCLVIKYAK

SEQ ID NO: 14891 - protein, 22 aa, Artificial Sequence
  Quasi-synthetic sequence derived from human genome
VSGICIVFGFIILLLLVLRKRR

SEQ ID NO: 14892 - protein, 22 aa, Artificial Sequence
  Quasi-synthetic sequence derived from human genome
RRLRKNLKSLIIVHPSWFIRTV

SEQ ID NO: 14893 - protein, 22 aa, Artificial Sequence
  Quasi-synthetic sequence derived from human genome
RALGNWKLLAKGLLIRERLKRR

SEQ ID NO: 14894 - protein, 22 aa, Artificial Sequence
  Quasi-synthetic sequence derived from human genome
FSFLRRLITSLGRSRLWLKARA

SEQ ID NO: 14895 - protein, 22 aa, Artificial Sequence
  Quasi-synthetic sequence derived from human genome
FLHLKRRVKSVILVMLLGPLLF

SEQ ID NO: 14896 - protein, 22 aa, Artificial Sequence
  Quasi-synthetic sequence derived from human genome
KLKFSIIVRLPPLIGQKICRLW

SEQ ID NO: 14897 - protein, 22 aa, Artificial Sequence
  Quasi-synthetic sequence derived from human genome
LKVYVRKRRPSRPHMFPKMLMK

SEQ ID NO: 14898 - protein, 22 aa, Artificial Sequence
  Quasi-synthetic sequence derived from human genome
KFKKFDHRYLRKILIRKNLPKS

SEQ ID NO: 14899 - protein, 22 aa, Artificial Sequence
  Quasi-synthetic sequence derived from human genome
LRKYFNMRVFRQRTYRIWAFGI

SEQ ID NO: 14900 - protein, 22 aa, Artificial Sequence
  Quasi-synthetic sequence derived from human genome
AILLIAGIIAMICYRKKRKGKL

SEQ ID NO: 14901 - protein, 22 aa, Artificial Sequence
  Quasi-synthetic sequence derived from human genome
LVLCLSFMLLFSLWRQSCRRRK

SEQ ID NO: 14902 - protein, 22 aa, Artificial Sequence
  Quasi-synthetic sequence derived from human genome
ALASRHFRARFRRLWPCGRRRR

SEQ ID NO: 14903 - protein, 22 aa, Artificial Sequence
  Quasi-synthetic sequence derived from human genome
LVRAHRHRGLRPRRQKALRMIL

SEQ ID NO: 14904 - protein, 22 aa, Artificial Sequence
  Quasi-synthetic sequence derived from human genome
LLLLAVLVFVMYRMGFFKRVRP

SEQ ID NO: 14905 - protein, 22 aa, Artificial Sequence
  Quasi-synthetic sequence derived from human genome
WLLREQKRKKKLRKLLKRLQNN

SEQ ID NO: 14906 - protein, 22 aa, Artificial Sequence
  Quasi-synthetic sequence derived from human genome
CWLRATFWLLATKRRKQQLVLR

SEQ ID NO: 14907 - protein, 22 aa, Artificial Sequence
  Quasi-synthetic sequence derived from human genome
RAFMGVKNWPWMKLYFKIKPLL

SEQ ID NO: 14908 - protein, 22 aa, Artificial Sequence
  Quasi-synthetic sequence derived from human genome
KKVKRLLSFQRYFHASRLLRGI

SEQ ID NO: 14909 - protein, 22 aa, Artificial Sequence
  Quasi-synthetic sequence derived from human genome
LLSIKKTLKSLKALLRWKLVEK

SEQ ID NO: 14910 - protein, 22 aa, Artificial Sequence
  Quasi-synthetic sequence derived from human genome
MTSRPRGVKRRWRLSRIVFRHL

SEQ ID NO: 14911 - protein, 22 aa, Artificial Sequence
  Quasi-synthetic sequence derived from human genome
IFGLFIILLVIFLIWRCFLRNK

SEQ ID NO: 14912 - protein, 22 aa, Artificial Sequence
  Quasi-synthetic sequence derived from human genome
KVRLLYSLAFNARFLRHLWFLI

SEQ ID NO: 14913 - protein, 22 aa, Artificial Sequence
  Quasi-synthetic sequence derived from human genome
KLSRRWRRWNRFNRRRCRAAVK

SEQ ID NO: 14914 - protein, 22 aa, Artificial Sequence
  Quasi-synthetic sequence derived from human genome
IAGLLMFIIILLGVMLTIKRRR

SEQ ID NO: 14915 - protein, 22 aa, Artificial Sequence
  Quasi-synthetic sequence derived from human genome
RRLFVRRGQPFTIILYFRAPVR

SEQ ID NO: 14916 - protein, 22 aa, Artificial Sequence
  Quasi-synthetic sequence derived from human genome
KLLPLRTFRVFRALKAISVVSR

SEQ ID NO: 14917 - protein, 22 aa, Artificial Sequence
  Quasi-synthetic sequence derived from human genome
GLKVSIRAVCVMRFLVSKRKFK

SEQ ID NO: 14918 - protein, 22 aa, Artificial Sequence
  Quasi-synthetic sequence derived from human genome
RRFFWWARFIAINTFLFFLFFF

SEQ ID NO: 14919 - protein, 22 aa, Artificial Sequence
  Quasi-synthetic sequence derived from human genome
MFLGLGRFSRLVLWFAAFRKLL

SEQ ID NO: 14920 - protein, 22 aa, Artificial Sequence
  Quasi-synthetic sequence derived from human genome
ISVLRCVRLLRIFKITRYWNSL

SEQ ID NO: 14921 - protein, 22 aa, Artificial Sequence
  Quasi-synthetic sequence derived from human genome
ILIRIFHLLHQKRQLEKLMRRL

SEQ ID NO: 14922 - protein, 22 aa, Artificial Sequence
  Quasi-synthetic sequence derived from human genome
LTRKGIVRVVFFPFFFRWWLQV

SEQ ID NO: 14923 - protein, 22 aa, Artificial Sequence
  Quasi-synthetic sequence derived from human genome
RLLFQRLLPCGVIKFRYIWICW

SEQ ID NO: 14924 - protein, 22 aa, Artificial Sequence
  Quasi-synthetic sequence derived from human genome
FIALIIAGFVLYLYKHRRRPKV

SEQ ID NO: 14925 - protein, 22 aa, Artificial Sequence
  Quasi-synthetic sequence derived from human genome
FLHLKRRVKSVVLVILLGPLLF

SEQ ID NO: 14926 - protein, 22 aa, Artificial Sequence
  Quasi-synthetic sequence derived from human genome
KNIRVWFIKVRKMKAIYHTLNL

SEQ ID NO: 14927 - protein, 22 aa, Artificial Sequence
  Quasi-synthetic sequence derived from human genome
RRILQRVPGKQRFGIYRFLPFF

SEQ ID NO: 14928 - protein, 22 aa, Artificial Sequence
  Quasi-synthetic sequence derived from human genome
RLLYCVPRLRLLGQKFSVRARI

SEQ ID NO: 14929 - protein, 22 aa, Artificial Sequence
  Quasi-synthetic sequence derived from human genome
SYWKFLLRLTKGKFAVMNRKVL

SEQ ID NO: 14930 - protein, 22 aa, Artificial Sequence
  Quasi-synthetic sequence derived from human genome
GPRCNLFRCRRLRGWWPVVKLK

SEQ ID NO: 14931 - protein, 22 aa, Artificial Sequence
  Quasi-synthetic sequence derived from human genome
MKSRLRRTMLVAKVTCIIIWLL

SEQ ID NO: 14932 - protein, 22 aa, Artificial Sequence
  Quasi-synthetic sequence derived from human genome
FLLRPRSHKSRVKGFLRLKMAY

SEQ ID NO: 14933 - protein, 22 aa, Artificial Sequence
  Quasi-synthetic sequence derived from human genome
AIFLLVLYLNRKGIKKWMHNIR

SEQ ID NO: 14934 - protein, 22 aa, Artificial Sequence
  Quasi-synthetic sequence derived from human genome
ALRRKRKALWAHLFSSLRGYLK

SEQ ID NO: 14935 - protein, 22 aa, Artificial Sequence
  Quasi-synthetic sequence derived from human genome
KREGVIPTFRVKFLLRLLRGRL

SEQ ID NO: 14936 - protein, 22 aa, Artificial Sequence
  Quasi-synthetic sequence derived from human genome
WYILQLRWARKVMQKIRMKGSL

SEQ ID NO: 14937 - protein, 22 aa, Artificial Sequence
  Quasi-synthetic sequence derived from human genome
KKILQKKWTSFLKARLICHIPL

SEQ ID NO: 14938 - protein, 22 aa, Artificial Sequence
  Quasi-synthetic sequence derived from human genome
SRKQLVLRRGLLLLGVFLILLV

SEQ ID NO: 14939 - protein, 22 aa, Artificial Sequence
  Quasi-synthetic sequence derived from human genome
TGCKFKFFFRRNPYFRNKLIVK

SEQ ID NO: 14940 - protein, 22 aa, Artificial Sequence
  Quasi-synthetic sequence derived from human genome
TLRRWRCHVQRFFYRIYASLRI

SEQ ID NO: 14941 - protein, 22 aa, Artificial Sequence
  Quasi-synthetic sequence derived from human genome
LIKFVRVQWRRPQVEWRRRRWG

SEQ ID NO: 14942 - protein, 22 aa, Artificial Sequence
  Quasi-synthetic sequence derived from human genome
RVSVRTWWRWLTFWRRLQSAFL

SEQ ID NO: 14943 - protein, 22 aa, Artificial Sequence
  Quasi-synthetic sequence derived from human genome
FLRFKKGKRCSLVFGLIIMTLV

SEQ ID NO: 14944 - protein, 22 aa, Artificial Sequence
  Quasi-synthetic sequence derived from human genome
LPRWRRIAQKIIRERRKKRVPK

SEQ ID NO: 14945 - protein, 22 aa, Artificial Sequence
  Quasi-synthetic sequence derived from human genome
MLKMSKGLDARSKRWLKIIWRR

SEQ ID NO: 14946 - protein, 22 aa, Artificial Sequence
  Quasi-synthetic sequence derived from human genome
RLQKFWRVTVKGFFVKKKEKKI

SEQ ID NO: 14947 - protein, 22 aa, Artificial Sequence
  Quasi-synthetic sequence derived from human genome
FSRLIFHHLKRKAKSVVLVIVL

SEQ ID NO: 14948 - protein, 22 aa, Artificial Sequence
  Quasi-synthetic sequence derived from human genome
KKHLKQHCNKVLLRVRMLYYLK

SEQ ID NO: 14949 - protein, 22 aa, Artificial Sequence
  Quasi-synthetic sequence derived from human genome
LRRPGAPASWIWWRMLRQVLRR

SEQ ID NO: 14950 - protein, 22 aa, Artificial Sequence
  Quasi-synthetic sequence derived from human genome
KQMRARRKTAKMLMVVLLVFAL

SEQ ID NO: 14951 - protein, 22 aa, Artificial Sequence
  Quasi-synthetic sequence derived from human genome
FVKSGWLLRQSTILKRWKKNWF

SEQ ID NO: 14952 - protein, 22 aa, Artificial Sequence
  Quasi-synthetic sequence derived from human genome
KRYLQKATKGKLLIIIFIVTLW

SEQ ID NO: 14953 - protein, 22 aa, Artificial Sequence
  Quasi-synthetic sequence derived from human genome
LPRRYKFMSRIDKQISRFRRWL

SEQ ID NO: 14954 - protein, 22 aa, Artificial Sequence
  Quasi-synthetic sequence derived from human genome
VLLLALIILIILFSLSQRKRHR

SEQ ID NO: 14955 - protein, 22 aa, Artificial Sequence
  Quasi-synthetic sequence derived from human genome
LKRQILILFNIILISKLLGARW

SEQ ID NO: 14956 - protein, 22 aa, Artificial Sequence
  Quasi-synthetic sequence derived from human genome
IVPRTKVKTIKMFLILNLLFLL

SEQ ID NO: 14957 - protein, 22 aa, Artificial Sequence
  Quasi-synthetic sequence derived from human genome
VKIWFQNRRMKKKRLLLREQAL

SEQ ID NO: 14958 - protein, 22 aa, Artificial Sequence
  Quasi-synthetic sequence derived from human genome
LQLYVLKLLKLQTKYLGRQWRK

SEQ ID NO: 14959 - protein, 22 aa, Artificial Sequence
  Quasi-synthetic sequence derived from human genome
FRLLRVFKLAKSWPTLNTLIKI

SEQ ID NO: 14960 - protein, 22 aa, Artificial Sequence
  Quasi-synthetic sequence derived from human genome
GITGVKVKRIIKVNNRILRLKF

SEQ ID NO: 14961 - protein, 22 aa, Artificial Sequence
  Quasi-synthetic sequence derived from human genome
LLWRGRIPGRQWIGKHRRPRFV

SEQ ID NO: 14962 - protein, 22 aa, Artificial Sequence
  Quasi-synthetic sequence derived from human genome
RSIRKRWTICTISLLLIFYKTK

SEQ ID NO: 14963 - protein, 22 aa, Artificial Sequence
  Quasi-synthetic sequence derived from human genome
PVRKKVLAPRVNLTFRKILLTK

SEQ ID NO: 14964 - protein, 22 aa, Artificial Sequence
  Quasi-synthetic sequence derived from human genome
IIAVLGLMFYCKKRCKAKRLQK

SEQ ID NO: 14965 - protein, 22 aa, Artificial Sequence
  Quasi-synthetic sequence derived from human genome
RSKINKTKVLKMIFVHLIIFCF

SEQ ID NO: 14966 - protein, 22 aa, Artificial Sequence
  Quasi-synthetic sequence derived from human genome
VLLVVCGPLAYKKLVKKFRQKK

SEQ ID NO: 14967 - protein, 22 aa, Artificial Sequence
  Quasi-synthetic sequence derived from human genome
CKFKFFFQRNPYFRNKLIVKVY

SEQ ID NO: 14968 - protein, 22 aa, Artificial Sequence
  Quasi-synthetic sequence derived from human genome
RFHGLWYMKMMWAWLQAKRKPR

SEQ ID NO: 14969 - protein, 22 aa, Artificial Sequence
  Quasi-synthetic sequence derived from human genome
LFWVLGLLILCGFLWTRKGKLK

SEQ ID NO: 14970 - protein, 22 aa, Artificial Sequence
  Quasi-synthetic sequence derived from human genome
LRIRRLLRPFFLLQNSSMMKKT

SEQ ID NO: 14971 - protein, 22 aa, Artificial Sequence
  Quasi-synthetic sequence derived from human genome
RFRGGLRCIKYLLLGFNLLFWL

SEQ ID NO: 14972 - protein, 22 aa, Artificial Sequence
  Quasi-synthetic sequence derived from human genome
SACIPVFRLARRRKKILFYCHF

SEQ ID NO: 14973 - protein, 22 aa, Artificial Sequence
  Quasi-synthetic sequence derived from human genome
KIICNLKPALKLRLRFITHISK

SEQ ID NO: 14974 - protein, 22 aa, Artificial Sequence
  Quasi-synthetic sequence derived from human genome
KAKTKRRLVLGLREVLKHLKLK

SEQ ID NO: 14975 - protein, 22 aa, Artificial Sequence
  Quasi-synthetic sequence derived from human genome
FLRRTKAATIIQKYWRMYVVRR

SEQ ID NO: 14976 - protein, 22 aa, Artificial Sequence
  Quasi-synthetic sequence derived from human genome
LVLLVCFPLLRLLYWNRKLYNK

SEQ ID NO: 14977 - protein, 22 aa, Artificial Sequence
  Quasi-synthetic sequence derived from human genome
RRRPPVDPRRLARQLLLLLWLL

SEQ ID NO: 14978 - protein, 22 aa, Artificial Sequence
  Quasi-synthetic sequence derived from human genome
ALLLCGLVALLGWSWLRRRRAR

SEQ ID NO: 14979 - protein, 22 aa, Artificial Sequence
  Quasi-synthetic sequence derived from human genome
VRKRFFREALLQISIPFLLKKL

SEQ ID NO: 14980 - protein, 22 aa, Artificial Sequence
  Quasi-synthetic sequence derived from human genome
VRRQALLQLCLLLCHRFPLIRK

SEQ ID NO: 14981 - protein, 22 aa, Artificial Sequence
  Quasi-synthetic sequence derived from human genome
DTVKRLLIKKLPRVLAIQLKRF

SEQ ID NO: 14982 - protein, 22 aa, Artificial Sequence
  Quasi-synthetic sequence derived from human genome
MRRAKRIRNAALQHLFIRKSFR

SEQ ID NO: 14983 - protein, 22 aa, Artificial Sequence
  Quasi-synthetic sequence derived from human genome
LLLILFFLAFTIHCRKNRIVKM

SEQ ID NO: 14984 - protein, 22 aa, Artificial Sequence
  Quasi-synthetic sequence derived from human genome
LRALLLWGRRLRPLLRAPALAA

SEQ ID NO: 14985 - protein, 22 aa, Artificial Sequence
  Quasi-synthetic sequence derived from human genome
IFLLLVILAMGLWVIRVQKRHK

SEQ ID NO: 14986 - protein, 22 aa, Artificial Sequence
  Quasi-synthetic sequence derived from human genome
LWVLMCALAMWFPRRYLPKIFR

SEQ ID NO: 14987 - protein, 22 aa, Artificial Sequence
  Quasi-synthetic sequence derived from human genome
LKKWFLKPYKGQTLPGRVLFLR

SEQ ID NO: 14988 - protein, 22 aa, Artificial Sequence
  Quasi-synthetic sequence derived from human genome
LMCKKMKHLWFFLLLVAAPRWV

SEQ ID NO: 14989 - protein, 22 aa, Artificial Sequence
  Quasi-synthetic sequence derived from human genome
RRLLVLCWYLPGWRAGRVTWLR

SEQ ID NO: 14990 - protein, 22 aa, Artificial Sequence
  Quasi-synthetic sequence derived from human genome
KLRNIRYGFNTILVILIWRIFI

SEQ ID NO: 14991 - protein, 22 aa, Artificial Sequence
  Quasi-synthetic sequence derived from human genome
WLSARLWKWLKSPRSWRLGLAL

SEQ ID NO: 14992 - protein, 22 aa, Artificial Sequence
  Quasi-synthetic sequence derived from human genome
FIVRTRIPIFVLLRPFIQCKLL

SEQ ID NO: 14993 - protein, 22 aa, Artificial Sequence
  Quasi-synthetic sequence derived from human genome
RAWIIQCWWRQVLEKLLAKRRR

SEQ ID NO: 14994 - protein, 22 aa, Artificial Sequence
  Quasi-synthetic sequence derived from human genome
LVLALLVLLLWKMGFFKRAKHP

SEQ ID NO: 14995 - protein, 22 aa, Artificial Sequence
  Quasi-synthetic sequence derived from human genome
LKAKRKVVKMMIIVVMTFAICW

SEQ ID NO: 14996 - protein, 22 aa, Artificial Sequence
  Quasi-synthetic sequence derived from human genome
FFAVLFLWRSFRSVTSRLYVRR

SEQ ID NO: 14997 - protein, 22 aa, Artificial Sequence
  Quasi-synthetic sequence derived from human genome
LFALRYNILTLMRMLSLKSLKK

SEQ ID NO: 14998 - protein, 22 aa, Artificial Sequence
  Quasi-synthetic sequence derived from human genome
RLWVSRLLRHRKAQLLLVNLLT

SEQ ID NO: 14999 - protein, 22 aa, Artificial Sequence
  Quasi-synthetic sequence derived from human genome
ISVLKLFRMRSLRWQLLSIIVL

SEQ ID NO: 15000 - protein, 22 aa, Artificial Sequence
  Quasi-synthetic sequence derived from human genome
SILAGCLLNRRRAARRRRKRLR

SEQ ID NO: 15001 - protein, 23 aa, Artificial Sequence
  Quasi-synthetic sequence derived from human genome
PWRFRLLCLLRRWLPRPRAWFIR

SEQ ID NO: 15002 - protein, 23 aa, Artificial Sequence
  Quasi-synthetic sequence derived from human genome
LRIVRFTKILSLLRLLRLSRLIR

SEQ ID NO: 15003 - protein, 23 aa, Artificial Sequence
  Quasi-synthetic sequence derived from human genome
VIFLLIIIFLTVLLLKLRKRHRK

SEQ ID NO: 15004 - protein, 23 aa, Artificial Sequence
  Quasi-synthetic sequence derived from human genome
LLLFVLLLVVRRRRREQRLKRLR

SEQ ID NO: 15005 - protein, 23 aa, Artificial Sequence
  Quasi-synthetic sequence derived from human genome
RAARPPLLLRPVKLLRRRFRLLL

SEQ ID NO: 15006 - protein, 23 aa, Artificial Sequence
  Quasi-synthetic sequence derived from human genome
KRFLLLFTFLKKNRKKKLMVFFS

SEQ ID NO: 15007 - protein, 23 aa, Artificial Sequence
  Quasi-synthetic sequence derived from human genome
KLLKRLRLLPALLILRAFKPHRK

SEQ ID NO: 15008 - protein, 23 aa, Artificial Sequence
  Quasi-synthetic sequence derived from human genome
LILILLIKKLIIFILKKTREKKK

SEQ ID NO: 15009 - protein, 23 aa, Artificial Sequence
  Quasi-synthetic sequence derived from human genome
LKIKRLRKKFAQKMLRKARRKLI

SEQ ID NO: 15010 - protein, 23 aa, Artificial Sequence
  Quasi-synthetic sequence derived from human genome
LFVIIFLGVVLVMKKRKLAKKRK

SEQ ID NO: 15011 - protein, 23 aa, Artificial Sequence
  Quasi-synthetic sequence derived from human genome
VFILLLLVVILIVKKSKLAKKRK

SEQ ID NO: 15012 - protein, 23 aa, Artificial Sequence
  Quasi-synthetic sequence derived from human genome
RWRRLRLQQLRRLRGLLRVLRGR

SEQ ID NO: 15013 - protein, 23 aa, Artificial Sequence
  Quasi-synthetic sequence derived from human genome
LVLILKTIRRRLPFSKWRLAFRF

SEQ ID NO: 15014 - protein, 23 aa, Artificial Sequence
  Quasi-synthetic sequence derived from human genome
KLLRNIPRWTHLLRLLRLIILLR

SEQ ID NO: 15015 - protein, 23 aa, Artificial Sequence
  Quasi-synthetic sequence derived from human genome
LLMLLILALWKIGFFKRPLKKKM

SEQ ID NO: 15016 - protein, 23 aa, Artificial Sequence
  Quasi-synthetic sequence derived from human genome
FKRKKRIKRRALLFLSYILTHFI

SEQ ID NO: 15017 - protein, 23 aa, Artificial Sequence
  Quasi-synthetic sequence derived from human genome
RWRCRRLRAIYTIMRWFRRHKVR

SEQ ID NO: 15018 - protein, 23 aa, Artificial Sequence
  Quasi-synthetic sequence derived from human genome
LRWFLSPRWILQFRRWARKWSRF

SEQ ID NO: 15019 - protein, 23 aa, Artificial Sequence
  Quasi-synthetic sequence derived from human genome
RALSRRYLRRLLLLLLLLLLRQP

SEQ ID NO: 15020 - protein, 23 aa, Artificial Sequence
  Quasi-synthetic sequence derived from human genome
LLFLLFFLTLRFSVVKRGRKKLL

SEQ ID NO: 15021 - protein, 23 aa, Artificial Sequence
  Quasi-synthetic sequence derived from human genome
IVVLIFKSILFLPCLRKKILKIR

SEQ ID NO: 15022 - protein, 23 aa, Artificial Sequence
  Quasi-synthetic sequence derived from human genome
VVLFVIFILVVLFIVFRKKVFRK

SEQ ID NO: 15023 - protein, 23 aa, Artificial Sequence
  Quasi-synthetic sequence derived from human genome
RRGFGLFFFLRLHRLLLLFLVLR

SEQ ID NO: 15024 - protein, 23 aa, Artificial Sequence
  Quasi-synthetic sequence derived from human genome
VKYFYFFKILLRLRLAILKYLFI

SEQ ID NO: 15025 - protein, 23 aa, Artificial Sequence
  Quasi-synthetic sequence derived from human genome
VRVLLRFQRKLSVLLLLLGRRRV

SEQ ID NO: 15026 - protein, 23 aa, Artificial Sequence
  Quasi-synthetic sequence derived from human genome
KLWFKFQRYFRRKPVRFFTFLAL

SEQ ID NO: 15027 - protein, 23 aa, Artificial Sequence
  Quasi-synthetic sequence derived from human genome
ILKVFKSLRALRAIRVLRRLSFL

SEQ ID NO: 15028 - protein, 23 aa, Artificial Sequence
  Quasi-synthetic sequence derived from human genome
KFFRWVRRAWQRIISWVFFWRQK

SEQ ID NO: 15029 - protein, 23 aa, Artificial Sequence
  Quasi-synthetic sequence derived from human genome
RIMKRHLRLIHPTKLYKLMLRRF

SEQ ID NO: 15030 - protein, 23 aa, Artificial Sequence
  Quasi-synthetic sequence derived from human genome
IYVFMIRKFRRSLLQLLCLRLLR

SEQ ID NO: 15031 - protein, 23 aa, Artificial Sequence
  Quasi-synthetic sequence derived from human genome
LLLFLLFFLFRLLLRFLRLCRSF

SEQ ID NO: 15032 - protein, 23 aa, Artificial Sequence
  Quasi-synthetic sequence derived from human genome
MKRALGRRKGVWLRLRKILFCVL

SEQ ID NO: 15033 - protein, 23 aa, Artificial Sequence
  Quasi-synthetic sequence derived from human genome
IKSLRVLRVLRPLKTIKRLPKLK

SEQ ID NO: 15034 - protein, 23 aa, Artificial Sequence
  Quasi-synthetic sequence derived from human genome
VPFIVTLLVYIKIYIVLRRRRKR

SEQ ID NO: 15035 - protein, 23 aa, Artificial Sequence
  Quasi-synthetic sequence derived from human genome
KLLRNIPRWTHLVRLLRLIILIR

SEQ ID NO: 15036 - protein, 23 aa, Artificial Sequence
  Quasi-synthetic sequence derived from human genome
QRCLRGFFIKRRFRSLRHKIILL

SEQ ID NO: 15037 - protein, 23 aa, Artificial Sequence
  Quasi-synthetic sequence derived from human genome
LRKRIHRPRRRTTRRWKRWFKFR

SEQ ID NO: 15038 - protein, 23 aa, Artificial Sequence
  Quasi-synthetic sequence derived from human genome
RRKKKKTIKMLMLVVVLFALCWF

SEQ ID NO: 15039 - protein, 23 aa, Artificial Sequence
  Quasi-synthetic sequence derived from human genome
ARFLLKRGLRNKRIGHFLFWFLR

SEQ ID NO: 15040 - protein, 23 aa, Artificial Sequence
  Quasi-synthetic sequence derived from human genome
VCGISRIWVFRLKRRKRIARRLV

SEQ ID NO: 15041 - protein, 23 aa, Artificial Sequence
  Quasi-synthetic sequence derived from human genome
YFTRRKYLLKALFKALKRLKSLR

SEQ ID NO: 15042 - protein, 23 aa, Artificial Sequence
  Quasi-synthetic sequence derived from human genome
LLLSILCLVMILYTRRRWCKRRR

SEQ ID NO: 15043 - protein, 23 aa, Artificial Sequence
  Quasi-synthetic sequence derived from human genome
RLLRGLWQRWRRYKYRFVPWIAL

SEQ ID NO: 15044 - protein, 23 aa, Artificial Sequence
  Quasi-synthetic sequence derived from human genome
VLGFLRVVRFVRILRIFKLTRHF

SEQ ID NO: 15045 - protein, 23 aa, Artificial Sequence
  Quasi-synthetic sequence derived from human genome
RLLRVLKLVRFLPALRRQLVVLV

SEQ ID NO: 15046 - protein, 23 aa, Artificial Sequence
  Quasi-synthetic sequence derived from human genome
MLLRKRYRHRPCRLQFLLLLLML

SEQ ID NO: 15047 - protein, 23 aa, Artificial Sequence
  Quasi-synthetic sequence derived from human genome
LFRQCRRRLIPHPRRLWPFVRRR

SEQ ID NO: 15048 - protein, 23 aa, Artificial Sequence
  Quasi-synthetic sequence derived from human genome
RKKIHRRVLKKNPLKNLRIMLKL

SEQ ID NO: 15049 - protein, 23 aa, Artificial Sequence
  Quasi-synthetic sequence derived from human genome
VYLLLRKILLRKFCQMRKRRLRE

SEQ ID NO: 15050 - protein, 23 aa, Artificial Sequence
  Quasi-synthetic sequence derived from human genome
IFIITKFCLFCFRKLAKKGKKKK

SEQ ID NO: 15051 - protein, 23 aa, Artificial Sequence
  Quasi-synthetic sequence derived from human genome
LLMRRPPVPPPPRRRRRRRLLFW

SEQ ID NO: 15052 - protein, 23 aa, Artificial Sequence
  Quasi-synthetic sequence derived from human genome
LAILRVIRLVRVFRIFKLSRHSK

SEQ ID NO: 15053 - protein, 23 aa, Artificial Sequence
  Quasi-synthetic sequence derived from human genome
IRIMRVLRIARVLKLLKMAVGMR

SEQ ID NO: 15054 - protein, 23 aa, Artificial Sequence
  Quasi-synthetic sequence derived from human genome
LVVLLAILLYLLRLRRIHRRTPR

SEQ ID NO: 15055 - protein, 23 aa, Artificial Sequence
  Quasi-synthetic sequence derived from human genome
LVLLALAAWASRWLRRKLRARRK

SEQ ID NO: 15056 - protein, 23 aa, Artificial Sequence
  Quasi-synthetic sequence derived from human genome
PYKTMKFILWRRFRWAIILFIIL

SEQ ID NO: 15057 - protein, 23 aa, Artificial Sequence
  Quasi-synthetic sequence derived from human genome
IRYSLQKLRLVRWLLKKVFQCRR

SEQ ID NO: 15058 - protein, 23 aa, Artificial Sequence
  Quasi-synthetic sequence derived from human genome
VRIRVIKKKKVIMKKRKKLTLTR

SEQ ID NO: 15059 - protein, 23 aa, Artificial Sequence
  Quasi-synthetic sequence derived from human genome
RRIILLQRWFRVLLCRQHFLHLR

SEQ ID NO: 15060 - protein, 23 aa, Artificial Sequence
  Quasi-synthetic sequence derived from human genome
LLFLLLVLLLLVRKKRKIKEPLL

SEQ ID NO: 15061 - protein, 23 aa, Artificial Sequence
  Quasi-synthetic sequence derived from human genome
VLTFLGHRLLKRLLGPKLRRFLK

SEQ ID NO: 15062 - protein, 23 aa, Artificial Sequence
  Quasi-synthetic sequence derived from human genome
LKLILKRYKIGASRKTFWKRKKI

SEQ ID NO: 15063 - protein, 23 aa, Artificial Sequence
  Quasi-synthetic sequence derived from human genome
FRIVRLARIGRILRLVRAARGIR

SEQ ID NO: 15064 - protein, 23 aa, Artificial Sequence
  Quasi-synthetic sequence derived from human genome
KRCIKKFSIQRFPKILVLHLKRF

SEQ ID NO: 15065 - protein, 23 aa, Artificial Sequence
  Quasi-synthetic sequence derived from human genome
KRRLSLYLTKIHFWLPVLKMIRK

SEQ ID NO: 15066 - protein, 23 aa, Artificial Sequence
  Quasi-synthetic sequence derived from human genome
RLLRVLKLVRFMPALRRQLVVLM

SEQ ID NO: 15067 - protein, 23 aa, Artificial Sequence
  Quasi-synthetic sequence derived from human genome
KRWTHLVRLLRLIILIRIFHLLH

SEQ ID NO: 15068 - protein, 23 aa, Artificial Sequence
  Quasi-synthetic sequence derived from human genome
FRVIRLARIGRILRLIRGAKGIR

SEQ ID NO: 15069 - protein, 23 aa, Artificial Sequence
  Quasi-synthetic sequence derived from human genome
IPLLLMLVLYGRIFRAARFRIRK

SEQ ID NO: 15070 - protein, 23 aa, Artificial Sequence
  Quasi-synthetic sequence derived from human genome
SWLRRKLRGKRRPVIAFCLLMIL

SEQ ID NO: 15071 - protein, 23 aa, Artificial Sequence
  Quasi-synthetic sequence derived from human genome
LKRFKVMKIKVLRSWCRQILKGL

SEQ ID NO: 15072 - protein, 23 aa, Artificial Sequence
  Quasi-synthetic sequence derived from human genome
FFIAFFLRKFKNSRFFPGRIRRV

SEQ ID NO: 15073 - protein, 23 aa, Artificial Sequence
  Quasi-synthetic sequence derived from human genome
MLMLLPFLLRQHKVWRKCRMRIF

SEQ ID NO: 15074 - protein, 23 aa, Artificial Sequence
  Quasi-synthetic sequence derived from human genome
LIVLFCLFIFVLIYVRVFRKSRR

SEQ ID NO: 15075 - protein, 23 aa, Artificial Sequence
  Quasi-synthetic sequence derived from human genome
HRILINLMKYLQKWKRYRPLWKL

SEQ ID NO: 15076 - protein, 23 aa, Artificial Sequence
  Quasi-synthetic sequence derived from human genome
VALLAVIVLVALLLLWRRRQKRR

SEQ ID NO: 15077 - protein, 23 aa, Artificial Sequence
  Quasi-synthetic sequence derived from human genome
LRSLKQNIFLFYVKLRWLLKHWR

SEQ ID NO: 15078 - protein, 23 aa, Artificial Sequence
  Quasi-synthetic sequence derived from human genome
WKVLKVVAKVIRALLRILCCLLK

SEQ ID NO: 15079 - protein, 23 aa, Artificial Sequence
  Quasi-synthetic sequence derived from human genome
FRVIRLARIGRILRLIKGAKGIR

SEQ ID NO: 15080 - protein, 23 aa, Artificial Sequence
  Quasi-synthetic sequence derived from human genome
KIMKKKKKVLVWNRVYKVISRML

SEQ ID NO: 15081 - protein, 23 aa, Artificial Sequence
  Quasi-synthetic sequence derived from human genome
KKKKKKKRQCFAFLIYFRLGIKM

SEQ ID NO: 15082 - protein, 23 aa, Artificial Sequence
  Quasi-synthetic sequence derived from human genome
QKGFLLKKRKWPLKGWHKRFFYL

SEQ ID NO: 15083 - protein, 23 aa, Artificial Sequence
  Quasi-synthetic sequence derived from human genome
KKLAVLCYRCLSLLYLRMFKLKK

SEQ ID NO: 15084 - protein, 23 aa, Artificial Sequence
  Quasi-synthetic sequence derived from human genome
NVRRVVQIFRIMRILRILKLARH

SEQ ID NO: 15085 - protein, 23 aa, Artificial Sequence
  Quasi-synthetic sequence derived from human genome
WLLLGALLWMWWRRNRRGKLGRL

SEQ ID NO: 15086 - protein, 23 aa, Artificial Sequence
  Quasi-synthetic sequence derived from human genome
KIRKLSFKRKHFLIKLHANILVL

SEQ ID NO: 15087 - protein, 23 aa, Artificial Sequence
  Quasi-synthetic sequence derived from human genome
RFLRLHCGLWVRRKAGYKKKLWK

SEQ ID NO: 15088 - protein, 23 aa, Artificial Sequence
  Quasi-synthetic sequence derived from human genome
IFRKVKRRSLRLYARWQSRWRKK

SEQ ID NO: 15089 - protein, 23 aa, Artificial Sequence
  Quasi-synthetic sequence derived from human genome
NLKLFRPKKLLPKAFKQYWFIFK

SEQ ID NO: 15090 - protein, 23 aa, Artificial Sequence
  Quasi-synthetic sequence derived from human genome
RWLLRTKRLHWSRLLFLLGMLII

SEQ ID NO: 15091 - protein, 23 aa, Artificial Sequence
  Quasi-synthetic sequence derived from human genome
MPRLPVKKIRKQMKLLLLLLLLS

SEQ ID NO: 15092 - protein, 23 aa, Artificial Sequence
  Quasi-synthetic sequence derived from human genome
LLLLLLLLLYKYKQKPKYQVRWK

SEQ ID NO: 15093 - protein, 23 aa, Artificial Sequence
  Quasi-synthetic sequence derived from human genome
GILIFLLLAVLLWKMGFFRRRYK

SEQ ID NO: 15094 - protein, 23 aa, Artificial Sequence
  Quasi-synthetic sequence derived from human genome
RLRFLKLKRQTKVLLTLLLVFGI

SEQ ID NO: 15095 - protein, 23 aa, Artificial Sequence
  Quasi-synthetic sequence derived from human genome
VGILLFLILVGLLIFFLKRRNKK

SEQ ID NO: 15096 - protein, 23 aa, Artificial Sequence
  Quasi-synthetic sequence derived from human genome
LVLRRKALAPRLLLRLLRSPTLR

SEQ ID NO: 15097 - protein, 23 aa, Artificial Sequence
  Quasi-synthetic sequence derived from human genome
MRVLSRISKFRRLRQLLRRRKKT

SEQ ID NO: 15098 - protein, 23 aa, Artificial Sequence
  Quasi-synthetic sequence derived from human genome
RRKGVWLRLRKILFCVLGLYIAI

SEQ ID NO: 15099 - protein, 23 aa, Artificial Sequence
  Quasi-synthetic sequence derived from human genome
LVRLLRLIILIRIFHLLHQKRQL

SEQ ID NO: 15100 - protein, 23 aa, Artificial Sequence
  Quasi-synthetic sequence derived from human genome
MAHLKRLVKLHIKRHYHKKFWKL

SEQ ID NO: 15101 - protein, 23 aa, Artificial Sequence
  Quasi-synthetic sequence derived from human genome
APVRAVLRLRRRVCVLRKRRLLQ

SEQ ID NO: 15102 - protein, 23 aa, Artificial Sequence
  Quasi-synthetic sequence derived from human genome
WRRLLRKRWVLALVFGLSLVYFL

SEQ ID NO: 15103 - protein, 23 aa, Artificial Sequence
  Quasi-synthetic sequence derived from human genome
FHLYRAPYFWIKRRILLLIPKWL

SEQ ID NO: 15104 - protein, 23 aa, Artificial Sequence
  Quasi-synthetic sequence derived from human genome
KINAFNWAKVRKLSFKRKRFLIK

SEQ ID NO: 15105 - protein, 23 aa, Artificial Sequence
  Quasi-synthetic sequence derived from human genome
LRFLLGRLPWRVASGARRFRRWL

SEQ ID NO: 15106 - protein, 23 aa, Artificial Sequence
  Quasi-synthetic sequence derived from human genome
LCNRTFRKTFKMLLLCRWKKKKV

SEQ ID NO: 15107 - protein, 23 aa, Artificial Sequence
  Quasi-synthetic sequence derived from human genome
RMPEKVTWMRRMRILRRLLRRYR

SEQ ID NO: 15108 - protein, 23 aa, Artificial Sequence
  Quasi-synthetic sequence derived from human genome
RKRRKMSKKLPPVIIKYIIINRF

SEQ ID NO: 15109 - protein, 23 aa, Artificial Sequence
  Quasi-synthetic sequence derived from human genome
YLIRIRKLTLKRQRKLVPLSKKV

SEQ ID NO: 15110 - protein, 23 aa, Artificial Sequence
  Quasi-synthetic sequence derived from human genome
RRLQARRFRRSRRTGRLVVLIIL

SEQ ID NO: 15111 - protein, 23 aa, Artificial Sequence
  Quasi-synthetic sequence derived from human genome
FFSPTLFRVIRLARIGRILRLIR

SEQ ID NO: 15112 - protein, 23 aa, Artificial Sequence
  Quasi-synthetic sequence derived from human genome
LRILRKRNKALRKIRKLQKQGLL

SEQ ID NO: 15113 - protein, 23 aa, Artificial Sequence
  Quasi-synthetic sequence derived from human genome
LGIGLFMRRRHIVRKRTLRRLLQ

SEQ ID NO: 15114 - protein, 23 aa, Artificial Sequence
  Quasi-synthetic sequence derived from human genome
ALLALTALLLVAMICRRRRRRKK

SEQ ID NO: 15115 - protein, 23 aa, Artificial Sequence
  Quasi-synthetic sequence derived from human genome
KKNIFLLFKKLCSFRYRRDLLRL

SEQ ID NO: 15116 - protein, 23 aa, Artificial Sequence
  Quasi-synthetic sequence derived from human genome
LFRRCRRRLIPHPRRLSPVVIRR

SEQ ID NO: 15117 - protein, 23 aa, Artificial Sequence
  Quasi-synthetic sequence derived from human genome
ILSRRPRRRLGSLRWCGRRRLRW

SEQ ID NO: 15118 - protein, 23 aa, Artificial Sequence
  Quasi-synthetic sequence derived from human genome
LRIRCVARKFLYLWIRMTFGRVF

SEQ ID NO: 15119 - protein, 23 aa, Artificial Sequence
  Quasi-synthetic sequence derived from human genome
LIRIVLFLQKVWRGTLARMRYKR

SEQ ID NO: 15120 - protein, 23 aa, Artificial Sequence
  Quasi-synthetic sequence derived from human genome
ILLLLLIIALMLWRLHWRRLLSK

SEQ ID NO: 15121 - protein, 23 aa, Artificial Sequence
  Quasi-synthetic sequence derived from human genome
IQRRFRTLMMRRRFLSLKKTAIL

SEQ ID NO: 15122 - protein, 23 aa, Artificial Sequence
  Quasi-synthetic sequence derived from human genome
LRLLRGLRRRNVQKKVALAKKLL

SEQ ID NO: 15123 - protein, 23 aa, Artificial Sequence
  Quasi-synthetic sequence derived from human genome
QKRMRVKKLPMILALHLKRFKYM

SEQ ID NO: 15124 - protein, 23 aa, Artificial Sequence
  Quasi-synthetic sequence derived from human genome
IRNIGIWFFWIRLYKIRRGRTRP

SEQ ID NO: 15125 - protein, 23 aa, Artificial Sequence
  Quasi-synthetic sequence derived from human genome
LPTVIICVMVFCLILWKWKKKKR

SEQ ID NO: 15126 - protein, 23 aa, Artificial Sequence
  Quasi-synthetic sequence derived from human genome
MNRVFLQRLLWLLRLLFPRVLCR

SEQ ID NO: 15127 - protein, 23 aa, Artificial Sequence
  Quasi-synthetic sequence derived from human genome
ARRKARRLLKTVLMILLAFLVCW

SEQ ID NO: 15128 - protein, 23 aa, Artificial Sequence
  Quasi-synthetic sequence derived from human genome
FFFFFSVGRKFKKFNKVRVVRAL

SEQ ID NO: 15129 - protein, 23 aa, Artificial Sequence
  Quasi-synthetic sequence derived from human genome
RLFRAARLIKLLRQGYTIRILLW

SEQ ID NO: 15130 - protein, 23 aa, Artificial Sequence
  Quasi-synthetic sequence derived from human genome
KRCNRRLKSQILLKKYLMKRRWK

SEQ ID NO: 15131 - protein, 23 aa, Artificial Sequence
  Quasi-synthetic sequence derived from human genome
LKVLFKKTHRILRRLFNLCKRCH

SEQ ID NO: 15132 - protein, 23 aa, Artificial Sequence
  Quasi-synthetic sequence derived from human genome
LIFFWCLAFLWGLLILLKYRWRK

SEQ ID NO: 15133 - protein, 23 aa, Artificial Sequence
  Quasi-synthetic sequence derived from human genome
IRRRSKFANLGRIFKPWKWRKKK

SEQ ID NO: 15134 - protein, 23 aa, Artificial Sequence
  Quasi-synthetic sequence derived from human genome
LRLPKRLRVVYFLARTRLAQRLI

SEQ ID NO: 15135 - protein, 23 aa, Artificial Sequence
  Quasi-synthetic sequence derived from human genome
IFLLIILSYIKIGKNLLRISKRR

SEQ ID NO: 15136 - protein, 23 aa, Artificial Sequence
  Quasi-synthetic sequence derived from human genome
CFILLILSLICKIKLGPVRRKLK

SEQ ID NO: 15137 - protein, 23 aa, Artificial Sequence
  Quasi-synthetic sequence derived from human genome
FLRLKRRVKSVILVVLLGPLLFL

SEQ ID NO: 15138 - protein, 23 aa, Artificial Sequence
  Quasi-synthetic sequence derived from human genome
KVGQVLRVMRLMRIFRILKLARH

SEQ ID NO: 15139 - protein, 23 aa, Artificial Sequence
  Quasi-synthetic sequence derived from human genome
ILVVKRLPKTRSGKVMRRLLRKI

SEQ ID NO: 15140 - protein, 23 aa, Artificial Sequence
  Quasi-synthetic sequence derived from human genome
FVRQIQLLLWKNWTLRKRQKIRF

SEQ ID NO: 15141 - protein, 23 aa, Artificial Sequence
  Quasi-synthetic sequence derived from human genome
KRKKGLRIKGKRRRKKLILAKKF

SEQ ID NO: 15142 - protein, 23 aa, Artificial Sequence
  Quasi-synthetic sequence derived from human genome
ARKQLMIYRLPQVLRLHLKRFRW

SEQ ID NO: 15143 - protein, 23 aa, Artificial Sequence
  Quasi-synthetic sequence derived from human genome
VLFVLSVHYLWKKWKKHQKKLKK

SEQ ID NO: 15144 - protein, 23 aa, Artificial Sequence
  Quasi-synthetic sequence derived from human genome
LTLLIPYLLGRKRRWSKCKIRVF

SEQ ID NO: 15145 - protein, 23 aa, Artificial Sequence
  Quasi-synthetic sequence derived from human genome
RFRSLLVRRRFISLKKATIFVQR

SEQ ID NO: 15146 - protein, 23 aa, Artificial Sequence
  Quasi-synthetic sequence derived from human genome
FLRIKRRVKSVVLVILLGPLLFL

SEQ ID NO: 15147 - protein, 23 aa, Artificial Sequence
  Quasi-synthetic sequence derived from human genome
VLLTLLLIAFIFLIIKSYRKYRR

SEQ ID NO: 15148 - protein, 23 aa, Artificial Sequence
  Quasi-synthetic sequence derived from human genome
IIVLLLQKAWRGTLARWRCRRLR

SEQ ID NO: 15149 - protein, 23 aa, Artificial Sequence
  Quasi-synthetic sequence derived from human genome
KLFRAARLIKLLRQGYTIRILLW

SEQ ID NO: 15150 - protein, 23 aa, Artificial Sequence
  Quasi-synthetic sequence derived from human genome
VKILRVLRVLRPLRAINRAKGLK

SEQ ID NO: 15151 - protein, 23 aa, Artificial Sequence
  Quasi-synthetic sequence derived from human genome
FRRFNIRLIHPVQFVFLRKRYLV

SEQ ID NO: 15152 - protein, 23 aa, Artificial Sequence
  Quasi-synthetic sequence derived from human genome
IFGRKSYPMLKLVRLKLWFPRFM

SEQ ID NO: 15153 - protein, 23 aa, Artificial Sequence
  Quasi-synthetic sequence derived from human genome
FIITKFCLFCFWKFARKGKKGKR

SEQ ID NO: 15154 - protein, 23 aa, Artificial Sequence
  Quasi-synthetic sequence derived from human genome
RFRKYLRQLFHRRVAVHLVKWLP

SEQ ID NO: 15155 - protein, 23 aa, Artificial Sequence
  Quasi-synthetic sequence derived from human genome
RAFLLRRRFLHLKKAAIVFQKQL

SEQ ID NO: 15156 - protein, 23 aa, Artificial Sequence
  Quasi-synthetic sequence derived from human genome
RLKKWKGVRWKRLRLLLTIQKGS

SEQ ID NO: 15157 - protein, 23 aa, Artificial Sequence
  Quasi-synthetic sequence derived from human genome
VIVFIKVVQFFRILRIFKLIAPK

SEQ ID NO: 15158 - protein, 23 aa, Artificial Sequence
  Quasi-synthetic sequence derived from human genome
FLIFIRILGILLSKLRTRQMRCR

SEQ ID NO: 15159 - protein, 23 aa, Artificial Sequence
  Quasi-synthetic sequence derived from human genome
LVLLLLAGGSLAFILLRVRRRRK

SEQ ID NO: 15160 - protein, 23 aa, Artificial Sequence
  Quasi-synthetic sequence derived from human genome
LLCYRHLKTKRILRRNLLALIHR

SEQ ID NO: 15161 - protein, 23 aa, Artificial Sequence
  Quasi-synthetic sequence derived from human genome
KKLPGVMLFKKKKTRKLKIALAL

SEQ ID NO: 15162 - protein, 23 aa, Artificial Sequence
  Quasi-synthetic sequence derived from human genome
WRGALARKAIQRRKWAVRIIRKF

SEQ ID NO: 15163 - protein, 23 aa, Artificial Sequence
  Quasi-synthetic sequence derived from human genome
ILLMVSLLLLSLWKLWRVKKFLI

SEQ ID NO: 15164 - protein, 23 aa, Artificial Sequence
  Quasi-synthetic sequence derived from human genome
LLLLGLIILLLWKCGFFKRARTR

SEQ ID NO: 15165 - protein, 23 aa, Artificial Sequence
  Quasi-synthetic sequence derived from human genome
LALLVLLVAPPLLRRAGRLRWRR

SEQ ID NO: 15166 - protein, 23 aa, Artificial Sequence
  Quasi-synthetic sequence derived from human genome
AFVLLLFLLLFLLLRRQRHSKHR

SEQ ID NO: 15167 - protein, 23 aa, Artificial Sequence
  Quasi-synthetic sequence derived from human genome
IPRKRISLKRPKKCFRNLFHIRR

SEQ ID NO: 15168 - protein, 23 aa, Artificial Sequence
  Quasi-synthetic sequence derived from human genome
KIVQVMRKQKTINRFLMRKRLLF

SEQ ID NO: 15169 - protein, 23 aa, Artificial Sequence
  Quasi-synthetic sequence derived from human genome
LRRRCFLLTFYLWFLFFSRFLLM

SEQ ID NO: 15170 - protein, 23 aa, Artificial Sequence
  Quasi-synthetic sequence derived from human genome
INTFNWSKVRKLSFKRKRFLIKL

SEQ ID NO: 15171 - protein, 23 aa, Artificial Sequence
  Quasi-synthetic sequence derived from human genome
LIVLFILLCCLYRLCKKSKPIKK

SEQ ID NO: 15172 - protein, 23 aa, Artificial Sequence
  Quasi-synthetic sequence derived from human genome
WIFWKTWIFWKTWIFRKTYIGWK

SEQ ID NO: 15173 - protein, 23 aa, Artificial Sequence
  Quasi-synthetic sequence derived from human genome
KGKGKRWFAFKMMMAKKWAKFLR

SEQ ID NO: 15174 - protein, 23 aa, Artificial Sequence
  Quasi-synthetic sequence derived from human genome
RIIILKIVHRRIINRFHSFLLFM

SEQ ID NO: 15175 - protein, 23 aa, Artificial Sequence
  Quasi-synthetic sequence derived from human genome
LVTLLIWVPVKVILHKKRYIYRK

SEQ ID NO: 15176 - protein, 23 aa, Artificial Sequence
  Quasi-synthetic sequence derived from human genome
LKGKKHVLHLWPKRLLLPRHLRV

SEQ ID NO: 15177 - protein, 23 aa, Artificial Sequence
  Quasi-synthetic sequence derived from human genome
LLLFQVIRLYQRRRWMIRALHLF

SEQ ID NO: 15178 - protein, 23 aa, Artificial Sequence
  Quasi-synthetic sequence derived from human genome
VAILLLLALALGLLVYRKRRAKR

SEQ ID NO: 15179 - protein, 23 aa, Artificial Sequence
  Quasi-synthetic sequence derived from human genome
RSIVLALRLRKRFLNFFLEKYKR

SEQ ID NO: 15180 - protein, 23 aa, Artificial Sequence
  Quasi-synthetic sequence derived from human genome
RAFMNVKHWPWMKLFFKIKPLLK

SEQ ID NO: 15181 - protein, 23 aa, Artificial Sequence
  Quasi-synthetic sequence derived from human genome
RGPRHRGLLRVRLGRFISRLLLW

SEQ ID NO: 15182 - protein, 23 aa, Artificial Sequence
  Quasi-synthetic sequence derived from human genome
VRARLLRALRLVRRLRGLSQALR

SEQ ID NO: 15183 - protein, 23 aa, Artificial Sequence
  Quasi-synthetic sequence derived from human genome
LLRLFRMLRIFKLGKYWPTFQIL

SEQ ID NO: 15184 - protein, 23 aa, Artificial Sequence
  Quasi-synthetic sequence derived from human genome
LKIYIRKRRPSKPHMFPKILMKI

SEQ ID NO: 15185 - protein, 23 aa, Artificial Sequence
  Quasi-synthetic sequence derived from human genome
RRRPARTLGLLLLVVLGFLVLRR

SEQ ID NO: 15186 - protein, 23 aa, Artificial Sequence
  Quasi-synthetic sequence derived from human genome
MRVLSRTSKFRRLRQLLRRRKKR

SEQ ID NO: 15187 - protein, 23 aa, Artificial Sequence
  Quasi-synthetic sequence derived from human genome
LRIIRLVRVFRIFKLSRHSKGLQ

SEQ ID NO: 15188 - protein, 23 aa, Artificial Sequence
  Quasi-synthetic sequence derived from human genome
RDVLGFLRVVRFVRILRIFKLTR

SEQ ID NO: 15189 - protein, 23 aa, Artificial Sequence
  Quasi-synthetic sequence derived from human genome
GILALLILILLLLLFLRRRAVVK

SEQ ID NO: 15190 - protein, 23 aa, Artificial Sequence
  Quasi-synthetic sequence derived from human genome
RRGIGYLKLICFLIPFLLSLKKK

SEQ ID NO: 15191 - protein, 23 aa, Artificial Sequence
  Quasi-synthetic sequence derived from human genome
RKKQKIIKMLLIVALLFILSWLP

SEQ ID NO: 15192 - protein, 23 aa, Artificial Sequence
  Quasi-synthetic sequence derived from human genome
LKTFVFFIWRRYWRTLVLLLLVL

SEQ ID NO: 15193 - protein, 23 aa, Artificial Sequence
  Quasi-synthetic sequence derived from human genome
MLRMIRKHVRKNYMKFKAKFSLI

SEQ ID NO: 15194 - protein, 23 aa, Artificial Sequence
  Quasi-synthetic sequence derived from human genome
IIKTLLRCPSKKKYKAIRLIFVI

SEQ ID NO: 15195 - protein, 23 aa, Artificial Sequence
  Quasi-synthetic sequence derived from human genome
FWRRYGKLSRHLMKVKLKKYTKF

SEQ ID NO: 15196 - protein, 23 aa, Artificial Sequence
  Quasi-synthetic sequence derived from human genome
RFKVMKPKVLRSWCRQILKGLLF

SEQ ID NO: 15197 - protein, 23 aa, Artificial Sequence
  Quasi-synthetic sequence derived from human genome
MPLWVRQIFIHKLPLYLRLKRPK

SEQ ID NO: 15198 - protein, 23 aa, Artificial Sequence
  Quasi-synthetic sequence derived from human genome
RLRRVIAAFYFPKREKKRILFLY

SEQ ID NO: 15199 - protein, 23 aa, Artificial Sequence
  Quasi-synthetic sequence derived from human genome
LYVRRRKKLPSVLLFKKPSPFIF

SEQ ID NO: 15200 - protein, 23 aa, Artificial Sequence
  Quasi-synthetic sequence derived from human genome
LKRFKVMKPKVLRSWCRQILKGL

SEQ ID NO: 15201 - protein, 23 aa, Artificial Sequence
  Quasi-synthetic sequence derived from human genome
PCKTMKFIVWRRFKWVIIGLLFL

SEQ ID NO: 15202 - protein, 23 aa, Artificial Sequence
  Quasi-synthetic sequence derived from human genome
WPRLIRKLRCYLKEMKNLRKLVF

SEQ ID NO: 15203 - protein, 23 aa, Artificial Sequence
  Quasi-synthetic sequence derived from human genome
LRTFRLMRVLKLVRFLPALQRQL

SEQ ID NO: 15204 - protein, 23 aa, Artificial Sequence
  Quasi-synthetic sequence derived from human genome
FVLLLFLLLFLLLRRQRHSKHRT

SEQ ID NO: 15205 - protein, 23 aa, Artificial Sequence
  Quasi-synthetic sequence derived from human genome
YFSPTLFRVIRLARIGRILRLIR

SEQ ID NO: 15206 - protein, 23 aa, Artificial Sequence
  Quasi-synthetic sequence derived from human genome
LLCIIILLVIVVLFAALKRQRKK

SEQ ID NO: 15207 - protein, 23 aa, Artificial Sequence
  Quasi-synthetic sequence derived from human genome
WLRKSPPEKKLRRYAWKKRWFIL

SEQ ID NO: 15208 - protein, 23 aa, Artificial Sequence
  Quasi-synthetic sequence derived from human genome
RLARIGRILRLIKGAKGIRTLLF

SEQ ID NO: 15209 - protein, 23 aa, Artificial Sequence
  Quasi-synthetic sequence derived from human genome
PAVKTVIRSIRILKFLVAKRKFK

SEQ ID NO: 15210 - protein, 23 aa, Artificial Sequence
  Quasi-synthetic sequence derived from human genome
LRRQILLPFRKPLIIFTPKSLLR

SEQ ID NO: 15211 - protein, 23 aa, Artificial Sequence
  Quasi-synthetic sequence derived from human genome
RRWRHALHRRLLNRRLLLAVTPW

SEQ ID NO: 15212 - protein, 23 aa, Artificial Sequence
  Quasi-synthetic sequence derived from human genome
LCVPWMLLFKPLVLRRQYLRRKH

SEQ ID NO: 15213 - protein, 23 aa, Artificial Sequence
  Quasi-synthetic sequence derived from human genome
FRARFRRLWPCGRRRRHRARRAL

SEQ ID NO: 15214 - protein, 23 aa, Artificial Sequence
  Quasi-synthetic sequence derived from human genome
ILLLLLLLLLFLILRHRRQGKHW

SEQ ID NO: 15215 - protein, 23 aa, Artificial Sequence
  Quasi-synthetic sequence derived from human genome
KDVLGFLRVVRFVRILRIFKLTR

SEQ ID NO: 15216 - protein, 23 aa, Artificial Sequence
  Quasi-synthetic sequence derived from human genome
RRFRLSSHFIRHRRAHMRRRLYI

SEQ ID NO: 15217 - protein, 23 aa, Artificial Sequence
  Quasi-synthetic sequence derived from human genome
LLMVFVALLVFYITKRKKQRSRR

SEQ ID NO: 15218 - protein, 23 aa, Artificial Sequence
  Quasi-synthetic sequence derived from human genome
LRKPKRVPSIYKLKLRPRIRPRR

SEQ ID NO: 15219 - protein, 23 aa, Artificial Sequence
  Quasi-synthetic sequence derived from human genome
IWGLIVLLCCFCSFLRRRLKRRQ

SEQ ID NO: 15220 - protein, 23 aa, Artificial Sequence
  Quasi-synthetic sequence derived from human genome
LIILLIFRLIWRSVKKWQIIKGT

SEQ ID NO: 15221 - protein, 23 aa, Artificial Sequence
  Quasi-synthetic sequence derived from human genome
LWVIRVQKRHKMPRMKKLMRNRM

SEQ ID NO: 15222 - protein, 23 aa, Artificial Sequence
  Quasi-synthetic sequence derived from human genome
RKKFRMMKIPKPILFGLNIAMKK

SEQ ID NO: 15223 - protein, 23 aa, Artificial Sequence
  Quasi-synthetic sequence derived from human genome
ILGMLRVLRLLRTLRPLRVISRA

SEQ ID NO: 15224 - protein, 23 aa, Artificial Sequence
  Quasi-synthetic sequence derived from human genome
RSLLLGPARLCLRLLLLLGYRRR

SEQ ID NO: 15225 - protein, 23 aa, Artificial Sequence
  Quasi-synthetic sequence derived from human genome
KLSRKQLVLRRGLLLLGVFLILL

SEQ ID NO: 15226 - protein, 23 aa, Artificial Sequence
  Quasi-synthetic sequence derived from human genome
FRMKLRNLFTKFIRKFGFELVKR

SEQ ID NO: 15227 - protein, 23 aa, Artificial Sequence
  Quasi-synthetic sequence derived from human genome
WPIQAFVKRKVIIFLKKCLLCKV

SEQ ID NO: 15228 - protein, 23 aa, Artificial Sequence
  Quasi-synthetic sequence derived from human genome
LLLRKAPGGFMGPRWRRRWFVLK

SEQ ID NO: 15229 - protein, 23 aa, Artificial Sequence
  Quasi-synthetic sequence derived from human genome
KLAQLFRWIRKAAFSRLYQLRIR

SEQ ID NO: 15230 - protein, 23 aa, Artificial Sequence
  Quasi-synthetic sequence derived from human genome
ILGVLRVLRLLRTLRPLRVISRA

SEQ ID NO: 15231 - protein, 23 aa, Artificial Sequence
  Quasi-synthetic sequence derived from human genome
IIKYIIINRFRGRKNMLVKLGKI

SEQ ID NO: 15232 - protein, 23 aa, Artificial Sequence
  Quasi-synthetic sequence derived from human genome
KVGLVLRVLRALRILYVMRLARH

SEQ ID NO: 15233 - protein, 23 aa, Artificial Sequence
  Quasi-synthetic sequence derived from human genome
LLLLLLVFTVALYAQRRWQKRRR

SEQ ID NO: 15234 - protein, 23 aa, Artificial Sequence
  Quasi-synthetic sequence derived from human genome
WLGRWRRKRRWRRVRKAGPRDLL

SEQ ID NO: 15235 - protein, 23 aa, Artificial Sequence
  Quasi-synthetic sequence derived from human genome
IVKKGYLLKKGKGKRWKNLYFIL

SEQ ID NO: 15236 - protein, 23 aa, Artificial Sequence
  Quasi-synthetic sequence derived from human genome
ILGLWKIARKWMRRKMGKWPAVV

SEQ ID NO: 15237 - protein, 23 aa, Artificial Sequence
  Quasi-synthetic sequence derived from human genome
WRRRSCWRKWKQLSRLQRNMILF

SEQ ID NO: 15238 - protein, 23 aa, Artificial Sequence
  Quasi-synthetic sequence derived from human genome
RLILFLFCLMVLVESRKPKRKRW

SEQ ID NO: 15239 - protein, 23 aa, Artificial Sequence
  Quasi-synthetic sequence derived from human genome
IRLRLSKLRRCVQWLKVMGLFAF

SEQ ID NO: 15240 - protein, 23 aa, Artificial Sequence
  Quasi-synthetic sequence derived from human genome
LRAACIRIQKTIRGWLLRKKYLR

SEQ ID NO: 15241 - protein, 23 aa, Artificial Sequence
  Quasi-synthetic sequence derived from human genome
TLLVRYRHYFRLLVRTVLLRSLR

SEQ ID NO: 15242 - protein, 23 aa, Artificial Sequence
  Quasi-synthetic sequence derived from human genome
SRILKNLVFRILKKCYRGRFQLI

SEQ ID NO: 15243 - protein, 23 aa, Artificial Sequence
  Quasi-synthetic sequence derived from human genome
LFFLMKRKIIVLMPWLLRLSVLV

SEQ ID NO: 15244 - protein, 23 aa, Artificial Sequence
  Quasi-synthetic sequence derived from human genome
FLPVFCLTVLYSLIGRKLWRRRR

SEQ ID NO: 15245 - protein, 23 aa, Artificial Sequence
  Quasi-synthetic sequence derived from human genome
RSFMNVKHWPWMKLFFKIKPLLK

SEQ ID NO: 15246 - protein, 23 aa, Artificial Sequence
  Quasi-synthetic sequence derived from human genome
RRLQQRRLQHRLRLRAQMRLRRL

SEQ ID NO: 15247 - protein, 23 aa, Artificial Sequence
  Quasi-synthetic sequence derived from human genome
LKKHTLIRFLPRPIRQQLLYKRR

SEQ ID NO: 15248 - protein, 23 aa, Artificial Sequence
  Quasi-synthetic sequence derived from human genome
PKKGSVLKRRLVKLVVNFLFYFR

SEQ ID NO: 15249 - protein, 23 aa, Artificial Sequence
  Quasi-synthetic sequence derived from human genome
KICAFLLRKKRFGQWTKLLCVIK

SEQ ID NO: 15250 - protein, 23 aa, Artificial Sequence
  Quasi-synthetic sequence derived from human genome
GYVKIRSRKLGIFRRCWLVFKKA

SEQ ID NO: 15251 - protein, 23 aa, Artificial Sequence
  Quasi-synthetic sequence derived from human genome
RAFMAVKNWPWMRLFFKIKPLVK

SEQ ID NO: 15252 - protein, 23 aa, Artificial Sequence
  Quasi-synthetic sequence derived from human genome
VVILAKALFLLPCISRRLARIRR

SEQ ID NO: 15253 - protein, 23 aa, Artificial Sequence
  Quasi-synthetic sequence derived from human genome
ALLLKRFLLARRSRRGLFAQIVL

SEQ ID NO: 15254 - protein, 23 aa, Artificial Sequence
  Quasi-synthetic sequence derived from human genome
FVSPTLFRVIRLARIGRVLRLIR

SEQ ID NO: 15255 - protein, 23 aa, Artificial Sequence
  Quasi-synthetic sequence derived from human genome
VIFLTLCFGLIARRKKIMKLCMK

SEQ ID NO: 15256 - protein, 23 aa, Artificial Sequence
  Quasi-synthetic sequence derived from human genome
RIRRLGFSHRILFANFIKRYYLL

SEQ ID NO: 15257 - protein, 23 aa, Artificial Sequence
  Quasi-synthetic sequence derived from human genome
IKKIKKVQSFMRGWLCRRKWKTI

SEQ ID NO: 15258 - protein, 23 aa, Artificial Sequence
  Quasi-synthetic sequence derived from human genome
LFVNKRLVLRTKLHKLIDFLLRK

SEQ ID NO: 15259 - protein, 23 aa, Artificial Sequence
  Quasi-synthetic sequence derived from human genome
MARGSLRRLLRLLVLGLWLALLR

SEQ ID NO: 15260 - protein, 23 aa, Artificial Sequence
  Quasi-synthetic sequence derived from human genome
GLLLKKIMAILIKRFHHTRRNWK

SEQ ID NO: 15261 - protein, 23 aa, Artificial Sequence
  Quasi-synthetic sequence derived from human genome
RRHYSVKKKLKLIRVLGLFMGLV

SEQ ID NO: 15262 - protein, 23 aa, Artificial Sequence
  Quasi-synthetic sequence derived from human genome
KVFILFLTLWLLSLLKLLNVRRL

SEQ ID NO: 15263 - protein, 23 aa, Artificial Sequence
  Quasi-synthetic sequence derived from human genome
IALLFLCLLPLIVKHIRKKQAKK

SEQ ID NO: 15264 - protein, 23 aa, Artificial Sequence
  Quasi-synthetic sequence derived from human genome
VKRFLKHAGKWSLRWFLSPRWIL

SEQ ID NO: 15265 - protein, 23 aa, Artificial Sequence
  Quasi-synthetic sequence derived from human genome
FLVIFPMFTFPKKLPPRHKKKKK

SEQ ID NO: 15266 - protein, 23 aa, Artificial Sequence
  Quasi-synthetic sequence derived from human genome
VVLLAIFVALFFLTKKRRQRQRL

SEQ ID NO: 15267 - protein, 23 aa, Artificial Sequence
  Quasi-synthetic sequence derived from human genome
RARRRRPLFALLLLCALLARLQV

SEQ ID NO: 15268 - protein, 23 aa, Artificial Sequence
  Quasi-synthetic sequence derived from human genome
FWVIAAARQIQKMRKFYFRRIMR

SEQ ID NO: 15269 - protein, 23 aa, Artificial Sequence
  Quasi-synthetic sequence derived from human genome
LQLLLAKVMRFERFGRRRVIIKK

SEQ ID NO: 15270 - protein, 23 aa, Artificial Sequence
  Quasi-synthetic sequence derived from human genome
ISMAFKLLILLIGTWALFFRKRR

SEQ ID NO: 15271 - protein, 23 aa, Artificial Sequence
  Quasi-synthetic sequence derived from human genome
FFIFLKILKLLISKLKAHQMCFR

SEQ ID NO: 15272 - protein, 23 aa, Artificial Sequence
  Quasi-synthetic sequence derived from human genome
RKWAVRIIRKFIKGFISRNKPLC

SEQ ID NO: 15273 - protein, 23 aa, Artificial Sequence
  Quasi-synthetic sequence derived from human genome
ILHKKRYIYRKIKGWRPVLMMCV

SEQ ID NO: 15274 - protein, 23 aa, Artificial Sequence
  Quasi-synthetic sequence derived from human genome
VPILLLGTPLHLLHRHRRRLRRR

SEQ ID NO: 15275 - protein, 23 aa, Artificial Sequence
  Quasi-synthetic sequence derived from human genome
LLALCLLLPLLLLGGWKRWRRGR

SEQ ID NO: 15276 - protein, 23 aa, Artificial Sequence
  Quasi-synthetic sequence derived from human genome
KVWLLREQKRKKKLRKLLKRLQN

SEQ ID NO: 15277 - protein, 23 aa, Artificial Sequence
  Quasi-synthetic sequence derived from human genome
VFVLLFIFVKRQIMRFAMKSRRG

SEQ ID NO: 15278 - protein, 23 aa, Artificial Sequence
  Quasi-synthetic sequence derived from human genome
MIKVFLSSLKFHIRRFIFLFFIL

SEQ ID NO: 15279 - protein, 23 aa, Artificial Sequence
  Quasi-synthetic sequence derived from human genome
FKRARRPGARALRLVLGIVLLFW

SEQ ID NO: 15280 - protein, 23 aa, Artificial Sequence
  Quasi-synthetic sequence derived from human genome
VKVLNINLKRKFIKKRIIIISNY

SEQ ID NO: 15281 - protein, 23 aa, Artificial Sequence
  Quasi-synthetic sequence derived from human genome
YLIMIFLGLYINFRHLYKQRRRR

SEQ ID NO: 15282 - protein, 23 aa, Artificial Sequence
  Quasi-synthetic sequence derived from human genome
VLSRTSKFRRLRQLLRRRKKRWQ

SEQ ID NO: 15283 - protein, 23 aa, Artificial Sequence
  Quasi-synthetic sequence derived from human genome
ILSILINFILFINILRILMRKLR

SEQ ID NO: 15284 - protein, 23 aa, Artificial Sequence
  Quasi-synthetic sequence derived from human genome
KKMLRKALKLLNRIFPYNLISLF

SEQ ID NO: 15285 - protein, 23 aa, Artificial Sequence
  Quasi-synthetic sequence derived from human genome
ANFLKKVRRLIMKRIVKISKCNL

SEQ ID NO: 15286 - protein, 23 aa, Artificial Sequence
  Quasi-synthetic sequence derived from human genome
LAMFFLLVLILSSVFLFRLFKRR

SEQ ID NO: 15287 - protein, 23 aa, Artificial Sequence
  Quasi-synthetic sequence derived from human genome
VLLLLLLLLLFLILRHRRQGKHW

SEQ ID NO: 15288 - protein, 23 aa, Artificial Sequence
  Quasi-synthetic sequence derived from human genome
RIFGKLVFLPLRLVWKEVILRKI

SEQ ID NO: 15289 - protein, 23 aa, Artificial Sequence
  Quasi-synthetic sequence derived from human genome
KVARKFWWKNVKMIVLICVIVFI

SEQ ID NO: 15290 - protein, 23 aa, Artificial Sequence
  Quasi-synthetic sequence derived from human genome
IILLRIFHLFHQKRQLEKLIRRR

SEQ ID NO: 15291 - protein, 23 aa, Artificial Sequence
  Quasi-synthetic sequence derived from human genome
GLTFAVYVRRKSIKKKRALRRFL

SEQ ID NO: 15292 - protein, 23 aa, Artificial Sequence
  Quasi-synthetic sequence derived from human genome
RRRTRFVFQKALRSLRRYPLPLR

SEQ ID NO: 15293 - protein, 23 aa, Artificial Sequence
  Quasi-synthetic sequence derived from human genome
AFILLVLLCLLLYYCRRKCLKPR

SEQ ID NO: 15294 - protein, 23 aa, Artificial Sequence
  Quasi-synthetic sequence derived from human genome
FMIKRAQGRKRFGMKNFKKRWFR

SEQ ID NO: 15295 - protein, 23 aa, Artificial Sequence
  Quasi-synthetic sequence derived from human genome
RPLRARVLVTRRRVRALIAVLWA

SEQ ID NO: 15296 - protein, 23 aa, Artificial Sequence
  Quasi-synthetic sequence derived from human genome
CVMVFCLILWKWKKKKRPRNSYK

SEQ ID NO: 15297 - protein, 23 aa, Artificial Sequence
  Quasi-synthetic sequence derived from human genome
AALVIQKYWRRVLAQRKLLMLKK

SEQ ID NO: 15298 - protein, 23 aa, Artificial Sequence
  Quasi-synthetic sequence derived from human genome
KKRVIRMLIVIVVLFFLCWMPIF

SEQ ID NO: 15299 - protein, 23 aa, Artificial Sequence
  Quasi-synthetic sequence derived from human genome
LRIARFRFRAFHFLNRFPSVYLR

SEQ ID NO: 15300 - protein, 23 aa, Artificial Sequence
  Quasi-synthetic sequence derived from human genome
LKKIIKRKHTLPNYKIRFKPFFP

SEQ ID NO: 15301 - protein, 23 aa, Artificial Sequence
  Quasi-synthetic sequence derived from human genome
KFVVVTRWRFKKAPLLLHYRPKM

SEQ ID NO: 15302 - protein, 23 aa, Artificial Sequence
  Quasi-synthetic sequence derived from human genome
FPRSPRIRKRFLLRRILEMLFFT

SEQ ID NO: 15303 - protein, 23 aa, Artificial Sequence
  Quasi-synthetic sequence derived from human genome
LGPKLRRFLKPQGHPRLLLWFKR

SEQ ID NO: 15304 - protein, 23 aa, Artificial Sequence
  Quasi-synthetic sequence derived from human genome
FRLKKVVKWYLSGFYKKPKGLKK

SEQ ID NO: 15305 - protein, 23 aa, Artificial Sequence
  Quasi-synthetic sequence derived from human genome
RLARIGRILRLVKGAKGIRTLLF

SEQ ID NO: 15306 - protein, 23 aa, Artificial Sequence
  Quasi-synthetic sequence derived from human genome
ALYFLIRAFRLKKPQRRRYGLLA

SEQ ID NO: 15307 - protein, 23 aa, Artificial Sequence
  Quasi-synthetic sequence derived from human genome
RIGRILRLIRAAKGIRTLLFALM

SEQ ID NO: 15308 - protein, 23 aa, Artificial Sequence
  Quasi-synthetic sequence derived from human genome
LRRNFMNIRPVKLKNLILLVKHW

SEQ ID NO: 15309 - protein, 23 aa, Artificial Sequence
  Quasi-synthetic sequence derived from human genome
LLLILKAGRRWNKYFKSRRPLFT

SEQ ID NO: 15310 - protein, 23 aa, Artificial Sequence
  Quasi-synthetic sequence derived from human genome
RFRKFPFFTRPLLSKWCPKSLFK

SEQ ID NO: 15311 - protein, 23 aa, Artificial Sequence
  Quasi-synthetic sequence derived from human genome
GLGLLHALLLVLLLCRLRRLRAR

SEQ ID NO: 15312 - protein, 23 aa, Artificial Sequence
  Quasi-synthetic sequence derived from human genome
KIWLRLRGLRKYKKTSQRLRSLV

SEQ ID NO: 15313 - protein, 23 aa, Artificial Sequence
  Quasi-synthetic sequence derived from human genome
ISVLRALRLLRIFKVTKYWASLR

SEQ ID NO: 15314 - protein, 23 aa, Artificial Sequence
  Quasi-synthetic sequence derived from human genome
FFSLRLLINESLIKKLRLFFRKF

SEQ ID NO: 15315 - protein, 23 aa, Artificial Sequence
  Quasi-synthetic sequence derived from human genome
WLRKSPPEKKLKRYAWKRRWFVL

SEQ ID NO: 15316 - protein, 23 aa, Artificial Sequence
  Quasi-synthetic sequence derived from human genome
RKRLRCRRKTVLVLMCILTAYVL

SEQ ID NO: 15317 - protein, 23 aa, Artificial Sequence
  Quasi-synthetic sequence derived from human genome
CLYFYCKFLWRCLKFVMRKLTGR

SEQ ID NO: 15318 - protein, 23 aa, Artificial Sequence
  Quasi-synthetic sequence derived from human genome
RLLLLLGYRRRCPPLLRGLVQRW

SEQ ID NO: 15319 - protein, 23 aa, Artificial Sequence
  Quasi-synthetic sequence derived from human genome
RARRGLLRLPRRSLLAALFFFSL

SEQ ID NO: 15320 - protein, 23 aa, Artificial Sequence
  Quasi-synthetic sequence derived from human genome
RAFMNVKHWPWMKLYFKIKPLLK

SEQ ID NO: 15321 - protein, 23 aa, Artificial Sequence
  Quasi-synthetic sequence derived from human genome
MMAGIPLLLFRWKPLWGVRLRLR

SEQ ID NO: 15322 - protein, 23 aa, Artificial Sequence
  Quasi-synthetic sequence derived from human genome
ILQKYARAWLARRRFQSIRRFVL

SEQ ID NO: 15323 - protein, 23 aa, Artificial Sequence
  Quasi-synthetic sequence derived from human genome
RRRNTPFHERFFRFLLRKLYVFR

SEQ ID NO: 15324 - protein, 23 aa, Artificial Sequence
  Quasi-synthetic sequence derived from human genome
CAPLFALLSRGRRRRMHVLRRRW

SEQ ID NO: 15325 - protein, 23 aa, Artificial Sequence
  Quasi-synthetic sequence derived from human genome
LLPPKRRLLPRVRLLPLLLALAV

SEQ ID NO: 15326 - protein, 23 aa, Artificial Sequence
  Quasi-synthetic sequence derived from human genome
YLWAIGKNVWKRWKKRFFVLVQV

SEQ ID NO: 15327 - protein, 23 aa, Artificial Sequence
  Quasi-synthetic sequence derived from human genome
RFLLRKLYVFRRSFLMTCISLRN

SEQ ID NO: 15328 - protein, 23 aa, Artificial Sequence
  Quasi-synthetic sequence derived from human genome
MFSIWRFAWRKSIKKYHAWRSRR

SEQ ID NO: 15329 - protein, 23 aa, Artificial Sequence
  Quasi-synthetic sequence derived from human genome
KIIRTIFKRLKSFICPKLHMGFK

SEQ ID NO: 15330 - protein, 23 aa, Artificial Sequence
  Quasi-synthetic sequence derived from human genome
KCALVRHKFNRLPRVLILHLKRY

SEQ ID NO: 15331 - protein, 23 aa, Artificial Sequence
  Quasi-synthetic sequence derived from human genome
FKRKGKLSTIGKIFKPWKWRKKK

SEQ ID NO: 15332 - protein, 23 aa, Artificial Sequence
  Quasi-synthetic sequence derived from human genome
KARSRTVAKKLVVFRPRLFLLCF

SEQ ID NO: 15333 - protein, 23 aa, Artificial Sequence
  Quasi-synthetic sequence derived from human genome
TLVLLLSIAIFQRQKRRKFWKAK

SEQ ID NO: 15334 - protein, 23 aa, Artificial Sequence
  Quasi-synthetic sequence derived from human genome
KGLCLFKKHFMALIFSAKRLKII

SEQ ID NO: 15335 - protein, 23 aa, Artificial Sequence
  Quasi-synthetic sequence derived from human genome
VRIQRRWRGYRVRKYLFNYYYLK

SEQ ID NO: 15336 - protein, 23 aa, Artificial Sequence
  Quasi-synthetic sequence derived from human genome
KQNIFHFLYRKNRSRIPLLRKRW

SEQ ID NO: 15337 - protein, 23 aa, Artificial Sequence
  Quasi-synthetic sequence derived from human genome
KTIIRKINKMKTLKRKKLLNQIL

SEQ ID NO: 15338 - protein, 23 aa, Artificial Sequence
  Quasi-synthetic sequence derived from human genome
VKAFLALLRPFISSKFTRKIRFL

SEQ ID NO: 15339 - protein, 23 aa, Artificial Sequence
  Quasi-synthetic sequence derived from human genome
KLKPPVWYLRSLVQNLLLIRRFK

SEQ ID NO: 15340 - protein, 23 aa, Artificial Sequence
  Quasi-synthetic sequence derived from human genome
KAKYKKVQLVRLVGMMLLIFARK

SEQ ID NO: 15341 - protein, 23 aa, Artificial Sequence
  Quasi-synthetic sequence derived from human genome
WWRTLVQRRIRQRRQALLRVYVI

SEQ ID NO: 15342 - protein, 23 aa, Artificial Sequence
  Quasi-synthetic sequence derived from human genome
KLFNKAKVNVNLLIFLLNKKFLR

SEQ ID NO: 15343 - protein, 23 aa, Artificial Sequence
  Quasi-synthetic sequence derived from human genome
KKLRRLLKYMFIRDYKSKIVKGI

SEQ ID NO: 15344 - protein, 23 aa, Artificial Sequence
  Quasi-synthetic sequence derived from human genome
WRRKKLYLLFAQHRYISRLFSVL

SEQ ID NO: 15345 - protein, 23 aa, Artificial Sequence
  Quasi-synthetic sequence derived from human genome
RRSRHRLLLLLLRYLVVALGYHK

SEQ ID NO: 15346 - protein, 23 aa, Artificial Sequence
  Quasi-synthetic sequence derived from human genome
FVVTKFCLFCFWKFARKGKKGKR

SEQ ID NO: 15347 - protein, 23 aa, Artificial Sequence
  Quasi-synthetic sequence derived from human genome
WWWARAARLARLRFRRSLLPPQR

SEQ ID NO: 15348 - protein, 23 aa, Artificial Sequence
  Quasi-synthetic sequence derived from human genome
LRKRRRLLSIIVVLVVTFALCWM

SEQ ID NO: 15349 - protein, 23 aa, Artificial Sequence
  Quasi-synthetic sequence derived from human genome
KRHYHKKFWKLGAVIFFFIIVLV

SEQ ID NO: 15350 - protein, 23 aa, Artificial Sequence
  Quasi-synthetic sequence derived from human genome
GRRKSWRLEFLFLRRRCFLLTFY

SEQ ID NO: 15351 - protein, 23 aa, Artificial Sequence
  Quasi-synthetic sequence derived from human genome
KYLKVFYKFINLNRYKIRHTRKK

SEQ ID NO: 15352 - protein, 23 aa, Artificial Sequence
  Quasi-synthetic sequence derived from human genome
YRHWQIPLGRRFRSLKMWFVFRM

SEQ ID NO: 15353 - protein, 23 aa, Artificial Sequence
  Quasi-synthetic sequence derived from human genome
KKRILFLYNDLLKKRAAFTKLRR

SEQ ID NO: 15354 - protein, 23 aa, Artificial Sequence
  Quasi-synthetic sequence derived from human genome
FFIIFCVLIAIMVKVNFQRKKWR

SEQ ID NO: 15355 - protein, 23 aa, Artificial Sequence
  Quasi-synthetic sequence derived from human genome
VIFVLVHSFLKKLLGKKLTRCLK

SEQ ID NO: 15356 - protein, 23 aa, Artificial Sequence
  Quasi-synthetic sequence derived from human genome
RYKPLRRRVIWLIGQWISVKFKS

SEQ ID NO: 15357 - protein, 23 aa, Artificial Sequence
  Quasi-synthetic sequence derived from human genome
FVAKGHLFRKGIMKIMVYKIFRI

SEQ ID NO: 15358 - protein, 23 aa, Artificial Sequence
  Quasi-synthetic sequence derived from human genome
LLVLILLCLLIYYCRRRCLKPRQ

SEQ ID NO: 15359 - protein, 23 aa, Artificial Sequence
  Quasi-synthetic sequence derived from human genome
RLLLKFIKIMKHLRKLNNFNSYL

SEQ ID NO: 15360 - protein, 23 aa, Artificial Sequence
  Quasi-synthetic sequence derived from human genome
RTLYLRYRPKVKFLFGIWPVILF

SEQ ID NO: 15361 - protein, 23 aa, Artificial Sequence
  Quasi-synthetic sequence derived from human genome
RLKNIRKVYGRCMWYRLRLLKPQ

SEQ ID NO: 15362 - protein, 23 aa, Artificial Sequence
  Quasi-synthetic sequence derived from human genome
RRRRRREYCKFALLLVLYTLVLL

SEQ ID NO: 15363 - protein, 23 aa, Artificial Sequence
  Quasi-synthetic sequence derived from human genome
KQLAALCYRCLALLYWRMFRLKR

SEQ ID NO: 15364 - protein, 23 aa, Artificial Sequence
  Quasi-synthetic sequence derived from human genome
RIRILCCLTFLVKVKSKALLKNR

SEQ ID NO: 15365 - protein, 23 aa, Artificial Sequence
  Quasi-synthetic sequence derived from human genome
KKKKPLKLGPIKKKDLKKLVLYL

SEQ ID NO: 15366 - protein, 23 aa, Artificial Sequence
  Quasi-synthetic sequence derived from human genome
KVKKIWQKQFRWPKNRLQILKFC

SEQ ID NO: 15367 - protein, 23 aa, Artificial Sequence
  Quasi-synthetic sequence derived from human genome
RRLRRLAHLVLFCPFSKRLQGRL

SEQ ID NO: 15368 - protein, 23 aa, Artificial Sequence
  Quasi-synthetic sequence derived from human genome
RISLRKKLKLPIGKRNWLKRSSL

SEQ ID NO: 15369 - protein, 23 aa, Artificial Sequence
  Quasi-synthetic sequence derived from human genome
WHKFKQWVIPWHLNKRYNRKRFF

SEQ ID NO: 15370 - protein, 23 aa, Artificial Sequence
  Quasi-synthetic sequence derived from human genome
KKKKFCYLCILLLIVLFILLCCL

SEQ ID NO: 15371 - protein, 23 aa, Artificial Sequence
  Quasi-synthetic sequence derived from human genome
KQKVKYLTFRFIFALRLSKKQKK

SEQ ID NO: 15372 - protein, 23 aa, Artificial Sequence
  Quasi-synthetic sequence derived from human genome
LRRQWKCVQRRCLRHLAHRLRRR

SEQ ID NO: 15373 - protein, 23 aa, Artificial Sequence
  Quasi-synthetic sequence derived from human genome
LVWKRRILFFVVTLVSVFLVWKF

SEQ ID NO: 15374 - protein, 23 aa, Artificial Sequence
  Quasi-synthetic sequence derived from human genome
RDTFRLLLLCRWDKRRWRKIPKR

SEQ ID NO: 15375 - protein, 23 aa, Artificial Sequence
  Quasi-synthetic sequence derived from human genome
IMGYLRIIRFLPLFKIIVPILIR

SEQ ID NO: 15376 - protein, 23 aa, Artificial Sequence
  Quasi-synthetic sequence derived from human genome
RNVRYNCRVIFLNRKILLIRPKM

SEQ ID NO: 15377 - protein, 23 aa, Artificial Sequence
  Quasi-synthetic sequence derived from human genome
ILCYIWLLVLLLHKHRSILLRRL

SEQ ID NO: 15378 - protein, 23 aa, Artificial Sequence
  Quasi-synthetic sequence derived from human genome
RARRRRRRRRRRDLLLSQLCFLA

SEQ ID NO: 15379 - protein, 23 aa, Artificial Sequence
  Quasi-synthetic sequence derived from human genome
WVKRHRSSFRNRFPLLKVLILQR

SEQ ID NO: 15380 - protein, 23 aa, Artificial Sequence
  Quasi-synthetic sequence derived from human genome
VYFGAHLLKTVRLLRLLRLLPRL

SEQ ID NO: 15381 - protein, 23 aa, Artificial Sequence
  Quasi-synthetic sequence derived from human genome
LFKRRVVRRLASLKTRRCRLSRA

SEQ ID NO: 15382 - protein, 23 aa, Artificial Sequence
  Quasi-synthetic sequence derived from human genome
CWVILMGFSIWLYWRRKKRKGLS

SEQ ID NO: 15383 - protein, 23 aa, Artificial Sequence
  Quasi-synthetic sequence derived from human genome
SRLLFFLLGFLRIRVRGQRASRL

SEQ ID NO: 15384 - protein, 23 aa, Artificial Sequence
  Quasi-synthetic sequence derived from human genome
LVILTFQWRFYLSFRKLMRWILI

SEQ ID NO: 15385 - protein, 23 aa, Artificial Sequence
  Quasi-synthetic sequence derived from human genome
LFFRRPKASLPRVFVLRALLMVL

SEQ ID NO: 15386 - protein, 23 aa, Artificial Sequence
  Quasi-synthetic sequence derived from human genome
VAGIFLLVVVFVLCRKMISRKKK

SEQ ID NO: 15387 - protein, 23 aa, Artificial Sequence
  Quasi-synthetic sequence derived from human genome
KMPKWTRVILLNWCAWFLRMKRP

SEQ ID NO: 15388 - protein, 23 aa, Artificial Sequence
  Quasi-synthetic sequence derived from human genome
FLKRFQLTKLPPYLIFCIKRFTK

SEQ ID NO: 15389 - protein, 23 aa, Artificial Sequence
  Quasi-synthetic sequence derived from human genome
LRPLKKFLRKLHLPRDLPQKKKL

SEQ ID NO: 15390 - protein, 23 aa, Artificial Sequence
  Quasi-synthetic sequence derived from human genome
LLLLVFLVACFINRKCQKQRKKK

SEQ ID NO: 15391 - protein, 23 aa, Artificial Sequence
  Quasi-synthetic sequence derived from human genome
RAGVTLRVLRMMRIFWVIKLARH

SEQ ID NO: 15392 - protein, 23 aa, Artificial Sequence
  Quasi-synthetic sequence derived from human genome
MFAKTWRVHAIFKNVKMKKKIIK

SEQ ID NO: 15393 - protein, 23 aa, Artificial Sequence
  Quasi-synthetic sequence derived from human genome
LLLMVACRLRLVKQKLKKARPIT

SEQ ID NO: 15394 - protein, 23 aa, Artificial Sequence
  Quasi-synthetic sequence derived from human genome
VRLFLKNYSKTRFGYRIKWRIIC

SEQ ID NO: 15395 - protein, 23 aa, Artificial Sequence
  Quasi-synthetic sequence derived from human genome
RIGRILRLIRGAKGIRTLLFALM

SEQ ID NO: 15396 - protein, 23 aa, Artificial Sequence
  Quasi-synthetic sequence derived from human genome
ILGLLLLRWRRPALHRPIKVNLL

SEQ ID NO: 15397 - protein, 23 aa, Artificial Sequence
  Quasi-synthetic sequence derived from human genome
RRLRKNLKSLIIVHPSWFIRTLL

SEQ ID NO: 15398 - protein, 23 aa, Artificial Sequence
  Quasi-synthetic sequence derived from human genome
KIRTRLIRKRFLCLGWGLPALVV

SEQ ID NO: 15399 - protein, 23 aa, Artificial Sequence
  Quasi-synthetic sequence derived from human genome
MRRIVFAGVILFRLLGVILFRLL

SEQ ID NO: 15400 - protein, 23 aa, Artificial Sequence
  Quasi-synthetic sequence derived from human genome
FVAAGLFAYVLRRRRKKLPFRSK

SEQ ID NO: 15401 - protein, 23 aa, Artificial Sequence
  Quasi-synthetic sequence derived from human genome
RRGRSFLLRSWHHLMKRVQIKIF

SEQ ID NO: 15402 - protein, 23 aa, Artificial Sequence
  Quasi-synthetic sequence derived from human genome
RIRIYKLNRRKRYRCLALKGFHP

SEQ ID NO: 15403 - protein, 23 aa, Artificial Sequence
  Quasi-synthetic sequence derived from human genome
RLCIRKFFPKKKCFVFDLPIHRR

SEQ ID NO: 15404 - protein, 23 aa, Artificial Sequence
  Quasi-synthetic sequence derived from human genome
FIITKCCLFCFWKFARKGKKGKR

SEQ ID NO: 15405 - protein, 23 aa, Artificial Sequence
  Quasi-synthetic sequence derived from human genome
KLLRRRFRLLLALAVVSVGLWTL

SEQ ID NO: 15406 - protein, 23 aa, Artificial Sequence
  Quasi-synthetic sequence derived from human genome
MRVLRIARVLKLLKMATGMRALL

SEQ ID NO: 15407 - protein, 23 aa, Artificial Sequence
  Quasi-synthetic sequence derived from human genome
PPLKTVIRAIRIMKFHVAKRKFK

SEQ ID NO: 15408 - protein, 23 aa, Artificial Sequence
  Quasi-synthetic sequence derived from human genome
IFCLIVLSLSTFHIHKRRMKKRK

SEQ ID NO: 15409 - protein, 23 aa, Artificial Sequence
  Quasi-synthetic sequence derived from human genome
LRRPPRLRLCARLPDFFLLLLFR

SEQ ID NO: 15410 - protein, 23 aa, Artificial Sequence
  Quasi-synthetic sequence derived from human genome
IGIFNRSFRTGIKRRILLLIPKW

SEQ ID NO: 15411 - protein, 23 aa, Artificial Sequence
  Quasi-synthetic sequence derived from human genome
FYFIVVLRPLQLLRLFKLKERYR

SEQ ID NO: 15412 - protein, 23 aa, Artificial Sequence
  Quasi-synthetic sequence derived from human genome
RAFMGVKNWPWMKLYFKIKPLLK

SEQ ID NO: 15413 - protein, 23 aa, Artificial Sequence
  Quasi-synthetic sequence derived from human genome
LVVIILILAFWVLPKYKTRKAMR

SEQ ID NO: 15414 - protein, 23 aa, Artificial Sequence
  Quasi-synthetic sequence derived from human genome
RLRLRQRRRRLLIKKMPAAATIP

SEQ ID NO: 15415 - protein, 23 aa, Artificial Sequence
  Quasi-synthetic sequence derived from human genome
PKPPRLRLWALIPWLPRKQRPRI

SEQ ID NO: 15416 - protein, 23 aa, Artificial Sequence
  Quasi-synthetic sequence derived from human genome
RMALSMIERRKRWRTIKLLLRRG

SEQ ID NO: 15417 - protein, 23 aa, Artificial Sequence
  Quasi-synthetic sequence derived from human genome
LRFLKLRRERRALLCLLLVLGIA

SEQ ID NO: 15418 - protein, 23 aa, Artificial Sequence
  Quasi-synthetic sequence derived from human genome
FRLLRVFKLAKSWPTLNMLIKII

SEQ ID NO: 15419 - protein, 23 aa, Artificial Sequence
  Quasi-synthetic sequence derived from human genome
KKFIWNHGITLPLKNVRKRRFRK

SEQ ID NO: 15420 - protein, 23 aa, Artificial Sequence
  Quasi-synthetic sequence derived from human genome
SRISITFFRLFRVMRLVKLLSRG

SEQ ID NO: 15421 - protein, 23 aa, Artificial Sequence
  Quasi-synthetic sequence derived from human genome
NSRISITFFRLFRVMRLVKLLSR

SEQ ID NO: 15422 - protein, 23 aa, Artificial Sequence
  Quasi-synthetic sequence derived from human genome
FWKRYRFKLIAFMVISIIALMLF

SEQ ID NO: 15423 - protein, 23 aa, Artificial Sequence
  Quasi-synthetic sequence derived from human genome
FKRFHPFCLVLRKRKSTLFWGAR

SEQ ID NO: 15424 - protein, 23 aa, Artificial Sequence
  Quasi-synthetic sequence derived from human genome
GILMLALLVFILWKCGFFKRNKK

SEQ ID NO: 15425 - protein, 23 aa, Artificial Sequence
  Quasi-synthetic sequence derived from human genome
LSIFYLLKIANFSNLIFLRLKRR

SEQ ID NO: 15426 - protein, 23 aa, Artificial Sequence
  Quasi-synthetic sequence derived from human genome
LLAILLVVAVFCILWNWNKRKKR

SEQ ID NO: 15427 - protein, 23 aa, Artificial Sequence
  Quasi-synthetic sequence derived from human genome
KIGIYGWRKRCLYLFVLLLLIIL

SEQ ID NO: 15428 - protein, 23 aa, Artificial Sequence
  Quasi-synthetic sequence derived from human genome
LKRKYWWKNLKMMIILGVICAII

SEQ ID NO: 15429 - protein, 23 aa, Artificial Sequence
  Quasi-synthetic sequence derived from human genome
MRRFLSKVYSFPMRKLILFLVFP

SEQ ID NO: 15430 - protein, 23 aa, Artificial Sequence
  Quasi-synthetic sequence derived from human genome
MVRPHLLKKKILGRVWWLMPVVL

SEQ ID NO: 15431 - protein, 23 aa, Artificial Sequence
  Quasi-synthetic sequence derived from human genome
FIRHKCKQRFTKITQYLIRIRKL

SEQ ID NO: 15432 - protein, 23 aa, Artificial Sequence
  Quasi-synthetic sequence derived from human genome
KSWLMKALFKTFYMVLLKSFLLK

SEQ ID NO: 15433 - protein, 23 aa, Artificial Sequence
  Quasi-synthetic sequence derived from human genome
LYSRAVRNLKKKLLPWQRRGLLR

SEQ ID NO: 15434 - protein, 23 aa, Artificial Sequence
  Quasi-synthetic sequence derived from human genome
LNLFWICKTCFRCLKRLKMSWFL

SEQ ID NO: 15435 - protein, 23 aa, Artificial Sequence
  Quasi-synthetic sequence derived from human genome
LVFVPHMRRFLSRKKIRHHIYVL

SEQ ID NO: 15436 - protein, 23 aa, Artificial Sequence
  Quasi-synthetic sequence derived from human genome
LKLRHWQWWRLFTKVKPLLQVTR

SEQ ID NO: 15437 - protein, 23 aa, Artificial Sequence
  Quasi-synthetic sequence derived from human genome
LFFRKRRADMPRVFVFRALLLVL

SEQ ID NO: 15438 - protein, 23 aa, Artificial Sequence
  Quasi-synthetic sequence derived from human genome
FLRRADTRRWKKKQLRRPSLLLL

SEQ ID NO: 15439 - protein, 23 aa, Artificial Sequence
  Quasi-synthetic sequence derived from human genome
ALKALKYLFRFIIQSRVLYLRFY

SEQ ID NO: 15440 - protein, 23 aa, Artificial Sequence
  Quasi-synthetic sequence derived from human genome
LRRLSSKKNIRKQRMKILFNVVL

SEQ ID NO: 15441 - protein, 23 aa, Artificial Sequence
  Quasi-synthetic sequence derived from human genome
RRRARLRFMKQKFNIVCLKISGF

SEQ ID NO: 15442 - protein, 23 aa, Artificial Sequence
  Quasi-synthetic sequence derived from human genome
VLLLLALILPLLFYLRKRNKTGK

SEQ ID NO: 15443 - protein, 23 aa, Artificial Sequence
  Quasi-synthetic sequence derived from human genome
LLPRRRRCFPARAPLLRVALCLL

SEQ ID NO: 15444 - protein, 23 aa, Artificial Sequence
  Quasi-synthetic sequence derived from human genome
RYAAIVHPLRLRHLRRPRVARLL

SEQ ID NO: 15445 - protein, 23 aa, Artificial Sequence
  Quasi-synthetic sequence derived from human genome
FLNRYPRKKFWVGKPIARVVKKK

SEQ ID NO: 15446 - protein, 23 aa, Artificial Sequence
  Quasi-synthetic sequence derived from human genome
ARLFSKKIFCCLFFITLFFIRLL

SEQ ID NO: 15447 - protein, 23 aa, Artificial Sequence
  Quasi-synthetic sequence derived from human genome
MRLRLRLLALLLLLLAPPARAPK

SEQ ID NO: 15448 - protein, 23 aa, Artificial Sequence
  Quasi-synthetic sequence derived from human genome
RLKLFFIKNQRSSLRIRLFNFSL

SEQ ID NO: 15449 - protein, 23 aa, Artificial Sequence
  Quasi-synthetic sequence derived from human genome
KAATIIQKYWRMYVVRRRYKIRR

SEQ ID NO: 15450 - protein, 23 aa, Artificial Sequence
  Quasi-synthetic sequence derived from human genome
ILKRALKVKQAMMQLYVLKLLKV

SEQ ID NO: 15451 - protein, 23 aa, Artificial Sequence
  Quasi-synthetic sequence derived from human genome
LRLRKILFCVLGLYIAIPFLIKL

SEQ ID NO: 15452 - protein, 23 aa, Artificial Sequence
  Quasi-synthetic sequence derived from human genome
RPLNKKWRGMKWKKWSIHIVIPK

SEQ ID NO: 15453 - protein, 23 aa, Artificial Sequence
  Quasi-synthetic sequence derived from human genome
RKPPPRKHTRSWAVLKLLLLLLL

SEQ ID NO: 15454 - protein, 23 aa, Artificial Sequence
  Quasi-synthetic sequence derived from human genome
RLLLVHGRWSYIRMCKFLRYFFY

SEQ ID NO: 15455 - protein, 23 aa, Artificial Sequence
  Quasi-synthetic sequence derived from human genome
RRAKRKVTRMILIVAALFCLCWM

SEQ ID NO: 15456 - protein, 23 aa, Artificial Sequence
  Quasi-synthetic sequence derived from human genome
SIFFILNSIIVYKLRRKSNFRLR

SEQ ID NO: 15457 - protein, 23 aa, Artificial Sequence
  Quasi-synthetic sequence derived from human genome
LLLLVLVLLVALRARFWKQSRGK

SEQ ID NO: 15458 - protein, 23 aa, Artificial Sequence
  Quasi-synthetic sequence derived from human genome
RSLVPLFCWLRATFWLLATKRRK

SEQ ID NO: 15459 - protein, 23 aa, Artificial Sequence
  Quasi-synthetic sequence derived from human genome
FFFIIFIVFISRKCCPPTLRRIR

SEQ ID NO: 15460 - protein, 23 aa, Artificial Sequence
  Quasi-synthetic sequence derived from human genome
LLVVVLGVVFGILIKRRQQKIRK

SEQ ID NO: 15461 - protein, 23 aa, Artificial Sequence
  Quasi-synthetic sequence derived from human genome
RFIKIIEVKNKKLVELLRRKVRL

SEQ ID NO: 15462 - protein, 23 aa, Artificial Sequence
  Quasi-synthetic sequence derived from human genome
LLIKKHWLWTRKCFVCKMYTARW

SEQ ID NO: 15463 - protein, 23 aa, Artificial Sequence
  Quasi-synthetic sequence derived from human genome
RFWAKHRWGLPLRVLKPIQCFKL

SEQ ID NO: 15464 - protein, 23 aa, Artificial Sequence
  Quasi-synthetic sequence derived from human genome
RRMFRVRNCLRGLGLFLLVFSFF

SEQ ID NO: 15465 - protein, 23 aa, Artificial Sequence
  Quasi-synthetic sequence derived from human genome
LLLFQVIRLYQRRRWTIRAMHLF

SEQ ID NO: 15466 - protein, 23 aa, Artificial Sequence
  Quasi-synthetic sequence derived from human genome
LAKKRVVRMLLVIVVLFFLCWLP

SEQ ID NO: 15467 - protein, 23 aa, Artificial Sequence
  Quasi-synthetic sequence derived from human genome
KSRFLCGKEIKKKKCIFRLRIRV

SEQ ID NO: 15468 - protein, 23 aa, Artificial Sequence
  Quasi-synthetic sequence derived from human genome
LVSILAGCLLNRRRAARRRRKRL

SEQ ID NO: 15469 - protein, 23 aa, Artificial Sequence
  Quasi-synthetic sequence derived from human genome
LLAKHWKLLPLLRSVLRFRLGGL

SEQ ID NO: 15470 - protein, 23 aa, Artificial Sequence
  Quasi-synthetic sequence derived from human genome
SHLIFFIFYLRNMKKKYTKMVKL

SEQ ID NO: 15471 - protein, 23 aa, Artificial Sequence
  Quasi-synthetic sequence derived from human genome
RLLLVHGRWSYVRICKFLRYFFY

SEQ ID NO: 15472 - protein, 23 aa, Artificial Sequence
  Quasi-synthetic sequence derived from human genome
KMLRKALKLLNRIFPYNLISLFL

SEQ ID NO: 15473 - protein, 23 aa, Artificial Sequence
  Quasi-synthetic sequence derived from human genome
TRRPRGSTARTLLRLLLRLLLFL

SEQ ID NO: 15474 - protein, 23 aa, Artificial Sequence
  Quasi-synthetic sequence derived from human genome
FRHIFLATLACLCPVWRRRRKRP

SEQ ID NO: 15475 - protein, 23 aa, Artificial Sequence
  Quasi-synthetic sequence derived from human genome
LKMLMKRALKFKDPLLMKMIRNI

SEQ ID NO: 15476 - protein, 23 aa, Artificial Sequence
  Quasi-synthetic sequence derived from human genome
KRSVTRIKKRSRSVFYRLTILIL

SEQ ID NO: 15477 - protein, 23 aa, Artificial Sequence
  Quasi-synthetic sequence derived from human genome
LATLGVALLFIVRKKRKEKRLKR

SEQ ID NO: 15478 - protein, 23 aa, Artificial Sequence
  Quasi-synthetic sequence derived from human genome
KPIIRQIRRPKNVVLRLAVKFFP

SEQ ID NO: 15479 - protein, 23 aa, Artificial Sequence
  Quasi-synthetic sequence derived from human genome
LLRFLRLCRSFYITCRRLRCFPQ

SEQ ID NO: 15480 - protein, 23 aa, Artificial Sequence
  Quasi-synthetic sequence derived from human genome
KRKARGYLRLVPLFVLLALLVLA

SEQ ID NO: 15481 - protein, 23 aa, Artificial Sequence
  Quasi-synthetic sequence derived from human genome
FIPFFKYCLLRKSFTCWKKNVRL

SEQ ID NO: 15482 - protein, 23 aa, Artificial Sequence
  Quasi-synthetic sequence derived from human genome
KKAIKYQSKARRKLMFIIICVIV

SEQ ID NO: 15483 - protein, 23 aa, Artificial Sequence
  Quasi-synthetic sequence derived from human genome
MKLLLWACIVCVAFARKRRFPFI

SEQ ID NO: 15484 - protein, 23 aa, Artificial Sequence
  Quasi-synthetic sequence derived from human genome
RYLRRRLVPRYRLQLLGIACMVI

SEQ ID NO: 15485 - protein, 23 aa, Artificial Sequence
  Quasi-synthetic sequence derived from human genome
IFIVTKCCLFCFWKFARKAKKGK

SEQ ID NO: 15486 - protein, 23 aa, Artificial Sequence
  Quasi-synthetic sequence derived from human genome
ARRRCRRVLYWIPVVFITLLLGW

SEQ ID NO: 15487 - protein, 23 aa, Artificial Sequence
  Quasi-synthetic sequence derived from human genome
IVILYCRIYSLVRTRSRRLTFRK

SEQ ID NO: 15488 - protein, 23 aa, Artificial Sequence
  Quasi-synthetic sequence derived from human genome
RILRIFKLTRHFVGLRVLGHTLR

SEQ ID NO: 15489 - protein, 23 aa, Artificial Sequence
  Quasi-synthetic sequence derived from human genome
LLRLLNKLTKWKHSRTMMLVVFK

SEQ ID NO: 15490 - protein, 23 aa, Artificial Sequence
  Quasi-synthetic sequence derived from human genome
RCARRRRPGLLLPGLWLLLLARP

SEQ ID NO: 15491 - protein, 23 aa, Artificial Sequence
  Quasi-synthetic sequence derived from human genome
ALSACIIQCWWRLILSKILKKRR

SEQ ID NO: 15492 - protein, 23 aa, Artificial Sequence
  Quasi-synthetic sequence derived from human genome
REFKRAFLRLLRCQCRRRRRRRP

SEQ ID NO: 15493 - protein, 23 aa, Artificial Sequence
  Quasi-synthetic sequence derived from human genome
ISFIILFKVFLFPRITISKKTKL

SEQ ID NO: 15494 - protein, 23 aa, Artificial Sequence
  Quasi-synthetic sequence derived from human genome
LNTFLLKPIQRLLHYRLLLRRLC

SEQ ID NO: 15495 - protein, 23 aa, Artificial Sequence
  Quasi-synthetic sequence derived from human genome
LIQGLSFVTRRRIRRTVRRALRR

SEQ ID NO: 15496 - protein, 23 aa, Artificial Sequence
  Quasi-synthetic sequence derived from human genome
RFLGKKYRKYYYKSPKPLLRPFL

SEQ ID NO: 15497 - protein, 23 aa, Artificial Sequence
  Quasi-synthetic sequence derived from human genome
RYFLWHTYRWLLLKLLLLLLLLL

SEQ ID NO: 15498 - protein, 23 aa, Artificial Sequence
  Quasi-synthetic sequence derived from human genome
TMLALFMLMALVLLQRKLWRRRT

SEQ ID NO: 15499 - protein, 23 aa, Artificial Sequence
  Quasi-synthetic sequence derived from human genome
LLSPSKIKTFLSLVWKRRILFFV

SEQ ID NO: 15500 - protein, 23 aa, Artificial Sequence
  Quasi-synthetic sequence derived from human genome
RLARRRKKILFYCHFPDLLLTKR

SEQ ID NO: 15501 - protein, 23 aa, Artificial Sequence
  Quasi-synthetic sequence derived from human genome
RFPWPKVLKISYKRSSFFIKIRP

SEQ ID NO: 15502 - protein, 23 aa, Artificial Sequence
  Quasi-synthetic sequence derived from human genome
LLRRLPKLRKRMRKMCLTFMKES

SEQ ID NO: 15503 - protein, 23 aa, Artificial Sequence
  Quasi-synthetic sequence derived from human genome
KLKQRVVLLAILLVIFIFTKVFL

SEQ ID NO: 15504 - protein, 23 aa, Artificial Sequence
  Quasi-synthetic sequence derived from human genome
KLRQVSLRRNRLRALPRALFRNL

SEQ ID NO: 15505 - protein, 23 aa, Artificial Sequence
  Quasi-synthetic sequence derived from human genome
KKSRKKMCILVLVLSVIILILGL

SEQ ID NO: 15506 - protein, 23 aa, Artificial Sequence
  Quasi-synthetic sequence derived from human genome
GLRKTKYRSFRRRLLKFIPGLNR

SEQ ID NO: 15507 - protein, 23 aa, Artificial Sequence
  Quasi-synthetic sequence derived from human genome
MAALRPLVKPKIVKKRTKKFIRH

SEQ ID NO: 15508 - protein, 23 aa, Artificial Sequence
  Quasi-synthetic sequence derived from human genome
KKKKIVKYGMGGLIILFLIAIIW

SEQ ID NO: 15509 - protein, 23 aa, Artificial Sequence
  Quasi-synthetic sequence derived from human genome
LKVYVRKRRPSRPHMFPKMLMKI

SEQ ID NO: 15510 - protein, 23 aa, Artificial Sequence
  Quasi-synthetic sequence derived from human genome
RLGIHLIRRKIVKPKHHVLMSRK

SEQ ID NO: 15511 - protein, 23 aa, Artificial Sequence
  Quasi-synthetic sequence derived from human genome
RWLNKLMKLLQRLPNSVVRRLHR

SEQ ID NO: 15512 - protein, 23 aa, Artificial Sequence
  Quasi-synthetic sequence derived from human genome
LLLLLFYVVRYCWLRRQAALQRR

SEQ ID NO: 15513 - protein, 23 aa, Artificial Sequence
  Quasi-synthetic sequence derived from human genome
VIKHFLRKIIMVHPKVRFHFSVK

SEQ ID NO: 15514 - protein, 23 aa, Artificial Sequence
  Quasi-synthetic sequence derived from human genome
PFRLIRKMFSFKVSRWMGLACFR

SEQ ID NO: 15515 - protein, 23 aa, Artificial Sequence
  Quasi-synthetic sequence derived from human genome
FLILPFQRITRLKLLVQNILKRV

SEQ ID NO: 15516 - protein, 23 aa, Artificial Sequence
  Quasi-synthetic sequence derived from human genome
LGPWLRALGPWLRVRRGLLVLRL

SEQ ID NO: 15517 - protein, 23 aa, Artificial Sequence
  Quasi-synthetic sequence derived from human genome
LLAWCRRSRGLKALRLCRALALL

SEQ ID NO: 15518 - protein, 23 aa, Artificial Sequence
  Quasi-synthetic sequence derived from human genome
LLALALLAWCRRSRGLKALRLCR

SEQ ID NO: 15519 - protein, 23 aa, Artificial Sequence
  Quasi-synthetic sequence derived from human genome
LIFILLLTLTILTIWLFKHRRAR

SEQ ID NO: 15520 - protein, 23 aa, Artificial Sequence
  Quasi-synthetic sequence derived from human genome
RALRGLSYRSLRRRVRRLRRLTA

SEQ ID NO: 15521 - protein, 23 aa, Artificial Sequence
  Quasi-synthetic sequence derived from human genome
KRLKKSAFVVLILLITAKLLVLP

SEQ ID NO: 15522 - protein, 23 aa, Artificial Sequence
  Quasi-synthetic sequence derived from human genome
VAIKRKRPFVLKKKRGRKRRRIN

SEQ ID NO: 15523 - protein, 23 aa, Artificial Sequence
  Quasi-synthetic sequence derived from human genome
IMLLLFLIVVLLGLFAWHRRRQK

SEQ ID NO: 15524 - protein, 23 aa, Artificial Sequence
  Quasi-synthetic sequence derived from human genome
RTGCKFKFFFRRNPYFRNKLIVK

SEQ ID NO: 15525 - protein, 23 aa, Artificial Sequence
  Quasi-synthetic sequence derived from human genome
LIIRRLHKVLRPFLLRRLKKEVE

SEQ ID NO: 15526 - protein, 23 aa, Artificial Sequence
  Quasi-synthetic sequence derived from human genome
LSMFYLLRIANFSNLIFLRIKRR

SEQ ID NO: 15527 - protein, 23 aa, Artificial Sequence
  Quasi-synthetic sequence derived from human genome
LLVLTCCFCICKKCLFKKKNKKK

SEQ ID NO: 15528 - protein, 23 aa, Artificial Sequence
  Quasi-synthetic sequence derived from human genome
LFFRFKRTLDRICVLFLLGWHRK

SEQ ID NO: 15529 - protein, 23 aa, Artificial Sequence
  Quasi-synthetic sequence derived from human genome
KFFKRKPKVLGVVRILIALMSLS

SEQ ID NO: 15530 - protein, 23 aa, Artificial Sequence
  Quasi-synthetic sequence derived from human genome
SLCLLGRLLIYKQGRKLFPIKLK

SEQ ID NO: 15531 - protein, 23 aa, Artificial Sequence
  Quasi-synthetic sequence derived from human genome
RFHGLWYMKMMWAWLQAKRKPRK

SEQ ID NO: 15532 - protein, 23 aa, Artificial Sequence
  Quasi-synthetic sequence derived from human genome
RPFLKRAILVLSYVLVILYFRLW

SEQ ID NO: 15533 - protein, 23 aa, Artificial Sequence
  Quasi-synthetic sequence derived from human genome
PKLKQFTKILRRKRLLPKRCNKK

SEQ ID NO: 15534 - protein, 23 aa, Artificial Sequence
  Quasi-synthetic sequence derived from human genome
RIGRVLRLIRGAKGIRTLLFALM

SEQ ID NO: 15535 - protein, 23 aa, Artificial Sequence
  Quasi-synthetic sequence derived from human genome
RLLRLIILIRIFHLLHQKRQLEK

SEQ ID NO: 15536 - protein, 23 aa, Artificial Sequence
  Quasi-synthetic sequence derived from human genome
LLRILNKLTKWKHSRTMMLVVFK

SEQ ID NO: 15537 - protein, 23 aa, Artificial Sequence
  Quasi-synthetic sequence derived from human genome
LRLRLPNLKMVRLRVSFSAVVFK

SEQ ID NO: 15538 - protein, 23 aa, Artificial Sequence
  Quasi-synthetic sequence derived from human genome
RLKRLRNIHYLFNTALFLIAWRL

SEQ ID NO: 15539 - protein, 23 aa, Artificial Sequence
  Quasi-synthetic sequence derived from human genome
RIRRLLRPFFLLQNSSMMKKTLK

SEQ ID NO: 15540 - protein, 23 aa, Artificial Sequence
  Quasi-synthetic sequence derived from human genome
GPLAPRPRRRRSLRRLFSRFLLA

SEQ ID NO: 15541 - protein, 23 aa, Artificial Sequence
  Quasi-synthetic sequence derived from human genome
LYNWNLPPRRILFIKRFIIYSIR

SEQ ID NO: 15542 - protein, 23 aa, Artificial Sequence
  Quasi-synthetic sequence derived from human genome
IFIITKCLFCVWKFVRTGKKGKR

SEQ ID NO: 15543 - protein, 23 aa, Artificial Sequence
  Quasi-synthetic sequence derived from human genome
FWKKKKSMIGMSTKLWKVKKALK

SEQ ID NO: 15544 - protein, 23 aa, Artificial Sequence
  Quasi-synthetic sequence derived from human genome
LILEKLKIITYRNLFKKVYLLLK

SEQ ID NO: 15545 - protein, 23 aa, Artificial Sequence
  Quasi-synthetic sequence derived from human genome
RRSLVKFRSLVHAYVSRRRYLKL

SEQ ID NO: 15546 - protein, 23 aa, Artificial Sequence
  Quasi-synthetic sequence derived from human genome
KRLTVLCLRCESLLYLRLFKLKK

SEQ ID NO: 15547 - protein, 23 aa, Artificial Sequence
  Quasi-synthetic sequence derived from human genome
LVFLLMVAVYTRIFFYVRRRVQR

SEQ ID NO: 15548 - protein, 23 aa, Artificial Sequence
  Quasi-synthetic sequence derived from human genome
HLRIFRPRKLTLKGYRQHWVVFK

SEQ ID NO: 15549 - protein, 23 aa, Artificial Sequence
  Quasi-synthetic sequence derived from human genome
LPVRKKVLAPRVNLTFRKILLTK

SEQ ID NO: 15550 - protein, 23 aa, Artificial Sequence
  Quasi-synthetic sequence derived from human genome
RFSRISMKLPRIPLRRQKLPKVV

SEQ ID NO: 15551 - protein, 23 aa, Artificial Sequence
  Quasi-synthetic sequence derived from human genome
RALMALKKRTKDKLFQFLKLRKY

SEQ ID NO: 15552 - protein, 23 aa, Artificial Sequence
  Quasi-synthetic sequence derived from human genome
FWKRFCFWKATRSYLQYRGKKFK

SEQ ID NO: 15553 - protein, 23 aa, Artificial Sequence
  Quasi-synthetic sequence derived from human genome
RRRKTVRLLLANLVIFLLCFVPY

SEQ ID NO: 15554 - protein, 23 aa, Artificial Sequence
  Quasi-synthetic sequence derived from human genome
KKFWIQKLPKVLCLHLKRFHWTA

SEQ ID NO: 15555 - protein, 23 aa, Artificial Sequence
  Quasi-synthetic sequence derived from human genome
LLAIFIKMCLWLWKQFLKRGSKC

SEQ ID NO: 15556 - protein, 23 aa, Artificial Sequence
  Quasi-synthetic sequence derived from human genome
RIVLWGFRWLIFRIMLGAGLIKI

SEQ ID NO: 15557 - protein, 23 aa, Artificial Sequence
  Quasi-synthetic sequence derived from human genome
RIIQFQARCRAYLVRKAFRHRLW

SEQ ID NO: 15558 - protein, 23 aa, Artificial Sequence
  Quasi-synthetic sequence derived from human genome
MAKPFFRLQKFLRRTQFLLFFLT

SEQ ID NO: 15559 - protein, 23 aa, Artificial Sequence
  Quasi-synthetic sequence derived from human genome
VHKFLQLRFWGWWKLYNKVKPLL

SEQ ID NO: 15560 - protein, 23 aa, Artificial Sequence
  Quasi-synthetic sequence derived from human genome
FYGFLGKKFKRYFLQLLKYIPPK

SEQ ID NO: 15561 - protein, 23 aa, Artificial Sequence
  Quasi-synthetic sequence derived from human genome
LILLRLWRVARIINGIIISVKTR

SEQ ID NO: 15562 - protein, 23 aa, Artificial Sequence
  Quasi-synthetic sequence derived from human genome
LRAWKRIFWRQILLTLGLLGLFL

SEQ ID NO: 15563 - protein, 23 aa, Artificial Sequence
  Quasi-synthetic sequence derived from human genome
ARGVRKVFLRLLPQLLRMHVRPL

SEQ ID NO: 15564 - protein, 23 aa, Artificial Sequence
  Quasi-synthetic sequence derived from human genome
RGWLLRKKYLRMRKAAITMQRYV

SEQ ID NO: 15565 - protein, 23 aa, Artificial Sequence
  Quasi-synthetic sequence derived from human genome
FLAKQRLRKRVNAALVIQKYWRR

SEQ ID NO: 15566 - protein, 23 aa, Artificial Sequence
  Quasi-synthetic sequence derived from human genome
MKIFFRYQTFRFIWLTKPPGRRL

SEQ ID NO: 15567 - protein, 23 aa, Artificial Sequence
  Quasi-synthetic sequence derived from human genome
AALLGLLAALLLLLLLSRRRTRR

SEQ ID NO: 15568 - protein, 23 aa, Artificial Sequence
  Quasi-synthetic sequence derived from human genome
FLINPTKTFYYKSRFWLLKLLFR

SEQ ID NO: 15569 - protein, 23 aa, Artificial Sequence
  Quasi-synthetic sequence derived from human genome
KKILHLLFLKRRDWDCFWKRKAI

SEQ ID NO: 15570 - protein, 23 aa, Artificial Sequence
  Quasi-synthetic sequence derived from human genome
LPMKLLRKKIEKRNLKLRQRNLK

SEQ ID NO: 15571 - protein, 23 aa, Artificial Sequence
  Quasi-synthetic sequence derived from human genome
KLRLKNVSLKVQRKKMLLQLRQK

SEQ ID NO: 15572 - protein, 23 aa, Artificial Sequence
  Quasi-synthetic sequence derived from human genome
WWFMSVKVKLKRKKRQKTPNRKL

SEQ ID NO: 15573 - protein, 23 aa, Artificial Sequence
  Quasi-synthetic sequence derived from human genome
RNRLAKTKKPFKIIVTIIITFFL

SEQ ID NO: 15574 - protein, 23 aa, Artificial Sequence
  Quasi-synthetic sequence derived from human genome
RWVRQQGPRVRRGISRLWLRVLL

SEQ ID NO: 15575 - protein, 23 aa, Artificial Sequence
  Quasi-synthetic sequence derived from human genome
YRLLWFKVKKMPLTEYLKRIKLP

SEQ ID NO: 15576 - protein, 23 aa, Artificial Sequence
  Quasi-synthetic sequence derived from human genome
KRALGNWKLLAKGLLIRERLKRR

SEQ ID NO: 15577 - protein, 23 aa, Artificial Sequence
  Quasi-synthetic sequence derived from human genome
FRLHIGRNIARPWKLIYYRAKKM

SEQ ID NO: 15578 - protein, 23 aa, Artificial Sequence
  Quasi-synthetic sequence derived from human genome
KKVKRLLSFQRYFHASRLLRGII

SEQ ID NO: 15579 - protein, 23 aa, Artificial Sequence
  Quasi-synthetic sequence derived from human genome
MQKIFKKLPGFKKIHVLGFRPKK

SEQ ID NO: 15580 - protein, 23 aa, Artificial Sequence
  Quasi-synthetic sequence derived from human genome
LRIRLFNFSLKLLSCLLYIIRVL

SEQ ID NO: 15581 - protein, 23 aa, Artificial Sequence
  Quasi-synthetic sequence derived from human genome
HPLSRLLWRRLKPLILGKLLFAP

SEQ ID NO: 15582 - protein, 23 aa, Artificial Sequence
  Quasi-synthetic sequence derived from human genome
MVRRFLVTLRIRRACGPPRVRVF

SEQ ID NO: 15583 - protein, 23 aa, Artificial Sequence
  Quasi-synthetic sequence derived from human genome
GRSRRQGSRFLWLLKILVIILVL

SEQ ID NO: 15584 - protein, 23 aa, Artificial Sequence
  Quasi-synthetic sequence derived from human genome
LRKRTLKVLTFLVLFIFLTSFFL

SEQ ID NO: 15585 - protein, 23 aa, Artificial Sequence
  Quasi-synthetic sequence derived from human genome
FLYLKWRVKKVVLVLLLVTSVFL

SEQ ID NO: 15586 - protein, 23 aa, Artificial Sequence
  Quasi-synthetic sequence derived from human genome
KKGSLSVLRSFRLLRVFKLAKSW

SEQ ID NO: 15587 - protein, 23 aa, Artificial Sequence
  Quasi-synthetic sequence derived from human genome
ANLGRVAQVLRLMRIFRILKLAR

SEQ ID NO: 15588 - protein, 23 aa, Artificial Sequence
  Quasi-synthetic sequence derived from human genome
QAVLRRKALLIFLVVHRLRWSSK

SEQ ID NO: 15589 - protein, 23 aa, Artificial Sequence
  Quasi-synthetic sequence derived from human genome
LLCIVILLVTVVLFAALRRQRKK

SEQ ID NO: 15590 - protein, 23 aa, Artificial Sequence
  Quasi-synthetic sequence derived from human genome
RAFNAVKNWSWMKLFFKMKPLLR

SEQ ID NO: 15591 - protein, 23 aa, Artificial Sequence
  Quasi-synthetic sequence derived from human genome
PLLYPLCHKRFQKAFLKIFCIKK

SEQ ID NO: 15592 - protein, 23 aa, Artificial Sequence
  Quasi-synthetic sequence derived from human genome
LGLIAFDRFLKIIRPLRNIFLKK

SEQ ID NO: 15593 - protein, 23 aa, Artificial Sequence
  Quasi-synthetic sequence derived from human genome
KLLIFLALALFLATVLYIVKKRL

SEQ ID NO: 15594 - protein, 23 aa, Artificial Sequence
  Quasi-synthetic sequence derived from human genome
FHRLKIKQILPTIYKRKNLSLFL

SEQ ID NO: 15595 - protein, 23 aa, Artificial Sequence
  Quasi-synthetic sequence derived from human genome
QPRRNFWPARLATRLLKLRYLIL

SEQ ID NO: 15596 - protein, 23 aa, Artificial Sequence
  Quasi-synthetic sequence derived from human genome
RRLQKFWRVTVKGFFVKKKEKKI

SEQ ID NO: 15597 - protein, 23 aa, Artificial Sequence
  Quasi-synthetic sequence derived from human genome
WGVYQAVRWLRWKASLIKLRALR

SEQ ID NO: 15598 - protein, 23 aa, Artificial Sequence
  Quasi-synthetic sequence derived from human genome
IFKAIAHFKRTTFLKKHRMLGRL

SEQ ID NO: 15599 - protein, 23 aa, Artificial Sequence
  Quasi-synthetic sequence derived from human genome
LVHLLKTVRLLRLLRLLQKLDRY

SEQ ID NO: 15600 - protein, 23 aa, Artificial Sequence
  Quasi-synthetic sequence derived from human genome
KLLPLRTFRVFRALKAISVVSRL

SEQ ID NO: 15601 - protein, 23 aa, Artificial Sequence
  Quasi-synthetic sequence derived from human genome
KALLRLVSAVNRRRMKLLLGIAL

SEQ ID NO: 15602 - protein, 23 aa, Artificial Sequence
  Quasi-synthetic sequence derived from human genome
VRRNSKLATLGRIFKPWKWRKKK

SEQ ID NO: 15603 - protein, 23 aa, Artificial Sequence
  Quasi-synthetic sequence derived from human genome
WRLPPILIIHLKRFQFVNGRWIK

SEQ ID NO: 15604 - protein, 23 aa, Artificial Sequence
  Quasi-synthetic sequence derived from human genome
LAVIGRMRTRLVRKRFLCLGWGL

SEQ ID NO: 15605 - protein, 23 aa, Artificial Sequence
  Quasi-synthetic sequence derived from human genome
RRILQRVPGKQRFGIYRFLPFFF

SEQ ID NO: 15606 - protein, 23 aa, Artificial Sequence
  Quasi-synthetic sequence derived from human genome
KGLIRIFRKGVIAVLAANRLKIL

SEQ ID NO: 15607 - protein, 23 aa, Artificial Sequence
  Quasi-synthetic sequence derived from human genome
RRLHLYSGHKLKWWIGYLQRKFK

SEQ ID NO: 15608 - protein, 23 aa, Artificial Sequence
  Quasi-synthetic sequence derived from human genome
RALHIRKLLLTLPRSVLIVMRYL

SEQ ID NO: 15609 - protein, 23 aa, Artificial Sequence
  Quasi-synthetic sequence derived from human genome
IRAKIQDYHILTRKRIRYRFRRF

SEQ ID NO: 15610 - protein, 23 aa, Artificial Sequence
  Quasi-synthetic sequence derived from human genome
RRLLFYKYVYKRYRAGKQRGMII

SEQ ID NO: 15611 - protein, 23 aa, Artificial Sequence
  Quasi-synthetic sequence derived from human genome
KMLKMSKGLDARSKRWLKIIWRR

SEQ ID NO: 15612 - protein, 23 aa, Artificial Sequence
  Quasi-synthetic sequence derived from human genome
ISGYLSRCKRGKRHWKKLWFVIK

SEQ ID NO: 15613 - protein, 23 aa, Artificial Sequence
  Quasi-synthetic sequence derived from human genome
LSMKKFAVRRFFSVYLRRKSRSK

SEQ ID NO: 15614 - protein, 23 aa, Artificial Sequence
  Quasi-synthetic sequence derived from human genome
LRLLLVKKPSVRSLALKLLAFHL

SEQ ID NO: 15615 - protein, 23 aa, Artificial Sequence
  Quasi-synthetic sequence derived from human genome
KIVKSIVEKKPRTFIIKLIKWLM

SEQ ID NO: 15616 - protein, 23 aa, Artificial Sequence
  Quasi-synthetic sequence derived from human genome
MRAKWRKKRMRRLKRKRRKMRQR

SEQ ID NO: 15617 - protein, 23 aa, Artificial Sequence
  Quasi-synthetic sequence derived from human genome
KRMKFKTVCYLLVQLMHCRKMFK

SEQ ID NO: 15618 - protein, 23 aa, Artificial Sequence
  Quasi-synthetic sequence derived from human genome
FLKFNTIPPLRKYMLVFKGKRYL

SEQ ID NO: 15619 - protein, 23 aa, Artificial Sequence
  Quasi-synthetic sequence derived from human genome
RFCLLYDNVKVKKLRLRRGKKKR

SEQ ID NO: 15620 - protein, 23 aa, Artificial Sequence
  Quasi-synthetic sequence derived from human genome
ILRVSLMWRGRNFRVLKYFTRSL

SEQ ID NO: 15621 - protein, 23 aa, Artificial Sequence
  Quasi-synthetic sequence derived from human genome
FLRRPGAPASWIWWRMLRQVLRR

SEQ ID NO: 15622 - protein, 23 aa, Artificial Sequence
  Quasi-synthetic sequence derived from human genome
LWLIQWLLLKYKSIISRRFFCIV

SEQ ID NO: 15623 - protein, 23 aa, Artificial Sequence
  Quasi-synthetic sequence derived from human genome
RKRFRTLYHNLFGPKRPKALKLL

SEQ ID NO: 15624 - protein, 23 aa, Artificial Sequence
  Quasi-synthetic sequence derived from human genome
LTLCFLTLRHKRPKAKYIIWPRI

SEQ ID NO: 15625 - protein, 23 aa, Artificial Sequence
  Quasi-synthetic sequence derived from human genome
RLLLLLCIFLGTLRGFRARQIRY

SEQ ID NO: 15626 - protein, 23 aa, Artificial Sequence
  Quasi-synthetic sequence derived from human genome
LLLLLLGLLRPLRRRSCLLAPGK

SEQ ID NO: 15627 - protein, 23 aa, Artificial Sequence
  Quasi-synthetic sequence derived from human genome
WRKKYMRWMNHKKSRVMDFFRRI

SEQ ID NO: 15628 - protein, 23 aa, Artificial Sequence
  Quasi-synthetic sequence derived from human genome
KLINALRRCFFWRFMFYGIFLYL

SEQ ID NO: 15629 - protein, 23 aa, Artificial Sequence
  Quasi-synthetic sequence derived from human genome
WRALRRLWDRVLGPARRWRRPLP

SEQ ID NO: 15630 - protein, 23 aa, Artificial Sequence
  Quasi-synthetic sequence derived from human genome
LLPLVAFLLFCLHVLFKKRTKSK

SEQ ID NO: 15631 - protein, 23 aa, Artificial Sequence
  Quasi-synthetic sequence derived from human genome
RGGWLWRQSSILRRWKRNWFALW

SEQ ID NO: 15632 - protein, 23 aa, Artificial Sequence
  Quasi-synthetic sequence derived from human genome
FKLLSSLPRWRRIAQKIIRERRK

SEQ ID NO: 15633 - protein, 23 aa, Artificial Sequence
  Quasi-synthetic sequence derived from human genome
LIRFNRLTKVVRRSLINLGRAIK

SEQ ID NO: 15634 - protein, 23 aa, Artificial Sequence
  Quasi-synthetic sequence derived from human genome
TCRGFLIKMGGKIKTWKKRWFVF

SEQ ID NO: 15635 - protein, 23 aa, Artificial Sequence
  Quasi-synthetic sequence derived from human genome
FIIPKKLMIFLRTVIRLERKTPR

SEQ ID NO: 15636 - protein, 23 aa, Artificial Sequence
  Quasi-synthetic sequence derived from human genome
FYRLGGFRVCHKLIFMIIQKLFR

SEQ ID NO: 15637 - protein, 23 aa, Artificial Sequence
  Quasi-synthetic sequence derived from human genome
ILACIFVLLVLVLLILSMRRHRK

SEQ ID NO: 15638 - protein, 23 aa, Artificial Sequence
  Quasi-synthetic sequence derived from human genome
LLLLKRSRIPIFKADRPFIYFLR

SEQ ID NO: 15639 - protein, 23 aa, Artificial Sequence
  Quasi-synthetic sequence derived from human genome
LKSIPRLKRKKPFHWLPSIGKKR

SEQ ID NO: 15640 - protein, 23 aa, Artificial Sequence
  Quasi-synthetic sequence derived from human genome
LKPALWTRLRTLRAPELRRLRRR

SEQ ID NO: 15641 - protein, 23 aa, Artificial Sequence
  Quasi-synthetic sequence derived from human genome
LLFLYLGSGGWRFIRVFIKTIRR

SEQ ID NO: 15642 - protein, 23 aa, Artificial Sequence
  Quasi-synthetic sequence derived from human genome
KLIIYLFSQNNRIRFSKLLLKIL

SEQ ID NO: 15643 - protein, 23 aa, Artificial Sequence
  Quasi-synthetic sequence derived from human genome
FIIILVLCLRLLQSRCPRVLPKK

SEQ ID NO: 15644 - protein, 23 aa, Artificial Sequence
  Quasi-synthetic sequence derived from human genome
CIRKFFPKKKCFVFDRPVHRRKL

SEQ ID NO: 15645 - protein, 23 aa, Artificial Sequence
  Quasi-synthetic sequence derived from human genome
VFLFRLFKRRQGRIFPEGKMWKL

SEQ ID NO: 15646 - protein, 23 aa, Artificial Sequence
  Quasi-synthetic sequence derived from human genome
PVLAVILIILIVIAILLFKRKRT

SEQ ID NO: 15647 - protein, 23 aa, Artificial Sequence
  Quasi-synthetic sequence derived from human genome
IRFRYRILRSQHFRTKSKVCKLR

SEQ ID NO: 15648 - protein, 23 aa, Artificial Sequence
  Quasi-synthetic sequence derived from human genome
LIVFLLLLAILLFFAVKYLLRWK

SEQ ID NO: 15649 - protein, 23 aa, Artificial Sequence
  Quasi-synthetic sequence derived from human genome
RPAGSRLRLLLLLLLPPLLLLLR

SEQ ID NO: 15650 - protein, 23 aa, Artificial Sequence
  Quasi-synthetic sequence derived from human genome
GLRLPRLLSPPLRPRLLLLLLLL

SEQ ID NO: 15651 - protein, 23 aa, Artificial Sequence
  Quasi-synthetic sequence derived from human genome
RIPIPIARLVLKSKNGIHLRLRR

SEQ ID NO: 15652 - protein, 23 aa, Artificial Sequence
  Quasi-synthetic sequence derived from human genome
RFAWPKILKISYKRSNFYIKIRP

SEQ ID NO: 15653 - protein, 23 aa, Artificial Sequence
  Quasi-synthetic sequence derived from human genome
LRAWIIQCWWRQVLEKLLAKRRR

SEQ ID NO: 15654 - protein, 23 aa, Artificial Sequence
  Quasi-synthetic sequence derived from human genome
RLMLKYQKILWKVPSFLITQVRR

SEQ ID NO: 15655 - protein, 23 aa, Artificial Sequence
  Quasi-synthetic sequence derived from human genome
FLILPFQRITRLKLLLQNILKRT

SEQ ID NO: 15656 - protein, 23 aa, Artificial Sequence
  Quasi-synthetic sequence derived from human genome
LSSLLVIVFIIIVLYMLRFKKYK

SEQ ID NO: 15657 - protein, 23 aa, Artificial Sequence
  Quasi-synthetic sequence derived from human genome
YKKHLKHHCNKVLLRVRMLYYLR

SEQ ID NO: 15658 - protein, 23 aa, Artificial Sequence
  Quasi-synthetic sequence derived from human genome
KIMVRRCLVTLRPFRLFVLGIGF

SEQ ID NO: 15659 - protein, 23 aa, Artificial Sequence
  Quasi-synthetic sequence derived from human genome
YFVLCCSWSFRRLKKLCRPLPWK

SEQ ID NO: 15660 - protein, 23 aa, Artificial Sequence
  Quasi-synthetic sequence derived from human genome
FFKGLPKVLPKLPKRVIVQRILP

SEQ ID NO: 15661 - protein, 23 aa, Artificial Sequence
  Quasi-synthetic sequence derived from human genome
LRRLLPPLLLLLLSLPPRARAKY

SEQ ID NO: 15662 - protein, 23 aa, Artificial Sequence
  Quasi-synthetic sequence derived from human genome
RMLKRFRQEKAVWIKYGAFLLRR

SEQ ID NO: 15663 - protein, 23 aa, Artificial Sequence
  Quasi-synthetic sequence derived from human genome
RARRRRTFCLLVVIVVVFAVCWL

SEQ ID NO: 15664 - protein, 23 aa, Artificial Sequence
  Quasi-synthetic sequence derived from human genome
RRQLYLPMLFKVRLLMVSRMAKP

SEQ ID NO: 15665 - protein, 23 aa, Artificial Sequence
  Quasi-synthetic sequence derived from human genome
RYMRKKVFCLYLSTLKFPVSKKW

SEQ ID NO: 15666 - protein, 23 aa, Artificial Sequence
  Quasi-synthetic sequence derived from human genome
RICAFLWRKKWLGQWAKQLCVIK

SEQ ID NO: 15667 - protein, 23 aa, Artificial Sequence
  Quasi-synthetic sequence derived from human genome
KVFSAFALVRTIRYLYRRLQRML

SEQ ID NO: 15668 - protein, 23 aa, Artificial Sequence
  Quasi-synthetic sequence derived from human genome
RLSLIMQLVALLLVVLWIRWKCR

SEQ ID NO: 15669 - protein, 23 aa, Artificial Sequence
  Quasi-synthetic sequence derived from human genome
RLLRRRHMPLRLAMVGCAFVLFL

SEQ ID NO: 15670 - protein, 23 aa, Artificial Sequence
  Quasi-synthetic sequence derived from human genome
RRKMNHHKYRKLVKKTRFLRRKV

SEQ ID NO: 15671 - protein, 23 aa, Artificial Sequence
  Quasi-synthetic sequence derived from human genome
VPYVPLRQRRQLLLQKLLQRRRK

SEQ ID NO: 15672 - protein, 23 aa, Artificial Sequence
  Quasi-synthetic sequence derived from human genome
TLRVFRVFRIFKFSRHSQGLRIL

SEQ ID NO: 15673 - protein, 23 aa, Artificial Sequence
  Quasi-synthetic sequence derived from human genome
RGLRARVRPLFCALLLSLGRFVR

SEQ ID NO: 15674 - protein, 23 aa, Artificial Sequence
  Quasi-synthetic sequence derived from human genome
LVSLGVAIHLCCRRRRARLRFMK

SEQ ID NO: 15675 - protein, 23 aa, Artificial Sequence
  Quasi-synthetic sequence derived from human genome
SLRAFCGILYMKPRMKIFLRQKK

SEQ ID NO: 15676 - protein, 23 aa, Artificial Sequence
  Quasi-synthetic sequence derived from human genome
IFLLNVSMFIVVLVQLCRIKKKK

SEQ ID NO: 15677 - protein, 23 aa, Artificial Sequence
  Quasi-synthetic sequence derived from human genome
KVPRKKVNVKVFIIIAVFFICFV

SEQ ID NO: 15678 - protein, 23 aa, Artificial Sequence
  Quasi-synthetic sequence derived from human genome
VKIKKVLKSTKLKIFRGKRTLYP

SEQ ID NO: 15679 - protein, 23 aa, Artificial Sequence
  Quasi-synthetic sequence derived from human genome
KKTLGIKLPFLVMIIKNLKKYFT

SEQ ID NO: 15680 - protein, 23 aa, Artificial Sequence
  Quasi-synthetic sequence derived from human genome
FLRRLITSLGRSRLWLKARAHYK

SEQ ID NO: 15681 - protein, 23 aa, Artificial Sequence
  Quasi-synthetic sequence derived from human genome
LVLHFRHKVLILFKLILLEKKVL

SEQ ID NO: 15682 - protein, 23 aa, Artificial Sequence
  Quasi-synthetic sequence derived from human genome
LVVLWIRWKCRRLRIREAWLLGT

SEQ ID NO: 15683 - protein, 23 aa, Artificial Sequence
  Quasi-synthetic sequence derived from human genome
FGLVKLFKFPCLKRGAKFRKYVG

SEQ ID NO: 15684 - protein, 23 aa, Artificial Sequence
  Quasi-synthetic sequence derived from human genome
KRLLSWKQQVLKLLRTFPRKAAL

SEQ ID NO: 15685 - protein, 23 aa, Artificial Sequence
  Quasi-synthetic sequence derived from human genome
LVLCLSFMLLFSLWRQSCRRRKL

SEQ ID NO: 15686 - protein, 23 aa, Artificial Sequence
  Quasi-synthetic sequence derived from human genome
LRRQMVRNFRKPLIVASPKMLLR

SEQ ID NO: 15687 - protein, 23 aa, Artificial Sequence
  Quasi-synthetic sequence derived from human genome
MWLCGKLLGVVARWLRGARKVKK

SEQ ID NO: 15688 - protein, 23 aa, Artificial Sequence
  Quasi-synthetic sequence derived from human genome
LFRQNRFYDAKVRYKRALLLLRR

SEQ ID NO: 15689 - protein, 23 aa, Artificial Sequence
  Quasi-synthetic sequence derived from human genome
MRIILGFLLFLTILKTLRYSRFF

SEQ ID NO: 15690 - protein, 23 aa, Artificial Sequence
  Quasi-synthetic sequence derived from human genome
IRAFVKCTKARYLKKKNMRTLWI

SEQ ID NO: 15691 - protein, 23 aa, Artificial Sequence
  Quasi-synthetic sequence derived from human genome
FIRPKLVTIIRSGVKPRKAVRIL

SEQ ID NO: 15692 - protein, 23 aa, Artificial Sequence
  Quasi-synthetic sequence derived from human genome
RICAFLLRKKRFGQWAKQLTVIR

SEQ ID NO: 15693 - protein, 23 aa, Artificial Sequence
  Quasi-synthetic sequence derived from human genome
GIPWKKIPLNALIRRFAHLLVKK

SEQ ID NO: 15694 - protein, 23 aa, Artificial Sequence
  Quasi-synthetic sequence derived from human genome
LLTRLNLCARRRTRVQRPIVRLL

SEQ ID NO: 15695 - protein, 23 aa, Artificial Sequence
  Quasi-synthetic sequence derived from human genome
RRVAMLRIVHRRVCNRFHAFLLY

SEQ ID NO: 15696 - protein, 23 aa, Artificial Sequence
  Quasi-synthetic sequence derived from human genome
RYLRRFREMKPRVLQRWSRQILR

SEQ ID NO: 15697 - protein, 23 aa, Artificial Sequence
  Quasi-synthetic sequence derived from human genome
RLRINRFAWPKILKISYKRSNFY

SEQ ID NO: 15698 - protein, 23 aa, Artificial Sequence
  Quasi-synthetic sequence derived from human genome
RFCRRKCRAAVKSNVFYWLVIFL

SEQ ID NO: 15699 - protein, 23 aa, Artificial Sequence
  Quasi-synthetic sequence derived from human genome
WRRLLVLCWYLPGWRAGRVTWLR

SEQ ID NO: 15700 - protein, 23 aa, Artificial Sequence
  Quasi-synthetic sequence derived from human genome
LRPLARLRPPGMLLRALLLLLLL

SEQ ID NO: 15701 - protein, 23 aa, Artificial Sequence
  Quasi-synthetic sequence derived from human genome
MKRMVSWSFHKLKTMKHLLLLLL

SEQ ID NO: 15702 - protein, 23 aa, Artificial Sequence
  Quasi-synthetic sequence derived from human genome
CFLLGKCFKKGLKGKGFVLLVKL

SEQ ID NO: 15703 - protein, 23 aa, Artificial Sequence
  Quasi-synthetic sequence derived from human genome
RIYGKFLGLRAFIRKQINNIFLR

SEQ ID NO: 15704 - protein, 23 aa, Artificial Sequence
  Quasi-synthetic sequence derived from human genome
RALHIRKVLLVLPKTTLIIMRYL

SEQ ID NO: 15705 - protein, 23 aa, Artificial Sequence
  Quasi-synthetic sequence derived from human genome
RVLGLLLLLGSRLARVRRALARA

SEQ ID NO: 15706 - protein, 23 aa, Artificial Sequence
  Quasi-synthetic sequence derived from human genome
LLLWLALLLSIQRRLPRERKIKY

SEQ ID NO: 15707 - protein, 23 aa, Artificial Sequence
  Quasi-synthetic sequence derived from human genome
ILKKWFLKPYKGQTLPGRVLFLR

SEQ ID NO: 15708 - protein, 23 aa, Artificial Sequence
  Quasi-synthetic sequence derived from human genome
CPRVRLRALRLALLILLTFILCW

SEQ ID NO: 15709 - protein, 23 aa, Artificial Sequence
  Quasi-synthetic sequence derived from human genome
RLFRIKCVTRIQAYWRGCVVRKW

SEQ ID NO: 15710 - protein, 23 aa, Artificial Sequence
  Quasi-synthetic sequence derived from human genome
EKFMVLLWKNFILKRRRCIALVV

SEQ ID NO: 15711 - protein, 23 aa, Artificial Sequence
  Quasi-synthetic sequence derived from human genome
LRKRIWEKIALRKKELFKVRPPW

SEQ ID NO: 15712 - protein, 23 aa, Artificial Sequence
  Quasi-synthetic sequence derived from human genome
RRVLVLMASKHAFLALCALRFKR

SEQ ID NO: 15713 - protein, 23 aa, Artificial Sequence
  Quasi-synthetic sequence derived from human genome
RLTWKLLLLRRPLYRNLLRSPNP

SEQ ID NO: 15714 - protein, 23 aa, Artificial Sequence
  Quasi-synthetic sequence derived from human genome
RKKRKAAKNLELTRLLPLRFVRI

SEQ ID NO: 15715 - protein, 23 aa, Artificial Sequence
  Quasi-synthetic sequence derived from human genome
KTLRKWLKMFKKRQLELYLPKFS

SEQ ID NO: 15716 - protein, 23 aa, Artificial Sequence
  Quasi-synthetic sequence derived from human genome
KVGIYGWRKRCLYFFVLLLMILI

SEQ ID NO: 15717 - protein, 23 aa, Artificial Sequence
  Quasi-synthetic sequence derived from human genome
KAKTKRRLVLGLREVLKHLKLKK

SEQ ID NO: 15718 - protein, 23 aa, Artificial Sequence
  Quasi-synthetic sequence derived from human genome
TALLARKECLKFLIKRLAKIVRL

SEQ ID NO: 15719 - protein, 23 aa, Artificial Sequence
  Quasi-synthetic sequence derived from human genome
LLLLLLISLLCLYWKARKLSTLR

SEQ ID NO: 15720 - protein, 23 aa, Artificial Sequence
  Quasi-synthetic sequence derived from human genome
FIILVIGVCTCCHPLRKRRKRKK

SEQ ID NO: 15721 - protein, 23 aa, Artificial Sequence
  Quasi-synthetic sequence derived from human genome
LKKYLMKRRWKKNFIAVSAANRF

SEQ ID NO: 15722 - protein, 23 aa, Artificial Sequence
  Quasi-synthetic sequence derived from human genome
LKVALIFPVLVLLTVFIFVVRKK

SEQ ID NO: 15723 - protein, 23 aa, Artificial Sequence
  Quasi-synthetic sequence derived from human genome
LGLRRGLRRLRRLWAGPRVQRGR

SEQ ID NO: 15724 - protein, 23 aa, Artificial Sequence
  Quasi-synthetic sequence derived from human genome
KIRRGRTRPQALLFLCMILLLIV

SEQ ID NO: 15725 - protein, 23 aa, Artificial Sequence
  Quasi-synthetic sequence derived from human genome
LRIRLFNFSLKLLTCLLYIVRVL

SEQ ID NO: 15726 - protein, 23 aa, Artificial Sequence
  Quasi-synthetic sequence derived from human genome
LRRKRKALWAHLFSSLRGYLKSL

SEQ ID NO: 15727 - protein, 23 aa, Artificial Sequence
  Quasi-synthetic sequence derived from human genome
IFSLFRAPKLRMRVFGLCFVRFA

SEQ ID NO: 15728 - protein, 23 aa, Artificial Sequence
  Quasi-synthetic sequence derived from human genome
IVCAIFIFIKRDQLWRSYFRKKR

SEQ ID NO: 15729 - protein, 23 aa, Artificial Sequence
  Quasi-synthetic sequence derived from human genome
CLCSLLLWPTRLRRSFLAWRRGR

SEQ ID NO: 15730 - protein, 23 aa, Artificial Sequence
  Quasi-synthetic sequence derived from human genome
LLFLHLKRRVRSVILVILLGTLI

SEQ ID NO: 15731 - protein, 23 aa, Artificial Sequence
  Quasi-synthetic sequence derived from human genome
ITVITLLIFLRRRLRKQARAHGK

SEQ ID NO: 15732 - protein, 23 aa, Artificial Sequence
  Quasi-synthetic sequence derived from human genome
KWRRKSAYWKALKVFKLPVEFLL

SEQ ID NO: 15733 - protein, 23 aa, Artificial Sequence
  Quasi-synthetic sequence derived from human genome
VVFLFLILIRRALSASQKKKVII

SEQ ID NO: 15734 - protein, 23 aa, Artificial Sequence
  Quasi-synthetic sequence derived from human genome
LLLLYKRHKGRKLTVPVRRHAYL

SEQ ID NO: 15735 - protein, 23 aa, Artificial Sequence
  Quasi-synthetic sequence derived from human genome
FKRFKYSKFSHMHLMAFRKISLK

SEQ ID NO: 15736 - protein, 23 aa, Artificial Sequence
  Quasi-synthetic sequence derived from human genome
KILILLVILLCVILMFIICKFWK

SEQ ID NO: 15737 - protein, 23 aa, Artificial Sequence
  Quasi-synthetic sequence derived from human genome
FPLRKPRKAHKYLRLSRKKFPPR

SEQ ID NO: 15738 - protein, 23 aa, Artificial Sequence
  Quasi-synthetic sequence derived from human genome
RPTQAKLLAKKRVVRMLLVIVVL

SEQ ID NO: 15739 - protein, 23 aa, Artificial Sequence
  Quasi-synthetic sequence derived from human genome
QNMSLAILRIIRLVRVFRIFKLS

SEQ ID NO: 15740 - protein, 23 aa, Artificial Sequence
  Quasi-synthetic sequence derived from human genome
GRKAPLWLRAKFQRLLFKLGCYI

SEQ ID NO: 15741 - protein, 23 aa, Artificial Sequence
  Quasi-synthetic sequence derived from human genome
AIRIKKPIKTKFRLPVFNWTALK

SEQ ID NO: 15742 - protein, 23 aa, Artificial Sequence
  Quasi-synthetic sequence derived from human genome
YIGRSVHYWKKVLPLLKIIKKKN

SEQ ID NO: 15743 - protein, 23 aa, Artificial Sequence
  Quasi-synthetic sequence derived from human genome
PIIFGILFAILLVLVFIKKVAKK

SEQ ID NO: 15744 - protein, 23 aa, Artificial Sequence
  Quasi-synthetic sequence derived from human genome
IKINQAMRKKLILYFKRRNHARK

SEQ ID NO: 15745 - protein, 23 aa, Artificial Sequence
  Quasi-synthetic sequence derived from human genome
GPGARRRQRGRLMRRLVRRLRRW

SEQ ID NO: 15746 - protein, 23 aa, Artificial Sequence
  Quasi-synthetic sequence derived from human genome
LGSAVLLFHFCIFHRRKMKAIRR

SEQ ID NO: 15747 - protein, 23 aa, Artificial Sequence
  Quasi-synthetic sequence derived from human genome
HLAFKFLYIITKVRGYKTFLRLF

SEQ ID NO: 15748 - protein, 23 aa, Artificial Sequence
  Quasi-synthetic sequence derived from human genome
WLSARLWKWLKSPRSWRLGLALL

SEQ ID NO: 15749 - protein, 23 aa, Artificial Sequence
  Quasi-synthetic sequence derived from human genome
RRLTRRLVLPVFGVLWITVLLFF

SEQ ID NO: 15750 - protein, 23 aa, Artificial Sequence
  Quasi-synthetic sequence derived from human genome
LRIWILVLQVRQRVKPDRKPKLK

SEQ ID NO: 15751 - protein, 23 aa, Artificial Sequence
  Quasi-synthetic sequence derived from human genome
LKAKRKVVKMMIIVVMTFAICWL

SEQ ID NO: 15752 - protein, 23 aa, Artificial Sequence
  Quasi-synthetic sequence derived from human genome
TVLIFKVYMFKCVWRCYRLIKCM

SEQ ID NO: 15753 - protein, 23 aa, Artificial Sequence
  Quasi-synthetic sequence derived from human genome
IKTNQVMRKKLILFFKRRNHARK

SEQ ID NO: 15754 - protein, 23 aa, Artificial Sequence
  Quasi-synthetic sequence derived from human genome
RLWVSRLLRHRKAQLLLVNLLTF

SEQ ID NO: 15755 - protein, 23 aa, Artificial Sequence
  Quasi-synthetic sequence derived from human genome
ALSLLLGVARSLWMLLKLRQRLR

SEQ ID NO: 15756 - protein, 23 aa, Artificial Sequence
  Quasi-synthetic sequence derived from human genome
RRVFQAMWLSFLKHKLPLSLYKK

SEQ ID NO: 15757 - protein, 23 aa, Artificial Sequence
  Quasi-synthetic sequence derived from human genome
IFMITKCCLFCFRKLAKTGKKKK

SEQ ID NO: 15758 - protein, 23 aa, Artificial Sequence
  Quasi-synthetic sequence derived from human genome
KLKEKQVRWKFIKRWKTRYFTLA

SEQ ID NO: 15759 - protein, 23 aa, Artificial Sequence
  Quasi-synthetic sequence derived from human genome
LPLRIFINVSRFFCVQLKKMVRL

SEQ ID NO: 15760 - protein, 23 aa, Artificial Sequence
  Quasi-synthetic sequence derived from human genome
RLIILIRIFHLLHQKRQLEKLMR

SEQ ID NO: 15761 - protein, 23 aa, Artificial Sequence
  Quasi-synthetic sequence derived from human genome
IILIRIFHLLHQKRQLEKLMRRL

SEQ ID NO: 15762 - protein, 23 aa, Artificial Sequence
  Quasi-synthetic sequence derived from human genome
ILLIAGIIAMICYRKKRKGKLTL

SEQ ID NO: 15763 - protein, 23 aa, Artificial Sequence
  Quasi-synthetic sequence derived from human genome
FKLLIKVFLALLTHFYIVKGNRK

SEQ ID NO: 15764 - protein, 23 aa, Artificial Sequence
  Quasi-synthetic sequence derived from human genome
LRWFQHRRNRRRRKPQRNLLRNF

SEQ ID NO: 15765 - protein, 23 aa, Artificial Sequence
  Quasi-synthetic sequence derived from human genome
VKRKKNVLRLCCKKLKIFAMPMQ

SEQ ID NO: 15766 - protein, 23 aa, Artificial Sequence
  Quasi-synthetic sequence derived from human genome
ACILVVLLAIFLYLLRLRRIHHR

SEQ ID NO: 15767 - protein, 23 aa, Artificial Sequence
  Quasi-synthetic sequence derived from human genome
RRRRVLQTLVWFLLTLLLALFIP

SEQ ID NO: 15768 - protein, 23 aa, Artificial Sequence
  Quasi-synthetic sequence derived from human genome
LIRIPLHRVQPGRRILNLLRGWR

SEQ ID NO: 15769 - protein, 23 aa, Artificial Sequence
  Quasi-synthetic sequence derived from human genome
IMFLVNTVLWVTIRKELKRKKKW

SEQ ID NO: 15770 - protein, 23 aa, Artificial Sequence
  Quasi-synthetic sequence derived from human genome
FLKLLKPPLLWSHGLIRIIRAKA

SEQ ID NO: 15771 - protein, 23 aa, Artificial Sequence
  Quasi-synthetic sequence derived from human genome
RLKAFILFGKLARVVGMSKKHFF

SEQ ID NO: 15772 - protein, 23 aa, Artificial Sequence
  Quasi-synthetic sequence derived from human genome
GLVLRVLRALRILYVMRLARHSL

SEQ ID NO: 15773 - protein, 23 aa, Artificial Sequence
  Quasi-synthetic sequence derived from human genome
FYALLFVFIYVQLWLVLRYRHKR

SEQ ID NO: 15774 - protein, 23 aa, Artificial Sequence
  Quasi-synthetic sequence derived from human genome
KKKFYGPQRRKMMFMGFIRLGVW

SEQ ID NO: 15775 - protein, 23 aa, Artificial Sequence
  Quasi-synthetic sequence derived from human genome
FRKYLRHFFHRHLLMHLGRYIPF

SEQ ID NO: 15776 - protein, 23 aa, Artificial Sequence
  Quasi-synthetic sequence derived from human genome
VQRWIRGFLVRKNLSPVFFHKKK

SEQ ID NO: 15777 - protein, 23 aa, Artificial Sequence
  Quasi-synthetic sequence derived from human genome
MKMMLVRRFRVLILMVFLVACAL

SEQ ID NO: 15778 - protein, 23 aa, Artificial Sequence
  Quasi-synthetic sequence derived from human genome
KRKFKSLLLHKRTAIQHAYRLLI

SEQ ID NO: 15779 - protein, 23 aa, Artificial Sequence
  Quasi-synthetic sequence derived from human genome
GRRRGNVVRRVFGRIRRFFSRRR

SEQ ID NO: 15780 - protein, 23 aa, Artificial Sequence
  Quasi-synthetic sequence derived from human genome
LFIFTFFAMLALVLHQKRKRLFL

SEQ ID NO: 15781 - protein, 23 aa, Artificial Sequence
  Quasi-synthetic sequence derived from human genome
RAVIKLQSLVRMWRVRWRYCQVL

SEQ ID NO: 15782 - protein, 23 aa, Artificial Sequence
  Quasi-synthetic sequence derived from human genome
VLVRAHRHRGLRPRRQKALRMIL

SEQ ID NO: 15783 - protein, 23 aa, Artificial Sequence
  Quasi-synthetic sequence derived from human genome
RISKSKFSRYWRRWNRFCRRKCR

SEQ ID NO: 15784 - protein, 23 aa, Artificial Sequence
  Quasi-synthetic sequence derived from human genome
KIKSWKKRWFVFDRLKRTLSYYV

SEQ ID NO: 15785 - protein, 23 aa, Artificial Sequence
  Quasi-synthetic sequence derived from human genome
QAMSLAILRVIRLVRVFRIFKLS

SEQ ID NO: 15786 - protein, 23 aa, Artificial Sequence
  Quasi-synthetic sequence derived from human genome
FFAVLFFLWRSFRSVRSRLYVGR

SEQ ID NO: 15787 - protein, 23 aa, Artificial Sequence
  Quasi-synthetic sequence derived from human genome
VMTSRPRGVKRRWRLSRIVFRHL

SEQ ID NO: 15788 - protein, 23 aa, Artificial Sequence
  Quasi-synthetic sequence derived from human genome
LRCLRPLRIFKLVPQMRKVVREL

SEQ ID NO: 15789 - protein, 23 aa, Artificial Sequence
  Quasi-synthetic sequence derived from human genome
FLHLKRRVKSVILVMLLGPLLFL

SEQ ID NO: 15790 - protein, 23 aa, Artificial Sequence
  Quasi-synthetic sequence derived from human genome
RVLQAAAKNIRVWFIKVRKMKAI

SEQ ID NO: 15791 - protein, 23 aa, Artificial Sequence
  Quasi-synthetic sequence derived from human genome
IVRYSFKKQWSLGFIPKLKRKIP

SEQ ID NO: 15792 - protein, 23 aa, Artificial Sequence
  Quasi-synthetic sequence derived from human genome
KKKIFWSHRNSFPHLLYRLLFPR

SEQ ID NO: 15793 - protein, 23 aa, Artificial Sequence
  Quasi-synthetic sequence derived from human genome
RTFVAFAAKLWSFFIYLLRRQIR

SEQ ID NO: 15794 - protein, 23 aa, Artificial Sequence
  Quasi-synthetic sequence derived from human genome
FRLLRVFKLAKSWPTLNTLIKII

SEQ ID NO: 15795 - protein, 23 aa, Artificial Sequence
  Quasi-synthetic sequence derived from human genome
VAALILFLVALLARVLVKRKPPR

SEQ ID NO: 15796 - protein, 23 aa, Artificial Sequence
  Quasi-synthetic sequence derived from human genome
ARAALLLLLPPRLLARPSLLLRR

SEQ ID NO: 15797 - protein, 23 aa, Artificial Sequence
  Quasi-synthetic sequence derived from human genome
AALKFLAKCRKKKKLFAPWRGLQ

SEQ ID NO: 15798 - protein, 23 aa, Artificial Sequence
  Quasi-synthetic sequence derived from human genome
MIMMKKKKKKKKHSPKNLLLNFV

SEQ ID NO: 15799 - protein, 23 aa, Artificial Sequence
  Quasi-synthetic sequence derived from human genome
FSFCLWFVLQVLIVVLRIVRYRK

SEQ ID NO: 15800 - protein, 23 aa, Artificial Sequence
  Quasi-synthetic sequence derived from human genome
LQRRRPAWLPVRLRSWAWLPVWL

SEQ ID NO: 15801 - protein, 23 aa, Artificial Sequence
  Quasi-synthetic sequence derived from human genome
WWYRFAHKFLIWNCSPYWIKFKK

SEQ ID NO: 15802 - protein, 23 aa, Artificial Sequence
  Quasi-synthetic sequence derived from human genome
KLKSLIRLVKHWYQNCKKKLGKL

SEQ ID NO: 15803 - protein, 23 aa, Artificial Sequence
  Quasi-synthetic sequence derived from human genome
LCCKKLKILGMPFRNIRSILKMV

SEQ ID NO: 15804 - protein, 23 aa, Artificial Sequence
  Quasi-synthetic sequence derived from human genome
LVYKSLKADIVLRRVKAFVKRLL

SEQ ID NO: 15805 - protein, 23 aa, Artificial Sequence
  Quasi-synthetic sequence derived from human genome
MIVWFKYQKYPFWPAVIKSIRRK

SEQ ID NO: 15806 - protein, 23 aa, Artificial Sequence
  Quasi-synthetic sequence derived from human genome
KNFLQICKKILCRLFRVFVHVYI

SEQ ID NO: 15807 - protein, 23 aa, Artificial Sequence
  Quasi-synthetic sequence derived from human genome
LLILILLIVCFIRRNKGGKYPVK

SEQ ID NO: 15808 - protein, 23 aa, Artificial Sequence
  Quasi-synthetic sequence derived from human genome
SLVLKRLGFKGVWKGLFARIIMI

SEQ ID NO: 15809 - protein, 23 aa, Artificial Sequence
  Quasi-synthetic sequence derived from human genome
IWFRQFKKILAGFPNRPKSLKIL

SEQ ID NO: 15810 - protein, 23 aa, Artificial Sequence
  Quasi-synthetic sequence derived from human genome
RLLLRFKILRSLQAFVAVAARVF

SEQ ID NO: 15811 - protein, 23 aa, Artificial Sequence
  Quasi-synthetic sequence derived from human genome
WRPRRARGTPLLLLLLLLLLWPV

SEQ ID NO: 15812 - protein, 23 aa, Artificial Sequence
  Quasi-synthetic sequence derived from human genome
RVLIGVGKLLRVYDLGKKKLLRK

SEQ ID NO: 15813 - protein, 23 aa, Artificial Sequence
  Quasi-synthetic sequence derived from human genome
RFLRIMMLSVLRNTKTPVKFWLL

SEQ ID NO: 15814 - protein, 23 aa, Artificial Sequence
  Quasi-synthetic sequence derived from human genome
KKWCRSILRRTSLILARVFGLHL

SEQ ID NO: 15815 - protein, 23 aa, Artificial Sequence
  Quasi-synthetic sequence derived from human genome
LLIKKLIIFILKKTREKKKECLV

SEQ ID NO: 15816 - protein, 23 aa, Artificial Sequence
  Quasi-synthetic sequence derived from human genome
RLLFQRLLPCGVIKFRYIWICWF

SEQ ID NO: 15817 - protein, 23 aa, Artificial Sequence
  Quasi-synthetic sequence derived from human genome
KMFRFFIRRMVKAQSFYWVVLCV

SEQ ID NO: 15818 - protein, 23 aa, Artificial Sequence
  Quasi-synthetic sequence derived from human genome
CISSFLILSLLLFMVHRLRQRRR

SEQ ID NO: 15819 - protein, 23 aa, Artificial Sequence
  Quasi-synthetic sequence derived from human genome
FLHLKRRVKSVVLVILLGPLLFL

SEQ ID NO: 15820 - protein, 23 aa, Artificial Sequence
  Quasi-synthetic sequence derived from human genome
LRTLLRRRLFSYPTKYYFMVLVL

SEQ ID NO: 15821 - protein, 23 aa, Artificial Sequence
  Quasi-synthetic sequence derived from human genome
LIYKNRVRMNTFPWLKIVKISFK

SEQ ID NO: 15822 - protein, 23 aa, Artificial Sequence
  Quasi-synthetic sequence derived from human genome
VLLVVLLVVCGPLAYKKLVKKFR

SEQ ID NO: 15823 - protein, 23 aa, Artificial Sequence
  Quasi-synthetic sequence derived from human genome
MQLKIMPKKKRLSAGRVPLILFL

SEQ ID NO: 15824 - protein, 23 aa, Artificial Sequence
  Quasi-synthetic sequence derived from human genome
RICRVLRSLKLLAQFRQIQIIIL

SEQ ID NO: 15825 - protein, 23 aa, Artificial Sequence
  Quasi-synthetic sequence derived from human genome
RRVIFIADKLRYPPWLLLLKRLN

SEQ ID NO: 15826 - protein, 23 aa, Artificial Sequence
  Quasi-synthetic sequence derived from human genome
MAKFRRRTCIILALFILFIFSLM

SEQ ID NO: 15827 - protein, 23 aa, Artificial Sequence
  Quasi-synthetic sequence derived from human genome
FLRLVRKLHKCVSQHFLKHYFVR

SEQ ID NO: 15828 - protein, 23 aa, Artificial Sequence
  Quasi-synthetic sequence derived from human genome
MLLARNKIRTLKNNMFSKFKKLK

SEQ ID NO: 15829 - protein, 23 aa, Artificial Sequence
  Quasi-synthetic sequence derived from human genome
RRLFFCSLWHLPLLLLLMLTCKR

SEQ ID NO: 15830 - protein, 23 aa, Artificial Sequence
  Quasi-synthetic sequence derived from human genome
FLLLVVRKLLRTNSRFVKVVLMS

SEQ ID NO: 15831 - protein, 23 aa, Artificial Sequence
  Quasi-synthetic sequence derived from human genome
RKKMVRRVVCILVWLLAFCVSLP

SEQ ID NO: 15832 - protein, 23 aa, Artificial Sequence
  Quasi-synthetic sequence derived from human genome
LLLLFVGLFISYVMLKTKRVTKK

SEQ ID NO: 15833 - protein, 23 aa, Artificial Sequence
  Quasi-synthetic sequence derived from human genome
FAIIWPFIAQWLVYLYYQRRRRK

SEQ ID NO: 15834 - protein, 23 aa, Artificial Sequence
  Quasi-synthetic sequence derived from human genome
ILKQRKVKARLTIAAVLYLLFMI

SEQ ID NO: 15835 - protein, 23 aa, Artificial Sequence
  Quasi-synthetic sequence derived from human genome
LIGLLKTARLLRLVRVARKLDRY

SEQ ID NO: 15836 - protein, 23 aa, Artificial Sequence
  Quasi-synthetic sequence derived from human genome
RKVWKRSGAWFYKGLPKYILPLK

SEQ ID NO: 15837 - protein, 23 aa, Artificial Sequence
  Quasi-synthetic sequence derived from human genome
GFLSYRFKQGFRRVLLRPSRRVR

SEQ ID NO: 15838 - protein, 23 aa, Artificial Sequence
  Quasi-synthetic sequence derived from human genome
LQLLKWPLRFVIIHKRCVYYFKS

SEQ ID NO: 15839 - protein, 23 aa, Artificial Sequence
  Quasi-synthetic sequence derived from human genome
QLQLLKWPLRFVIIHKRCVYYFK

SEQ ID NO: 15840 - protein, 23 aa, Artificial Sequence
  Quasi-synthetic sequence derived from human genome
RLGLRGPLRKLVLQSLVPLLLRL

SEQ ID NO: 15841 - protein, 23 aa, Artificial Sequence
  Quasi-synthetic sequence derived from human genome
YAFFYPWFRKALKMMLFGKIFQK

SEQ ID NO: 15842 - protein, 23 aa, Artificial Sequence
  Quasi-synthetic sequence derived from human genome
IKWQRPRLSRQALMRCCLVKWIL

SEQ ID NO: 15843 - protein, 23 aa, Artificial Sequence
  Quasi-synthetic sequence derived from human genome
YPIVLFIRVCEKNIKRFRKLLPR

SEQ ID NO: 15844 - protein, 23 aa, Artificial Sequence
  Quasi-synthetic sequence derived from human genome
CCLNKRFRAGFKRAFRWCPFIKV

SEQ ID NO: 15845 - protein, 23 aa, Artificial Sequence
  Quasi-synthetic sequence derived from human genome
FLLRPRSHKSRVKGFLRLKMAYM

SEQ ID NO: 15846 - protein, 23 aa, Artificial Sequence
  Quasi-synthetic sequence derived from human genome
LLQKPRHRCRKRKPLLAIGFYLY

SEQ ID NO: 15847 - protein, 23 aa, Artificial Sequence
  Quasi-synthetic sequence derived from human genome
MWMGRLKMRKNSWLKIIISIILP

SEQ ID NO: 15848 - protein, 23 aa, Artificial Sequence
  Quasi-synthetic sequence derived from human genome
LKRQILILFNIILISKLLGARWF

SEQ ID NO: 15849 - protein, 23 aa, Artificial Sequence
  Quasi-synthetic sequence derived from human genome
IRKLLLTLPRSVLIVMRYLFAFL

SEQ ID NO: 15850 - protein, 23 aa, Artificial Sequence
  Quasi-synthetic sequence derived from human genome
LKDHLRIFRIPRRPRKLTLKGYR

SEQ ID NO: 15851 - protein, 23 aa, Artificial Sequence
  Quasi-synthetic sequence derived from human genome
MKAVINMYGRLIHRVRYRRGLWR

SEQ ID NO: 15852 - protein, 23 aa, Artificial Sequence
  Quasi-synthetic sequence derived from human genome
RRIVVSRGRLRRLLWIGFTLTAV

SEQ ID NO: 15853 - protein, 23 aa, Artificial Sequence
  Quasi-synthetic sequence derived from human genome
KVYYRLGRLTFCQLKVRARLPRF

SEQ ID NO: 15854 - protein, 23 aa, Artificial Sequence
  Quasi-synthetic sequence derived from human genome
YLLFLIILGKILLNILTLGMRRK

SEQ ID NO: 15855 - protein, 23 aa, Artificial Sequence
  Quasi-synthetic sequence derived from human genome
YKKHIKHHCNKVLLRVRMLYYLK

SEQ ID NO: 15856 - protein, 23 aa, Artificial Sequence
  Quasi-synthetic sequence derived from human genome
RKGIVRVVFFPFFFRWWLQVTSK

SEQ ID NO: 15857 - protein, 23 aa, Artificial Sequence
  Quasi-synthetic sequence derived from human genome
LCLIFKVKKRSILISSRHFWTIL

SEQ ID NO: 15858 - protein, 23 aa, Artificial Sequence
  Quasi-synthetic sequence derived from human genome
RRVTHKPNLLGSKWFIKILKRHF

SEQ ID NO: 15859 - protein, 23 aa, Artificial Sequence
  Quasi-synthetic sequence derived from human genome
GLLMALARLCFLLGRLCSRRLKL

SEQ ID NO: 15860 - protein, 23 aa, Artificial Sequence
  Quasi-synthetic sequence derived from human genome
VLGFLFKRFLRIQRLFPPVPQIK

SEQ ID NO: 15861 - protein, 23 aa, Artificial Sequence
  Quasi-synthetic sequence derived from human genome
LKQNFQKLLKLFYIKKLKPLYNY

SEQ ID NO: 15862 - protein, 23 aa, Artificial Sequence
  Quasi-synthetic sequence derived from human genome
RARKKRSRIPLLRKRRFQLGRSM

SEQ ID NO: 15863 - protein, 23 aa, Artificial Sequence
  Quasi-synthetic sequence derived from human genome
ALWRRQIYAVATLRFLKLRRERR

SEQ ID NO: 15864 - protein, 23 aa, Artificial Sequence
  Quasi-synthetic sequence derived from human genome
KLLAKIAKLQRRIKTVLLFQRNC

SEQ ID NO: 15865 - protein, 23 aa, Artificial Sequence
  Quasi-synthetic sequence derived from human genome
LLFALLLDLLLVALIKGLVRRRR

SEQ ID NO: 15866 - protein, 23 aa, Artificial Sequence
  Quasi-synthetic sequence derived from human genome
ILICYLKIVICLRRRNAKVDKKK

SEQ ID NO: 15867 - protein, 23 aa, Artificial Sequence
  Quasi-synthetic sequence derived from human genome
RLRRAARRQVLSGHLPFCRFRLR

SEQ ID NO: 15868 - protein, 23 aa, Artificial Sequence
  Quasi-synthetic sequence derived from human genome
RKELRSLLNWRTKLRRYVAKKLK

SEQ ID NO: 15869 - protein, 23 aa, Artificial Sequence
  Quasi-synthetic sequence derived from human genome
LFRKYIAYRLIQHARNNIMKRLK

SEQ ID NO: 15870 - protein, 23 aa, Artificial Sequence
  Quasi-synthetic sequence derived from human genome
KKLKKPAKPLLSKIKLRNHCKRL

SEQ ID NO: 15871 - protein, 23 aa, Artificial Sequence
  Quasi-synthetic sequence derived from human genome
SVIFLAHHFKRKRGKKKGKILPW

SEQ ID NO: 15872 - protein, 23 aa, Artificial Sequence
  Quasi-synthetic sequence derived from human genome
KRAIRIILSFFFLFLLYFLAFLI

SEQ ID NO: 15873 - protein, 23 aa, Artificial Sequence
  Quasi-synthetic sequence derived from human genome
ILRRKLYIHRVTLRKLLPGVQYV

SEQ ID NO: 15874 - protein, 23 aa, Artificial Sequence
  Quasi-synthetic sequence derived from human genome
LIFLLLVILAMGLWVIRVQKRHK

SEQ ID NO: 15875 - protein, 23 aa, Artificial Sequence
  Quasi-synthetic sequence derived from human genome
LMCKKMKHLWFFLLLVAAPRWVL

SEQ ID NO: 15876 - protein, 23 aa, Artificial Sequence
  Quasi-synthetic sequence derived from human genome
RIPLLRKRWFQLGRSMNPRARKK

SEQ ID NO: 15877 - protein, 23 aa, Artificial Sequence
  Quasi-synthetic sequence derived from human genome
RRVPQKDLRVKKNLKKFRYVKLI

SEQ ID NO: 15878 - protein, 23 aa, Artificial Sequence
  Quasi-synthetic sequence derived from human genome
KMRCLRKRSTVSFLGVLVIFLLF

SEQ ID NO: 15879 - protein, 23 aa, Artificial Sequence
  Quasi-synthetic sequence derived from human genome
KYLICTRYKWLIIKIVLALLGLL

SEQ ID NO: 15880 - protein, 23 aa, Artificial Sequence
  Quasi-synthetic sequence derived from human genome
MLRSVWNFLKRHKKKCIFLGTVL

SEQ ID NO: 15881 - protein, 23 aa, Artificial Sequence
  Quasi-synthetic sequence derived from human genome
KAIFIFIRWLLKLGHHGRAPPRR

SEQ ID NO: 15882 - protein, 23 aa, Artificial Sequence
  Quasi-synthetic sequence derived from human genome
FISVLKLFRMRSLRWQLLSIIVL

SEQ ID NO: 15883 - protein, 23 aa, Artificial Sequence
  Quasi-synthetic sequence derived from human genome
LKNTPRFKRRRVRRRRMETIVFL

SEQ ID NO: 15884 - protein, 23 aa, Artificial Sequence
  Quasi-synthetic sequence derived from human genome
FKKFAARKKWKQSVRLISLCQRL

SEQ ID NO: 15885 - protein, 23 aa, Artificial Sequence
  Quasi-synthetic sequence derived from human genome
VLKRPARLPCSHIFCKKCILRWL

SEQ ID NO: 15886 - protein, 23 aa, Artificial Sequence
  Quasi-synthetic sequence derived from human genome
LVFIMSVFVAAGLFVLVMKRRKK

SEQ ID NO: 15887 - protein, 23 aa, Artificial Sequence
  Quasi-synthetic sequence derived from human genome
KVDTVKRLLIKKLPRVLAIQLKR

SEQ ID NO: 15888 - protein, 23 aa, Artificial Sequence
  Quasi-synthetic sequence derived from human genome
HVTIRKKHLQRPIFRLRCLVKQL

SEQ ID NO: 15889 - protein, 23 aa, Artificial Sequence
  Quasi-synthetic sequence derived from human genome
AVLVYFVVRTVRMRRRNRKTRRY

SEQ ID NO: 15890 - protein, 23 aa, Artificial Sequence
  Quasi-synthetic sequence derived from human genome
FYRIHRRGPKILLLLLFFGVVLV

SEQ ID NO: 15891 - protein, 23 aa, Artificial Sequence
  Quasi-synthetic sequence derived from human genome
FLTFSVVLALFLKRPKRSLFFNR

SEQ ID NO: 15892 - protein, 23 aa, Artificial Sequence
  Quasi-synthetic sequence derived from human genome
IIKILLRRPNEKKSKAVRLIFVI

SEQ ID NO: 15893 - protein, 23 aa, Artificial Sequence
  Quasi-synthetic sequence derived from human genome
IIRFLQQRLKKAVPYNRMKLMIV

SEQ ID NO: 15894 - protein, 23 aa, Artificial Sequence
  Quasi-synthetic sequence derived from human genome
HKLLKVIRKKLVHKTLDMIKKIA

SEQ ID NO: 15895 - protein, 23 aa, Artificial Sequence
  Quasi-synthetic sequence derived from human genome
WPRLIRKLRCYLKEMKTLGKLVF

SEQ ID NO: 15896 - protein, 23 aa, Artificial Sequence
  Quasi-synthetic sequence derived from human genome
LRKKRLKKFPWSLWVWTTDLKKA

SEQ ID NO: 15897 - protein, 23 aa, Artificial Sequence
  Quasi-synthetic sequence derived from human genome
LALFKAAEFAKLSIKWMIKIRKR

SEQ ID NO: 15898 - protein, 23 aa, Artificial Sequence
  Quasi-synthetic sequence derived from human genome
RFLRIMMLSVLKNTKTPVKFWFL

SEQ ID NO: 15899 - protein, 23 aa, Artificial Sequence
  Quasi-synthetic sequence derived from human genome
RRYFKRVVLAARTKRGHLVLKSF

SEQ ID NO: 15900 - protein, 23 aa, Artificial Sequence
  Quasi-synthetic sequence derived from human genome
KKHRYLRLLPEALIRFGGFRKRK

SEQ ID NO: 15901 - protein, 23 aa, Artificial Sequence
  Quasi-synthetic sequence derived from human genome
KKRTKVQKKSLLLKKPLRVDLIL

SEQ ID NO: 15902 - protein, 23 aa, Artificial Sequence
  Quasi-synthetic sequence derived from human genome
LIQALWKGYLVRSLLRSKKKRGK

SEQ ID NO: 15903 - protein, 23 aa, Artificial Sequence
  Quasi-synthetic sequence derived from human genome
LARMRYKRTKAALTIIRYYRRYK

SEQ ID NO: 15904 - protein, 23 aa, Artificial Sequence
  Quasi-synthetic sequence derived from human genome
LCRLKIRKCMGRLHLRCPVFMSF

SEQ ID NO: 15905 - protein, 23 aa, Artificial Sequence
  Quasi-synthetic sequence derived from human genome
ILVALLMLVFRSKREVKRQKYRL

SEQ ID NO: 15906 - protein, 23 aa, Artificial Sequence
  Quasi-synthetic sequence derived from human genome
LLRRPFRQVLAGMVHRLLKRTPR

SEQ ID NO: 15907 - protein, 23 aa, Artificial Sequence
  Quasi-synthetic sequence derived from human genome
VVKIPFTILLFFLLHRWCSNKKK

SEQ ID NO: 15908 - protein, 23 aa, Artificial Sequence
  Quasi-synthetic sequence derived from human genome
YKKHLKHQCNKVLLRVRMLYYLR

SEQ ID NO: 15909 - protein, 23 aa, Artificial Sequence
  Quasi-synthetic sequence derived from human genome
KQNIFHFLYRKNRSRIPLLRKPW

SEQ ID NO: 15910 - protein, 23 aa, Artificial Sequence
  Quasi-synthetic sequence derived from human genome
LFWVLGLLILCGFLWTRKGKLKI

SEQ ID NO: 15911 - protein, 23 aa, Artificial Sequence
  Quasi-synthetic sequence derived from human genome
LKLRRTRRYNVLSKNCFVTRIRL

SEQ ID NO: 15912 - protein, 23 aa, Artificial Sequence
  Quasi-synthetic sequence derived from human genome
RRILFIKHFIIYSIPRYVRDLKI

SEQ ID NO: 15913 - protein, 23 aa, Artificial Sequence
  Quasi-synthetic sequence derived from human genome
LVLLVTLITTLVIGLVLCKRKRR

SEQ ID NO: 15914 - protein, 23 aa, Artificial Sequence
  Quasi-synthetic sequence derived from human genome
RRAKRIRNAALQHLFIRKSFRPF

SEQ ID NO: 15915 - protein, 23 aa, Artificial Sequence
  Quasi-synthetic sequence derived from human genome
KLLERAGLVLRLLRALRVLYVMR

SEQ ID NO: 15916 - protein, 23 aa, Artificial Sequence
  Quasi-synthetic sequence derived from human genome
RLCFLLGRLSIRKVKLSQARVYF

SEQ ID NO: 15917 - protein, 23 aa, Artificial Sequence
  Quasi-synthetic sequence derived from human genome
KRRFILKTCGTTLLLKALVPLLK

SEQ ID NO: 15918 - protein, 23 aa, Artificial Sequence
  Quasi-synthetic sequence derived from human genome
LKFRKKKLRFGRSRIHEWGLFAM

SEQ ID NO: 15919 - protein, 23 aa, Artificial Sequence
  Quasi-synthetic sequence derived from human genome
FGIPRLEKILRNKAKIKFIIKKP

SEQ ID NO: 15920 - protein, 23 aa, Artificial Sequence
  Quasi-synthetic sequence derived from human genome
KLTQQQFVALLWKRLLIARRSRK

SEQ ID NO: 15921 - protein, 23 aa, Artificial Sequence
  Quasi-synthetic sequence derived from human genome
RKRLHFKLCKKSSILVHKLLDKL

SEQ ID NO: 15922 - protein, 23 aa, Artificial Sequence
  Quasi-synthetic sequence derived from human genome
FVILPVFLTFFPPSKKHHKKKKR

SEQ ID NO: 15923 - protein, 23 aa, Artificial Sequence
  Quasi-synthetic sequence derived from human genome
RMYLRLRGRCPLLLRCLIYTLWT

SEQ ID NO: 15924 - protein, 23 aa, Artificial Sequence
  Quasi-synthetic sequence derived from human genome
WRRRPKRLSAVVCALLWVLSLLV

SEQ ID NO: 15925 - protein, 23 aa, Artificial Sequence
  Quasi-synthetic sequence derived from human genome
LKTILHRIYGKFLGLRAYIRRQI

SEQ ID NO: 15926 - protein, 23 aa, Artificial Sequence
  Quasi-synthetic sequence derived from human genome
VKLFLYQILRGLAYCHRRKVLHR

SEQ ID NO: 15927 - protein, 23 aa, Artificial Sequence
  Quasi-synthetic sequence derived from human genome
LFLRHVPGWLRPLLRPLAWLVLR

SEQ ID NO: 15928 - protein, 23 aa, Artificial Sequence
  Quasi-synthetic sequence derived from human genome
RLRRKQIKFEKDLRRIWLKAGLK

SEQ ID NO: 15929 - protein, 23 aa, Artificial Sequence
  Quasi-synthetic sequence derived from human genome
LIFGLFIILLVIFLIWRCFLRNK

SEQ ID NO: 15930 - protein, 23 aa, Artificial Sequence
  Quasi-synthetic sequence derived from human genome
ARLYCLKIHGLSSLWRLFRGKKW

SEQ ID NO: 15931 - protein, 23 aa, Artificial Sequence
  Quasi-synthetic sequence derived from human genome
LLRKLGVKLVQRLGLTFLKPKVA

SEQ ID NO: 15932 - protein, 23 aa, Artificial Sequence
  Quasi-synthetic sequence derived from human genome
FRLQFNNKRRLRRPYYPRKALLC

SEQ ID NO: 15933 - protein, 23 aa, Artificial Sequence
  Quasi-synthetic sequence derived from human genome
KKAKAIKLILLVVIVFFLFWTPY

SEQ ID NO: 15934 - protein, 23 aa, Artificial Sequence
  Quasi-synthetic sequence derived from human genome
PWVLRWLRSRRRRPRREALFFPS

SEQ ID NO: 15935 - protein, 23 aa, Artificial Sequence
  Quasi-synthetic sequence derived from human genome
RPLRNIFLKKPVFAKTVSIFIWF

SEQ ID NO: 15936 - protein, 23 aa, Artificial Sequence
  Quasi-synthetic sequence derived from human genome
YLLLWVKQRKDLLHLCCKKLKIL

SEQ ID NO: 15937 - protein, 23 aa, Artificial Sequence
  Quasi-synthetic sequence derived from human genome
RRFFWWARFIAINTFLFFLFFFL

SEQ ID NO: 15938 - protein, 23 aa, Artificial Sequence
  Quasi-synthetic sequence derived from human genome
LVYARIYVVLKQRRRKRILTRQN

SEQ ID NO: 15939 - protein, 23 aa, Artificial Sequence
  Quasi-synthetic sequence derived from human genome
YLYALGQKVWKRWKKRYFVLVQV

SEQ ID NO: 15940 - protein, 23 aa, Artificial Sequence
  Quasi-synthetic sequence derived from human genome
KLTCSAFRLQRALRFLLGRLPWR

SEQ ID NO: 15941 - protein, 23 aa, Artificial Sequence
  Quasi-synthetic sequence derived from human genome
MLQLYVLKLLKLQTKYLGRQWRK

SEQ ID NO: 15942 - protein, 23 aa, Artificial Sequence
  Quasi-synthetic sequence derived from human genome
AFIVGLLILLSRRFRCGGNKKRR

SEQ ID NO: 15943 - protein, 23 aa, Artificial Sequence
  Quasi-synthetic sequence derived from human genome
LFRSRSKRRHRTVKLIFAIVVAY

SEQ ID NO: 15944 - protein, 23 aa, Artificial Sequence
  Quasi-synthetic sequence derived from human genome
LRLYARRRRPSQPYMFPRMLMKI

SEQ ID NO: 15945 - protein, 23 aa, Artificial Sequence
  Quasi-synthetic sequence derived from human genome
FPLVSLLSAWIVARLRMRNFKRL

SEQ ID NO: 15946 - protein, 23 aa, Artificial Sequence
  Quasi-synthetic sequence derived from human genome
FRLFKFCTCLATVFSFLKRLICR

SEQ ID NO: 15947 - protein, 23 aa, Artificial Sequence
  Quasi-synthetic sequence derived from human genome
KLRHASLKVIWKVMSILKGRKFQ

SEQ ID NO: 15948 - protein, 23 aa, Artificial Sequence
  Quasi-synthetic sequence derived from human genome
MRSIRKRWTICTISLLLIFYKTK

SEQ ID NO: 15949 - protein, 23 aa, Artificial Sequence
  Quasi-synthetic sequence derived from human genome
RRYKFMSRIDKQISRFRRWLPKK

SEQ ID NO: 15950 - protein, 23 aa, Artificial Sequence
  Quasi-synthetic sequence derived from human genome
LKTNIRLKKMASLARKASLWLFL

SEQ ID NO: 15951 - protein, 23 aa, Artificial Sequence
  Quasi-synthetic sequence derived from human genome
LRKRFGGIRIPIILAVLYLFIYI

SEQ ID NO: 15952 - protein, 23 aa, Artificial Sequence
  Quasi-synthetic sequence derived from human genome
LVSLGVAMHLCCRRRRARLRFMK

SEQ ID NO: 15953 - protein, 23 aa, Artificial Sequence
  Quasi-synthetic sequence derived from human genome
KYVLARRRLVKVINNRAKLLSLC

SEQ ID NO: 15954 - protein, 23 aa, Artificial Sequence
  Quasi-synthetic sequence derived from human genome
LLLAVYFIARKIRKKRLENRKSV

SEQ ID NO: 15955 - protein, 23 aa, Artificial Sequence
  Quasi-synthetic sequence derived from human genome
RLRHPRTRWKNWWVRGILTLAMI

SEQ ID NO: 15956 - protein, 23 aa, Artificial Sequence
  Quasi-synthetic sequence derived from human genome
KIICNLKPALKLRLRFITHISKM

SEQ ID NO: 15957 - protein, 23 aa, Artificial Sequence
  Quasi-synthetic sequence derived from human genome
KLLKLRRNIVKLSLYRHFTNTLI

SEQ ID NO: 15958 - protein, 23 aa, Artificial Sequence
  Quasi-synthetic sequence derived from human genome
LRRAPRLWKVRAMMIFNTFNLIL

SEQ ID NO: 15959 - protein, 23 aa, Artificial Sequence
  Quasi-synthetic sequence derived from human genome
IRMAKALGKRTAKYRWFAVLYLL

SEQ ID NO: 15960 - protein, 23 aa, Artificial Sequence
  Quasi-synthetic sequence derived from human genome
MAAMRWRWWQRLLPWRLLQARGF

SEQ ID NO: 15961 - protein, 23 aa, Artificial Sequence
  Quasi-synthetic sequence derived from human genome
KFLYIKSVFHTLRMAQRRHKRVR

SEQ ID NO: 15962 - protein, 23 aa, Artificial Sequence
  Quasi-synthetic sequence derived from human genome
RYCCKINKKLKSITMLRKKIVHF

SEQ ID NO: 15963 - protein, 23 aa, Artificial Sequence
  Quasi-synthetic sequence derived from human genome
RFAWPKVLKISYKRNNFYIKIRP

SEQ ID NO: 15964 - protein, 23 aa, Artificial Sequence
  Quasi-synthetic sequence derived from human genome
LLPKGVVLKLKPVATRFPRKAWR

SEQ ID NO: 15965 - protein, 23 aa, Artificial Sequence
  Quasi-synthetic sequence derived from human genome
MARRRRRACIALFLVLLFAFGTL

SEQ ID NO: 15966 - protein, 23 aa, Artificial Sequence
  Quasi-synthetic sequence derived from human genome
KFRLLGKIAWRSFLLICIGIIIV

SEQ ID NO: 15967 - protein, 23 aa, Artificial Sequence
  Quasi-synthetic sequence derived from human genome
RSQLLWFRRLYIIFSRYMRINSL

SEQ ID NO: 15968 - protein, 23 aa, Artificial Sequence
  Quasi-synthetic sequence derived from human genome
KQGYVKMKSRKLGIYRRCWLVFR

SEQ ID NO: 15969 - protein, 23 aa, Artificial Sequence
  Quasi-synthetic sequence derived from human genome
VKQMRARRKTAKMLMVVLLVFAL

SEQ ID NO: 15970 - protein, 23 aa, Artificial Sequence
  Quasi-synthetic sequence derived from human genome
KCVRFSRCVLLNYWKVLPKSFLR

SEQ ID NO: 15971 - protein, 23 aa, Artificial Sequence
  Quasi-synthetic sequence derived from human genome
VRSRYSFIQALVRRIRGLLRISR

SEQ ID NO: 15972 - protein, 23 aa, Artificial Sequence
  Quasi-synthetic sequence derived from human genome
IIGTLLALALIGLIIFCCRKKRR

SEQ ID NO: 15973 - protein, 23 aa, Artificial Sequence
  Quasi-synthetic sequence derived from human genome
LLVLILLIVCFIKRSRGGKYPVR

SEQ ID NO: 15974 - protein, 23 aa, Artificial Sequence
  Quasi-synthetic sequence derived from human genome
LSFFMARVFMRMKLPRSLALLPR

SEQ ID NO: 15975 - protein, 23 aa, Artificial Sequence
  Quasi-synthetic sequence derived from human genome
IRWLVLSGKSSKALKILRRVAVF

SEQ ID NO: 15976 - protein, 23 aa, Artificial Sequence
  Quasi-synthetic sequence derived from human genome
LLRRLRAVRLRSGAKALGKARRK

SEQ ID NO: 15977 - protein, 23 aa, Artificial Sequence
  Quasi-synthetic sequence derived from human genome
LVRRRRRYALSGSVWKKRTLTWR

SEQ ID NO: 15978 - protein, 23 aa, Artificial Sequence
  Quasi-synthetic sequence derived from human genome
ALRRLHYVPATKVFLSFRRPFWR

SEQ ID NO: 15979 - protein, 23 aa, Artificial Sequence
  Quasi-synthetic sequence derived from human genome
VKKCSAFQFFKKRVRRWIKSPMV

SEQ ID NO: 15980 - protein, 23 aa, Artificial Sequence
  Quasi-synthetic sequence derived from human genome
FRIKRFLAKKQKQNRPIPQWIRM

SEQ ID NO: 15981 - protein, 23 aa, Artificial Sequence
  Quasi-synthetic sequence derived from human genome
SLLMNRRKFLYQFKNVRWAKGRR

SEQ ID NO: 15982 - protein, 23 aa, Artificial Sequence
  Quasi-synthetic sequence derived from human genome
FIKVLWNILKPLISHKFGKKVIY

SEQ ID NO: 15983 - protein, 23 aa, Artificial Sequence
  Quasi-synthetic sequence derived from human genome
TLQARWRLVGLPVHLLFLRFYKR

SEQ ID NO: 15984 - protein, 23 aa, Artificial Sequence
  Quasi-synthetic sequence derived from human genome
FIALVFFLYRRRKGSRKDVTLRK

SEQ ID NO: 15985 - protein, 23 aa, Artificial Sequence
  Quasi-synthetic sequence derived from human genome
LLLLGKTYLKLHNKKLAAFWLMK

SEQ ID NO: 15986 - protein, 23 aa, Artificial Sequence
  Quasi-synthetic sequence derived from human genome
KAGRNMRRKLFGVLRLKCHSLFL

SEQ ID NO: 15987 - protein, 23 aa, Artificial Sequence
  Quasi-synthetic sequence derived from human genome
VFNQDFRRSFKHILFRRRRRGFR

SEQ ID NO: 15988 - protein, 23 aa, Artificial Sequence
  Quasi-synthetic sequence derived from human genome
LVLWAVRKHLRRLYRRQERHRRH

SEQ ID NO: 15989 - protein, 23 aa, Artificial Sequence
  Quasi-synthetic sequence derived from human genome
RFRIYKRKVLILTLVVAACGFVL

SEQ ID NO: 15990 - protein, 23 aa, Artificial Sequence
  Quasi-synthetic sequence derived from human genome
ISLVALLVAFVLFLRLRSIRCLR

SEQ ID NO: 15991 - protein, 23 aa, Artificial Sequence
  Quasi-synthetic sequence derived from human genome
LLHMKWKKFAKHMFFLSFCFYFF

SEQ ID NO: 15992 - protein, 23 aa, Artificial Sequence
  Quasi-synthetic sequence derived from human genome
VSACIPVFRLARRRKKILFYCHF

SEQ ID NO: 15993 - protein, 23 aa, Artificial Sequence
  Quasi-synthetic sequence derived from human genome
NKRPVLGYRNLNLFKLFRLVHKL

SEQ ID NO: 15994 - protein, 23 aa, Artificial Sequence
  Quasi-synthetic sequence derived from human genome
IRVRRLFCRTQWYLRIDKRGKVK

SEQ ID NO: 15995 - protein, 23 aa, Artificial Sequence
  Quasi-synthetic sequence derived from human genome
GFVKVVKNKAYFKRYQVKFRRRR

SEQ ID NO: 15996 - protein, 23 aa, Artificial Sequence
  Quasi-synthetic sequence derived from human genome
FFRRKLIDAVGFSPLRILRKRNK

SEQ ID NO: 15997 - protein, 23 aa, Artificial Sequence
  Quasi-synthetic sequence derived from human genome
ATFTRRLVPFLWLKWPGTRLLLR

SEQ ID NO: 15998 - protein, 23 aa, Artificial Sequence
  Quasi-synthetic sequence derived from human genome
KVCRGYLVKMGGKIKSWKKRWFV

SEQ ID NO: 15999 - protein, 23 aa, Artificial Sequence
  Quasi-synthetic sequence derived from human genome
LWLSYLKSVFNPIVYCWRIKKFR

SEQ ID NO: 16000 - protein, 23 aa, Artificial Sequence
  Quasi-synthetic sequence derived from human genome
KFAKSRPIIKRFLGKLTIPVQRL

SEQ ID NO: 16001 - protein, 24 aa, Artificial Sequence
  Quasi-synthetic sequence derived from human genome
RRRGFGLFFFLRLHRLLLLFLVLR

SEQ ID NO: 16002 - protein, 24 aa, Artificial Sequence
  Quasi-synthetic sequence derived from human genome
KRKKKKKFCYLCILLLIVLFILLC

SEQ ID NO: 16003 - protein, 24 aa, Artificial Sequence
  Quasi-synthetic sequence derived from human genome
LLKRLRLLPALLILRAFKPHRKIR

SEQ ID NO: 16004 - protein, 24 aa, Artificial Sequence
  Quasi-synthetic sequence derived from human genome
FKRAFLRLLRCQCRRRRRRRPLWR

SEQ ID NO: 16005 - protein, 24 aa, Artificial Sequence
  Quasi-synthetic sequence derived from human genome
LVFILLLLVVILIVKKSKLAKKRK

SEQ ID NO: 16006 - protein, 24 aa, Artificial Sequence
  Quasi-synthetic sequence derived from human genome
LRIVRFTKILSLLRLLRLSRLIRY

SEQ ID NO: 16007 - protein, 24 aa, Artificial Sequence
  Quasi-synthetic sequence derived from human genome
SLFRILKVFKSLRALRAIRVLRRL

SEQ ID NO: 16008 - protein, 24 aa, Artificial Sequence
  Quasi-synthetic sequence derived from human genome
LKIKRLRKKFAQKMLRKARRKLIY

SEQ ID NO: 16009 - protein, 24 aa, Artificial Sequence
  Quasi-synthetic sequence derived from human genome
FLRVVRFVRILRIFKLTRHFVGLR

SEQ ID NO: 16010 - protein, 24 aa, Artificial Sequence
  Quasi-synthetic sequence derived from human genome
RLLRVLKLVRFLPALRRQLVVLVK

SEQ ID NO: 16011 - protein, 24 aa, Artificial Sequence
  Quasi-synthetic sequence derived from human genome
RRRQRGRLMRRLVRRLRRWGLLPR

SEQ ID NO: 16012 - protein, 24 aa, Artificial Sequence
  Quasi-synthetic sequence derived from human genome
RPPLLLRPVKLLRRRFRLLLALAV

SEQ ID NO: 16013 - protein, 24 aa, Artificial Sequence
  Quasi-synthetic sequence derived from human genome
GAVLALLFLLLVLLLLVRKKRKIK

SEQ ID NO: 16014 - protein, 24 aa, Artificial Sequence
  Quasi-synthetic sequence derived from human genome
KFFRWVRRAWQRIISWVFFWRQKI

SEQ ID NO: 16015 - protein, 24 aa, Artificial Sequence
  Quasi-synthetic sequence derived from human genome
IMQLVALLLVVLWIRWKCRRLRIR

SEQ ID NO: 16016 - protein, 24 aa, Artificial Sequence
  Quasi-synthetic sequence derived from human genome
LRRKKKKTIKMLMLVVVLFALCWF

SEQ ID NO: 16017 - protein, 24 aa, Artificial Sequence
  Quasi-synthetic sequence derived from human genome
RWRRLRLQQLRRLRGLLRVLRGRP

SEQ ID NO: 16018 - protein, 24 aa, Artificial Sequence
  Quasi-synthetic sequence derived from human genome
RLLRVLKLVRFMPALRRQLVVLMK

SEQ ID NO: 16019 - protein, 24 aa, Artificial Sequence
  Quasi-synthetic sequence derived from human genome
LFRVIRLARIGRILRLIRAAKGIR

SEQ ID NO: 16020 - protein, 24 aa, Artificial Sequence
  Quasi-synthetic sequence derived from human genome
LLHALLLVLLLCRLRRLRARARAR

SEQ ID NO: 16021 - protein, 24 aa, Artificial Sequence
  Quasi-synthetic sequence derived from human genome
IKLLRNIPRWTHLVRLLRLIILIR

SEQ ID NO: 16022 - protein, 24 aa, Artificial Sequence
  Quasi-synthetic sequence derived from human genome
LVLILKTIRRRLPFSKWRLAFRFA

SEQ ID NO: 16023 - protein, 24 aa, Artificial Sequence
  Quasi-synthetic sequence derived from human genome
LLRKILLRKFCQMRKRRLREQFWR

SEQ ID NO: 16024 - protein, 24 aa, Artificial Sequence
  Quasi-synthetic sequence derived from human genome
RALSRRYLRRLLLLLLLLLLRQPV

SEQ ID NO: 16025 - protein, 24 aa, Artificial Sequence
  Quasi-synthetic sequence derived from human genome
VGILLFLILVGLLIFFLKRRNKKK

SEQ ID NO: 16026 - protein, 24 aa, Artificial Sequence
  Quasi-synthetic sequence derived from human genome
IFIITKFCLFCFRKLAKKGKKKKR

SEQ ID NO: 16027 - protein, 24 aa, Artificial Sequence
  Quasi-synthetic sequence derived from human genome
LARWRCRRLRAIYTIMRWFRRHKV

SEQ ID NO: 16028 - protein, 24 aa, Artificial Sequence
  Quasi-synthetic sequence derived from human genome
LLVLLALAAWASRWLRRKLRARRK

SEQ ID NO: 16029 - protein, 24 aa, Artificial Sequence
  Quasi-synthetic sequence derived from human genome
KRFLLLFTFLKKNRKKKLMVFFSS

SEQ ID NO: 16030 - protein, 24 aa, Artificial Sequence
  Quasi-synthetic sequence derived from human genome
LRKRIHRPRRRTTRRWKRWFKFRK

SEQ ID NO: 16031 - protein, 24 aa, Artificial Sequence
  Quasi-synthetic sequence derived from human genome
KRRLSLYLTKIHFWLPVLKMIRKK

SEQ ID NO: 16032 - protein, 24 aa, Artificial Sequence
  Quasi-synthetic sequence derived from human genome
RKRCIKKFSIQRFPKILVLHLKRF

SEQ ID NO: 16033 - protein, 24 aa, Artificial Sequence
  Quasi-synthetic sequence derived from human genome
KLWFKFQRYFRRKPVRFFTFLALY

SEQ ID NO: 16034 - protein, 24 aa, Artificial Sequence
  Quasi-synthetic sequence derived from human genome
YRIMKRHLRLIHPTKLYKLMLRRF

SEQ ID NO: 16035 - protein, 24 aa, Artificial Sequence
  Quasi-synthetic sequence derived from human genome
LFRVIRLARIGRILRLIRGAKGIR

SEQ ID NO: 16036 - protein, 24 aa, Artificial Sequence
  Quasi-synthetic sequence derived from human genome
LLLRKILLRKFCQMRKRRLREQLI

SEQ ID NO: 16037 - protein, 24 aa, Artificial Sequence
  Quasi-synthetic sequence derived from human genome
LLLSILCLVMILYTRRRWCKRRRV

SEQ ID NO: 16038 - protein, 24 aa, Artificial Sequence
  Quasi-synthetic sequence derived from human genome
FLVVLLAILLYLLRLRRIHRRTPR

SEQ ID NO: 16039 - protein, 24 aa, Artificial Sequence
  Quasi-synthetic sequence derived from human genome
LGVRVLLRFQRKLSVLLLLLGRRR

SEQ ID NO: 16040 - protein, 24 aa, Artificial Sequence
  Quasi-synthetic sequence derived from human genome
INAFNWAKVRKLSFKRKRFLIKLR

SEQ ID NO: 16041 - protein, 24 aa, Artificial Sequence
  Quasi-synthetic sequence derived from human genome
LFRVIRLARIGRILRLIKGAKGIR

SEQ ID NO: 16042 - protein, 24 aa, Artificial Sequence
  Quasi-synthetic sequence derived from human genome
LRRIILLQRWFRVLLCRQHFLHLR

SEQ ID NO: 16043 - protein, 24 aa, Artificial Sequence
  Quasi-synthetic sequence derived from human genome
LILSRRPRRRLGSLRWCGRRRLRW

SEQ ID NO: 16044 - protein, 24 aa, Artificial Sequence
  Quasi-synthetic sequence derived from human genome
VFMIRKFRRSLLQLLCLRLLRCQR

SEQ ID NO: 16045 - protein, 24 aa, Artificial Sequence
  Quasi-synthetic sequence derived from human genome
LLLFLLFFLFRLLLRFLRLCRSFY

SEQ ID NO: 16046 - protein, 24 aa, Artificial Sequence
  Quasi-synthetic sequence derived from human genome
AVVLFVIFILVVLFIVFRKKVFRK

SEQ ID NO: 16047 - protein, 24 aa, Artificial Sequence
  Quasi-synthetic sequence derived from human genome
IKSLRVLRVLRPLKTIKRLPKLKA

SEQ ID NO: 16048 - protein, 24 aa, Artificial Sequence
  Quasi-synthetic sequence derived from human genome
LVALLAVIVLVALLLLWRRRQKRR

SEQ ID NO: 16049 - protein, 24 aa, Artificial Sequence
  Quasi-synthetic sequence derived from human genome
VRVLSRTSKFRRLRQLLRRRKKRW

SEQ ID NO: 16050 - protein, 24 aa, Artificial Sequence
  Quasi-synthetic sequence derived from human genome
LFRVIRLARIGRVLRLIRGAKGIR

SEQ ID NO: 16051 - protein, 24 aa, Artificial Sequence
  Quasi-synthetic sequence derived from human genome
LLALTALLLVAMICRRRRRRKKAR

SEQ ID NO: 16052 - protein, 24 aa, Artificial Sequence
  Quasi-synthetic sequence derived from human genome
LIFFIFYLRNMKKKYTKMVKLLHK

SEQ ID NO: 16053 - protein, 24 aa, Artificial Sequence
  Quasi-synthetic sequence derived from human genome
IFRKVKRRSLRLYARWQSRWRKKV

SEQ ID NO: 16054 - protein, 24 aa, Artificial Sequence
  Quasi-synthetic sequence derived from human genome
RKRRKMSKKLPPVIIKYIIINRFR

SEQ ID NO: 16055 - protein, 24 aa, Artificial Sequence
  Quasi-synthetic sequence derived from human genome
KKKKKKKKRQCFAFLIYFRLGIKM

SEQ ID NO: 16056 - protein, 24 aa, Artificial Sequence
  Quasi-synthetic sequence derived from human genome
LKVLFKKTHRILRRLFNLCKRCHR

SEQ ID NO: 16057 - protein, 24 aa, Artificial Sequence
  Quasi-synthetic sequence derived from human genome
VVLTFLGHRLLKRLLGPKLRRFLK

SEQ ID NO: 16058 - protein, 24 aa, Artificial Sequence
  Quasi-synthetic sequence derived from human genome
RRKSWRLEFLFLRRRCFLLTFYLW

SEQ ID NO: 16059 - protein, 24 aa, Artificial Sequence
  Quasi-synthetic sequence derived from human genome
RAFLLRRRFLHLKKAAIVFQKQLR

SEQ ID NO: 16060 - protein, 24 aa, Artificial Sequence
  Quasi-synthetic sequence derived from human genome
RFRTLMMRRRFLSLKKTAILIQRK

SEQ ID NO: 16061 - protein, 24 aa, Artificial Sequence
  Quasi-synthetic sequence derived from human genome
LGKSFFKTLKKRAWAIFLRLCLKK

SEQ ID NO: 16062 - protein, 24 aa, Artificial Sequence
  Quasi-synthetic sequence derived from human genome
FQNVRRVVQIFRIMRILRILKLAR

SEQ ID NO: 16063 - protein, 24 aa, Artificial Sequence
  Quasi-synthetic sequence derived from human genome
LKTYLKRFKVMKIKVLRSWCRQIL

SEQ ID NO: 16064 - protein, 24 aa, Artificial Sequence
  Quasi-synthetic sequence derived from human genome
LMLVLYGRIFRAARFRIRKTVKKV

SEQ ID NO: 16065 - protein, 24 aa, Artificial Sequence
  Quasi-synthetic sequence derived from human genome
PRKKIHRRVLKKNPLKNLRIMLKL

SEQ ID NO: 16066 - protein, 24 aa, Artificial Sequence
  Quasi-synthetic sequence derived from human genome
GVIGLLILILLIKKLIIFILKKTR

SEQ ID NO: 16067 - protein, 24 aa, Artificial Sequence
  Quasi-synthetic sequence derived from human genome
IWFFWIRLYKIRRGRTRPQALLFL

SEQ ID NO: 16068 - protein, 24 aa, Artificial Sequence
  Quasi-synthetic sequence derived from human genome
VTLLIWVPVKVILHKKRYIYRKIK

SEQ ID NO: 16069 - protein, 24 aa, Artificial Sequence
  Quasi-synthetic sequence derived from human genome
WRGALARKAIQRRKWAVRIIRKFI

SEQ ID NO: 16070 - protein, 24 aa, Artificial Sequence
  Quasi-synthetic sequence derived from human genome
LPLLLLLLVLLLAAYFFRFRKQRK

SEQ ID NO: 16071 - protein, 24 aa, Artificial Sequence
  Quasi-synthetic sequence derived from human genome
VTLLVYIKIYIVLRRRRKRVNTKR

SEQ ID NO: 16072 - protein, 24 aa, Artificial Sequence
  Quasi-synthetic sequence derived from human genome
RKIVQVMRKQKTINRFLMRKRLLF

SEQ ID NO: 16073 - protein, 24 aa, Artificial Sequence
  Quasi-synthetic sequence derived from human genome
IFIITKFCLFCFWKFARKGKKGKR

SEQ ID NO: 16074 - protein, 24 aa, Artificial Sequence
  Quasi-synthetic sequence derived from human genome
LIFLLIILSYIKIGKNLLRISKRR

SEQ ID NO: 16075 - protein, 24 aa, Artificial Sequence
  Quasi-synthetic sequence derived from human genome
KKRIKRRALLFLSYILTHFIFLAL

SEQ ID NO: 16076 - protein, 24 aa, Artificial Sequence
  Quasi-synthetic sequence derived from human genome
VRIRVIKKKKVIMKKRKKLTLTRP

SEQ ID NO: 16077 - protein, 24 aa, Artificial Sequence
  Quasi-synthetic sequence derived from human genome
FWRRYGKLSRHLMKVKLKKYTKFL

SEQ ID NO: 16078 - protein, 24 aa, Artificial Sequence
  Quasi-synthetic sequence derived from human genome
LKRLVKLHIKRHYHKKFWKLGAVI

SEQ ID NO: 16079 - protein, 24 aa, Artificial Sequence
  Quasi-synthetic sequence derived from human genome
RFRKYLRQLFHRRVAVHLVKWLPF

SEQ ID NO: 16080 - protein, 24 aa, Artificial Sequence
  Quasi-synthetic sequence derived from human genome
FGLFIILLVIFLIWRCFLRNKTRR

SEQ ID NO: 16081 - protein, 24 aa, Artificial Sequence
  Quasi-synthetic sequence derived from human genome
IFILFIIVQLFIMKLRKAHVIWKK

SEQ ID NO: 16082 - protein, 24 aa, Artificial Sequence
  Quasi-synthetic sequence derived from human genome
LKLFRAARLIKLLRQGYTIRILLW

SEQ ID NO: 16083 - protein, 24 aa, Artificial Sequence
  Quasi-synthetic sequence derived from human genome
KINTFNWSKVRKLSFKRKRFLIKL

SEQ ID NO: 16084 - protein, 24 aa, Artificial Sequence
  Quasi-synthetic sequence derived from human genome
RWTHLLRLLRLIILLRIFHLFHQK

SEQ ID NO: 16085 - protein, 24 aa, Artificial Sequence
  Quasi-synthetic sequence derived from human genome
LKGKKHVLHLWPKRLLLPRHLRVF

SEQ ID NO: 16086 - protein, 24 aa, Artificial Sequence
  Quasi-synthetic sequence derived from human genome
LCCRRRRARLRFMKQKFNIVCLKI

SEQ ID NO: 16087 - protein, 24 aa, Artificial Sequence
  Quasi-synthetic sequence derived from human genome
GRLLRGLWQRWRRYKYRFVPWIAL

SEQ ID NO: 16088 - protein, 24 aa, Artificial Sequence
  Quasi-synthetic sequence derived from human genome
LKRFKVMKPKVLRSWCRQILKGLL

SEQ ID NO: 16089 - protein, 24 aa, Artificial Sequence
  Quasi-synthetic sequence derived from human genome
LLVLLLLAGGSLAFILLRVRRRRK

SEQ ID NO: 16090 - protein, 24 aa, Artificial Sequence
  Quasi-synthetic sequence derived from human genome
WLRKSPPEKKLRRYAWKKRWFILR

SEQ ID NO: 16091 - protein, 24 aa, Artificial Sequence
  Quasi-synthetic sequence derived from human genome
MLIRIVLFLQKVWRGTLARMRYKR

SEQ ID NO: 16092 - protein, 24 aa, Artificial Sequence
  Quasi-synthetic sequence derived from human genome
RPFTRFRTAVRVVIAILRLRFLVK

SEQ ID NO: 16093 - protein, 24 aa, Artificial Sequence
  Quasi-synthetic sequence derived from human genome
MLLRKRYRHRPCRLQFLLLLLMLG

SEQ ID NO: 16094 - protein, 24 aa, Artificial Sequence
  Quasi-synthetic sequence derived from human genome
VGILIFLLLAVLLWKMGFFRRRYK

SEQ ID NO: 16095 - protein, 24 aa, Artificial Sequence
  Quasi-synthetic sequence derived from human genome
LLIVLFILLCCLYRLCKKSKPIKK

SEQ ID NO: 16096 - protein, 24 aa, Artificial Sequence
  Quasi-synthetic sequence derived from human genome
FMIKRAQGRKRFGMKNFKKRWFRL

SEQ ID NO: 16097 - protein, 24 aa, Artificial Sequence
  Quasi-synthetic sequence derived from human genome
LIFFWCLAFLWGLLILLKYRWRKL

SEQ ID NO: 16098 - protein, 24 aa, Artificial Sequence
  Quasi-synthetic sequence derived from human genome
IILLLLLIIALMLWRLHWRRLLSK

SEQ ID NO: 16099 - protein, 24 aa, Artificial Sequence
  Quasi-synthetic sequence derived from human genome
LRLPKRLRVVYFLARTRLAQRLIM

SEQ ID NO: 16100 - protein, 24 aa, Artificial Sequence
  Quasi-synthetic sequence derived from human genome
PTVIICVMVFCLILWKWKKKKRPR

SEQ ID NO: 16101 - protein, 24 aa, Artificial Sequence
  Quasi-synthetic sequence derived from human genome
LIFLRIKRRVKSVVLVILLGPLLF

SEQ ID NO: 16102 - protein, 24 aa, Artificial Sequence
  Quasi-synthetic sequence derived from human genome
WRRRSCWRKWKQLSRLQRNMILFL

SEQ ID NO: 16103 - protein, 24 aa, Artificial Sequence
  Quasi-synthetic sequence derived from human genome
RLKSMLRLLLVKKPSVRSLALKLL

SEQ ID NO: 16104 - protein, 24 aa, Artificial Sequence
  Quasi-synthetic sequence derived from human genome
ASWLRRKLRGKRRPVIAFCLLMIL

SEQ ID NO: 16105 - protein, 24 aa, Artificial Sequence
  Quasi-synthetic sequence derived from human genome
WRFYLSFRKLMRWILILVIALWFI

SEQ ID NO: 16106 - protein, 24 aa, Artificial Sequence
  Quasi-synthetic sequence derived from human genome
WLLLRKAPGGFMGPRWRRRWFVLK

SEQ ID NO: 16107 - protein, 24 aa, Artificial Sequence
  Quasi-synthetic sequence derived from human genome
VWRRLLRKRWVLALVFGLSLVYFL

SEQ ID NO: 16108 - protein, 24 aa, Artificial Sequence
  Quasi-synthetic sequence derived from human genome
LKIRRRKMNHHKYRKLVKKTRFLR

SEQ ID NO: 16109 - protein, 24 aa, Artificial Sequence
  Quasi-synthetic sequence derived from human genome
IRKKFRMMKIPKPILFGLNIAMKK

SEQ ID NO: 16110 - protein, 24 aa, Artificial Sequence
  Quasi-synthetic sequence derived from human genome
VLKTVILGLLCLLLLWWRRRKGSR

SEQ ID NO: 16111 - protein, 24 aa, Artificial Sequence
  Quasi-synthetic sequence derived from human genome
LRRRPARTLGLLLLVVLGFLVLRR

SEQ ID NO: 16112 - protein, 24 aa, Artificial Sequence
  Quasi-synthetic sequence derived from human genome
VVKILRVLRVLRPLRAINRAKGLK

SEQ ID NO: 16113 - protein, 24 aa, Artificial Sequence
  Quasi-synthetic sequence derived from human genome
FRMKLRNLFTKFIRKFGFELVKRL

SEQ ID NO: 16114 - protein, 24 aa, Artificial Sequence
  Quasi-synthetic sequence derived from human genome
LRKRFGGRRIRLYLSVLSLFLYIF

SEQ ID NO: 16115 - protein, 24 aa, Artificial Sequence
  Quasi-synthetic sequence derived from human genome
FVRQIQLLLWKNWTLRKRQKIRFV

SEQ ID NO: 16116 - protein, 24 aa, Artificial Sequence
  Quasi-synthetic sequence derived from human genome
SLAILRVIRLVRVFRIFKLSRHSK

SEQ ID NO: 16117 - protein, 24 aa, Artificial Sequence
  Quasi-synthetic sequence derived from human genome
LYVRRRKKLPSVLLFKKPSPFIFI

SEQ ID NO: 16118 - protein, 24 aa, Artificial Sequence
  Quasi-synthetic sequence derived from human genome
IRLARIGRILRLIKGAKGIRTLLF

SEQ ID NO: 16119 - protein, 24 aa, Artificial Sequence
  Quasi-synthetic sequence derived from human genome
KKRKKGLRIKGKRRRKKLILAKKF

SEQ ID NO: 16120 - protein, 24 aa, Artificial Sequence
  Quasi-synthetic sequence derived from human genome
WAKIRKLSFKRKHFLIKLHANILV

SEQ ID NO: 16121 - protein, 24 aa, Artificial Sequence
  Quasi-synthetic sequence derived from human genome
YFFSPTLFRVIRLARIGRILRLIR

SEQ ID NO: 16122 - protein, 24 aa, Artificial Sequence
  Quasi-synthetic sequence derived from human genome
RPAARRKARRLLKTVLMILLAFLV

SEQ ID NO: 16123 - protein, 24 aa, Artificial Sequence
  Quasi-synthetic sequence derived from human genome
FHLYRAPYFWIKRRILLLIPKWLY

SEQ ID NO: 16124 - protein, 24 aa, Artificial Sequence
  Quasi-synthetic sequence derived from human genome
WKVLKVVAKVIRALLRILCCLLKA

SEQ ID NO: 16125 - protein, 24 aa, Artificial Sequence
  Quasi-synthetic sequence derived from human genome
IRRGIGYLKLICFLIPFLLSLKKK

SEQ ID NO: 16126 - protein, 24 aa, Artificial Sequence
  Quasi-synthetic sequence derived from human genome
RIVLWGFRWLIFRIMLGAGLIKIR

SEQ ID NO: 16127 - protein, 24 aa, Artificial Sequence
  Quasi-synthetic sequence derived from human genome
ALLCVPWMLLFKPLVLRRQYLRRK

SEQ ID NO: 16128 - protein, 24 aa, Artificial Sequence
  Quasi-synthetic sequence derived from human genome
MLLCYRHLKTKRILRRNLLALIHR

SEQ ID NO: 16129 - protein, 24 aa, Artificial Sequence
  Quasi-synthetic sequence derived from human genome
KLRAACIRIQKTIRGWLLRKKYLR

SEQ ID NO: 16130 - protein, 24 aa, Artificial Sequence
  Quasi-synthetic sequence derived from human genome
GLKLILKRYKIGASRKTFWKRKKI

SEQ ID NO: 16131 - protein, 24 aa, Artificial Sequence
  Quasi-synthetic sequence derived from human genome
FRARFRRLWPCGRRRRHRARRALR

SEQ ID NO: 16132 - protein, 24 aa, Artificial Sequence
  Quasi-synthetic sequence derived from human genome
LRVLRLLRTLRPLRVISRAPGLKL

SEQ ID NO: 16133 - protein, 24 aa, Artificial Sequence
  Quasi-synthetic sequence derived from human genome
RWLGRWRRKRRWRRVRKAGPRDLL

SEQ ID NO: 16134 - protein, 24 aa, Artificial Sequence
  Quasi-synthetic sequence derived from human genome
WLLLGALLWMWWRRNRRGKLGRLA

SEQ ID NO: 16135 - protein, 24 aa, Artificial Sequence
  Quasi-synthetic sequence derived from human genome
KLKPPVWYLRSLVQNLLLIRRFKK

SEQ ID NO: 16136 - protein, 24 aa, Artificial Sequence
  Quasi-synthetic sequence derived from human genome
LWVIRVQKRHKMPRMKKLMRNRMK

SEQ ID NO: 16137 - protein, 24 aa, Artificial Sequence
  Quasi-synthetic sequence derived from human genome
RRRNTPFHERFFRFLLRKLYVFRR

SEQ ID NO: 16138 - protein, 24 aa, Artificial Sequence
  Quasi-synthetic sequence derived from human genome
MPRLPVKKIRKQMKLLLLLLLLSC

SEQ ID NO: 16139 - protein, 24 aa, Artificial Sequence
  Quasi-synthetic sequence derived from human genome
FFLPVFCLTVLYSLIGRKLWRRRR

SEQ ID NO: 16140 - protein, 24 aa, Artificial Sequence
  Quasi-synthetic sequence derived from human genome
KLKRKYWWKNLKMMIILGVICAII

SEQ ID NO: 16141 - protein, 24 aa, Artificial Sequence
  Quasi-synthetic sequence derived from human genome
IWVFRLKRRKRIARRLVDTLRNCF

SEQ ID NO: 16142 - protein, 24 aa, Artificial Sequence
  Quasi-synthetic sequence derived from human genome
RLCLRLLLLLGYRRRCPPLLRGLV

SEQ ID NO: 16143 - protein, 24 aa, Artificial Sequence
  Quasi-synthetic sequence derived from human genome
SKRWTHLVRLLRLIILIRIFHLLH

SEQ ID NO: 16144 - protein, 24 aa, Artificial Sequence
  Quasi-synthetic sequence derived from human genome
WTHLVRLLRLIILIRIFHLLHQKR

SEQ ID NO: 16145 - protein, 24 aa, Artificial Sequence
  Quasi-synthetic sequence derived from human genome
FLVIFPMFTFPKKLPPRHKKKKKK

SEQ ID NO: 16146 - protein, 24 aa, Artificial Sequence
  Quasi-synthetic sequence derived from human genome
ARLRFLKLKRQTKVLLTLLLVFGI

SEQ ID NO: 16147 - protein, 24 aa, Artificial Sequence
  Quasi-synthetic sequence derived from human genome
FFLLVLILSSVFLFRLFKRRQGRI

SEQ ID NO: 16148 - protein, 24 aa, Artificial Sequence
  Quasi-synthetic sequence derived from human genome
FMFSIWRFAWRKSIKKYHAWRSRR

SEQ ID NO: 16149 - protein, 24 aa, Artificial Sequence
  Quasi-synthetic sequence derived from human genome
RFRKFPFFTRPLLSKWCPKSLFKK

SEQ ID NO: 16150 - protein, 24 aa, Artificial Sequence
  Quasi-synthetic sequence derived from human genome
PLRILRKRNKALRKIRKLQKQGLL

SEQ ID NO: 16151 - protein, 24 aa, Artificial Sequence
  Quasi-synthetic sequence derived from human genome
GMLMLLPFLLRQHKVWRKCRMRIF

SEQ ID NO: 16152 - protein, 24 aa, Artificial Sequence
  Quasi-synthetic sequence derived from human genome
ARMPEKVTWMRRMRILRRLLRRYR

SEQ ID NO: 16153 - protein, 24 aa, Artificial Sequence
  Quasi-synthetic sequence derived from human genome
KQNIFHFLYRKNRSRIPLLRKRWF

SEQ ID NO: 16154 - protein, 24 aa, Artificial Sequence
  Quasi-synthetic sequence derived from human genome
VGKVGQVLRVMRLMRIFRILKLAR

SEQ ID NO: 16155 - protein, 24 aa, Artificial Sequence
  Quasi-synthetic sequence derived from human genome
WLRKSPPEKKLKRYAWKRRWFVLR

SEQ ID NO: 16156 - protein, 24 aa, Artificial Sequence
  Quasi-synthetic sequence derived from human genome
RRKGVWLRLRKILFCVLGLYIAIP

SEQ ID NO: 16157 - protein, 24 aa, Artificial Sequence
  Quasi-synthetic sequence derived from human genome
FILWRRFRWAIILFIILFILLLFL

SEQ ID NO: 16158 - protein, 24 aa, Artificial Sequence
  Quasi-synthetic sequence derived from human genome
FLFVNKRLVLRTKLHKLIDFLLRK

SEQ ID NO: 16159 - protein, 24 aa, Artificial Sequence
  Quasi-synthetic sequence derived from human genome
LKTFVFFIWRRYWRTLVLLLLVLL

SEQ ID NO: 16160 - protein, 24 aa, Artificial Sequence
  Quasi-synthetic sequence derived from human genome
RRPAGSRLRLLLLLLLPPLLLLLR

SEQ ID NO: 16161 - protein, 24 aa, Artificial Sequence
  Quasi-synthetic sequence derived from human genome
LLGPKLRRFLKPQGHPRLLLWFKR

SEQ ID NO: 16162 - protein, 24 aa, Artificial Sequence
  Quasi-synthetic sequence derived from human genome
RLMRVLKLVRFLPALQRQLVVLMK

SEQ ID NO: 16163 - protein, 24 aa, Artificial Sequence
  Quasi-synthetic sequence derived from human genome
FFIKRRFRSLRHKIILLQSRARGY

SEQ ID NO: 16164 - protein, 24 aa, Artificial Sequence
  Quasi-synthetic sequence derived from human genome
LRVIRLVRVFRIFKLSRHSKGLQI

SEQ ID NO: 16165 - protein, 24 aa, Artificial Sequence
  Quasi-synthetic sequence derived from human genome
LRSLKQNIFLFYVKLRWLLKHWRQ

SEQ ID NO: 16166 - protein, 24 aa, Artificial Sequence
  Quasi-synthetic sequence derived from human genome
PIRRRSKFANLGRIFKPWKWRKKK

SEQ ID NO: 16167 - protein, 24 aa, Artificial Sequence
  Quasi-synthetic sequence derived from human genome
LRLLRGLRRRNVQKKVALAKKLLA

SEQ ID NO: 16168 - protein, 24 aa, Artificial Sequence
  Quasi-synthetic sequence derived from human genome
IRAFMAVKNWPWMRLFFKIKPLVK

SEQ ID NO: 16169 - protein, 24 aa, Artificial Sequence
  Quasi-synthetic sequence derived from human genome
WMLFKALLIIYGILVIFRRMMKSR

SEQ ID NO: 16170 - protein, 24 aa, Artificial Sequence
  Quasi-synthetic sequence derived from human genome
KKARSRTVAKKLVVFRPRLFLLCF

SEQ ID NO: 16171 - protein, 24 aa, Artificial Sequence
  Quasi-synthetic sequence derived from human genome
KKMLRKALKLLNRIFPYNLISLFL

SEQ ID NO: 16172 - protein, 24 aa, Artificial Sequence
  Quasi-synthetic sequence derived from human genome
VVAILLLLALALGLLVYRKRRAKR

SEQ ID NO: 16173 - protein, 24 aa, Artificial Sequence
  Quasi-synthetic sequence derived from human genome
LPINPTIIRIMRVLRIARVLKLLK

SEQ ID NO: 16174 - protein, 24 aa, Artificial Sequence
  Quasi-synthetic sequence derived from human genome
LFILVIVGLTFAVYVRRKSIKKKR

SEQ ID NO: 16175 - protein, 24 aa, Artificial Sequence
  Quasi-synthetic sequence derived from human genome
VAFVLLLFLLLFLLLRRQRHSKHR

SEQ ID NO: 16176 - protein, 24 aa, Artificial Sequence
  Quasi-synthetic sequence derived from human genome
LLSLLLILKAGRRWNKYFKSRRPL

SEQ ID NO: 16177 - protein, 24 aa, Artificial Sequence
  Quasi-synthetic sequence derived from human genome
AQKRMRVKKLPMILALHLKRFKYM

SEQ ID NO: 16178 - protein, 24 aa, Artificial Sequence
  Quasi-synthetic sequence derived from human genome
SKIMKKKKKVLVWNRVYKVISRML

SEQ ID NO: 16179 - protein, 24 aa, Artificial Sequence
  Quasi-synthetic sequence derived from human genome
LRLFRMLRIFKLGKYWPTFQILMW

SEQ ID NO: 16180 - protein, 24 aa, Artificial Sequence
  Quasi-synthetic sequence derived from human genome
LILILLIKKLIIFILKKTREKKKE

SEQ ID NO: 16181 - protein, 24 aa, Artificial Sequence
  Quasi-synthetic sequence derived from human genome
FRDTFRLLLLCRWDKRRWRKIPKR

SEQ ID NO: 16182 - protein, 24 aa, Artificial Sequence
  Quasi-synthetic sequence derived from human genome
IFVVTKFCLFCFWKFARKGKKGKR

SEQ ID NO: 16183 - protein, 24 aa, Artificial Sequence
  Quasi-synthetic sequence derived from human genome
LKTYLKRFKVMKPKVLRSWCRQIL

SEQ ID NO: 16184 - protein, 24 aa, Artificial Sequence
  Quasi-synthetic sequence derived from human genome
RFLLGRLPWRVASGARRFRRWLNR

SEQ ID NO: 16185 - protein, 24 aa, Artificial Sequence
  Quasi-synthetic sequence derived from human genome
LRVLRLLRTLRPLRVISRAQGLKL

SEQ ID NO: 16186 - protein, 24 aa, Artificial Sequence
  Quasi-synthetic sequence derived from human genome
VNIKAGKAFLRLKRKFIQMRRPFL

SEQ ID NO: 16187 - protein, 24 aa, Artificial Sequence
  Quasi-synthetic sequence derived from human genome
IRKRLRCRRKTVLVLMCILTAYVL

SEQ ID NO: 16188 - protein, 24 aa, Artificial Sequence
  Quasi-synthetic sequence derived from human genome
FISMAFKLLILLIGTWALFFRKRR

SEQ ID NO: 16189 - protein, 24 aa, Artificial Sequence
  Quasi-synthetic sequence derived from human genome
RWLLRTKRLHWSRLLFLLGMLIIG

SEQ ID NO: 16190 - protein, 24 aa, Artificial Sequence
  Quasi-synthetic sequence derived from human genome
VLRALRLLRIFKITKYWASLRNLV

SEQ ID NO: 16191 - protein, 24 aa, Artificial Sequence
  Quasi-synthetic sequence derived from human genome
LRFSVVKRGRKKLLYIFKQPFMRP

SEQ ID NO: 16192 - protein, 24 aa, Artificial Sequence
  Quasi-synthetic sequence derived from human genome
LFIITKCCLFCFWKFARKGKKGKR

SEQ ID NO: 16193 - protein, 24 aa, Artificial Sequence
  Quasi-synthetic sequence derived from human genome
YLLLRKILLRKFCQMRKRRLREQA

SEQ ID NO: 16194 - protein, 24 aa, Artificial Sequence
  Quasi-synthetic sequence derived from human genome
LLKIANFSNLIFLRLKRRVKSVIL

SEQ ID NO: 16195 - protein, 24 aa, Artificial Sequence
  Quasi-synthetic sequence derived from human genome
RIFGKLVFLPLRLVWKEVILRKIL

SEQ ID NO: 16196 - protein, 24 aa, Artificial Sequence
  Quasi-synthetic sequence derived from human genome
LGVAIHLCCRRRRARLRFMKQLRL

SEQ ID NO: 16197 - protein, 24 aa, Artificial Sequence
  Quasi-synthetic sequence derived from human genome
RIRILCCLTFLVKVKSKALLKNRL

SEQ ID NO: 16198 - protein, 24 aa, Artificial Sequence
  Quasi-synthetic sequence derived from human genome
KKKLRRLLKYMFIRDYKSKIVKGI

SEQ ID NO: 16199 - protein, 24 aa, Artificial Sequence
  Quasi-synthetic sequence derived from human genome
LALLVLILLCLLIYYCRRRCLKPR

SEQ ID NO: 16200 - protein, 24 aa, Artificial Sequence
  Quasi-synthetic sequence derived from human genome
LKKRKWPLKGWHKRFFYLDKGILK

SEQ ID NO: 16201 - protein, 24 aa, Artificial Sequence
  Quasi-synthetic sequence derived from human genome
VLRRQILLPFRKPLIIFTPKSLLR

SEQ ID NO: 16202 - protein, 24 aa, Artificial Sequence
  Quasi-synthetic sequence derived from human genome
ILGLWKIARKWMRRKMGKWPAVVV

SEQ ID NO: 16203 - protein, 24 aa, Artificial Sequence
  Quasi-synthetic sequence derived from human genome
AMSLAILRVIRLVRVFRIFKLSRH

SEQ ID NO: 16204 - protein, 24 aa, Artificial Sequence
  Quasi-synthetic sequence derived from human genome
RLKLFFIKNQRSSLRIRLFNFSLK

SEQ ID NO: 16205 - protein, 24 aa, Artificial Sequence
  Quasi-synthetic sequence derived from human genome
SLVLRRKALAPRLLLRLLRSPTLR

SEQ ID NO: 16206 - protein, 24 aa, Artificial Sequence
  Quasi-synthetic sequence derived from human genome
VKILRVLRVLRPLRAINRAKGLKH

SEQ ID NO: 16207 - protein, 24 aa, Artificial Sequence
  Quasi-synthetic sequence derived from human genome
KQGYVKIRSRKLGIFRRCWLVFKK

SEQ ID NO: 16208 - protein, 24 aa, Artificial Sequence
  Quasi-synthetic sequence derived from human genome
PIIVLLLQKAWRGTLARWRCRRLR

SEQ ID NO: 16209 - protein, 24 aa, Artificial Sequence
  Quasi-synthetic sequence derived from human genome
YRLRRVIAAFYFPKREKKRILFLY

SEQ ID NO: 16210 - protein, 24 aa, Artificial Sequence
  Quasi-synthetic sequence derived from human genome
KIWLRLRGLRKYKKTSQRLRSLVK

SEQ ID NO: 16211 - protein, 24 aa, Artificial Sequence
  Quasi-synthetic sequence derived from human genome
RIIWHKFKQWVIPWHLNKRYNRKR

SEQ ID NO: 16212 - protein, 24 aa, Artificial Sequence
  Quasi-synthetic sequence derived from human genome
SLWSRFKKKCFKLTRKMPIIGRKI

SEQ ID NO: 16213 - protein, 24 aa, Artificial Sequence
  Quasi-synthetic sequence derived from human genome
FVAAGLFAYVLRRRRKKLPFRSKR

SEQ ID NO: 16214 - protein, 24 aa, Artificial Sequence
  Quasi-synthetic sequence derived from human genome
RRISLRKKLKLPIGKRNWLKRSSL

SEQ ID NO: 16215 - protein, 24 aa, Artificial Sequence
  Quasi-synthetic sequence derived from human genome
RLCIRKFFPKKKCFVFDLPIHRRK

SEQ ID NO: 16216 - protein, 24 aa, Artificial Sequence
  Quasi-synthetic sequence derived from human genome
WMMAGIPLLLFRWKPLWGVRLRLR

SEQ ID NO: 16217 - protein, 24 aa, Artificial Sequence
  Quasi-synthetic sequence derived from human genome
LIQIFGRKSYPMLKLVRLKLWFPR

SEQ ID NO: 16218 - protein, 24 aa, Artificial Sequence
  Quasi-synthetic sequence derived from human genome
KVARKFWWKNVKMIVLICVIVFII

SEQ ID NO: 16219 - protein, 24 aa, Artificial Sequence
  Quasi-synthetic sequence derived from human genome
RIIKTLSKTKNLRLLILVGRLFMW

SEQ ID NO: 16220 - protein, 24 aa, Artificial Sequence
  Quasi-synthetic sequence derived from human genome
LVIFVLVHSFLKKLLGKKLTRCLK

SEQ ID NO: 16221 - protein, 24 aa, Artificial Sequence
  Quasi-synthetic sequence derived from human genome
FRRGRSFLLRSWHHLMKRVQIKIF

SEQ ID NO: 16222 - protein, 24 aa, Artificial Sequence
  Quasi-synthetic sequence derived from human genome
LKVFYKFINLNRYKIRHTRKKPFK

SEQ ID NO: 16223 - protein, 24 aa, Artificial Sequence
  Quasi-synthetic sequence derived from human genome
KVKKIWQKQFRWPKNRLQILKFCK

SEQ ID NO: 16224 - protein, 24 aa, Artificial Sequence
  Quasi-synthetic sequence derived from human genome
VTLLVRYRHYFRLLVRTVLLRSLR

SEQ ID NO: 16225 - protein, 24 aa, Artificial Sequence
  Quasi-synthetic sequence derived from human genome
MVPILLLGTPLHLLHRHRRRLRRR

SEQ ID NO: 16226 - protein, 24 aa, Artificial Sequence
  Quasi-synthetic sequence derived from human genome
LIFCLIVLSLSTFHIHKRRMKKRK

SEQ ID NO: 16227 - protein, 24 aa, Artificial Sequence
  Quasi-synthetic sequence derived from human genome
RRRRRREYCKFALLLVLYTLVLLL

SEQ ID NO: 16228 - protein, 24 aa, Artificial Sequence
  Quasi-synthetic sequence derived from human genome
VSKKRLISVKNYRMIKKRKGLRLI

SEQ ID NO: 16229 - protein, 24 aa, Artificial Sequence
  Quasi-synthetic sequence derived from human genome
KLSRKQLVLRRGLLLLGVFLILLV

SEQ ID NO: 16230 - protein, 24 aa, Artificial Sequence
  Quasi-synthetic sequence derived from human genome
RFIRHKCKQRFTKITQYLIRIRKL

SEQ ID NO: 16231 - protein, 24 aa, Artificial Sequence
  Quasi-synthetic sequence derived from human genome
QYLIRIRKLTLKRQRKLVPLSKKV

SEQ ID NO: 16232 - protein, 24 aa, Artificial Sequence
  Quasi-synthetic sequence derived from human genome
FRRHIRQHSALTRLRLRNVFRRFL

SEQ ID NO: 16233 - protein, 24 aa, Artificial Sequence
  Quasi-synthetic sequence derived from human genome
FYFLYGKTRSRIPLLRKRRFQLCR

SEQ ID NO: 16234 - protein, 24 aa, Artificial Sequence
  Quasi-synthetic sequence derived from human genome
RLKTLRRPRVRDRLPILLQRRMRV

SEQ ID NO: 16235 - protein, 24 aa, Artificial Sequence
  Quasi-synthetic sequence derived from human genome
LLRCPSKKKYKAIRLIFVIMAVFF

SEQ ID NO: 16236 - protein, 24 aa, Artificial Sequence
  Quasi-synthetic sequence derived from human genome
LATLGVALLFIVRKKRKEKRLKRL

SEQ ID NO: 16237 - protein, 24 aa, Artificial Sequence
  Quasi-synthetic sequence derived from human genome
KKNIFLLFKKLCSFRYRRDLLRLS

SEQ ID NO: 16238 - protein, 24 aa, Artificial Sequence
  Quasi-synthetic sequence derived from human genome
LRMIRKHVRKNYMKFKAKFSLIQF

SEQ ID NO: 16239 - protein, 24 aa, Artificial Sequence
  Quasi-synthetic sequence derived from human genome
VLLLLFVISITTIIVIFLNRRRRR

SEQ ID NO: 16240 - protein, 24 aa, Artificial Sequence
  Quasi-synthetic sequence derived from human genome
VLRLLRALRVLYVMRLARHSLGLR

SEQ ID NO: 16241 - protein, 24 aa, Artificial Sequence
  Quasi-synthetic sequence derived from human genome
LSRLLFFLLGFLRIRVRGQRASRL

SEQ ID NO: 16242 - protein, 24 aa, Artificial Sequence
  Quasi-synthetic sequence derived from human genome
VILLLLLLLLLFLILRHRRQGKHW

SEQ ID NO: 16243 - protein, 24 aa, Artificial Sequence
  Quasi-synthetic sequence derived from human genome
CLLGRLLIYKQGRKLFPIKLKNKK

SEQ ID NO: 16244 - protein, 24 aa, Artificial Sequence
  Quasi-synthetic sequence derived from human genome
RAGVTLRVLRMMRIFWVIKLARHF

SEQ ID NO: 16245 - protein, 24 aa, Artificial Sequence
  Quasi-synthetic sequence derived from human genome
RLFRAARLIKLLRQGYTIRILLWT

SEQ ID NO: 16246 - protein, 24 aa, Artificial Sequence
  Quasi-synthetic sequence derived from human genome
RLARIGRILRLVRAARGIRTLLFA

SEQ ID NO: 16247 - protein, 24 aa, Artificial Sequence
  Quasi-synthetic sequence derived from human genome
RYLRVKLTVRYKRVTTHRRIWLAL

SEQ ID NO: 16248 - protein, 24 aa, Artificial Sequence
  Quasi-synthetic sequence derived from human genome
LAILLMVSLLLLSLWKLWRVKKFL

SEQ ID NO: 16249 - protein, 24 aa, Artificial Sequence
  Quasi-synthetic sequence derived from human genome
KALKKKKKMPKLRFASRIRKIRKK

SEQ ID NO: 16250 - protein, 24 aa, Artificial Sequence
  Quasi-synthetic sequence derived from human genome
LPMKLLRKKIEKRNLKLRQRNLKF

SEQ ID NO: 16251 - protein, 24 aa, Artificial Sequence
  Quasi-synthetic sequence derived from human genome
GMNRVFLQRLLWLLRLLFPRVLCR

SEQ ID NO: 16252 - protein, 24 aa, Artificial Sequence
  Quasi-synthetic sequence derived from human genome
QNMSLAILRIIRLVRVFRIFKLSR

SEQ ID NO: 16253 - protein, 24 aa, Artificial Sequence
  Quasi-synthetic sequence derived from human genome
NFFFFFSVGRKFKKFNKVRVVRAL

SEQ ID NO: 16254 - protein, 24 aa, Artificial Sequence
  Quasi-synthetic sequence derived from human genome
KSFLILPFQRITRLKLLLQNILKR

SEQ ID NO: 16255 - protein, 24 aa, Artificial Sequence
  Quasi-synthetic sequence derived from human genome
KKHTLIRFLPRPIRQQLLYKRRYI

SEQ ID NO: 16256 - protein, 24 aa, Artificial Sequence
  Quasi-synthetic sequence derived from human genome
LIGIFNRSFRTGIKRRILLLIPKW

SEQ ID NO: 16257 - protein, 24 aa, Artificial Sequence
  Quasi-synthetic sequence derived from human genome
RLIILIRIFHLLHQKRQLEKLMRR

SEQ ID NO: 16258 - protein, 24 aa, Artificial Sequence
  Quasi-synthetic sequence derived from human genome
LIQVCLYFYCKFLWRCLKFVMRKL

SEQ ID NO: 16259 - protein, 24 aa, Artificial Sequence
  Quasi-synthetic sequence derived from human genome
RHRGLRPRRQKALRMILAVVLVFF

SEQ ID NO: 16260 - protein, 24 aa, Artificial Sequence
  Quasi-synthetic sequence derived from human genome
IQKYWRMYVVRRRYKIRRAATIVL

SEQ ID NO: 16261 - protein, 24 aa, Artificial Sequence
  Quasi-synthetic sequence derived from human genome
LPRQRARKRTKVLSLAKRILRFKK

SEQ ID NO: 16262 - protein, 24 aa, Artificial Sequence
  Quasi-synthetic sequence derived from human genome
YFRLKKVVKWYLSGFYKKPKGLKK

SEQ ID NO: 16263 - protein, 24 aa, Artificial Sequence
  Quasi-synthetic sequence derived from human genome
FKAAEFAKLSIKWMIKIRKRYLKR

SEQ ID NO: 16264 - protein, 24 aa, Artificial Sequence
  Quasi-synthetic sequence derived from human genome
GPLAPRPRRRRSLRRLFSRFLLAL

SEQ ID NO: 16265 - protein, 24 aa, Artificial Sequence
  Quasi-synthetic sequence derived from human genome
VLRALRLLRIFKVTKYWASLRNLV

SEQ ID NO: 16266 - protein, 24 aa, Artificial Sequence
  Quasi-synthetic sequence derived from human genome
LWVRRKAGYKKKLWKKTPARKKRL

SEQ ID NO: 16267 - protein, 24 aa, Artificial Sequence
  Quasi-synthetic sequence derived from human genome
KLLRHLVPAAALRRKRKALWAHLF

SEQ ID NO: 16268 - protein, 24 aa, Artificial Sequence
  Quasi-synthetic sequence derived from human genome
RRFRLSSHFIRHRRAHMRRRLYIC

SEQ ID NO: 16269 - protein, 24 aa, Artificial Sequence
  Quasi-synthetic sequence derived from human genome
MRKNMRVLSRTSKFRRLRQLLRRR

SEQ ID NO: 16270 - protein, 24 aa, Artificial Sequence
  Quasi-synthetic sequence derived from human genome
KKAIKYQSKARRKLMFIIICVIVL

SEQ ID NO: 16271 - protein, 24 aa, Artificial Sequence
  Quasi-synthetic sequence derived from human genome
LLVFVPHMRRFLSRKKIRHHIYVL

SEQ ID NO: 16272 - protein, 24 aa, Artificial Sequence
  Quasi-synthetic sequence derived from human genome
KIPIFSLFRKWKAFSVWRKNVRSK

SEQ ID NO: 16273 - protein, 24 aa, Artificial Sequence
  Quasi-synthetic sequence derived from human genome
RRFLGKKYRKYYYKSPKPLLRPFL

SEQ ID NO: 16274 - protein, 24 aa, Artificial Sequence
  Quasi-synthetic sequence derived from human genome
VILQKYARAWLARRRFQSIRRFVL

SEQ ID NO: 16275 - protein, 24 aa, Artificial Sequence
  Quasi-synthetic sequence derived from human genome
VLLALCLLLPLLLLGGWKRWRRGR

SEQ ID NO: 16276 - protein, 24 aa, Artificial Sequence
  Quasi-synthetic sequence derived from human genome
LKHAGKWSLRWFLSPRWILQFRRW

SEQ ID NO: 16277 - protein, 24 aa, Artificial Sequence
  Quasi-synthetic sequence derived from human genome
GVLLTLLLIAFIFLIIKSYRKYRR

SEQ ID NO: 16278 - protein, 24 aa, Artificial Sequence
  Quasi-synthetic sequence derived from human genome
LKKIIKRKHTLPNYKIRFKPFFPY

SEQ ID NO: 16279 - protein, 24 aa, Artificial Sequence
  Quasi-synthetic sequence derived from human genome
FRLARRRKKILFYCHFPDLLLTKR

SEQ ID NO: 16280 - protein, 24 aa, Artificial Sequence
  Quasi-synthetic sequence derived from human genome
MAPRARRRRPLFALLLLCALLARL

SEQ ID NO: 16281 - protein, 24 aa, Artificial Sequence
  Quasi-synthetic sequence derived from human genome
RWVRQQGPRVRRGISRLWLRVLLR

SEQ ID NO: 16282 - protein, 24 aa, Artificial Sequence
  Quasi-synthetic sequence derived from human genome
AIAKVRFLKLKKERKSLWTILLLF

SEQ ID NO: 16283 - protein, 24 aa, Artificial Sequence
  Quasi-synthetic sequence derived from human genome
IRAFMGVKNWPWMKLYFKIKPLLK

SEQ ID NO: 16284 - protein, 24 aa, Artificial Sequence
  Quasi-synthetic sequence derived from human genome
KLLPLRTFRVFRALKAISVVSRLK

SEQ ID NO: 16285 - protein, 24 aa, Artificial Sequence
  Quasi-synthetic sequence derived from human genome
VLNINLKRKFIKKRIIIISNYSKR

SEQ ID NO: 16286 - protein, 24 aa, Artificial Sequence
  Quasi-synthetic sequence derived from human genome
MRARRGLLRLPRRSLLAALFFFSL

SEQ ID NO: 16287 - protein, 24 aa, Artificial Sequence
  Quasi-synthetic sequence derived from human genome
LVIQKYWRRVLAQRKLLMLKKEKL

SEQ ID NO: 16288 - protein, 24 aa, Artificial Sequence
  Quasi-synthetic sequence derived from human genome
LFVLLLVVRRRRREQRLKRLRDAK

SEQ ID NO: 16289 - protein, 24 aa, Artificial Sequence
  Quasi-synthetic sequence derived from human genome
LLWRLPNVLIVQLKRFSFRSFIWR

SEQ ID NO: 16290 - protein, 24 aa, Artificial Sequence
  Quasi-synthetic sequence derived from human genome
YLIMIFLGLYINFRHLYKQRRRRY

SEQ ID NO: 16291 - protein, 24 aa, Artificial Sequence
  Quasi-synthetic sequence derived from human genome
KTARLFSKKIFCCLFFITLFFIRL

SEQ ID NO: 16292 - protein, 24 aa, Artificial Sequence
  Quasi-synthetic sequence derived from human genome
KKNRKMLVILILFVIIIVLIVVLV

SEQ ID NO: 16293 - protein, 24 aa, Artificial Sequence
  Quasi-synthetic sequence derived from human genome
RRLHLYSGHKLKWWIGYLQRKFKR

SEQ ID NO: 16294 - protein, 24 aa, Artificial Sequence
  Quasi-synthetic sequence derived from human genome
LLVVIILILAFWVLPKYKTRKAMR

SEQ ID NO: 16295 - protein, 24 aa, Artificial Sequence
  Quasi-synthetic sequence derived from human genome
LVLVIVGIGVLILLVRYRKCIKLK

SEQ ID NO: 16296 - protein, 24 aa, Artificial Sequence
  Quasi-synthetic sequence derived from human genome
VRAVLRLRRRVCVLRKRRLLQPGG

SEQ ID NO: 16297 - protein, 24 aa, Artificial Sequence
  Quasi-synthetic sequence derived from human genome
LRFLKLRRERRALLCLLLVLGIAF

SEQ ID NO: 16298 - protein, 24 aa, Artificial Sequence
  Quasi-synthetic sequence derived from human genome
MKLFNKAKVNVNLLIFLLNKKFLR

SEQ ID NO: 16299 - protein, 24 aa, Artificial Sequence
  Quasi-synthetic sequence derived from human genome
RRSLVKFRSLVHAYVSRRRYLKLR

SEQ ID NO: 16300 - protein, 24 aa, Artificial Sequence
  Quasi-synthetic sequence derived from human genome
KPARSKLSLIRKFRLFPRPQVKLF

SEQ ID NO: 16301 - protein, 24 aa, Artificial Sequence
  Quasi-synthetic sequence derived from human genome
LKKFLRKLHLPRDLPQKKKLKYMK

SEQ ID NO: 16302 - protein, 24 aa, Artificial Sequence
  Quasi-synthetic sequence derived from human genome
RIARFRFRAFHFLNRFPSVYLRCK

SEQ ID NO: 16303 - protein, 24 aa, Artificial Sequence
  Quasi-synthetic sequence derived from human genome
KWRLPRISARAPYRLRRLRRHTYW

SEQ ID NO: 16304 - protein, 24 aa, Artificial Sequence
  Quasi-synthetic sequence derived from human genome
VLQRRKFLQMKRRKYGFIYKTHLF

SEQ ID NO: 16305 - protein, 24 aa, Artificial Sequence
  Quasi-synthetic sequence derived from human genome
VILSILINFILFINILRILMRKLR

SEQ ID NO: 16306 - protein, 24 aa, Artificial Sequence
  Quasi-synthetic sequence derived from human genome
RFLRIMMLSVLRNTKTPVKFWLLK

SEQ ID NO: 16307 - protein, 24 aa, Artificial Sequence
  Quasi-synthetic sequence derived from human genome
MRRLRRLAHLVLFCPFSKRLQGRL

SEQ ID NO: 16308 - protein, 24 aa, Artificial Sequence
  Quasi-synthetic sequence derived from human genome
NFLIFIRILGILLSKLRTRQMRCR

SEQ ID NO: 16309 - protein, 24 aa, Artificial Sequence
  Quasi-synthetic sequence derived from human genome
MFFSLRLLINESLIKKLRLFFRKF

SEQ ID NO: 16310 - protein, 24 aa, Artificial Sequence
  Quasi-synthetic sequence derived from human genome
RPHLLKKKILGRVWWLMPVVLALW

SEQ ID NO: 16311 - protein, 24 aa, Artificial Sequence
  Quasi-synthetic sequence derived from human genome
VLAMFFLLVLILSSVFLFRLFKRR

SEQ ID NO: 16312 - protein, 24 aa, Artificial Sequence
  Quasi-synthetic sequence derived from human genome
VVLLLLLLLLLFLILRHRRQGKHW

SEQ ID NO: 16313 - protein, 24 aa, Artificial Sequence
  Quasi-synthetic sequence derived from human genome
KSWLMKALFKTFYMVLLKSFLLKL

SEQ ID NO: 16314 - protein, 24 aa, Artificial Sequence
  Quasi-synthetic sequence derived from human genome
ILVVLLAIFLYLLRLRRIHHRQTR

SEQ ID NO: 16315 - protein, 24 aa, Artificial Sequence
  Quasi-synthetic sequence derived from human genome
RRPRGSTARTLLRLLLRLLLFLGL

SEQ ID NO: 16316 - protein, 24 aa, Artificial Sequence
  Quasi-synthetic sequence derived from human genome
MLLPFLLRHHKVWRKCKMRIFTVA

SEQ ID NO: 16317 - protein, 24 aa, Artificial Sequence
  Quasi-synthetic sequence derived from human genome
LKMMHIAATLIQRRFRTLMMRRRF

SEQ ID NO: 16318 - protein, 24 aa, Artificial Sequence
  Quasi-synthetic sequence derived from human genome
RYSLQKLRLVRWLLKKVFQCRRAT

SEQ ID NO: 16319 - protein, 24 aa, Artificial Sequence
  Quasi-synthetic sequence derived from human genome
RGWLLRKKYLRMRKAAITMQRYVR

SEQ ID NO: 16320 - protein, 24 aa, Artificial Sequence
  Quasi-synthetic sequence derived from human genome
KKLPGVMLFKKKKTRKLKIALALS

SEQ ID NO: 16321 - protein, 24 aa, Artificial Sequence
  Quasi-synthetic sequence derived from human genome
LVLLLLALILPLLFYLRKRNKTGK

SEQ ID NO: 16322 - protein, 24 aa, Artificial Sequence
  Quasi-synthetic sequence derived from human genome
KKNPKLINALRRCFFWRFMFYGIF

SEQ ID NO: 16323 - protein, 24 aa, Artificial Sequence
  Quasi-synthetic sequence derived from human genome
RFRSAVRVSIAISRMKFLVRRWHR

SEQ ID NO: 16324 - protein, 24 aa, Artificial Sequence
  Quasi-synthetic sequence derived from human genome
ILLVVVLGVVFGILIKRRQQKIRK

SEQ ID NO: 16325 - protein, 24 aa, Artificial Sequence
  Quasi-synthetic sequence derived from human genome
SIPRKRISLKRPKKCFRNLFHIRR

SEQ ID NO: 16326 - protein, 24 aa, Artificial Sequence
  Quasi-synthetic sequence derived from human genome
PSIVILGKIILFLPCISRKLKRIK

SEQ ID NO: 16327 - protein, 24 aa, Artificial Sequence
  Quasi-synthetic sequence derived from human genome
MLLLLVFLVACFINRKCQKQRKKK

SEQ ID NO: 16328 - protein, 24 aa, Artificial Sequence
  Quasi-synthetic sequence derived from human genome
KKKVKRLLSFQRYFHASRLLRGII

SEQ ID NO: 16329 - protein, 24 aa, Artificial Sequence
  Quasi-synthetic sequence derived from human genome
TWIFWKTWIFWKTWIFRKTYIGWK

SEQ ID NO: 16330 - protein, 24 aa, Artificial Sequence
  Quasi-synthetic sequence derived from human genome
VIRMLIMPRRNFPIAMIRPKWKTR

SEQ ID NO: 16331 - protein, 24 aa, Artificial Sequence
  Quasi-synthetic sequence derived from human genome
KMLFWVLGLLILCGFLWTRKGKLK

SEQ ID NO: 16332 - protein, 24 aa, Artificial Sequence
  Quasi-synthetic sequence derived from human genome
IMGYLRIIRFLPLFKIIVPILIRI

SEQ ID NO: 16333 - protein, 24 aa, Artificial Sequence
  Quasi-synthetic sequence derived from human genome
LAFFVVVSLVCLILLVKIKLKQRR

SEQ ID NO: 16334 - protein, 24 aa, Artificial Sequence
  Quasi-synthetic sequence derived from human genome
AKLSRKQLVLRRGLLLLGVFLILL

SEQ ID NO: 16335 - protein, 24 aa, Artificial Sequence
  Quasi-synthetic sequence derived from human genome
WYVKAFLALLRPFISSKFTRKIRF

SEQ ID NO: 16336 - protein, 24 aa, Artificial Sequence
  Quasi-synthetic sequence derived from human genome
LAITALLLLMVACRLRLVKQKLKK

SEQ ID NO: 16337 - protein, 24 aa, Artificial Sequence
  Quasi-synthetic sequence derived from human genome
RRMFRVRNCLRGLGLFLLVFSFFF

SEQ ID NO: 16338 - protein, 24 aa, Artificial Sequence
  Quasi-synthetic sequence derived from human genome
RRLLPPLLLLLLSLPPRARAKYVR

SEQ ID NO: 16339 - protein, 24 aa, Artificial Sequence
  Quasi-synthetic sequence derived from human genome
QIKRKAPRGFLKRVFKRKKPQLRL

SEQ ID NO: 16340 - protein, 24 aa, Artificial Sequence
  Quasi-synthetic sequence derived from human genome
LFRQNRFYDAKVRYKRALLLLRRR

SEQ ID NO: 16341 - protein, 24 aa, Artificial Sequence
  Quasi-synthetic sequence derived from human genome
KKWCRSILRRTSLILARVFGLHLR

SEQ ID NO: 16342 - protein, 24 aa, Artificial Sequence
  Quasi-synthetic sequence derived from human genome
CIFLVFVIVLLALRLWRWHKSRLL

SEQ ID NO: 16343 - protein, 24 aa, Artificial Sequence
  Quasi-synthetic sequence derived from human genome
LFFRKRRADMPRVFVFRALLLVLI

SEQ ID NO: 16344 - protein, 24 aa, Artificial Sequence
  Quasi-synthetic sequence derived from human genome
RNFLKLLKPPLLWSHGLIRIIRAK

SEQ ID NO: 16345 - protein, 24 aa, Artificial Sequence
  Quasi-synthetic sequence derived from human genome
RRVLVLMASKHAFLALCALRFKRK

SEQ ID NO: 16346 - protein, 24 aa, Artificial Sequence
  Quasi-synthetic sequence derived from human genome
RALRGLSYRSLRRRVRRLRRLTAR

SEQ ID NO: 16347 - protein, 24 aa, Artificial Sequence
  Quasi-synthetic sequence derived from human genome
RFLRIMMLSVLKNTKTPVKFWFLK

SEQ ID NO: 16348 - protein, 24 aa, Artificial Sequence
  Quasi-synthetic sequence derived from human genome
LCLFKKHFMALIFSAKRLKIIPFI

SEQ ID NO: 16349 - protein, 24 aa, Artificial Sequence
  Quasi-synthetic sequence derived from human genome
FRRKEKMFRFFIRRMVKAQSFYWV

SEQ ID NO: 16350 - protein, 24 aa, Artificial Sequence
  Quasi-synthetic sequence derived from human genome
AKICAFLLRKKRFGQWTKLLCVIK

SEQ ID NO: 16351 - protein, 24 aa, Artificial Sequence
  Quasi-synthetic sequence derived from human genome
ILLCIVILLAIVVLYVALRRQKKK

SEQ ID NO: 16352 - protein, 24 aa, Artificial Sequence
  Quasi-synthetic sequence derived from human genome
VLRALRLLRIFKVTKYWSSLRNLV

SEQ ID NO: 16353 - protein, 24 aa, Artificial Sequence
  Quasi-synthetic sequence derived from human genome
RIRRLGFSHRILFANFIKRYYLLC

SEQ ID NO: 16354 - protein, 24 aa, Artificial Sequence
  Quasi-synthetic sequence derived from human genome
RLIRKLRCYLKEMKNLRKLVFSRC

SEQ ID NO: 16355 - protein, 24 aa, Artificial Sequence
  Quasi-synthetic sequence derived from human genome
KLLKHKQIHTRNKAFRALLLKKRR

SEQ ID NO: 16356 - protein, 24 aa, Artificial Sequence
  Quasi-synthetic sequence derived from human genome
RKAPLWLRAKFQRLLFKLGCYIQK

SEQ ID NO: 16357 - protein, 24 aa, Artificial Sequence
  Quasi-synthetic sequence derived from human genome
LLKKYLMKRRWKKNFIAVSAANRF

SEQ ID NO: 16358 - protein, 24 aa, Artificial Sequence
  Quasi-synthetic sequence derived from human genome
SAVLLFHFCIFHRRKMKAIRRSLK

SEQ ID NO: 16359 - protein, 24 aa, Artificial Sequence
  Quasi-synthetic sequence derived from human genome
KTCRGFLIKMGGKIKTWKKRWFVF

SEQ ID NO: 16360 - protein, 24 aa, Artificial Sequence
  Quasi-synthetic sequence derived from human genome
LFYGFLGKKFKRYFLQLLKYIPPK

SEQ ID NO: 16361 - protein, 24 aa, Artificial Sequence
  Quasi-synthetic sequence derived from human genome
RIGRILRLIRGAKGIRTLLFALMM

SEQ ID NO: 16362 - protein, 24 aa, Artificial Sequence
  Quasi-synthetic sequence derived from human genome
KLKRKYWWKNCKMWAIGITVLVIF

SEQ ID NO: 16363 - protein, 24 aa, Artificial Sequence
  Quasi-synthetic sequence derived from human genome
ALLLKRFLLARRSRRGLFAQIVLP

SEQ ID NO: 16364 - protein, 24 aa, Artificial Sequence
  Quasi-synthetic sequence derived from human genome
IILFIILLGVIMAKRKRKHGSLWL

SEQ ID NO: 16365 - protein, 24 aa, Artificial Sequence
  Quasi-synthetic sequence derived from human genome
RRHYSVKKKLKLIRVLGLFMGLVA

SEQ ID NO: 16366 - protein, 24 aa, Artificial Sequence
  Quasi-synthetic sequence derived from human genome
MLLPFLLRQHKVWRKCRMRIFTVA

SEQ ID NO: 16367 - protein, 24 aa, Artificial Sequence
  Quasi-synthetic sequence derived from human genome
RSRLLLLLCIFLGTLRGFRARQIR

SEQ ID NO: 16368 - protein, 24 aa, Artificial Sequence
  Quasi-synthetic sequence derived from human genome
RKAIFIFIRWLLKLGHHGRAPPRR

SEQ ID NO: 16369 - protein, 24 aa, Artificial Sequence
  Quasi-synthetic sequence derived from human genome
FFFIIGLWWCTKSILKYICKKQKR

SEQ ID NO: 16370 - protein, 24 aa, Artificial Sequence
  Quasi-synthetic sequence derived from human genome
RSFRLLRVFKLAKSWPTLNMLIKI

SEQ ID NO: 16371 - protein, 24 aa, Artificial Sequence
  Quasi-synthetic sequence derived from human genome
LLLLLVFTVALYAQRRWQKRRRIP

SEQ ID NO: 16372 - protein, 24 aa, Artificial Sequence
  Quasi-synthetic sequence derived from human genome
IFWKRYRFKLIAFMVISIIALMLF

SEQ ID NO: 16373 - protein, 24 aa, Artificial Sequence
  Quasi-synthetic sequence derived from human genome
LLLLLLFYVVRYCWLRRQAALQRR

SEQ ID NO: 16374 - protein, 24 aa, Artificial Sequence
  Quasi-synthetic sequence derived from human genome
PLFFLMKRKIIVLMPWLLRLSVLV

SEQ ID NO: 16375 - protein, 24 aa, Artificial Sequence
  Quasi-synthetic sequence derived from human genome
YLVKMGGKIKSWKKRWFVFDRLKR

SEQ ID NO: 16376 - protein, 24 aa, Artificial Sequence
  Quasi-synthetic sequence derived from human genome
LFCWLRATFWLLATKRRKQQLVLR

SEQ ID NO: 16377 - protein, 24 aa, Artificial Sequence
  Quasi-synthetic sequence derived from human genome
LIYRDRLRINRFAWPKILKISYKR

SEQ ID NO: 16378 - protein, 24 aa, Artificial Sequence
  Quasi-synthetic sequence derived from human genome
LLRRQMVRNFRKPLIVASPKMLLR

SEQ ID NO: 16379 - protein, 24 aa, Artificial Sequence
  Quasi-synthetic sequence derived from human genome
KLRINRFPWPKVLKISYKRSSFFI

SEQ ID NO: 16380 - protein, 24 aa, Artificial Sequence
  Quasi-synthetic sequence derived from human genome
RSVTRIKKRSRSVFYRLTILILVF

SEQ ID NO: 16381 - protein, 24 aa, Artificial Sequence
  Quasi-synthetic sequence derived from human genome
VVLLAIFVALFFLTKKRRQRQRLA

SEQ ID NO: 16382 - protein, 24 aa, Artificial Sequence
  Quasi-synthetic sequence derived from human genome
KALLRLVSAVNRRRMKLLLGIALL

SEQ ID NO: 16383 - protein, 24 aa, Artificial Sequence
  Quasi-synthetic sequence derived from human genome
FIRPKLVTIIRSGVKPRKAVRILL

SEQ ID NO: 16384 - protein, 24 aa, Artificial Sequence
  Quasi-synthetic sequence derived from human genome
IILVYKAKKRCIFFLQDKRKRNFL

SEQ ID NO: 16385 - protein, 24 aa, Artificial Sequence
  Quasi-synthetic sequence derived from human genome
KKRLLSWKQQVLKLLRTFPRKAAL

SEQ ID NO: 16386 - protein, 24 aa, Artificial Sequence
  Quasi-synthetic sequence derived from human genome
RRKKKCKICKLRSFFRKLNTRLMS

SEQ ID NO: 16387 - protein, 24 aa, Artificial Sequence
  Quasi-synthetic sequence derived from human genome
IVHPLRLRHLRRPRVARLLCLGVW

SEQ ID NO: 16388 - protein, 24 aa, Artificial Sequence
  Quasi-synthetic sequence derived from human genome
LLFFRFKRTLDRICVLFLLGWHRK

SEQ ID NO: 16389 - protein, 24 aa, Artificial Sequence
  Quasi-synthetic sequence derived from human genome
CKRGKRHWKKLWFVIKGKVLYTYM

SEQ ID NO: 16390 - protein, 24 aa, Artificial Sequence
  Quasi-synthetic sequence derived from human genome
RLKRLRNIHYLFNTALFLIAWRLL

SEQ ID NO: 16391 - protein, 24 aa, Artificial Sequence
  Quasi-synthetic sequence derived from human genome
FWKKKKSMIGMSTKLWKVKKALKM

SEQ ID NO: 16392 - protein, 24 aa, Artificial Sequence
  Quasi-synthetic sequence derived from human genome
FFRRPKASLPRVFVLRALLMVLVF

SEQ ID NO: 16393 - protein, 24 aa, Artificial Sequence
  Quasi-synthetic sequence derived from human genome
WAALLGLLAALLLLLLLSRRRTRR

SEQ ID NO: 16394 - protein, 24 aa, Artificial Sequence
  Quasi-synthetic sequence derived from human genome
RRTLRKPKRVPSIYKLKLRPRIRP

SEQ ID NO: 16395 - protein, 24 aa, Artificial Sequence
  Quasi-synthetic sequence derived from human genome
FKRARRPGARALRLVLGIVLLFWA

SEQ ID NO: 16396 - protein, 24 aa, Artificial Sequence
  Quasi-synthetic sequence derived from human genome
FIVWRRFKWVIIGLLFLLILLLFV

SEQ ID NO: 16397 - protein, 24 aa, Artificial Sequence
  Quasi-synthetic sequence derived from human genome
FLILEKLKIITYRNLFKKVYLLLK

SEQ ID NO: 16398 - protein, 24 aa, Artificial Sequence
  Quasi-synthetic sequence derived from human genome
LLVFLLMVAVYTRIFFYVRRRVQR

SEQ ID NO: 16399 - protein, 24 aa, Artificial Sequence
  Quasi-synthetic sequence derived from human genome
AKALRNKRRRMQVRVKLGKFQLLL

SEQ ID NO: 16400 - protein, 24 aa, Artificial Sequence
  Quasi-synthetic sequence derived from human genome
RGGWLWRQSSILRRWKRNWFALWL

SEQ ID NO: 16401 - protein, 24 aa, Artificial Sequence
  Quasi-synthetic sequence derived from human genome
CVFLAFVIVLLAHRLRRWHKSRLL

SEQ ID NO: 16402 - protein, 24 aa, Artificial Sequence
  Quasi-synthetic sequence derived from human genome
MILCYIWLLVLLLHKHRSILLRRL

SEQ ID NO: 16403 - protein, 24 aa, Artificial Sequence
  Quasi-synthetic sequence derived from human genome
RRKAAKRKWAAQTIRRLIRGFVLR

SEQ ID NO: 16404 - protein, 24 aa, Artificial Sequence
  Quasi-synthetic sequence derived from human genome
PFKRKGKLSTIGKIFKPWKWRKKK

SEQ ID NO: 16405 - protein, 24 aa, Artificial Sequence
  Quasi-synthetic sequence derived from human genome
LLQKPRHRCRKRKPLLAIGFYLYR

SEQ ID NO: 16406 - protein, 24 aa, Artificial Sequence
  Quasi-synthetic sequence derived from human genome
RWILQFRRWARKWSRFTRSSFQVR

SEQ ID NO: 16407 - protein, 24 aa, Artificial Sequence
  Quasi-synthetic sequence derived from human genome
SLLMVFVALLVFYITKRKKQRSRR

SEQ ID NO: 16408 - protein, 24 aa, Artificial Sequence
  Quasi-synthetic sequence derived from human genome
TLQRAALKFLAKCRKKKKLFAPWR

SEQ ID NO: 16409 - protein, 24 aa, Artificial Sequence
  Quasi-synthetic sequence derived from human genome
ILEIFHLGFKKIKRGLWGKYKLKK

SEQ ID NO: 16410 - protein, 24 aa, Artificial Sequence
  Quasi-synthetic sequence derived from human genome
GILVGCLCLLLAVYFIARKIRKKR

SEQ ID NO: 16411 - protein, 24 aa, Artificial Sequence
  Quasi-synthetic sequence derived from human genome
GLIILLIFRLIWRSVKKWQIIKGT

SEQ ID NO: 16412 - protein, 24 aa, Artificial Sequence
  Quasi-synthetic sequence derived from human genome
IFMITKCCLFCFRKLAKTGKKKKR

SEQ ID NO: 16413 - protein, 24 aa, Artificial Sequence
  Quasi-synthetic sequence derived from human genome
VSKIPLPRFKLKCIFCKKRRKRTA

SEQ ID NO: 16414 - protein, 24 aa, Artificial Sequence
  Quasi-synthetic sequence derived from human genome
KRRYSFRLHIGRNIARPWKLIYYR

SEQ ID NO: 16415 - protein, 24 aa, Artificial Sequence
  Quasi-synthetic sequence derived from human genome
KIVKSIVEKKPRTFIIKLIKWLMI

SEQ ID NO: 16416 - protein, 24 aa, Artificial Sequence
  Quasi-synthetic sequence derived from human genome
FKRFHPFCLVLRKRKSTLFWGARY

SEQ ID NO: 16417 - protein, 24 aa, Artificial Sequence
  Quasi-synthetic sequence derived from human genome
KKTLGIKLPFLVMIIKNLKKYFTF

SEQ ID NO: 16418 - protein, 24 aa, Artificial Sequence
  Quasi-synthetic sequence derived from human genome
PHFRLKKVQNIKMWLSLRSYLKRR

SEQ ID NO: 16419 - protein, 24 aa, Artificial Sequence
  Quasi-synthetic sequence derived from human genome
MGKVVQILRLMRIFRILKLARHSV

SEQ ID NO: 16420 - protein, 24 aa, Artificial Sequence
  Quasi-synthetic sequence derived from human genome
LLGLIAFDRFLKIIRPLRNIFLKK

SEQ ID NO: 16421 - protein, 24 aa, Artificial Sequence
  Quasi-synthetic sequence derived from human genome
FRLIRKMFSFKVSRWMGLACFRSL

SEQ ID NO: 16422 - protein, 24 aa, Artificial Sequence
  Quasi-synthetic sequence derived from human genome
TRLILFLFCLMVLVESRKPKRKRW

SEQ ID NO: 16423 - protein, 24 aa, Artificial Sequence
  Quasi-synthetic sequence derived from human genome
RLRINRFAWPKILKISYKRSNFYI

SEQ ID NO: 16424 - protein, 24 aa, Artificial Sequence
  Quasi-synthetic sequence derived from human genome
IVLALRLRKRFLNFFLEKYKRPVC

SEQ ID NO: 16425 - protein, 24 aa, Artificial Sequence
  Quasi-synthetic sequence derived from human genome
VIFIVTKCCLFCFWKFARKAKKGK

SEQ ID NO: 16426 - protein, 24 aa, Artificial Sequence
  Quasi-synthetic sequence derived from human genome
TQAKLLAKKRVVRMLLVIVVLFFL

SEQ ID NO: 16427 - protein, 24 aa, Artificial Sequence
  Quasi-synthetic sequence derived from human genome
LLIFILLLTLTILTIWLFKHRRAR

SEQ ID NO: 16428 - protein, 24 aa, Artificial Sequence
  Quasi-synthetic sequence derived from human genome
LKLRRTRRYNVLSKNCFVTRIRLL

SEQ ID NO: 16429 - protein, 24 aa, Artificial Sequence
  Quasi-synthetic sequence derived from human genome
KTLRKWLKMFKKRQLELYLPKFSI

SEQ ID NO: 16430 - protein, 24 aa, Artificial Sequence
  Quasi-synthetic sequence derived from human genome
LWRLPPILIIHLKRFQFVNGRWIK

SEQ ID NO: 16431 - protein, 24 aa, Artificial Sequence
  Quasi-synthetic sequence derived from human genome
KMKKKTFKGLIRIFRKGVIAVLAA

SEQ ID NO: 16432 - protein, 24 aa, Artificial Sequence
  Quasi-synthetic sequence derived from human genome
VRFWAKHRWGLPLRVLKPIQCFKL

SEQ ID NO: 16433 - protein, 24 aa, Artificial Sequence
  Quasi-synthetic sequence derived from human genome
MRRFLSKVYSFPMRKLILFLVFPV

SEQ ID NO: 16434 - protein, 24 aa, Artificial Sequence
  Quasi-synthetic sequence derived from human genome
IMMMKKREKYLYQKIMFGKRRKIR

SEQ ID NO: 16435 - protein, 24 aa, Artificial Sequence
  Quasi-synthetic sequence derived from human genome
FCFLLGKCFKKGLKGKGFVLLVKL

SEQ ID NO: 16436 - protein, 24 aa, Artificial Sequence
  Quasi-synthetic sequence derived from human genome
PKKGSVLKRRLVKLVVNFLFYFRT

SEQ ID NO: 16437 - protein, 24 aa, Artificial Sequence
  Quasi-synthetic sequence derived from human genome
RKRMGLKMLMMMALLVPLVYTIKR

SEQ ID NO: 16438 - protein, 24 aa, Artificial Sequence
  Quasi-synthetic sequence derived from human genome
RIYGKFLGLRAFIRKQINNIFLRF

SEQ ID NO: 16439 - protein, 24 aa, Artificial Sequence
  Quasi-synthetic sequence derived from human genome
AVRIQRRWRGYRVRKYLFNYYYLK

SEQ ID NO: 16440 - protein, 24 aa, Artificial Sequence
  Quasi-synthetic sequence derived from human genome
KLKQRVVLLAILLVIFIFTKVFLI

SEQ ID NO: 16441 - protein, 24 aa, Artificial Sequence
  Quasi-synthetic sequence derived from human genome
IRLMLKYQKILWKVPSFLITQVRR

SEQ ID NO: 16442 - protein, 24 aa, Artificial Sequence
  Quasi-synthetic sequence derived from human genome
SIFYLLKIVNFSRLIFHHLKRKAK

SEQ ID NO: 16443 - protein, 24 aa, Artificial Sequence
  Quasi-synthetic sequence derived from human genome
RFSRISMKLPRIPLRRQKLPKVVV

SEQ ID NO: 16444 - protein, 24 aa, Artificial Sequence
  Quasi-synthetic sequence derived from human genome
KIFFRYQTFRFIWLTKPPGRRLHK

SEQ ID NO: 16445 - protein, 24 aa, Artificial Sequence
  Quasi-synthetic sequence derived from human genome
IVPKKKKPLKLGPIKKKDLKKLVL

SEQ ID NO: 16446 - protein, 24 aa, Artificial Sequence
  Quasi-synthetic sequence derived from human genome
RSRRQGSRFLWLLKILVIILVLGI

SEQ ID NO: 16447 - protein, 24 aa, Artificial Sequence
  Quasi-synthetic sequence derived from human genome
LLMILKPVQKLFAIIVGRGIRKWW

SEQ ID NO: 16448 - protein, 24 aa, Artificial Sequence
  Quasi-synthetic sequence derived from human genome
QRRLQQRRLQHRLRLRAQMRLRRL

SEQ ID NO: 16449 - protein, 24 aa, Artificial Sequence
  Quasi-synthetic sequence derived from human genome
LIVCAIFIFIKRDQLWRSYFRKKR

SEQ ID NO: 16450 - protein, 24 aa, Artificial Sequence
  Quasi-synthetic sequence derived from human genome
LLVILAMGLWVIRVQKRHKMPRMK

SEQ ID NO: 16451 - protein, 24 aa, Artificial Sequence
  Quasi-synthetic sequence derived from human genome
IIIFLTVLLLKLRKRHRKHTQQRA

SEQ ID NO: 16452 - protein, 24 aa, Artificial Sequence
  Quasi-synthetic sequence derived from human genome
AFGTLLCIAIVLRFKKTWKLRALK

SEQ ID NO: 16453 - protein, 24 aa, Artificial Sequence
  Quasi-synthetic sequence derived from human genome
KLRNIRYGFNTILVILIWRIFIAR

SEQ ID NO: 16454 - protein, 24 aa, Artificial Sequence
  Quasi-synthetic sequence derived from human genome
KWRRKSAYWKALKVFKLPVEFLLL

SEQ ID NO: 16455 - protein, 24 aa, Artificial Sequence
  Quasi-synthetic sequence derived from human genome
MIRFRYRILRSQHFRTKSKVCKLR

SEQ ID NO: 16456 - protein, 24 aa, Artificial Sequence
  Quasi-synthetic sequence derived from human genome
KRKKRKAAKNLELTRLLPLRFVRI

SEQ ID NO: 16457 - protein, 24 aa, Artificial Sequence
  Quasi-synthetic sequence derived from human genome
WKLTQQQFVALLWKRLLIARRSRK

SEQ ID NO: 16458 - protein, 24 aa, Artificial Sequence
  Quasi-synthetic sequence derived from human genome
LAKQRLRKRVNAALVIQKYWRRVL

SEQ ID NO: 16459 - protein, 24 aa, Artificial Sequence
  Quasi-synthetic sequence derived from human genome
FIIILVLCLRLLQSRCPRVLPKKL

SEQ ID NO: 16460 - protein, 24 aa, Artificial Sequence
  Quasi-synthetic sequence derived from human genome
FIILFKVFLFPRITISKKTKLVTL

SEQ ID NO: 16461 - protein, 24 aa, Artificial Sequence
  Quasi-synthetic sequence derived from human genome
PLQRGTRLRLRQRRRRLLIKKMPA

SEQ ID NO: 16462 - protein, 24 aa, Artificial Sequence
  Quasi-synthetic sequence derived from human genome
WWARAARLARLRFRRSLLPPQRPR

SEQ ID NO: 16463 - protein, 24 aa, Artificial Sequence
  Quasi-synthetic sequence derived from human genome
FRVLLVKIRSGRRSVRMYNKIFAI

SEQ ID NO: 16464 - protein, 24 aa, Artificial Sequence
  Quasi-synthetic sequence derived from human genome
IVQRWIRGFLVRKNLSPVFFHKKK

SEQ ID NO: 16465 - protein, 24 aa, Artificial Sequence
  Quasi-synthetic sequence derived from human genome
WRRWNRFCRRKCRAAVKSNVFYWL

SEQ ID NO: 16466 - protein, 24 aa, Artificial Sequence
  Quasi-synthetic sequence derived from human genome
FLLRKLYVFRRSFLMTCISLRNLI

SEQ ID NO: 16467 - protein, 24 aa, Artificial Sequence
  Quasi-synthetic sequence derived from human genome
YLKLRHWQWWRLFTKVKPLLQVTR

SEQ ID NO: 16468 - protein, 24 aa, Artificial Sequence
  Quasi-synthetic sequence derived from human genome
KIMVRRCLVTLRPFRLFVLGIGFF

SEQ ID NO: 16469 - protein, 24 aa, Artificial Sequence
  Quasi-synthetic sequence derived from human genome
KKRILFLYNDLLKKRAAFTKLRRA

SEQ ID NO: 16470 - protein, 24 aa, Artificial Sequence
  Quasi-synthetic sequence derived from human genome
CVFLAFVAVLLGLRLRRWHKSRLL

SEQ ID NO: 16471 - protein, 24 aa, Artificial Sequence
  Quasi-synthetic sequence derived from human genome
RPFLKRAILVLSYVLVILYFRLWI

SEQ ID NO: 16472 - protein, 24 aa, Artificial Sequence
  Quasi-synthetic sequence derived from human genome
LRRQWKCVQRRCLRHLAHRLRRRH

SEQ ID NO: 16473 - protein, 24 aa, Artificial Sequence
  Quasi-synthetic sequence derived from human genome
LVRRRFISLKKATIFVQRKYRATI

SEQ ID NO: 16474 - protein, 24 aa, Artificial Sequence
  Quasi-synthetic sequence derived from human genome
RRLRRAARRQVLSGHLPFCRFRLR

SEQ ID NO: 16475 - protein, 24 aa, Artificial Sequence
  Quasi-synthetic sequence derived from human genome
WQIPLGRRFRSLKMWFVFRMYGVK

SEQ ID NO: 16476 - protein, 24 aa, Artificial Sequence
  Quasi-synthetic sequence derived from human genome
VIFIITKCLFCVWKFVRTGKKGKR

SEQ ID NO: 16477 - protein, 24 aa, Artificial Sequence
  Quasi-synthetic sequence derived from human genome
KVDTVKRLLIKKLPRVLAIQLKRF

SEQ ID NO: 16478 - protein, 24 aa, Artificial Sequence
  Quasi-synthetic sequence derived from human genome
RLLRRRHMPLRLAMVGCAFVLFLF

SEQ ID NO: 16479 - protein, 24 aa, Artificial Sequence
  Quasi-synthetic sequence derived from human genome
LRIRLFNFSLKLLSCLLYIIRVLL

SEQ ID NO: 16480 - protein, 24 aa, Artificial Sequence
  Quasi-synthetic sequence derived from human genome
LILLVLLLLSVVFLATYYKRKRTK

SEQ ID NO: 16481 - protein, 24 aa, Artificial Sequence
  Quasi-synthetic sequence derived from human genome
FLYLKWRVKKVVLVLLLVTSVFLF

SEQ ID NO: 16482 - protein, 24 aa, Artificial Sequence
  Quasi-synthetic sequence derived from human genome
KRQILILFNIILISKLLGARWFPK

SEQ ID NO: 16483 - protein, 24 aa, Artificial Sequence
  Quasi-synthetic sequence derived from human genome
MARGSLRRLLRLLVLGLWLALLRS

SEQ ID NO: 16484 - protein, 24 aa, Artificial Sequence
  Quasi-synthetic sequence derived from human genome
LMALKKRTKDKLFQFLKLRKYSIK

SEQ ID NO: 16485 - protein, 24 aa, Artificial Sequence
  Quasi-synthetic sequence derived from human genome
IILKKWFLKPYKGQTLPGRVLFLR

SEQ ID NO: 16486 - protein, 24 aa, Artificial Sequence
  Quasi-synthetic sequence derived from human genome
ARRSRHRLLLLLLRYLVVALGYHK

SEQ ID NO: 16487 - protein, 24 aa, Artificial Sequence
  Quasi-synthetic sequence derived from human genome
LQYFGPLCFIFICYFKIYIRLKRR

SEQ ID NO: 16488 - protein, 24 aa, Artificial Sequence
  Quasi-synthetic sequence derived from human genome
LFKRRVVRRLASLKTRRCRLSRAA

SEQ ID NO: 16489 - protein, 24 aa, Artificial Sequence
  Quasi-synthetic sequence derived from human genome
KFFKRKPKVLGVVRILIALMSLSM

SEQ ID NO: 16490 - protein, 24 aa, Artificial Sequence
  Quasi-synthetic sequence derived from human genome
KQNIFHFLYRKNRSRIPLLRKPWF

SEQ ID NO: 16491 - protein, 24 aa, Artificial Sequence
  Quasi-synthetic sequence derived from human genome
KLLIFLALALFLATVLYIVKKRLF

SEQ ID NO: 16492 - protein, 24 aa, Artificial Sequence
  Quasi-synthetic sequence derived from human genome
HNRYKPLRRRVIWLIGQWISVKFK

SEQ ID NO: 16493 - protein, 24 aa, Artificial Sequence
  Quasi-synthetic sequence derived from human genome
MLRLRLPNLKMVRLRVSFSAVVFK

SEQ ID NO: 16494 - protein, 24 aa, Artificial Sequence
  Quasi-synthetic sequence derived from human genome
LILGNKKLKQIFLSVLRHVRYWVK

SEQ ID NO: 16495 - protein, 24 aa, Artificial Sequence
  Quasi-synthetic sequence derived from human genome
RKRLHFKLCKKSSILVHKLLDKLL

SEQ ID NO: 16496 - protein, 24 aa, Artificial Sequence
  Quasi-synthetic sequence derived from human genome
IWFRQFKKILAGFPNRPKSLKILL

SEQ ID NO: 16497 - protein, 24 aa, Artificial Sequence
  Quasi-synthetic sequence derived from human genome
IFFILNSIIVYKLRRKSNFRLRGY

SEQ ID NO: 16498 - protein, 24 aa, Artificial Sequence
  Quasi-synthetic sequence derived from human genome
VLLALALLAWCRRSRGLKALRLCR

SEQ ID NO: 16499 - protein, 24 aa, Artificial Sequence
  Quasi-synthetic sequence derived from human genome
LQLLLAKVMRFERFGRRRVIIKKG

SEQ ID NO: 16500 - protein, 24 aa, Artificial Sequence
  Quasi-synthetic sequence derived from human genome
WRRLLVLCWYLPGWRAGRVTWLRL

SEQ ID NO: 16501 - protein, 24 aa, Artificial Sequence
  Quasi-synthetic sequence derived from human genome
NFFIFLKILKLLISKLKAHQMCFR

SEQ ID NO: 16502 - protein, 24 aa, Artificial Sequence
  Quasi-synthetic sequence derived from human genome
CVFLAFVTVLLALKLRRWHKSRLL

SEQ ID NO: 16503 - protein, 24 aa, Artificial Sequence
  Quasi-synthetic sequence derived from human genome
RKFLYLWIRMTFGRVFPSKARFYY

SEQ ID NO: 16504 - protein, 24 aa, Artificial Sequence
  Quasi-synthetic sequence derived from human genome
FYYKSRFWLLKLLFRVFTAPFHKV

SEQ ID NO: 16505 - protein, 24 aa, Artificial Sequence
  Quasi-synthetic sequence derived from human genome
VWRKKYMRWMNHKKSRVMDFFRRI

SEQ ID NO: 16506 - protein, 24 aa, Artificial Sequence
  Quasi-synthetic sequence derived from human genome
FRSRSKRRHRTVKLIFAIVVAYFL

SEQ ID NO: 16507 - protein, 24 aa, Artificial Sequence
  Quasi-synthetic sequence derived from human genome
IPLLLLLVVTTVVCWVWICRKRKR

SEQ ID NO: 16508 - protein, 24 aa, Artificial Sequence
  Quasi-synthetic sequence derived from human genome
LRKRRRLLSIIVVLVVTFALCWMP

SEQ ID NO: 16509 - protein, 24 aa, Artificial Sequence
  Quasi-synthetic sequence derived from human genome
KRHRSSFRNRFPLLKVLILQRNKL

SEQ ID NO: 16510 - protein, 24 aa, Artificial Sequence
  Quasi-synthetic sequence derived from human genome
RALHIRKVLLVLPKTTLIIMRYLF

SEQ ID NO: 16511 - protein, 24 aa, Artificial Sequence
  Quasi-synthetic sequence derived from human genome
WALSLLLGVARSLWMLLKLRQRLR

SEQ ID NO: 16512 - protein, 24 aa, Artificial Sequence
  Quasi-synthetic sequence derived from human genome
VSCVFLAFVILLLALRLRRWHKSR

SEQ ID NO: 16513 - protein, 24 aa, Artificial Sequence
  Quasi-synthetic sequence derived from human genome
KDKVWLLREQKRKKKLRKLLKRLQ

SEQ ID NO: 16514 - protein, 24 aa, Artificial Sequence
  Quasi-synthetic sequence derived from human genome
MVRRFLVTLRIRRACGPPRVRVFV

SEQ ID NO: 16515 - protein, 24 aa, Artificial Sequence
  Quasi-synthetic sequence derived from human genome
LLLPKGVVLKLKPVATRFPRKAWR

SEQ ID NO: 16516 - protein, 24 aa, Artificial Sequence
  Quasi-synthetic sequence derived from human genome
LVLKNRSLKLQKMKYRPPKTKFFF

SEQ ID NO: 16517 - protein, 24 aa, Artificial Sequence
  Quasi-synthetic sequence derived from human genome
VRKKLEQHIRRRLIQRRWGLPRRI

SEQ ID NO: 16518 - protein, 24 aa, Artificial Sequence
  Quasi-synthetic sequence derived from human genome
SANFLKKVRRLIMKRIVKISKCNL

SEQ ID NO: 16519 - protein, 24 aa, Artificial Sequence
  Quasi-synthetic sequence derived from human genome
PFFIIFCVLIAIMVKVNFQRKKWR

SEQ ID NO: 16520 - protein, 24 aa, Artificial Sequence
  Quasi-synthetic sequence derived from human genome
FAFTTLLIACLLLRVFRSGKRLKK

SEQ ID NO: 16521 - protein, 24 aa, Artificial Sequence
  Quasi-synthetic sequence derived from human genome
LAMFFLLVLILSSVFLFRLFKRRQ

SEQ ID NO: 16522 - protein, 24 aa, Artificial Sequence
  Quasi-synthetic sequence derived from human genome
RIPLLRKRWFQLGRSMNPRARKKR

SEQ ID NO: 16523 - protein, 24 aa, Artificial Sequence
  Quasi-synthetic sequence derived from human genome
RKILLLQSWFRMVLERRHFLQMKR

SEQ ID NO: 16524 - protein, 24 aa, Artificial Sequence
  Quasi-synthetic sequence derived from human genome
RRRVRPSIRLLSPVLSLILLLIAL

SEQ ID NO: 16525 - protein, 24 aa, Artificial Sequence
  Quasi-synthetic sequence derived from human genome
AMFAKTWRVHAIFKNVKMKKKIIK

SEQ ID NO: 16526 - protein, 24 aa, Artificial Sequence
  Quasi-synthetic sequence derived from human genome
MVTLVLGVLRMAKKRVIVKKLPIV

SEQ ID NO: 16527 - protein, 24 aa, Artificial Sequence
  Quasi-synthetic sequence derived from human genome
RLFFGPQHRPVILRLPNRRALRLR

SEQ ID NO: 16528 - protein, 24 aa, Artificial Sequence
  Quasi-synthetic sequence derived from human genome
WLSARLWKWLKSPRSWRLGLALLL

SEQ ID NO: 16529 - protein, 24 aa, Artificial Sequence
  Quasi-synthetic sequence derived from human genome
SAFALVRTIRYLYRRLQRMLGLRR

SEQ ID NO: 16530 - protein, 24 aa, Artificial Sequence
  Quasi-synthetic sequence derived from human genome
GLALVLALVLVGLVSWRRRQRRLR

SEQ ID NO: 16531 - protein, 24 aa, Artificial Sequence
  Quasi-synthetic sequence derived from human genome
VKYFYFFKILLRLRLAILKYLFID

SEQ ID NO: 16532 - protein, 24 aa, Artificial Sequence
  Quasi-synthetic sequence derived from human genome
TLCVCLVIVLWGIRLLLQRKKKLV

SEQ ID NO: 16533 - protein, 24 aa, Artificial Sequence
  Quasi-synthetic sequence derived from human genome
FFKLLIKVFLALLTHFYIVKGNRK

SEQ ID NO: 16534 - protein, 24 aa, Artificial Sequence
  Quasi-synthetic sequence derived from human genome
KKKKLIAAVVLGILFINTLRCVLR

SEQ ID NO: 16535 - protein, 24 aa, Artificial Sequence
  Quasi-synthetic sequence derived from human genome
VIRSIRILKFLVAKRKFKETLRPY

SEQ ID NO: 16536 - protein, 24 aa, Artificial Sequence
  Quasi-synthetic sequence derived from human genome
LIYRDRLRINRFAWPKVLKISYKR

SEQ ID NO: 16537 - protein, 24 aa, Artificial Sequence
  Quasi-synthetic sequence derived from human genome
RSRRRTRFVFQKALRSLRRYPLPL

SEQ ID NO: 16538 - protein, 24 aa, Artificial Sequence
  Quasi-synthetic sequence derived from human genome
LVLRVLRALRILYVMRLARHSLGL

SEQ ID NO: 16539 - protein, 24 aa, Artificial Sequence
  Quasi-synthetic sequence derived from human genome
RMKLVLRWYLSGFYKKPKGIKKPY

SEQ ID NO: 16540 - protein, 24 aa, Artificial Sequence
  Quasi-synthetic sequence derived from human genome
ILIYKNRVRMNTFPWLKIVKISFK

SEQ ID NO: 16541 - protein, 24 aa, Artificial Sequence
  Quasi-synthetic sequence derived from human genome
KVRSRYSFIQALVRRIRGLLRISR

SEQ ID NO: 16542 - protein, 24 aa, Artificial Sequence
  Quasi-synthetic sequence derived from human genome
FRKTFKMLLLCRWKKKKVEEKLYW

SEQ ID NO: 16543 - protein, 24 aa, Artificial Sequence
  Quasi-synthetic sequence derived from human genome
RIGRILRLVKGAKGIRTLLFALMM

SEQ ID NO: 16544 - protein, 24 aa, Artificial Sequence
  Quasi-synthetic sequence derived from human genome
ACWVILMGFSIWLYWRRKKRKGLS

SEQ ID NO: 16545 - protein, 24 aa, Artificial Sequence
  Quasi-synthetic sequence derived from human genome
WMRMISFIRSFCKYRRFMLNPSKR

SEQ ID NO: 16546 - protein, 24 aa, Artificial Sequence
  Quasi-synthetic sequence derived from human genome
KFRLILIESRIHRLARYYKTKRVL

SEQ ID NO: 16547 - protein, 24 aa, Artificial Sequence
  Quasi-synthetic sequence derived from human genome
VIRAFVKCTKARYLKKKNMRTLWI

SEQ ID NO: 16548 - protein, 24 aa, Artificial Sequence
  Quasi-synthetic sequence derived from human genome
KRALGNWKLLAKGLLIRERLKRRY

SEQ ID NO: 16549 - protein, 24 aa, Artificial Sequence
  Quasi-synthetic sequence derived from human genome
KKRVIRMLIVIVVLFFLCWMPIFS

SEQ ID NO: 16550 - protein, 24 aa, Artificial Sequence
  Quasi-synthetic sequence derived from human genome
LRTFVAFAAKLWSFFIYLLRRQIR

SEQ ID NO: 16551 - protein, 24 aa, Artificial Sequence
  Quasi-synthetic sequence derived from human genome
LVLHFRHKVLILFKLILLEKKVLF

SEQ ID NO: 16552 - protein, 24 aa, Artificial Sequence
  Quasi-synthetic sequence derived from human genome
VLIPKLKGWWQKFRLRSKKRKAGA

SEQ ID NO: 16553 - protein, 24 aa, Artificial Sequence
  Quasi-synthetic sequence derived from human genome
PSPKSLWYLIKWIWTHLCKKKMRR

SEQ ID NO: 16554 - protein, 24 aa, Artificial Sequence
  Quasi-synthetic sequence derived from human genome
FPRSPRIRKRFLLRRILEMLFFTQ

SEQ ID NO: 16555 - protein, 24 aa, Artificial Sequence
  Quasi-synthetic sequence derived from human genome
KRRFILKTCGTTLLLKALVPLLKL

SEQ ID NO: 16556 - protein, 24 aa, Artificial Sequence
  Quasi-synthetic sequence derived from human genome
ILYGFLSYRFKQGFRRVLLRPSRR

SEQ ID NO: 16557 - protein, 24 aa, Artificial Sequence
  Quasi-synthetic sequence derived from human genome
IFSLFRAPKLRMRVFGLCFVRFAI

SEQ ID NO: 16558 - protein, 24 aa, Artificial Sequence
  Quasi-synthetic sequence derived from human genome
KFKKFAARKKWKQSVRLISLCQRL

SEQ ID NO: 16559 - protein, 24 aa, Artificial Sequence
  Quasi-synthetic sequence derived from human genome
RRRLRLGPRGLPLLLSGLLLPLCR

SEQ ID NO: 16560 - protein, 24 aa, Artificial Sequence
  Quasi-synthetic sequence derived from human genome
VFHRLKIKQILPTIYKRKNLSLFL

SEQ ID NO: 16561 - protein, 24 aa, Artificial Sequence
  Quasi-synthetic sequence derived from human genome
RFLAQLRKYFNMRVFRQRTYRIWA

SEQ ID NO: 16562 - protein, 24 aa, Artificial Sequence
  Quasi-synthetic sequence derived from human genome
LPRRRRCFPARAPLLRVALCLLCW

SEQ ID NO: 16563 - protein, 24 aa, Artificial Sequence
  Quasi-synthetic sequence derived from human genome
LKLTCSAFRLQRALRFLLGRLPWR

SEQ ID NO: 16564 - protein, 24 aa, Artificial Sequence
  Quasi-synthetic sequence derived from human genome
LLRICRVLRSLKLLAQFRQIQIII

SEQ ID NO: 16565 - protein, 24 aa, Artificial Sequence
  Quasi-synthetic sequence derived from human genome
RRYFKRVVLAARTKRGHLVLKSFK

SEQ ID NO: 16566 - protein, 24 aa, Artificial Sequence
  Quasi-synthetic sequence derived from human genome
WRRWNRFNRRRCRAAVKSVTFYWL

SEQ ID NO: 16567 - protein, 24 aa, Artificial Sequence
  Quasi-synthetic sequence derived from human genome
VRRILQRVPGKQRFGIYRFLPFFF

SEQ ID NO: 16568 - protein, 24 aa, Artificial Sequence
  Quasi-synthetic sequence derived from human genome
FAIIWPFIAQWLVYLYYQRRRRKL

SEQ ID NO: 16569 - protein, 24 aa, Artificial Sequence
  Quasi-synthetic sequence derived from human genome
LLLLLFVGLFISYVMLKTKRVTKK

SEQ ID NO: 16570 - protein, 24 aa, Artificial Sequence
  Quasi-synthetic sequence derived from human genome
TSRPRMRKKLKMLNIAKKILRIQK

SEQ ID NO: 16571 - protein, 24 aa, Artificial Sequence
  Quasi-synthetic sequence derived from human genome
FCLWFVLQVLIVVLRIVRYRKSSK

SEQ ID NO: 16572 - protein, 24 aa, Artificial Sequence
  Quasi-synthetic sequence derived from human genome
KLLKLRRNIVKLSLYRHFTNTLIL

SEQ ID NO: 16573 - protein, 24 aa, Artificial Sequence
  Quasi-synthetic sequence derived from human genome
RRLTRRLVLPVFGVLWITVLLFFW

SEQ ID NO: 16574 - protein, 24 aa, Artificial Sequence
  Quasi-synthetic sequence derived from human genome
RLKIRKCMGRLHLRCPVFMSFLPL

SEQ ID NO: 16575 - protein, 24 aa, Artificial Sequence
  Quasi-synthetic sequence derived from human genome
RRAKRIRNAALQHLFIRKSFRPFK

SEQ ID NO: 16576 - protein, 24 aa, Artificial Sequence
  Quasi-synthetic sequence derived from human genome
CRPLNKKWRGMKWKKWSIHIVIPK

SEQ ID NO: 16577 - protein, 24 aa, Artificial Sequence
  Quasi-synthetic sequence derived from human genome
RKKYEPKLKQFTKILRRKRLLPKR

SEQ ID NO: 16578 - protein, 24 aa, Artificial Sequence
  Quasi-synthetic sequence derived from human genome
VVKMRKEVKRIRVLVIRKLVRSVG

SEQ ID NO: 16579 - protein, 24 aa, Artificial Sequence
  Quasi-synthetic sequence derived from human genome
LFLILIRRALSASQKKKVIIAALR

SEQ ID NO: 16580 - protein, 24 aa, Artificial Sequence
  Quasi-synthetic sequence derived from human genome
FLKHVRLLSRKQFQLRALMQKARK

SEQ ID NO: 16581 - protein, 24 aa, Artificial Sequence
  Quasi-synthetic sequence derived from human genome
RDKLKLMKQRRKPPGFLALVKLLR

SEQ ID NO: 16582 - protein, 24 aa, Artificial Sequence
  Quasi-synthetic sequence derived from human genome
LRAWIIQCWWRQVLEKLLAKRRRM

SEQ ID NO: 16583 - protein, 24 aa, Artificial Sequence
  Quasi-synthetic sequence derived from human genome
LRIRLFNFSLKLLTCLLYIVRVLL

SEQ ID NO: 16584 - protein, 24 aa, Artificial Sequence
  Quasi-synthetic sequence derived from human genome
LKRPARLPCSHIFCKKCILRWLAR

SEQ ID NO: 16585 - protein, 24 aa, Artificial Sequence
  Quasi-synthetic sequence derived from human genome
IFCLCSLVGILHLQRALVLRRKRK

SEQ ID NO: 16586 - protein, 24 aa, Artificial Sequence
  Quasi-synthetic sequence derived from human genome
LRRKLYIHRVTLRKLLPGVQYVYR

SEQ ID NO: 16587 - protein, 24 aa, Artificial Sequence
  Quasi-synthetic sequence derived from human genome
LLSSLPRWRRIAQKIIRERRKKRV

SEQ ID NO: 16588 - protein, 24 aa, Artificial Sequence
  Quasi-synthetic sequence derived from human genome
LIILVALLMLVFRSKREVKRQKYR

SEQ ID NO: 16589 - protein, 24 aa, Artificial Sequence
  Quasi-synthetic sequence derived from human genome
IAMKQGVIKSLKIKYRHCLIKKFL

SEQ ID NO: 16590 - protein, 24 aa, Artificial Sequence
  Quasi-synthetic sequence derived from human genome
PPILTKPTLKRKKPFLHRRRRVRK

SEQ ID NO: 16591 - protein, 24 aa, Artificial Sequence
  Quasi-synthetic sequence derived from human genome
VWFLNPLKSIKYLICTRYKWLIIK

SEQ ID NO: 16592 - protein, 24 aa, Artificial Sequence
  Quasi-synthetic sequence derived from human genome
ALRRPPRLRLCARLPDFFLLLLFR

SEQ ID NO: 16593 - protein, 24 aa, Artificial Sequence
  Quasi-synthetic sequence derived from human genome
MNCVLQKRSWPFLRSFRVLRVFKL

SEQ ID NO: 16594 - protein, 24 aa, Artificial Sequence
  Quasi-synthetic sequence derived from human genome
GKCALVRHKFNRLPRVLILHLKRY

SEQ ID NO: 16595 - protein, 24 aa, Artificial Sequence
  Quasi-synthetic sequence derived from human genome
FLIVFLLLLAILLFFAVKYLLRWK

SEQ ID NO: 16596 - protein, 24 aa, Artificial Sequence
  Quasi-synthetic sequence derived from human genome
IFLKRSQQKKKTSPLNFKKRLFLL

SEQ ID NO: 16597 - protein, 24 aa, Artificial Sequence
  Quasi-synthetic sequence derived from human genome
KKFLYIKSVFHTLRMAQRRHKRVR

SEQ ID NO: 16598 - protein, 24 aa, Artificial Sequence
  Quasi-synthetic sequence derived from human genome
RRILWITLRTWKKFVKFMKEERVK

SEQ ID NO: 16599 - protein, 24 aa, Artificial Sequence
  Quasi-synthetic sequence derived from human genome
MLRIPRPLIMIRAFRIYFRFELPR

SEQ ID NO: 16600 - protein, 24 aa, Artificial Sequence
  Quasi-synthetic sequence derived from human genome
LLVFIMSVFVAAGLFVLVMKRRKK

SEQ ID NO: 16601 - protein, 24 aa, Artificial Sequence
  Quasi-synthetic sequence derived from human genome
PFYFIVVLRPLQLLRLFKLKERYR

SEQ ID NO: 16602 - protein, 24 aa, Artificial Sequence
  Quasi-synthetic sequence derived from human genome
KIMKTRVCRRLRRANRVLRARCRR

SEQ ID NO: 16603 - protein, 24 aa, Artificial Sequence
  Quasi-synthetic sequence derived from human genome
FLLLVPLLVLALASYRRLCLRLRL

SEQ ID NO: 16604 - protein, 24 aa, Artificial Sequence
  Quasi-synthetic sequence derived from human genome
KQGYVKMKSRKLGIYRRCWLVFRK

SEQ ID NO: 16605 - protein, 24 aa, Artificial Sequence
  Quasi-synthetic sequence derived from human genome
WALFFRKRRADMPRVFVFRALLLV

SEQ ID NO: 16606 - protein, 24 aa, Artificial Sequence
  Quasi-synthetic sequence derived from human genome
KLLPLRALPLLFNLIKVVPRVFGR

SEQ ID NO: 16607 - protein, 24 aa, Artificial Sequence
  Quasi-synthetic sequence derived from human genome
NIFHFLYGKNRSRIPLLRKRRFQL

SEQ ID NO: 16608 - protein, 24 aa, Artificial Sequence
  Quasi-synthetic sequence derived from human genome
KKKPVPVLLGSLLKRKMLPRAALL

SEQ ID NO: 16609 - protein, 24 aa, Artificial Sequence
  Quasi-synthetic sequence derived from human genome
FKIRKHYLHLRATVVSIQRRYRKL

SEQ ID NO: 16610 - protein, 24 aa, Artificial Sequence
  Quasi-synthetic sequence derived from human genome
WWRTLVQRRIRQRRQALLRVYVIQ

SEQ ID NO: 16611 - protein, 24 aa, Artificial Sequence
  Quasi-synthetic sequence derived from human genome
FRIKRFLAKKQKQNRPIPQWIRMK

SEQ ID NO: 16612 - protein, 24 aa, Artificial Sequence
  Quasi-synthetic sequence derived from human genome
FLCLLPLIVKHIRKKQAKKAAAIR

SEQ ID NO: 16613 - protein, 24 aa, Artificial Sequence
  Quasi-synthetic sequence derived from human genome
KHEGFMLKKRKWPLKGWHKRFFVL

SEQ ID NO: 16614 - protein, 24 aa, Artificial Sequence
  Quasi-synthetic sequence derived from human genome
RRIKLSPLMMYEKLSMIRFRYRIL

SEQ ID NO: 16615 - protein, 24 aa, Artificial Sequence
  Quasi-synthetic sequence derived from human genome
ILTLMRMLSLKSLKKQMKKVKKMT

SEQ ID NO: 16616 - protein, 24 aa, Artificial Sequence
  Quasi-synthetic sequence derived from human genome
PKKIRNIIYMFLPITKWLPAYKFK

SEQ ID NO: 16617 - protein, 24 aa, Artificial Sequence
  Quasi-synthetic sequence derived from human genome
ILLMSMAFLTCCLLKCVKKSKRRR

SEQ ID NO: 16618 - protein, 24 aa, Artificial Sequence
  Quasi-synthetic sequence derived from human genome
MGFVKVVKNKAYFKRYQVKFRRRR

SEQ ID NO: 16619 - protein, 24 aa, Artificial Sequence
  Quasi-synthetic sequence derived from human genome
KKRHRAVRLIFTIMIVYFLFWAPY

SEQ ID NO: 16620 - protein, 24 aa, Artificial Sequence
  Quasi-synthetic sequence derived from human genome
AGILMLALLVFILWKCGFFKRNKK

SEQ ID NO: 16621 - protein, 24 aa, Artificial Sequence
  Quasi-synthetic sequence derived from human genome
LRNKEVINIMKKIMKKRKFCHILK

SEQ ID NO: 16622 - protein, 24 aa, Artificial Sequence
  Quasi-synthetic sequence derived from human genome
YVPYVPLRQRRQLLLQKLLQRRRK

SEQ ID NO: 16623 - protein, 24 aa, Artificial Sequence
  Quasi-synthetic sequence derived from human genome
LLFRIVLKRRLNWIQWASLLTLFL

SEQ ID NO: 16624 - protein, 24 aa, Artificial Sequence
  Quasi-synthetic sequence derived from human genome
IYSIKTKQIRQRIIKKFQFIKSLR

SEQ ID NO: 16625 - protein, 24 aa, Artificial Sequence
  Quasi-synthetic sequence derived from human genome
QFFRILRIFKLIAPKLLQIIDKRM

SEQ ID NO: 16626 - protein, 24 aa, Artificial Sequence
  Quasi-synthetic sequence derived from human genome
IVLGFLFKRFLRIQRLFPPVPQIK

SEQ ID NO: 16627 - protein, 24 aa, Artificial Sequence
  Quasi-synthetic sequence derived from human genome
LRKLRNVSNLKPVPLIGPKLKRRW

SEQ ID NO: 16628 - protein, 24 aa, Artificial Sequence
  Quasi-synthetic sequence derived from human genome
VLLLLLLGLLRPLRRRSCLLAPGK

SEQ ID NO: 16629 - protein, 24 aa, Artificial Sequence
  Quasi-synthetic sequence derived from human genome
RKRFLGPLHPSFNLVKIIRSFLLK

SEQ ID NO: 16630 - protein, 24 aa, Artificial Sequence
  Quasi-synthetic sequence derived from human genome
WTLQARWRLVGLPVHLLFLRFYKR

SEQ ID NO: 16631 - protein, 24 aa, Artificial Sequence
  Quasi-synthetic sequence derived from human genome
LKIHGLSSLWRLFRGKKWNVLRQR

SEQ ID NO: 16632 - protein, 24 aa, Artificial Sequence
  Quasi-synthetic sequence derived from human genome
RFRIYKRKVLILTLVVAACGFVLW

SEQ ID NO: 16633 - protein, 24 aa, Artificial Sequence
  Quasi-synthetic sequence derived from human genome
RPLRNIFLKKPVFAKTVSIFIWFF

SEQ ID NO: 16634 - protein, 24 aa, Artificial Sequence
  Quasi-synthetic sequence derived from human genome
FPRFIKIIEVKNKKLVELLRRKVR

SEQ ID NO: 16635 - protein, 24 aa, Artificial Sequence
  Quasi-synthetic sequence derived from human genome
QYRKVLYCVVIIQKNYRAFLLRRR

SEQ ID NO: 16636 - protein, 24 aa, Artificial Sequence
  Quasi-synthetic sequence derived from human genome
WRIRKKYFLMKIKNQPKERLVLSW

SEQ ID NO: 16637 - protein, 24 aa, Artificial Sequence
  Quasi-synthetic sequence derived from human genome
LLRRLRAVRLRSGAKALGKARRKV

SEQ ID NO: 16638 - protein, 24 aa, Artificial Sequence
  Quasi-synthetic sequence derived from human genome
RRKKGLLLRPVAPLRTRPPLLISL

SEQ ID NO: 16639 - protein, 24 aa, Artificial Sequence
  Quasi-synthetic sequence derived from human genome
SFLWFTSPYKTMKFILWRRFRWAI

SEQ ID NO: 16640 - protein, 24 aa, Artificial Sequence
  Quasi-synthetic sequence derived from human genome
TRTLYLRYRPKVKFLFGIWPVILF

SEQ ID NO: 16641 - protein, 24 aa, Artificial Sequence
  Quasi-synthetic sequence derived from human genome
LLTFILLLTLTILTIWLFKHRRVR

SEQ ID NO: 16642 - protein, 24 aa, Artificial Sequence
  Quasi-synthetic sequence derived from human genome
LARMRYKRTKAALTIIRYYRRYKV

SEQ ID NO: 16643 - protein, 24 aa, Artificial Sequence
  Quasi-synthetic sequence derived from human genome
KQNIFHFLYGKNRSRIPLLRKRWF

SEQ ID NO: 16644 - protein, 24 aa, Artificial Sequence
  Quasi-synthetic sequence derived from human genome
INKRPVLGYRNLNLFKLFRLVHKL

SEQ ID NO: 16645 - protein, 24 aa, Artificial Sequence
  Quasi-synthetic sequence derived from human genome
MNFFVFSRGLLQYINQRKKFRRRW

SEQ ID NO: 16646 - protein, 24 aa, Artificial Sequence
  Quasi-synthetic sequence derived from human genome
LLLLRWRRPALHRPIKVNLLIPVA

SEQ ID NO: 16647 - protein, 24 aa, Artificial Sequence
  Quasi-synthetic sequence derived from human genome
ARRAKRKVTRMILIVAALFCLCWM

SEQ ID NO: 16648 - protein, 24 aa, Artificial Sequence
  Quasi-synthetic sequence derived from human genome
FIKFFGEQILILWKFALLRKRILI

SEQ ID NO: 16649 - protein, 24 aa, Artificial Sequence
  Quasi-synthetic sequence derived from human genome
FLRKKVLLRGFSPSHLRAYARRMF

SEQ ID NO: 16650 - protein, 24 aa, Artificial Sequence
  Quasi-synthetic sequence derived from human genome
FILFIFTFFAMLALVLHQKRKRLF

SEQ ID NO: 16651 - protein, 24 aa, Artificial Sequence
  Quasi-synthetic sequence derived from human genome
GNSKLREAFLKMLRFVKCFLRRRK

SEQ ID NO: 16652 - protein, 24 aa, Artificial Sequence
  Quasi-synthetic sequence derived from human genome
RLLLVHGRWSYFRMCKFLCYFFYK

SEQ ID NO: 16653 - protein, 24 aa, Artificial Sequence
  Quasi-synthetic sequence derived from human genome
RLLLVHGRWSYLRMCKFLCYFFYK

SEQ ID NO: 16654 - protein, 24 aa, Artificial Sequence
  Quasi-synthetic sequence derived from human genome
MRLRLRLLALLLLLLAPPARAPKP

SEQ ID NO: 16655 - protein, 24 aa, Artificial Sequence
  Quasi-synthetic sequence derived from human genome
LRSFRLLRVFKLAKSWPTLNTLIK

SEQ ID NO: 16656 - protein, 24 aa, Artificial Sequence
  Quasi-synthetic sequence derived from human genome
IVRYSFKKQWSLGFIPKLKRKIPV

SEQ ID NO: 16657 - protein, 24 aa, Artificial Sequence
  Quasi-synthetic sequence derived from human genome
LLSFFMARVFMRMKLPRSLALLPR

SEQ ID NO: 16658 - protein, 24 aa, Artificial Sequence
  Quasi-synthetic sequence derived from human genome
VSCVFLAFVLVLLALRLRRWHKSR

SEQ ID NO: 16659 - protein, 24 aa, Artificial Sequence
  Quasi-synthetic sequence derived from human genome
WLKVFYCLRIANFNHPLFFLMKRK

SEQ ID NO: 16660 - protein, 24 aa, Artificial Sequence
  Quasi-synthetic sequence derived from human genome
LVWKRRILFFVVTLVSVFLVWKFT

SEQ ID NO: 16661 - protein, 24 aa, Artificial Sequence
  Quasi-synthetic sequence derived from human genome
FIFLHLKRRVKSVILVMLLGPLLF

SEQ ID NO: 16662 - protein, 24 aa, Artificial Sequence
  Quasi-synthetic sequence derived from human genome
LIFLHLKRRVKSVILVMLLGPLLF

SEQ ID NO: 16663 - protein, 24 aa, Artificial Sequence
  Quasi-synthetic sequence derived from human genome
KLKRKYWWKNCKMMIMLGAICAII

SEQ ID NO: 16664 - protein, 24 aa, Artificial Sequence
  Quasi-synthetic sequence derived from human genome
LTPPLKTVIRAIRIMKFHVAKRKF

SEQ ID NO: 16665 - protein, 24 aa, Artificial Sequence
  Quasi-synthetic sequence derived from human genome
FIKVLWNILKPLISHKFGKKVIYF

SEQ ID NO: 16666 - protein, 24 aa, Artificial Sequence
  Quasi-synthetic sequence derived from human genome
LLAAGFVVYLKRKTLIRLLFTNKK

SEQ ID NO: 16667 - protein, 24 aa, Artificial Sequence
  Quasi-synthetic sequence derived from human genome
WYWRRRPKRLSAVVCALLWVLSLL

SEQ ID NO: 16668 - protein, 24 aa, Artificial Sequence
  Quasi-synthetic sequence derived from human genome
WRRRPNCGIRLPRIRRWRSVRQKR

SEQ ID NO: 16669 - protein, 24 aa, Artificial Sequence
  Quasi-synthetic sequence derived from human genome
RRRRRRRRRDLLLSQLCFLASVAL

SEQ ID NO: 16670 - protein, 24 aa, Artificial Sequence
  Quasi-synthetic sequence derived from human genome
ALLLLVLVLLVALRARFWKQSRGK

SEQ ID NO: 16671 - protein, 24 aa, Artificial Sequence
  Quasi-synthetic sequence derived from human genome
IRVRRAGYAYRRIFQKFLQRYAIL

SEQ ID NO: 16672 - protein, 24 aa, Artificial Sequence
  Quasi-synthetic sequence derived from human genome
VIFLLNVSMFIVVLVQLCRIKKKK

SEQ ID NO: 16673 - protein, 24 aa, Artificial Sequence
  Quasi-synthetic sequence derived from human genome
LLIFLLLVILAMGLWVIRVQKRHK

SEQ ID NO: 16674 - protein, 24 aa, Artificial Sequence
  Quasi-synthetic sequence derived from human genome
LLRRLPKLRKRMRKMCLTFMKESP

SEQ ID NO: 16675 - protein, 24 aa, Artificial Sequence
  Quasi-synthetic sequence derived from human genome
ITIVFCAAGIVVLVLHRRRRYKKK

SEQ ID NO: 16676 - protein, 24 aa, Artificial Sequence
  Quasi-synthetic sequence derived from human genome
HKKRYIYRKIKGWRPVLMMCVVLT

SEQ ID NO: 16677 - protein, 24 aa, Artificial Sequence
  Quasi-synthetic sequence derived from human genome
LIFLHLKRRVKSVVLVILLGPLLF

SEQ ID NO: 16678 - protein, 24 aa, Artificial Sequence
  Quasi-synthetic sequence derived from human genome
VLVLCLSFMLLFSLWRQSCRRRKL

SEQ ID NO: 16679 - protein, 24 aa, Artificial Sequence
  Quasi-synthetic sequence derived from human genome
RLLHKQRLLFSCLLWLTFMYFFWK

SEQ ID NO: 16680 - protein, 24 aa, Artificial Sequence
  Quasi-synthetic sequence derived from human genome
KKAVKYQSKARRKKIMIIICCVIL

SEQ ID NO: 16681 - protein, 24 aa, Artificial Sequence
  Quasi-synthetic sequence derived from human genome
KTESWPRIIMRFRKRKNFKKKRIV

SEQ ID NO: 16682 - protein, 24 aa, Artificial Sequence
  Quasi-synthetic sequence derived from human genome
LYAIVLCKQNELRIRIKMRKLILR

SEQ ID NO: 16683 - protein, 24 aa, Artificial Sequence
  Quasi-synthetic sequence derived from human genome
RAALLLLLPPRLLARPSLLLRRSL

SEQ ID NO: 16684 - protein, 24 aa, Artificial Sequence
  Quasi-synthetic sequence derived from human genome
LLAKHWKLLPLLRSVLRFRLGGLA

SEQ ID NO: 16685 - protein, 24 aa, Artificial Sequence
  Quasi-synthetic sequence derived from human genome
LVRRRRRYALSGSVWKKRTLTWRV

SEQ ID NO: 16686 - protein, 24 aa, Artificial Sequence
  Quasi-synthetic sequence derived from human genome
LRAWKRIFWRQILLTLGLLGLFLY

SEQ ID NO: 16687 - protein, 24 aa, Artificial Sequence
  Quasi-synthetic sequence derived from human genome
KFMVLLWKNFILKRRRCIALVVEM

SEQ ID NO: 16688 - protein, 24 aa, Artificial Sequence
  Quasi-synthetic sequence derived from human genome
ASLVFLTVLVIICYKAIKRKPLRK

SEQ ID NO: 16689 - protein, 24 aa, Artificial Sequence
  Quasi-synthetic sequence derived from human genome
RKYICTSFYPWVNILKISFKRKKF

SEQ ID NO: 16690 - protein, 24 aa, Artificial Sequence
  Quasi-synthetic sequence derived from human genome
LYVASSLFLMVMYFFFRVRSRRWK

SEQ ID NO: 16691 - protein, 24 aa, Artificial Sequence
  Quasi-synthetic sequence derived from human genome
KKWGMLFLVNQLFKIYFKINKLHL

SEQ ID NO: 16692 - protein, 24 aa, Artificial Sequence
  Quasi-synthetic sequence derived from human genome
YVRGRALRSRLLRKQAWKQKWRKK

SEQ ID NO: 16693 - protein, 24 aa, Artificial Sequence
  Quasi-synthetic sequence derived from human genome
KRRILRVVAHCNKPKYKILLHGLW

SEQ ID NO: 16694 - protein, 24 aa, Artificial Sequence
  Quasi-synthetic sequence derived from human genome
WPPFLRGLRYLHPLKKWPMRSRLY

SEQ ID NO: 16695 - protein, 24 aa, Artificial Sequence
  Quasi-synthetic sequence derived from human genome
LFPFLVMLVCYGFIFRVARVKARK

SEQ ID NO: 16696 - protein, 24 aa, Artificial Sequence
  Quasi-synthetic sequence derived from human genome
WLYKKKEKGSFLSNKWKKFWVILK

SEQ ID NO: 16697 - protein, 24 aa, Artificial Sequence
  Quasi-synthetic sequence derived from human genome
WALRLWGALRLGAVILRWRYHALR

SEQ ID NO: 16698 - protein, 24 aa, Artificial Sequence
  Quasi-synthetic sequence derived from human genome
RIPLLRKRRFQLGRSMNLRARKNR

SEQ ID NO: 16699 - protein, 24 aa, Artificial Sequence
  Quasi-synthetic sequence derived from human genome
KKKAWYLIAMLLKLAFCLALCAKL

SEQ ID NO: 16700 - protein, 24 aa, Artificial Sequence
  Quasi-synthetic sequence derived from human genome
RLFRIKCVTRIQAYWRGCVVRKWY

SEQ ID NO: 16701 - protein, 24 aa, Artificial Sequence
  Quasi-synthetic sequence derived from human genome
RRRCRRVLYWIPVVFITLLLGWSY

SEQ ID NO: 16702 - protein, 24 aa, Artificial Sequence
  Quasi-synthetic sequence derived from human genome
RIRRLLRPFFLLQNSSMMKKTLKC

SEQ ID NO: 16703 - protein, 24 aa, Artificial Sequence
  Quasi-synthetic sequence derived from human genome
KMPKWTRVILLNWCAWFLRMKRPG

SEQ ID NO: 16704 - protein, 24 aa, Artificial Sequence
  Quasi-synthetic sequence derived from human genome
ACIIQCWWRLILSKILKKRRQAAL

SEQ ID NO: 16705 - protein, 24 aa, Artificial Sequence
  Quasi-synthetic sequence derived from human genome
IAKVKMKFRFLGKLMAKAIMDFRL

SEQ ID NO: 16706 - protein, 24 aa, Artificial Sequence
  Quasi-synthetic sequence derived from human genome
LVFFIYMISFIFRKRRKNSGLWSF

SEQ ID NO: 16707 - protein, 24 aa, Artificial Sequence
  Quasi-synthetic sequence derived from human genome
NFLKRFQLTKLPPYLIFCIKRFTK

SEQ ID NO: 16708 - protein, 24 aa, Artificial Sequence
  Quasi-synthetic sequence derived from human genome
ILLLLVLLILCFIKRSKGGKYSVK

SEQ ID NO: 16709 - protein, 24 aa, Artificial Sequence
  Quasi-synthetic sequence derived from human genome
LSRISKFRRLRQLLRRRKKTRQGR

SEQ ID NO: 16710 - protein, 24 aa, Artificial Sequence
  Quasi-synthetic sequence derived from human genome
FKKKMPIAFAAKGINKLLNKLFLI

SEQ ID NO: 16711 - protein, 24 aa, Artificial Sequence
  Quasi-synthetic sequence derived from human genome
LRPPIISRFIRLIPLGWHVRIAIR

SEQ ID NO: 16712 - protein, 24 aa, Artificial Sequence
  Quasi-synthetic sequence derived from human genome
VSCVFLAFVIVLLALRLRRWHKSR

SEQ ID NO: 16713 - protein, 24 aa, Artificial Sequence
  Quasi-synthetic sequence derived from human genome
FLLAVFRFKVLILAYAVCRLRHWW

SEQ ID NO: 16714 - protein, 24 aa, Artificial Sequence
  Quasi-synthetic sequence derived from human genome
FRAARLIKLLRQGYTIRILLWTFV

SEQ ID NO: 16715 - protein, 24 aa, Artificial Sequence
  Quasi-synthetic sequence derived from human genome
KKRLLSWKQQVQKLFRSFPRKTLL

SEQ ID NO: 16716 - protein, 24 aa, Artificial Sequence
  Quasi-synthetic sequence derived from human genome
VGLLLSGFLVIFYCYIRKRCLKLK

SEQ ID NO: 16717 - protein, 24 aa, Artificial Sequence
  Quasi-synthetic sequence derived from human genome
VSISTALLLLLGFFLWLKKRKQIK

SEQ ID NO: 16718 - protein, 24 aa, Artificial Sequence
  Quasi-synthetic sequence derived from human genome
KKAGLLMALARLCFLLGRLCSRRL

SEQ ID NO: 16719 - protein, 24 aa, Artificial Sequence
  Quasi-synthetic sequence derived from human genome
MYGRLIHRVRYRRGLWRTRQILNL

SEQ ID NO: 16720 - protein, 24 aa, Artificial Sequence
  Quasi-synthetic sequence derived from human genome
AWWFMSVKVKLKRKKRQKTPNRKL

SEQ ID NO: 16721 - protein, 24 aa, Artificial Sequence
  Quasi-synthetic sequence derived from human genome
FRRYLSVFFRKHITKRFCKQCPVF

SEQ ID NO: 16722 - protein, 24 aa, Artificial Sequence
  Quasi-synthetic sequence derived from human genome
RVAARVQRRPWGAWLSARLWKWLK

SEQ ID NO: 16723 - protein, 24 aa, Artificial Sequence
  Quasi-synthetic sequence derived from human genome
WKRRIEVVMREYHKWRIYYKKRLR

SEQ ID NO: 16724 - protein, 24 aa, Artificial Sequence
  Quasi-synthetic sequence derived from human genome
FIVGLLILLSRRFRCGGNKKRRQI

SEQ ID NO: 16725 - protein, 24 aa, Artificial Sequence
  Quasi-synthetic sequence derived from human genome
LLKIANFSNLLFLHLKRRVRSVIL

SEQ ID NO: 16726 - protein, 24 aa, Artificial Sequence
  Quasi-synthetic sequence derived from human genome
LLAGLVAVALVVRKVKLRNLQKKR

SEQ ID NO: 16727 - protein, 24 aa, Artificial Sequence
  Quasi-synthetic sequence derived from human genome
LRKRFGGIRIPIILAVLYLFIYIF

SEQ ID NO: 16728 - protein, 24 aa, Artificial Sequence
  Quasi-synthetic sequence derived from human genome
LRRYTYLAKAVLRRIVSKIFRNRQ

SEQ ID NO: 16729 - protein, 24 aa, Artificial Sequence
  Quasi-synthetic sequence derived from human genome
TIRIWSCSRGRGVMILKLPFLKRR

SEQ ID NO: 16730 - protein, 24 aa, Artificial Sequence
  Quasi-synthetic sequence derived from human genome
KKFIWNHGITLPLKNVRKRRFRKT

SEQ ID NO: 16731 - protein, 24 aa, Artificial Sequence
  Quasi-synthetic sequence derived from human genome
FYRIHRRGPKILLLLLFFGVVLVI

SEQ ID NO: 16732 - protein, 24 aa, Artificial Sequence
  Quasi-synthetic sequence derived from human genome
HRFHGLWYMKMMWAWLQAKRKPRK

SEQ ID NO: 16733 - protein, 24 aa, Artificial Sequence
  Quasi-synthetic sequence derived from human genome
RKILRSMSRKVTTNKLLLSIIILL

SEQ ID NO: 16734 - protein, 24 aa, Artificial Sequence
  Quasi-synthetic sequence derived from human genome
LKKKLLPWQRRGLLRAQGLRGWKA

SEQ ID NO: 16735 - protein, 24 aa, Artificial Sequence
  Quasi-synthetic sequence derived from human genome
IIIISYFFILLSVLKIRSFSGRKK

SEQ ID NO: 16736 - protein, 24 aa, Artificial Sequence
  Quasi-synthetic sequence derived from human genome
IILIRIFHLLHQKRQLEKLMRRLV

SEQ ID NO: 16737 - protein, 24 aa, Artificial Sequence
  Quasi-synthetic sequence derived from human genome
KKKFYGPQRRKMMFMGFIRLGVWY

SEQ ID NO: 16738 - protein, 24 aa, Artificial Sequence
  Quasi-synthetic sequence derived from human genome
KYLLLGRWRKKHLTFRILNLPSTL

SEQ ID NO: 16739 - protein, 24 aa, Artificial Sequence
  Quasi-synthetic sequence derived from human genome
DKKLAVLCYRCLSLLYLRMFKLKK

SEQ ID NO: 16740 - protein, 24 aa, Artificial Sequence
  Quasi-synthetic sequence derived from human genome
WLVKSPPERKLQRYAWRKRWFVLR

SEQ ID NO: 16741 - protein, 24 aa, Artificial Sequence
  Quasi-synthetic sequence derived from human genome
LISKLKKWIKILEAKTKQLPKFFL

SEQ ID NO: 16742 - protein, 24 aa, Artificial Sequence
  Quasi-synthetic sequence derived from human genome
LVKKTRFLRRKVQEGRLRRKQIKF

SEQ ID NO: 16743 - protein, 24 aa, Artificial Sequence
  Quasi-synthetic sequence derived from human genome
KVRKVLQLLRLRQIFNGTFVKLNK

SEQ ID NO: 16744 - protein, 24 aa, Artificial Sequence
  Quasi-synthetic sequence derived from human genome
LKLFLSRRRWQRSQISYKCHLVLR

SEQ ID NO: 16745 - protein, 24 aa, Artificial Sequence
  Quasi-synthetic sequence derived from human genome
RWKFIKRWKTRYFTLAGNQLLFQK

SEQ ID NO: 16746 - protein, 24 aa, Artificial Sequence
  Quasi-synthetic sequence derived from human genome
FPVKKCSAFQFFKKRVRRWIKSPM

SEQ ID NO: 16747 - protein, 24 aa, Artificial Sequence
  Quasi-synthetic sequence derived from human genome
PVRRNSKLATLGRIFKPWKWRKKK

SEQ ID NO: 16748 - protein, 24 aa, Artificial Sequence
  Quasi-synthetic sequence derived from human genome
LINLMKYLQKWKRYRPLWKLDKAI

SEQ ID NO: 16749 - protein, 24 aa, Artificial Sequence
  Quasi-synthetic sequence derived from human genome
RVRLQLKIILCFSPVGRTLRVRAR

SEQ ID NO: 16750 - protein, 24 aa, Artificial Sequence
  Quasi-synthetic sequence derived from human genome
RYKYKLMRQIRMCKDLKHLIYYRF

SEQ ID NO: 16751 - protein, 24 aa, Artificial Sequence
  Quasi-synthetic sequence derived from human genome
KFMSRIDKQISRFRRWLPKKPMRL

SEQ ID NO: 16752 - protein, 24 aa, Artificial Sequence
  Quasi-synthetic sequence derived from human genome
MLRTLLRRRLFSYPTKYYFMVLVL

SEQ ID NO: 16753 - protein, 24 aa, Artificial Sequence
  Quasi-synthetic sequence derived from human genome
PKPPRLRLWALIPWLPRKQRPRIS

SEQ ID NO: 16754 - protein, 24 aa, Artificial Sequence
  Quasi-synthetic sequence derived from human genome
IIKILLRRPNEKKSKAVRLIFVIM

SEQ ID NO: 16755 - protein, 24 aa, Artificial Sequence
  Quasi-synthetic sequence derived from human genome
FWKNWHFRLLLDLTAKMKFCLRWK

SEQ ID NO: 16756 - protein, 24 aa, Artificial Sequence
  Quasi-synthetic sequence derived from human genome
LFLIPRNPPPRLKSKKWSKKFFSF

SEQ ID NO: 16757 - protein, 24 aa, Artificial Sequence
  Quasi-synthetic sequence derived from human genome
KKKPNFILLLKALLLSSYGKLLLI

SEQ ID NO: 16758 - protein, 24 aa, Artificial Sequence
  Quasi-synthetic sequence derived from human genome
ILFRATRKPLSGRTPRLVYKWFLL

SEQ ID NO: 16759 - protein, 24 aa, Artificial Sequence
  Quasi-synthetic sequence derived from human genome
FRLLRVFKLAKSWPTLNMLIKIIG

SEQ ID NO: 16760 - protein, 24 aa, Artificial Sequence
  Quasi-synthetic sequence derived from human genome
GMLMLLPFLLKQHKVWRKCSIRIF

SEQ ID NO: 16761 - protein, 24 aa, Artificial Sequence
  Quasi-synthetic sequence derived from human genome
RIIQFQARCRAYLVRKAFRHRLWA

SEQ ID NO: 16762 - protein, 24 aa, Artificial Sequence
  Quasi-synthetic sequence derived from human genome
KRRPKRREIPLKVLVKAVLFACML

SEQ ID NO: 16763 - protein, 24 aa, Artificial Sequence
  Quasi-synthetic sequence derived from human genome
MLGLRRLSSKKNIRKQRMKILFNV

SEQ ID NO: 16764 - protein, 24 aa, Artificial Sequence
  Quasi-synthetic sequence derived from human genome
RFFVGSRRRAKGLFMGLVRQLVLL

SEQ ID NO: 16765 - protein, 24 aa, Artificial Sequence
  Quasi-synthetic sequence derived from human genome
FILLSHLQLFIKRVVLKTPAKRHK

SEQ ID NO: 16766 - protein, 24 aa, Artificial Sequence
  Quasi-synthetic sequence derived from human genome
VLQRRRPAWLPVRLRSWAWLPVWL

SEQ ID NO: 16767 - protein, 24 aa, Artificial Sequence
  Quasi-synthetic sequence derived from human genome
IKIVKKLKLTGFPYKIFKNTSFIK

SEQ ID NO: 16768 - protein, 24 aa, Artificial Sequence
  Quasi-synthetic sequence derived from human genome
KFRRRTCIILALFILFIFSLMMGL

SEQ ID NO: 16769 - protein, 24 aa, Artificial Sequence
  Quasi-synthetic sequence derived from human genome
GLLAILLVVAVFCILWNWNKRKKR

SEQ ID NO: 16770 - protein, 24 aa, Artificial Sequence
  Quasi-synthetic sequence derived from human genome
RRCFLLTFYLWFLFFSRFLLMLFL

SEQ ID NO: 16771 - protein, 24 aa, Artificial Sequence
  Quasi-synthetic sequence derived from human genome
RLLLTRKKLQLLMLGPFQYAFLKI

SEQ ID NO: 16772 - protein, 24 aa, Artificial Sequence
  Quasi-synthetic sequence derived from human genome
WWVFLVLGFLLFLRGFINYAKVRK

SEQ ID NO: 16773 - protein, 24 aa, Artificial Sequence
  Quasi-synthetic sequence derived from human genome
LLWLALLLSIQRRLPRERKIKYSK

SEQ ID NO: 16774 - protein, 24 aa, Artificial Sequence
  Quasi-synthetic sequence derived from human genome
RRKLKFFFMNPCEKFWARGRKPWK

SEQ ID NO: 16775 - protein, 24 aa, Artificial Sequence
  Quasi-synthetic sequence derived from human genome
IKKKKCIFRLRIRVPPNPPGKLLP

SEQ ID NO: 16776 - protein, 24 aa, Artificial Sequence
  Quasi-synthetic sequence derived from human genome
HLYNWNLPPRRILFIKRFIIYSIR

SEQ ID NO: 16777 - protein, 24 aa, Artificial Sequence
  Quasi-synthetic sequence derived from human genome
KRYLQKATKGKLLIIIFIVTLWGK

SEQ ID NO: 16778 - protein, 24 aa, Artificial Sequence
  Quasi-synthetic sequence derived from human genome
KFWARGRKPWKLAIQILKIAMVTI

SEQ ID NO: 16779 - protein, 24 aa, Artificial Sequence
  Quasi-synthetic sequence derived from human genome
LLLQSFKRRFLAARALRSFRWQSL

SEQ ID NO: 16780 - protein, 24 aa, Artificial Sequence
  Quasi-synthetic sequence derived from human genome
FARYLAMNKVKKMKRYHVGKVWRR

SEQ ID NO: 16781 - protein, 24 aa, Artificial Sequence
  Quasi-synthetic sequence derived from human genome
WLVWGVILFVYLVIRALRLWRTAK

SEQ ID NO: 16782 - protein, 24 aa, Artificial Sequence
  Quasi-synthetic sequence derived from human genome
KRYLKYLTKKYLKKNNLRDWLRVV

SEQ ID NO: 16783 - protein, 24 aa, Artificial Sequence
  Quasi-synthetic sequence derived from human genome
GLIFILLLVFVLIIRGQSKKYAKK

SEQ ID NO: 16784 - protein, 24 aa, Artificial Sequence
  Quasi-synthetic sequence derived from human genome
FFKDKLKQLLHKHQRKSIFKIKKK

SEQ ID NO: 16785 - protein, 24 aa, Artificial Sequence
  Quasi-synthetic sequence derived from human genome
RIAMLWGSGKCKALTKFKFVFFLR

SEQ ID NO: 16786 - protein, 24 aa, Artificial Sequence
  Quasi-synthetic sequence derived from human genome
LKRIRKIKNVTNQIALLKLGKLPL

SEQ ID NO: 16787 - protein, 24 aa, Artificial Sequence
  Quasi-synthetic sequence derived from human genome
WLWKKKDAKSYFSQKWKKYWFVLK

SEQ ID NO: 16788 - protein, 24 aa, Artificial Sequence
  Quasi-synthetic sequence derived from human genome
RLLLLLLLLLLRHTRQGWALRPVL

SEQ ID NO: 16789 - protein, 24 aa, Artificial Sequence
  Quasi-synthetic sequence derived from human genome
KRKTVKAVIDRFLRLHCGLWVRRK

SEQ ID NO: 16790 - protein, 24 aa, Artificial Sequence
  Quasi-synthetic sequence derived from human genome
ARGVRKVFLRLLPQLLRMHVRPLA

SEQ ID NO: 16791 - protein, 24 aa, Artificial Sequence
  Quasi-synthetic sequence derived from human genome
PLPVPRLLPRRLIAAWRDRLARRR

SEQ ID NO: 16792 - protein, 24 aa, Artificial Sequence
  Quasi-synthetic sequence derived from human genome
IIKIQAWARMWAARRQYLRRLHYF

SEQ ID NO: 16793 - protein, 24 aa, Artificial Sequence
  Quasi-synthetic sequence derived from human genome
IQRCYRKYKQLTWIALKFALYKKM

SEQ ID NO: 16794 - protein, 24 aa, Artificial Sequence
  Quasi-synthetic sequence derived from human genome
LHKRVPKGRLLYGLTNTLRLRLKL

SEQ ID NO: 16795 - protein, 24 aa, Artificial Sequence
  Quasi-synthetic sequence derived from human genome
LVALLVAFVLFLRLRSIRCLRNII

SEQ ID NO: 16796 - protein, 24 aa, Artificial Sequence
  Quasi-synthetic sequence derived from human genome
PKMLKMSKGLDARSKRWLKIIWRR

SEQ ID NO: 16797 - protein, 24 aa, Artificial Sequence
  Quasi-synthetic sequence derived from human genome
KMRCLRKRSTVSFLGVLVIFLLFM

SEQ ID NO: 16798 - protein, 24 aa, Artificial Sequence
  Quasi-synthetic sequence derived from human genome
RRIFIQLMKRFGLKATTKINWKQF

SEQ ID NO: 16799 - protein, 24 aa, Artificial Sequence
  Quasi-synthetic sequence derived from human genome
RRRRACIALFLVLLFAFGTLMGLR

SEQ ID NO: 16800 - protein, 24 aa, Artificial Sequence
  Quasi-synthetic sequence derived from human genome
IGRSVHYWKKVLPLLKIIKKKNSI

SEQ ID NO: 16801 - protein, 24 aa, Artificial Sequence
  Quasi-synthetic sequence derived from human genome
ALILILKRLDRMFNKIHKMPTLRR

SEQ ID NO: 16802 - protein, 24 aa, Artificial Sequence
  Quasi-synthetic sequence derived from human genome
LFVIGLFAAGAFILYKFKRKRPGR

SEQ ID NO: 16803 - protein, 24 aa, Artificial Sequence
  Quasi-synthetic sequence derived from human genome
RKGIVRVVFFPFFFRWWLQVTSKV

SEQ ID NO: 16804 - protein, 24 aa, Artificial Sequence
  Quasi-synthetic sequence derived from human genome
RLKRRVKSVILVVLLGPLLFLACH

SEQ ID NO: 16805 - protein, 24 aa, Artificial Sequence
  Quasi-synthetic sequence derived from human genome
MAKPFFRLQKFLRRTQFLLFFLTA

SEQ ID NO: 16806 - protein, 24 aa, Artificial Sequence
  Quasi-synthetic sequence derived from human genome
YLFRKYIAYRLIQHARNNIMKRLK

SEQ ID NO: 16807 - protein, 24 aa, Artificial Sequence
  Quasi-synthetic sequence derived from human genome
FVKIKASHNLKKKILRFRSGSLKL

SEQ ID NO: 16808 - protein, 24 aa, Artificial Sequence
  Quasi-synthetic sequence derived from human genome
LVMYFIMLFCITMKRQIKHMIKYR

SEQ ID NO: 16809 - protein, 24 aa, Artificial Sequence
  Quasi-synthetic sequence derived from human genome
LLYERFKRQQHALRNRRLLRKVIK

SEQ ID NO: 16810 - protein, 24 aa, Artificial Sequence
  Quasi-synthetic sequence derived from human genome
KVRRVFVRKVYTILLIQLLVTLAV

SEQ ID NO: 16811 - protein, 24 aa, Artificial Sequence
  Quasi-synthetic sequence derived from human genome
FRLQFNNKRRLRRPYYPRKALLCY

SEQ ID NO: 16812 - protein, 24 aa, Artificial Sequence
  Quasi-synthetic sequence derived from human genome
WFCKRRRAFWHTPRLPTLPKRVPR

SEQ ID NO: 16813 - protein, 24 aa, Artificial Sequence
  Quasi-synthetic sequence derived from human genome
CFLRRPGAPASWIWWRMLRQVLRR

SEQ ID NO: 16814 - protein, 24 aa, Artificial Sequence
  Quasi-synthetic sequence derived from human genome
RRLRKNLKSLIIVHPSWFIRTVLA

SEQ ID NO: 16815 - protein, 24 aa, Artificial Sequence
  Quasi-synthetic sequence derived from human genome
ANLGRVAQVLRLMRIFRILKLARH

SEQ ID NO: 16816 - protein, 24 aa, Artificial Sequence
  Quasi-synthetic sequence derived from human genome
LNLAALTLQRCLRGFFIKRRFRSL

SEQ ID NO: 16817 - protein, 24 aa, Artificial Sequence
  Quasi-synthetic sequence derived from human genome
LLLGKTYLKLHNKKLAAFWLMKAK

SEQ ID NO: 16818 - protein, 24 aa, Artificial Sequence
  Quasi-synthetic sequence derived from human genome
VVNRKFGNRIKVLRSRIRFIHLVT

SEQ ID NO: 16819 - protein, 24 aa, Artificial Sequence
  Quasi-synthetic sequence derived from human genome
RYLKKKKSVVSRLKKAKRTAKVLL

SEQ ID NO: 16820 - protein, 24 aa, Artificial Sequence
  Quasi-synthetic sequence derived from human genome
LIFKVKKRSILISSRHFWTILVVV

SEQ ID NO: 16821 - protein, 24 aa, Artificial Sequence
  Quasi-synthetic sequence derived from human genome
KTVKKKIKPTLPLRIFINVSRFFC

SEQ ID NO: 16822 - protein, 24 aa, Artificial Sequence
  Quasi-synthetic sequence derived from human genome
IRVRRAGFAYRRQFAKFLQRYAIL

SEQ ID NO: 16823 - protein, 24 aa, Artificial Sequence
  Quasi-synthetic sequence derived from human genome
AKRMKFKTVCYLLVQLMHCRKMFK

SEQ ID NO: 16824 - protein, 24 aa, Artificial Sequence
  Quasi-synthetic sequence derived from human genome
LKLMVQAWPFRRLPLRPLIKMPCL

SEQ ID NO: 16825 - protein, 24 aa, Artificial Sequence
  Quasi-synthetic sequence derived from human genome
IRSFMNVKHWPWMNLFFKIKPLLK

SEQ ID NO: 16826 - protein, 24 aa, Artificial Sequence
  Quasi-synthetic sequence derived from human genome
IRMAKALGKRTAKYRWFAVLYLLV

SEQ ID NO: 16827 - protein, 24 aa, Artificial Sequence
  Quasi-synthetic sequence derived from human genome
SFFFIIFIVFISRKCCPPTLRRIR

SEQ ID NO: 16828 - protein, 24 aa, Artificial Sequence
  Quasi-synthetic sequence derived from human genome
SFLWFTNPCKTMKFIVWRRFKWVI

SEQ ID NO: 16829 - protein, 24 aa, Artificial Sequence
  Quasi-synthetic sequence derived from human genome
FGNNFINLSFLRLFRAARLIKLLR

SEQ ID NO: 16830 - protein, 24 aa, Artificial Sequence
  Quasi-synthetic sequence derived from human genome
RRLFVRRGQPFTIILYFRAPVRAF

SEQ ID NO: 16831 - protein, 24 aa, Artificial Sequence
  Quasi-synthetic sequence derived from human genome
RGFLKFNTIPPLRKYMLVFKGKRY

SEQ ID NO: 16832 - protein, 24 aa, Artificial Sequence
  Quasi-synthetic sequence derived from human genome
ILKAVKVLQASFRGVRVRRTLRKM

SEQ ID NO: 16833 - protein, 24 aa, Artificial Sequence
  Quasi-synthetic sequence derived from human genome
YRYCCKINKKLKSITMLRKKIVHF

SEQ ID NO: 16834 - protein, 24 aa, Artificial Sequence
  Quasi-synthetic sequence derived from human genome
IPIKQGMLLKRSGKWLKTWKKKYV

SEQ ID NO: 16835 - protein, 24 aa, Artificial Sequence
  Quasi-synthetic sequence derived from human genome
IGRMRTRLVRKRFLCLGWGLPALV

SEQ ID NO: 16836 - protein, 24 aa, Artificial Sequence
  Quasi-synthetic sequence derived from human genome
RRTAILPWGSWLRVLGRLVKLSLK

SEQ ID NO: 16837 - protein, 24 aa, Artificial Sequence
  Quasi-synthetic sequence derived from human genome
SSRISITFFRLFRVMRLVKLLSKG

SEQ ID NO: 16838 - protein, 24 aa, Artificial Sequence
  Quasi-synthetic sequence derived from human genome
IFVLLTITTLYCCRRRKQWKNKKR

SEQ ID NO: 16839 - protein, 24 aa, Artificial Sequence
  Quasi-synthetic sequence derived from human genome
RRHQRKLLAAINAFRQVRLKHRKL

SEQ ID NO: 16840 - protein, 24 aa, Artificial Sequence
  Quasi-synthetic sequence derived from human genome
LARRRLVKVINNRAKLLSLCSFII

SEQ ID NO: 16841 - protein, 24 aa, Artificial Sequence
  Quasi-synthetic sequence derived from human genome
NGQLMKTIIRKINKMKTLKRKKLL

SEQ ID NO: 16842 - protein, 24 aa, Artificial Sequence
  Quasi-synthetic sequence derived from human genome
FRLRRRDLLLGFNKRAIDKCWKIR

SEQ ID NO: 16843 - protein, 24 aa, Artificial Sequence
  Quasi-synthetic sequence derived from human genome
GKGKRWFAFKMMMAKKWAKFLRDF

SEQ ID NO: 16844 - protein, 24 aa, Artificial Sequence
  Quasi-synthetic sequence derived from human genome
LTLKQFVRRQQVLLLYRRILQTIR

SEQ ID NO: 16845 - protein, 24 aa, Artificial Sequence
  Quasi-synthetic sequence derived from human genome
GLKMLMKRALKFKDPLLMKMIRNI

SEQ ID NO: 16846 - protein, 24 aa, Artificial Sequence
  Quasi-synthetic sequence derived from human genome
WLLWTVLILFSCCCAFRHRRAKLR

SEQ ID NO: 16847 - protein, 24 aa, Artificial Sequence
  Quasi-synthetic sequence derived from human genome
LLMKRPCLHGSSLRRLPCRKRFVK

SEQ ID NO: 16848 - protein, 24 aa, Artificial Sequence
  Quasi-synthetic sequence derived from human genome
CRICAFLLRKKRFGQWAKQLTVIR

SEQ ID NO: 16849 - protein, 24 aa, Artificial Sequence
  Quasi-synthetic sequence derived from human genome
FRLFRVMRLIKLLSRAEGVRTLLW

SEQ ID NO: 16850 - protein, 24 aa, Artificial Sequence
  Quasi-synthetic sequence derived from human genome
LLLRLLRGAPRQRVCTLFIIGFKF

SEQ ID NO: 16851 - protein, 24 aa, Artificial Sequence
  Quasi-synthetic sequence derived from human genome
IRRKNLRKLRRKCAVPSSSWLPWI

SEQ ID NO: 16852 - protein, 24 aa, Artificial Sequence
  Quasi-synthetic sequence derived from human genome
KLQRNRLAKTKKPFKIIVTIIITF

SEQ ID NO: 16853 - protein, 24 aa, Artificial Sequence
  Quasi-synthetic sequence derived from human genome
GGLLLLLLIFIVLYKVGFFKRNLK

SEQ ID NO: 16854 - protein, 24 aa, Artificial Sequence
  Quasi-synthetic sequence derived from human genome
LCLLLYYCRRKCLKPRQHHRKLQL

SEQ ID NO: 16855 - protein, 24 aa, Artificial Sequence
  Quasi-synthetic sequence derived from human genome
FIPFFKYCLLRKSFTCWKKNVRLQ

SEQ ID NO: 16856 - protein, 24 aa, Artificial Sequence
  Quasi-synthetic sequence derived from human genome
WFICSLCVPRVRKLWSSRRPRTRR

SEQ ID NO: 16857 - protein, 24 aa, Artificial Sequence
  Quasi-synthetic sequence derived from human genome
RWSYIRMCKFLRYFFYKNFAFTLV

SEQ ID NO: 16858 - protein, 24 aa, Artificial Sequence
  Quasi-synthetic sequence derived from human genome
MKLLLWACIVCVAFARKRRFPFIG

SEQ ID NO: 16859 - protein, 24 aa, Artificial Sequence
  Quasi-synthetic sequence derived from human genome
RNRLRTVLKNLSLLKLLKSSNRRI

SEQ ID NO: 16860 - protein, 24 aa, Artificial Sequence
  Quasi-synthetic sequence derived from human genome
LFSCKNHKKAKAIKLILLVVIVFF

SEQ ID NO: 16861 - protein, 24 aa, Artificial Sequence
  Quasi-synthetic sequence derived from human genome
RKLGVKLVQRLGLTFLKPKVAAWR

SEQ ID NO: 16862 - protein, 24 aa, Artificial Sequence
  Quasi-synthetic sequence derived from human genome
RKKLVRALFIVPRQRLDLLPFYAR

SEQ ID NO: 16863 - protein, 24 aa, Artificial Sequence
  Quasi-synthetic sequence derived from human genome
LLKKIGISWNKKYRKQHGPLRKFL

SEQ ID NO: 16864 - protein, 24 aa, Artificial Sequence
  Quasi-synthetic sequence derived from human genome
SIVILYCRIYSLVRTRSRRLTFRK

SEQ ID NO: 16865 - protein, 24 aa, Artificial Sequence
  Quasi-synthetic sequence derived from human genome
VRRRSFSISPVRLRRSRTPLRRRF

SEQ ID NO: 16866 - protein, 24 aa, Artificial Sequence
  Quasi-synthetic sequence derived from human genome
PIIYFFMCRSFSRRLFKKSNIRTR

SEQ ID NO: 16867 - protein, 24 aa, Artificial Sequence
  Quasi-synthetic sequence derived from human genome
VRRRKWIRYRRYKSRDIWAKIPSK

SEQ ID NO: 16868 - protein, 24 aa, Artificial Sequence
  Quasi-synthetic sequence derived from human genome
FWIQKLPKVLCLHLKRFHWTAYLR

SEQ ID NO: 16869 - protein, 24 aa, Artificial Sequence
  Quasi-synthetic sequence derived from human genome
FILTNPRSLKHLCRLKIRKCMGRL

SEQ ID NO: 16870 - protein, 24 aa, Artificial Sequence
  Quasi-synthetic sequence derived from human genome
WKHLSVRRFFWWARFIAINTFLFF

SEQ ID NO: 16871 - protein, 24 aa, Artificial Sequence
  Quasi-synthetic sequence derived from human genome
NLLRLLNKLTKWKHSRTMMLVVFK

SEQ ID NO: 16872 - protein, 24 aa, Artificial Sequence
  Quasi-synthetic sequence derived from human genome
FLAFCRRHVRAARPVPWNALLRRR

SEQ ID NO: 16873 - protein, 24 aa, Artificial Sequence
  Quasi-synthetic sequence derived from human genome
RIKSLLPKLSCGVKNRMHIRRKRI

SEQ ID NO: 16874 - protein, 24 aa, Artificial Sequence
  Quasi-synthetic sequence derived from human genome
IAIFQRQKRRKFWKAKNLQHIPLK

SEQ ID NO: 16875 - protein, 24 aa, Artificial Sequence
  Quasi-synthetic sequence derived from human genome
RRLKGARRLKLSPLRSLRKGPGLL

SEQ ID NO: 16876 - protein, 24 aa, Artificial Sequence
  Quasi-synthetic sequence derived from human genome
AVFLPIVVLIFKSILFLPCLRKKI

SEQ ID NO: 16877 - protein, 24 aa, Artificial Sequence
  Quasi-synthetic sequence derived from human genome
IRVFIKTIRRDIFGGLVLLKVKAK

SEQ ID NO: 16878 - protein, 24 aa, Artificial Sequence
  Quasi-synthetic sequence derived from human genome
RGVGKVPRKKVNVKVFIIIAVFFI

SEQ ID NO: 16879 - protein, 24 aa, Artificial Sequence
  Quasi-synthetic sequence derived from human genome
FIYFFACKGYKRKVMRMLKRQVSV

SEQ ID NO: 16880 - protein, 24 aa, Artificial Sequence
  Quasi-synthetic sequence derived from human genome
LTFNRGFKAGRNMRRKLFGVLRLK

SEQ ID NO: 16881 - protein, 24 aa, Artificial Sequence
  Quasi-synthetic sequence derived from human genome
RRVLVLMNSKHTFLALCALRFMRR

SEQ ID NO: 16882 - protein, 24 aa, Artificial Sequence
  Quasi-synthetic sequence derived from human genome
YLLLRKILLRKFCQMRKRRLREQE

SEQ ID NO: 16883 - protein, 24 aa, Artificial Sequence
  Quasi-synthetic sequence derived from human genome
KMMLVRRFRVLILMVFLVACALHI

SEQ ID NO: 16884 - protein, 24 aa, Artificial Sequence
  Quasi-synthetic sequence derived from human genome
IRLGIFLRRYPIARVFVIIYMALL

SEQ ID NO: 16885 - protein, 24 aa, Artificial Sequence
  Quasi-synthetic sequence derived from human genome
VKLKKYTKFLFVRDPFVRLISAFR

SEQ ID NO: 16886 - protein, 24 aa, Artificial Sequence
  Quasi-synthetic sequence derived from human genome
LWLYLKLLPYVLEKGSRRKVRVKV

SEQ ID NO: 16887 - protein, 24 aa, Artificial Sequence
  Quasi-synthetic sequence derived from human genome
KFYSHKKILQLIKSQKFLNKLVIL

SEQ ID NO: 16888 - protein, 24 aa, Artificial Sequence
  Quasi-synthetic sequence derived from human genome
ALLLLKRSRIPIFKADRPFIYFLR

SEQ ID NO: 16889 - protein, 24 aa, Artificial Sequence
  Quasi-synthetic sequence derived from human genome
RYLLILSPLRYKLRMTPLRALALV

SEQ ID NO: 16890 - protein, 24 aa, Artificial Sequence
  Quasi-synthetic sequence derived from human genome
AGRRRGNVVRRVFGRIRRFFSRRR

SEQ ID NO: 16891 - protein, 24 aa, Artificial Sequence
  Quasi-synthetic sequence derived from human genome
LLRNRRCTVAYLYDRLLRIRALRW

SEQ ID NO: 16892 - protein, 24 aa, Artificial Sequence
  Quasi-synthetic sequence derived from human genome
IILVLVVLFLLALFIIYRHKQKGK

SEQ ID NO: 16893 - protein, 24 aa, Artificial Sequence
  Quasi-synthetic sequence derived from human genome
MLFWVLGLLILCGFLWTRKGKLKI

SEQ ID NO: 16894 - protein, 24 aa, Artificial Sequence
  Quasi-synthetic sequence derived from human genome
PPRRQLYLPMLFKVRLLMVSRMAK

SEQ ID NO: 16895 - protein, 24 aa, Artificial Sequence
  Quasi-synthetic sequence derived from human genome
ARICAFLWRKKWLGQWAKQLCVIK

SEQ ID NO: 16896 - protein, 24 aa, Artificial Sequence
  Quasi-synthetic sequence derived from human genome
LKEVRLFLKNYSKTRFGYRIKWRI

SEQ ID NO: 16897 - protein, 24 aa, Artificial Sequence
  Quasi-synthetic sequence derived from human genome
FVMREWKKSRKLLGQRLFNKLMKM

SEQ ID NO: 16898 - protein, 24 aa, Artificial Sequence
  Quasi-synthetic sequence derived from human genome
IMMKKKKKKKKHSPKNLLLNFVTI

SEQ ID NO: 16899 - protein, 24 aa, Artificial Sequence
  Quasi-synthetic sequence derived from human genome
RRRRMHVLRRRWDLGSLCRALLTR

SEQ ID NO: 16900 - protein, 24 aa, Artificial Sequence
  Quasi-synthetic sequence derived from human genome
GFCGLTALYFLIRAFRLKKPQRRR

SEQ ID NO: 16901 - protein, 24 aa, Artificial Sequence
  Quasi-synthetic sequence derived from human genome
KKAIKYQSKARRKKWIIIAVSVVL

SEQ ID NO: 16902 - protein, 24 aa, Artificial Sequence
  Quasi-synthetic sequence derived from human genome
VVQVFRLMRIFRVLKLARHSTGLR

SEQ ID NO: 16903 - protein, 24 aa, Artificial Sequence
  Quasi-synthetic sequence derived from human genome
LLARNKIRTLKNNMFSKFKKLKSL

SEQ ID NO: 16904 - protein, 24 aa, Artificial Sequence
  Quasi-synthetic sequence derived from human genome
RLGGFRVCHKLIFMIIQKLFRSHK

SEQ ID NO: 16905 - protein, 24 aa, Artificial Sequence
  Quasi-synthetic sequence derived from human genome
FFHKKERRMRFYIRRMVKTQAFYW

SEQ ID NO: 16906 - protein, 24 aa, Artificial Sequence
  Quasi-synthetic sequence derived from human genome
RRLWEAVKRRKALCKRKSWMSKVF

SEQ ID NO: 16907 - protein, 24 aa, Artificial Sequence
  Quasi-synthetic sequence derived from human genome
MAALRPLVKPKIVKKRTKKFIRHQ

SEQ ID NO: 16908 - protein, 24 aa, Artificial Sequence
  Quasi-synthetic sequence derived from human genome
FLQLRFWGWWKLYNKVKPLLNVAR

SEQ ID NO: 16909 - protein, 24 aa, Artificial Sequence
  Quasi-synthetic sequence derived from human genome
KFKKFDHRYLRKILIRKNLPKSSI

SEQ ID NO: 16910 - protein, 24 aa, Artificial Sequence
  Quasi-synthetic sequence derived from human genome
KEIKPFKRFLRKKSKPKKCVKKFV

SEQ ID NO: 16911 - protein, 24 aa, Artificial Sequence
  Quasi-synthetic sequence derived from human genome
GRWLNKLMKLLQRLPNSVVRRLHR

SEQ ID NO: 16912 - protein, 24 aa, Artificial Sequence
  Quasi-synthetic sequence derived from human genome
RNFMNIRPVKLKNLILLVKHWYRQ

SEQ ID NO: 16913 - protein, 24 aa, Artificial Sequence
  Quasi-synthetic sequence derived from human genome
RRLLLALHRRLRGLRRAAAGTSRL

SEQ ID NO: 16914 - protein, 24 aa, Artificial Sequence
  Quasi-synthetic sequence derived from human genome
LILMRNLMNVRNVKRLLGKVHILL

SEQ ID NO: 16915 - protein, 24 aa, Artificial Sequence
  Quasi-synthetic sequence derived from human genome
AILACIFVLLVLVLLILSMRRHRK

SEQ ID NO: 16916 - protein, 24 aa, Artificial Sequence
  Quasi-synthetic sequence derived from human genome
RLCIRKFFPKRKCFVFDWPAPKKY

SEQ ID NO: 16917 - protein, 24 aa, Artificial Sequence
  Quasi-synthetic sequence derived from human genome
CVMTSRPRGVKRRWRLSRIVFRHL

SEQ ID NO: 16918 - protein, 24 aa, Artificial Sequence
  Quasi-synthetic sequence derived from human genome
KWRHHRRLLTPAFHFNILKPYIKI

SEQ ID NO: 16919 - protein, 24 aa, Artificial Sequence
  Quasi-synthetic sequence derived from human genome
RARRRRTFCLLVVIVVVFAVCWLP

SEQ ID NO: 16920 - protein, 24 aa, Artificial Sequence
  Quasi-synthetic sequence derived from human genome
YSLLKRYLLKRLNLIWNIYSTIIR

SEQ ID NO: 16921 - protein, 24 aa, Artificial Sequence
  Quasi-synthetic sequence derived from human genome
SFLILPFQRITRLKLLVQNILKRV

SEQ ID NO: 16922 - protein, 24 aa, Artificial Sequence
  Quasi-synthetic sequence derived from human genome
LLLVHGRWSYVRICKFLRYFFYKS

SEQ ID NO: 16923 - protein, 24 aa, Artificial Sequence
  Quasi-synthetic sequence derived from human genome
RKLIQFGLMKNLIRRLQKYPVRVT

SEQ ID NO: 16924 - protein, 24 aa, Artificial Sequence
  Quasi-synthetic sequence derived from human genome
KRLLIARRSRKGFFAQIVLPAVFV

SEQ ID NO: 16925 - protein, 24 aa, Artificial Sequence
  Quasi-synthetic sequence derived from human genome
KKRRKVTRKEPPVIIKYIIINRFK

SEQ ID NO: 16926 - protein, 24 aa, Artificial Sequence
  Quasi-synthetic sequence derived from human genome
RIRKFFRGSGRVLAFIFVASVIWL

SEQ ID NO: 16927 - protein, 24 aa, Artificial Sequence
  Quasi-synthetic sequence derived from human genome
GFFVVLLFLWRSFRSVRSRLYVGR

SEQ ID NO: 16928 - protein, 24 aa, Artificial Sequence
  Quasi-synthetic sequence derived from human genome
VLWLSYLKSVFNPIVYCWRIKKFR

SEQ ID NO: 16929 - protein, 24 aa, Artificial Sequence
  Quasi-synthetic sequence derived from human genome
WMRIFIQAKRVKTKHLCYCLYRPR

SEQ ID NO: 16930 - protein, 24 aa, Artificial Sequence
  Quasi-synthetic sequence derived from human genome
PVLAVILIILIVIAILLFKRKRTH

SEQ ID NO: 16931 - protein, 24 aa, Artificial Sequence
  Quasi-synthetic sequence derived from human genome
LVPLVYTIKRHKWSVLKSRKLAYR

SEQ ID NO: 16932 - protein, 24 aa, Artificial Sequence
  Quasi-synthetic sequence derived from human genome
IKVSSFTHHIFLWLRWRILRLFPW

SEQ ID NO: 16933 - protein, 24 aa, Artificial Sequence
  Quasi-synthetic sequence derived from human genome
LPFPKRGMQRWMLPLRRGARLLPL

SEQ ID NO: 16934 - protein, 24 aa, Artificial Sequence
  Quasi-synthetic sequence derived from human genome
IYLYNFLKRQKAPRSKLISVLKIL

SEQ ID NO: 16935 - protein, 24 aa, Artificial Sequence
  Quasi-synthetic sequence derived from human genome
FRRLLKLPRTLILLLGGALALLLV

SEQ ID NO: 16936 - protein, 24 aa, Artificial Sequence
  Quasi-synthetic sequence derived from human genome
LLIPNVLFLIFLLWKLPSARAKIR

SEQ ID NO: 16937 - protein, 24 aa, Artificial Sequence
  Quasi-synthetic sequence derived from human genome
WKPYKLRRLYFIWVCRDIQSFRWF

SEQ ID NO: 16938 - protein, 24 aa, Artificial Sequence
  Quasi-synthetic sequence derived from human genome
KTKKGRSIPVWIKILLFVVVAVFL

SEQ ID NO: 16939 - protein, 24 aa, Artificial Sequence
  Quasi-synthetic sequence derived from human genome
LRLPRLLSPPLRPRLLLLLLLLSP

SEQ ID NO: 16940 - protein, 24 aa, Artificial Sequence
  Quasi-synthetic sequence derived from human genome
SIFYLLKIANFSNLIFLHLKRRVK

SEQ ID NO: 16941 - protein, 24 aa, Artificial Sequence
  Quasi-synthetic sequence derived from human genome
SIFYLLKIANFSNFIFLHLKRRVK

SEQ ID NO: 16942 - protein, 24 aa, Artificial Sequence
  Quasi-synthetic sequence derived from human genome
MKRMVSWSFHKLKTMKHLLLLLLC

SEQ ID NO: 16943 - protein, 24 aa, Artificial Sequence
  Quasi-synthetic sequence derived from human genome
KLTSAPLKQNFQKLLKLFYIKKLK

SEQ ID NO: 16944 - protein, 24 aa, Artificial Sequence
  Quasi-synthetic sequence derived from human genome
RRRLNRGLRRKQHSLLKRLRKAKK

SEQ ID NO: 16945 - protein, 24 aa, Artificial Sequence
  Quasi-synthetic sequence derived from human genome
GIMLLLFLIVVLLGLFAWHRRRQK

SEQ ID NO: 16946 - protein, 24 aa, Artificial Sequence
  Quasi-synthetic sequence derived from human genome
VLLVTLITTLVIGLVLCKRKRRTK

SEQ ID NO: 16947 - protein, 24 aa, Artificial Sequence
  Quasi-synthetic sequence derived from human genome
RRCLPSMAFKKPWRGPVRLQILKR

SEQ ID NO: 16948 - protein, 24 aa, Artificial Sequence
  Quasi-synthetic sequence derived from human genome
AVAVTVLGIMILGLICLLRWRRRK

SEQ ID NO: 16949 - protein, 24 aa, Artificial Sequence
  Quasi-synthetic sequence derived from human genome
KFRCKVVDCLKFFRKAKLLHYHMK

SEQ ID NO: 16950 - protein, 24 aa, Artificial Sequence
  Quasi-synthetic sequence derived from human genome
RLKSQLLLQKYIAQRKWKKHFYVV

SEQ ID NO: 16951 - protein, 24 aa, Artificial Sequence
  Quasi-synthetic sequence derived from human genome
LLPFCVCLMSFFLLILSLRRHIRR

SEQ ID NO: 16952 - protein, 24 aa, Artificial Sequence
  Quasi-synthetic sequence derived from human genome
RTKVKTIKMFLILNLLFLLSWLPF

SEQ ID NO: 16953 - protein, 24 aa, Artificial Sequence
  Quasi-synthetic sequence derived from human genome
LRNRLIRKRFLCLGWGLPALVVAI

SEQ ID NO: 16954 - protein, 24 aa, Artificial Sequence
  Quasi-synthetic sequence derived from human genome
RILWGNNHFFRINLPKRKRRDWLK

SEQ ID NO: 16955 - protein, 24 aa, Artificial Sequence
  Quasi-synthetic sequence derived from human genome
RRLFLSGAPRFRHRGKVIAFQLKK

SEQ ID NO: 16956 - protein, 24 aa, Artificial Sequence
  Quasi-synthetic sequence derived from human genome
RLKKSAFVVLILLITAKLLVLPLL

SEQ ID NO: 16957 - protein, 24 aa, Artificial Sequence
  Quasi-synthetic sequence derived from human genome
APKQKVKYLTFRFIFALRLSKKQK

SEQ ID NO: 16958 - protein, 24 aa, Artificial Sequence
  Quasi-synthetic sequence derived from human genome
LFMRRRHIVRKRTLRRLLQERELV

SEQ ID NO: 16959 - protein, 24 aa, Artificial Sequence
  Quasi-synthetic sequence derived from human genome
RRLSEILAFPRAWYRRSIARRLFL

SEQ ID NO: 16960 - protein, 24 aa, Artificial Sequence
  Quasi-synthetic sequence derived from human genome
NLLRILNKLTKWKHSRTMMLVVFK

SEQ ID NO: 16961 - protein, 24 aa, Artificial Sequence
  Quasi-synthetic sequence derived from human genome
LLRKINQVLLFLLIVTLCVILYKK

SEQ ID NO: 16962 - protein, 24 aa, Artificial Sequence
  Quasi-synthetic sequence derived from human genome
RRRALARLVLRLNAPLWALPVAWL

SEQ ID NO: 16963 - protein, 24 aa, Artificial Sequence
  Quasi-synthetic sequence derived from human genome
LKRKWIRCSAQATVLHLKKFIAKK

SEQ ID NO: 16964 - protein, 24 aa, Artificial Sequence
  Quasi-synthetic sequence derived from human genome
RSKINKTKVLKMIFVHLIIFCFCF

SEQ ID NO: 16965 - protein, 24 aa, Artificial Sequence
  Quasi-synthetic sequence derived from human genome
AILLCVLILLAIVVLFITLRRSKK

SEQ ID NO: 16966 - protein, 24 aa, Artificial Sequence
  Quasi-synthetic sequence derived from human genome
MSIRRLLILILKIGRRWTELIRTM

SEQ ID NO: 16967 - protein, 24 aa, Artificial Sequence
  Quasi-synthetic sequence derived from human genome
RISRRLRRPPHVGRARRNSLRIIF

SEQ ID NO: 16968 - protein, 24 aa, Artificial Sequence
  Quasi-synthetic sequence derived from human genome
LWRGRIPGRQWIGKHRRPRFVSLR

SEQ ID NO: 16969 - protein, 24 aa, Artificial Sequence
  Quasi-synthetic sequence derived from human genome
PHFRLKKVENIKIWLSLRSYLKRR

SEQ ID NO: 16970 - protein, 24 aa, Artificial Sequence
  Quasi-synthetic sequence derived from human genome
KKLVELLRRKVRLAQPYVGVFLKR

SEQ ID NO: 16971 - protein, 24 aa, Artificial Sequence
  Quasi-synthetic sequence derived from human genome
LKAGWLKKQRSIMKNWQQRWFVLR

SEQ ID NO: 16972 - protein, 24 aa, Artificial Sequence
  Quasi-synthetic sequence derived from human genome
KALYRRLATVHMSRMINKYKRRRF

SEQ ID NO: 16973 - protein, 24 aa, Artificial Sequence
  Quasi-synthetic sequence derived from human genome
AIRIKKPIKTKFRLPVFNWTALKP

SEQ ID NO: 16974 - protein, 24 aa, Artificial Sequence
  Quasi-synthetic sequence derived from human genome
KARRLTILLLLAFYVCFLPFHILR

SEQ ID NO: 16975 - protein, 24 aa, Artificial Sequence
  Quasi-synthetic sequence derived from human genome
LVPFIALIIAGFVLYLYKHRRRPK

SEQ ID NO: 16976 - protein, 24 aa, Artificial Sequence
  Quasi-synthetic sequence derived from human genome
LFYRTYMLFKNASGKRRFLLCLLL

SEQ ID NO: 16977 - protein, 24 aa, Artificial Sequence
  Quasi-synthetic sequence derived from human genome
RSMNPRARKKRSRIPLLRKRRFQL

SEQ ID NO: 16978 - protein, 24 aa, Artificial Sequence
  Quasi-synthetic sequence derived from human genome
VKIWFQNRRMKKKRLLLREQALSF

SEQ ID NO: 16979 - protein, 24 aa, Artificial Sequence
  Quasi-synthetic sequence derived from human genome
RMLKQLKHPNLVNLLEVFRRKRRL

SEQ ID NO: 16980 - protein, 24 aa, Artificial Sequence
  Quasi-synthetic sequence derived from human genome
LLLKRGSCRSTWLRVRKARPQLIL

SEQ ID NO: 16981 - protein, 24 aa, Artificial Sequence
  Quasi-synthetic sequence derived from human genome
RVLIGVGKLLRVYDLGKKKLLRKC

SEQ ID NO: 16982 - protein, 24 aa, Artificial Sequence
  Quasi-synthetic sequence derived from human genome
LLLKYKSIISRRFFCIVGTLYLYR

SEQ ID NO: 16983 - protein, 24 aa, Artificial Sequence
  Quasi-synthetic sequence derived from human genome
LKALKYLFRFIIQSRVLYLRFYGQ

SEQ ID NO: 16984 - protein, 24 aa, Artificial Sequence
  Quasi-synthetic sequence derived from human genome
LGRTKHLKVARRRLRPLRDPLLRM

SEQ ID NO: 16985 - protein, 24 aa, Artificial Sequence
  Quasi-synthetic sequence derived from human genome
LIYSLRNSEMKRTLIKLWRRKVIL

SEQ ID NO: 16986 - protein, 24 aa, Artificial Sequence
  Quasi-synthetic sequence derived from human genome
LRRTRLILFVLLLFGIYGLLKNPF

SEQ ID NO: 16987 - protein, 24 aa, Artificial Sequence
  Quasi-synthetic sequence derived from human genome
RMSRCCFWRRRTTKLEQILLFIRR

SEQ ID NO: 16988 - protein, 24 aa, Artificial Sequence
  Quasi-synthetic sequence derived from human genome
LIRSRLRKVPRFKTMFSNLIHYPR

SEQ ID NO: 16989 - protein, 24 aa, Artificial Sequence
  Quasi-synthetic sequence derived from human genome
IFSFFAEQLIALKRKIFPRRRIHK

SEQ ID NO: 16990 - protein, 24 aa, Artificial Sequence
  Quasi-synthetic sequence derived from human genome
WKLKQKKKLERKKLIKDMKAKIRV

SEQ ID NO: 16991 - protein, 24 aa, Artificial Sequence
  Quasi-synthetic sequence derived from human genome
RFKHLKKLLLVHGHWCYSRLARMV

SEQ ID NO: 16992 - protein, 24 aa, Artificial Sequence
  Quasi-synthetic sequence derived from human genome
RRRKTVRLLLANLVIFLLCFVPYN

SEQ ID NO: 16993 - protein, 24 aa, Artificial Sequence
  Quasi-synthetic sequence derived from human genome
FWRRLQSAFLKNRSLRTKSSLWRR

SEQ ID NO: 16994 - protein, 24 aa, Artificial Sequence
  Quasi-synthetic sequence derived from human genome
RMMVPKVRLLYSLAFNARFLRHLW

SEQ ID NO: 16995 - protein, 24 aa, Artificial Sequence
  Quasi-synthetic sequence derived from human genome
MNPRARKNRSRIPLLRKRRFQLYR

SEQ ID NO: 16996 - protein, 24 aa, Artificial Sequence
  Quasi-synthetic sequence derived from human genome
KLKSLIRLVKHWYQNCKKKLGKLP

SEQ ID NO: 16997 - protein, 24 aa, Artificial Sequence
  Quasi-synthetic sequence derived from human genome
KHRWYKKILKSRDPIIFSVGWRRF

SEQ ID NO: 16998 - protein, 24 aa, Artificial Sequence
  Quasi-synthetic sequence derived from human genome
LFLLLVLVVIVVCSIRKSSRTLKK

SEQ ID NO: 16999 - protein, 24 aa, Artificial Sequence
  Quasi-synthetic sequence derived from human genome
VICLASLILCTRSIVLALRLRKRF

SEQ ID NO: 17000 - protein, 24 aa, Artificial Sequence
  Quasi-synthetic sequence derived from human genome
YLYRSKGNKKPWKHFWFVIKNKVL

SEQ ID NO: 17001 - protein, 25 aa, Artificial Sequence
  Quasi-synthetic sequence derived from human genome
KLLKRLRLLPALLILRAFKPHRKIR

SEQ ID NO: 17002 - protein, 25 aa, Artificial Sequence
  Quasi-synthetic sequence derived from human genome
FFLFRLLLRFLRLCRSFYITCRRLR

SEQ ID NO: 17003 - protein, 25 aa, Artificial Sequence
  Quasi-synthetic sequence derived from human genome
ILLFVIIFLGVVLVMKKRKLAKKRK

SEQ ID NO: 17004 - protein, 25 aa, Artificial Sequence
  Quasi-synthetic sequence derived from human genome
RALRIVRFTKILSLLRLLRLSRLIR

SEQ ID NO: 17005 - protein, 25 aa, Artificial Sequence
  Quasi-synthetic sequence derived from human genome
IRIFKRKKRIKRRALLFLSYILTHF

SEQ ID NO: 17006 - protein, 25 aa, Artificial Sequence
  Quasi-synthetic sequence derived from human genome
ILVFILLLLVVILIVKKSKLAKKRK

SEQ ID NO: 17007 - protein, 25 aa, Artificial Sequence
  Quasi-synthetic sequence derived from human genome
LFRILKVFKSLRALRAIRVLRRLSF

SEQ ID NO: 17008 - protein, 25 aa, Artificial Sequence
  Quasi-synthetic sequence derived from human genome
LRIVRFTKILSLLRLLRLSRLIRYI

SEQ ID NO: 17009 - protein, 25 aa, Artificial Sequence
  Quasi-synthetic sequence derived from human genome
KFFRWVRRAWQRIISWVFFWRQKIK

SEQ ID NO: 17010 - protein, 25 aa, Artificial Sequence
  Quasi-synthetic sequence derived from human genome
KRKKKKKFCYLCILLLIVLFILLCC

SEQ ID NO: 17011 - protein, 25 aa, Artificial Sequence
  Quasi-synthetic sequence derived from human genome
FRLLRVLKLVRFLPALRRQLVVLVK

SEQ ID NO: 17012 - protein, 25 aa, Artificial Sequence
  Quasi-synthetic sequence derived from human genome
KLLRNIPRWTHLLRLLRLIILLRIF

SEQ ID NO: 17013 - protein, 25 aa, Artificial Sequence
  Quasi-synthetic sequence derived from human genome
RAARPPLLLRPVKLLRRRFRLLLAL

SEQ ID NO: 17014 - protein, 25 aa, Artificial Sequence
  Quasi-synthetic sequence derived from human genome
LLLRKILLRKFCQMRKRRLREQFWR

SEQ ID NO: 17015 - protein, 25 aa, Artificial Sequence
  Quasi-synthetic sequence derived from human genome
FKHNFLLLFMKLRWFLKRWRQGKVL

SEQ ID NO: 17016 - protein, 25 aa, Artificial Sequence
  Quasi-synthetic sequence derived from human genome
LARWRCRRLRAIYTIMRWFRRHKVR

SEQ ID NO: 17017 - protein, 25 aa, Artificial Sequence
  Quasi-synthetic sequence derived from human genome
LGAVLALLFLLLVLLLLVRKKRKIK

SEQ ID NO: 17018 - protein, 25 aa, Artificial Sequence
  Quasi-synthetic sequence derived from human genome
FLRVVRFVRILRIFKLTRHFVGLRV

SEQ ID NO: 17019 - protein, 25 aa, Artificial Sequence
  Quasi-synthetic sequence derived from human genome
SRRRGFGLFFFLRLHRLLLLFLVLR

SEQ ID NO: 17020 - protein, 25 aa, Artificial Sequence
  Quasi-synthetic sequence derived from human genome
LIMQLVALLLVVLWIRWKCRRLRIR

SEQ ID NO: 17021 - protein, 25 aa, Artificial Sequence
  Quasi-synthetic sequence derived from human genome
FRLLRVLKLVRFMPALRRQLVVLMK

SEQ ID NO: 17022 - protein, 25 aa, Artificial Sequence
  Quasi-synthetic sequence derived from human genome
LLIWVPVKVILHKKRYIYRKIKGWR

SEQ ID NO: 17023 - protein, 25 aa, Artificial Sequence
  Quasi-synthetic sequence derived from human genome
KLLRNIPRWTHLVRLLRLIILIRIF

SEQ ID NO: 17024 - protein, 25 aa, Artificial Sequence
  Quasi-synthetic sequence derived from human genome
FVGILLFLILVGLLIFFLKRRNKKK

SEQ ID NO: 17025 - protein, 25 aa, Artificial Sequence
  Quasi-synthetic sequence derived from human genome
KLWFKFQRYFRRKPVRFFTFLALYL

SEQ ID NO: 17026 - protein, 25 aa, Artificial Sequence
  Quasi-synthetic sequence derived from human genome
LSRRPRRRLGSLRWCGRRRLRWRLL

SEQ ID NO: 17027 - protein, 25 aa, Artificial Sequence
  Quasi-synthetic sequence derived from human genome
LRKRIHRPRRRTTRRWKRWFKFRKR

SEQ ID NO: 17028 - protein, 25 aa, Artificial Sequence
  Quasi-synthetic sequence derived from human genome
VIFIITKFCLFCFRKLAKKGKKKKR

SEQ ID NO: 17029 - protein, 25 aa, Artificial Sequence
  Quasi-synthetic sequence derived from human genome
LLLMLVLYGRIFRAARFRIRKTVKK

SEQ ID NO: 17030 - protein, 25 aa, Artificial Sequence
  Quasi-synthetic sequence derived from human genome
KINAFNWAKVRKLSFKRKRFLIKLR

SEQ ID NO: 17031 - protein, 25 aa, Artificial Sequence
  Quasi-synthetic sequence derived from human genome
ARRRQRGRLMRRLVRRLRRWGLLPR

SEQ ID NO: 17032 - protein, 25 aa, Artificial Sequence
  Quasi-synthetic sequence derived from human genome
RRLKSQILLKKYLMKRRWKKNFIAV

SEQ ID NO: 17033 - protein, 25 aa, Artificial Sequence
  Quasi-synthetic sequence derived from human genome
VKRRLSLYLTKIHFWLPVLKMIRKK

SEQ ID NO: 17034 - protein, 25 aa, Artificial Sequence
  Quasi-synthetic sequence derived from human genome
LPIVVLIFKSILFLPCLRKKILKIR

SEQ ID NO: 17035 - protein, 25 aa, Artificial Sequence
  Quasi-synthetic sequence derived from human genome
FALRRKKKKTIKMLMLVVVLFALCW

SEQ ID NO: 17036 - protein, 25 aa, Artificial Sequence
  Quasi-synthetic sequence derived from human genome
IKTIKSLRVLRVLRPLKTIKRLPKL

SEQ ID NO: 17037 - protein, 25 aa, Artificial Sequence
  Quasi-synthetic sequence derived from human genome
LKTYLKRFKVMKIKVLRSWCRQILK

SEQ ID NO: 17038 - protein, 25 aa, Artificial Sequence
  Quasi-synthetic sequence derived from human genome
FWRRYGKLSRHLMKVKLKKYTKFLF

SEQ ID NO: 17039 - protein, 25 aa, Artificial Sequence
  Quasi-synthetic sequence derived from human genome
WLVWLRFHKKKWQLQARQRLARRKR

SEQ ID NO: 17040 - protein, 25 aa, Artificial Sequence
  Quasi-synthetic sequence derived from human genome
LGVRVLLRFQRKLSVLLLLLGRRRV

SEQ ID NO: 17041 - protein, 25 aa, Artificial Sequence
  Quasi-synthetic sequence derived from human genome
YLLLRKILLRKFCQMRKRRLREQLI

SEQ ID NO: 17042 - protein, 25 aa, Artificial Sequence
  Quasi-synthetic sequence derived from human genome
RWTHLVRLLRLIILIRIFHLLHQKR

SEQ ID NO: 17043 - protein, 25 aa, Artificial Sequence
  Quasi-synthetic sequence derived from human genome
RASLVLILKTIRRRLPFSKWRLAFR

SEQ ID NO: 17044 - protein, 25 aa, Artificial Sequence
  Quasi-synthetic sequence derived from human genome
IVTLLVYIKIYIVLRRRRKRVNTKR

SEQ ID NO: 17045 - protein, 25 aa, Artificial Sequence
  Quasi-synthetic sequence derived from human genome
MRKNMRVLSRISKFRRLRQLLRRRK

SEQ ID NO: 17046 - protein, 25 aa, Artificial Sequence
  Quasi-synthetic sequence derived from human genome
LLHALLLVLLLCRLRRLRARARARA

SEQ ID NO: 17047 - protein, 25 aa, Artificial Sequence
  Quasi-synthetic sequence derived from human genome
RRKSWRLEFLFLRRRCFLLTFYLWF

SEQ ID NO: 17048 - protein, 25 aa, Artificial Sequence
  Quasi-synthetic sequence derived from human genome
LKRLVKLHIKRHYHKKFWKLGAVIF

SEQ ID NO: 17049 - protein, 25 aa, Artificial Sequence
  Quasi-synthetic sequence derived from human genome
VLRRIILLQRWFRVLLCRQHFLHLR

SEQ ID NO: 17050 - protein, 25 aa, Artificial Sequence
  Quasi-synthetic sequence derived from human genome
KRFLLLFTFLKKNRKKKLMVFFSSC

SEQ ID NO: 17051 - protein, 25 aa, Artificial Sequence
  Quasi-synthetic sequence derived from human genome
KKKKKKKKKRQCFAFLIYFRLGIKM

SEQ ID NO: 17052 - protein, 25 aa, Artificial Sequence
  Quasi-synthetic sequence derived from human genome
ALLVLLALAAWASRWLRRKLRARRK

SEQ ID NO: 17053 - protein, 25 aa, Artificial Sequence
  Quasi-synthetic sequence derived from human genome
RPFTRFRTAVRVVIAILRLRFLVKK

SEQ ID NO: 17054 - protein, 25 aa, Artificial Sequence
  Quasi-synthetic sequence derived from human genome
KYFFSPTLFRVIRLARIGRILRLIR

SEQ ID NO: 17055 - protein, 25 aa, Artificial Sequence
  Quasi-synthetic sequence derived from human genome
IVILGKIILFLPCISRKLKRIKKGW

SEQ ID NO: 17056 - protein, 25 aa, Artificial Sequence
  Quasi-synthetic sequence derived from human genome
FAILRIIRLVRVFRIFKLSRHSKGL

SEQ ID NO: 17057 - protein, 25 aa, Artificial Sequence
  Quasi-synthetic sequence derived from human genome
RFRKYLRQLFHRRVAVHLVKWLPFL

SEQ ID NO: 17058 - protein, 25 aa, Artificial Sequence
  Quasi-synthetic sequence derived from human genome
LKRFKVMKPKVLRSWCRQILKGLLF

SEQ ID NO: 17059 - protein, 25 aa, Artificial Sequence
  Quasi-synthetic sequence derived from human genome
ALARKAIQRRKWAVRIIRKFIKGFI

SEQ ID NO: 17060 - protein, 25 aa, Artificial Sequence
  Quasi-synthetic sequence derived from human genome
WLIFLLIILSYIKIGKNLLRISKRR

SEQ ID NO: 17061 - protein, 25 aa, Artificial Sequence
  Quasi-synthetic sequence derived from human genome
RWRRLRLQQLRRLRGLLRVLRGRPG

SEQ ID NO: 17062 - protein, 25 aa, Artificial Sequence
  Quasi-synthetic sequence derived from human genome
TLFRVIRLARIGRILRLIRAAKGIR

SEQ ID NO: 17063 - protein, 25 aa, Artificial Sequence
  Quasi-synthetic sequence derived from human genome
AYRIMKRHLRLIHPTKLYKLMLRRF

SEQ ID NO: 17064 - protein, 25 aa, Artificial Sequence
  Quasi-synthetic sequence derived from human genome
VLVALLAVIVLVALLLLWRRRQKRR

SEQ ID NO: 17065 - protein, 25 aa, Artificial Sequence
  Quasi-synthetic sequence derived from human genome
REFKRAFLRLLRCQCRRRRRRRPLW

SEQ ID NO: 17066 - protein, 25 aa, Artificial Sequence
  Quasi-synthetic sequence derived from human genome
RLLRGLWQRWRRYKYRFVPWIALNL

SEQ ID NO: 17067 - protein, 25 aa, Artificial Sequence
  Quasi-synthetic sequence derived from human genome
WRRRSCWRKWKQLSRLQRNMILFLL

SEQ ID NO: 17068 - protein, 25 aa, Artificial Sequence
  Quasi-synthetic sequence derived from human genome
ALLLSILCLVMILYTRRRWCKRRRV

SEQ ID NO: 17069 - protein, 25 aa, Artificial Sequence
  Quasi-synthetic sequence derived from human genome
CFLVVLLAILLYLLRLRRIHRRTPR

SEQ ID NO: 17070 - protein, 25 aa, Artificial Sequence
  Quasi-synthetic sequence derived from human genome
RALSRRYLRRLLLLLLLLLLRQPVT

SEQ ID NO: 17071 - protein, 25 aa, Artificial Sequence
  Quasi-synthetic sequence derived from human genome
KIRKLSFKRKHFLIKLHANILVLCK

SEQ ID NO: 17072 - protein, 25 aa, Artificial Sequence
  Quasi-synthetic sequence derived from human genome
LLPLLLLLLVLLLAAYFFRFRKQRK

SEQ ID NO: 17073 - protein, 25 aa, Artificial Sequence
  Quasi-synthetic sequence derived from human genome
RLIILLRIFHLFHQKRQLEKLIRRR

SEQ ID NO: 17074 - protein, 25 aa, Artificial Sequence
  Quasi-synthetic sequence derived from human genome
LPTVIICVMVFCLILWKWKKKKRPR

SEQ ID NO: 17075 - protein, 25 aa, Artificial Sequence
  Quasi-synthetic sequence derived from human genome
RFRTLMMRRRFLSLKKTAILIQRKY

SEQ ID NO: 17076 - protein, 25 aa, Artificial Sequence
  Quasi-synthetic sequence derived from human genome
LIFILFIIVQLFIMKLRKAHVIWKK

SEQ ID NO: 17077 - protein, 25 aa, Artificial Sequence
  Quasi-synthetic sequence derived from human genome
YRAFLLRRRFLHLKKAAIVFQKQLR

SEQ ID NO: 17078 - protein, 25 aa, Artificial Sequence
  Quasi-synthetic sequence derived from human genome
GRKRCIKKFSIQRFPKILVLHLKRF

SEQ ID NO: 17079 - protein, 25 aa, Artificial Sequence
  Quasi-synthetic sequence derived from human genome
TLFRIVRLARIGRILRLVRAARGIR

SEQ ID NO: 17080 - protein, 25 aa, Artificial Sequence
  Quasi-synthetic sequence derived from human genome
RRGIGYLKLICFLIPFLLSLKKKMK

SEQ ID NO: 17081 - protein, 25 aa, Artificial Sequence
  Quasi-synthetic sequence derived from human genome
VIFIITKFCLFCFWKFARKGKKGKR

SEQ ID NO: 17082 - protein, 25 aa, Artificial Sequence
  Quasi-synthetic sequence derived from human genome
FRMKLRNLFTKFIRKFGFELVKRLL

SEQ ID NO: 17083 - protein, 25 aa, Artificial Sequence
  Quasi-synthetic sequence derived from human genome
IFGLFIILLVIFLIWRCFLRNKTRR

SEQ ID NO: 17084 - protein, 25 aa, Artificial Sequence
  Quasi-synthetic sequence derived from human genome
LLLIVLFILLCCLYRLCKKSKPIKK

SEQ ID NO: 17085 - protein, 25 aa, Artificial Sequence
  Quasi-synthetic sequence derived from human genome
VFMIRKFRRSLLQLLCLRLLRCQRP

SEQ ID NO: 17086 - protein, 25 aa, Artificial Sequence
  Quasi-synthetic sequence derived from human genome
LAILRVIRLVRVFRIFKLSRHSKGL

SEQ ID NO: 17087 - protein, 25 aa, Artificial Sequence
  Quasi-synthetic sequence derived from human genome
RIWVFRLKRRKRIARRLVDTLRNCF

SEQ ID NO: 17088 - protein, 25 aa, Artificial Sequence
  Quasi-synthetic sequence derived from human genome
RLLKRLLGPKLRRFLKPQGHPRLLL

SEQ ID NO: 17089 - protein, 25 aa, Artificial Sequence
  Quasi-synthetic sequence derived from human genome
VLKIRRRKMNHHKYRKLVKKTRFLR

SEQ ID NO: 17090 - protein, 25 aa, Artificial Sequence
  Quasi-synthetic sequence derived from human genome
RFRSLLVRRRFISLKKATIFVQRKY

SEQ ID NO: 17091 - protein, 25 aa, Artificial Sequence
  Quasi-synthetic sequence derived from human genome
LIFLRLKRRVKSVILVVLLGPLLFL

SEQ ID NO: 17092 - protein, 25 aa, Artificial Sequence
  Quasi-synthetic sequence derived from human genome
VIRYSLQKLRLVRWLLKKVFQCRRA

SEQ ID NO: 17093 - protein, 25 aa, Artificial Sequence
  Quasi-synthetic sequence derived from human genome
LRRRPARTLGLLLLVVLGFLVLRRL

SEQ ID NO: 17094 - protein, 25 aa, Artificial Sequence
  Quasi-synthetic sequence derived from human genome
ALLALTALLLVAMICRRRRRRKKAR

SEQ ID NO: 17095 - protein, 25 aa, Artificial Sequence
  Quasi-synthetic sequence derived from human genome
LVGILIFLLLAVLLWKMGFFRRRYK

SEQ ID NO: 17096 - protein, 25 aa, Artificial Sequence
  Quasi-synthetic sequence derived from human genome
ELKIKRLRKKFAQKMLRKARRKLIY

SEQ ID NO: 17097 - protein, 25 aa, Artificial Sequence
  Quasi-synthetic sequence derived from human genome
FKLKPPVWYLRSLVQNLLLIRRFKK

SEQ ID NO: 17098 - protein, 25 aa, Artificial Sequence
  Quasi-synthetic sequence derived from human genome
LIFLRIKRRVKSVVLVILLGPLLFL

SEQ ID NO: 17099 - protein, 25 aa, Artificial Sequence
  Quasi-synthetic sequence derived from human genome
FFIKRRFRSLRHKIILLQSRARGYL

SEQ ID NO: 17100 - protein, 25 aa, Artificial Sequence
  Quasi-synthetic sequence derived from human genome
TLFRVIRLARIGRILRLIKGAKGIR

SEQ ID NO: 17101 - protein, 25 aa, Artificial Sequence
  Quasi-synthetic sequence derived from human genome
RFRKFPFFTRPLLSKWCPKSLFKKK

SEQ ID NO: 17102 - protein, 25 aa, Artificial Sequence
  Quasi-synthetic sequence derived from human genome
LLCYRHLKTKRILRRNLLALIHRMI

SEQ ID NO: 17103 - protein, 25 aa, Artificial Sequence
  Quasi-synthetic sequence derived from human genome
LRAACIRIQKTIRGWLLRKKYLRMR

SEQ ID NO: 17104 - protein, 25 aa, Artificial Sequence
  Quasi-synthetic sequence derived from human genome
GLLLLALLVLALWKLGFFRSARRRR

SEQ ID NO: 17105 - protein, 25 aa, Artificial Sequence
  Quasi-synthetic sequence derived from human genome
LRAPRKKIHRRVLKKNPLKNLRIML

SEQ ID NO: 17106 - protein, 25 aa, Artificial Sequence
  Quasi-synthetic sequence derived from human genome
RAAGVFYPWRFRLLCLLRRWLPRPR

SEQ ID NO: 17107 - protein, 25 aa, Artificial Sequence
  Quasi-synthetic sequence derived from human genome
IMPAVKTVIRSIRILKFLVAKRKFK

SEQ ID NO: 17108 - protein, 25 aa, Artificial Sequence
  Quasi-synthetic sequence derived from human genome
HLIFFIFYLRNMKKKYTKMVKLLHK

SEQ ID NO: 17109 - protein, 25 aa, Artificial Sequence
  Quasi-synthetic sequence derived from human genome
LRFLLGRLPWRVASGARRFRRWLNR

SEQ ID NO: 17110 - protein, 25 aa, Artificial Sequence
  Quasi-synthetic sequence derived from human genome
WKVLKVVAKVIRALLRILCCLLKAI

SEQ ID NO: 17111 - protein, 25 aa, Artificial Sequence
  Quasi-synthetic sequence derived from human genome
LRVIRLVRVFRIFKLSRHSKGLQIL

SEQ ID NO: 17112 - protein, 25 aa, Artificial Sequence
  Quasi-synthetic sequence derived from human genome
FFFLPVFCLTVLYSLIGRKLWRRRR

SEQ ID NO: 17113 - protein, 25 aa, Artificial Sequence
  Quasi-synthetic sequence derived from human genome
KLKRKYWWKNLKMMIILGVICAIIL

SEQ ID NO: 17114 - protein, 25 aa, Artificial Sequence
  Quasi-synthetic sequence derived from human genome
WLRRKLRGKRRPVIAFCLLMILSAM

SEQ ID NO: 17115 - protein, 25 aa, Artificial Sequence
  Quasi-synthetic sequence derived from human genome
LLSLLLILKAGRRWNKYFKSRRPLF

SEQ ID NO: 17116 - protein, 25 aa, Artificial Sequence
  Quasi-synthetic sequence derived from human genome
LLKKRKWPLKGWHKRFFYLDKGILK

SEQ ID NO: 17117 - protein, 25 aa, Artificial Sequence
  Quasi-synthetic sequence derived from human genome
RRKGVWLRLRKILFCVLGLYIAIPF

SEQ ID NO: 17118 - protein, 25 aa, Artificial Sequence
  Quasi-synthetic sequence derived from human genome
LKTYLKRFKVMKPKVLRSWCRQILK

SEQ ID NO: 17119 - protein, 25 aa, Artificial Sequence
  Quasi-synthetic sequence derived from human genome
VLLALLVLLVAPPLLRRAGRLRWRR

SEQ ID NO: 17120 - protein, 25 aa, Artificial Sequence
  Quasi-synthetic sequence derived from human genome
RMLIQVCLYFYCKFLWRCLKFVMRK

SEQ ID NO: 17121 - protein, 25 aa, Artificial Sequence
  Quasi-synthetic sequence derived from human genome
KRWLGRWRRKRRWRRVRKAGPRDLL

SEQ ID NO: 17122 - protein, 25 aa, Artificial Sequence
  Quasi-synthetic sequence derived from human genome
IVGLTFAVYVRRKSIKKKRALRRFL

SEQ ID NO: 17123 - protein, 25 aa, Artificial Sequence
  Quasi-synthetic sequence derived from human genome
FRLMRVLKLVRFLPALQRQLVVLMK

SEQ ID NO: 17124 - protein, 25 aa, Artificial Sequence
  Quasi-synthetic sequence derived from human genome
RLLRGLRRRNVQKKVALAKKLLAKL

SEQ ID NO: 17125 - protein, 25 aa, Artificial Sequence
  Quasi-synthetic sequence derived from human genome
RFLKHAGKWSLRWFLSPRWILQFRR

SEQ ID NO: 17126 - protein, 25 aa, Artificial Sequence
  Quasi-synthetic sequence derived from human genome
RLCIRKFFPKKKCFVFDLPIHRRKL

SEQ ID NO: 17127 - protein, 25 aa, Artificial Sequence
  Quasi-synthetic sequence derived from human genome
TLFRVIRLARIGRVLRLIRGAKGIR

SEQ ID NO: 17128 - protein, 25 aa, Artificial Sequence
  Quasi-synthetic sequence derived from human genome
RLRFLKLKRQTKVLLTLLLVFGIAI

SEQ ID NO: 17129 - protein, 25 aa, Artificial Sequence
  Quasi-synthetic sequence derived from human genome
FVRQIQLLLWKNWTLRKRQKIRFVV

SEQ ID NO: 17130 - protein, 25 aa, Artificial Sequence
  Quasi-synthetic sequence derived from human genome
LIRIVLFLQKVWRGTLARMRYKRTK

SEQ ID NO: 17131 - protein, 25 aa, Artificial Sequence
  Quasi-synthetic sequence derived from human genome
IWFFWIRLYKIRRGRTRPQALLFLC

SEQ ID NO: 17132 - protein, 25 aa, Artificial Sequence
  Quasi-synthetic sequence derived from human genome
FFLTLRFSVVKRGRKKLLYIFKQPF

SEQ ID NO: 17133 - protein, 25 aa, Artificial Sequence
  Quasi-synthetic sequence derived from human genome
FRRHIRQHSALTRLRLRNVFRRFLR

SEQ ID NO: 17134 - protein, 25 aa, Artificial Sequence
  Quasi-synthetic sequence derived from human genome
RKIVQVMRKQKTINRFLMRKRLLFP

SEQ ID NO: 17135 - protein, 25 aa, Artificial Sequence
  Quasi-synthetic sequence derived from human genome
RIRILCCLTFLVKVKSKALLKNRLL

SEQ ID NO: 17136 - protein, 25 aa, Artificial Sequence
  Quasi-synthetic sequence derived from human genome
FFLLVLILSSVFLFRLFKRRQGRIF

SEQ ID NO: 17137 - protein, 25 aa, Artificial Sequence
  Quasi-synthetic sequence derived from human genome
LATLGVALLFIVRKKRKEKRLKRLR

SEQ ID NO: 17138 - protein, 25 aa, Artificial Sequence
  Quasi-synthetic sequence derived from human genome
RLKLFFIKNQRSSLRIRLFNFSLKL

SEQ ID NO: 17139 - protein, 25 aa, Artificial Sequence
  Quasi-synthetic sequence derived from human genome
LIVLFCLFIFVLIYVRVFRKSRRSL

SEQ ID NO: 17140 - protein, 25 aa, Artificial Sequence
  Quasi-synthetic sequence derived from human genome
AMKILLLCLCLILLRVRSCRRKAAR

SEQ ID NO: 17141 - protein, 25 aa, Artificial Sequence
  Quasi-synthetic sequence derived from human genome
MVWRRLLRKRWVLALVFGLSLVYFL

SEQ ID NO: 17142 - protein, 25 aa, Artificial Sequence
  Quasi-synthetic sequence derived from human genome
KKKRKKGLRIKGKRRRKKLILAKKF

SEQ ID NO: 17143 - protein, 25 aa, Artificial Sequence
  Quasi-synthetic sequence derived from human genome
LCLLGRLLIYKQGRKLFPIKLKNKK

SEQ ID NO: 17144 - protein, 25 aa, Artificial Sequence
  Quasi-synthetic sequence derived from human genome
LLQLKGKKHVLHLWPKRLLLPRHLR

SEQ ID NO: 17145 - protein, 25 aa, Artificial Sequence
  Quasi-synthetic sequence derived from human genome
SRKRRKMSKKLPPVIIKYIIINRFR

SEQ ID NO: 17146 - protein, 25 aa, Artificial Sequence
  Quasi-synthetic sequence derived from human genome
GLKVLFKKTHRILRRLFNLCKRCHR

SEQ ID NO: 17147 - protein, 25 aa, Artificial Sequence
  Quasi-synthetic sequence derived from human genome
FWMLFKALLIIYGILVIFRRMMKSR

SEQ ID NO: 17148 - protein, 25 aa, Artificial Sequence
  Quasi-synthetic sequence derived from human genome
VLRVLRLLRTLRPLRVISRAPGLKL

SEQ ID NO: 17149 - protein, 25 aa, Artificial Sequence
  Quasi-synthetic sequence derived from human genome
LKKHTLIRFLPRPIRQQLLYKRRYI

SEQ ID NO: 17150 - protein, 25 aa, Artificial Sequence
  Quasi-synthetic sequence derived from human genome
RLIPIIVLLLQKAWRGTLARWRCRR

SEQ ID NO: 17151 - protein, 25 aa, Artificial Sequence
  Quasi-synthetic sequence derived from human genome
IFYFLYGKTRSRIPLLRKRRFQLCR

SEQ ID NO: 17152 - protein, 25 aa, Artificial Sequence
  Quasi-synthetic sequence derived from human genome
FKAAEFAKLSIKWMIKIRKRYLKRR

SEQ ID NO: 17153 - protein, 25 aa, Artificial Sequence
  Quasi-synthetic sequence derived from human genome
LLRLFRMLRIFKLGKYWPTFQILMW

SEQ ID NO: 17154 - protein, 25 aa, Artificial Sequence
  Quasi-synthetic sequence derived from human genome
KINTFNWSKVRKLSFKRKRFLIKLH

SEQ ID NO: 17155 - protein, 25 aa, Artificial Sequence
  Quasi-synthetic sequence derived from human genome
KIKRLKKSAFVVLILLITAKLLVLP

SEQ ID NO: 17156 - protein, 25 aa, Artificial Sequence
  Quasi-synthetic sequence derived from human genome
IHLCCRRRRARLRFMKQKFNIVCLK

SEQ ID NO: 17157 - protein, 25 aa, Artificial Sequence
  Quasi-synthetic sequence derived from human genome
YLRKRFGGRRIRLYLSVLSLFLYIF

SEQ ID NO: 17158 - protein, 25 aa, Artificial Sequence
  Quasi-synthetic sequence derived from human genome
RRFLSKVYSFPMRKLILFLVFPVVR

SEQ ID NO: 17159 - protein, 25 aa, Artificial Sequence
  Quasi-synthetic sequence derived from human genome
FVLFVLSVHYLWKKWKKHQKKLKKQ

SEQ ID NO: 17160 - protein, 25 aa, Artificial Sequence
  Quasi-synthetic sequence derived from human genome
LFISMAFKLLILLIGTWALFFRKRR

SEQ ID NO: 17161 - protein, 25 aa, Artificial Sequence
  Quasi-synthetic sequence derived from human genome
RLPVKKIRKQMKLLLLLLLLSCAAW

SEQ ID NO: 17162 - protein, 25 aa, Artificial Sequence
  Quasi-synthetic sequence derived from human genome
RWVRQQGPRVRRGISRLWLRVLLRL

SEQ ID NO: 17163 - protein, 25 aa, Artificial Sequence
  Quasi-synthetic sequence derived from human genome
LLLRKILLRKFCQMRKRRLREQAPL

SEQ ID NO: 17164 - protein, 25 aa, Artificial Sequence
  Quasi-synthetic sequence derived from human genome
IFHFLYGKNRSRIPLLRKRRFQLYR

SEQ ID NO: 17165 - protein, 25 aa, Artificial Sequence
  Quasi-synthetic sequence derived from human genome
LSIFYLLKIANFSNLIFLRLKRRVK

SEQ ID NO: 17166 - protein, 25 aa, Artificial Sequence
  Quasi-synthetic sequence derived from human genome
IIQKYWRMYVVRRRYKIRRAATIVL

SEQ ID NO: 17167 - protein, 25 aa, Artificial Sequence
  Quasi-synthetic sequence derived from human genome
RLARIGRILRLIRGAKGIRTLLFAL

SEQ ID NO: 17168 - protein, 25 aa, Artificial Sequence
  Quasi-synthetic sequence derived from human genome
RLKTLRRPRVRDRLPILLQRRMRVK

SEQ ID NO: 17169 - protein, 25 aa, Artificial Sequence
  Quasi-synthetic sequence derived from human genome
VIFVVTKFCLFCFWKFARKGKKGKR

SEQ ID NO: 17170 - protein, 25 aa, Artificial Sequence
  Quasi-synthetic sequence derived from human genome
IPIFSLFRKWKAFSVWRKNVRSKKI

SEQ ID NO: 17171 - protein, 25 aa, Artificial Sequence
  Quasi-synthetic sequence derived from human genome
MLLRKRYRHRPCRLQFLLLLLMLGC

SEQ ID NO: 17172 - protein, 25 aa, Artificial Sequence
  Quasi-synthetic sequence derived from human genome
GGVIGLLILILLIKKLIIFILKKTR

SEQ ID NO: 17173 - protein, 25 aa, Artificial Sequence
  Quasi-synthetic sequence derived from human genome
IVKQGYVKIRSRKLGIFRRCWLVFK

SEQ ID NO: 17174 - protein, 25 aa, Artificial Sequence
  Quasi-synthetic sequence derived from human genome
KKAIKYQSKARRKLMFIIICVIVLL

SEQ ID NO: 17175 - protein, 25 aa, Artificial Sequence
  Quasi-synthetic sequence derived from human genome
RCPSKKKYKAIRLIFVIMAVFFIFW

SEQ ID NO: 17176 - protein, 25 aa, Artificial Sequence
  Quasi-synthetic sequence derived from human genome
VRIRVIKKKKVIMKKRKKLTLTRPT

SEQ ID NO: 17177 - protein, 25 aa, Artificial Sequence
  Quasi-synthetic sequence derived from human genome
RIFGKLVFLPLRLVWKEVILRKILI

SEQ ID NO: 17178 - protein, 25 aa, Artificial Sequence
  Quasi-synthetic sequence derived from human genome
VFVAAGLFAYVLRRRRKKLPFRSKR

SEQ ID NO: 17179 - protein, 25 aa, Artificial Sequence
  Quasi-synthetic sequence derived from human genome
RLRELRIRCVARKFLYLWIRMTFGR

SEQ ID NO: 17180 - protein, 25 aa, Artificial Sequence
  Quasi-synthetic sequence derived from human genome
MLRVLRLLRTLRPLRVISRAQGLKL

SEQ ID NO: 17181 - protein, 25 aa, Artificial Sequence
  Quasi-synthetic sequence derived from human genome
RRKARRLLKTVLMILLAFLVCWGPL

SEQ ID NO: 17182 - protein, 25 aa, Artificial Sequence
  Quasi-synthetic sequence derived from human genome
RKQLMIYRLPQVLRLHLKRFRWSGR

SEQ ID NO: 17183 - protein, 25 aa, Artificial Sequence
  Quasi-synthetic sequence derived from human genome
VLFIITKCCLFCFWKFARKGKKGKR

SEQ ID NO: 17184 - protein, 25 aa, Artificial Sequence
  Quasi-synthetic sequence derived from human genome
MIPTLKAAIRAVRILQFRLYKKKFK

SEQ ID NO: 17185 - protein, 25 aa, Artificial Sequence
  Quasi-synthetic sequence derived from human genome
KVIRMLIMPRRNFPIAMIRPKWKTR

SEQ ID NO: 17186 - protein, 25 aa, Artificial Sequence
  Quasi-synthetic sequence derived from human genome
KVLNINLKRKFIKKRIIIISNYSKR

SEQ ID NO: 17187 - protein, 25 aa, Artificial Sequence
  Quasi-synthetic sequence derived from human genome
LKSFLILPFQRITRLKLLLQNILKR

SEQ ID NO: 17188 - protein, 25 aa, Artificial Sequence
  Quasi-synthetic sequence derived from human genome
RLKSMLRLLLVKKPSVRSLALKLLA

SEQ ID NO: 17189 - protein, 25 aa, Artificial Sequence
  Quasi-synthetic sequence derived from human genome
LRLIILIRIFHLLHQKRQLEKLMRR

SEQ ID NO: 17190 - protein, 25 aa, Artificial Sequence
  Quasi-synthetic sequence derived from human genome
LIGIFNRSFRTGIKRRILLLIPKWL

SEQ ID NO: 17191 - protein, 25 aa, Artificial Sequence
  Quasi-synthetic sequence derived from human genome
VKILRVLRVLRPLRAINRAKGLKHV

SEQ ID NO: 17192 - protein, 25 aa, Artificial Sequence
  Quasi-synthetic sequence derived from human genome
VVKILRVLRVLRPLRAINRAKGLKH

SEQ ID NO: 17193 - protein, 25 aa, Artificial Sequence
  Quasi-synthetic sequence derived from human genome
RAGVTLRVLRMMRIFWVIKLARHFI

SEQ ID NO: 17194 - protein, 25 aa, Artificial Sequence
  Quasi-synthetic sequence derived from human genome
IYMNFFFFFSVGRKFKKFNKVRVVR

SEQ ID NO: 17195 - protein, 25 aa, Artificial Sequence
  Quasi-synthetic sequence derived from human genome
ILGLWKIARKWMRRKMGKWPAVVVM

SEQ ID NO: 17196 - protein, 25 aa, Artificial Sequence
  Quasi-synthetic sequence derived from human genome
KVARKFWWKNVKMIVLICVIVFIII

SEQ ID NO: 17197 - protein, 25 aa, Artificial Sequence
  Quasi-synthetic sequence derived from human genome
WPRLIRKLRCYLKEMKNLRKLVFSR

SEQ ID NO: 17198 - protein, 25 aa, Artificial Sequence
  Quasi-synthetic sequence derived from human genome
FVALLWKRLLIARRSRKGFFAQIVL

SEQ ID NO: 17199 - protein, 25 aa, Artificial Sequence
  Quasi-synthetic sequence derived from human genome
RHFRARFRRLWPCGRRRRHRARRAL

SEQ ID NO: 17200 - protein, 25 aa, Artificial Sequence
  Quasi-synthetic sequence derived from human genome
AIILLLLLIIALMLWRLHWRRLLSK

SEQ ID NO: 17201 - protein, 25 aa, Artificial Sequence
  Quasi-synthetic sequence derived from human genome
LKMMHIAATLIQRRFRTLMMRRRFL

SEQ ID NO: 17202 - protein, 25 aa, Artificial Sequence
  Quasi-synthetic sequence derived from human genome
IKLLPLRTFRVFRALKAISVVSRLK

SEQ ID NO: 17203 - protein, 25 aa, Artificial Sequence
  Quasi-synthetic sequence derived from human genome
VLQKRSWPFLRSFRVLRVFKLAKSW

SEQ ID NO: 17204 - protein, 25 aa, Artificial Sequence
  Quasi-synthetic sequence derived from human genome
LAVAVLKTVILGLLCLLLLWWRRRK

SEQ ID NO: 17205 - protein, 25 aa, Artificial Sequence
  Quasi-synthetic sequence derived from human genome
LWVRRKAGYKKKLWKKTPARKKRLR

SEQ ID NO: 17206 - protein, 25 aa, Artificial Sequence
  Quasi-synthetic sequence derived from human genome
AGLKLILKRYKIGASRKTFWKRKKI

SEQ ID NO: 17207 - protein, 25 aa, Artificial Sequence
  Quasi-synthetic sequence derived from human genome
RINRFPWPKVLKISYKRSSFFIKIR

SEQ ID NO: 17208 - protein, 25 aa, Artificial Sequence
  Quasi-synthetic sequence derived from human genome
MLRMIRKHVRKNYMKFKAKFSLIQF

SEQ ID NO: 17209 - protein, 25 aa, Artificial Sequence
  Quasi-synthetic sequence derived from human genome
VLRALRLLRIFKITKYWASLRNLVV

SEQ ID NO: 17210 - protein, 25 aa, Artificial Sequence
  Quasi-synthetic sequence derived from human genome
LSMFYLLRIANFSNLIFLRIKRRVK

SEQ ID NO: 17211 - protein, 25 aa, Artificial Sequence
  Quasi-synthetic sequence derived from human genome
RWILQFRRWARKWSRFTRSSFQVRW

SEQ ID NO: 17212 - protein, 25 aa, Artificial Sequence
  Quasi-synthetic sequence derived from human genome
KKWCRSILRRTSLILARVFGLHLRL

SEQ ID NO: 17213 - protein, 25 aa, Artificial Sequence
  Quasi-synthetic sequence derived from human genome
LRRVLVLMASKHAFLALCALRFKRK

SEQ ID NO: 17214 - protein, 25 aa, Artificial Sequence
  Quasi-synthetic sequence derived from human genome
KRSVTRIKKRSRSVFYRLTILILVF

SEQ ID NO: 17215 - protein, 25 aa, Artificial Sequence
  Quasi-synthetic sequence derived from human genome
LGVVFGILIKRRQQKIRKYTMRRLL

SEQ ID NO: 17216 - protein, 25 aa, Artificial Sequence
  Quasi-synthetic sequence derived from human genome
CFHLYRAPYFWIKRRILLLIPKWLY

SEQ ID NO: 17217 - protein, 25 aa, Artificial Sequence
  Quasi-synthetic sequence derived from human genome
LLVILAMGLWVIRVQKRHKMPRMKK

SEQ ID NO: 17218 - protein, 25 aa, Artificial Sequence
  Quasi-synthetic sequence derived from human genome
VIRVQKRHKMPRMKKLMRNRMKLRK

SEQ ID NO: 17219 - protein, 25 aa, Artificial Sequence
  Quasi-synthetic sequence derived from human genome
RRPRGSTARTLLRLLLRLLLFLGLL

SEQ ID NO: 17220 - protein, 25 aa, Artificial Sequence
  Quasi-synthetic sequence derived from human genome
VAIHLCCRRRRARLRFMKQLRLHPL

SEQ ID NO: 17221 - protein, 25 aa, Artificial Sequence
  Quasi-synthetic sequence derived from human genome
ILFVYLVIRALRLWRTAKLQVTLKK

SEQ ID NO: 17222 - protein, 25 aa, Artificial Sequence
  Quasi-synthetic sequence derived from human genome
IMLLLLVFLVACFINRKCQKQRKKK

SEQ ID NO: 17223 - protein, 25 aa, Artificial Sequence
  Quasi-synthetic sequence derived from human genome
KYLKVFYKFINLNRYKIRHTRKKPF

SEQ ID NO: 17224 - protein, 25 aa, Artificial Sequence
  Quasi-synthetic sequence derived from human genome
GWLRKSPPEKKLRRYAWKKRWFILR

SEQ ID NO: 17225 - protein, 25 aa, Artificial Sequence
  Quasi-synthetic sequence derived from human genome
LVLLALCLLLPLLLLGGWKRWRRGR

SEQ ID NO: 17226 - protein, 25 aa, Artificial Sequence
  Quasi-synthetic sequence derived from human genome
KAKTKRRLVLGLREVLKHLKLKKLK

SEQ ID NO: 17227 - protein, 25 aa, Artificial Sequence
  Quasi-synthetic sequence derived from human genome
KKNPKLINALRRCFFWRFMFYGIFL

SEQ ID NO: 17228 - protein, 25 aa, Artificial Sequence
  Quasi-synthetic sequence derived from human genome
IYLIMIFLGLYINFRHLYKQRRRRY

SEQ ID NO: 17229 - protein, 25 aa, Artificial Sequence
  Quasi-synthetic sequence derived from human genome
MRKNMRVLSRTSKFRRLRQLLRRRK

SEQ ID NO: 17230 - protein, 25 aa, Artificial Sequence
  Quasi-synthetic sequence derived from human genome
KFRRRTCIILALFILFIFSLMMGLK

SEQ ID NO: 17231 - protein, 25 aa, Artificial Sequence
  Quasi-synthetic sequence derived from human genome
VSKKNIFLLFKKLCSFRYRRDLLRL

SEQ ID NO: 17232 - protein, 25 aa, Artificial Sequence
  Quasi-synthetic sequence derived from human genome
LKRRYSFRLHIGRNIARPWKLIYYR

SEQ ID NO: 17233 - protein, 25 aa, Artificial Sequence
  Quasi-synthetic sequence derived from human genome
KMLRLRLPNLKMVRLRVSFSAVVFK

SEQ ID NO: 17234 - protein, 25 aa, Artificial Sequence
  Quasi-synthetic sequence derived from human genome
LLIYRDRLRINRFAWPKILKISYKR

SEQ ID NO: 17235 - protein, 25 aa, Artificial Sequence
  Quasi-synthetic sequence derived from human genome
LLRRQMVRNFRKPLIVASPKMLLRL

SEQ ID NO: 17236 - protein, 25 aa, Artificial Sequence
  Quasi-synthetic sequence derived from human genome
WYVKAFLALLRPFISSKFTRKIRFL

SEQ ID NO: 17237 - protein, 25 aa, Artificial Sequence
  Quasi-synthetic sequence derived from human genome
LRRLLPPLLLLLLSLPPRARAKYVR

SEQ ID NO: 17238 - protein, 25 aa, Artificial Sequence
  Quasi-synthetic sequence derived from human genome
WWWARAARLARLRFRRSLLPPQRPR

SEQ ID NO: 17239 - protein, 25 aa, Artificial Sequence
  Quasi-synthetic sequence derived from human genome
INFLIFIRILGILLSKLRTRQMRCR

SEQ ID NO: 17240 - protein, 25 aa, Artificial Sequence
  Quasi-synthetic sequence derived from human genome
YLRPLKKFLRKLHLPRDLPQKKKLK

SEQ ID NO: 17241 - protein, 25 aa, Artificial Sequence
  Quasi-synthetic sequence derived from human genome
VVTLLVRYRHYFRLLVRTVLLRSLR

SEQ ID NO: 17242 - protein, 25 aa, Artificial Sequence
  Quasi-synthetic sequence derived from human genome
LLIILVYKAKKRCIFFLQDKRKRNF

SEQ ID NO: 17243 - protein, 25 aa, Artificial Sequence
  Quasi-synthetic sequence derived from human genome
KTARLFSKKIFCCLFFITLFFIRLL

SEQ ID NO: 17244 - protein, 25 aa, Artificial Sequence
  Quasi-synthetic sequence derived from human genome
RRVVQIFRIMRILRILKLARHSTGL

SEQ ID NO: 17245 - protein, 25 aa, Artificial Sequence
  Quasi-synthetic sequence derived from human genome
RRRRRREYCKFALLLVLYTLVLLLV

SEQ ID NO: 17246 - protein, 25 aa, Artificial Sequence
  Quasi-synthetic sequence derived from human genome
PPIRRRSKFANLGRIFKPWKWRKKK

SEQ ID NO: 17247 - protein, 25 aa, Artificial Sequence
  Quasi-synthetic sequence derived from human genome
LLLVVIILILAFWVLPKYKTRKAMR

SEQ ID NO: 17248 - protein, 25 aa, Artificial Sequence
  Quasi-synthetic sequence derived from human genome
MRRSLVKFRSLVHAYVSRRRYLKLR

SEQ ID NO: 17249 - protein, 25 aa, Artificial Sequence
  Quasi-synthetic sequence derived from human genome
RKRLRCRRKTVLVLMCILTAYVLCW

SEQ ID NO: 17250 - protein, 25 aa, Artificial Sequence
  Quasi-synthetic sequence derived from human genome
FGYRLRRVIAAFYFPKREKKRILFL

SEQ ID NO: 17251 - protein, 25 aa, Artificial Sequence
  Quasi-synthetic sequence derived from human genome
LAILLMVSLLLLSLWKLWRVKKFLI

SEQ ID NO: 17252 - protein, 25 aa, Artificial Sequence
  Quasi-synthetic sequence derived from human genome
LILLCLLIYYCRRRCLKPRQQHRKL

SEQ ID NO: 17253 - protein, 25 aa, Artificial Sequence
  Quasi-synthetic sequence derived from human genome
RSLKQNIFLFYVKLRWLLKHWRQGK

SEQ ID NO: 17254 - protein, 25 aa, Artificial Sequence
  Quasi-synthetic sequence derived from human genome
MRKNVRVLSRTSKFRRLRQLLRRRK

SEQ ID NO: 17255 - protein, 25 aa, Artificial Sequence
  Quasi-synthetic sequence derived from human genome
ARLCLRLLLLLGYRRRCPPLLRGLV

SEQ ID NO: 17256 - protein, 25 aa, Artificial Sequence
  Quasi-synthetic sequence derived from human genome
VWMMAGIPLLLFRWKPLWGVRLRLR

SEQ ID NO: 17257 - protein, 25 aa, Artificial Sequence
  Quasi-synthetic sequence derived from human genome
WIFWKTWIFWKTWIFRKTYIGWKTW

SEQ ID NO: 17258 - protein, 25 aa, Artificial Sequence
  Quasi-synthetic sequence derived from human genome
RRHYSVKKKLKLIRVLGLFMGLVAI

SEQ ID NO: 17259 - protein, 25 aa, Artificial Sequence
  Quasi-synthetic sequence derived from human genome
RRLVLPVFGVLWITVLLFFWVTKRK

SEQ ID NO: 17260 - protein, 25 aa, Artificial Sequence
  Quasi-synthetic sequence derived from human genome
FKLLSSLPRWRRIAQKIIRERRKKR

SEQ ID NO: 17261 - protein, 25 aa, Artificial Sequence
  Quasi-synthetic sequence derived from human genome
VGKVGQVLRVMRLMRIFRILKLARH

SEQ ID NO: 17262 - protein, 25 aa, Artificial Sequence
  Quasi-synthetic sequence derived from human genome
RHRGLRPRRQKALRMILAVVLVFFV

SEQ ID NO: 17263 - protein, 25 aa, Artificial Sequence
  Quasi-synthetic sequence derived from human genome
LRKRVNAALVIQKYWRRVLAQRKLL

SEQ ID NO: 17264 - protein, 25 aa, Artificial Sequence
  Quasi-synthetic sequence derived from human genome
KSIPRKRISLKRPKKCFRNLFHIRR

SEQ ID NO: 17265 - protein, 25 aa, Artificial Sequence
  Quasi-synthetic sequence derived from human genome
LLLKRFLLARRSRRGLFAQIVLPAL

SEQ ID NO: 17266 - protein, 25 aa, Artificial Sequence
  Quasi-synthetic sequence derived from human genome
IFILVVLFIVFRKKVFRKNYSRNNI

SEQ ID NO: 17267 - protein, 25 aa, Artificial Sequence
  Quasi-synthetic sequence derived from human genome
IFCLCSLVGILHLQRALVLRRKRKR

SEQ ID NO: 17268 - protein, 25 aa, Artificial Sequence
  Quasi-synthetic sequence derived from human genome
RSRSRRISLRKKLKLPIGKRNWLKR

SEQ ID NO: 17269 - protein, 25 aa, Artificial Sequence
  Quasi-synthetic sequence derived from human genome
RTVAKKLVVFRPRLFLLCFGIIFLI

SEQ ID NO: 17270 - protein, 25 aa, Artificial Sequence
  Quasi-synthetic sequence derived from human genome
LRSFRLLRVFKLAKSWPTLNMLIKI

SEQ ID NO: 17271 - protein, 25 aa, Artificial Sequence
  Quasi-synthetic sequence derived from human genome
LIRIRKLTLKRQRKLVPLSKKVERR

SEQ ID NO: 17272 - protein, 25 aa, Artificial Sequence
  Quasi-synthetic sequence derived from human genome
FTTLLIACLLLRVFRSGKRLKKTRK

SEQ ID NO: 17273 - protein, 25 aa, Artificial Sequence
  Quasi-synthetic sequence derived from human genome
MVLQRRKFLQMKRRKYGFIYKTHLF

SEQ ID NO: 17274 - protein, 25 aa, Artificial Sequence
  Quasi-synthetic sequence derived from human genome
LILKTIRRRLPFSKWRLAFRFAGPH

SEQ ID NO: 17275 - protein, 25 aa, Artificial Sequence
  Quasi-synthetic sequence derived from human genome
FLAFFVVVSLVCLILLVKIKLKQRR

SEQ ID NO: 17276 - protein, 25 aa, Artificial Sequence
  Quasi-synthetic sequence derived from human genome
RRMFRVRNCLRGLGLFLLVFSFFFL

SEQ ID NO: 17277 - protein, 25 aa, Artificial Sequence
  Quasi-synthetic sequence derived from human genome
RARRRRPLFALLLLCALLARLQVAL

SEQ ID NO: 17278 - protein, 25 aa, Artificial Sequence
  Quasi-synthetic sequence derived from human genome
PRRPAGSRLRLLLLLLLPPLLLLLR

SEQ ID NO: 17279 - protein, 25 aa, Artificial Sequence
  Quasi-synthetic sequence derived from human genome
LFFRKRRADMPRVFVFRALLLVLIF

SEQ ID NO: 17280 - protein, 25 aa, Artificial Sequence
  Quasi-synthetic sequence derived from human genome
KKVDTVKRLLIKKLPRVLAIQLKRF

SEQ ID NO: 17281 - protein, 25 aa, Artificial Sequence
  Quasi-synthetic sequence derived from human genome
VFRLARRRKKILFYCHFPDLLLTKR

SEQ ID NO: 17282 - protein, 25 aa, Artificial Sequence
  Quasi-synthetic sequence derived from human genome
RGRRKKKCKICKLRSFFRKLNTRLM

SEQ ID NO: 17283 - protein, 25 aa, Artificial Sequence
  Quasi-synthetic sequence derived from human genome
LILILLIKKLIIFILKKTREKKKEC

SEQ ID NO: 17284 - protein, 25 aa, Artificial Sequence
  Quasi-synthetic sequence derived from human genome
KLKRKYWWKNCKMWAIGITVLVIFI

SEQ ID NO: 17285 - protein, 25 aa, Artificial Sequence
  Quasi-synthetic sequence derived from human genome
PLKTFVFFIWRRYWRTLVLLLLVLL

SEQ ID NO: 17286 - protein, 25 aa, Artificial Sequence
  Quasi-synthetic sequence derived from human genome
LAKKMLRKALKLLNRIFPYNLISLF

SEQ ID NO: 17287 - protein, 25 aa, Artificial Sequence
  Quasi-synthetic sequence derived from human genome
LAYCLALQLYVRRRKKLPSVLLFKK

SEQ ID NO: 17288 - protein, 25 aa, Artificial Sequence
  Quasi-synthetic sequence derived from human genome
RLLLFFRFKRTLDRICVLFLLGWHR

SEQ ID NO: 17289 - protein, 25 aa, Artificial Sequence
  Quasi-synthetic sequence derived from human genome
VLRALRLLRIFKVTKYWASLRNLVV

SEQ ID NO: 17290 - protein, 25 aa, Artificial Sequence
  Quasi-synthetic sequence derived from human genome
KMLFWVLGLLILCGFLWTRKGKLKI

SEQ ID NO: 17291 - protein, 25 aa, Artificial Sequence
  Quasi-synthetic sequence derived from human genome
IWLRLRGLRKYKKTSQRLRSLVKQL

SEQ ID NO: 17292 - protein, 25 aa, Artificial Sequence
  Quasi-synthetic sequence derived from human genome
RRTLRKPKRVPSIYKLKLRPRIRPR

SEQ ID NO: 17293 - protein, 25 aa, Artificial Sequence
  Quasi-synthetic sequence derived from human genome
RIARFRFRAFHFLNRFPSVYLRCKM

SEQ ID NO: 17294 - protein, 25 aa, Artificial Sequence
  Quasi-synthetic sequence derived from human genome
LIIIFLTVLLLKLRKRHRKHTQQRA

SEQ ID NO: 17295 - protein, 25 aa, Artificial Sequence
  Quasi-synthetic sequence derived from human genome
VKKIWQKQFRWPKNRLQILKFCKAR

SEQ ID NO: 17296 - protein, 25 aa, Artificial Sequence
  Quasi-synthetic sequence derived from human genome
LWRRQIYAVATLRFLKLRRERRALL

SEQ ID NO: 17297 - protein, 25 aa, Artificial Sequence
  Quasi-synthetic sequence derived from human genome
SCVFLAFVILLLALRLRRWHKSRLL

SEQ ID NO: 17298 - protein, 25 aa, Artificial Sequence
  Quasi-synthetic sequence derived from human genome
KNIVKKGYLLKKGKGKRWKNLYFIL

SEQ ID NO: 17299 - protein, 25 aa, Artificial Sequence
  Quasi-synthetic sequence derived from human genome
FILWRRFRWAIILFIILFILLLFLA

SEQ ID NO: 17300 - protein, 25 aa, Artificial Sequence
  Quasi-synthetic sequence derived from human genome
RIVLWGFRWLIFRIMLGAGLIKIRG

SEQ ID NO: 17301 - protein, 25 aa, Artificial Sequence
  Quasi-synthetic sequence derived from human genome
KQIKRKAPRGFLKRVFKRKKPQLRL

SEQ ID NO: 17302 - protein, 25 aa, Artificial Sequence
  Quasi-synthetic sequence derived from human genome
LIVQRWIRGFLVRKNLSPVFFHKKK

SEQ ID NO: 17303 - protein, 25 aa, Artificial Sequence
  Quasi-synthetic sequence derived from human genome
AVNIKAGKAFLRLKRKFIQMRRPFL

SEQ ID NO: 17304 - protein, 25 aa, Artificial Sequence
  Quasi-synthetic sequence derived from human genome
GILVGCLCLLLAVYFIARKIRKKRL

SEQ ID NO: 17305 - protein, 25 aa, Artificial Sequence
  Quasi-synthetic sequence derived from human genome
MIKVFLSSLKFHIRRFIFLFFILVI

SEQ ID NO: 17306 - protein, 25 aa, Artificial Sequence
  Quasi-synthetic sequence derived from human genome
LLLLLLFYVVRYCWLRRQAALQRRL

SEQ ID NO: 17307 - protein, 25 aa, Artificial Sequence
  Quasi-synthetic sequence derived from human genome
FTRLILFLFCLMVLVESRKPKRKRW

SEQ ID NO: 17308 - protein, 25 aa, Artificial Sequence
  Quasi-synthetic sequence derived from human genome
RRRRRACIALFLVLLFAFGTLMGLR

SEQ ID NO: 17309 - protein, 25 aa, Artificial Sequence
  Quasi-synthetic sequence derived from human genome
RRRNTPFHERFFRFLLRKLYVFRRS

SEQ ID NO: 17310 - protein, 25 aa, Artificial Sequence
  Quasi-synthetic sequence derived from human genome
IQKYFFSPTLFRVIRLARIGRILRL

SEQ ID NO: 17311 - protein, 25 aa, Artificial Sequence
  Quasi-synthetic sequence derived from human genome
FFCFLLGKCFKKGLKGKGFVLLVKL

SEQ ID NO: 17312 - protein, 25 aa, Artificial Sequence
  Quasi-synthetic sequence derived from human genome
WPRFIRHKCKQRFTKITQYLIRIRK

SEQ ID NO: 17313 - protein, 25 aa, Artificial Sequence
  Quasi-synthetic sequence derived from human genome
FFRRPKASLPRVFVLRALLMVLVFL

SEQ ID NO: 17314 - protein, 25 aa, Artificial Sequence
  Quasi-synthetic sequence derived from human genome
LSIFYLLKIVNFSRLIFHHLKRKAK

SEQ ID NO: 17315 - protein, 25 aa, Artificial Sequence
  Quasi-synthetic sequence derived from human genome
AKALKKKKKMPKLRFASRIRKIRKK

SEQ ID NO: 17316 - protein, 25 aa, Artificial Sequence
  Quasi-synthetic sequence derived from human genome
LVAVILLLLLLLLLFLILRHRRQGK

SEQ ID NO: 17317 - protein, 25 aa, Artificial Sequence
  Quasi-synthetic sequence derived from human genome
KAFRDTFRLLLLCRWDKRRWRKIPK

SEQ ID NO: 17318 - protein, 25 aa, Artificial Sequence
  Quasi-synthetic sequence derived from human genome
KWRRKSAYWKALKVFKLPVEFLLLL

SEQ ID NO: 17319 - protein, 25 aa, Artificial Sequence
  Quasi-synthetic sequence derived from human genome
WTHLVRLLRLIILIRIFHLLHQKRQ

SEQ ID NO: 17320 - protein, 25 aa, Artificial Sequence
  Quasi-synthetic sequence derived from human genome
LRDKLKLMKQRRKPPGFLALVKLLR

SEQ ID NO: 17321 - protein, 25 aa, Artificial Sequence
  Quasi-synthetic sequence derived from human genome
LVLRRKALAPRLLLRLLRSPTLRGH

SEQ ID NO: 17322 - protein, 25 aa, Artificial Sequence
  Quasi-synthetic sequence derived from human genome
RPTQAKLLAKKRVVRMLLVIVVLFF

SEQ ID NO: 17323 - protein, 25 aa, Artificial Sequence
  Quasi-synthetic sequence derived from human genome
KHLYNWNLPPRRILFIKRFIIYSIR

SEQ ID NO: 17324 - protein, 25 aa, Artificial Sequence
  Quasi-synthetic sequence derived from human genome
HVLRRQILLPFRKPLIIFTPKSLLR

SEQ ID NO: 17325 - protein, 25 aa, Artificial Sequence
  Quasi-synthetic sequence derived from human genome
RKQLVLRRGLLLLGVFLILLAGVRW

SEQ ID NO: 17326 - protein, 25 aa, Artificial Sequence
  Quasi-synthetic sequence derived from human genome
LKSARYFLWHTYRWLLLKLLLLLLL

SEQ ID NO: 17327 - protein, 25 aa, Artificial Sequence
  Quasi-synthetic sequence derived from human genome
WVLLALALLAWCRRSRGLKALRLCR

SEQ ID NO: 17328 - protein, 25 aa, Artificial Sequence
  Quasi-synthetic sequence derived from human genome
WMRRMRILRRLLRRYRESKKIDRHM

SEQ ID NO: 17329 - protein, 25 aa, Artificial Sequence
  Quasi-synthetic sequence derived from human genome
RRMALSMIERRKRWRTIKLLLRRGA

SEQ ID NO: 17330 - protein, 25 aa, Artificial Sequence
  Quasi-synthetic sequence derived from human genome
FSAFALVRTIRYLYRRLQRMLGLRR

SEQ ID NO: 17331 - protein, 25 aa, Artificial Sequence
  Quasi-synthetic sequence derived from human genome
MIFMITKCCLFCFRKLAKTGKKKKR

SEQ ID NO: 17332 - protein, 25 aa, Artificial Sequence
  Quasi-synthetic sequence derived from human genome
FMFSIWRFAWRKSIKKYHAWRSRRS

SEQ ID NO: 17333 - protein, 25 aa, Artificial Sequence
  Quasi-synthetic sequence derived from human genome
WMLLFKPLVLRRQYLRRKHLGTLNF

SEQ ID NO: 17334 - protein, 25 aa, Artificial Sequence
  Quasi-synthetic sequence derived from human genome
KGLCLFKKHFMALIFSAKRLKIIPF

SEQ ID NO: 17335 - protein, 25 aa, Artificial Sequence
  Quasi-synthetic sequence derived from human genome
FRRKEKMFRFFIRRMVKAQSFYWVV

SEQ ID NO: 17336 - protein, 25 aa, Artificial Sequence
  Quasi-synthetic sequence derived from human genome
GGMLMLLPFLLRQHKVWRKCRMRIF

SEQ ID NO: 17337 - protein, 25 aa, Artificial Sequence
  Quasi-synthetic sequence derived from human genome
KIVPKKKKPLKLGPIKKKDLKKLVL

SEQ ID NO: 17338 - protein, 25 aa, Artificial Sequence
  Quasi-synthetic sequence derived from human genome
LLIYRDRLRINRFAWPKVLKISYKR

SEQ ID NO: 17339 - protein, 25 aa, Artificial Sequence
  Quasi-synthetic sequence derived from human genome
RLKRLRNIHYLFNTALFLIAWRLLI

SEQ ID NO: 17340 - protein, 25 aa, Artificial Sequence
  Quasi-synthetic sequence derived from human genome
IHNRYKPLRRRVIWLIGQWISVKFK

SEQ ID NO: 17341 - protein, 25 aa, Artificial Sequence
  Quasi-synthetic sequence derived from human genome
IVRFWAKHRWGLPLRVLKPIQCFKL

SEQ ID NO: 17342 - protein, 25 aa, Artificial Sequence
  Quasi-synthetic sequence derived from human genome
CLVIFVLVHSFLKKLLGKKLTRCLK

SEQ ID NO: 17343 - protein, 25 aa, Artificial Sequence
  Quasi-synthetic sequence derived from human genome
GWLRKSPPEKKLKRYAWKRRWFVLR

SEQ ID NO: 17344 - protein, 25 aa, Artificial Sequence
  Quasi-synthetic sequence derived from human genome
QFLFVNKRLVLRTKLHKLIDFLLRK

SEQ ID NO: 17345 - protein, 25 aa, Artificial Sequence
  Quasi-synthetic sequence derived from human genome
LRFGFGFRRGRSFLLRSWHHLMKRV

SEQ ID NO: 17346 - protein, 25 aa, Artificial Sequence
  Quasi-synthetic sequence derived from human genome
VVKMRKEVKRIRVLVIRKLVRSVGR

SEQ ID NO: 17347 - protein, 25 aa, Artificial Sequence
  Quasi-synthetic sequence derived from human genome
ALLLLMVACRLRLVKQKLKKARPIT

SEQ ID NO: 17348 - protein, 25 aa, Artificial Sequence
  Quasi-synthetic sequence derived from human genome
RIYGKFLGLRAFIRKQINNIFLRFI

SEQ ID NO: 17349 - protein, 25 aa, Artificial Sequence
  Quasi-synthetic sequence derived from human genome
KKSRKKMCILVLVLSVIILILGLII

SEQ ID NO: 17350 - protein, 25 aa, Artificial Sequence
  Quasi-synthetic sequence derived from human genome
IFLILEKLKIITYRNLFKKVYLLLK

SEQ ID NO: 17351 - protein, 25 aa, Artificial Sequence
  Quasi-synthetic sequence derived from human genome
RSRRRTRFVFQKALRSLRRYPLPLR

SEQ ID NO: 17352 - protein, 25 aa, Artificial Sequence
  Quasi-synthetic sequence derived from human genome
IIRLMLKYQKILWKVPSFLITQVRR

SEQ ID NO: 17353 - protein, 25 aa, Artificial Sequence
  Quasi-synthetic sequence derived from human genome
KRFHPFCLVLRKRKSTLFWGARYVR

SEQ ID NO: 17354 - protein, 25 aa, Artificial Sequence
  Quasi-synthetic sequence derived from human genome
HRILINLMKYLQKWKRYRPLWKLDK

SEQ ID NO: 17355 - protein, 25 aa, Artificial Sequence
  Quasi-synthetic sequence derived from human genome
LGVVLLAIFVALFFLTKKRRQRQRL

SEQ ID NO: 17356 - protein, 25 aa, Artificial Sequence
  Quasi-synthetic sequence derived from human genome
KKQKSTKKFWIQKLPKVLCLHLKRF

SEQ ID NO: 17357 - protein, 25 aa, Artificial Sequence
  Quasi-synthetic sequence derived from human genome
NIRSFMNVKHWPWMKLFFKIKPLLK

SEQ ID NO: 17358 - protein, 25 aa, Artificial Sequence
  Quasi-synthetic sequence derived from human genome
CRYVSWRRKKLYLLFAQHRYISRLF

SEQ ID NO: 17359 - protein, 25 aa, Artificial Sequence
  Quasi-synthetic sequence derived from human genome
VRPHLLKKKILGRVWWLMPVVLALW

SEQ ID NO: 17360 - protein, 25 aa, Artificial Sequence
  Quasi-synthetic sequence derived from human genome
TVVAILLLLALALGLLVYRKRRAKR

SEQ ID NO: 17361 - protein, 25 aa, Artificial Sequence
  Quasi-synthetic sequence derived from human genome
AMVPILLLGTPLHLLHRHRRRLRRR

SEQ ID NO: 17362 - protein, 25 aa, Artificial Sequence
  Quasi-synthetic sequence derived from human genome
KSWLMKALFKTFYMVLLKSFLLKLV

SEQ ID NO: 17363 - protein, 25 aa, Artificial Sequence
  Quasi-synthetic sequence derived from human genome
VAFVLLLFLLLFLLLRRQRHSKHRT

SEQ ID NO: 17364 - protein, 25 aa, Artificial Sequence
  Quasi-synthetic sequence derived from human genome
YLFRQNRFYDAKVRYKRALLLLRRR

SEQ ID NO: 17365 - protein, 25 aa, Artificial Sequence
  Quasi-synthetic sequence derived from human genome
IFKAIAHFKRTTFLKKHRMLGRLKY

SEQ ID NO: 17366 - protein, 25 aa, Artificial Sequence
  Quasi-synthetic sequence derived from human genome
IFHFLYGKNRSRIPLLRKRWFQLGR

SEQ ID NO: 17367 - protein, 25 aa, Artificial Sequence
  Quasi-synthetic sequence derived from human genome
NIRAFMAVKNWPWMRLFFKIKPLVK

SEQ ID NO: 17368 - protein, 25 aa, Artificial Sequence
  Quasi-synthetic sequence derived from human genome
LIILLIFRLIWRSVKKWQIIKGTGI

SEQ ID NO: 17369 - protein, 25 aa, Artificial Sequence
  Quasi-synthetic sequence derived from human genome
KTFYYKSRFWLLKLLFRVFTAPFHK

SEQ ID NO: 17370 - protein, 25 aa, Artificial Sequence
  Quasi-synthetic sequence derived from human genome
LLLMILKPVQKLFAIIVGRGIRKWW

SEQ ID NO: 17371 - protein, 25 aa, Artificial Sequence
  Quasi-synthetic sequence derived from human genome
RLMNFFVFSRGLLQYINQRKKFRRR

SEQ ID NO: 17372 - protein, 25 aa, Artificial Sequence
  Quasi-synthetic sequence derived from human genome
RYAAIVHPLRLRHLRRPRVARLLCL

SEQ ID NO: 17373 - protein, 25 aa, Artificial Sequence
  Quasi-synthetic sequence derived from human genome
VLRALRLLRIFKVTKYWSSLRNLVV

SEQ ID NO: 17374 - protein, 25 aa, Artificial Sequence
  Quasi-synthetic sequence derived from human genome
KKAGLLMALARLCFLLGRLCSRRLK

SEQ ID NO: 17375 - protein, 25 aa, Artificial Sequence
  Quasi-synthetic sequence derived from human genome
HLPMKLLRKKIEKRNLKLRQRNLKF

SEQ ID NO: 17376 - protein, 25 aa, Artificial Sequence
  Quasi-synthetic sequence derived from human genome
RLFRIKCVTRIQAYWRGCVVRKWYR

SEQ ID NO: 17377 - protein, 25 aa, Artificial Sequence
  Quasi-synthetic sequence derived from human genome
FLLRKLYVFRRSFLMTCISLRNLIL

SEQ ID NO: 17378 - protein, 25 aa, Artificial Sequence
  Quasi-synthetic sequence derived from human genome
LGLALVLALVLVGLVSWRRRQRRLR

SEQ ID NO: 17379 - protein, 25 aa, Artificial Sequence
  Quasi-synthetic sequence derived from human genome
RRRRRRRRRDLLLSQLCFLASVALL

SEQ ID NO: 17380 - protein, 25 aa, Artificial Sequence
  Quasi-synthetic sequence derived from human genome
RSLKHLCRLKIRKCMGRLHLRCPVF

SEQ ID NO: 17381 - protein, 25 aa, Artificial Sequence
  Quasi-synthetic sequence derived from human genome
SCVFLAFVLVLLALRLRRWHKSRLL

SEQ ID NO: 17382 - protein, 25 aa, Artificial Sequence
  Quasi-synthetic sequence derived from human genome
RRFLGKKYRKYYYKSPKPLLRPFLC

SEQ ID NO: 17383 - protein, 25 aa, Artificial Sequence
  Quasi-synthetic sequence derived from human genome
KCALVRHKFNRLPRVLILHLKRYSF

SEQ ID NO: 17384 - protein, 25 aa, Artificial Sequence
  Quasi-synthetic sequence derived from human genome
ILILGNKKLKQIFLSVLRHVRYWVK

SEQ ID NO: 17385 - protein, 25 aa, Artificial Sequence
  Quasi-synthetic sequence derived from human genome
LLRRLPKLRKRMRKMCLTFMKESPL

SEQ ID NO: 17386 - protein, 25 aa, Artificial Sequence
  Quasi-synthetic sequence derived from human genome
AKLSRKQLVLRRGLLLLGVFLILLV

SEQ ID NO: 17387 - protein, 25 aa, Artificial Sequence
  Quasi-synthetic sequence derived from human genome
RLLRRRHMPLRLAMVGCAFVLFLFL

SEQ ID NO: 17388 - protein, 25 aa, Artificial Sequence
  Quasi-synthetic sequence derived from human genome
RKQYRKVLYCVVIIQKNYRAFLLRR

SEQ ID NO: 17389 - protein, 25 aa, Artificial Sequence
  Quasi-synthetic sequence derived from human genome
ILLVVVLGVVFGILIKRRQQKIRKY

SEQ ID NO: 17390 - protein, 25 aa, Artificial Sequence
  Quasi-synthetic sequence derived from human genome
LVKMGGKIKSWKKRWFVFDRLKRTL

SEQ ID NO: 17391 - protein, 25 aa, Artificial Sequence
  Quasi-synthetic sequence derived from human genome
LRYNILTLMRMLSLKSLKKQMKKVK

SEQ ID NO: 17392 - protein, 25 aa, Artificial Sequence
  Quasi-synthetic sequence derived from human genome
RRFRSLKMWFVFRMYGVKGLQAYIR

SEQ ID NO: 17393 - protein, 25 aa, Artificial Sequence
  Quasi-synthetic sequence derived from human genome
RFLLKRGLRNKRIGHFLFWFLRSEI

SEQ ID NO: 17394 - protein, 25 aa, Artificial Sequence
  Quasi-synthetic sequence derived from human genome
LNLAALTLQRCLRGFFIKRRFRSLR

SEQ ID NO: 17395 - protein, 25 aa, Artificial Sequence
  Quasi-synthetic sequence derived from human genome
LKRQILILFNIILISKLLGARWFPK

SEQ ID NO: 17396 - protein, 25 aa, Artificial Sequence
  Quasi-synthetic sequence derived from human genome
LLLFVISITTIIVIFLNRRRRRERR

SEQ ID NO: 17397 - protein, 25 aa, Artificial Sequence
  Quasi-synthetic sequence derived from human genome
LVILTFQWRFYLSFRKLMRWILILV

SEQ ID NO: 17398 - protein, 25 aa, Artificial Sequence
  Quasi-synthetic sequence derived from human genome
IIYSIKTKQIRQRIIKKFQFIKSLR

SEQ ID NO: 17399 - protein, 25 aa, Artificial Sequence
  Quasi-synthetic sequence derived from human genome
LRVLRMMRIFWVIKLARHFIGLQTL

SEQ ID NO: 17400 - protein, 25 aa, Artificial Sequence
  Quasi-synthetic sequence derived from human genome
FPRSPRIRKRFLLRRILEMLFFTQL

SEQ ID NO: 17401 - protein, 25 aa, Artificial Sequence
  Quasi-synthetic sequence derived from human genome
PYFRLKKVVKWYLSGFYKKPKGLKK

SEQ ID NO: 17402 - protein, 25 aa, Artificial Sequence
  Quasi-synthetic sequence derived from human genome
LLIFILLLTLTILTIWLFKHRRARF

SEQ ID NO: 17403 - protein, 25 aa, Artificial Sequence
  Quasi-synthetic sequence derived from human genome
FVFHRLKIKQILPTIYKRKNLSLFL

SEQ ID NO: 17404 - protein, 25 aa, Artificial Sequence
  Quasi-synthetic sequence derived from human genome
KFLQLRFWGWWKLYNKVKPLLNVAR

SEQ ID NO: 17405 - protein, 25 aa, Artificial Sequence
  Quasi-synthetic sequence derived from human genome
RLAHRISKSKFSRYWRRWNRFCRRK

SEQ ID NO: 17406 - protein, 25 aa, Artificial Sequence
  Quasi-synthetic sequence derived from human genome
RINRFAWPKILKISYKRSNFYIKVR

SEQ ID NO: 17407 - protein, 25 aa, Artificial Sequence
  Quasi-synthetic sequence derived from human genome
RRFRLSSHFIRHRRAHMRRRLYICA

SEQ ID NO: 17408 - protein, 25 aa, Artificial Sequence
  Quasi-synthetic sequence derived from human genome
LARIGRILRLIRGAKGIRTLLFALM

SEQ ID NO: 17409 - protein, 25 aa, Artificial Sequence
  Quasi-synthetic sequence derived from human genome
WLVKSPPERKLQRYAWRKRWFVLRR

SEQ ID NO: 17410 - protein, 25 aa, Artificial Sequence
  Quasi-synthetic sequence derived from human genome
LLPRRRRCFPARAPLLRVALCLLCW

SEQ ID NO: 17411 - protein, 25 aa, Artificial Sequence
  Quasi-synthetic sequence derived from human genome
LVAVVLLLLLLLLLFLILRHRRQGK

SEQ ID NO: 17412 - protein, 25 aa, Artificial Sequence
  Quasi-synthetic sequence derived from human genome
FPRFIKIIEVKNKKLVELLRRKVRL

SEQ ID NO: 17413 - protein, 25 aa, Artificial Sequence
  Quasi-synthetic sequence derived from human genome
RRILQRVPGKQRFGIYRFLPFFFVL

SEQ ID NO: 17414 - protein, 25 aa, Artificial Sequence
  Quasi-synthetic sequence derived from human genome
LPFPLRKPRKAHKYLRLSRKKFPPR

SEQ ID NO: 17415 - protein, 25 aa, Artificial Sequence
  Quasi-synthetic sequence derived from human genome
RWLLRTKRLHWSRLLFLLGMLIIGS

SEQ ID NO: 17416 - protein, 25 aa, Artificial Sequence
  Quasi-synthetic sequence derived from human genome
LWALSLLLGVARSLWMLLKLRQRLR

SEQ ID NO: 17417 - protein, 25 aa, Artificial Sequence
  Quasi-synthetic sequence derived from human genome
QNMSLAILRIIRLVRVFRIFKLSRH

SEQ ID NO: 17418 - protein, 25 aa, Artificial Sequence
  Quasi-synthetic sequence derived from human genome
AVGFSPLRILRKRNKALRKIRKLQK

SEQ ID NO: 17419 - protein, 25 aa, Artificial Sequence
  Quasi-synthetic sequence derived from human genome
VIMGYLRIIRFLPLFKIIVPILIRI

SEQ ID NO: 17420 - protein, 25 aa, Artificial Sequence
  Quasi-synthetic sequence derived from human genome
SCVFLAFVIVLLALRLRRWHKSRLL

SEQ ID NO: 17421 - protein, 25 aa, Artificial Sequence
  Quasi-synthetic sequence derived from human genome
ILRRKLYIHRVTLRKLLPGVQYVYR

SEQ ID NO: 17422 - protein, 25 aa, Artificial Sequence
  Quasi-synthetic sequence derived from human genome
FLFLILIRRALSASQKKKVIIAALR

SEQ ID NO: 17423 - protein, 25 aa, Artificial Sequence
  Quasi-synthetic sequence derived from human genome
YRKAIFIFIRWLLKLGHHGRAPPRR

SEQ ID NO: 17424 - protein, 25 aa, Artificial Sequence
  Quasi-synthetic sequence derived from human genome
FYGFLGKKFKRYFLQLLKYIPPKAK

SEQ ID NO: 17425 - protein, 25 aa, Artificial Sequence
  Quasi-synthetic sequence derived from human genome
LFFLMKRKIIVLMPWLLRLSVLVSL

SEQ ID NO: 17426 - protein, 25 aa, Artificial Sequence
  Quasi-synthetic sequence derived from human genome
RRLLRPFFLLQNSSMMKKTLKCIRW

SEQ ID NO: 17427 - protein, 25 aa, Artificial Sequence
  Quasi-synthetic sequence derived from human genome
FRHIFLATLACLCPVWRRRRKRPAF

SEQ ID NO: 17428 - protein, 25 aa, Artificial Sequence
  Quasi-synthetic sequence derived from human genome
WRRWNRFCRRKCRAAVKSNVFYWLV

SEQ ID NO: 17429 - protein, 25 aa, Artificial Sequence
  Quasi-synthetic sequence derived from human genome
LYGFLSYRFKQGFRRVLLRPSRRVR

SEQ ID NO: 17430 - protein, 25 aa, Artificial Sequence
  Quasi-synthetic sequence derived from human genome
LVRGGWLWRQSSILRRWKRNWFALW

SEQ ID NO: 17431 - protein, 25 aa, Artificial Sequence
  Quasi-synthetic sequence derived from human genome
RIRRLGFSHRILFANFIKRYYLLCY

SEQ ID NO: 17432 - protein, 25 aa, Artificial Sequence
  Quasi-synthetic sequence derived from human genome
LQVSKKRLISVKNYRMIKKRKGLRL

SEQ ID NO: 17433 - protein, 25 aa, Artificial Sequence
  Quasi-synthetic sequence derived from human genome
MKIFFRYQTFRFIWLTKPPGRRLHK

SEQ ID NO: 17434 - protein, 25 aa, Artificial Sequence
  Quasi-synthetic sequence derived from human genome
KLGVLLRRVTRNLVRNKLAVITRLL

SEQ ID NO: 17435 - protein, 25 aa, Artificial Sequence
  Quasi-synthetic sequence derived from human genome
LIILVALLMLVFRSKREVKRQKYRL

SEQ ID NO: 17436 - protein, 25 aa, Artificial Sequence
  Quasi-synthetic sequence derived from human genome
QAMSLAILRVIRLVRVFRIFKLSRH

SEQ ID NO: 17437 - protein, 25 aa, Artificial Sequence
  Quasi-synthetic sequence derived from human genome
IILLMSMAFLTCCLLKCVKKSKRRR

SEQ ID NO: 17438 - protein, 25 aa, Artificial Sequence
  Quasi-synthetic sequence derived from human genome
FITIVFCAAGIVVLVLHRRRRYKKK

SEQ ID NO: 17439 - protein, 25 aa, Artificial Sequence
  Quasi-synthetic sequence derived from human genome
SGYLKIRRSYALVSLSFFRKLRLIR

SEQ ID NO: 17440 - protein, 25 aa, Artificial Sequence
  Quasi-synthetic sequence derived from human genome
LMALKKRTKDKLFQFLKLRKYSIKV

SEQ ID NO: 17441 - protein, 25 aa, Artificial Sequence
  Quasi-synthetic sequence derived from human genome
RKYICTSFYPWVNILKISFKRKKFF

SEQ ID NO: 17442 - protein, 25 aa, Artificial Sequence
  Quasi-synthetic sequence derived from human genome
PLKSIKYLICTRYKWLIIKIVLALL

SEQ ID NO: 17443 - protein, 25 aa, Artificial Sequence
  Quasi-synthetic sequence derived from human genome
LLVFLLMVAVYTRIFFYVRRRVQRM

SEQ ID NO: 17444 - protein, 25 aa, Artificial Sequence
  Quasi-synthetic sequence derived from human genome
RSRLLLLLCIFLGTLRGFRARQIRY

SEQ ID NO: 17445 - protein, 25 aa, Artificial Sequence
  Quasi-synthetic sequence derived from human genome
HRLLILWRILYKKTLWYQAQLNRRV

SEQ ID NO: 17446 - protein, 25 aa, Artificial Sequence
  Quasi-synthetic sequence derived from human genome
LKRRILRVVAHCNKPKYKILLHGLW

SEQ ID NO: 17447 - protein, 25 aa, Artificial Sequence
  Quasi-synthetic sequence derived from human genome
FLYLKWRVKKVVLVLLLVTSVFLFL

SEQ ID NO: 17448 - protein, 25 aa, Artificial Sequence
  Quasi-synthetic sequence derived from human genome
KFRRYLSVFFRKHITKRFCKQCPVF

SEQ ID NO: 17449 - protein, 25 aa, Artificial Sequence
  Quasi-synthetic sequence derived from human genome
RRKLKFFFMNPCEKFWARGRKPWKL

SEQ ID NO: 17450 - protein, 25 aa, Artificial Sequence
  Quasi-synthetic sequence derived from human genome
SLWSRFKKKCFKLTRKMPIIGRKIQ

SEQ ID NO: 17451 - protein, 25 aa, Artificial Sequence
  Quasi-synthetic sequence derived from human genome
IPFFIIFCVLIAIMVKVNFQRKKWR

SEQ ID NO: 17452 - protein, 25 aa, Artificial Sequence
  Quasi-synthetic sequence derived from human genome
PKWRLPRISARAPYRLRRLRRHTYW

SEQ ID NO: 17453 - protein, 25 aa, Artificial Sequence
  Quasi-synthetic sequence derived from human genome
LKKKLLPWQRRGLLRAQGLRGWKAR

SEQ ID NO: 17454 - protein, 25 aa, Artificial Sequence
  Quasi-synthetic sequence derived from human genome
LGLRRLSSKKNIRKQRMKILFNVVL

SEQ ID NO: 17455 - protein, 25 aa, Artificial Sequence
  Quasi-synthetic sequence derived from human genome
VKRHRSSFRNRFPLLKVLILQRNKL

SEQ ID NO: 17456 - protein, 25 aa, Artificial Sequence
  Quasi-synthetic sequence derived from human genome
LVRRRRRYALSGSVWKKRTLTWRVR

SEQ ID NO: 17457 - protein, 25 aa, Artificial Sequence
  Quasi-synthetic sequence derived from human genome
LLRICRVLRSLKLLAQFRQIQIIIL

SEQ ID NO: 17458 - protein, 25 aa, Artificial Sequence
  Quasi-synthetic sequence derived from human genome
IVKQGYVKMKSRKLGIYRRCWLVFR

SEQ ID NO: 17459 - protein, 25 aa, Artificial Sequence
  Quasi-synthetic sequence derived from human genome
LQQHKLLKVIRKKLVRKTLDMIKKI

SEQ ID NO: 17460 - protein, 25 aa, Artificial Sequence
  Quasi-synthetic sequence derived from human genome
NIRAFMNVKHWPWMKLYFKIKPLLK

SEQ ID NO: 17461 - protein, 25 aa, Artificial Sequence
  Quasi-synthetic sequence derived from human genome
MRRAKRIRNAALQHLFIRKSFRPFK

SEQ ID NO: 17462 - protein, 25 aa, Artificial Sequence
  Quasi-synthetic sequence derived from human genome
FCLWFVLQVLIVVLRIVRYRKSSKL

SEQ ID NO: 17463 - protein, 25 aa, Artificial Sequence
  Quasi-synthetic sequence derived from human genome
FLLAGLVAVALVVRKVKLRNLQKKR

SEQ ID NO: 17464 - protein, 25 aa, Artificial Sequence
  Quasi-synthetic sequence derived from human genome
RKHLNKLRNIRYGFNTILVILIWRI

SEQ ID NO: 17465 - protein, 25 aa, Artificial Sequence
  Quasi-synthetic sequence derived from human genome
GLRKTKYRSFRRRLLKFIPGLNRSL

SEQ ID NO: 17466 - protein, 25 aa, Artificial Sequence
  Quasi-synthetic sequence derived from human genome
RIYGKFLGLRAFIRKQINNIFLRFV

SEQ ID NO: 17467 - protein, 25 aa, Artificial Sequence
  Quasi-synthetic sequence derived from human genome
RVRLQLKIILCFSPVGRTLRVRARK

SEQ ID NO: 17468 - protein, 25 aa, Artificial Sequence
  Quasi-synthetic sequence derived from human genome
RRLRRAARRQVLSGHLPFCRFRLRY

SEQ ID NO: 17469 - protein, 25 aa, Artificial Sequence
  Quasi-synthetic sequence derived from human genome
MRRLRRLAHLVLFCPFSKRLQGRLP

SEQ ID NO: 17470 - protein, 25 aa, Artificial Sequence
  Quasi-synthetic sequence derived from human genome
RKRLHFKLCKKSSILVHKLLDKLLV

SEQ ID NO: 17471 - protein, 25 aa, Artificial Sequence
  Quasi-synthetic sequence derived from human genome
IFGFSNNYWELRRRRPKLKKLKKLL

SEQ ID NO: 17472 - protein, 25 aa, Artificial Sequence
  Quasi-synthetic sequence derived from human genome
MKKFLYIKSVFHTLRMAQRRHKRVR

SEQ ID NO: 17473 - protein, 25 aa, Artificial Sequence
  Quasi-synthetic sequence derived from human genome
YLPLNTFLLKPIQRLLHYRLLLRRL

SEQ ID NO: 17474 - protein, 25 aa, Artificial Sequence
  Quasi-synthetic sequence derived from human genome
KVKLKKYTKFLFVRDPFVRLISAFR

SEQ ID NO: 17475 - protein, 25 aa, Artificial Sequence
  Quasi-synthetic sequence derived from human genome
VLLGLIAFDRFLKIIRPLRNIFLKK

SEQ ID NO: 17476 - protein, 25 aa, Artificial Sequence
  Quasi-synthetic sequence derived from human genome
LLLVFIMSVFVAAGLFVLVMKRRKK

SEQ ID NO: 17477 - protein, 25 aa, Artificial Sequence
  Quasi-synthetic sequence derived from human genome
MARRSRHRLLLLLLRYLVVALGYHK

SEQ ID NO: 17478 - protein, 25 aa, Artificial Sequence
  Quasi-synthetic sequence derived from human genome
KKKVKRLLSFQRYFHASRLLRGIIP

SEQ ID NO: 17479 - protein, 25 aa, Artificial Sequence
  Quasi-synthetic sequence derived from human genome
RRVFQAMWLSFLKHKLPLSLYKKVL

SEQ ID NO: 17480 - protein, 25 aa, Artificial Sequence
  Quasi-synthetic sequence derived from human genome
KKKIFWSHRNSFPHLLYRLLFPRLM

SEQ ID NO: 17481 - protein, 25 aa, Artificial Sequence
  Quasi-synthetic sequence derived from human genome
RVAQVLRLMRIFRILKLARHSTGLR

SEQ ID NO: 17482 - protein, 25 aa, Artificial Sequence
  Quasi-synthetic sequence derived from human genome
CILVVLLAIFLYLLRLRRIHHRQTR

SEQ ID NO: 17483 - protein, 25 aa, Artificial Sequence
  Quasi-synthetic sequence derived from human genome
WALFFRKRRADMPRVFVFRALLLVL

SEQ ID NO: 17484 - protein, 25 aa, Artificial Sequence
  Quasi-synthetic sequence derived from human genome
MVRRFLVTLRIRRACGPPRVRVFVV

SEQ ID NO: 17485 - protein, 25 aa, Artificial Sequence
  Quasi-synthetic sequence derived from human genome
LARMRYKRTKAALTIIRYYRRYKVK

SEQ ID NO: 17486 - protein, 25 aa, Artificial Sequence
  Quasi-synthetic sequence derived from human genome
CLVLLLLALILPLLFYLRKRNKTGK

SEQ ID NO: 17487 - protein, 25 aa, Artificial Sequence
  Quasi-synthetic sequence derived from human genome
KQFYRLGGFRVCHKLIFMIIQKLFR

SEQ ID NO: 17488 - protein, 25 aa, Artificial Sequence
  Quasi-synthetic sequence derived from human genome
LSRLLFFLLGFLRIRVRGQRASRLQ

SEQ ID NO: 17489 - protein, 25 aa, Artificial Sequence
  Quasi-synthetic sequence derived from human genome
LFLMVMYFFFRVRSRRWKVKHHHPA

SEQ ID NO: 17490 - protein, 25 aa, Artificial Sequence
  Quasi-synthetic sequence derived from human genome
IFLLLVILAMGLWVIRVQKRHKMPR

SEQ ID NO: 17491 - protein, 25 aa, Artificial Sequence
  Quasi-synthetic sequence derived from human genome
CRSTWLRVRKARPQLILSRRPRRRL

SEQ ID NO: 17492 - protein, 25 aa, Artificial Sequence
  Quasi-synthetic sequence derived from human genome
LKRIRKIKNVTNQIALLKLGKLPLL

SEQ ID NO: 17493 - protein, 25 aa, Artificial Sequence
  Quasi-synthetic sequence derived from human genome
YIFWKRYRFKLIAFMVISIIALMLF

SEQ ID NO: 17494 - protein, 25 aa, Artificial Sequence
  Quasi-synthetic sequence derived from human genome
WKRRIEVVMREYHKWRIYYKKRLRK

SEQ ID NO: 17495 - protein, 25 aa, Artificial Sequence
  Quasi-synthetic sequence derived from human genome
QMNVRMPFRRKIYYLPRRYKFMSRI

SEQ ID NO: 17496 - protein, 25 aa, Artificial Sequence
  Quasi-synthetic sequence derived from human genome
KKKTFKGLIRIFRKGVIAVLAANRL

SEQ ID NO: 17497 - protein, 25 aa, Artificial Sequence
  Quasi-synthetic sequence derived from human genome
VIILKKWFLKPYKGQTLPGRVLFLR

SEQ ID NO: 17498 - protein, 25 aa, Artificial Sequence
  Quasi-synthetic sequence derived from human genome
RYLRVKLTVRYKRVTTHRRIWLALG

SEQ ID NO: 17499 - protein, 25 aa, Artificial Sequence
  Quasi-synthetic sequence derived from human genome
LRSFRLLRVFKLAKSWPTLNTLIKI

SEQ ID NO: 17500 - protein, 25 aa, Artificial Sequence
  Quasi-synthetic sequence derived from human genome
KMGLILAIRSILLVIPFPFTLRRLK

SEQ ID NO: 17501 - protein, 25 aa, Artificial Sequence
  Quasi-synthetic sequence derived from human genome
RPLRNIFLKKPVFAKTVSIFIWFFL

SEQ ID NO: 17502 - protein, 25 aa, Artificial Sequence
  Quasi-synthetic sequence derived from human genome
RRIFIQLMKRFGLKATTKINWKQFL

SEQ ID NO: 17503 - protein, 25 aa, Artificial Sequence
  Quasi-synthetic sequence derived from human genome
RSRRQGSRFLWLLKILVIILVLGIV

SEQ ID NO: 17504 - protein, 25 aa, Artificial Sequence
  Quasi-synthetic sequence derived from human genome
WWFMSVKVKLKRKKRQKTPNRKLPR

SEQ ID NO: 17505 - protein, 25 aa, Artificial Sequence
  Quasi-synthetic sequence derived from human genome
KRMRVKKLPMILALHLKRFKYMEQL

SEQ ID NO: 17506 - protein, 25 aa, Artificial Sequence
  Quasi-synthetic sequence derived from human genome
LRGLGKLRQVSLRRNRLRALPRALF

SEQ ID NO: 17507 - protein, 25 aa, Artificial Sequence
  Quasi-synthetic sequence derived from human genome
ALKIYIRKRRPSKPHMFPKILMKIT

SEQ ID NO: 17508 - protein, 25 aa, Artificial Sequence
  Quasi-synthetic sequence derived from human genome
RNRLAKTKKPFKIIVTIIITFFLCW

SEQ ID NO: 17509 - protein, 25 aa, Artificial Sequence
  Quasi-synthetic sequence derived from human genome
VFIIILVLCLRLLQSRCPRVLPKKL

SEQ ID NO: 17510 - protein, 25 aa, Artificial Sequence
  Quasi-synthetic sequence derived from human genome
RIIMRFRKRKNFKKKRIVTTPQTVL

SEQ ID NO: 17511 - protein, 25 aa, Artificial Sequence
  Quasi-synthetic sequence derived from human genome
RKLIQFGLMKNLIRRLQKYPVRVTR

SEQ ID NO: 17512 - protein, 25 aa, Artificial Sequence
  Quasi-synthetic sequence derived from human genome
LLHLCCKKLKILGMPFRNIRSILKM

SEQ ID NO: 17513 - protein, 25 aa, Artificial Sequence
  Quasi-synthetic sequence derived from human genome
VFLKHVRLLSRKQFQLRALMQKARK

SEQ ID NO: 17514 - protein, 25 aa, Artificial Sequence
  Quasi-synthetic sequence derived from human genome
IFQLWFHFKRYRYRRPGPCWRPIRH

SEQ ID NO: 17515 - protein, 25 aa, Artificial Sequence
  Quasi-synthetic sequence derived from human genome
VILGSAVLLFHFCIFHRRKMKAIRR

SEQ ID NO: 17516 - protein, 25 aa, Artificial Sequence
  Quasi-synthetic sequence derived from human genome
RRLLLALHRRLRGLRRAAAGTSRLL

SEQ ID NO: 17517 - protein, 25 aa, Artificial Sequence
  Quasi-synthetic sequence derived from human genome
LALLAWCRRSRGLKALRLCRALALL

SEQ ID NO: 17518 - protein, 25 aa, Artificial Sequence
  Quasi-synthetic sequence derived from human genome
LFLIPRNPPPRLKSKKWSKKFFSFI

SEQ ID NO: 17519 - protein, 25 aa, Artificial Sequence
  Quasi-synthetic sequence derived from human genome
RFRKKRRRSQRRPRLRQFSDLWVRL

SEQ ID NO: 17520 - protein, 25 aa, Artificial Sequence
  Quasi-synthetic sequence derived from human genome
LLSFFMARVFMRMKLPRSLALLPRL

SEQ ID NO: 17521 - protein, 25 aa, Artificial Sequence
  Quasi-synthetic sequence derived from human genome
MKLKQRVVLLAILLVIFIFTKVFLI

SEQ ID NO: 17522 - protein, 25 aa, Artificial Sequence
  Quasi-synthetic sequence derived from human genome
RKRFGGIRIPIILAVLYLFIYIFTK

SEQ ID NO: 17523 - protein, 25 aa, Artificial Sequence
  Quasi-synthetic sequence derived from human genome
LLFLHLKRRVRSVILVILLGTLIFL

SEQ ID NO: 17524 - protein, 25 aa, Artificial Sequence
  Quasi-synthetic sequence derived from human genome
LRRKRKALWAHLFSSLRGYLKSLPR

SEQ ID NO: 17525 - protein, 25 aa, Artificial Sequence
  Quasi-synthetic sequence derived from human genome
MARGSLRRLLRLLVLGLWLALLRSV

SEQ ID NO: 17526 - protein, 25 aa, Artificial Sequence
  Quasi-synthetic sequence derived from human genome
VRKILLLQSWFRMVLERRHFLQMKR

SEQ ID NO: 17527 - protein, 25 aa, Artificial Sequence
  Quasi-synthetic sequence derived from human genome
KILLRRPNEKKSKAVRLIFVIMIIF

SEQ ID NO: 17528 - protein, 25 aa, Artificial Sequence
  Quasi-synthetic sequence derived from human genome
PCVVILAKALFLLPCISRRLARIRR

SEQ ID NO: 17529 - protein, 25 aa, Artificial Sequence
  Quasi-synthetic sequence derived from human genome
LKPIVKQIRRPKHVVVKFVVKFFPP

SEQ ID NO: 17530 - protein, 25 aa, Artificial Sequence
  Quasi-synthetic sequence derived from human genome
KQKLLRHLVPAAALRRKRKALWAHL

SEQ ID NO: 17531 - protein, 25 aa, Artificial Sequence
  Quasi-synthetic sequence derived from human genome
PIVVMVTLVLGVLRMAKKRVIVKKL

SEQ ID NO: 17532 - protein, 25 aa, Artificial Sequence
  Quasi-synthetic sequence derived from human genome
FVIRIRGINGVSPKVRKVLQLLRLR

SEQ ID NO: 17533 - protein, 25 aa, Artificial Sequence
  Quasi-synthetic sequence derived from human genome
RKLRNLVTIATKTFLRPHKLMIMLR

SEQ ID NO: 17534 - protein, 25 aa, Artificial Sequence
  Quasi-synthetic sequence derived from human genome
KKKIKPTLPLRIFINVSRFFCVQLK

SEQ ID NO: 17535 - protein, 25 aa, Artificial Sequence
  Quasi-synthetic sequence derived from human genome
GGPLAPRPRRRRSLRRLFSRFLLAL

SEQ ID NO: 17536 - protein, 25 aa, Artificial Sequence
  Quasi-synthetic sequence derived from human genome
LKRKWIRCSAQATVLHLKKFIAKKL

SEQ ID NO: 17537 - protein, 25 aa, Artificial Sequence
  Quasi-synthetic sequence derived from human genome
LLGALLWMWWRRNRRGKLGRLAAAF

SEQ ID NO: 17538 - protein, 25 aa, Artificial Sequence
  Quasi-synthetic sequence derived from human genome
SFLWFTSPYKTMKFILWRRFRWAII

SEQ ID NO: 17539 - protein, 25 aa, Artificial Sequence
  Quasi-synthetic sequence derived from human genome
RGARAALLLLLPPRLLARPSLLLRR

SEQ ID NO: 17540 - protein, 25 aa, Artificial Sequence
  Quasi-synthetic sequence derived from human genome
LLWRGRIPGRQWIGKHRRPRFVSLR

SEQ ID NO: 17541 - protein, 25 aa, Artificial Sequence
  Quasi-synthetic sequence derived from human genome
FCLIVLSLSTFHIHKRRMKKRKMQR

SEQ ID NO: 17542 - protein, 25 aa, Artificial Sequence
  Quasi-synthetic sequence derived from human genome
ISFWKKKKSMIGMSTKLWKVKKALK

SEQ ID NO: 17543 - protein, 25 aa, Artificial Sequence
  Quasi-synthetic sequence derived from human genome
RIIILKIVHRRIINRFHSFLLFMGH

SEQ ID NO: 17544 - protein, 25 aa, Artificial Sequence
  Quasi-synthetic sequence derived from human genome
LLLWLALLLSIQRRLPRERKIKYSK

SEQ ID NO: 17545 - protein, 25 aa, Artificial Sequence
  Quasi-synthetic sequence derived from human genome
PPFKRKGKLSTIGKIFKPWKWRKKK

SEQ ID NO: 17546 - protein, 25 aa, Artificial Sequence
  Quasi-synthetic sequence derived from human genome
LIYKNRVRMNTFPWLKIVKISFKCK

SEQ ID NO: 17547 - protein, 25 aa, Artificial Sequence
  Quasi-synthetic sequence derived from human genome
LLCLLLYYCRRKCLKPRQHHRKLQL

SEQ ID NO: 17548 - protein, 25 aa, Artificial Sequence
  Quasi-synthetic sequence derived from human genome
MRPFLKRAILVLSYVLVILYFRLWI

SEQ ID NO: 17549 - protein, 25 aa, Artificial Sequence
  Quasi-synthetic sequence derived from human genome
LWALRLWGALRLGAVILRWRYHALR

SEQ ID NO: 17550 - protein, 25 aa, Artificial Sequence
  Quasi-synthetic sequence derived from human genome
LFNPIIYSLRNKQIKVAIKKIMKRI

SEQ ID NO: 17551 - protein, 25 aa, Artificial Sequence
  Quasi-synthetic sequence derived from human genome
LLLLVFTVALYAQRRWQKRRRIPQK

SEQ ID NO: 17552 - protein, 25 aa, Artificial Sequence
  Quasi-synthetic sequence derived from human genome
LRKLGVKLVQRLGLTFLKPKVAAWR

SEQ ID NO: 17553 - protein, 25 aa, Artificial Sequence
  Quasi-synthetic sequence derived from human genome
MGNSKLREAFLKMLRFVKCFLRRRK

SEQ ID NO: 17554 - protein, 25 aa, Artificial Sequence
  Quasi-synthetic sequence derived from human genome
RQRIIQFQARCRAYLVRKAFRHRLW

SEQ ID NO: 17555 - protein, 25 aa, Artificial Sequence
  Quasi-synthetic sequence derived from human genome
LLVFVPHMRRFLSRKKIRHHIYVLN

SEQ ID NO: 17556 - protein, 25 aa, Artificial Sequence
  Quasi-synthetic sequence derived from human genome
VNFFIFLKILKLLISKLKAHQMCFR

SEQ ID NO: 17557 - protein, 25 aa, Artificial Sequence
  Quasi-synthetic sequence derived from human genome
LKQNIFLFYVKLRWLLKHWRQGKQM

SEQ ID NO: 17558 - protein, 25 aa, Artificial Sequence
  Quasi-synthetic sequence derived from human genome
WRSLVPLFCWLRATFWLLATKRRKQ

SEQ ID NO: 17559 - protein, 25 aa, Artificial Sequence
  Quasi-synthetic sequence derived from human genome
RIAMLWGSGKCKALTKFKFVFFLRL

SEQ ID NO: 17560 - protein, 25 aa, Artificial Sequence
  Quasi-synthetic sequence derived from human genome
LSIVILYCRIYSLVRTRSRRLTFRK

SEQ ID NO: 17561 - protein, 25 aa, Artificial Sequence
  Quasi-synthetic sequence derived from human genome
VLKRPARLPCSHIFCKKCILRWLAR

SEQ ID NO: 17562 - protein, 25 aa, Artificial Sequence
  Quasi-synthetic sequence derived from human genome
KRLAIMMMKKREKYLYQKIMFGKRR

SEQ ID NO: 17563 - protein, 25 aa, Artificial Sequence
  Quasi-synthetic sequence derived from human genome
RRRLGRLWNRLFHRPRAPRGQIPLL

SEQ ID NO: 17564 - protein, 25 aa, Artificial Sequence
  Quasi-synthetic sequence derived from human genome
LLRPPIISRFIRLIPLGWHVRIAIR

SEQ ID NO: 17565 - protein, 25 aa, Artificial Sequence
  Quasi-synthetic sequence derived from human genome
FKCIKCSKSFFMLSCLIRHKRIHIR

SEQ ID NO: 17566 - protein, 25 aa, Artificial Sequence
  Quasi-synthetic sequence derived from human genome
WLKVFYCLRIANFNHPLFFLMKRKI

SEQ ID NO: 17567 - protein, 25 aa, Artificial Sequence
  Quasi-synthetic sequence derived from human genome
RASFKRARRPGARALRLVLGIVLLF

SEQ ID NO: 17568 - protein, 25 aa, Artificial Sequence
  Quasi-synthetic sequence derived from human genome
KLKEVRLFLKNYSKTRFGYRIKWRI

SEQ ID NO: 17569 - protein, 25 aa, Artificial Sequence
  Quasi-synthetic sequence derived from human genome
LPRRYKFMSRIDKQISRFRRWLPKK

SEQ ID NO: 17570 - protein, 25 aa, Artificial Sequence
  Quasi-synthetic sequence derived from human genome
LFRAARLIKLLRQGYTIRILLWTFV

SEQ ID NO: 17571 - protein, 25 aa, Artificial Sequence
  Quasi-synthetic sequence derived from human genome
LRHPRTGCKFKFFFRRNPYFRNKLI

SEQ ID NO: 17572 - protein, 25 aa, Artificial Sequence
  Quasi-synthetic sequence derived from human genome
QLKKIIKRKHTLPNYKIRFKPFFPY

SEQ ID NO: 17573 - protein, 25 aa, Artificial Sequence
  Quasi-synthetic sequence derived from human genome
MKLLKLRRNIVKLSLYRHFTNTLIL

SEQ ID NO: 17574 - protein, 25 aa, Artificial Sequence
  Quasi-synthetic sequence derived from human genome
RRHQRKLLAAINAFRQVRLKHRKLR

SEQ ID NO: 17575 - protein, 25 aa, Artificial Sequence
  Quasi-synthetic sequence derived from human genome
RFIRVFIKTIRRDIFGGLVLLKVKA

SEQ ID NO: 17576 - protein, 25 aa, Artificial Sequence
  Quasi-synthetic sequence derived from human genome
LRKALILMNSKHTHLILCVLRFMRR

SEQ ID NO: 17577 - protein, 25 aa, Artificial Sequence
  Quasi-synthetic sequence derived from human genome
RQRGLRARVRPLFCALLLSLGRFVR

SEQ ID NO: 17578 - protein, 25 aa, Artificial Sequence
  Quasi-synthetic sequence derived from human genome
LGFCGLTALYFLIRAFRLKKPQRRR

SEQ ID NO: 17579 - protein, 25 aa, Artificial Sequence
  Quasi-synthetic sequence derived from human genome
LISKLKKWIKILEAKTKQLPKFFLI

SEQ ID NO: 17580 - protein, 25 aa, Artificial Sequence
  Quasi-synthetic sequence derived from human genome
RCVMTSRPRGVKRRWRLSRIVFRHL

SEQ ID NO: 17581 - protein, 25 aa, Artificial Sequence
  Quasi-synthetic sequence derived from human genome
LHMLLARNKIRTLKNNMFSKFKKLK

SEQ ID NO: 17582 - protein, 25 aa, Artificial Sequence
  Quasi-synthetic sequence derived from human genome
LLTFILLLTLTILTIWLFKHRRVRF

SEQ ID NO: 17583 - protein, 25 aa, Artificial Sequence
  Quasi-synthetic sequence derived from human genome
NIRAFMGVKNWPWMKLYFKIKPLLK

SEQ ID NO: 17584 - protein, 25 aa, Artificial Sequence
  Quasi-synthetic sequence derived from human genome
MRARRGLLRLPRRSLLAALFFFSLS

SEQ ID NO: 17585 - protein, 25 aa, Artificial Sequence
  Quasi-synthetic sequence derived from human genome
YKSIKKELVVLRLASLLFKRFLSLR

SEQ ID NO: 17586 - protein, 25 aa, Artificial Sequence
  Quasi-synthetic sequence derived from human genome
LKLTCSAFRLQRALRFLLGRLPWRV

SEQ ID NO: 17587 - protein, 25 aa, Artificial Sequence
  Quasi-synthetic sequence derived from human genome
RIVQVLRLLRALRMLKLGRHSTGLR

SEQ ID NO: 17588 - protein, 25 aa, Artificial Sequence
  Quasi-synthetic sequence derived from human genome
IILFIILLGVIMAKRKRKHGSLWLP

SEQ ID NO: 17589 - protein, 25 aa, Artificial Sequence
  Quasi-synthetic sequence derived from human genome
ILFRATRKPLSGRTPRLVYKWFLLI

SEQ ID NO: 17590 - protein, 25 aa, Artificial Sequence
  Quasi-synthetic sequence derived from human genome
WRGFHWRQKFLRVKRSAICIQSWWR

SEQ ID NO: 17591 - protein, 25 aa, Artificial Sequence
  Quasi-synthetic sequence derived from human genome
RKPPPRKHTRSWAVLKLLLLLLLFG

SEQ ID NO: 17592 - protein, 25 aa, Artificial Sequence
  Quasi-synthetic sequence derived from human genome
LLLLGKTYLKLHNKKLAAFWLMKAK

SEQ ID NO: 17593 - protein, 25 aa, Artificial Sequence
  Quasi-synthetic sequence derived from human genome
RLCIRKFFPKRKCFVFDWPAPKKYL

SEQ ID NO: 17594 - protein, 25 aa, Artificial Sequence
  Quasi-synthetic sequence derived from human genome
FIKFFGEQILILWKFALLRKRILIF

SEQ ID NO: 17595 - protein, 25 aa, Artificial Sequence
  Quasi-synthetic sequence derived from human genome
WMRIFIQAKRVKTKHLCYCLYRPRK

SEQ ID NO: 17596 - protein, 25 aa, Artificial Sequence
  Quasi-synthetic sequence derived from human genome
TYFVSPTLFRVIRLARIGRILRLVK

SEQ ID NO: 17597 - protein, 25 aa, Artificial Sequence
  Quasi-synthetic sequence derived from human genome
RRLFVRRGQPFTIILYFRAPVRAFL

SEQ ID NO: 17598 - protein, 25 aa, Artificial Sequence
  Quasi-synthetic sequence derived from human genome
LARIGRILRLVKGAKGIRTLLFALM

SEQ ID NO: 17599 - protein, 25 aa, Artificial Sequence
  Quasi-synthetic sequence derived from human genome
KALLRLVSAVNRRRMKLLLGIALLA

SEQ ID NO: 17600 - protein, 25 aa, Artificial Sequence
  Quasi-synthetic sequence derived from human genome
YKSRFLCGKEIKKKKCIFRLRIRVP

SEQ ID NO: 17601 - protein, 25 aa, Artificial Sequence
  Quasi-synthetic sequence derived from human genome
RLCGRFSRISMKLPRIPLRRQKLPK

SEQ ID NO: 17602 - protein, 25 aa, Artificial Sequence
  Quasi-synthetic sequence derived from human genome
RAYIRHLNRIVTIIQKWWRSFLGRK

SEQ ID NO: 17603 - protein, 25 aa, Artificial Sequence
  Quasi-synthetic sequence derived from human genome
LFVLLLVVRRRRREQRLKRLRDAKS

SEQ ID NO: 17604 - protein, 25 aa, Artificial Sequence
  Quasi-synthetic sequence derived from human genome
FIFLHLKRRVKSVILVMLLGPLLFL

SEQ ID NO: 17605 - protein, 25 aa, Artificial Sequence
  Quasi-synthetic sequence derived from human genome
LIFLHLKRRVKSVILVMLLGPLLFL

SEQ ID NO: 17606 - protein, 25 aa, Artificial Sequence
  Quasi-synthetic sequence derived from human genome
LLVPLVYTIKRHKWSVLKSRKLAYR

SEQ ID NO: 17607 - protein, 25 aa, Artificial Sequence
  Quasi-synthetic sequence derived from human genome
LRAWIIQCWWRQVLEKLLAKRRRMV

SEQ ID NO: 17608 - protein, 25 aa, Artificial Sequence
  Quasi-synthetic sequence derived from human genome
LGTFFIAFFLRKFRNSRFLGGKARR

SEQ ID NO: 17609 - protein, 25 aa, Artificial Sequence
  Quasi-synthetic sequence derived from human genome
LKRLFMSRTNRPPLSLSRMIRKMKL

SEQ ID NO: 17610 - protein, 25 aa, Artificial Sequence
  Quasi-synthetic sequence derived from human genome
QKKNRKMLVILILFVIIIVLIVVLV

SEQ ID NO: 17611 - protein, 25 aa, Artificial Sequence
  Quasi-synthetic sequence derived from human genome
VILSILINFILFINILRILMRKLRT

SEQ ID NO: 17612 - protein, 25 aa, Artificial Sequence
  Quasi-synthetic sequence derived from human genome
IILLLLVLLILCFIKRSKGGKYSVK

SEQ ID NO: 17613 - protein, 25 aa, Artificial Sequence
  Quasi-synthetic sequence derived from human genome
TMFFSLRLLINESLIKKLRLFFRKF

SEQ ID NO: 17614 - protein, 25 aa, Artificial Sequence
  Quasi-synthetic sequence derived from human genome
LKIHGLSSLWRLFRGKKWNVLRQRV

SEQ ID NO: 17615 - protein, 25 aa, Artificial Sequence
  Quasi-synthetic sequence derived from human genome
FKCLYYLIWKNYKKYIIIAFILIIL

SEQ ID NO: 17616 - protein, 25 aa, Artificial Sequence
  Quasi-synthetic sequence derived from human genome
LVLVIVGIGVLILLVRYRKCIKLKQ

SEQ ID NO: 17617 - protein, 25 aa, Artificial Sequence
  Quasi-synthetic sequence derived from human genome
LFLYNDLLKKRAAFTKLRRAAILRR

SEQ ID NO: 17618 - protein, 25 aa, Artificial Sequence
  Quasi-synthetic sequence derived from human genome
PMKPIIRQIRRPKNVVLRLAVKFFP

SEQ ID NO: 17619 - protein, 25 aa, Artificial Sequence
  Quasi-synthetic sequence derived from human genome
VRAVLRLRRRVCVLRKRRLLQPGGG

SEQ ID NO: 17620 - protein, 25 aa, Artificial Sequence
  Quasi-synthetic sequence derived from human genome
LSLVWKRRILFFVVTLVSVFLVWKF

SEQ ID NO: 17621 - protein, 25 aa, Artificial Sequence
  Quasi-synthetic sequence derived from human genome
LIFLHLKRRVKSVVLVILLGPLLFL

SEQ ID NO: 17622 - protein, 25 aa, Artificial Sequence
  Quasi-synthetic sequence derived from human genome
RLLHKQRLLFSCLLWLTFMYFFWKL

SEQ ID NO: 17623 - protein, 25 aa, Artificial Sequence
  Quasi-synthetic sequence derived from human genome
KPARSKLSLIRKFRLFPRPQVKLFG

SEQ ID NO: 17624 - protein, 25 aa, Artificial Sequence
  Quasi-synthetic sequence derived from human genome
RKGLTRRERRELRRRTILLLYYLLR

SEQ ID NO: 17625 - protein, 25 aa, Artificial Sequence
  Quasi-synthetic sequence derived from human genome
FFLIVFLLLLAILLFFAVKYLLRWK

SEQ ID NO: 17626 - protein, 25 aa, Artificial Sequence
  Quasi-synthetic sequence derived from human genome
MRKNMRVLSRTSKFRRRKQLLRRRK

SEQ ID NO: 17627 - protein, 25 aa, Artificial Sequence
  Quasi-synthetic sequence derived from human genome
YWRRLLVLCWYLPGWRAGRVTWLRL

SEQ ID NO: 17628 - protein, 25 aa, Artificial Sequence
  Quasi-synthetic sequence derived from human genome
KLLKKIGISWNKKYRKQHGPLRKFL

SEQ ID NO: 17629 - protein, 25 aa, Artificial Sequence
  Quasi-synthetic sequence derived from human genome
VLAMFFLLVLILSSVFLFRLFKRRQ

SEQ ID NO: 17630 - protein, 25 aa, Artificial Sequence
  Quasi-synthetic sequence derived from human genome
SVLAMFFLLVLILSSVFLFRLFKRR

SEQ ID NO: 17631 - protein, 25 aa, Artificial Sequence
  Quasi-synthetic sequence derived from human genome
FFIYMISFIFRKRRKNSGLWSFYFF

SEQ ID NO: 17632 - protein, 25 aa, Artificial Sequence
  Quasi-synthetic sequence derived from human genome
AWAALLGLLAALLLLLLLSRRRTRR

SEQ ID NO: 17633 - protein, 25 aa, Artificial Sequence
  Quasi-synthetic sequence derived from human genome
RKKLVRALFIVPRQRLDLLPFYARL

SEQ ID NO: 17634 - protein, 25 aa, Artificial Sequence
  Quasi-synthetic sequence derived from human genome
VCAIAKVRFLKLKKERKSLWTILLL

SEQ ID NO: 17635 - protein, 25 aa, Artificial Sequence
  Quasi-synthetic sequence derived from human genome
RRPKRREIPLKVLVKAVLFACMLMR

SEQ ID NO: 17636 - protein, 25 aa, Artificial Sequence
  Quasi-synthetic sequence derived from human genome
IAIFQRQKRRKFWKAKNLQHIPLKK

SEQ ID NO: 17637 - protein, 25 aa, Artificial Sequence
  Quasi-synthetic sequence derived from human genome
KLVKKTRFLRRKVQEGRLRRKQIKF

SEQ ID NO: 17638 - protein, 25 aa, Artificial Sequence
  Quasi-synthetic sequence derived from human genome
RRLRKNLKSFIIVHPSWFIRTILAV

SEQ ID NO: 17639 - protein, 25 aa, Artificial Sequence
  Quasi-synthetic sequence derived from human genome
RRLRKNLKSLIIVHPSWFIRTVLAI

SEQ ID NO: 17640 - protein, 25 aa, Artificial Sequence
  Quasi-synthetic sequence derived from human genome
LLPFLLRHHKVWRKCKMRIFTVAQM

SEQ ID NO: 17641 - protein, 25 aa, Artificial Sequence
  Quasi-synthetic sequence derived from human genome
RLKKHRWYKKILKSRDPIIFSVGWR

SEQ ID NO: 17642 - protein, 25 aa, Artificial Sequence
  Quasi-synthetic sequence derived from human genome
IIIIISYFFILLSVLKIRSFSGRKK

SEQ ID NO: 17643 - protein, 25 aa, Artificial Sequence
  Quasi-synthetic sequence derived from human genome
WRRFKWVIIGLLFLLILLLFVAVLL

SEQ ID NO: 17644 - protein, 25 aa, Artificial Sequence
  Quasi-synthetic sequence derived from human genome
RAWLARRRFQSIRRFVLNIQLTYRV

SEQ ID NO: 17645 - protein, 25 aa, Artificial Sequence
  Quasi-synthetic sequence derived from human genome
LRRVLVLMNSKHTFLALCALRFMRR

SEQ ID NO: 17646 - protein, 25 aa, Artificial Sequence
  Quasi-synthetic sequence derived from human genome
LFLVNQLFKIYFKINKLHLCKPLIR

SEQ ID NO: 17647 - protein, 25 aa, Artificial Sequence
  Quasi-synthetic sequence derived from human genome
IFVNWKELIMCNIKLLKALRVRKKM

SEQ ID NO: 17648 - protein, 25 aa, Artificial Sequence
  Quasi-synthetic sequence derived from human genome
LLVVAVFCILWNWNKRKKRQVPYLR

SEQ ID NO: 17649 - protein, 25 aa, Artificial Sequence
  Quasi-synthetic sequence derived from human genome
RRLTILLLLAFYVCFLPFHILRVIR

SEQ ID NO: 17650 - protein, 25 aa, Artificial Sequence
  Quasi-synthetic sequence derived from human genome
MILCYIWLLVLLLHKHRSILLRRLC

SEQ ID NO: 17651 - protein, 25 aa, Artificial Sequence
  Quasi-synthetic sequence derived from human genome
LKVLKKYPRLWCMTKPPSRRPKLYI

SEQ ID NO: 17652 - protein, 25 aa, Artificial Sequence
  Quasi-synthetic sequence derived from human genome
MALRRPPRLRLCARLPDFFLLLLFR

SEQ ID NO: 17653 - protein, 25 aa, Artificial Sequence
  Quasi-synthetic sequence derived from human genome
LSIFYLLKIANFSNLLFLHLKRRVR

SEQ ID NO: 17654 - protein, 25 aa, Artificial Sequence
  Quasi-synthetic sequence derived from human genome
RKRFLGPLHPSFNLVKIIRSFLLKV

SEQ ID NO: 17655 - protein, 25 aa, Artificial Sequence
  Quasi-synthetic sequence derived from human genome
RALKLLPCSYKLWYRYLKARRAQVK

SEQ ID NO: 17656 - protein, 25 aa, Artificial Sequence
  Quasi-synthetic sequence derived from human genome
IYRTMPQKRLKRTLIRKVFNLYLSK

SEQ ID NO: 17657 - protein, 25 aa, Artificial Sequence
  Quasi-synthetic sequence derived from human genome
RFSRISMKLPRIPLRRQKLPKVVVA

SEQ ID NO: 17658 - protein, 25 aa, Artificial Sequence
  Quasi-synthetic sequence derived from human genome
RRRIRLWHRGAMVIQATWRGYRVRR

SEQ ID NO: 17659 - protein, 25 aa, Artificial Sequence
  Quasi-synthetic sequence derived from human genome
KLLPLRALPLLFNLIKVVPRVFGRM

SEQ ID NO: 17660 - protein, 25 aa, Artificial Sequence
  Quasi-synthetic sequence derived from human genome
KIVKSIVEKKPRTFIIKLIKWLMIA

SEQ ID NO: 17661 - protein, 25 aa, Artificial Sequence
  Quasi-synthetic sequence derived from human genome
PKKTLGIKLPFLVMIIKNLKKYFTF

SEQ ID NO: 17662 - protein, 25 aa, Artificial Sequence
  Quasi-synthetic sequence derived from human genome
LVRGLPTLASVLRRKVKNKRVRVVW

SEQ ID NO: 17663 - protein, 25 aa, Artificial Sequence
  Quasi-synthetic sequence derived from human genome
RRLCLRLRLADCLVPYSRALYRRRR

SEQ ID NO: 17664 - protein, 25 aa, Artificial Sequence
  Quasi-synthetic sequence derived from human genome
FYAVKLARHLFKIQKNLPKSRKVLL

SEQ ID NO: 17665 - protein, 25 aa, Artificial Sequence
  Quasi-synthetic sequence derived from human genome
PFRLIRKMFSFKVSRWMGLACFRSL

SEQ ID NO: 17666 - protein, 25 aa, Artificial Sequence
  Quasi-synthetic sequence derived from human genome
KWRHHRRLLTPAFHFNILKPYIKIF

SEQ ID NO: 17667 - protein, 25 aa, Artificial Sequence
  Quasi-synthetic sequence derived from human genome
LLLLVLVLLVALRARFWKQSRGKGL

SEQ ID NO: 17668 - protein, 25 aa, Artificial Sequence
  Quasi-synthetic sequence derived from human genome
RFRRRCWRRRLAPNKDKGIAPIFLL

SEQ ID NO: 17669 - protein, 25 aa, Artificial Sequence
  Quasi-synthetic sequence derived from human genome
FLLKLQKWTQKKEKGKKLSRMKLLL

SEQ ID NO: 17670 - protein, 25 aa, Artificial Sequence
  Quasi-synthetic sequence derived from human genome
FSFFFIIFIVFISRKCCPPTLRRIR

SEQ ID NO: 17671 - protein, 25 aa, Artificial Sequence
  Quasi-synthetic sequence derived from human genome
KLLKHKQIHTRNKAFRALLLKKRRT

SEQ ID NO: 17672 - protein, 25 aa, Artificial Sequence
  Quasi-synthetic sequence derived from human genome
FPVKKCSAFQFFKKRVRRWIKSPMV

SEQ ID NO: 17673 - protein, 25 aa, Artificial Sequence
  Quasi-synthetic sequence derived from human genome
LVLLVTLITTLVIGLVLCKRKRRTK

SEQ ID NO: 17674 - protein, 25 aa, Artificial Sequence
  Quasi-synthetic sequence derived from human genome
RKILRLITIRKLFTAIGVLFPSVIL

SEQ ID NO: 17675 - protein, 25 aa, Artificial Sequence
  Quasi-synthetic sequence derived from human genome
FLLRPRSHKSRVKGFLRLKMAYMPK

SEQ ID NO: 17676 - protein, 25 aa, Artificial Sequence
  Quasi-synthetic sequence derived from human genome
IRMLKQLKHPNLVNLLEVFRRKRRL

SEQ ID NO: 17677 - protein, 25 aa, Artificial Sequence
  Quasi-synthetic sequence derived from human genome
SCIFLVFVIVLLALRLWRWHKSRLL

SEQ ID NO: 17678 - protein, 25 aa, Artificial Sequence
  Quasi-synthetic sequence derived from human genome
MSPWGMLRIPRPLIMIRAFRIYFRF

SEQ ID NO: 17679 - protein, 25 aa, Artificial Sequence
  Quasi-synthetic sequence derived from human genome
KLKRKYWWKNCKMMIMLGAICAIIV

SEQ ID NO: 17680 - protein, 25 aa, Artificial Sequence
  Quasi-synthetic sequence derived from human genome
RGTRLRLRQRRRRLLIKKMPAAATI

SEQ ID NO: 17681 - protein, 25 aa, Artificial Sequence
  Quasi-synthetic sequence derived from human genome
KWKIMMGKKQGLRRRRRRARHSVRW

SEQ ID NO: 17682 - protein, 25 aa, Artificial Sequence
  Quasi-synthetic sequence derived from human genome
FLKKVRRLIMKRIVKISKCNLSDIV

SEQ ID NO: 17683 - protein, 25 aa, Artificial Sequence
  Quasi-synthetic sequence derived from human genome
LNKKWRGMKWKKWSIHIVIPKGTFK

SEQ ID NO: 17684 - protein, 25 aa, Artificial Sequence
  Quasi-synthetic sequence derived from human genome
WLGKWLRKRRIVSGNPRCQKPFFLK

SEQ ID NO: 17685 - protein, 25 aa, Artificial Sequence
  Quasi-synthetic sequence derived from human genome
MRFRIYKRKVLILTLVVAACGFVLW

SEQ ID NO: 17686 - protein, 25 aa, Artificial Sequence
  Quasi-synthetic sequence derived from human genome
WLFLRYKSIVGRRFCFIIGTLYLYR

SEQ ID NO: 17687 - protein, 25 aa, Artificial Sequence
  Quasi-synthetic sequence derived from human genome
APKQKVKYLTFRFIFALRLSKKQKK

SEQ ID NO: 17688 - protein, 25 aa, Artificial Sequence
  Quasi-synthetic sequence derived from human genome
HRKRMGLKMLMMMALLVPLVYTIKR

SEQ ID NO: 17689 - protein, 25 aa, Artificial Sequence
  Quasi-synthetic sequence derived from human genome
GRALRGLSYRSLRRRVRRLRRLTAR

SEQ ID NO: 17690 - protein, 25 aa, Artificial Sequence
  Quasi-synthetic sequence derived from human genome
INLLRLLNKLTKWKHSRTMMLVVFK

SEQ ID NO: 17691 - protein, 25 aa, Artificial Sequence
  Quasi-synthetic sequence derived from human genome
RFLRIMMLSVLKNTKTPVKFWFLKN

SEQ ID NO: 17692 - protein, 25 aa, Artificial Sequence
  Quasi-synthetic sequence derived from human genome
LCLLPLVAFLLFCLHVLFKKRTKSK

SEQ ID NO: 17693 - protein, 25 aa, Artificial Sequence
  Quasi-synthetic sequence derived from human genome
VVRRRSFSISPVRLRRSRTPLRRRF

SEQ ID NO: 17694 - protein, 25 aa, Artificial Sequence
  Quasi-synthetic sequence derived from human genome
MLNPLIYSLRKKDVKRAIRKVMLKR

SEQ ID NO: 17695 - protein, 25 aa, Artificial Sequence
  Quasi-synthetic sequence derived from human genome
RGLRLRLPRRESLLRGLCRPLRPLL

SEQ ID NO: 17696 - protein, 25 aa, Artificial Sequence
  Quasi-synthetic sequence derived from human genome
RVLLVKIRSGRRSVRMYNKIFAIPL

SEQ ID NO: 17697 - protein, 25 aa, Artificial Sequence
  Quasi-synthetic sequence derived from human genome
FWLLWTVLILFSCCCAFRHRRAKLR

SEQ ID NO: 17698 - protein, 25 aa, Artificial Sequence
  Quasi-synthetic sequence derived from human genome
FVKIKASHNLKKKILRFRSGSLKLM

SEQ ID NO: 17699 - protein, 25 aa, Artificial Sequence
  Quasi-synthetic sequence derived from human genome
IKARMSLKDWFAKRKKFKRPPQRLF

SEQ ID NO: 17700 - protein, 25 aa, Artificial Sequence
  Quasi-synthetic sequence derived from human genome
FFRLFRVMRLIKLLSRAEGVRTLLW

SEQ ID NO: 17701 - protein, 25 aa, Artificial Sequence
  Quasi-synthetic sequence derived from human genome
RKGIVRVVFFPFFFRWWLQVTSKVI

SEQ ID NO: 17702 - protein, 25 aa, Artificial Sequence
  Quasi-synthetic sequence derived from human genome
LASLILCTRSIVLALRLRKRFLNFF

SEQ ID NO: 17703 - protein, 25 aa, Artificial Sequence
  Quasi-synthetic sequence derived from human genome
LWWVFLVLGFLLFLRGFINYAKVRK

SEQ ID NO: 17704 - protein, 25 aa, Artificial Sequence
  Quasi-synthetic sequence derived from human genome
GRKAPLWLRAKFQRLLFKLGCYIQK

SEQ ID NO: 17705 - protein, 25 aa, Artificial Sequence
  Quasi-synthetic sequence derived from human genome
FFFIIGLWWCTKSILKYICKKQKRT

SEQ ID NO: 17706 - protein, 25 aa, Artificial Sequence
  Quasi-synthetic sequence derived from human genome
KVIVVRNRRLGVLYRAVQLLILLYF

SEQ ID NO: 17707 - protein, 25 aa, Artificial Sequence
  Quasi-synthetic sequence derived from human genome
VVFVAGIFLLVVVFVLCRKMISRKK

SEQ ID NO: 17708 - protein, 25 aa, Artificial Sequence
  Quasi-synthetic sequence derived from human genome
RKKYEPKLKQFTKILRRKRLLPKRC

SEQ ID NO: 17709 - protein, 25 aa, Artificial Sequence
  Quasi-synthetic sequence derived from human genome
FVRKARHRRPLSSFVRKARHRRTLF

SEQ ID NO: 17710 - protein, 25 aa, Artificial Sequence
  Quasi-synthetic sequence derived from human genome
SFLWFTNPCKTMKFIVWRRFKWVII

SEQ ID NO: 17711 - protein, 25 aa, Artificial Sequence
  Quasi-synthetic sequence derived from human genome
FAYFIRRRINKIQLIKGPNRILLTL

SEQ ID NO: 17712 - protein, 25 aa, Artificial Sequence
  Quasi-synthetic sequence derived from human genome
AIARVRLLKLKHERKALLALLLILM

SEQ ID NO: 17713 - protein, 25 aa, Artificial Sequence
  Quasi-synthetic sequence derived from human genome
AYLKLRHWQWWRLFTKVKPLLQVTR

SEQ ID NO: 17714 - protein, 25 aa, Artificial Sequence
  Quasi-synthetic sequence derived from human genome
LRLRVHGPFFPRILRRRKGKREFGK

SEQ ID NO: 17715 - protein, 25 aa, Artificial Sequence
  Quasi-synthetic sequence derived from human genome
WKSGIIKLFGVLRQRTGSLKILRLK

SEQ ID NO: 17716 - protein, 25 aa, Artificial Sequence
  Quasi-synthetic sequence derived from human genome
MIMMKKKKKKKKHSPKNLLLNFVTI

SEQ ID NO: 17717 - protein, 25 aa, Artificial Sequence
  Quasi-synthetic sequence derived from human genome
KQVRWKFIKRWKTRYFTLAGNQLLF

SEQ ID NO: 17718 - protein, 25 aa, Artificial Sequence
  Quasi-synthetic sequence derived from human genome
IAKVKMKFRFLGKLMAKAIMDFRLV

SEQ ID NO: 17719 - protein, 25 aa, Artificial Sequence
  Quasi-synthetic sequence derived from human genome
LFMVSGICIVFGFIILLLLVLRKRR

SEQ ID NO: 17720 - protein, 25 aa, Artificial Sequence
  Quasi-synthetic sequence derived from human genome
VRKKLEQHIRRRLIQRRWGLPRRIH

SEQ ID NO: 17721 - protein, 25 aa, Artificial Sequence
  Quasi-synthetic sequence derived from human genome
LLLVHGRWSYIRMCKFLRYFFYKNF

SEQ ID NO: 17722 - protein, 25 aa, Artificial Sequence
  Quasi-synthetic sequence derived from human genome
IKIQAMWRRYRAKKYLCKVKAACKI

SEQ ID NO: 17723 - protein, 25 aa, Artificial Sequence
  Quasi-synthetic sequence derived from human genome
LGRKELRSLLNWRTKLRRYVAKKLK

SEQ ID NO: 17724 - protein, 25 aa, Artificial Sequence
  Quasi-synthetic sequence derived from human genome
LRIQNWLSAKVRKQLRLKPFYLVPK

SEQ ID NO: 17725 - protein, 25 aa, Artificial Sequence
  Quasi-synthetic sequence derived from human genome
MLLPFLLRQHKVWRKCRMRIFTVAQ

SEQ ID NO: 17726 - protein, 25 aa, Artificial Sequence
  Quasi-synthetic sequence derived from human genome
LRALYSMYLRKTKSLNKLLYHLFRL

SEQ ID NO: 17727 - protein, 25 aa, Artificial Sequence
  Quasi-synthetic sequence derived from human genome
KCKDCVHLLKIKNTFCLWKRLIKLK

SEQ ID NO: 17728 - protein, 25 aa, Artificial Sequence
  Quasi-synthetic sequence derived from human genome
FLKPIAKLFSVIKNKLSRKLLCTVF

SEQ ID NO: 17729 - protein, 25 aa, Artificial Sequence
  Quasi-synthetic sequence derived from human genome
LTLLLIAFIFLIIKSYRKYRRERLP

SEQ ID NO: 17730 - protein, 25 aa, Artificial Sequence
  Quasi-synthetic sequence derived from human genome
WYWRRRPKRLSAVVCALLWVLSLLV

SEQ ID NO: 17731 - protein, 25 aa, Artificial Sequence
  Quasi-synthetic sequence derived from human genome
RDLTRFVKWPRYIRLQRQRAILYKR

SEQ ID NO: 17732 - protein, 25 aa, Artificial Sequence
  Quasi-synthetic sequence derived from human genome
KLKVLKILLYLCSHGSSFFLLILKR

SEQ ID NO: 17733 - protein, 25 aa, Artificial Sequence
  Quasi-synthetic sequence derived from human genome
RRTMNIVPRTKVKTIKMFLILNLLF

SEQ ID NO: 17734 - protein, 25 aa, Artificial Sequence
  Quasi-synthetic sequence derived from human genome
PLQLLLAKVMRFERFGRRRVIIKKG

SEQ ID NO: 17735 - protein, 25 aa, Artificial Sequence
  Quasi-synthetic sequence derived from human genome
INLLRILNKLTKWKHSRTMMLVVFK

SEQ ID NO: 17736 - protein, 25 aa, Artificial Sequence
  Quasi-synthetic sequence derived from human genome
FIKILLKRGGVKVSTKNLIKLFQII

SEQ ID NO: 17737 - protein, 25 aa, Artificial Sequence
  Quasi-synthetic sequence derived from human genome
MLKKRKWPLKGWHKRFFVLDNGMLK

SEQ ID NO: 17738 - protein, 25 aa, Artificial Sequence
  Quasi-synthetic sequence derived from human genome
FVILPVFLTFFPPSKKHHKKKKRAK

SEQ ID NO: 17739 - protein, 25 aa, Artificial Sequence
  Quasi-synthetic sequence derived from human genome
KPFFRLQKFLRRTQFLLFFLTAAYL

SEQ ID NO: 17740 - protein, 25 aa, Artificial Sequence
  Quasi-synthetic sequence derived from human genome
LKTYLRRFREMKPRVLQRWSRQILR

SEQ ID NO: 17741 - protein, 25 aa, Artificial Sequence
  Quasi-synthetic sequence derived from human genome
VYRYCCKINKKLKSITMLRKKIVHF

SEQ ID NO: 17742 - protein, 25 aa, Artificial Sequence
  Quasi-synthetic sequence derived from human genome
RARRRRTFCLLVVIVVVFAVCWLPL

SEQ ID NO: 17743 - protein, 25 aa, Artificial Sequence
  Quasi-synthetic sequence derived from human genome
RRGFSGRLGGYWKTWIFWKTWIFWK

SEQ ID NO: 17744 - protein, 25 aa, Artificial Sequence
  Quasi-synthetic sequence derived from human genome
LRRAKFKFPGRQKIHISKKWGFTKF

SEQ ID NO: 17745 - protein, 25 aa, Artificial Sequence
  Quasi-synthetic sequence derived from human genome
WLLLKYKSIISRRFFCIVGTLYLYR

SEQ ID NO: 17746 - protein, 25 aa, Artificial Sequence
  Quasi-synthetic sequence derived from human genome
WPRLIRKLRCYLKEMKTLGKLVFSR

SEQ ID NO: 17747 - protein, 25 aa, Artificial Sequence
  Quasi-synthetic sequence derived from human genome
FVVLVLCLSFMLLFSLWRQSCRRRK

SEQ ID NO: 17748 - protein, 25 aa, Artificial Sequence
  Quasi-synthetic sequence derived from human genome
RIRKFFRGSGRVLAFIFVASVIWLL

SEQ ID NO: 17749 - protein, 25 aa, Artificial Sequence
  Quasi-synthetic sequence derived from human genome
QRRPWGAWLSARLWKWLKSPRSWRL

SEQ ID NO: 17750 - protein, 25 aa, Artificial Sequence
  Quasi-synthetic sequence derived from human genome
KTKKGRSIPVWIKILLFVVVAVFLF

SEQ ID NO: 17751 - protein, 25 aa, Artificial Sequence
  Quasi-synthetic sequence derived from human genome
RARVLVTRRRVRALIAVLWAVALLS

SEQ ID NO: 17752 - protein, 25 aa, Artificial Sequence
  Quasi-synthetic sequence derived from human genome
LSIFYLLKIANFSNLIFLHLKRRVK

SEQ ID NO: 17753 - protein, 25 aa, Artificial Sequence
  Quasi-synthetic sequence derived from human genome
PLILLVLLLLSVVFLATYYKRKRTK

SEQ ID NO: 17754 - protein, 25 aa, Artificial Sequence
  Quasi-synthetic sequence derived from human genome
RGRRLGLALGLLLALVLAPRVLRAK

SEQ ID NO: 17755 - protein, 25 aa, Artificial Sequence
  Quasi-synthetic sequence derived from human genome
LFRKYIAYRLIQHARNNIMKRLKAI

SEQ ID NO: 17756 - protein, 25 aa, Artificial Sequence
  Quasi-synthetic sequence derived from human genome
IRAFVKCTKARYLKKKNMRTLWINR

SEQ ID NO: 17757 - protein, 25 aa, Artificial Sequence
  Quasi-synthetic sequence derived from human genome
VAKKGSLSVLRSFRLLRVFKLAKSW

SEQ ID NO: 17758 - protein, 25 aa, Artificial Sequence
  Quasi-synthetic sequence derived from human genome
KFMVLLWKNFILKRRRCIALVVEMV

SEQ ID NO: 17759 - protein, 25 aa, Artificial Sequence
  Quasi-synthetic sequence derived from human genome
KVPRKKVNVKVFIIIAVFFICFVPF

SEQ ID NO: 17760 - protein, 25 aa, Artificial Sequence
  Quasi-synthetic sequence derived from human genome
RRPPRVMRLLGWWQVLLWVLGLPVR

SEQ ID NO: 17761 - protein, 25 aa, Artificial Sequence
  Quasi-synthetic sequence derived from human genome
QKKRLLSWKQQVLKLLRTFPRKAAL

SEQ ID NO: 17762 - protein, 25 aa, Artificial Sequence
  Quasi-synthetic sequence derived from human genome
ILIVIFMITKFVQDRHRARRNRLRK

SEQ ID NO: 17763 - protein, 25 aa, Artificial Sequence
  Quasi-synthetic sequence derived from human genome
RRFILKTCGTTLLLKALVPLLKLAR

SEQ ID NO: 17764 - protein, 25 aa, Artificial Sequence
  Quasi-synthetic sequence derived from human genome
RWNLHKRIALRTLLWVGAKPARLML

SEQ ID NO: 17765 - protein, 25 aa, Artificial Sequence
  Quasi-synthetic sequence derived from human genome
RQRVLQAAAKNIRVWFIKVRKMKAI

SEQ ID NO: 17766 - protein, 25 aa, Artificial Sequence
  Quasi-synthetic sequence derived from human genome
VIQRCYRKYKQLTWIALKFALYKKM

SEQ ID NO: 17767 - protein, 25 aa, Artificial Sequence
  Quasi-synthetic sequence derived from human genome
RKFGNRIKVLRSRIRFIHLVTGCVL

SEQ ID NO: 17768 - protein, 25 aa, Artificial Sequence
  Quasi-synthetic sequence derived from human genome
LFPFLVMLVCYGFIFRVARVKARKV

SEQ ID NO: 17769 - protein, 25 aa, Artificial Sequence
  Quasi-synthetic sequence derived from human genome
WRFLRIVCKTARRDLFGLSVLIRVR

SEQ ID NO: 17770 - protein, 25 aa, Artificial Sequence
  Quasi-synthetic sequence derived from human genome
LLVRFLLKKALTNQRIGHFFFWHLK

SEQ ID NO: 17771 - protein, 25 aa, Artificial Sequence
  Quasi-synthetic sequence derived from human genome
KILLYKTHWMTPIFLKVVINTRRIK

SEQ ID NO: 17772 - protein, 25 aa, Artificial Sequence
  Quasi-synthetic sequence derived from human genome
FKLGLAKSIHHARVLIRQRHIRVRK

SEQ ID NO: 17773 - protein, 25 aa, Artificial Sequence
  Quasi-synthetic sequence derived from human genome
RFNRRRCRAAVKSVTFYWLVIVLVF

SEQ ID NO: 17774 - protein, 25 aa, Artificial Sequence
  Quasi-synthetic sequence derived from human genome
FLRRPGAPASWIWWRMLRQVLRRGL

SEQ ID NO: 17775 - protein, 25 aa, Artificial Sequence
  Quasi-synthetic sequence derived from human genome
RKASIQRKLRRACLVVSLCISWRRR

SEQ ID NO: 17776 - protein, 25 aa, Artificial Sequence
  Quasi-synthetic sequence derived from human genome
LFYRTYMLFKNASGKRRFLLCLLLF

SEQ ID NO: 17777 - protein, 25 aa, Artificial Sequence
  Quasi-synthetic sequence derived from human genome
KRMVSWSFHKLKTMKHLLLLLLCVF

SEQ ID NO: 17778 - protein, 25 aa, Artificial Sequence
  Quasi-synthetic sequence derived from human genome
RKIPKLVLRINAIYEVRRGKKRVKR

SEQ ID NO: 17779 - protein, 25 aa, Artificial Sequence
  Quasi-synthetic sequence derived from human genome
LRSLRFLQILRMLRMDRRGGTWKLL

SEQ ID NO: 17780 - protein, 25 aa, Artificial Sequence
  Quasi-synthetic sequence derived from human genome
ARLFFGPQHRPVILRLPNRRALRLR

SEQ ID NO: 17781 - protein, 25 aa, Artificial Sequence
  Quasi-synthetic sequence derived from human genome
VPKKLKKPAKPLLSKIKLRNHCKRL

SEQ ID NO: 17782 - protein, 25 aa, Artificial Sequence
  Quasi-synthetic sequence derived from human genome
LIRRKVGKVKKKLRKKGKKTLDALI

SEQ ID NO: 17783 - protein, 25 aa, Artificial Sequence
  Quasi-synthetic sequence derived from human genome
CRRRVRPSIRLLSPVLSLILLLIAL

SEQ ID NO: 17784 - protein, 25 aa, Artificial Sequence
  Quasi-synthetic sequence derived from human genome
LKKIMAILIKRFHHTRRNWKGLIAQ

SEQ ID NO: 17785 - protein, 25 aa, Artificial Sequence
  Quasi-synthetic sequence derived from human genome
LKIMPKKKRLSAGRVPLILFLCQMI

SEQ ID NO: 17786 - protein, 25 aa, Artificial Sequence
  Quasi-synthetic sequence derived from human genome
LYTRTLYLRYRPKVKFLFGIWPVIL

SEQ ID NO: 17787 - protein, 25 aa, Artificial Sequence
  Quasi-synthetic sequence derived from human genome
FLTNKKGFPVLSKMHQRLIFRLLKL

SEQ ID NO: 17788 - protein, 25 aa, Artificial Sequence
  Quasi-synthetic sequence derived from human genome
KYFMKLVNLYKGAVLYLLRGRKTFL

SEQ ID NO: 17789 - protein, 25 aa, Artificial Sequence
  Quasi-synthetic sequence derived from human genome
CVFLAFVTVLLALKLRRWHKSRLLH

SEQ ID NO: 17790 - protein, 25 aa, Artificial Sequence
  Quasi-synthetic sequence derived from human genome
LSMIRFRYRILRSQHFRTKSKVCKL

SEQ ID NO: 17791 - protein, 25 aa, Artificial Sequence
  Quasi-synthetic sequence derived from human genome
IPLTIKAIFERFKNRKKRYKKKKKR

SEQ ID NO: 17792 - protein, 25 aa, Artificial Sequence
  Quasi-synthetic sequence derived from human genome
IMIRAFRIYFRFELPRTRITNILKR

SEQ ID NO: 17793 - protein, 25 aa, Artificial Sequence
  Quasi-synthetic sequence derived from human genome
KLLIFLALALFLATVLYIVKKRLFP

SEQ ID NO: 17794 - protein, 25 aa, Artificial Sequence
  Quasi-synthetic sequence derived from human genome
KKAVKYQSQARKKLIIIIVLVVVLL

SEQ ID NO: 17795 - protein, 25 aa, Artificial Sequence
  Quasi-synthetic sequence derived from human genome
KKVDTVKRLLIKKLPPVLAIQLKRF

SEQ ID NO: 17796 - protein, 25 aa, Artificial Sequence
  Quasi-synthetic sequence derived from human genome
SCVFLAFVIVLLAHRLRRWHKSRLL

SEQ ID NO: 17797 - protein, 25 aa, Artificial Sequence
  Quasi-synthetic sequence derived from human genome
RMMVPKVRLLYSLAFNARFLRHLWF

SEQ ID NO: 17798 - protein, 25 aa, Artificial Sequence
  Quasi-synthetic sequence derived from human genome
LGFKRFKYSKFSHMHLMAFRKISLK

SEQ ID NO: 17799 - protein, 25 aa, Artificial Sequence
  Quasi-synthetic sequence derived from human genome
IYSLLKRYLLKRLNLIWNIYSTIIR

SEQ ID NO: 17800 - protein, 25 aa, Artificial Sequence
  Quasi-synthetic sequence derived from human genome
RFCLLYDNVKVKKLRLRRGKKKRGR

SEQ ID NO: 17801 - protein, 25 aa, Artificial Sequence
  Quasi-synthetic sequence derived from human genome
WKHLSVRRFFWWARFIAINTFLFFL

SEQ ID NO: 17802 - protein, 25 aa, Artificial Sequence
  Quasi-synthetic sequence derived from human genome
LLLLRWRRPALHRPIKVNLLIPVAY

SEQ ID NO: 17803 - protein, 25 aa, Artificial Sequence
  Quasi-synthetic sequence derived from human genome
VAALRAWMIQCWWRTLVQRRIRQRR

SEQ ID NO: 17804 - protein, 25 aa, Artificial Sequence
  Quasi-synthetic sequence derived from human genome
KRYLQKATKGKLLIIIFIVTLWGKV

SEQ ID NO: 17805 - protein, 25 aa, Artificial Sequence
  Quasi-synthetic sequence derived from human genome
NIRAFNAVKNWSWMKLFFKMKPLLR

SEQ ID NO: 17806 - protein, 25 aa, Artificial Sequence
  Quasi-synthetic sequence derived from human genome
KIPSRFKRSYNYKTIVKKILAKLKR

SEQ ID NO: 17807 - protein, 25 aa, Artificial Sequence
  Quasi-synthetic sequence derived from human genome
IGFFVVLLFLWRSFRSVRSRLYVGR

SEQ ID NO: 17808 - protein, 25 aa, Artificial Sequence
  Quasi-synthetic sequence derived from human genome
LSAIRIKKPIKTKFRLPVFNWTALK

SEQ ID NO: 17809 - protein, 25 aa, Artificial Sequence
  Quasi-synthetic sequence derived from human genome
RLLLSCLLLPAARLARQYLLPLLRR

SEQ ID NO: 17810 - protein, 25 aa, Artificial Sequence
  Quasi-synthetic sequence derived from human genome
CWVILMGFSIWLYWRRKKRKGLSNY

SEQ ID NO: 17811 - protein, 25 aa, Artificial Sequence
  Quasi-synthetic sequence derived from human genome
WFKKLSQKRFKQLVERLLQFISLRL

SEQ ID NO: 17812 - protein, 25 aa, Artificial Sequence
  Quasi-synthetic sequence derived from human genome
KKFIRCSTRVTVGTIKKFLSLKLKL

SEQ ID NO: 17813 - protein, 25 aa, Artificial Sequence
  Quasi-synthetic sequence derived from human genome
KKAIKYQSKARRKKWIIIAVSVVLV

SEQ ID NO: 17814 - protein, 25 aa, Artificial Sequence
  Quasi-synthetic sequence derived from human genome
AKFRLILIESRIHRLARYYKTKRVL

SEQ ID NO: 17815 - protein, 25 aa, Artificial Sequence
  Quasi-synthetic sequence derived from human genome
LTKKRTKVQKKSLLLKKPLRVDLIL

SEQ ID NO: 17816 - protein, 25 aa, Artificial Sequence
  Quasi-synthetic sequence derived from human genome
TVIFIVTKCCLFCFWKFARKAKKGK

SEQ ID NO: 17817 - protein, 25 aa, Artificial Sequence
  Quasi-synthetic sequence derived from human genome
IITVIGLAVALVLYIRKKKRLEKLR

SEQ ID NO: 17818 - protein, 25 aa, Artificial Sequence
  Quasi-synthetic sequence derived from human genome
KKARKKKVLIAICVSITVVLLAVII

SEQ ID NO: 17819 - protein, 25 aa, Artificial Sequence
  Quasi-synthetic sequence derived from human genome
SLLMVFVALLVFYITKRKKQRSRRN

SEQ ID NO: 17820 - protein, 25 aa, Artificial Sequence
  Quasi-synthetic sequence derived from human genome
KFKKFDHRYLRKILIRKNLPKSSIV

SEQ ID NO: 17821 - protein, 25 aa, Artificial Sequence
  Quasi-synthetic sequence derived from human genome
NILEIFHLGFKKIKRGLWGKYKLKK

SEQ ID NO: 17822 - protein, 25 aa, Artificial Sequence
  Quasi-synthetic sequence derived from human genome
IFHPLLYAFTRQKFQKVLKSKMKKR

SEQ ID NO: 17823 - protein, 25 aa, Artificial Sequence
  Quasi-synthetic sequence derived from human genome
IFYFLYGKTRSRIPLVRNRRFQLCR

SEQ ID NO: 17824 - protein, 25 aa, Artificial Sequence
  Quasi-synthetic sequence derived from human genome
KKVSIMVSVDGVKVILKKKKKLLLL

SEQ ID NO: 17825 - protein, 25 aa, Artificial Sequence
  Quasi-synthetic sequence derived from human genome
RKYKKNIKALYIVHPTMFIKTLLIL

SEQ ID NO: 17826 - protein, 25 aa, Artificial Sequence
  Quasi-synthetic sequence derived from human genome
LRALLVVVNALLRKRRYHAALAVLK

SEQ ID NO: 17827 - protein, 25 aa, Artificial Sequence
  Quasi-synthetic sequence derived from human genome
FPHLLSPSKIKTFLSLVWKRRILFF

SEQ ID NO: 17828 - protein, 25 aa, Artificial Sequence
  Quasi-synthetic sequence derived from human genome
VRKKLEQHIRKRLIQRRWGLPRRIH

SEQ ID NO: 17829 - protein, 25 aa, Artificial Sequence
  Quasi-synthetic sequence derived from human genome
VSKIPLPRFKLKCIFCKKRRKRTAG

SEQ ID NO: 17830 - protein, 25 aa, Artificial Sequence
  Quasi-synthetic sequence derived from human genome
YRYKYKLMRQIRMCKDLKHLIYYRF

SEQ ID NO: 17831 - protein, 25 aa, Artificial Sequence
  Quasi-synthetic sequence derived from human genome
YKAAVTLQRAALKFLAKCRKKKKLF

SEQ ID NO: 17832 - protein, 25 aa, Artificial Sequence
  Quasi-synthetic sequence derived from human genome
LLKYYVLNALKHRPPKAQKKRYLFR

SEQ ID NO: 17833 - protein, 25 aa, Artificial Sequence
  Quasi-synthetic sequence derived from human genome
RLLLLCLGVVMVCVVLRYMKYRWTK

SEQ ID NO: 17834 - protein, 25 aa, Artificial Sequence
  Quasi-synthetic sequence derived from human genome
PVSTMLALFMLMALVLLQRKLWRRR

SEQ ID NO: 17835 - protein, 25 aa, Artificial Sequence
  Quasi-synthetic sequence derived from human genome
CIAMKQGVIKSLKIKYRHCLIKKFL

SEQ ID NO: 17836 - protein, 25 aa, Artificial Sequence
  Quasi-synthetic sequence derived from human genome
ILVPFIALIIAGFVLYLYKHRRRPK

SEQ ID NO: 17837 - protein, 25 aa, Artificial Sequence
  Quasi-synthetic sequence derived from human genome
RYKGWRGRLKFARKPLCMLDIFVLI

SEQ ID NO: 17838 - protein, 25 aa, Artificial Sequence
  Quasi-synthetic sequence derived from human genome
KKEIKPFKRFLRKKSKPKKCVKKFV

SEQ ID NO: 17839 - protein, 25 aa, Artificial Sequence
  Quasi-synthetic sequence derived from human genome
VIPSPKSLWYLIKWIWTHLCKKKMR

SEQ ID NO: 17840 - protein, 25 aa, Artificial Sequence
  Quasi-synthetic sequence derived from human genome
RRRQAGRRLRYLPTGSFPFLLLLLL

SEQ ID NO: 17841 - protein, 25 aa, Artificial Sequence
  Quasi-synthetic sequence derived from human genome
IGGLLLLLLIFIVLYKVGFFKRNLK

SEQ ID NO: 17842 - protein, 25 aa, Artificial Sequence
  Quasi-synthetic sequence derived from human genome
NMGKVVQILRLMRIFRILKLARHSV

SEQ ID NO: 17843 - protein, 25 aa, Artificial Sequence
  Quasi-synthetic sequence derived from human genome
LFALLSRGRRRRMHVLRRRWDLGSL

SEQ ID NO: 17844 - protein, 25 aa, Artificial Sequence
  Quasi-synthetic sequence derived from human genome
IYPIVLFIRVCEKNIKRFRKLLPRP

SEQ ID NO: 17845 - protein, 25 aa, Artificial Sequence
  Quasi-synthetic sequence derived from human genome
AFKVNVYFGAHLLKTVRLLRLLRLL

SEQ ID NO: 17846 - protein, 25 aa, Artificial Sequence
  Quasi-synthetic sequence derived from human genome
KKKKRYLRASSNRNFLLTMRPFLKR

SEQ ID NO: 17847 - protein, 25 aa, Artificial Sequence
  Quasi-synthetic sequence derived from human genome
RKINQVLLFLLIVTLCVILYKKVHK

SEQ ID NO: 17848 - protein, 25 aa, Artificial Sequence
  Quasi-synthetic sequence derived from human genome
FRQRIILRVWWSTWRQRLGQVRVSR

SEQ ID NO: 17849 - protein, 25 aa, Artificial Sequence
  Quasi-synthetic sequence derived from human genome
LRSLRFLQILRMIRMDRRGGTWKLL

SEQ ID NO: 17850 - protein, 25 aa, Artificial Sequence
  Quasi-synthetic sequence derived from human genome
WLLIFFILKSISCLKPARLPIYQRK

SEQ ID NO: 17851 - protein, 25 aa, Artificial Sequence
  Quasi-synthetic sequence derived from human genome
PRRRLRLGPRGLPLLLSGLLLPLCR

SEQ ID NO: 17852 - protein, 25 aa, Artificial Sequence
  Quasi-synthetic sequence derived from human genome
FGLKLRRTRRYNVLSKNCFVTRIRL

SEQ ID NO: 17853 - protein, 25 aa, Artificial Sequence
  Quasi-synthetic sequence derived from human genome
KVSSFTHHIFLWLRWRILRLFPWIL

SEQ ID NO: 17854 - protein, 25 aa, Artificial Sequence
  Quasi-synthetic sequence derived from human genome
LLLIPNVLFLIFLLWKLPSARAKIR

SEQ ID NO: 17855 - protein, 25 aa, Artificial Sequence
  Quasi-synthetic sequence derived from human genome
YLPFGVTVLVYARIYVVLKQRRRKR

SEQ ID NO: 17856 - protein, 25 aa, Artificial Sequence
  Quasi-synthetic sequence derived from human genome
VLLVILVTVLQRRRPAWLPVRLRSW

SEQ ID NO: 17857 - protein, 25 aa, Artificial Sequence
  Quasi-synthetic sequence derived from human genome
LWRLPPILIIHLKRFQFVNGRWIKS

SEQ ID NO: 17858 - protein, 25 aa, Artificial Sequence
  Quasi-synthetic sequence derived from human genome
RRVAMLRIVHRRVCNRFHAFLLYLG

SEQ ID NO: 17859 - protein, 25 aa, Artificial Sequence
  Quasi-synthetic sequence derived from human genome
LIMILVYVRIYQIAKRRTRVPPSRR

SEQ ID NO: 17860 - protein, 25 aa, Artificial Sequence
  Quasi-synthetic sequence derived from human genome
RRRCRRVLYWIPVVFITLLLGWSYY

SEQ ID NO: 17861 - protein, 25 aa, Artificial Sequence
  Quasi-synthetic sequence derived from human genome
FFRLFRVMRLVKLLSRGEGIRTLLW

SEQ ID NO: 17862 - protein, 25 aa, Artificial Sequence
  Quasi-synthetic sequence derived from human genome
TKRKKRKAAKNLELTRLLPLRFVRI

SEQ ID NO: 17863 - protein, 25 aa, Artificial Sequence
  Quasi-synthetic sequence derived from human genome
FLAILINFFIFVRIVQLLVAKLRAR

SEQ ID NO: 17864 - protein, 25 aa, Artificial Sequence
  Quasi-synthetic sequence derived from human genome
RGKLLVHSLNLLAKQGLRLLRGLRR

SEQ ID NO: 17865 - protein, 25 aa, Artificial Sequence
  Quasi-synthetic sequence derived from human genome
IGRMRTRLVRKRFLCLGWGLPALVV

SEQ ID NO: 17866 - protein, 25 aa, Artificial Sequence
  Quasi-synthetic sequence derived from human genome
FKGLRKLIILHLRSNSLKTVPIRVF

SEQ ID NO: 17867 - protein, 25 aa, Artificial Sequence
  Quasi-synthetic sequence derived from human genome
GPKKGSVLKRRLVKLVVNFLFYFRT

SEQ ID NO: 17868 - protein, 25 aa, Artificial Sequence
  Quasi-synthetic sequence derived from human genome
IVIILIIISVIVQIKQPRKKYVQRK

SEQ ID NO: 17869 - protein, 25 aa, Artificial Sequence
  Quasi-synthetic sequence derived from human genome
RAIPIKQGMLLKRSGKWLKTWKKKY

SEQ ID NO: 17870 - protein, 25 aa, Artificial Sequence
  Quasi-synthetic sequence derived from human genome
RRRIKSLLPKLSCGVKNRMHIRRKR

SEQ ID NO: 17871 - protein, 25 aa, Artificial Sequence
  Quasi-synthetic sequence derived from human genome
IIILVLVVLFLLALFIIYRHKQKGK

SEQ ID NO: 17872 - protein, 25 aa, Artificial Sequence
  Quasi-synthetic sequence derived from human genome
RLRHPRTRWKNWWVRGILTLAMIAF

SEQ ID NO: 17873 - protein, 25 aa, Artificial Sequence
  Quasi-synthetic sequence derived from human genome
VGLIFILLLVFVLIIRGQSKKYAKK

SEQ ID NO: 17874 - protein, 25 aa, Artificial Sequence
  Quasi-synthetic sequence derived from human genome
LFILGALYSIKVMNRRRRNGFKRHK

SEQ ID NO: 17875 - protein, 25 aa, Artificial Sequence
  Quasi-synthetic sequence derived from human genome
PFLLLILLCMSLLLFQVIRLYQRRR

SEQ ID NO: 17876 - protein, 25 aa, Artificial Sequence
  Quasi-synthetic sequence derived from human genome
VLARRRLVKVINNRAKLLSLCSFII

SEQ ID NO: 17877 - protein, 25 aa, Artificial Sequence
  Quasi-synthetic sequence derived from human genome
AFKIRKHYLHLRATVVSIQRRYRKL

SEQ ID NO: 17878 - protein, 25 aa, Artificial Sequence
  Quasi-synthetic sequence derived from human genome
FFAPCLIMILVYLRIYLIAKRSNRR

SEQ ID NO: 17879 - protein, 25 aa, Artificial Sequence
  Quasi-synthetic sequence derived from human genome
MVSLRKKRLKKFPWSLWVWTTDLKK

SEQ ID NO: 17880 - protein, 25 aa, Artificial Sequence
  Quasi-synthetic sequence derived from human genome
LLIYSLRNSEMKRALMKLWRRRVVL

SEQ ID NO: 17881 - protein, 25 aa, Artificial Sequence
  Quasi-synthetic sequence derived from human genome
KKRVIRMLIVIVVLFFLCWMPIFSA

SEQ ID NO: 17882 - protein, 25 aa, Artificial Sequence
  Quasi-synthetic sequence derived from human genome
LIIGLRKTFWFFFQRHKLKGTSFLL

SEQ ID NO: 17883 - protein, 25 aa, Artificial Sequence
  Quasi-synthetic sequence derived from human genome
KLLRFRKQRKKMAKLPKPVVVETFF

SEQ ID NO: 17884 - protein, 25 aa, Artificial Sequence
  Quasi-synthetic sequence derived from human genome
LRRTRLILFVLLLFGIYGLLKNPFL

SEQ ID NO: 17885 - protein, 25 aa, Artificial Sequence
  Quasi-synthetic sequence derived from human genome
KIMVRRCLVTLRPFRLFVLGIGFFT

SEQ ID NO: 17886 - protein, 25 aa, Artificial Sequence
  Quasi-synthetic sequence derived from human genome
LLERAGLVLRLLRALRVLYVMRLAR

SEQ ID NO: 17887 - protein, 25 aa, Artificial Sequence
  Quasi-synthetic sequence derived from human genome
IAILACIFVLLVLVLLILSMRRHRK

SEQ ID NO: 17888 - protein, 25 aa, Artificial Sequence
  Quasi-synthetic sequence derived from human genome
LLLLLFVGLFISYVMLKTKRVTKKA

SEQ ID NO: 17889 - protein, 25 aa, Artificial Sequence
  Quasi-synthetic sequence derived from human genome
TVIFIITKCLFCVWKFVRTGKKGKR

SEQ ID NO: 17890 - protein, 25 aa, Artificial Sequence
  Quasi-synthetic sequence derived from human genome
LIVCAIFIFIKRDQLWRSYFRKKRS

SEQ ID NO: 17891 - protein, 25 aa, Artificial Sequence
  Quasi-synthetic sequence derived from human genome
FLIKMGGKIKTWKKRWFVFDRNKRT

SEQ ID NO: 17892 - protein, 25 aa, Artificial Sequence
  Quasi-synthetic sequence derived from human genome
RLKVIVGALLRSVKKLVNVIILTFF

SEQ ID NO: 17893 - protein, 25 aa, Artificial Sequence
  Quasi-synthetic sequence derived from human genome
FSLLFLYLGSGGWRFIRVFIKTIRR

SEQ ID NO: 17894 - protein, 25 aa, Artificial Sequence
  Quasi-synthetic sequence derived from human genome
RRVKVLLVLNLIAVAGFVLFLAKCR

SEQ ID NO: 17895 - protein, 25 aa, Artificial Sequence
  Quasi-synthetic sequence derived from human genome
RMWRIRRRYCQVLNAVRIIQAYWRC

SEQ ID NO: 17896 - protein, 25 aa, Artificial Sequence
  Quasi-synthetic sequence derived from human genome
FILFLTWCRVQKQKHLPLRVSTRRR

SEQ ID NO: 17897 - protein, 25 aa, Artificial Sequence
  Quasi-synthetic sequence derived from human genome
KVKVNLVYLERRPKVKHILKNLRII

SEQ ID NO: 17898 - protein, 25 aa, Artificial Sequence
  Quasi-synthetic sequence derived from human genome
LLITISGKRNKLRVYYLSWLRNKIL

SEQ ID NO: 17899 - protein, 25 aa, Artificial Sequence
  Quasi-synthetic sequence derived from human genome
LFGWKFHLEYRKTDAFRRRRWRRRM

SEQ ID NO: 17900 - protein, 25 aa, Artificial Sequence
  Quasi-synthetic sequence derived from human genome
HSKAKYKKVQLVRLVGMMLLIFARK

SEQ ID NO: 17901 - protein, 25 aa, Artificial Sequence
  Quasi-synthetic sequence derived from human genome
LRRQMWWRGCKIKAIMALVAAILLL

SEQ ID NO: 17902 - protein, 25 aa, Artificial Sequence
  Quasi-synthetic sequence derived from human genome
FIILFKVFLFPRITISKKTKLVTLS

SEQ ID NO: 17903 - protein, 25 aa, Artificial Sequence
  Quasi-synthetic sequence derived from human genome
LRKLRNVSNLKPVPLIGPKLKRRWP

SEQ ID NO: 17904 - protein, 25 aa, Artificial Sequence
  Quasi-synthetic sequence derived from human genome
KIIYNLRNTLKYAKKNVRAFWKLRA

SEQ ID NO: 17905 - protein, 25 aa, Artificial Sequence
  Quasi-synthetic sequence derived from human genome
WNSCVRRRKWIRYRRYKSRDIWAKI

SEQ ID NO: 17906 - protein, 25 aa, Artificial Sequence
  Quasi-synthetic sequence derived from human genome
KVRRVFVRKVYTILLIQLLVTLAVV

SEQ ID NO: 17907 - protein, 25 aa, Artificial Sequence
  Quasi-synthetic sequence derived from human genome
VKQGYVRIRSRRLGIYQRCWLVFKK

SEQ ID NO: 17908 - protein, 25 aa, Artificial Sequence
  Quasi-synthetic sequence derived from human genome
KLRHSVIYIQAIFRGKKARRHLKMM

SEQ ID NO: 17909 - protein, 25 aa, Artificial Sequence
  Quasi-synthetic sequence derived from human genome
LAKRLKPLKVRRIKSEKLHLKDFRI

SEQ ID NO: 17910 - protein, 25 aa, Artificial Sequence
  Quasi-synthetic sequence derived from human genome
KLKFYYNPNFKRGYPQLLVRVKRRI

SEQ ID NO: 17911 - protein, 25 aa, Artificial Sequence
  Quasi-synthetic sequence derived from human genome
IRILAVITIQAGVRGYLARRRIRLW

SEQ ID NO: 17912 - protein, 25 aa, Artificial Sequence
  Quasi-synthetic sequence derived from human genome
TFRKIKRETKIKMCRKKIVNIYKLK

SEQ ID NO: 17913 - protein, 25 aa, Artificial Sequence
  Quasi-synthetic sequence derived from human genome
AYLKLRNWQWWRLFTKVKPLLQVTR

SEQ ID NO: 17914 - protein, 25 aa, Artificial Sequence
  Quasi-synthetic sequence derived from human genome
KALRNKRRRMQVRVKLGKFQLLLDI

SEQ ID NO: 17915 - protein, 25 aa, Artificial Sequence
  Quasi-synthetic sequence derived from human genome
RRRCPPLLRGLVQRWRYGKVCLRSL

SEQ ID NO: 17916 - protein, 25 aa, Artificial Sequence
  Quasi-synthetic sequence derived from human genome
NFPVVWHKTVRGRPKLSRKWYRILK

SEQ ID NO: 17917 - protein, 25 aa, Artificial Sequence
  Quasi-synthetic sequence derived from human genome
SCVFLAFVAVLLGLRLRRWHKSRLL

SEQ ID NO: 17918 - protein, 25 aa, Artificial Sequence
  Quasi-synthetic sequence derived from human genome
KHYVRGRALRSRLLRKQAWKQKWRK

SEQ ID NO: 17919 - protein, 25 aa, Artificial Sequence
  Quasi-synthetic sequence derived from human genome
RPGLRRQWKCVQRRCLRHLAHRLRR

SEQ ID NO: 17920 - protein, 25 aa, Artificial Sequence
  Quasi-synthetic sequence derived from human genome
RRYTYLAKAVLRRIVSKIFRNRQCW

SEQ ID NO: 17921 - protein, 25 aa, Artificial Sequence
  Quasi-synthetic sequence derived from human genome
RIYGKFLGLRAYIRKQINNIFYRFI

SEQ ID NO: 17922 - protein, 25 aa, Artificial Sequence
  Quasi-synthetic sequence derived from human genome
VTAFSGLAFIIWLARRLKKGKKSKR

SEQ ID NO: 17923 - protein, 25 aa, Artificial Sequence
  Quasi-synthetic sequence derived from human genome
KFYSHKKILQLIKSQKFLNKLVILV

SEQ ID NO: 17924 - protein, 25 aa, Artificial Sequence
  Quasi-synthetic sequence derived from human genome
VLKAGWLKKQRSIMKNWQQRWFVLR

SEQ ID NO: 17925 - protein, 25 aa, Artificial Sequence
  Quasi-synthetic sequence derived from human genome
LLRKSFTCWKKNVRLQGLHRLQKFL

SEQ ID NO: 17926 - protein, 25 aa, Artificial Sequence
  Quasi-synthetic sequence derived from human genome
IAILLCVLILLAIVVLFITLRRSKK

SEQ ID NO: 17927 - protein, 25 aa, Artificial Sequence
  Quasi-synthetic sequence derived from human genome
KKLKKSIKIIFIVVAAFLVSWLPFN

SEQ ID NO: 17928 - protein, 25 aa, Artificial Sequence
  Quasi-synthetic sequence derived from human genome
MKKYCKVIRVIVHTQMKLLPFRQKK

SEQ ID NO: 17929 - protein, 25 aa, Artificial Sequence
  Quasi-synthetic sequence derived from human genome
RKRFRTLYHNLFGPKRPKALKLLGM

SEQ ID NO: 17930 - protein, 25 aa, Artificial Sequence
  Quasi-synthetic sequence derived from human genome
KKFKFFKFKGFGSLSNLPRSFTLRR

SEQ ID NO: 17931 - protein, 25 aa, Artificial Sequence
  Quasi-synthetic sequence derived from human genome
HYYRLLWFKVKKMPLTEYLKRIKLP

SEQ ID NO: 17932 - protein, 25 aa, Artificial Sequence
  Quasi-synthetic sequence derived from human genome
RGFKAGRNMRRKLFGVLRLKCHSLF

SEQ ID NO: 17933 - protein, 25 aa, Artificial Sequence
  Quasi-synthetic sequence derived from human genome
IFLLNVSMFIVVLVQLCRIKKKKQL

SEQ ID NO: 17934 - protein, 25 aa, Artificial Sequence
  Quasi-synthetic sequence derived from human genome
FKKFAARKKWKQSVRLISLCQRLSR

SEQ ID NO: 17935 - protein, 25 aa, Artificial Sequence
  Quasi-synthetic sequence derived from human genome
WRIRKKYFLMKIKNQPKERLVLSWA

SEQ ID NO: 17936 - protein, 25 aa, Artificial Sequence
  Quasi-synthetic sequence derived from human genome
WKKTIVTRFLKLVPDLLAIVQRKKK

SEQ ID NO: 17937 - protein, 25 aa, Artificial Sequence
  Quasi-synthetic sequence derived from human genome
PCSIFFILNSIIVYKLRRKSNFRLR

SEQ ID NO: 17938 - protein, 25 aa, Artificial Sequence
  Quasi-synthetic sequence derived from human genome
KVLLAKRKLDGKFYAVKVLQKKIVL

SEQ ID NO: 17939 - protein, 25 aa, Artificial Sequence
  Quasi-synthetic sequence derived from human genome
RRKKGLLLRPVAPLRTRPPLLISLP

SEQ ID NO: 17940 - protein, 25 aa, Artificial Sequence
  Quasi-synthetic sequence derived from human genome
AYLKLRNWQWWRLFTKVKPLLQVSR

SEQ ID NO: 17941 - protein, 25 aa, Artificial Sequence
  Quasi-synthetic sequence derived from human genome
IRTIFKRLKSFICPKLHMGFKSSLR

SEQ ID NO: 17942 - protein, 25 aa, Artificial Sequence
  Quasi-synthetic sequence derived from human genome
LQQKVFILFLTLWLLSLLKLLNVRR

SEQ ID NO: 17943 - protein, 25 aa, Artificial Sequence
  Quasi-synthetic sequence derived from human genome
KFFKRKPKVLGVVRILIALMSLSMG

SEQ ID NO: 17944 - protein, 25 aa, Artificial Sequence
  Quasi-synthetic sequence derived from human genome
VIKHFLRKIIMVHPKVRFHFSVKVN

SEQ ID NO: 17945 - protein, 25 aa, Artificial Sequence
  Quasi-synthetic sequence derived from human genome
RNFMNIRPVKLKNLILLVKHWYRQV

SEQ ID NO: 17946 - protein, 25 aa, Artificial Sequence
  Quasi-synthetic sequence derived from human genome
KQMRARRKTAKMLMVVLLVFALCYL

SEQ ID NO: 17947 - protein, 25 aa, Artificial Sequence
  Quasi-synthetic sequence derived from human genome
LLILKRVLEMRKKALFILPFVSVAK

SEQ ID NO: 17948 - protein, 25 aa, Artificial Sequence
  Quasi-synthetic sequence derived from human genome
LAFLTFSVVLALFLKRPKRSLFFNR

SEQ ID NO: 17949 - protein, 25 aa, Artificial Sequence
  Quasi-synthetic sequence derived from human genome
IWKKFLSRPALPFILRLLRGLAIQH

SEQ ID NO: 17950 - protein, 25 aa, Artificial Sequence
  Quasi-synthetic sequence derived from human genome
RRELLRRTWGRERKVRGLQLRLLFL

SEQ ID NO: 17951 - protein, 25 aa, Artificial Sequence
  Quasi-synthetic sequence derived from human genome
ILFMFRRLRQFRQAQPTPQYRFRKR

SEQ ID NO: 17952 - protein, 25 aa, Artificial Sequence
  Quasi-synthetic sequence derived from human genome
WRRAWPRRRRRLQQVGTVAKLWIYP

SEQ ID NO: 17953 - protein, 25 aa, Artificial Sequence
  Quasi-synthetic sequence derived from human genome
KRGVRTLHQRFLAQLRKYFNMRVFR

SEQ ID NO: 17954 - protein, 25 aa, Artificial Sequence
  Quasi-synthetic sequence derived from human genome
FLNLVYKSLKADIVLRRVKAFVKRL

SEQ ID NO: 17955 - protein, 25 aa, Artificial Sequence
  Quasi-synthetic sequence derived from human genome
KLFRAQRNLYIAGFSLLLSFLLRRL

SEQ ID NO: 17956 - protein, 25 aa, Artificial Sequence
  Quasi-synthetic sequence derived from human genome
FYRIHRRGPKILLLLLFFGVVLVIY

SEQ ID NO: 17957 - protein, 25 aa, Artificial Sequence
  Quasi-synthetic sequence derived from human genome
CLLAAGFVVYLKRKTLIRLLFTNKK

SEQ ID NO: 17958 - protein, 25 aa, Artificial Sequence
  Quasi-synthetic sequence derived from human genome
FSKRYLKYLTKKYLKKNNLRDWLRV

SEQ ID NO: 17959 - protein, 25 aa, Artificial Sequence
  Quasi-synthetic sequence derived from human genome
FLRKKVLLRGFSPSHLRAYARRMFP

SEQ ID NO: 17960 - protein, 25 aa, Artificial Sequence
  Quasi-synthetic sequence derived from human genome
LFISVAFKLLILLLGSWALFFRRPK

SEQ ID NO: 17961 - protein, 25 aa, Artificial Sequence
  Quasi-synthetic sequence derived from human genome
HWQIPLSRRFRSVKLWFVIRSFGVK

SEQ ID NO: 17962 - protein, 25 aa, Artificial Sequence
  Quasi-synthetic sequence derived from human genome
VNVKIKKVLKSTKLKIFRGKRTLYP

SEQ ID NO: 17963 - protein, 25 aa, Artificial Sequence
  Quasi-synthetic sequence derived from human genome
LWLQWLPQPQPRVRPRKRRRPRPRR

SEQ ID NO: 17964 - protein, 25 aa, Artificial Sequence
  Quasi-synthetic sequence derived from human genome
FRLLRRRQQRHSGSKWLLRSWVQIF

SEQ ID NO: 17965 - protein, 25 aa, Artificial Sequence
  Quasi-synthetic sequence derived from human genome
PINKRPVLGYRNLNLFKLFRLVHKL

SEQ ID NO: 17966 - protein, 25 aa, Artificial Sequence
  Quasi-synthetic sequence derived from human genome
LLKYKAFIRIPIPTRRHTFRRQNVR

SEQ ID NO: 17967 - protein, 25 aa, Artificial Sequence
  Quasi-synthetic sequence derived from human genome
SIPLLLLLVVTTVVCWVWICRKRKR

SEQ ID NO: 17968 - protein, 25 aa, Artificial Sequence
  Quasi-synthetic sequence derived from human genome
ALCNRTFRKTFKMLLLCRWKKKKVE

SEQ ID NO: 17969 - protein, 25 aa, Artificial Sequence
  Quasi-synthetic sequence derived from human genome
FFRILRIFKLIAPKLLQIIDKRMSH

SEQ ID NO: 17970 - protein, 25 aa, Artificial Sequence
  Quasi-synthetic sequence derived from human genome
IVLILVGYISVKVMLKSIKTRLGRR

SEQ ID NO: 17971 - protein, 25 aa, Artificial Sequence
  Quasi-synthetic sequence derived from human genome
RLIFHHLKRKAKSVVLVIVLGSLFF

SEQ ID NO: 17972 - protein, 25 aa, Artificial Sequence
  Quasi-synthetic sequence derived from human genome
LNYRTGVRLRGAILTMAFKKILKLK

SEQ ID NO: 17973 - protein, 25 aa, Artificial Sequence
  Quasi-synthetic sequence derived from human genome
IIILGCLALFLLLQRKNLRRPPCIK

SEQ ID NO: 17974 - protein, 25 aa, Artificial Sequence
  Quasi-synthetic sequence derived from human genome
KDKVWLLREQKRKKKLRKLLKRLQN

SEQ ID NO: 17975 - protein, 25 aa, Artificial Sequence
  Quasi-synthetic sequence derived from human genome
FLLSASKKKRISKQCKLMRLPFARV

SEQ ID NO: 17976 - protein, 25 aa, Artificial Sequence
  Quasi-synthetic sequence derived from human genome
AKGHLFRKGIMKIMVYKIFRILVPG

SEQ ID NO: 17977 - protein, 25 aa, Artificial Sequence
  Quasi-synthetic sequence derived from human genome
ARRAKRKVTRMILIVAALFCLCWMP

SEQ ID NO: 17978 - protein, 25 aa, Artificial Sequence
  Quasi-synthetic sequence derived from human genome
LSRRWRRWNRFNRRRCRAAVKSVTF

SEQ ID NO: 17979 - protein, 25 aa, Artificial Sequence
  Quasi-synthetic sequence derived from human genome
RWRLNVLRLNFRGCLLRPKTFRSVS

SEQ ID NO: 17980 - protein, 25 aa, Artificial Sequence
  Quasi-synthetic sequence derived from human genome
IKLLTVIKWHGPKCNKLNSKFWKRL

SEQ ID NO: 17981 - protein, 25 aa, Artificial Sequence
  Quasi-synthetic sequence derived from human genome
TKKKKLIAAVVLGILFINTLRCVLR

SEQ ID NO: 17982 - protein, 25 aa, Artificial Sequence
  Quasi-synthetic sequence derived from human genome
VHRCLGVLRPLRSLRWGRARYARRV

SEQ ID NO: 17983 - protein, 25 aa, Artificial Sequence
  Quasi-synthetic sequence derived from human genome
LLLVHGRWSYVRICKFLRYFFYKSM

SEQ ID NO: 17984 - protein, 25 aa, Artificial Sequence
  Quasi-synthetic sequence derived from human genome
VMVFCLILWKWKKKKRPRNSYKCGT

SEQ ID NO: 17985 - protein, 25 aa, Artificial Sequence
  Quasi-synthetic sequence derived from human genome
ALLFRIVLKRRLNWIQWASLLTLFL

SEQ ID NO: 17986 - protein, 25 aa, Artificial Sequence
  Quasi-synthetic sequence derived from human genome
IALRFPALVLYIVFIFAMKKKFQGK

SEQ ID NO: 17987 - protein, 25 aa, Artificial Sequence
  Quasi-synthetic sequence derived from human genome
ILVVLILTVFVAFCLLVFVLRRNKK

SEQ ID NO: 17988 - protein, 25 aa, Artificial Sequence
  Quasi-synthetic sequence derived from human genome
WVFAILRPPVLRLMRSVLCCRISLR

SEQ ID NO: 17989 - protein, 25 aa, Artificial Sequence
  Quasi-synthetic sequence derived from human genome
KVASVRHPLFIWLKMRISKLVPWMI

SEQ ID NO: 17990 - protein, 25 aa, Artificial Sequence
  Quasi-synthetic sequence derived from human genome
RRLPRELKIRVRKLQKERITILLPK

SEQ ID NO: 17991 - protein, 25 aa, Artificial Sequence
  Quasi-synthetic sequence derived from human genome
KRLARISLVKKLMKKWSVTQNLTFR

SEQ ID NO: 17992 - protein, 25 aa, Artificial Sequence
  Quasi-synthetic sequence derived from human genome
LCRIKASKALKKKIRRFQPTALKVM

SEQ ID NO: 17993 - protein, 25 aa, Artificial Sequence
  Quasi-synthetic sequence derived from human genome
LLKHVRRNKLGYVSVKLLTSFKKVK

SEQ ID NO: 17994 - protein, 25 aa, Artificial Sequence
  Quasi-synthetic sequence derived from human genome
FRRRSFRGFWLTHHLYILLYVLLII

SEQ ID NO: 17995 - protein, 25 aa, Artificial Sequence
  Quasi-synthetic sequence derived from human genome
LKMSKGLDARSKRWLKIIWRRHGIW

SEQ ID NO: 17996 - protein, 25 aa, Artificial Sequence
  Quasi-synthetic sequence derived from human genome
RKRWFQLGRSMNPRARKKRSRIPLL

SEQ ID NO: 17997 - protein, 25 aa, Artificial Sequence
  Quasi-synthetic sequence derived from human genome
MLMRWNNLLRKRNFYKKLELHLPKF

SEQ ID NO: 17998 - protein, 25 aa, Artificial Sequence
  Quasi-synthetic sequence derived from human genome
RFKHLKKLLLVHGHWCYSRLARMVV

SEQ ID NO: 17999 - protein, 25 aa, Artificial Sequence
  Quasi-synthetic sequence derived from human genome
LKASVCKPFLFLLKKKIPSPVKLAF

SEQ ID NO: 18000 - protein, 25 aa, Artificial Sequence
  Quasi-synthetic sequence derived from human genome
LLIIRSLRQGLRVEKRLKTKAVRMI

SEQ ID NO: 18001 - protein, 26 aa, Artificial Sequence
  Quasi-synthetic sequence derived from human genome
LFFLFRLLLRFLRLCRSFYITCRRLR

SEQ ID NO: 18002 - protein, 26 aa, Artificial Sequence
  Quasi-synthetic sequence derived from human genome
LFRILKVFKSLRALRAIRVLRRLSFL

SEQ ID NO: 18003 - protein, 26 aa, Artificial Sequence
  Quasi-synthetic sequence derived from human genome
FKRAFLRLLRCQCRRRRRRRPLWRVY

SEQ ID NO: 18004 - protein, 26 aa, Artificial Sequence
  Quasi-synthetic sequence derived from human genome
RALRIVRFTKILSLLRLLRLSRLIRY

SEQ ID NO: 18005 - protein, 26 aa, Artificial Sequence
  Quasi-synthetic sequence derived from human genome
KRKKKKKFCYLCILLLIVLFILLCCL

SEQ ID NO: 18006 - protein, 26 aa, Artificial Sequence
  Quasi-synthetic sequence derived from human genome
QKLLKRLRLLPALLILRAFKPHRKIR

SEQ ID NO: 18007 - protein, 26 aa, Artificial Sequence
  Quasi-synthetic sequence derived from human genome
MKFFRWVRRAWQRIISWVFFWRQKIK

SEQ ID NO: 18008 - protein, 26 aa, Artificial Sequence
  Quasi-synthetic sequence derived from human genome
IKLLRNIPRWTHLLRLLRLIILLRIF

SEQ ID NO: 18009 - protein, 26 aa, Artificial Sequence
  Quasi-synthetic sequence derived from human genome
KTMKFILWRRFRWAIILFIILFILLL

SEQ ID NO: 18010 - protein, 26 aa, Artificial Sequence
  Quasi-synthetic sequence derived from human genome
FLRVVRFVRILRIFKLTRHFVGLRVL

SEQ ID NO: 18011 - protein, 26 aa, Artificial Sequence
  Quasi-synthetic sequence derived from human genome
LILSRRPRRRLGSLRWCGRRRLRWRL

SEQ ID NO: 18012 - protein, 26 aa, Artificial Sequence
  Quasi-synthetic sequence derived from human genome
LRTFRLLRVLKLVRFLPALRRQLVVL

SEQ ID NO: 18013 - protein, 26 aa, Artificial Sequence
  Quasi-synthetic sequence derived from human genome
GILVFILLLLVVILIVKKSKLAKKRK

SEQ ID NO: 18014 - protein, 26 aa, Artificial Sequence
  Quasi-synthetic sequence derived from human genome
RALSRRYLRRLLLLLLLLLLRQPVTR

SEQ ID NO: 18015 - protein, 26 aa, Artificial Sequence
  Quasi-synthetic sequence derived from human genome
PRAARPPLLLRPVKLLRRRFRLLLAL

SEQ ID NO: 18016 - protein, 26 aa, Artificial Sequence
  Quasi-synthetic sequence derived from human genome
IKSLRVLRVLRPLKTIKRLPKLKAVF

SEQ ID NO: 18017 - protein, 26 aa, Artificial Sequence
  Quasi-synthetic sequence derived from human genome
LRKRIHRPRRRTTRRWKRWFKFRKRK

SEQ ID NO: 18018 - protein, 26 aa, Artificial Sequence
  Quasi-synthetic sequence derived from human genome
LLLMLVLYGRIFRAARFRIRKTVKKV

SEQ ID NO: 18019 - protein, 26 aa, Artificial Sequence
  Quasi-synthetic sequence derived from human genome
LDPWVYLLLRKILLRKFCQMRKRRLR

SEQ ID NO: 18020 - protein, 26 aa, Artificial Sequence
  Quasi-synthetic sequence derived from human genome
KFWRRYGKLSRHLMKVKLKKYTKFLF

SEQ ID NO: 18021 - protein, 26 aa, Artificial Sequence
  Quasi-synthetic sequence derived from human genome
FALRRKKKKTIKMLMLVVVLFALCWF

SEQ ID NO: 18022 - protein, 26 aa, Artificial Sequence
  Quasi-synthetic sequence derived from human genome
FLPIVVLIFKSILFLPCLRKKILKIR

SEQ ID NO: 18023 - protein, 26 aa, Artificial Sequence
  Quasi-synthetic sequence derived from human genome
LKRLVKLHIKRHYHKKFWKLGAVIFF

SEQ ID NO: 18024 - protein, 26 aa, Artificial Sequence
  Quasi-synthetic sequence derived from human genome
RPFTRFRTAVRVVIAILRLRFLVKKW

SEQ ID NO: 18025 - protein, 26 aa, Artificial Sequence
  Quasi-synthetic sequence derived from human genome
KAYRIMKRHLRLIHPTKLYKLMLRRF

SEQ ID NO: 18026 - protein, 26 aa, Artificial Sequence
  Quasi-synthetic sequence derived from human genome
LKRFKVMKPKVLRSWCRQILKGLLFL

SEQ ID NO: 18027 - protein, 26 aa, Artificial Sequence
  Quasi-synthetic sequence derived from human genome
LLIWVPVKVILHKKRYIYRKIKGWRP

SEQ ID NO: 18028 - protein, 26 aa, Artificial Sequence
  Quasi-synthetic sequence derived from human genome
KRALGRRKGVWLRLRKILFCVLGLYI

SEQ ID NO: 18029 - protein, 26 aa, Artificial Sequence
  Quasi-synthetic sequence derived from human genome
LFRVIRLARIGRILRLIRAAKGIRTL

SEQ ID NO: 18030 - protein, 26 aa, Artificial Sequence
  Quasi-synthetic sequence derived from human genome
RRKSWRLEFLFLRRRCFLLTFYLWFL

SEQ ID NO: 18031 - protein, 26 aa, Artificial Sequence
  Quasi-synthetic sequence derived from human genome
RLSLIMQLVALLLVVLWIRWKCRRLR

SEQ ID NO: 18032 - protein, 26 aa, Artificial Sequence
  Quasi-synthetic sequence derived from human genome
RRRGFGLFFFLRLHRLLLLFLVLRGT

SEQ ID NO: 18033 - protein, 26 aa, Artificial Sequence
  Quasi-synthetic sequence derived from human genome
LLLVVALGIGLFMRRRHIVRKRTLRR

SEQ ID NO: 18034 - protein, 26 aa, Artificial Sequence
  Quasi-synthetic sequence derived from human genome
RRFRTLMMRRRFLSLKKTAILIQRKY

SEQ ID NO: 18035 - protein, 26 aa, Artificial Sequence
  Quasi-synthetic sequence derived from human genome
FRLLRVLKLVRFMPALRRQLVVLMKT

SEQ ID NO: 18036 - protein, 26 aa, Artificial Sequence
  Quasi-synthetic sequence derived from human genome
AKLWFKFQRYFRRKPVRFFTFLALYL

SEQ ID NO: 18037 - protein, 26 aa, Artificial Sequence
  Quasi-synthetic sequence derived from human genome
AFVGILLFLILVGLLIFFLKRRNKKK

SEQ ID NO: 18038 - protein, 26 aa, Artificial Sequence
  Quasi-synthetic sequence derived from human genome
RGRKRCIKKFSIQRFPKILVLHLKRF

SEQ ID NO: 18039 - protein, 26 aa, Artificial Sequence
  Quasi-synthetic sequence derived from human genome
LGLLHALLLVLLLCRLRRLRARARAR

SEQ ID NO: 18040 - protein, 26 aa, Artificial Sequence
  Quasi-synthetic sequence derived from human genome
KRLLGPKLRRFLKPQGHPRLLLWFKR

SEQ ID NO: 18041 - protein, 26 aa, Artificial Sequence
  Quasi-synthetic sequence derived from human genome
KINAFNWAKVRKLSFKRKRFLIKLRP

SEQ ID NO: 18042 - protein, 26 aa, Artificial Sequence
  Quasi-synthetic sequence derived from human genome
FWLIFLLIILSYIKIGKNLLRISKRR

SEQ ID NO: 18043 - protein, 26 aa, Artificial Sequence
  Quasi-synthetic sequence derived from human genome
VLFVIFILVVLFIVFRKKVFRKNYSR

SEQ ID NO: 18044 - protein, 26 aa, Artificial Sequence
  Quasi-synthetic sequence derived from human genome
LRLIILLRIFHLFHQKRQLEKLIRRR

SEQ ID NO: 18045 - protein, 26 aa, Artificial Sequence
  Quasi-synthetic sequence derived from human genome
RFRSLLVRRRFISLKKATIFVQRKYR

SEQ ID NO: 18046 - protein, 26 aa, Artificial Sequence
  Quasi-synthetic sequence derived from human genome
KRFLLLFTFLKKNRKKKLMVFFSSCM

SEQ ID NO: 18047 - protein, 26 aa, Artificial Sequence
  Quasi-synthetic sequence derived from human genome
LFRVIRLARIGRILRLIRGAKGIRTL

SEQ ID NO: 18048 - protein, 26 aa, Artificial Sequence
  Quasi-synthetic sequence derived from human genome
LKRFKVMKIKVLRSWCRQILKGLQFL

SEQ ID NO: 18049 - protein, 26 aa, Artificial Sequence
  Quasi-synthetic sequence derived from human genome
RFFRFLLRKLYVFRRSFLMTCISLRN

SEQ ID NO: 18050 - protein, 26 aa, Artificial Sequence
  Quasi-synthetic sequence derived from human genome
IALLALTALLLVAMICRRRRRRKKAR

SEQ ID NO: 18051 - protein, 26 aa, Artificial Sequence
  Quasi-synthetic sequence derived from human genome
AGILLFVIIFLGVVLVMKKRKLAKKR

SEQ ID NO: 18052 - protein, 26 aa, Artificial Sequence
  Quasi-synthetic sequence derived from human genome
RLFKLKPPVWYLRSLVQNLLLIRRFK

SEQ ID NO: 18053 - protein, 26 aa, Artificial Sequence
  Quasi-synthetic sequence derived from human genome
LRLLRGLRRRNVQKKVALAKKLLAKL

SEQ ID NO: 18054 - protein, 26 aa, Artificial Sequence
  Quasi-synthetic sequence derived from human genome
ILRIIRLVRVFRIFKLSRHSKGLQIL

SEQ ID NO: 18055 - protein, 26 aa, Artificial Sequence
  Quasi-synthetic sequence derived from human genome
LFRVIRLARIGRILRLIKGAKGIRTL

SEQ ID NO: 18056 - protein, 26 aa, Artificial Sequence
  Quasi-synthetic sequence derived from human genome
RVLLRFQRKLSVLLLLLGRRRVDFRL

SEQ ID NO: 18057 - protein, 26 aa, Artificial Sequence
  Quasi-synthetic sequence derived from human genome
VLKIRRRKMNHHKYRKLVKKTRFLRR

SEQ ID NO: 18058 - protein, 26 aa, Artificial Sequence
  Quasi-synthetic sequence derived from human genome
KRFLKHAGKWSLRWFLSPRWILQFRR

SEQ ID NO: 18059 - protein, 26 aa, Artificial Sequence
  Quasi-synthetic sequence derived from human genome
FLIFILFIIVQLFIMKLRKAHVIWKK

SEQ ID NO: 18060 - protein, 26 aa, Artificial Sequence
  Quasi-synthetic sequence derived from human genome
KLRAACIRIQKTIRGWLLRKKYLRMR

SEQ ID NO: 18061 - protein, 26 aa, Artificial Sequence
  Quasi-synthetic sequence derived from human genome
FMIRKFRRSLLQLLCLRLLRCQRPAK

SEQ ID NO: 18062 - protein, 26 aa, Artificial Sequence
  Quasi-synthetic sequence derived from human genome
CLRGFFIKRRFRSLRHKIILLQSRAR

SEQ ID NO: 18063 - protein, 26 aa, Artificial Sequence
  Quasi-synthetic sequence derived from human genome
RIWVFRLKRRKRIARRLVDTLRNCFM

SEQ ID NO: 18064 - protein, 26 aa, Artificial Sequence
  Quasi-synthetic sequence derived from human genome
FRARFRRLWPCGRRRRHRARRALRRV

SEQ ID NO: 18065 - protein, 26 aa, Artificial Sequence
  Quasi-synthetic sequence derived from human genome
RIIWHKFKQWVIPWHLNKRYNRKRFF

SEQ ID NO: 18066 - protein, 26 aa, Artificial Sequence
  Quasi-synthetic sequence derived from human genome
AWRGTLARWRCRRLRAIYTIMRWFRR

SEQ ID NO: 18067 - protein, 26 aa, Artificial Sequence
  Quasi-synthetic sequence derived from human genome
LFRVIRLARIGRVLRLIRGAKGIRTL

SEQ ID NO: 18068 - protein, 26 aa, Artificial Sequence
  Quasi-synthetic sequence derived from human genome
LKIKRLRKKFAQKMLRKARRKLIYEK

SEQ ID NO: 18069 - protein, 26 aa, Artificial Sequence
  Quasi-synthetic sequence derived from human genome
LRAPRKKIHRRVLKKNPLKNLRIMLK

SEQ ID NO: 18070 - protein, 26 aa, Artificial Sequence
  Quasi-synthetic sequence derived from human genome
LKSRKRRKMSKKLPPVIIKYIIINRF

SEQ ID NO: 18071 - protein, 26 aa, Artificial Sequence
  Quasi-synthetic sequence derived from human genome
ILATLGVALLFIVRKKRKEKRLKRLR

SEQ ID NO: 18072 - protein, 26 aa, Artificial Sequence
  Quasi-synthetic sequence derived from human genome
PRWTHLVRLLRLIILIRIFHLLHQKR

SEQ ID NO: 18073 - protein, 26 aa, Artificial Sequence
  Quasi-synthetic sequence derived from human genome
ILRVIRLVRVFRIFKLSRHSKGLQIL

SEQ ID NO: 18074 - protein, 26 aa, Artificial Sequence
  Quasi-synthetic sequence derived from human genome
RRGIGYLKLICFLIPFLLSLKKKMKV

SEQ ID NO: 18075 - protein, 26 aa, Artificial Sequence
  Quasi-synthetic sequence derived from human genome
LFRVIRLARIGRILRLVKGAKGIRTL

SEQ ID NO: 18076 - protein, 26 aa, Artificial Sequence
  Quasi-synthetic sequence derived from human genome
WKTWIFWKTWIFWKTWIFRKTYIGWK

SEQ ID NO: 18077 - protein, 26 aa, Artificial Sequence
  Quasi-synthetic sequence derived from human genome
RLKLFFIKNQRSSLRIRLFNFSLKLL

SEQ ID NO: 18078 - protein, 26 aa, Artificial Sequence
  Quasi-synthetic sequence derived from human genome
LRMLIQVCLYFYCKFLWRCLKFVMRK

SEQ ID NO: 18079 - protein, 26 aa, Artificial Sequence
  Quasi-synthetic sequence derived from human genome
IHLCCRRRRARLRFMKQKFNIVCLKI

SEQ ID NO: 18080 - protein, 26 aa, Artificial Sequence
  Quasi-synthetic sequence derived from human genome
IFFFLPVFCLTVLYSLIGRKLWRRRR

SEQ ID NO: 18081 - protein, 26 aa, Artificial Sequence
  Quasi-synthetic sequence derived from human genome
KLKRKYWWKNLKMMIILGVICAIILI

SEQ ID NO: 18082 - protein, 26 aa, Artificial Sequence
  Quasi-synthetic sequence derived from human genome
LRLRHLRRPRVARLLCLGVWALILVF

SEQ ID NO: 18083 - protein, 26 aa, Artificial Sequence
  Quasi-synthetic sequence derived from human genome
SALARFLLKRGLRNKRIGHFLFWFLR

SEQ ID NO: 18084 - protein, 26 aa, Artificial Sequence
  Quasi-synthetic sequence derived from human genome
RLRFLKLKRQTKVLLTLLLVFGIAIF

SEQ ID NO: 18085 - protein, 26 aa, Artificial Sequence
  Quasi-synthetic sequence derived from human genome
KHNFLLLFMKLRWFLKRWRQGKVLPS

SEQ ID NO: 18086 - protein, 26 aa, Artificial Sequence
  Quasi-synthetic sequence derived from human genome
IRIRILCCLTFLVKVKSKALLKNRLL

SEQ ID NO: 18087 - protein, 26 aa, Artificial Sequence
  Quasi-synthetic sequence derived from human genome
KVLKVVAKVIRALLRILCCLLKAICR

SEQ ID NO: 18088 - protein, 26 aa, Artificial Sequence
  Quasi-synthetic sequence derived from human genome
LNRKIVQVMRKQKTINRFLMRKRLLF

SEQ ID NO: 18089 - protein, 26 aa, Artificial Sequence
  Quasi-synthetic sequence derived from human genome
RLLLFFRFKRTLDRICVLFLLGWHRK

SEQ ID NO: 18090 - protein, 26 aa, Artificial Sequence
  Quasi-synthetic sequence derived from human genome
MLLCYRHLKTKRILRRNLLALIHRMI

SEQ ID NO: 18091 - protein, 26 aa, Artificial Sequence
  Quasi-synthetic sequence derived from human genome
WLVWLRFHKKKWQLQARQRLARRKRQ

SEQ ID NO: 18092 - protein, 26 aa, Artificial Sequence
  Quasi-synthetic sequence derived from human genome
IVKQGYVKIRSRKLGIFRRCWLVFKK

SEQ ID NO: 18093 - protein, 26 aa, Artificial Sequence
  Quasi-synthetic sequence derived from human genome
AVLVALLAVIVLVALLLLWRRRQKRR

SEQ ID NO: 18094 - protein, 26 aa, Artificial Sequence
  Quasi-synthetic sequence derived from human genome
LQFQNVRRVVQIFRIMRILRILKLAR

SEQ ID NO: 18095 - protein, 26 aa, Artificial Sequence
  Quasi-synthetic sequence derived from human genome
WRRRSCWRKWKQLSRLQRNMILFLLA

SEQ ID NO: 18096 - protein, 26 aa, Artificial Sequence
  Quasi-synthetic sequence derived from human genome
IVTLLVYIKIYIVLRRRRKRVNTKRS

SEQ ID NO: 18097 - protein, 26 aa, Artificial Sequence
  Quasi-synthetic sequence derived from human genome
LVIVGLTFAVYVRRKSIKKKRALRRF

SEQ ID NO: 18098 - protein, 26 aa, Artificial Sequence
  Quasi-synthetic sequence derived from human genome
KNVRVLSRTSKFRRLRQLLRRRKKRW

SEQ ID NO: 18099 - protein, 26 aa, Artificial Sequence
  Quasi-synthetic sequence derived from human genome
RVSKKNIFLLFKKLCSFRYRRDLLRL

SEQ ID NO: 18100 - protein, 26 aa, Artificial Sequence
  Quasi-synthetic sequence derived from human genome
QLLMVLRCLRPLRIFKLVPQMRKVVR

SEQ ID NO: 18101 - protein, 26 aa, Artificial Sequence
  Quasi-synthetic sequence derived from human genome
AKIRKLSFKRKHFLIKLHANILVLCK

SEQ ID NO: 18102 - protein, 26 aa, Artificial Sequence
  Quasi-synthetic sequence derived from human genome
RKVLYCVVIIQKNYRAFLLRRRFLHL

SEQ ID NO: 18103 - protein, 26 aa, Artificial Sequence
  Quasi-synthetic sequence derived from human genome
LRKRFGGRRIRLYLSVLSLFLYIFTK

SEQ ID NO: 18104 - protein, 26 aa, Artificial Sequence
  Quasi-synthetic sequence derived from human genome
VLRRIILLQRWFRVLLCRQHFLHLRQ

SEQ ID NO: 18105 - protein, 26 aa, Artificial Sequence
  Quasi-synthetic sequence derived from human genome
SKKKKKKKKKRQCFAFLIYFRLGIKM

SEQ ID NO: 18106 - protein, 26 aa, Artificial Sequence
  Quasi-synthetic sequence derived from human genome
KIKRLKKSAFVVLILLITAKLLVLPL

SEQ ID NO: 18107 - protein, 26 aa, Artificial Sequence
  Quasi-synthetic sequence derived from human genome
LRVKRSVTRIKKRSRSVFYRLTILIL

SEQ ID NO: 18108 - protein, 26 aa, Artificial Sequence
  Quasi-synthetic sequence derived from human genome
LIFLRIKRRVKSVVLVILLGPLLFLV

SEQ ID NO: 18109 - protein, 26 aa, Artificial Sequence
  Quasi-synthetic sequence derived from human genome
MLIRIVLFLQKVWRGTLARMRYKRTK

SEQ ID NO: 18110 - protein, 26 aa, Artificial Sequence
  Quasi-synthetic sequence derived from human genome
VLLSLLLILKAGRRWNKYFKSRRPLF

SEQ ID NO: 18111 - protein, 26 aa, Artificial Sequence
  Quasi-synthetic sequence derived from human genome
RLPVKKIRKQMKLLLLLLLLSCAAWL

SEQ ID NO: 18112 - protein, 26 aa, Artificial Sequence
  Quasi-synthetic sequence derived from human genome
FFWMLFKALLIIYGILVIFRRMMKSR

SEQ ID NO: 18113 - protein, 26 aa, Artificial Sequence
  Quasi-synthetic sequence derived from human genome
IRLARIGRILRLIRGAKGIRTLLFAL

SEQ ID NO: 18114 - protein, 26 aa, Artificial Sequence
  Quasi-synthetic sequence derived from human genome
KLLAKKRVVRMLLVIVVLFFLCWLPV

SEQ ID NO: 18115 - protein, 26 aa, Artificial Sequence
  Quasi-synthetic sequence derived from human genome
RLKSMLRLLLVKKPSVRSLALKLLAF

SEQ ID NO: 18116 - protein, 26 aa, Artificial Sequence
  Quasi-synthetic sequence derived from human genome
FAGLLLLMLLILALWKIGFFKRPLKK

SEQ ID NO: 18117 - protein, 26 aa, Artificial Sequence
  Quasi-synthetic sequence derived from human genome
LFKKTHRILRRLFNLCKRCHRQPRFR

SEQ ID NO: 18118 - protein, 26 aa, Artificial Sequence
  Quasi-synthetic sequence derived from human genome
RFRKYLRQLFHRRVAVHLVKWLPFLS

SEQ ID NO: 18119 - protein, 26 aa, Artificial Sequence
  Quasi-synthetic sequence derived from human genome
LKRFKVMKPKVLRSWCRQILKGLQFL

SEQ ID NO: 18120 - protein, 26 aa, Artificial Sequence
  Quasi-synthetic sequence derived from human genome
RLCLRLLLLLGYRRRCPPLLRGLVQR

SEQ ID NO: 18121 - protein, 26 aa, Artificial Sequence
  Quasi-synthetic sequence derived from human genome
RIRVIKKKKVIMKKRKKLTLTRPTPL

SEQ ID NO: 18122 - protein, 26 aa, Artificial Sequence
  Quasi-synthetic sequence derived from human genome
RFTKITQYLIRIRKLTLKRQRKLVPL

SEQ ID NO: 18123 - protein, 26 aa, Artificial Sequence
  Quasi-synthetic sequence derived from human genome
HFRMKLRNLFTKFIRKFGFELVKRLL

SEQ ID NO: 18124 - protein, 26 aa, Artificial Sequence
  Quasi-synthetic sequence derived from human genome
FLRLFRAARLIKLLRQGYTIRILLWT

SEQ ID NO: 18125 - protein, 26 aa, Artificial Sequence
  Quasi-synthetic sequence derived from human genome
LLRKRYRHRPCRLQFLLLLLMLGCVL

SEQ ID NO: 18126 - protein, 26 aa, Artificial Sequence
  Quasi-synthetic sequence derived from human genome
ILLKKYLMKRRWKKNFIAVSAANRFK

SEQ ID NO: 18127 - protein, 26 aa, Artificial Sequence
  Quasi-synthetic sequence derived from human genome
IWFFWIRLYKIRRGRTRPQALLFLCM

SEQ ID NO: 18128 - protein, 26 aa, Artificial Sequence
  Quasi-synthetic sequence derived from human genome
RRKARRLLKTVLMILLAFLVCWGPLF

SEQ ID NO: 18129 - protein, 26 aa, Artificial Sequence
  Quasi-synthetic sequence derived from human genome
RLRKRVNAALVIQKYWRRVLAQRKLL

SEQ ID NO: 18130 - protein, 26 aa, Artificial Sequence
  Quasi-synthetic sequence derived from human genome
RLLRLIILIRIFHLLHQKRQLEKLMR

SEQ ID NO: 18131 - protein, 26 aa, Artificial Sequence
  Quasi-synthetic sequence derived from human genome
VKMRKEVKRIRVLVIRKLVRSVGRLK

SEQ ID NO: 18132 - protein, 26 aa, Artificial Sequence
  Quasi-synthetic sequence derived from human genome
GRLLRGLWQRWRRYKYRFVPWIALNL

SEQ ID NO: 18133 - protein, 26 aa, Artificial Sequence
  Quasi-synthetic sequence derived from human genome
KTKRRLVLGLREVLKHLKLKKLKCVI

SEQ ID NO: 18134 - protein, 26 aa, Artificial Sequence
  Quasi-synthetic sequence derived from human genome
LLVILAMGLWVIRVQKRHKMPRMKKL

SEQ ID NO: 18135 - protein, 26 aa, Artificial Sequence
  Quasi-synthetic sequence derived from human genome
VLRVLRLLRTLRPLRVISRAPGLKLV

SEQ ID NO: 18136 - protein, 26 aa, Artificial Sequence
  Quasi-synthetic sequence derived from human genome
FLKLFRAARLIKLLRQGYTIRILLWT

SEQ ID NO: 18137 - protein, 26 aa, Artificial Sequence
  Quasi-synthetic sequence derived from human genome
VLRVMRLMRIFRILKLARHSTGLRAF

SEQ ID NO: 18138 - protein, 26 aa, Artificial Sequence
  Quasi-synthetic sequence derived from human genome
GCFLVVLLAILLYLLRLRRIHRRTPR

SEQ ID NO: 18139 - protein, 26 aa, Artificial Sequence
  Quasi-synthetic sequence derived from human genome
MFFLLVLILSSVFLFRLFKRRQGRIF

SEQ ID NO: 18140 - protein, 26 aa, Artificial Sequence
  Quasi-synthetic sequence derived from human genome
RIFGKLVFLPLRLVWKEVILRKILIL

SEQ ID NO: 18141 - protein, 26 aa, Artificial Sequence
  Quasi-synthetic sequence derived from human genome
RFRKFPFFTRPLLSKWCPKSLFKKKP

SEQ ID NO: 18142 - protein, 26 aa, Artificial Sequence
  Quasi-synthetic sequence derived from human genome
SLIRKKFRMMKIPKPILFGLNIAMKK

SEQ ID NO: 18143 - protein, 26 aa, Artificial Sequence
  Quasi-synthetic sequence derived from human genome
LLRLKAFILFGKLARVVGMSKKHFFK

SEQ ID NO: 18144 - protein, 26 aa, Artificial Sequence
  Quasi-synthetic sequence derived from human genome
ICYALCNRTFRKTFKMLLLCRWKKKK

SEQ ID NO: 18145 - protein, 26 aa, Artificial Sequence
  Quasi-synthetic sequence derived from human genome
ILRRVLVLMASKHAFLALCALRFKRK

SEQ ID NO: 18146 - protein, 26 aa, Artificial Sequence
  Quasi-synthetic sequence derived from human genome
LRTFRLMRVLKLVRFLPALQRQLVVL

SEQ ID NO: 18147 - protein, 26 aa, Artificial Sequence
  Quasi-synthetic sequence derived from human genome
ALLFLLLVLLLLVRKKRKIKEPLLLP

SEQ ID NO: 18148 - protein, 26 aa, Artificial Sequence
  Quasi-synthetic sequence derived from human genome
RLRINRFAWPKILKISYKRSNFYIKI

SEQ ID NO: 18149 - protein, 26 aa, Artificial Sequence
  Quasi-synthetic sequence derived from human genome
MRRFLSKVYSFPMRKLILFLVFPVVR

SEQ ID NO: 18150 - protein, 26 aa, Artificial Sequence
  Quasi-synthetic sequence derived from human genome
LLLKKIMAILIKRFHHTRRNWKGLIA

SEQ ID NO: 18151 - protein, 26 aa, Artificial Sequence
  Quasi-synthetic sequence derived from human genome
RAAGVFYPWRFRLLCLLRRWLPRPRA

SEQ ID NO: 18152 - protein, 26 aa, Artificial Sequence
  Quasi-synthetic sequence derived from human genome
AKRWLGRWRRKRRWRRVRKAGPRDLL

SEQ ID NO: 18153 - protein, 26 aa, Artificial Sequence
  Quasi-synthetic sequence derived from human genome
ISVVKILRVLRVLRPLRAINRAKGLK

SEQ ID NO: 18154 - protein, 26 aa, Artificial Sequence
  Quasi-synthetic sequence derived from human genome
INVVKILRVLRVLRPLRAINRAKGLK

SEQ ID NO: 18155 - protein, 26 aa, Artificial Sequence
  Quasi-synthetic sequence derived from human genome
RRLQARRFRRSRRTGRLVVLIILTFA

SEQ ID NO: 18156 - protein, 26 aa, Artificial Sequence
  Quasi-synthetic sequence derived from human genome
IQRRKWAVRIIRKFIKGFISRNKPLC

SEQ ID NO: 18157 - protein, 26 aa, Artificial Sequence
  Quasi-synthetic sequence derived from human genome
GCIIFIVIIITLVVLLLKYRRRHRKH

SEQ ID NO: 18158 - protein, 26 aa, Artificial Sequence
  Quasi-synthetic sequence derived from human genome
LIFCLCSLVGILHLQRALVLRRKRKR

SEQ ID NO: 18159 - protein, 26 aa, Artificial Sequence
  Quasi-synthetic sequence derived from human genome
KKFWIQKLPKVLCLHLKRFHWTAYLR

SEQ ID NO: 18160 - protein, 26 aa, Artificial Sequence
  Quasi-synthetic sequence derived from human genome
LAICRPLRARVLVTRRRVRALIAVLW

SEQ ID NO: 18161 - protein, 26 aa, Artificial Sequence
  Quasi-synthetic sequence derived from human genome
KAFRDTFRLLLLCRWDKRRWRKIPKR

SEQ ID NO: 18162 - protein, 26 aa, Artificial Sequence
  Quasi-synthetic sequence derived from human genome
AKKKRKKGLRIKGKRRRKKLILAKKF

SEQ ID NO: 18163 - protein, 26 aa, Artificial Sequence
  Quasi-synthetic sequence derived from human genome
IRKRLRCRRKTVLVLMCILTAYVLCW

SEQ ID NO: 18164 - protein, 26 aa, Artificial Sequence
  Quasi-synthetic sequence derived from human genome
LRIRCVARKFLYLWIRMTFGRVFPSK

SEQ ID NO: 18165 - protein, 26 aa, Artificial Sequence
  Quasi-synthetic sequence derived from human genome
LINFLIFIRILGILLSKLRTRQMRCR

SEQ ID NO: 18166 - protein, 26 aa, Artificial Sequence
  Quasi-synthetic sequence derived from human genome
LVVTLLVRYRHYFRLLVRTVLLRSLR

SEQ ID NO: 18167 - protein, 26 aa, Artificial Sequence
  Quasi-synthetic sequence derived from human genome
FYLLKIANFSNLIFLRLKRRVKSVIL

SEQ ID NO: 18168 - protein, 26 aa, Artificial Sequence
  Quasi-synthetic sequence derived from human genome
WSLRRRPARTLGLLLLVVLGFLVLRR

SEQ ID NO: 18169 - protein, 26 aa, Artificial Sequence
  Quasi-synthetic sequence derived from human genome
WLRRKLRGKRRPVIAFCLLMILSAMA

SEQ ID NO: 18170 - protein, 26 aa, Artificial Sequence
  Quasi-synthetic sequence derived from human genome
MLRVLRLLRTLRPLRVISRAQGLKLV

SEQ ID NO: 18171 - protein, 26 aa, Artificial Sequence
  Quasi-synthetic sequence derived from human genome
LRIARFRFRAFHFLNRFPSVYLRCKM

SEQ ID NO: 18172 - protein, 26 aa, Artificial Sequence
  Quasi-synthetic sequence derived from human genome
PRVRRGISRLWLRVLLRLSPMAFRAL

SEQ ID NO: 18173 - protein, 26 aa, Artificial Sequence
  Quasi-synthetic sequence derived from human genome
PRLCIRKFFPKKKCFVFDLPIHRRKL

SEQ ID NO: 18174 - protein, 26 aa, Artificial Sequence
  Quasi-synthetic sequence derived from human genome
LLLKRFLLARRSRRGLFAQIVLPALF

SEQ ID NO: 18175 - protein, 26 aa, Artificial Sequence
  Quasi-synthetic sequence derived from human genome
RIRRLGFSHRILFANFIKRYYLLCYK

SEQ ID NO: 18176 - protein, 26 aa, Artificial Sequence
  Quasi-synthetic sequence derived from human genome
AMFLVIFPMFTFPKKLPPRHKKKKKK

SEQ ID NO: 18177 - protein, 26 aa, Artificial Sequence
  Quasi-synthetic sequence derived from human genome
AVLLALLVLLVAPPLLRRAGRLRWRR

SEQ ID NO: 18178 - protein, 26 aa, Artificial Sequence
  Quasi-synthetic sequence derived from human genome
RLMNFFVFSRGLLQYINQRKKFRRRW

SEQ ID NO: 18179 - protein, 26 aa, Artificial Sequence
  Quasi-synthetic sequence derived from human genome
FKRFHPFCLVLRKRKSTLFWGARYVR

SEQ ID NO: 18180 - protein, 26 aa, Artificial Sequence
  Quasi-synthetic sequence derived from human genome
VGHIFRKVKRRSLRLYARWQSRWRKK

SEQ ID NO: 18181 - protein, 26 aa, Artificial Sequence
  Quasi-synthetic sequence derived from human genome
IKLLPLRTFRVFRALKAISVVSRLKV

SEQ ID NO: 18182 - protein, 26 aa, Artificial Sequence
  Quasi-synthetic sequence derived from human genome
KVKKIWQKQFRWPKNRLQILKFCKAR

SEQ ID NO: 18183 - protein, 26 aa, Artificial Sequence
  Quasi-synthetic sequence derived from human genome
RRWRRWNRFNRRRCRAAVKSVTFYWL

SEQ ID NO: 18184 - protein, 26 aa, Artificial Sequence
  Quasi-synthetic sequence derived from human genome
LLLLLIIALMLWRLHWRRLLSKAERR

SEQ ID NO: 18185 - protein, 26 aa, Artificial Sequence
  Quasi-synthetic sequence derived from human genome
VLGVVFGILIKRRQQKIRKYTMRRLL

SEQ ID NO: 18186 - protein, 26 aa, Artificial Sequence
  Quasi-synthetic sequence derived from human genome
RRRRRRRRRRDLLLSQLCFLASVALL

SEQ ID NO: 18187 - protein, 26 aa, Artificial Sequence
  Quasi-synthetic sequence derived from human genome
LIVRVLVRAHRHRGLRPRRQKALRMI

SEQ ID NO: 18188 - protein, 26 aa, Artificial Sequence
  Quasi-synthetic sequence derived from human genome
LILILLIKKLIIFILKKTREKKKECL

SEQ ID NO: 18189 - protein, 26 aa, Artificial Sequence
  Quasi-synthetic sequence derived from human genome
LAKKMLRKALKLLNRIFPYNLISLFL

SEQ ID NO: 18190 - protein, 26 aa, Artificial Sequence
  Quasi-synthetic sequence derived from human genome
IPSPKSLWYLIKWIWTHLCKKKMRRK

SEQ ID NO: 18191 - protein, 26 aa, Artificial Sequence
  Quasi-synthetic sequence derived from human genome
KAARDVLGFLRVVRFVRILRIFKLTR

SEQ ID NO: 18192 - protein, 26 aa, Artificial Sequence
  Quasi-synthetic sequence derived from human genome
LRSFRLLRVFKLAKSWPTLNMLIKII

SEQ ID NO: 18193 - protein, 26 aa, Artificial Sequence
  Quasi-synthetic sequence derived from human genome
RRLVLPVFGVLWITVLLFFWVTKRKL

SEQ ID NO: 18194 - protein, 26 aa, Artificial Sequence
  Quasi-synthetic sequence derived from human genome
RRFRSLKMWFVFRMYGVKGLQAYIRK

SEQ ID NO: 18195 - protein, 26 aa, Artificial Sequence
  Quasi-synthetic sequence derived from human genome
FFFIALVFFLYRRRKGSRKDVTLRKL

SEQ ID NO: 18196 - protein, 26 aa, Artificial Sequence
  Quasi-synthetic sequence derived from human genome
RRTLRKPKRVPSIYKLKLRPRIRPRR

SEQ ID NO: 18197 - protein, 26 aa, Artificial Sequence
  Quasi-synthetic sequence derived from human genome
GPGARRRQRGRLMRRLVRRLRRWGLL

SEQ ID NO: 18198 - protein, 26 aa, Artificial Sequence
  Quasi-synthetic sequence derived from human genome
RKQLVLRRGLLLLGVFLILLVGILVR

SEQ ID NO: 18199 - protein, 26 aa, Artificial Sequence
  Quasi-synthetic sequence derived from human genome
LQVSKKRLISVKNYRMIKKRKGLRLI

SEQ ID NO: 18200 - protein, 26 aa, Artificial Sequence
  Quasi-synthetic sequence derived from human genome
RKQIKRKAPRGFLKRVFKRKKPQLRL

SEQ ID NO: 18201 - protein, 26 aa, Artificial Sequence
  Quasi-synthetic sequence derived from human genome
FRRKEKMFRFFIRRMVKAQSFYWVVL

SEQ ID NO: 18202 - protein, 26 aa, Artificial Sequence
  Quasi-synthetic sequence derived from human genome
KGRRRRRREYCKFALLLVLYTLVLLL

SEQ ID NO: 18203 - protein, 26 aa, Artificial Sequence
  Quasi-synthetic sequence derived from human genome
LIFFIFYLRNMKKKYTKMVKLLHKSA

SEQ ID NO: 18204 - protein, 26 aa, Artificial Sequence
  Quasi-synthetic sequence derived from human genome
YIYMNFFFFFSVGRKFKKFNKVRVVR

SEQ ID NO: 18205 - protein, 26 aa, Artificial Sequence
  Quasi-synthetic sequence derived from human genome
LLALCLLLPLLLLGGWKRWRRGRAAR

SEQ ID NO: 18206 - protein, 26 aa, Artificial Sequence
  Quasi-synthetic sequence derived from human genome
KLKRKYWWKNCKMWAIGITVLVIFII

SEQ ID NO: 18207 - protein, 26 aa, Artificial Sequence
  Quasi-synthetic sequence derived from human genome
RRMFRVRNCLRGLGLFLLVFSFFFLL

SEQ ID NO: 18208 - protein, 26 aa, Artificial Sequence
  Quasi-synthetic sequence derived from human genome
IFKAIAHFKRTTFLKKHRMLGRLKYK

SEQ ID NO: 18209 - protein, 26 aa, Artificial Sequence
  Quasi-synthetic sequence derived from human genome
IDRFLRLHCGLWVRRKAGYKKKLWKK

SEQ ID NO: 18210 - protein, 26 aa, Artificial Sequence
  Quasi-synthetic sequence derived from human genome
LFFRKRRADMPRVFVFRALLLVLIFL

SEQ ID NO: 18211 - protein, 26 aa, Artificial Sequence
  Quasi-synthetic sequence derived from human genome
GTFFIAFFLRKFKNSRFFPGRIRRVI

SEQ ID NO: 18212 - protein, 26 aa, Artificial Sequence
  Quasi-synthetic sequence derived from human genome
RLRINRFAWPKVLKISYKRNNFYIKI

SEQ ID NO: 18213 - protein, 26 aa, Artificial Sequence
  Quasi-synthetic sequence derived from human genome
IVPKKKKPLKLGPIKKKDLKKLVLYL

SEQ ID NO: 18214 - protein, 26 aa, Artificial Sequence
  Quasi-synthetic sequence derived from human genome
LAMVPILLLGTPLHLLHRHRRRLRRR

SEQ ID NO: 18215 - protein, 26 aa, Artificial Sequence
  Quasi-synthetic sequence derived from human genome
AMVWRRLLRKRWVLALVFGLSLVYFL

SEQ ID NO: 18216 - protein, 26 aa, Artificial Sequence
  Quasi-synthetic sequence derived from human genome
KAAKDVLGFLRVVRFVRILRIFKLTR

SEQ ID NO: 18217 - protein, 26 aa, Artificial Sequence
  Quasi-synthetic sequence derived from human genome
FQWRFYLSFRKLMRWILILVIALWFI

SEQ ID NO: 18218 - protein, 26 aa, Artificial Sequence
  Quasi-synthetic sequence derived from human genome
RIRRLLRPFFLLQNSSMMKKTLKCIR

SEQ ID NO: 18219 - protein, 26 aa, Artificial Sequence
  Quasi-synthetic sequence derived from human genome
IFLAFFVVVSLVCLILLVKIKLKQRR

SEQ ID NO: 18220 - protein, 26 aa, Artificial Sequence
  Quasi-synthetic sequence derived from human genome
RRRTCIILALFILFIFSLMMGLKMLR

SEQ ID NO: 18221 - protein, 26 aa, Artificial Sequence
  Quasi-synthetic sequence derived from human genome
VRRVVQIFRIMRILRILKLARHSTGL

SEQ ID NO: 18222 - protein, 26 aa, Artificial Sequence
  Quasi-synthetic sequence derived from human genome
LRYNILTLMRMLSLKSLKKQMKKVKK

SEQ ID NO: 18223 - protein, 26 aa, Artificial Sequence
  Quasi-synthetic sequence derived from human genome
VVVVIIIFTVVLILLKMYNRKMRTRR

SEQ ID NO: 18224 - protein, 26 aa, Artificial Sequence
  Quasi-synthetic sequence derived from human genome
YKKWCRSILRRTSLILARVFGLHLRL

SEQ ID NO: 18225 - protein, 26 aa, Artificial Sequence
  Quasi-synthetic sequence derived from human genome
RILINLMKYLQKWKRYRPLWKLDKAI

SEQ ID NO: 18226 - protein, 26 aa, Artificial Sequence
  Quasi-synthetic sequence derived from human genome
QLMKTIIRKINKMKTLKRKKLLNQIL

SEQ ID NO: 18227 - protein, 26 aa, Artificial Sequence
  Quasi-synthetic sequence derived from human genome
SIKTKQIRQRIIKKFQFIKSLRCFWK

SEQ ID NO: 18228 - protein, 26 aa, Artificial Sequence
  Quasi-synthetic sequence derived from human genome
NSKLREAFLKMLRFVKCFLRRRKPFV

SEQ ID NO: 18229 - protein, 26 aa, Artificial Sequence
  Quasi-synthetic sequence derived from human genome
WNIRAFMAVKNWPWMRLFFKIKPLVK

SEQ ID NO: 18230 - protein, 26 aa, Artificial Sequence
  Quasi-synthetic sequence derived from human genome
ALLRLFRMLRIFKLGKYWPTFQILMW

SEQ ID NO: 18231 - protein, 26 aa, Artificial Sequence
  Quasi-synthetic sequence derived from human genome
VLPSIVILGKIILFLPCISRKLKRIK

SEQ ID NO: 18232 - protein, 26 aa, Artificial Sequence
  Quasi-synthetic sequence derived from human genome
RLLLVHGRWSYIRMCKFLRYFFYKNF

SEQ ID NO: 18233 - protein, 26 aa, Artificial Sequence
  Quasi-synthetic sequence derived from human genome
MGFVRQIQLLLWKNWTLRKRQKIRFV

SEQ ID NO: 18234 - protein, 26 aa, Artificial Sequence
  Quasi-synthetic sequence derived from human genome
RKGVWLRLRKILFCVLGLYIAIPFLI

SEQ ID NO: 18235 - protein, 26 aa, Artificial Sequence
  Quasi-synthetic sequence derived from human genome
GKVVQILRLMRIFRILKLARHSVGLR

SEQ ID NO: 18236 - protein, 26 aa, Artificial Sequence
  Quasi-synthetic sequence derived from human genome
LFFRRPKASLPRVFVLRALLMVLVFL

SEQ ID NO: 18237 - protein, 26 aa, Artificial Sequence
  Quasi-synthetic sequence derived from human genome
LQRLLLVHGRWSYVRICKFLRYFFYK

SEQ ID NO: 18238 - protein, 26 aa, Artificial Sequence
  Quasi-synthetic sequence derived from human genome
LPRLCIRKFFPKKKCFVFDRPVHRRK

SEQ ID NO: 18239 - protein, 26 aa, Artificial Sequence
  Quasi-synthetic sequence derived from human genome
LFYGFLGKKFKRYFLQLLKYIPPKAK

SEQ ID NO: 18240 - protein, 26 aa, Artificial Sequence
  Quasi-synthetic sequence derived from human genome
RVRLQLKIILCFSPVGRTLRVRARKF

SEQ ID NO: 18241 - protein, 26 aa, Artificial Sequence
  Quasi-synthetic sequence derived from human genome
VLILKTIRRRLPFSKWRLAFRFAGPH

SEQ ID NO: 18242 - protein, 26 aa, Artificial Sequence
  Quasi-synthetic sequence derived from human genome
WTHLVRLLRLIILIRIFHLLHQKRQL

SEQ ID NO: 18243 - protein, 26 aa, Artificial Sequence
  Quasi-synthetic sequence derived from human genome
IIMRFRKRKNFKKKRIVTTPQTVLRI

SEQ ID NO: 18244 - protein, 26 aa, Artificial Sequence
  Quasi-synthetic sequence derived from human genome
KKSRKKMCILVLVLSVIILILGLIIW

SEQ ID NO: 18245 - protein, 26 aa, Artificial Sequence
  Quasi-synthetic sequence derived from human genome
RSFRRHIRQHSALTRLRLRNVFRRFL

SEQ ID NO: 18246 - protein, 26 aa, Artificial Sequence
  Quasi-synthetic sequence derived from human genome
KVRFLKLKKERKSLWTILLLFGISFI

SEQ ID NO: 18247 - protein, 26 aa, Artificial Sequence
  Quasi-synthetic sequence derived from human genome
AVFVAAGLFAYVLRRRRKKLPFRSKR

SEQ ID NO: 18248 - protein, 26 aa, Artificial Sequence
  Quasi-synthetic sequence derived from human genome
RYWRRWNRFCRRKCRAAVKSNVFYWL

SEQ ID NO: 18249 - protein, 26 aa, Artificial Sequence
  Quasi-synthetic sequence derived from human genome
RFIRVFIKTIRRDIFGGLVLLKVKAK

SEQ ID NO: 18250 - protein, 26 aa, Artificial Sequence
  Quasi-synthetic sequence derived from human genome
LKKKLLPWQRRGLLRAQGLRGWKARR

SEQ ID NO: 18251 - protein, 26 aa, Artificial Sequence
  Quasi-synthetic sequence derived from human genome
FILILGNKKLKQIFLSVLRHVRYWVK

SEQ ID NO: 18252 - protein, 26 aa, Artificial Sequence
  Quasi-synthetic sequence derived from human genome
TFFSGLIILLIFRLIWRSVKKWQIIK

SEQ ID NO: 18253 - protein, 26 aa, Artificial Sequence
  Quasi-synthetic sequence derived from human genome
VVFVAGIFLLVVVFVLCRKMISRKKK

SEQ ID NO: 18254 - protein, 26 aa, Artificial Sequence
  Quasi-synthetic sequence derived from human genome
ILGVVLLAIFVALFFLTKKRRQRQRL

SEQ ID NO: 18255 - protein, 26 aa, Artificial Sequence
  Quasi-synthetic sequence derived from human genome
KKNPKLINALRRCFFWRFMFYGIFLY

SEQ ID NO: 18256 - protein, 26 aa, Artificial Sequence
  Quasi-synthetic sequence derived from human genome
LGSLVLRRKALAPRLLLRLLRSPTLR

SEQ ID NO: 18257 - protein, 26 aa, Artificial Sequence
  Quasi-synthetic sequence derived from human genome
ARKQLMIYRLPQVLRLHLKRFRWSGR

SEQ ID NO: 18258 - protein, 26 aa, Artificial Sequence
  Quasi-synthetic sequence derived from human genome
WPRLIRKLRCYLKEMKNLRKLVFSRC

SEQ ID NO: 18259 - protein, 26 aa, Artificial Sequence
  Quasi-synthetic sequence derived from human genome
LLLLFVISITTIIVIFLNRRRRRERR

SEQ ID NO: 18260 - protein, 26 aa, Artificial Sequence
  Quasi-synthetic sequence derived from human genome
LRRNFMNIRPVKLKNLILLVKHWYRQ

SEQ ID NO: 18261 - protein, 26 aa, Artificial Sequence
  Quasi-synthetic sequence derived from human genome
YLSRCKRGKRHWKKLWFVIKGKVLYT

SEQ ID NO: 18262 - protein, 26 aa, Artificial Sequence
  Quasi-synthetic sequence derived from human genome
LVTISCILVGVLLLFVLLLVVRRRRR

SEQ ID NO: 18263 - protein, 26 aa, Artificial Sequence
  Quasi-synthetic sequence derived from human genome
SLCLLGRLLIYKQGRKLFPIKLKNKK

SEQ ID NO: 18264 - protein, 26 aa, Artificial Sequence
  Quasi-synthetic sequence derived from human genome
IVKQGYVKMKSRKLGIYRRCWLVFRK

SEQ ID NO: 18265 - protein, 26 aa, Artificial Sequence
  Quasi-synthetic sequence derived from human genome
RYLRVKLTVRYKRVTTHRRIWLALGL

SEQ ID NO: 18266 - protein, 26 aa, Artificial Sequence
  Quasi-synthetic sequence derived from human genome
VVWMMAGIPLLLFRWKPLWGVRLRLR

SEQ ID NO: 18267 - protein, 26 aa, Artificial Sequence
  Quasi-synthetic sequence derived from human genome
LLLLLLVLLLAAYFFRFRKQRKAVVS

SEQ ID NO: 18268 - protein, 26 aa, Artificial Sequence
  Quasi-synthetic sequence derived from human genome
YKNIVKKGYLLKKGKGKRWKNLYFIL

SEQ ID NO: 18269 - protein, 26 aa, Artificial Sequence
  Quasi-synthetic sequence derived from human genome
ALPINPTIIRIMRVLRIARVLKLLKM

SEQ ID NO: 18270 - protein, 26 aa, Artificial Sequence
  Quasi-synthetic sequence derived from human genome
LFLLAGLVAVALVVRKVKLRNLQKKR

SEQ ID NO: 18271 - protein, 26 aa, Artificial Sequence
  Quasi-synthetic sequence derived from human genome
RSRRISLRKKLKLPIGKRNWLKRSSL

SEQ ID NO: 18272 - protein, 26 aa, Artificial Sequence
  Quasi-synthetic sequence derived from human genome
LRALRLLRIFKITKYWASLRNLVVSL

SEQ ID NO: 18273 - protein, 26 aa, Artificial Sequence
  Quasi-synthetic sequence derived from human genome
FGFRRGRSFLLRSWHHLMKRVQIKIF

SEQ ID NO: 18274 - protein, 26 aa, Artificial Sequence
  Quasi-synthetic sequence derived from human genome
CVLQKRSWPFLRSFRVLRVFKLAKSW

SEQ ID NO: 18275 - protein, 26 aa, Artificial Sequence
  Quasi-synthetic sequence derived from human genome
ILRTLFRSRSKRRHRTVKLIFAIVVA

SEQ ID NO: 18276 - protein, 26 aa, Artificial Sequence
  Quasi-synthetic sequence derived from human genome
LVRGGWLWRQSSILRRWKRNWFALWL

SEQ ID NO: 18277 - protein, 26 aa, Artificial Sequence
  Quasi-synthetic sequence derived from human genome
KCIRAKIQDYHILTRKRIRYRFRRFI

SEQ ID NO: 18278 - protein, 26 aa, Artificial Sequence
  Quasi-synthetic sequence derived from human genome
KQRLKRLRNIHYLFNTALFLIAWRLL

SEQ ID NO: 18279 - protein, 26 aa, Artificial Sequence
  Quasi-synthetic sequence derived from human genome
KAIKYQSKARRKLMFIIICVIVLLVI

SEQ ID NO: 18280 - protein, 26 aa, Artificial Sequence
  Quasi-synthetic sequence derived from human genome
ISGYLKIRRSYALVSLSFFRKLRLIR

SEQ ID NO: 18281 - protein, 26 aa, Artificial Sequence
  Quasi-synthetic sequence derived from human genome
IMALLLLLLLLLLYKYKQKPKYQVRW

SEQ ID NO: 18282 - protein, 26 aa, Artificial Sequence
  Quasi-synthetic sequence derived from human genome
RKRLHFKLCKKSSILVHKLLDKLLVL

SEQ ID NO: 18283 - protein, 26 aa, Artificial Sequence
  Quasi-synthetic sequence derived from human genome
RFRKYLRHFFHRHLLMHLGRYIPFLP

SEQ ID NO: 18284 - protein, 26 aa, Artificial Sequence
  Quasi-synthetic sequence derived from human genome
LIAILACVLTLLVLILLIVTMRRRKK

SEQ ID NO: 18285 - protein, 26 aa, Artificial Sequence
  Quasi-synthetic sequence derived from human genome
RKYICTSFYPWVNILKISFKRKKFFI

SEQ ID NO: 18286 - protein, 26 aa, Artificial Sequence
  Quasi-synthetic sequence derived from human genome
KKKIKPTLPLRIFINVSRFFCVQLKK

SEQ ID NO: 18287 - protein, 26 aa, Artificial Sequence
  Quasi-synthetic sequence derived from human genome
PLAPRPRRRRSLRRLFSRFLLALGSR

SEQ ID NO: 18288 - protein, 26 aa, Artificial Sequence
  Quasi-synthetic sequence derived from human genome
RAFLLRRRFLHLKKAAIVFQKQLRGQ

SEQ ID NO: 18289 - protein, 26 aa, Artificial Sequence
  Quasi-synthetic sequence derived from human genome
KQKLLRHLVPAAALRRKRKALWAHLF

SEQ ID NO: 18290 - protein, 26 aa, Artificial Sequence
  Quasi-synthetic sequence derived from human genome
FLPKPRKLRNRHLRKPLVVQRTLLPR

SEQ ID NO: 18291 - protein, 26 aa, Artificial Sequence
  Quasi-synthetic sequence derived from human genome
RLLRRRHMPLRLAMVGCAFVLFLFLL

SEQ ID NO: 18292 - protein, 26 aa, Artificial Sequence
  Quasi-synthetic sequence derived from human genome
AVLVSILAGCLLNRRRAARRRRKRLR

SEQ ID NO: 18293 - protein, 26 aa, Artificial Sequence
  Quasi-synthetic sequence derived from human genome
FVALLWKRLLIARRSRKGFFAQIVLP

SEQ ID NO: 18294 - protein, 26 aa, Artificial Sequence
  Quasi-synthetic sequence derived from human genome
ILVAVILLLLLLLLLFLILRHRRQGK

SEQ ID NO: 18295 - protein, 26 aa, Artificial Sequence
  Quasi-synthetic sequence derived from human genome
KKTFKGLIRIFRKGVIAVLAANRLKI

SEQ ID NO: 18296 - protein, 26 aa, Artificial Sequence
  Quasi-synthetic sequence derived from human genome
RTAILGLWKIARKWMRRKMGKWPAVV

SEQ ID NO: 18297 - protein, 26 aa, Artificial Sequence
  Quasi-synthetic sequence derived from human genome
RLAIMMMKKREKYLYQKIMFGKRRKI

SEQ ID NO: 18298 - protein, 26 aa, Artificial Sequence
  Quasi-synthetic sequence derived from human genome
RLYCLKIHGLSSLWRLFRGKKWNVLR

SEQ ID NO: 18299 - protein, 26 aa, Artificial Sequence
  Quasi-synthetic sequence derived from human genome
PRWILQFRRWARKWSRFTRSSFQVRW

SEQ ID NO: 18300 - protein, 26 aa, Artificial Sequence
  Quasi-synthetic sequence derived from human genome
VFSAFALVRTIRYLYRRLQRMLGLRR

SEQ ID NO: 18301 - protein, 26 aa, Artificial Sequence
  Quasi-synthetic sequence derived from human genome
VVFIILVIGVCTCCHPLRKRRKRKKK

SEQ ID NO: 18302 - protein, 26 aa, Artificial Sequence
  Quasi-synthetic sequence derived from human genome
RKFWWKNVKMIVLICVIVFIIILFIV

SEQ ID NO: 18303 - protein, 26 aa, Artificial Sequence
  Quasi-synthetic sequence derived from human genome
LRIPRPLIMIRAFRIYFRFELPRTRI

SEQ ID NO: 18304 - protein, 26 aa, Artificial Sequence
  Quasi-synthetic sequence derived from human genome
RKHLNKLRNIRYGFNTILVILIWRIF

SEQ ID NO: 18305 - protein, 26 aa, Artificial Sequence
  Quasi-synthetic sequence derived from human genome
RKRMGLKMLMMMALLVPLVYTIKRHK

SEQ ID NO: 18306 - protein, 26 aa, Artificial Sequence
  Quasi-synthetic sequence derived from human genome
MKWRRKSAYWKALKVFKLPVEFLLLL

SEQ ID NO: 18307 - protein, 26 aa, Artificial Sequence
  Quasi-synthetic sequence derived from human genome
ILGGILALLILILLLLLFLRRRAVVK

SEQ ID NO: 18308 - protein, 26 aa, Artificial Sequence
  Quasi-synthetic sequence derived from human genome
IIQKYWRMYVVRRRYKIRRAATIVLQ

SEQ ID NO: 18309 - protein, 26 aa, Artificial Sequence
  Quasi-synthetic sequence derived from human genome
VKHLYNWNLPPRRILFIKRFIIYSIR

SEQ ID NO: 18310 - protein, 26 aa, Artificial Sequence
  Quasi-synthetic sequence derived from human genome
IFCLIVLSLSTFHIHKRRMKKRKMQR

SEQ ID NO: 18311 - protein, 26 aa, Artificial Sequence
  Quasi-synthetic sequence derived from human genome
LLKPIVKQIRRPKHVVVKFVVKFFPP

SEQ ID NO: 18312 - protein, 26 aa, Artificial Sequence
  Quasi-synthetic sequence derived from human genome
RRVFQAMWLSFLKHKLPLSLYKKVLL

SEQ ID NO: 18313 - protein, 26 aa, Artificial Sequence
  Quasi-synthetic sequence derived from human genome
IIRLMLKYQKILWKVPSFLITQVRRM

SEQ ID NO: 18314 - protein, 26 aa, Artificial Sequence
  Quasi-synthetic sequence derived from human genome
LLVLLLLAGGSLAFILLRVRRRRKSP

SEQ ID NO: 18315 - protein, 26 aa, Artificial Sequence
  Quasi-synthetic sequence derived from human genome
VLQRRKFLQMKRRKYGFIYKTHLFGR

SEQ ID NO: 18316 - protein, 26 aa, Artificial Sequence
  Quasi-synthetic sequence derived from human genome
FTRFRSAVRVSIAISRMKFLVRRWHR

SEQ ID NO: 18317 - protein, 26 aa, Artificial Sequence
  Quasi-synthetic sequence derived from human genome
MRRSLVKFRSLVHAYVSRRRYLKLRA

SEQ ID NO: 18318 - protein, 26 aa, Artificial Sequence
  Quasi-synthetic sequence derived from human genome
KLLERAGLVLRLLRALRVLYVMRLAR

SEQ ID NO: 18319 - protein, 26 aa, Artificial Sequence
  Quasi-synthetic sequence derived from human genome
LGLSRLLFFLLGFLRIRVRGQRASRL

SEQ ID NO: 18320 - protein, 26 aa, Artificial Sequence
  Quasi-synthetic sequence derived from human genome
VRLGLKKSVIYSSLKLHKMWKGWLRK

SEQ ID NO: 18321 - protein, 26 aa, Artificial Sequence
  Quasi-synthetic sequence derived from human genome
RRPRGSTARTLLRLLLRLLLFLGLLA

SEQ ID NO: 18322 - protein, 26 aa, Artificial Sequence
  Quasi-synthetic sequence derived from human genome
LFNPIIYSLRNKQIKVAIKKIMKRIF

SEQ ID NO: 18323 - protein, 26 aa, Artificial Sequence
  Quasi-synthetic sequence derived from human genome
LLRKLGVKLVQRLGLTFLKPKVAAWR

SEQ ID NO: 18324 - protein, 26 aa, Artificial Sequence
  Quasi-synthetic sequence derived from human genome
RKIPKLVLRINAIYEVRRGKKRVKRL

SEQ ID NO: 18325 - protein, 26 aa, Artificial Sequence
  Quasi-synthetic sequence derived from human genome
KRRPKRREIPLKVLVKAVLFACMLMR

SEQ ID NO: 18326 - protein, 26 aa, Artificial Sequence
  Quasi-synthetic sequence derived from human genome
LRILRKRNKALRKIRKLQKQGLLQVT

SEQ ID NO: 18327 - protein, 26 aa, Artificial Sequence
  Quasi-synthetic sequence derived from human genome
LLSIVILYCRIYSLVRTRSRRLTFRK

SEQ ID NO: 18328 - protein, 26 aa, Artificial Sequence
  Quasi-synthetic sequence derived from human genome
RLKKHRWYKKILKSRDPIIFSVGWRR

SEQ ID NO: 18329 - protein, 26 aa, Artificial Sequence
  Quasi-synthetic sequence derived from human genome
AKLLFTPQHKMLRLRLPNLKMVRLRV

SEQ ID NO: 18330 - protein, 26 aa, Artificial Sequence
  Quasi-synthetic sequence derived from human genome
LLIFILLLTLTILTIWLFKHRRARFL

SEQ ID NO: 18331 - protein, 26 aa, Artificial Sequence
  Quasi-synthetic sequence derived from human genome
YFTRLILFLFCLMVLVESRKPKRKRW

SEQ ID NO: 18332 - protein, 26 aa, Artificial Sequence
  Quasi-synthetic sequence derived from human genome
LKSFLILPFQRITRLKLLLQNILKRT

SEQ ID NO: 18333 - protein, 26 aa, Artificial Sequence
  Quasi-synthetic sequence derived from human genome
LLRRQMVRNFRKPLIVASPKMLLRLP

SEQ ID NO: 18334 - protein, 26 aa, Artificial Sequence
  Quasi-synthetic sequence derived from human genome
CAKALKKKKKMPKLRFASRIRKIRKK

SEQ ID NO: 18335 - protein, 26 aa, Artificial Sequence
  Quasi-synthetic sequence derived from human genome
LGRRKAAKRKWAAQTIRRLIRGFVLR

SEQ ID NO: 18336 - protein, 26 aa, Artificial Sequence
  Quasi-synthetic sequence derived from human genome
LRFSVVKRGRKKLLYIFKQPFMRPVQ

SEQ ID NO: 18337 - protein, 26 aa, Artificial Sequence
  Quasi-synthetic sequence derived from human genome
ILKRALKVKQAMLQLYVLKLLKLQTK

SEQ ID NO: 18338 - protein, 26 aa, Artificial Sequence
  Quasi-synthetic sequence derived from human genome
SLPINPTIIRIMRVLRIARVLKLLKM

SEQ ID NO: 18339 - protein, 26 aa, Artificial Sequence
  Quasi-synthetic sequence derived from human genome
KKRKWPLKGWHKRFFYLDKGILKYAK

SEQ ID NO: 18340 - protein, 26 aa, Artificial Sequence
  Quasi-synthetic sequence derived from human genome
KRRFILKTCGTTLLLKALVPLLKLAR

SEQ ID NO: 18341 - protein, 26 aa, Artificial Sequence
  Quasi-synthetic sequence derived from human genome
ALRRLLPPLLLLLLSLPPRARAKYVR

SEQ ID NO: 18342 - protein, 26 aa, Artificial Sequence
  Quasi-synthetic sequence derived from human genome
KIYYLPRRYKFMSRIDKQISRFRRWL

SEQ ID NO: 18343 - protein, 26 aa, Artificial Sequence
  Quasi-synthetic sequence derived from human genome
MRRKLKFFFMNPCEKFWARGRKPWKL

SEQ ID NO: 18344 - protein, 26 aa, Artificial Sequence
  Quasi-synthetic sequence derived from human genome
KTFYYKSRFWLLKLLFRVFTAPFHKV

SEQ ID NO: 18345 - protein, 26 aa, Artificial Sequence
  Quasi-synthetic sequence derived from human genome
IIYCCLNKRFRAGFKRAFRWCPFIKV

SEQ ID NO: 18346 - protein, 26 aa, Artificial Sequence
  Quasi-synthetic sequence derived from human genome
RKRQKIRFVVELVWPLSLFLVLIWLR

SEQ ID NO: 18347 - protein, 26 aa, Artificial Sequence
  Quasi-synthetic sequence derived from human genome
LRNFLKLLKPPLLWSHGLIRIIRAKA

SEQ ID NO: 18348 - protein, 26 aa, Artificial Sequence
  Quasi-synthetic sequence derived from human genome
MVRPHLLKKKILGRVWWLMPVVLALW

SEQ ID NO: 18349 - protein, 26 aa, Artificial Sequence
  Quasi-synthetic sequence derived from human genome
KILLRRPNEKKSKAVRLIFVIMIIFF

SEQ ID NO: 18350 - protein, 26 aa, Artificial Sequence
  Quasi-synthetic sequence derived from human genome
RRAKRIRNAALQHLFIRKSFRPFKCL

SEQ ID NO: 18351 - protein, 26 aa, Artificial Sequence
  Quasi-synthetic sequence derived from human genome
VFPRFIKIIEVKNKKLVELLRRKVRL

SEQ ID NO: 18352 - protein, 26 aa, Artificial Sequence
  Quasi-synthetic sequence derived from human genome
IFRGKKARRHLKMMHIAATLIQRRFR

SEQ ID NO: 18353 - protein, 26 aa, Artificial Sequence
  Quasi-synthetic sequence derived from human genome
ILVAVVLLLLLLLLLFLILRHRRQGK

SEQ ID NO: 18354 - protein, 26 aa, Artificial Sequence
  Quasi-synthetic sequence derived from human genome
LRALRLLRIFKVTKYWASLRNLVVSL

SEQ ID NO: 18355 - protein, 26 aa, Artificial Sequence
  Quasi-synthetic sequence derived from human genome
LRSFRLLRVFKLAKSWPTLNTLIKII

SEQ ID NO: 18356 - protein, 26 aa, Artificial Sequence
  Quasi-synthetic sequence derived from human genome
WNIRAFMGVKNWPWMKLYFKIKPLLK

SEQ ID NO: 18357 - protein, 26 aa, Artificial Sequence
  Quasi-synthetic sequence derived from human genome
LRGARAALLLLLPPRLLARPSLLLRR

SEQ ID NO: 18358 - protein, 26 aa, Artificial Sequence
  Quasi-synthetic sequence derived from human genome
AKIILALKVSRKNLLNVCKLIFKISR

SEQ ID NO: 18359 - protein, 26 aa, Artificial Sequence
  Quasi-synthetic sequence derived from human genome
MFITIVFCAAGIVVLVLHRRRRYKKK

SEQ ID NO: 18360 - protein, 26 aa, Artificial Sequence
  Quasi-synthetic sequence derived from human genome
KPARSKLSLIRKFRLFPRPQVKLFGK

SEQ ID NO: 18361 - protein, 26 aa, Artificial Sequence
  Quasi-synthetic sequence derived from human genome
ILGFCGLTALYFLIRAFRLKKPQRRR

SEQ ID NO: 18362 - protein, 26 aa, Artificial Sequence
  Quasi-synthetic sequence derived from human genome
RALMALKKRTKDKLFQFLKLRKYSIK

SEQ ID NO: 18363 - protein, 26 aa, Artificial Sequence
  Quasi-synthetic sequence derived from human genome
FRRYLSVFFRKHITKRFCKQCPVFYR

SEQ ID NO: 18364 - protein, 26 aa, Artificial Sequence
  Quasi-synthetic sequence derived from human genome
FFRRKLIDAVGFSPLRILRKRNKALR

SEQ ID NO: 18365 - protein, 26 aa, Artificial Sequence
  Quasi-synthetic sequence derived from human genome
VMYFWKRFCFWKATRSYLQYRGKKFK

SEQ ID NO: 18366 - protein, 26 aa, Artificial Sequence
  Quasi-synthetic sequence derived from human genome
RIANFNHPLFFLMKRKIIVLMPWLLR

SEQ ID NO: 18367 - protein, 26 aa, Artificial Sequence
  Quasi-synthetic sequence derived from human genome
RPLRNIFLKKPVFAKTVSIFIWFFLF

SEQ ID NO: 18368 - protein, 26 aa, Artificial Sequence
  Quasi-synthetic sequence derived from human genome
LKHLCRLKIRKCMGRLHLRCPVFMSF

SEQ ID NO: 18369 - protein, 26 aa, Artificial Sequence
  Quasi-synthetic sequence derived from human genome
RMNTFPWLKIVKISFKCKQFFIQLRK

SEQ ID NO: 18370 - protein, 26 aa, Artificial Sequence
  Quasi-synthetic sequence derived from human genome
TIILYFIPLRYIILIWGINKFTKKLR

SEQ ID NO: 18371 - protein, 26 aa, Artificial Sequence
  Quasi-synthetic sequence derived from human genome
RFLLGRLPWRVASGARRFRRWLNRYS

SEQ ID NO: 18372 - protein, 26 aa, Artificial Sequence
  Quasi-synthetic sequence derived from human genome
FVWFLNPLKSIKYLICTRYKWLIIKI

SEQ ID NO: 18373 - protein, 26 aa, Artificial Sequence
  Quasi-synthetic sequence derived from human genome
VSVAFVLLLFLLLFLLLRRQRHSKHR

SEQ ID NO: 18374 - protein, 26 aa, Artificial Sequence
  Quasi-synthetic sequence derived from human genome
WRRQIYAVATLRFLKLRRERRALLCL

SEQ ID NO: 18375 - protein, 26 aa, Artificial Sequence
  Quasi-synthetic sequence derived from human genome
LLIACLLLRVFRSGKRLKKTRKYDII

SEQ ID NO: 18376 - protein, 26 aa, Artificial Sequence
  Quasi-synthetic sequence derived from human genome
FLQLRGSGRKLWKRFFCFLRRSGLYY

SEQ ID NO: 18377 - protein, 26 aa, Artificial Sequence
  Quasi-synthetic sequence derived from human genome
IVLLGLIAFDRFLKIIRPLRNIFLKK

SEQ ID NO: 18378 - protein, 26 aa, Artificial Sequence
  Quasi-synthetic sequence derived from human genome
LYKSIKKELVVLRLASLLFKRFLSLR

SEQ ID NO: 18379 - protein, 26 aa, Artificial Sequence
  Quasi-synthetic sequence derived from human genome
AGLKLILKRYKIGASRKTFWKRKKIN

SEQ ID NO: 18380 - protein, 26 aa, Artificial Sequence
  Quasi-synthetic sequence derived from human genome
HRRIKLSPLMMYEKLSMIRFRYRILR

SEQ ID NO: 18381 - protein, 26 aa, Artificial Sequence
  Quasi-synthetic sequence derived from human genome
VRRILQRVPGKQRFGIYRFLPFFFVL

SEQ ID NO: 18382 - protein, 26 aa, Artificial Sequence
  Quasi-synthetic sequence derived from human genome
LGTFFIAFFLRKFRNSRFLGGKARRI

SEQ ID NO: 18383 - protein, 26 aa, Artificial Sequence
  Quasi-synthetic sequence derived from human genome
KKWGMLFLVNQLFKIYFKINKLHLCK

SEQ ID NO: 18384 - protein, 26 aa, Artificial Sequence
  Quasi-synthetic sequence derived from human genome
KGKKHVLHLWPKRLLLPRHLRVFSFT

SEQ ID NO: 18385 - protein, 26 aa, Artificial Sequence
  Quasi-synthetic sequence derived from human genome
RDLTRFVKWPRYIRLQRQRAILYKRL

SEQ ID NO: 18386 - protein, 26 aa, Artificial Sequence
  Quasi-synthetic sequence derived from human genome
PVFRLARRRKKILFYCHFPDLLLTKR

SEQ ID NO: 18387 - protein, 26 aa, Artificial Sequence
  Quasi-synthetic sequence derived from human genome
LKQGIPWKKIPLNALIRRFAHLLVKK

SEQ ID NO: 18388 - protein, 26 aa, Artificial Sequence
  Quasi-synthetic sequence derived from human genome
LMLIILVALLMLVFRSKREVKRQKYR

SEQ ID NO: 18389 - protein, 26 aa, Artificial Sequence
  Quasi-synthetic sequence derived from human genome
PRARRRRPLFALLLLCALLARLQVAL

SEQ ID NO: 18390 - protein, 26 aa, Artificial Sequence
  Quasi-synthetic sequence derived from human genome
RGYLVKMGGKIKSWKKRWFVFDRLKR

SEQ ID NO: 18391 - protein, 26 aa, Artificial Sequence
  Quasi-synthetic sequence derived from human genome
VFLFLILIRRALSASQKKKVIIAALR

SEQ ID NO: 18392 - protein, 26 aa, Artificial Sequence
  Quasi-synthetic sequence derived from human genome
ILAGILMLALLVFILWKCGFFKRNKK

SEQ ID NO: 18393 - protein, 26 aa, Artificial Sequence
  Quasi-synthetic sequence derived from human genome
KRIFWRQILLTLGLLGLFLYGLPKFR

SEQ ID NO: 18394 - protein, 26 aa, Artificial Sequence
  Quasi-synthetic sequence derived from human genome
ALAYCLALQLYVRRRKKLPSVLLFKK

SEQ ID NO: 18395 - protein, 26 aa, Artificial Sequence
  Quasi-synthetic sequence derived from human genome
LRAWIIQCWWRQVLEKLLAKRRRMVL

SEQ ID NO: 18396 - protein, 26 aa, Artificial Sequence
  Quasi-synthetic sequence derived from human genome
IRAFVKCTKARYLKKKNMRTLWINRI

SEQ ID NO: 18397 - protein, 26 aa, Artificial Sequence
  Quasi-synthetic sequence derived from human genome
IFLGLYINFRHLYKQRRRRYGQKKKK

SEQ ID NO: 18398 - protein, 26 aa, Artificial Sequence
  Quasi-synthetic sequence derived from human genome
TGWLRKSPPEKKLRRYAWKKRWFILR

SEQ ID NO: 18399 - protein, 26 aa, Artificial Sequence
  Quasi-synthetic sequence derived from human genome
FLLKLQKWTQKKEKGKKLSRMKLLLK

SEQ ID NO: 18400 - protein, 26 aa, Artificial Sequence
  Quasi-synthetic sequence derived from human genome
LVLQYFGPLCFIFICYFKIYIRLKRR

SEQ ID NO: 18401 - protein, 26 aa, Artificial Sequence
  Quasi-synthetic sequence derived from human genome
RWQRRLRRAARRQVLSGHLPFCRFRL

SEQ ID NO: 18402 - protein, 26 aa, Artificial Sequence
  Quasi-synthetic sequence derived from human genome
FIRPKLVTIIRSGVKPRKAVRILLNK

SEQ ID NO: 18403 - protein, 26 aa, Artificial Sequence
  Quasi-synthetic sequence derived from human genome
RIKARMSLKDWFAKRKKFKRPPQRLF

SEQ ID NO: 18404 - protein, 26 aa, Artificial Sequence
  Quasi-synthetic sequence derived from human genome
LFRATRKPLSGRTPRLVYKWFLLIYK

SEQ ID NO: 18405 - protein, 26 aa, Artificial Sequence
  Quasi-synthetic sequence derived from human genome
SCFHLYRAPYFWIKRRILLLIPKWLY

SEQ ID NO: 18406 - protein, 26 aa, Artificial Sequence
  Quasi-synthetic sequence derived from human genome
AGLSLLTLAPFLLWLRKCLRKAKKFV

SEQ ID NO: 18407 - protein, 26 aa, Artificial Sequence
  Quasi-synthetic sequence derived from human genome
RGKLLVHSLNLLAKQGLRLLRGLRRR

SEQ ID NO: 18408 - protein, 26 aa, Artificial Sequence
  Quasi-synthetic sequence derived from human genome
KKRMVVPAALKVVRLKPTRKFALLGR

SEQ ID NO: 18409 - protein, 26 aa, Artificial Sequence
  Quasi-synthetic sequence derived from human genome
LFLRLRSIRCLRNIIHWNLISAFILR

SEQ ID NO: 18410 - protein, 26 aa, Artificial Sequence
  Quasi-synthetic sequence derived from human genome
LGSAVLLFHFCIFHRRKMKAIRRSLK

SEQ ID NO: 18411 - protein, 26 aa, Artificial Sequence
  Quasi-synthetic sequence derived from human genome
RKLVKKTRFLRRKVQEGRLRRKQIKF

SEQ ID NO: 18412 - protein, 26 aa, Artificial Sequence
  Quasi-synthetic sequence derived from human genome
GFMIKRAQGRKRFGMKNFKKRWFRLT

SEQ ID NO: 18413 - protein, 26 aa, Artificial Sequence
  Quasi-synthetic sequence derived from human genome
LLRRVLVLMNSKHTFLALCALRFMRR

SEQ ID NO: 18414 - protein, 26 aa, Artificial Sequence
  Quasi-synthetic sequence derived from human genome
LSMIRFRYRILRSQHFRTKSKVCKLR

SEQ ID NO: 18415 - protein, 26 aa, Artificial Sequence
  Quasi-synthetic sequence derived from human genome
LWKSGIIKLFGVLRQRTGSLKILRLK

SEQ ID NO: 18416 - protein, 26 aa, Artificial Sequence
  Quasi-synthetic sequence derived from human genome
LIIHLKRFQFVNGRWIKSQKIVKFPR

SEQ ID NO: 18417 - protein, 26 aa, Artificial Sequence
  Quasi-synthetic sequence derived from human genome
LIEKVKRKKNVLRLCCKKLKIFAMPM

SEQ ID NO: 18418 - protein, 26 aa, Artificial Sequence
  Quasi-synthetic sequence derived from human genome
RARSFSRGRRKKKCKICKLRSFFRKL

SEQ ID NO: 18419 - protein, 26 aa, Artificial Sequence
  Quasi-synthetic sequence derived from human genome
TWYVKAFLALLRPFISSKFTRKIRFL

SEQ ID NO: 18420 - protein, 26 aa, Artificial Sequence
  Quasi-synthetic sequence derived from human genome
RKRFLGPLHPSFNLVKIIRSFLLKVL

SEQ ID NO: 18421 - protein, 26 aa, Artificial Sequence
  Quasi-synthetic sequence derived from human genome
LLRKRWFQLGRSMNPRARKKRSRIPL

SEQ ID NO: 18422 - protein, 26 aa, Artificial Sequence
  Quasi-synthetic sequence derived from human genome
CVVILAKALFLLPCISRRLARIRRGW

SEQ ID NO: 18423 - protein, 26 aa, Artificial Sequence
  Quasi-synthetic sequence derived from human genome
SVRTWWRWLTFWRRLQSAFLKNRSLR

SEQ ID NO: 18424 - protein, 26 aa, Artificial Sequence
  Quasi-synthetic sequence derived from human genome
ILLIAVLVYWRGCNKIKSKGFPRRFR

SEQ ID NO: 18425 - protein, 26 aa, Artificial Sequence
  Quasi-synthetic sequence derived from human genome
LFKKHFMALIFSAKRLKIIPFICMYF

SEQ ID NO: 18426 - protein, 26 aa, Artificial Sequence
  Quasi-synthetic sequence derived from human genome
ARRRRRACIALFLVLLFAFGTLMGLR

SEQ ID NO: 18427 - protein, 26 aa, Artificial Sequence
  Quasi-synthetic sequence derived from human genome
FMLKKRKWPLKGWHKRFFVLDNGMLK

SEQ ID NO: 18428 - protein, 26 aa, Artificial Sequence
  Quasi-synthetic sequence derived from human genome
LLIVLFILLCCLYRLCKKSKPIKKQQ

SEQ ID NO: 18429 - protein, 26 aa, Artificial Sequence
  Quasi-synthetic sequence derived from human genome
CMIKVFLSSLKFHIRRFIFLFFILVI

SEQ ID NO: 18430 - protein, 26 aa, Artificial Sequence
  Quasi-synthetic sequence derived from human genome
KKKKIVKYGMGGLIILFLIAIIWFPL

SEQ ID NO: 18431 - protein, 26 aa, Artificial Sequence
  Quasi-synthetic sequence derived from human genome
IPLVLLVVLVFAGMGIFAAFRKKKKK

SEQ ID NO: 18432 - protein, 26 aa, Artificial Sequence
  Quasi-synthetic sequence derived from human genome
QLLLWRLPNVLIVQLKRFSFRSFIWR

SEQ ID NO: 18433 - protein, 26 aa, Artificial Sequence
  Quasi-synthetic sequence derived from human genome
KKKVSIMVSVDGVKVILKKKKKLLLL

SEQ ID NO: 18434 - protein, 26 aa, Artificial Sequence
  Quasi-synthetic sequence derived from human genome
GWWWARAARLARLRFRRSLLPPQRPR

SEQ ID NO: 18435 - protein, 26 aa, Artificial Sequence
  Quasi-synthetic sequence derived from human genome
QKTARLFSKKIFCCLFFITLFFIRLL

SEQ ID NO: 18436 - protein, 26 aa, Artificial Sequence
  Quasi-synthetic sequence derived from human genome
LKRRILRVVAHCNKPKYKILLHGLWY

SEQ ID NO: 18437 - protein, 26 aa, Artificial Sequence
  Quasi-synthetic sequence derived from human genome
FGLKLRRTRRYNVLSKNCFVTRIRLL

SEQ ID NO: 18438 - protein, 26 aa, Artificial Sequence
  Quasi-synthetic sequence derived from human genome
RIGRILRLVRAARGIRTLLFALMMSL

SEQ ID NO: 18439 - protein, 26 aa, Artificial Sequence
  Quasi-synthetic sequence derived from human genome
LPFFCFLLGKCFKKGLKGKGFVLLVK

SEQ ID NO: 18440 - protein, 26 aa, Artificial Sequence
  Quasi-synthetic sequence derived from human genome
KCIAMKQGVIKSLKIKYRHCLIKKFL

SEQ ID NO: 18441 - protein, 26 aa, Artificial Sequence
  Quasi-synthetic sequence derived from human genome
RSLKQNIFLFYVKLRWLLKHWRQGKQ

SEQ ID NO: 18442 - protein, 26 aa, Artificial Sequence
  Quasi-synthetic sequence derived from human genome
VSWRRKKLYLLFAQHRYISRLFSVLI

SEQ ID NO: 18443 - protein, 26 aa, Artificial Sequence
  Quasi-synthetic sequence derived from human genome
AVMKLFNKAKVNVNLLIFLLNKKFLR

SEQ ID NO: 18444 - protein, 26 aa, Artificial Sequence
  Quasi-synthetic sequence derived from human genome
ILLVVAVFCILWNWNKRKKRQVPYLR

SEQ ID NO: 18445 - protein, 26 aa, Artificial Sequence
  Quasi-synthetic sequence derived from human genome
LFFACILVVLLAIFLYLLRLRRIHHR

SEQ ID NO: 18446 - protein, 26 aa, Artificial Sequence
  Quasi-synthetic sequence derived from human genome
KCLRKRIWEKIALRKKELFKVRPPWV

SEQ ID NO: 18447 - protein, 26 aa, Artificial Sequence
  Quasi-synthetic sequence derived from human genome
IRLVRVFRIFKLSRHSKGLQILGKTL

SEQ ID NO: 18448 - protein, 26 aa, Artificial Sequence
  Quasi-synthetic sequence derived from human genome
RKQLVLRRGLLLLGVFLILLAGVRWC

SEQ ID NO: 18449 - protein, 26 aa, Artificial Sequence
  Quasi-synthetic sequence derived from human genome
FFIYMISFIFRKRRKNSGLWSFYFFF

SEQ ID NO: 18450 - protein, 26 aa, Artificial Sequence
  Quasi-synthetic sequence derived from human genome
LRERLKTLRRPRVRDRLPILLQRRMR

SEQ ID NO: 18451 - protein, 26 aa, Artificial Sequence
  Quasi-synthetic sequence derived from human genome
KRIRKIKNVTNQIALLKLGKLPLLYK

SEQ ID NO: 18452 - protein, 26 aa, Artificial Sequence
  Quasi-synthetic sequence derived from human genome
LKLNQLKFRKKKLRFGRSRIHEWGLF

SEQ ID NO: 18453 - protein, 26 aa, Artificial Sequence
  Quasi-synthetic sequence derived from human genome
LLRICRVLRSLKLLAQFRQIQIIILV

SEQ ID NO: 18454 - protein, 26 aa, Artificial Sequence
  Quasi-synthetic sequence derived from human genome
LVTLITTLVIGLVLCKRKRRTKTIRR

SEQ ID NO: 18455 - protein, 26 aa, Artificial Sequence
  Quasi-synthetic sequence derived from human genome
FLIKMGGKIKTWKKRWFVFDRNKRTF

SEQ ID NO: 18456 - protein, 26 aa, Artificial Sequence
  Quasi-synthetic sequence derived from human genome
VLRRQILLPFRKPLIIFTPKSLLRHP

SEQ ID NO: 18457 - protein, 26 aa, Artificial Sequence
  Quasi-synthetic sequence derived from human genome
LVAALRAWMIQCWWRTLVQRRIRQRR

SEQ ID NO: 18458 - protein, 26 aa, Artificial Sequence
  Quasi-synthetic sequence derived from human genome
FVRILRIFKLTRHFVGLRVLGHTLRA

SEQ ID NO: 18459 - protein, 26 aa, Artificial Sequence
  Quasi-synthetic sequence derived from human genome
HIPFPPTLFRIVRLARIGRILRLVRA

SEQ ID NO: 18460 - protein, 26 aa, Artificial Sequence
  Quasi-synthetic sequence derived from human genome
WVLLALALLAWCRRSRGLKALRLCRA

SEQ ID NO: 18461 - protein, 26 aa, Artificial Sequence
  Quasi-synthetic sequence derived from human genome
PWMLLFKPLVLRRQYLRRKHLGTLNF

SEQ ID NO: 18462 - protein, 26 aa, Artificial Sequence
  Quasi-synthetic sequence derived from human genome
SRTVAKKLVVFRPRLFLLCFGIIFLI

SEQ ID NO: 18463 - protein, 26 aa, Artificial Sequence
  Quasi-synthetic sequence derived from human genome
LRLKRRVKSVILVVLLGPLLFLACHL

SEQ ID NO: 18464 - protein, 26 aa, Artificial Sequence
  Quasi-synthetic sequence derived from human genome
RRTMNIVPRTKVKTIKMFLILNLLFL

SEQ ID NO: 18465 - protein, 26 aa, Artificial Sequence
  Quasi-synthetic sequence derived from human genome
KKFLYIKSVFHTLRMAQRRHKRVRTW

SEQ ID NO: 18466 - protein, 26 aa, Artificial Sequence
  Quasi-synthetic sequence derived from human genome
YNIRAFMNVKHWPWMKLYFKIKPLLK

SEQ ID NO: 18467 - protein, 26 aa, Artificial Sequence
  Quasi-synthetic sequence derived from human genome
WLARRRFQSIRRFVLNIQLTYRVQRL

SEQ ID NO: 18468 - protein, 26 aa, Artificial Sequence
  Quasi-synthetic sequence derived from human genome
MCLVLLLLALILPLLFYLRKRNKTGK

SEQ ID NO: 18469 - protein, 26 aa, Artificial Sequence
  Quasi-synthetic sequence derived from human genome
RGFKAGRNMRRKLFGVLRLKCHSLFL

SEQ ID NO: 18470 - protein, 26 aa, Artificial Sequence
  Quasi-synthetic sequence derived from human genome
ILTITVITLLIFLRRRLRKQARAHGK

SEQ ID NO: 18471 - protein, 26 aa, Artificial Sequence
  Quasi-synthetic sequence derived from human genome
KIMKTRVCRRLRRANRVLRARCRRAV

SEQ ID NO: 18472 - protein, 26 aa, Artificial Sequence
  Quasi-synthetic sequence derived from human genome
IRFLPLFKIIVPILIRIADVQIKKRL

SEQ ID NO: 18473 - protein, 26 aa, Artificial Sequence
  Quasi-synthetic sequence derived from human genome
WFVNPLKTFVFFIWRRYWRTLVLLLL

SEQ ID NO: 18474 - protein, 26 aa, Artificial Sequence
  Quasi-synthetic sequence derived from human genome
AALALLVLILLCLLIYYCRRRCLKPR

SEQ ID NO: 18475 - protein, 26 aa, Artificial Sequence
  Quasi-synthetic sequence derived from human genome
VLKRLFMSRTNRPPLSLSRMIRKMKL

SEQ ID NO: 18476 - protein, 26 aa, Artificial Sequence
  Quasi-synthetic sequence derived from human genome
RVPKKLKKPAKPLLSKIKLRNHCKRL

SEQ ID NO: 18477 - protein, 26 aa, Artificial Sequence
  Quasi-synthetic sequence derived from human genome
RIYGKFLGLRAFIRKQINNIFLRFVY

SEQ ID NO: 18478 - protein, 26 aa, Artificial Sequence
  Quasi-synthetic sequence derived from human genome
FLGKKYRKYYYKSPKPLLRPFLCRIC

SEQ ID NO: 18479 - protein, 26 aa, Artificial Sequence
  Quasi-synthetic sequence derived from human genome
RRILSLLMELKVAAQKNFILKRLFWK

SEQ ID NO: 18480 - protein, 26 aa, Artificial Sequence
  Quasi-synthetic sequence derived from human genome
FSCKNHKKAKAIKLILLVVIVFFLFW

SEQ ID NO: 18481 - protein, 26 aa, Artificial Sequence
  Quasi-synthetic sequence derived from human genome
ARLFRIKCVTRIQAYWRGCVVRKWYR

SEQ ID NO: 18482 - protein, 26 aa, Artificial Sequence
  Quasi-synthetic sequence derived from human genome
LILFMFRRLRQFRQAQPTPQYRFRKR

SEQ ID NO: 18483 - protein, 26 aa, Artificial Sequence
  Quasi-synthetic sequence derived from human genome
PRRPAGSRLRLLLLLLLPPLLLLLRG

SEQ ID NO: 18484 - protein, 26 aa, Artificial Sequence
  Quasi-synthetic sequence derived from human genome
LYPLLIKKHWLWTRKCFVCKMYTARW

SEQ ID NO: 18485 - protein, 26 aa, Artificial Sequence
  Quasi-synthetic sequence derived from human genome
VRRFLVTLRIRRACGPPRVRVFVVHI

SEQ ID NO: 18486 - protein, 26 aa, Artificial Sequence
  Quasi-synthetic sequence derived from human genome
WRLPRISARAPYRLRRLRRHTYWPPR

SEQ ID NO: 18487 - protein, 26 aa, Artificial Sequence
  Quasi-synthetic sequence derived from human genome
WRFLRIVCKTARRDLFGLSVLIRVRL

SEQ ID NO: 18488 - protein, 26 aa, Artificial Sequence
  Quasi-synthetic sequence derived from human genome
FLLLILLCMSLLLFQVIRLYQRRRWM

SEQ ID NO: 18489 - protein, 26 aa, Artificial Sequence
  Quasi-synthetic sequence derived from human genome
KLLKYYVLNALKHRPPKAQKKRYLFR

SEQ ID NO: 18490 - protein, 26 aa, Artificial Sequence
  Quasi-synthetic sequence derived from human genome
RLRLKKIFSGVFVKVTPQNLKMLRIV

SEQ ID NO: 18491 - protein, 26 aa, Artificial Sequence
  Quasi-synthetic sequence derived from human genome
KMRRYKLFLMFCMAGLCLISFLHFFK

SEQ ID NO: 18492 - protein, 26 aa, Artificial Sequence
  Quasi-synthetic sequence derived from human genome
FQLWFHFKRYRYRRPGPCWRPIRHCR

SEQ ID NO: 18493 - protein, 26 aa, Artificial Sequence
  Quasi-synthetic sequence derived from human genome
TSRIVLWGFRWLIFRIMLGAGLIKIR

SEQ ID NO: 18494 - protein, 26 aa, Artificial Sequence
  Quasi-synthetic sequence derived from human genome
RKGIVRVVFFPFFFRWWLQVTSKVIF

SEQ ID NO: 18495 - protein, 26 aa, Artificial Sequence
  Quasi-synthetic sequence derived from human genome
RALHIRKLLLTLPRSVLIVMRYLFAF

SEQ ID NO: 18496 - protein, 26 aa, Artificial Sequence
  Quasi-synthetic sequence derived from human genome
LASLILCTRSIVLALRLRKRFLNFFL

SEQ ID NO: 18497 - protein, 26 aa, Artificial Sequence
  Quasi-synthetic sequence derived from human genome
KVFVKIKASHALKKKILRFRSGSLKV

SEQ ID NO: 18498 - protein, 26 aa, Artificial Sequence
  Quasi-synthetic sequence derived from human genome
RPALILILKRLDRMFNKIHKMPTLRR

SEQ ID NO: 18499 - protein, 26 aa, Artificial Sequence
  Quasi-synthetic sequence derived from human genome
LRKLRNVSNLKPVPLIGPKLKRRWPI

SEQ ID NO: 18500 - protein, 26 aa, Artificial Sequence
  Quasi-synthetic sequence derived from human genome
RYLRRRLVPRYRLQLLGIACMVICTR

SEQ ID NO: 18501 - protein, 26 aa, Artificial Sequence
  Quasi-synthetic sequence derived from human genome
LSVLAMFFLLVLILSSVFLFRLFKRR

SEQ ID NO: 18502 - protein, 26 aa, Artificial Sequence
  Quasi-synthetic sequence derived from human genome
IVKQGYVRIRSRRLGIYQRCWLVFKK

SEQ ID NO: 18503 - protein, 26 aa, Artificial Sequence
  Quasi-synthetic sequence derived from human genome
VRAYIRHLNRIVTIIQKWWRSFLGRK

SEQ ID NO: 18504 - protein, 26 aa, Artificial Sequence
  Quasi-synthetic sequence derived from human genome
FKRSYNYKTIVKKILAKLKRARSKKL

SEQ ID NO: 18505 - protein, 26 aa, Artificial Sequence
  Quasi-synthetic sequence derived from human genome
LHSKAKYKKVQLVRLVGMMLLIFARK

SEQ ID NO: 18506 - protein, 26 aa, Artificial Sequence
  Quasi-synthetic sequence derived from human genome
LQLLLAKVMRFERFGRRRVIIKKGQK

SEQ ID NO: 18507 - protein, 26 aa, Artificial Sequence
  Quasi-synthetic sequence derived from human genome
FLWFTNPCKTMKFIVWRRFKWVIIGL

SEQ ID NO: 18508 - protein, 26 aa, Artificial Sequence
  Quasi-synthetic sequence derived from human genome
LKVLKKYPRLWCMTKPPSRRPKLYIV

SEQ ID NO: 18509 - protein, 26 aa, Artificial Sequence
  Quasi-synthetic sequence derived from human genome
ILRRKLYIHRVTLRKLLPGVQYVYRC

SEQ ID NO: 18510 - protein, 26 aa, Artificial Sequence
  Quasi-synthetic sequence derived from human genome
LGFILICYLKIVICLRRRNAKVDKKK

SEQ ID NO: 18511 - protein, 26 aa, Artificial Sequence
  Quasi-synthetic sequence derived from human genome
WFKKLSQKRFKQLVERLLQFISLRLF

SEQ ID NO: 18512 - protein, 26 aa, Artificial Sequence
  Quasi-synthetic sequence derived from human genome
LTSTALLFLLFFLTLRFSVVKRGRKK

SEQ ID NO: 18513 - protein, 26 aa, Artificial Sequence
  Quasi-synthetic sequence derived from human genome
PLLLMILKPVQKLFAIIVGRGIRKWW

SEQ ID NO: 18514 - protein, 26 aa, Artificial Sequence
  Quasi-synthetic sequence derived from human genome
FGAMFAKTWRVHAIFKNVKMKKKIIK

SEQ ID NO: 18515 - protein, 26 aa, Artificial Sequence
  Quasi-synthetic sequence derived from human genome
LYRKVKLLNQVRLLRVQLCHMKNMFK

SEQ ID NO: 18516 - protein, 26 aa, Artificial Sequence
  Quasi-synthetic sequence derived from human genome
VAAVLKRRLLQPSRRVKRSRRRPLLP

SEQ ID NO: 18517 - protein, 26 aa, Artificial Sequence
  Quasi-synthetic sequence derived from human genome
VIILKKWFLKPYKGQTLPGRVLFLRY

SEQ ID NO: 18518 - protein, 26 aa, Artificial Sequence
  Quasi-synthetic sequence derived from human genome
KAFKIRKHYLHLRATVVSIQRRYRKL

SEQ ID NO: 18519 - protein, 26 aa, Artificial Sequence
  Quasi-synthetic sequence derived from human genome
LLLPKGVVLKLKPVATRFPRKAWRQK

SEQ ID NO: 18520 - protein, 26 aa, Artificial Sequence
  Quasi-synthetic sequence derived from human genome
IRLLHKQRLLFSCLLWLTFMYFFWKL

SEQ ID NO: 18521 - protein, 26 aa, Artificial Sequence
  Quasi-synthetic sequence derived from human genome
KLKNILLRIQQIIYCHKLTIILTKWR

SEQ ID NO: 18522 - protein, 26 aa, Artificial Sequence
  Quasi-synthetic sequence derived from human genome
MRKNMRVLSRTSKFRRRKQLLRRRKK

SEQ ID NO: 18523 - protein, 26 aa, Artificial Sequence
  Quasi-synthetic sequence derived from human genome
RRRQAGRRLRYLPTGSFPFLLLLLLL

SEQ ID NO: 18524 - protein, 26 aa, Artificial Sequence
  Quasi-synthetic sequence derived from human genome
LVYIKRRLAMCARKLGRIREAVKIMR

SEQ ID NO: 18525 - protein, 26 aa, Artificial Sequence
  Quasi-synthetic sequence derived from human genome
RYSFRLHIGRNIARPWKLIYYRAKKM

SEQ ID NO: 18526 - protein, 26 aa, Artificial Sequence
  Quasi-synthetic sequence derived from human genome
LRPAILVIPCLLLIKCHLKLYRTKLI

SEQ ID NO: 18527 - protein, 26 aa, Artificial Sequence
  Quasi-synthetic sequence derived from human genome
FVVLVLCLSFMLLFSLWRQSCRRRKL

SEQ ID NO: 18528 - protein, 26 aa, Artificial Sequence
  Quasi-synthetic sequence derived from human genome
RIRKFFRGSGRVLAFIFVASVIWLLF

SEQ ID NO: 18529 - protein, 26 aa, Artificial Sequence
  Quasi-synthetic sequence derived from human genome
ILYNLISKKYRAAAFKLLLARKSRPR

SEQ ID NO: 18530 - protein, 26 aa, Artificial Sequence
  Quasi-synthetic sequence derived from human genome
RRRLRLGPRGLPLLLSGLLLPLCRAF

SEQ ID NO: 18531 - protein, 26 aa, Artificial Sequence
  Quasi-synthetic sequence derived from human genome
HKFLQLRFWGWWKLYNKVKPLLNVAR

SEQ ID NO: 18532 - protein, 26 aa, Artificial Sequence
  Quasi-synthetic sequence derived from human genome
KTKKGRSIPVWIKILLFVVVAVFLFL

SEQ ID NO: 18533 - protein, 26 aa, Artificial Sequence
  Quasi-synthetic sequence derived from human genome
IFLTNKKGFPVLSKMHQRLIFRLLKL

SEQ ID NO: 18534 - protein, 26 aa, Artificial Sequence
  Quasi-synthetic sequence derived from human genome
VPLFCWLRATFWLLATKRRKQQLVLR

SEQ ID NO: 18535 - protein, 26 aa, Artificial Sequence
  Quasi-synthetic sequence derived from human genome
KFMVLLWKNFILKRRRCIALVVEMVL

SEQ ID NO: 18536 - protein, 26 aa, Artificial Sequence
  Quasi-synthetic sequence derived from human genome
LSCLLLPAARLARQYLLPLLRRLARR

SEQ ID NO: 18537 - protein, 26 aa, Artificial Sequence
  Quasi-synthetic sequence derived from human genome
KLAKRLKPLKVRRIKSEKLHLKDFRI

SEQ ID NO: 18538 - protein, 26 aa, Artificial Sequence
  Quasi-synthetic sequence derived from human genome
KKAMSCHRSQLLWFRRLYIIFSRYMR

SEQ ID NO: 18539 - protein, 26 aa, Artificial Sequence
  Quasi-synthetic sequence derived from human genome
KVGLVLRVLRALRILYVMRLARHSLG

SEQ ID NO: 18540 - protein, 26 aa, Artificial Sequence
  Quasi-synthetic sequence derived from human genome
KQKARRLTILLLLAFYVCFLPFHILR

SEQ ID NO: 18541 - protein, 26 aa, Artificial Sequence
  Quasi-synthetic sequence derived from human genome
GKAFLRLKRKFIQMRRPFLERRDLII

SEQ ID NO: 18542 - protein, 26 aa, Artificial Sequence
  Quasi-synthetic sequence derived from human genome
KLKKYTKFLFVRDPFVRLISAFRSKF

SEQ ID NO: 18543 - protein, 26 aa, Artificial Sequence
  Quasi-synthetic sequence derived from human genome
TNVLIFFWCLAFLWGLLILLKYRWRK

SEQ ID NO: 18544 - protein, 26 aa, Artificial Sequence
  Quasi-synthetic sequence derived from human genome
RLRHPRTRWKNWWVRGILTLAMIAFF

SEQ ID NO: 18545 - protein, 26 aa, Artificial Sequence
  Quasi-synthetic sequence derived from human genome
ITAQRINSANFLKKVRRLIMKRIVKI

SEQ ID NO: 18546 - protein, 26 aa, Artificial Sequence
  Quasi-synthetic sequence derived from human genome
KRMVSWSFHKLKTMKHLLLLLLCVFL

SEQ ID NO: 18547 - protein, 26 aa, Artificial Sequence
  Quasi-synthetic sequence derived from human genome
LSIFYLLKIVNFSRLIFHHLKRKAKS

SEQ ID NO: 18548 - protein, 26 aa, Artificial Sequence
  Quasi-synthetic sequence derived from human genome
ILLFLAAMLFVLMNWYYRTVHKRKLK

SEQ ID NO: 18549 - protein, 26 aa, Artificial Sequence
  Quasi-synthetic sequence derived from human genome
RRLRRLAHLVLFCPFSKRLQGRLPGL

SEQ ID NO: 18550 - protein, 26 aa, Artificial Sequence
  Quasi-synthetic sequence derived from human genome
AIILLMSMAFLTCCLLKCVKKSKRRR

SEQ ID NO: 18551 - protein, 26 aa, Artificial Sequence
  Quasi-synthetic sequence derived from human genome
RALHIRKVLLVLPKTTLIIMRYLFAF

SEQ ID NO: 18552 - protein, 26 aa, Artificial Sequence
  Quasi-synthetic sequence derived from human genome
LAMVYRYCCKINKKLKSITMLRKKIV

SEQ ID NO: 18553 - protein, 26 aa, Artificial Sequence
  Quasi-synthetic sequence derived from human genome
RPGLRRQWKCVQRRCLRHLAHRLRRR

SEQ ID NO: 18554 - protein, 26 aa, Artificial Sequence
  Quasi-synthetic sequence derived from human genome
MIFVNWKELIMCNIKLLKALRVRKKM

SEQ ID NO: 18555 - protein, 26 aa, Artificial Sequence
  Quasi-synthetic sequence derived from human genome
YRTGVRLRGAILTMAFKKILKLKNIK

SEQ ID NO: 18556 - protein, 26 aa, Artificial Sequence
  Quasi-synthetic sequence derived from human genome
WRRAPLRRGVGSSPRARRLMRPLWLL

SEQ ID NO: 18557 - protein, 26 aa, Artificial Sequence
  Quasi-synthetic sequence derived from human genome
RFRSLKMWFVFRMYGVKGLQAYIRKH

SEQ ID NO: 18558 - protein, 26 aa, Artificial Sequence
  Quasi-synthetic sequence derived from human genome
FKIVWSLRRRQQLARQARMKKATRFI

SEQ ID NO: 18559 - protein, 26 aa, Artificial Sequence
  Quasi-synthetic sequence derived from human genome
LRVVVALTLLRFRLSVDRTRKVRRKP

SEQ ID NO: 18560 - protein, 26 aa, Artificial Sequence
  Quasi-synthetic sequence derived from human genome
MRPFLKRAILVLSYVLVILYFRLWIM

SEQ ID NO: 18561 - protein, 26 aa, Artificial Sequence
  Quasi-synthetic sequence derived from human genome
ILPIKTVNRKFFGFKFPGLRVLTYRK

SEQ ID NO: 18562 - protein, 26 aa, Artificial Sequence
  Quasi-synthetic sequence derived from human genome
LRRFREMKPRVLQRWSRQILRGLHFL

SEQ ID NO: 18563 - protein, 26 aa, Artificial Sequence
  Quasi-synthetic sequence derived from human genome
IFLILEKLKIITYRNLFKKVYLLLKT

SEQ ID NO: 18564 - protein, 26 aa, Artificial Sequence
  Quasi-synthetic sequence derived from human genome
LQQHKLLKVIRKKLVRKTLDMIKKIA

SEQ ID NO: 18565 - protein, 26 aa, Artificial Sequence
  Quasi-synthetic sequence derived from human genome
KFRCKVVDCLKFFRKAKLLHYHMKYF

SEQ ID NO: 18566 - protein, 26 aa, Artificial Sequence
  Quasi-synthetic sequence derived from human genome
KWKHSRTMMLVVFKSAPILKRALKVK

SEQ ID NO: 18567 - protein, 26 aa, Artificial Sequence
  Quasi-synthetic sequence derived from human genome
IVLFCLFIFVLIYVRVFRKSRRSLNS

SEQ ID NO: 18568 - protein, 26 aa, Artificial Sequence
  Quasi-synthetic sequence derived from human genome
RRVLLVMSKAKRKWVSVRPLPSIRNF

SEQ ID NO: 18569 - protein, 26 aa, Artificial Sequence
  Quasi-synthetic sequence derived from human genome
FYFIVVLRPLQLLRLFKLKERYRNVL

SEQ ID NO: 18570 - protein, 26 aa, Artificial Sequence
  Quasi-synthetic sequence derived from human genome
SGWLRKSPPEKKLKRYAWKRRWFVLR

SEQ ID NO: 18571 - protein, 26 aa, Artificial Sequence
  Quasi-synthetic sequence derived from human genome
HRLLILWRILYKKTLWYQAQLNRRVP

SEQ ID NO: 18572 - protein, 26 aa, Artificial Sequence
  Quasi-synthetic sequence derived from human genome
IFFLIVFLLLLAILLFFAVKYLLRWK

SEQ ID NO: 18573 - protein, 26 aa, Artificial Sequence
  Quasi-synthetic sequence derived from human genome
FIKYTKLKKIFLQHNCIRHISRKAFF

SEQ ID NO: 18574 - protein, 26 aa, Artificial Sequence
  Quasi-synthetic sequence derived from human genome
AFVTLRVFRVFRIFKFSRHSQGLRIL

SEQ ID NO: 18575 - protein, 26 aa, Artificial Sequence
  Quasi-synthetic sequence derived from human genome
LKAAIRAVRILQFRLYKKKFKETLRP

SEQ ID NO: 18576 - protein, 26 aa, Artificial Sequence
  Quasi-synthetic sequence derived from human genome
FRLKKVQNIKMWLSLRSYLKRRGPQR

SEQ ID NO: 18577 - protein, 26 aa, Artificial Sequence
  Quasi-synthetic sequence derived from human genome
KWNSCVRRRKWIRYRRYKSRDIWAKI

SEQ ID NO: 18578 - protein, 26 aa, Artificial Sequence
  Quasi-synthetic sequence derived from human genome
KLKKVFQQHYTNKIRALRNRLIVLLL

SEQ ID NO: 18579 - protein, 26 aa, Artificial Sequence
  Quasi-synthetic sequence derived from human genome
MAWAALLGLLAALLLLLLLSRRRTRR

SEQ ID NO: 18580 - protein, 26 aa, Artificial Sequence
  Quasi-synthetic sequence derived from human genome
LRKINQVLLFLLIVTLCVILYKKVHK

SEQ ID NO: 18581 - protein, 26 aa, Artificial Sequence
  Quasi-synthetic sequence derived from human genome
RMRVKKLPMILALHLKRFKYMEQLHR

SEQ ID NO: 18582 - protein, 26 aa, Artificial Sequence
  Quasi-synthetic sequence derived from human genome
YRRLCLRLRLADCLVPYSRALYRRRR

SEQ ID NO: 18583 - protein, 26 aa, Artificial Sequence
  Quasi-synthetic sequence derived from human genome
FLNLVYKSLKADIVLRRVKAFVKRLL

SEQ ID NO: 18584 - protein, 26 aa, Artificial Sequence
  Quasi-synthetic sequence derived from human genome
KKKKKRYLRASSNRNFLLTMRPFLKR

SEQ ID NO: 18585 - protein, 26 aa, Artificial Sequence
  Quasi-synthetic sequence derived from human genome
RHIFLATLACLCPVWRRRRKRPAFSR

SEQ ID NO: 18586 - protein, 26 aa, Artificial Sequence
  Quasi-synthetic sequence derived from human genome
LLKVAVLLLLSYVLLRCRHAVRQRFL

SEQ ID NO: 18587 - protein, 26 aa, Artificial Sequence
  Quasi-synthetic sequence derived from human genome
LKRPARLPCSHIFCKKCILRWLARQK

SEQ ID NO: 18588 - protein, 26 aa, Artificial Sequence
  Quasi-synthetic sequence derived from human genome
LRRKVLWCLQYIGLGFFCCKQKTRLR

SEQ ID NO: 18589 - protein, 26 aa, Artificial Sequence
  Quasi-synthetic sequence derived from human genome
LCLLLAVYFIARKIRKKRLENRKSVV

SEQ ID NO: 18590 - protein, 26 aa, Artificial Sequence
  Quasi-synthetic sequence derived from human genome
KYVLARRRLVKVINNRAKLLSLCSFI

SEQ ID NO: 18591 - protein, 26 aa, Artificial Sequence
  Quasi-synthetic sequence derived from human genome
RRLRKNLRALVVVHATWYVKAFLALL

SEQ ID NO: 18592 - protein, 26 aa, Artificial Sequence
  Quasi-synthetic sequence derived from human genome
VFKLGLAKSIHHARVLIRQRHIRVRK

SEQ ID NO: 18593 - protein, 26 aa, Artificial Sequence
  Quasi-synthetic sequence derived from human genome
SLLQKPRHRCRKRKPLLAIGFYLYRM

SEQ ID NO: 18594 - protein, 26 aa, Artificial Sequence
  Quasi-synthetic sequence derived from human genome
RKHAVAVIWAYWLGLKVRREYRKFFR

SEQ ID NO: 18595 - protein, 26 aa, Artificial Sequence
  Quasi-synthetic sequence derived from human genome
LKIANFSNLLFLHLKRRVRSVILVIL

SEQ ID NO: 18596 - protein, 26 aa, Artificial Sequence
  Quasi-synthetic sequence derived from human genome
KALLRLVSAVNRRRMKLLLGIALLAY

SEQ ID NO: 18597 - protein, 26 aa, Artificial Sequence
  Quasi-synthetic sequence derived from human genome
FAIFVLLTITTLYCCRRRKQWKNKKR

SEQ ID NO: 18598 - protein, 26 aa, Artificial Sequence
  Quasi-synthetic sequence derived from human genome
KIPLPRFKLKCIFCKKRRKRTAGCCV

SEQ ID NO: 18599 - protein, 26 aa, Artificial Sequence
  Quasi-synthetic sequence derived from human genome
ILFMVSGICIVFGFIILLLLVLRKRR

SEQ ID NO: 18600 - protein, 26 aa, Artificial Sequence
  Quasi-synthetic sequence derived from human genome
LVLHFRHKVLILFKLILLEKKVLFYI

SEQ ID NO: 18601 - protein, 26 aa, Artificial Sequence
  Quasi-synthetic sequence derived from human genome
FIVLILVGYISVKVMLKSIKTRLGRR

SEQ ID NO: 18602 - protein, 26 aa, Artificial Sequence
  Quasi-synthetic sequence derived from human genome
RVIRLVRVFRIFKLSRHSKGLQILGQ

SEQ ID NO: 18603 - protein, 26 aa, Artificial Sequence
  Quasi-synthetic sequence derived from human genome
KLKRKYWWKNCKMMIMLGAICAIIVV

SEQ ID NO: 18604 - protein, 26 aa, Artificial Sequence
  Quasi-synthetic sequence derived from human genome
KLIRMGPQERWLLRTKRLHWSRLLFL

SEQ ID NO: 18605 - protein, 26 aa, Artificial Sequence
  Quasi-synthetic sequence derived from human genome
KFKKFAARKKWKQSVRLISLCQRLSR

SEQ ID NO: 18606 - protein, 26 aa, Artificial Sequence
  Quasi-synthetic sequence derived from human genome
LLVMLFLLKLARHSKFGMKGFVLFHK

SEQ ID NO: 18607 - protein, 26 aa, Artificial Sequence
  Quasi-synthetic sequence derived from human genome
RPFLAFCRRHVRAARPVPWNALLRRR

SEQ ID NO: 18608 - protein, 26 aa, Artificial Sequence
  Quasi-synthetic sequence derived from human genome
KRMVVPAALKVVRLKPTRKFAYLGRL

SEQ ID NO: 18609 - protein, 26 aa, Artificial Sequence
  Quasi-synthetic sequence derived from human genome
RYKPLRRRVIWLIGQWISVKFKSDLR

SEQ ID NO: 18610 - protein, 26 aa, Artificial Sequence
  Quasi-synthetic sequence derived from human genome
KIMVRRCLVTLRPFRLFVLGIGFFTL

SEQ ID NO: 18611 - protein, 26 aa, Artificial Sequence
  Quasi-synthetic sequence derived from human genome
LVRHKFNRLPRVLILHLKRYSFNVAL

SEQ ID NO: 18612 - protein, 26 aa, Artificial Sequence
  Quasi-synthetic sequence derived from human genome
LFVKRLRRKTYLSNMAKTMRMVLKSK

SEQ ID NO: 18613 - protein, 26 aa, Artificial Sequence
  Quasi-synthetic sequence derived from human genome
LNINLKRKFIKKRIIIISNYSKRNSL

SEQ ID NO: 18614 - protein, 26 aa, Artificial Sequence
  Quasi-synthetic sequence derived from human genome
RKRKISVCQQTWALLCKNFLKKWRMK

SEQ ID NO: 18615 - protein, 26 aa, Artificial Sequence
  Quasi-synthetic sequence derived from human genome
QKVFILFLTLWLLSLLKLLNVRRLFP

SEQ ID NO: 18616 - protein, 26 aa, Artificial Sequence
  Quasi-synthetic sequence derived from human genome
KLLIFLALALFLATVLYIVKKRLFPF

SEQ ID NO: 18617 - protein, 26 aa, Artificial Sequence
  Quasi-synthetic sequence derived from human genome
WRRYRAKKYLCKVKAACKIQAWYRCW

SEQ ID NO: 18618 - protein, 26 aa, Artificial Sequence
  Quasi-synthetic sequence derived from human genome
RFLRIMMLSVLRNTKTPVKFWLLKNY

SEQ ID NO: 18619 - protein, 26 aa, Artificial Sequence
  Quasi-synthetic sequence derived from human genome
LRRVKVLLVLNLIAVAGFVLFLAKCR

SEQ ID NO: 18620 - protein, 26 aa, Artificial Sequence
  Quasi-synthetic sequence derived from human genome
GGLFILVIVGLTFAVYVRRKSIKKKR

SEQ ID NO: 18621 - protein, 26 aa, Artificial Sequence
  Quasi-synthetic sequence derived from human genome
YLPLNTFLLKPIQRLLHYRLLLRRLC

SEQ ID NO: 18622 - protein, 26 aa, Artificial Sequence
  Quasi-synthetic sequence derived from human genome
NCWGVYQAVRWLRWKASLIKLRALRR

SEQ ID NO: 18623 - protein, 26 aa, Artificial Sequence
  Quasi-synthetic sequence derived from human genome
KKNRKMLVILILFVIIIVLIVVLVGV

SEQ ID NO: 18624 - protein, 26 aa, Artificial Sequence
  Quasi-synthetic sequence derived from human genome
RMRYKRTKAALTIIRYYRRYKVKSYI

SEQ ID NO: 18625 - protein, 26 aa, Artificial Sequence
  Quasi-synthetic sequence derived from human genome
SHLPMKLLRKKIEKRNLKLRQRNLKF

SEQ ID NO: 18626 - protein, 26 aa, Artificial Sequence
  Quasi-synthetic sequence derived from human genome
RAIPIKQGMLLKRSGKWLKTWKKKYV

SEQ ID NO: 18627 - protein, 26 aa, Artificial Sequence
  Quasi-synthetic sequence derived from human genome
FLWKVSVITLVSCLPLYVLKYLRRRF

SEQ ID NO: 18628 - protein, 26 aa, Artificial Sequence
  Quasi-synthetic sequence derived from human genome
RLLRSRAGSRKRPLTLLQRAGLLLLL

SEQ ID NO: 18629 - protein, 26 aa, Artificial Sequence
  Quasi-synthetic sequence derived from human genome
IFHPLLYAFTRQKFQKVLKSKMKKRV

SEQ ID NO: 18630 - protein, 26 aa, Artificial Sequence
  Quasi-synthetic sequence derived from human genome
TLKRQILILFNIILISKLLGARWFPK

SEQ ID NO: 18631 - protein, 26 aa, Artificial Sequence
  Quasi-synthetic sequence derived from human genome
LIFLHLKRRVKSVVLVILLGPLLFLV

SEQ ID NO: 18632 - protein, 26 aa, Artificial Sequence
  Quasi-synthetic sequence derived from human genome
VAAAGRALRGLSYRSLRRRVRRLRRL

SEQ ID NO: 18633 - protein, 26 aa, Artificial Sequence
  Quasi-synthetic sequence derived from human genome
RRFILSVIVFGSIVLLMLWLPIRIIK

SEQ ID NO: 18634 - protein, 26 aa, Artificial Sequence
  Quasi-synthetic sequence derived from human genome
FLLKAVKFRERVLQRGLVARIYYKVK

SEQ ID NO: 18635 - protein, 26 aa, Artificial Sequence
  Quasi-synthetic sequence derived from human genome
FFKYCLLRKSFTCWKKNVRLQGLHRL

SEQ ID NO: 18636 - protein, 26 aa, Artificial Sequence
  Quasi-synthetic sequence derived from human genome
MARRSRHRLLLLLLRYLVVALGYHKA

SEQ ID NO: 18637 - protein, 26 aa, Artificial Sequence
  Quasi-synthetic sequence derived from human genome
RIFRPWRLRCPALHLPSLSVFSLRWK

SEQ ID NO: 18638 - protein, 26 aa, Artificial Sequence
  Quasi-synthetic sequence derived from human genome
TLRVLRMMRIFWVIKLARHFIGLQTL

SEQ ID NO: 18639 - protein, 26 aa, Artificial Sequence
  Quasi-synthetic sequence derived from human genome
KSRKILRSMSRKVTTNKLLLSIIILL

SEQ ID NO: 18640 - protein, 26 aa, Artificial Sequence
  Quasi-synthetic sequence derived from human genome
KREKKRILFLYNDLLKKRAAFTKLRR

SEQ ID NO: 18641 - protein, 26 aa, Artificial Sequence
  Quasi-synthetic sequence derived from human genome
WRRDIFGRIIWHKFKQWVIPWHLNKR

SEQ ID NO: 18642 - protein, 26 aa, Artificial Sequence
  Quasi-synthetic sequence derived from human genome
WKPSPLIKPFGARKKRSWYLTWKYKL

SEQ ID NO: 18643 - protein, 26 aa, Artificial Sequence
  Quasi-synthetic sequence derived from human genome
TLRPSYWKFLLRLTKGKFAVMNRKVL

SEQ ID NO: 18644 - protein, 26 aa, Artificial Sequence
  Quasi-synthetic sequence derived from human genome
LWLYLKLLPYVLEKGSRRKVRVKVYF

SEQ ID NO: 18645 - protein, 26 aa, Artificial Sequence
  Quasi-synthetic sequence derived from human genome
NVYLIVILVSFGLFMYAKRNKRRIMR

SEQ ID NO: 18646 - protein, 26 aa, Artificial Sequence
  Quasi-synthetic sequence derived from human genome
RNRLAKTKKPFKIIVTIIITFFLCWC

SEQ ID NO: 18647 - protein, 26 aa, Artificial Sequence
  Quasi-synthetic sequence derived from human genome
RKILRLITIRKLFTAIGVLFPSVILV

SEQ ID NO: 18648 - protein, 26 aa, Artificial Sequence
  Quasi-synthetic sequence derived from human genome
KRKKRKAAKNLELTRLLPLRFVRISV

SEQ ID NO: 18649 - protein, 26 aa, Artificial Sequence
  Quasi-synthetic sequence derived from human genome
FYRLGGFRVCHKLIFMIIQKLFRSHK

SEQ ID NO: 18650 - protein, 26 aa, Artificial Sequence
  Quasi-synthetic sequence derived from human genome
RSSLRIRLFNFSLKLLTCLLYIVRVL

SEQ ID NO: 18651 - protein, 26 aa, Artificial Sequence
  Quasi-synthetic sequence derived from human genome
LLPRRRRCFPARAPLLRVALCLLCWT

SEQ ID NO: 18652 - protein, 26 aa, Artificial Sequence
  Quasi-synthetic sequence derived from human genome
KKTPWGKRGWKMFHTLLRGMVLYFLK

SEQ ID NO: 18653 - protein, 26 aa, Artificial Sequence
  Quasi-synthetic sequence derived from human genome
IKRKIPYILKRQLYENKPRRPYILKR

SEQ ID NO: 18654 - protein, 26 aa, Artificial Sequence
  Quasi-synthetic sequence derived from human genome
RFLLLFIGFVCVLLSFFMARVFMRMK

SEQ ID NO: 18655 - protein, 26 aa, Artificial Sequence
  Quasi-synthetic sequence derived from human genome
WVRMWCVRQRYCRLLNAVRIIQVYWR

SEQ ID NO: 18656 - protein, 26 aa, Artificial Sequence
  Quasi-synthetic sequence derived from human genome
RLNKAVWAKGIRNVPYRIRVRLSRKR

SEQ ID NO: 18657 - protein, 26 aa, Artificial Sequence
  Quasi-synthetic sequence derived from human genome
LCGRFSRISMKLPRIPLRRQKLPKVV

SEQ ID NO: 18658 - protein, 26 aa, Artificial Sequence
  Quasi-synthetic sequence derived from human genome
IRVRRAGYAYRRIFQKFLQRYAILTK

SEQ ID NO: 18659 - protein, 26 aa, Artificial Sequence
  Quasi-synthetic sequence derived from human genome
LLWVKQRRDLLHLCCKKLKILGMPFR

SEQ ID NO: 18660 - protein, 26 aa, Artificial Sequence
  Quasi-synthetic sequence derived from human genome
KLCRIKASKALKKKIRRFQPTALKVM

SEQ ID NO: 18661 - protein, 26 aa, Artificial Sequence
  Quasi-synthetic sequence derived from human genome
RMKVKKLPMILALHLKRFKYMDQLHR

SEQ ID NO: 18662 - protein, 26 aa, Artificial Sequence
  Quasi-synthetic sequence derived from human genome
PFLLLILLCMSLLLFQVIRLYQRRRW

SEQ ID NO: 18663 - protein, 26 aa, Artificial Sequence
  Quasi-synthetic sequence derived from human genome
IRIRGINGVSPKVRKVLQLLRLRQIF

SEQ ID NO: 18664 - protein, 26 aa, Artificial Sequence
  Quasi-synthetic sequence derived from human genome
TLWALSLLLGVARSLWMLLKLRQRLR

SEQ ID NO: 18665 - protein, 26 aa, Artificial Sequence
  Quasi-synthetic sequence derived from human genome
MYRYKYKLMRQIRMCKDLKHLIYYRF

SEQ ID NO: 18666 - protein, 26 aa, Artificial Sequence
  Quasi-synthetic sequence derived from human genome
GQRRWRHALHRRLLNRRLLLAVTPWV

SEQ ID NO: 18667 - protein, 26 aa, Artificial Sequence
  Quasi-synthetic sequence derived from human genome
KFIWNHGITLPLKNVRKRRFRKTAKK

SEQ ID NO: 18668 - protein, 26 aa, Artificial Sequence
  Quasi-synthetic sequence derived from human genome
RISRRLRRPPHVGRARRNSLRIIFAI

SEQ ID NO: 18669 - protein, 26 aa, Artificial Sequence
  Quasi-synthetic sequence derived from human genome
SKIKTFLSLVWKRRILFFVVTLVSVF

SEQ ID NO: 18670 - protein, 26 aa, Artificial Sequence
  Quasi-synthetic sequence derived from human genome
ILLLLALVAILWKLGFFKRKYEKMTK

SEQ ID NO: 18671 - protein, 26 aa, Artificial Sequence
  Quasi-synthetic sequence derived from human genome
LKLFLSRRRWQRSQISYKCHLVLRPI

SEQ ID NO: 18672 - protein, 26 aa, Artificial Sequence
  Quasi-synthetic sequence derived from human genome
FFKDKLKQLLHKHQRKSIFKIKKKSL

SEQ ID NO: 18673 - protein, 26 aa, Artificial Sequence
  Quasi-synthetic sequence derived from human genome
VVQFFRILRIFKLIAPKLLQIIDKRM

SEQ ID NO: 18674 - protein, 26 aa, Artificial Sequence
  Quasi-synthetic sequence derived from human genome
INKLIIYLFSQNNRIRFSKLLLKILF

SEQ ID NO: 18675 - protein, 26 aa, Artificial Sequence
  Quasi-synthetic sequence derived from human genome
KKQRLSKKLRRKLQMWLWSQTFCPVL

SEQ ID NO: 18676 - protein, 26 aa, Artificial Sequence
  Quasi-synthetic sequence derived from human genome
KVSSFTHHIFLWLRWRILRLFPWILL

SEQ ID NO: 18677 - protein, 26 aa, Artificial Sequence
  Quasi-synthetic sequence derived from human genome
LLLLIPNVLFLIFLLWKLPSARAKIR

SEQ ID NO: 18678 - protein, 26 aa, Artificial Sequence
  Quasi-synthetic sequence derived from human genome
ILLSHLQLFIKRVVLKTPAKRHKQLK

SEQ ID NO: 18679 - protein, 26 aa, Artificial Sequence
  Quasi-synthetic sequence derived from human genome
GWLVKSPPERKLQRYAWRKRWFVLRR

SEQ ID NO: 18680 - protein, 26 aa, Artificial Sequence
  Quasi-synthetic sequence derived from human genome
LKKKFSCCVLVFLLFAVICVWKEKKK

SEQ ID NO: 18681 - protein, 26 aa, Artificial Sequence
  Quasi-synthetic sequence derived from human genome
RKKAPHRLCGRFSRISMKLPRIPLRR

SEQ ID NO: 18682 - protein, 26 aa, Artificial Sequence
  Quasi-synthetic sequence derived from human genome
DIMPAVKTVIRSIRILKFLVAKRKFK

SEQ ID NO: 18683 - protein, 26 aa, Artificial Sequence
  Quasi-synthetic sequence derived from human genome
ARRHQRKLLAAINAFRQVRLKHRKLR

SEQ ID NO: 18684 - protein, 26 aa, Artificial Sequence
  Quasi-synthetic sequence derived from human genome
LQRRKKGLLLRPVAPLRTRPPLLISL

SEQ ID NO: 18685 - protein, 26 aa, Artificial Sequence
  Quasi-synthetic sequence derived from human genome
RCMWYRLRLLKPQPNIIPTVKKIVLL

SEQ ID NO: 18686 - protein, 26 aa, Artificial Sequence
  Quasi-synthetic sequence derived from human genome
KVIVVRNRRLGVLYRAVQLLILLYFV

SEQ ID NO: 18687 - protein, 26 aa, Artificial Sequence
  Quasi-synthetic sequence derived from human genome
RKKVNVKVFIIIAVFFICFVPFHFAR

SEQ ID NO: 18688 - protein, 26 aa, Artificial Sequence
  Quasi-synthetic sequence derived from human genome
LKASVCKPFLFLLKKKIPSPVKLAFI

SEQ ID NO: 18689 - protein, 26 aa, Artificial Sequence
  Quasi-synthetic sequence derived from human genome
IKRSRKIIFVITHHLLKDPLCKRFKV

SEQ ID NO: 18690 - protein, 26 aa, Artificial Sequence
  Quasi-synthetic sequence derived from human genome
ALLWRGRIPGRQWIGKHRRPRFVSLR

SEQ ID NO: 18691 - protein, 26 aa, Artificial Sequence
  Quasi-synthetic sequence derived from human genome
RMAKALGKRTAKYRWFAVLYLLVCFL

SEQ ID NO: 18692 - protein, 26 aa, Artificial Sequence
  Quasi-synthetic sequence derived from human genome
MVTAFSGLAFIIWLARRLKKGKKSKR

SEQ ID NO: 18693 - protein, 26 aa, Artificial Sequence
  Quasi-synthetic sequence derived from human genome
LLRTFMRSRPSRQRLRQRGILRQRVF

SEQ ID NO: 18694 - protein, 26 aa, Artificial Sequence
  Quasi-synthetic sequence derived from human genome
RFLRIMMLSVLKNTKTPVKFWFLKNY

SEQ ID NO: 18695 - protein, 26 aa, Artificial Sequence
  Quasi-synthetic sequence derived from human genome
FILIWGNKKLKQTFLSVLRQVRYWVK

SEQ ID NO: 18696 - protein, 26 aa, Artificial Sequence
  Quasi-synthetic sequence derived from human genome
ALALLAWCRRSRGLKALRLCRALALL

SEQ ID NO: 18697 - protein, 26 aa, Artificial Sequence
  Quasi-synthetic sequence derived from human genome
NYRKAIFIFIRWLLKLGHHGRAPPRR

SEQ ID NO: 18698 - protein, 26 aa, Artificial Sequence
  Quasi-synthetic sequence derived from human genome
KPFFRLQKFLRRTQFLLFFLTAAYLM

SEQ ID NO: 18699 - protein, 26 aa, Artificial Sequence
  Quasi-synthetic sequence derived from human genome
LKYLLLGRWRKKHLTFRILNLPSTLP

SEQ ID NO: 18700 - protein, 26 aa, Artificial Sequence
  Quasi-synthetic sequence derived from human genome
ARQRIIQFQARCRAYLVRKAFRHRLW

SEQ ID NO: 18701 - protein, 26 aa, Artificial Sequence
  Quasi-synthetic sequence derived from human genome
RRRRRLRRRPRGLRCSRLPPPPPLPL

SEQ ID NO: 18702 - protein, 26 aa, Artificial Sequence
  Quasi-synthetic sequence derived from human genome
FRLRRRDLLLGFNKRAIDKCWKIRHF

SEQ ID NO: 18703 - protein, 26 aa, Artificial Sequence
  Quasi-synthetic sequence derived from human genome
WLIYKHTKLLKKIDHAKVRKHQRKFL

SEQ ID NO: 18704 - protein, 26 aa, Artificial Sequence
  Quasi-synthetic sequence derived from human genome
ILKRALKVKQAMMQLYVLKLLKVQTK

SEQ ID NO: 18705 - protein, 26 aa, Artificial Sequence
  Quasi-synthetic sequence derived from human genome
LIAILACIFVLLVLVLLILSMRRHRK

SEQ ID NO: 18706 - protein, 26 aa, Artificial Sequence
  Quasi-synthetic sequence derived from human genome
KVASVRHPLFIWLKMRISKLVPWMIL

SEQ ID NO: 18707 - protein, 26 aa, Artificial Sequence
  Quasi-synthetic sequence derived from human genome
IIKIQAWARMWAARRQYLRRLHYFQK

SEQ ID NO: 18708 - protein, 26 aa, Artificial Sequence
  Quasi-synthetic sequence derived from human genome
IGGACWVILMGFSIWLYWRRKKRKGL

SEQ ID NO: 18709 - protein, 26 aa, Artificial Sequence
  Quasi-synthetic sequence derived from human genome
RTELKKKLFKRRRVLNRERRLRHRVV

SEQ ID NO: 18710 - protein, 26 aa, Artificial Sequence
  Quasi-synthetic sequence derived from human genome
IRYLLYRAQRAIRLRHALRLHPQLHR

SEQ ID NO: 18711 - protein, 26 aa, Artificial Sequence
  Quasi-synthetic sequence derived from human genome
AGLLLLGLIILLLWKCGFFKRARTRA

SEQ ID NO: 18712 - protein, 26 aa, Artificial Sequence
  Quasi-synthetic sequence derived from human genome
FKNLFYRTYMLFKNASGKRRFLLCLL

SEQ ID NO: 18713 - protein, 26 aa, Artificial Sequence
  Quasi-synthetic sequence derived from human genome
VWRRFKWVIIGLLFLLILLLFVAVLL

SEQ ID NO: 18714 - protein, 26 aa, Artificial Sequence
  Quasi-synthetic sequence derived from human genome
QQAMSLAILRVIRLVRVFRIFKLSRH

SEQ ID NO: 18715 - protein, 26 aa, Artificial Sequence
  Quasi-synthetic sequence derived from human genome
LRVKKKALTLQKGMVMAYKRKQLVIK

SEQ ID NO: 18716 - protein, 26 aa, Artificial Sequence
  Quasi-synthetic sequence derived from human genome
KRYLQKATKGKLLIIIFIVTLWGKVV

SEQ ID NO: 18717 - protein, 26 aa, Artificial Sequence
  Quasi-synthetic sequence derived from human genome
LKALKYLFRFIIQSRVLYLRFYGQSK

SEQ ID NO: 18718 - protein, 26 aa, Artificial Sequence
  Quasi-synthetic sequence derived from human genome
WVPIIKKKQKHRQKSNFLRSLKSFFL

SEQ ID NO: 18719 - protein, 26 aa, Artificial Sequence
  Quasi-synthetic sequence derived from human genome
RCIALRWVRLLGFAIVYGTIILKLYR

SEQ ID NO: 18720 - protein, 26 aa, Artificial Sequence
  Quasi-synthetic sequence derived from human genome
YKSRFLCGKEIKKKKCIFRLRIRVPP

SEQ ID NO: 18721 - protein, 26 aa, Artificial Sequence
  Quasi-synthetic sequence derived from human genome
ITRLSSPTRLAVIPWGVRKLLRWVRR

SEQ ID NO: 18722 - protein, 26 aa, Artificial Sequence
  Quasi-synthetic sequence derived from human genome
LLWVKQRKDLLHLCCKKLKILGMPFR

SEQ ID NO: 18723 - protein, 26 aa, Artificial Sequence
  Quasi-synthetic sequence derived from human genome
LIAILLCVLILLAIVVLFITLRRSKK

SEQ ID NO: 18724 - protein, 26 aa, Artificial Sequence
  Quasi-synthetic sequence derived from human genome
MARGSLRRLLRLLVLGLWLALLRSVA

SEQ ID NO: 18725 - protein, 26 aa, Artificial Sequence
  Quasi-synthetic sequence derived from human genome
LLAKIYKMPLKPIFLSGRLAGLPRRL

SEQ ID NO: 18726 - protein, 26 aa, Artificial Sequence
  Quasi-synthetic sequence derived from human genome
WYRMHKELRKYIYIRSCVVIIQKRFR

SEQ ID NO: 18727 - protein, 26 aa, Artificial Sequence
  Quasi-synthetic sequence derived from human genome
RSRLLLLLCIFLGTLRGFRARQIRYS

SEQ ID NO: 18728 - protein, 26 aa, Artificial Sequence
  Quasi-synthetic sequence derived from human genome
ALLFAFFVWLFVCPWMRRKITGKLQK

SEQ ID NO: 18729 - protein, 26 aa, Artificial Sequence
  Quasi-synthetic sequence derived from human genome
LYLRYRPKVKFLFGIWPVILFEPLRK

SEQ ID NO: 18730 - protein, 26 aa, Artificial Sequence
  Quasi-synthetic sequence derived from human genome
LARRRIRLWHRGAMVIQATWRGYRVR

SEQ ID NO: 18731 - protein, 26 aa, Artificial Sequence
  Quasi-synthetic sequence derived from human genome
WRRAWPRRRRRLQQVGTVAKLWIYPV

SEQ ID NO: 18732 - protein, 26 aa, Artificial Sequence
  Quasi-synthetic sequence derived from human genome
PWMRIFIQAKRVKTKHLCYCLYRPRK

SEQ ID NO: 18733 - protein, 26 aa, Artificial Sequence
  Quasi-synthetic sequence derived from human genome
RQVSRSPRVRLLLLLLLLLVVPWGVR

SEQ ID NO: 18734 - protein, 26 aa, Artificial Sequence
  Quasi-synthetic sequence derived from human genome
LGLRTFVAFAAKLWSFFIYLLRRQIR

SEQ ID NO: 18735 - protein, 26 aa, Artificial Sequence
  Quasi-synthetic sequence derived from human genome
IGWRIRKKYFLMKIKNQPKERLVLSW

SEQ ID NO: 18736 - protein, 26 aa, Artificial Sequence
  Quasi-synthetic sequence derived from human genome
LPWSNPLKVWKINASFKKKKAKRKKI

SEQ ID NO: 18737 - protein, 26 aa, Artificial Sequence
  Quasi-synthetic sequence derived from human genome
LWSRFKKKCFKLTRKMPIIGRKIQDK

SEQ ID NO: 18738 - protein, 26 aa, Artificial Sequence
  Quasi-synthetic sequence derived from human genome
VVLFVIGLFAAGAFILYKFKRKRPGR

SEQ ID NO: 18739 - protein, 26 aa, Artificial Sequence
  Quasi-synthetic sequence derived from human genome
KRLKKLPSAVIALQRSFRSKRSKMLL

SEQ ID NO: 18740 - protein, 26 aa, Artificial Sequence
  Quasi-synthetic sequence derived from human genome
FVLLLVVRRRRREQRLKRLRDAKSLA

SEQ ID NO: 18741 - protein, 26 aa, Artificial Sequence
  Quasi-synthetic sequence derived from human genome
RRLKLVKMYRSKNDLSQLQLLIKKWR

SEQ ID NO: 18742 - protein, 26 aa, Artificial Sequence
  Quasi-synthetic sequence derived from human genome
IRNLQRVIPIRRAPLRSKIEIVRRIL

SEQ ID NO: 18743 - protein, 26 aa, Artificial Sequence
  Quasi-synthetic sequence derived from human genome
FSKRYLKYLTKKYLKKNNLRDWLRVV

SEQ ID NO: 18744 - protein, 26 aa, Artificial Sequence
  Quasi-synthetic sequence derived from human genome
ILKTFKNSFFNYRKKLASYFMGRKLR

SEQ ID NO: 18745 - protein, 26 aa, Artificial Sequence
  Quasi-synthetic sequence derived from human genome
RLWKWLKSPRSWRLGLALLLGGALLF

SEQ ID NO: 18746 - protein, 26 aa, Artificial Sequence
  Quasi-synthetic sequence derived from human genome
RILAVITIQAGVRGYLARRRIRLWHR

SEQ ID NO: 18747 - protein, 26 aa, Artificial Sequence
  Quasi-synthetic sequence derived from human genome
KTFRIKRFLAKKQKQNRPIPQWIRMK

SEQ ID NO: 18748 - protein, 26 aa, Artificial Sequence
  Quasi-synthetic sequence derived from human genome
LVMYFIMLFCITMKRQIKHMIKYRYI

SEQ ID NO: 18749 - protein, 26 aa, Artificial Sequence
  Quasi-synthetic sequence derived from human genome
LWLRAKFQRLLFKLGCYIQKNCGKFL

SEQ ID NO: 18750 - protein, 26 aa, Artificial Sequence
  Quasi-synthetic sequence derived from human genome
KARRKKWIIIAVSVVLVAIIALIIGL

SEQ ID NO: 18751 - protein, 26 aa, Artificial Sequence
  Quasi-synthetic sequence derived from human genome
SPPILTKPTLKRKKPFLHRRRRVRKR

SEQ ID NO: 18752 - protein, 26 aa, Artificial Sequence
  Quasi-synthetic sequence derived from human genome
KKRMTFVQFRRMMAKRPAIKKAINMR

SEQ ID NO: 18753 - protein, 26 aa, Artificial Sequence
  Quasi-synthetic sequence derived from human genome
FLKILKLLISKLKAHQMCFRDYKYRL

SEQ ID NO: 18754 - protein, 26 aa, Artificial Sequence
  Quasi-synthetic sequence derived from human genome
WCVKFLLPYVHNKLLLYRTRKQWLNR

SEQ ID NO: 18755 - protein, 26 aa, Artificial Sequence
  Quasi-synthetic sequence derived from human genome
LILAIRSILLVIPFPFTLRRLKYCQK

SEQ ID NO: 18756 - protein, 26 aa, Artificial Sequence
  Quasi-synthetic sequence derived from human genome
KKKYKAIRLIFVIMAVFFIFWTPYNV

SEQ ID NO: 18757 - protein, 26 aa, Artificial Sequence
  Quasi-synthetic sequence derived from human genome
GLVRRRRRYALSGSVWKKRTLTWRVR

SEQ ID NO: 18758 - protein, 26 aa, Artificial Sequence
  Quasi-synthetic sequence derived from human genome
WQIPLSRRFRSVKLWFVIRSFGVKNL

SEQ ID NO: 18759 - protein, 26 aa, Artificial Sequence
  Quasi-synthetic sequence derived from human genome
LTILKAVKVLQASFRGVRVRRTLRKM

SEQ ID NO: 18760 - protein, 26 aa, Artificial Sequence
  Quasi-synthetic sequence derived from human genome
LFVLENMLGLLRHRGLRPRCCRRKRR

SEQ ID NO: 18761 - protein, 26 aa, Artificial Sequence
  Quasi-synthetic sequence derived from human genome
IPIKQGMLLKRSGKWLKTWKKKYVTL

SEQ ID NO: 18762 - protein, 26 aa, Artificial Sequence
  Quasi-synthetic sequence derived from human genome
KLTSAPLKQNFQKLLKLFYIKKLKPL

SEQ ID NO: 18763 - protein, 26 aa, Artificial Sequence
  Quasi-synthetic sequence derived from human genome
LKLTCSAFRLQRALRFLLGRLPWRVA

SEQ ID NO: 18764 - protein, 26 aa, Artificial Sequence
  Quasi-synthetic sequence derived from human genome
LNPIVYSVRTKQIRLGILHKFVLRRR

SEQ ID NO: 18765 - protein, 26 aa, Artificial Sequence
  Quasi-synthetic sequence derived from human genome
VIGRMRTRLVRKRFLCLGWGLPALVV

SEQ ID NO: 18766 - protein, 26 aa, Artificial Sequence
  Quasi-synthetic sequence derived from human genome
VRTLRVLLDSPVKRRLLPMLRLVIPR

SEQ ID NO: 18767 - protein, 26 aa, Artificial Sequence
  Quasi-synthetic sequence derived from human genome
LKKLPPLPVVEKPKLFFKKRPKTIVK

SEQ ID NO: 18768 - protein, 26 aa, Artificial Sequence
  Quasi-synthetic sequence derived from human genome
LRRPPRLRLCARLPDFFLLLLFRGCL

SEQ ID NO: 18769 - protein, 26 aa, Artificial Sequence
  Quasi-synthetic sequence derived from human genome
FYFLKIANFSNSIFLYLKWRVKKVVL

SEQ ID NO: 18770 - protein, 26 aa, Artificial Sequence
  Quasi-synthetic sequence derived from human genome
RRQIIRALCLLLLLLHAGSAKNIWKR

SEQ ID NO: 18771 - protein, 26 aa, Artificial Sequence
  Quasi-synthetic sequence derived from human genome
LLMALARLCFLLGRLCSRRLKLSQAR

SEQ ID NO: 18772 - protein, 26 aa, Artificial Sequence
  Quasi-synthetic sequence derived from human genome
FKRAFVRILGCQCRGRGRRRRRRRRR

SEQ ID NO: 18773 - protein, 26 aa, Artificial Sequence
  Quasi-synthetic sequence derived from human genome
LSLFVNWKVSMFVEVHKAIKKRRRRR

SEQ ID NO: 18774 - protein, 26 aa, Artificial Sequence
  Quasi-synthetic sequence derived from human genome
LLLVVLALGGVVWYQHRQRKLRRNRR

SEQ ID NO: 18775 - protein, 26 aa, Artificial Sequence
  Quasi-synthetic sequence derived from human genome
VGLALTLEALPWVLRWLRSRRRRPRR

SEQ ID NO: 18776 - protein, 26 aa, Artificial Sequence
  Quasi-synthetic sequence derived from human genome
IFQRQKRRKFWKAKNLQHIPLKKGKR

SEQ ID NO: 18777 - protein, 26 aa, Artificial Sequence
  Quasi-synthetic sequence derived from human genome
FRLTRWRTRYKTIRINLGLWAASFIL

SEQ ID NO: 18778 - protein, 26 aa, Artificial Sequence
  Quasi-synthetic sequence derived from human genome
FRLQFNNKRRLRRPYYPRKALLCYQL

SEQ ID NO: 18779 - protein, 26 aa, Artificial Sequence
  Quasi-synthetic sequence derived from human genome
RWKFIKRWKTRYFTLAGNQLLFQKGK

SEQ ID NO: 18780 - protein, 26 aa, Artificial Sequence
  Quasi-synthetic sequence derived from human genome
FSWFCKRRRAFWHTPRLPTLPKRVPR

SEQ ID NO: 18781 - protein, 26 aa, Artificial Sequence
  Quasi-synthetic sequence derived from human genome
KLLKLRRNIVKLSLYRHFTNTLILAV

SEQ ID NO: 18782 - protein, 26 aa, Artificial Sequence
  Quasi-synthetic sequence derived from human genome
WLCGLNLFWICKTCFRCLKRLKMSWF

SEQ ID NO: 18783 - protein, 26 aa, Artificial Sequence
  Quasi-synthetic sequence derived from human genome
LRRRYLRLRYEDLVRQPRAQLRRLLR

SEQ ID NO: 18784 - protein, 26 aa, Artificial Sequence
  Quasi-synthetic sequence derived from human genome
FRLLRRRQQRHSGSKWLLRSWVQIFM

SEQ ID NO: 18785 - protein, 26 aa, Artificial Sequence
  Quasi-synthetic sequence derived from human genome
RRLFVRRGQPFTIILYFRAPVRAFLP

SEQ ID NO: 18786 - protein, 26 aa, Artificial Sequence
  Quasi-synthetic sequence derived from human genome
LYLKWRVKKVVLVLLLVTSVFLFLNI

SEQ ID NO: 18787 - protein, 26 aa, Artificial Sequence
  Quasi-synthetic sequence derived from human genome
KRLNFHLYMALKKALFKPGAWFKGIL

SEQ ID NO: 18788 - protein, 26 aa, Artificial Sequence
  Quasi-synthetic sequence derived from human genome
VVIPIIFGILFAILLVLVFIKKVAKK

SEQ ID NO: 18789 - protein, 26 aa, Artificial Sequence
  Quasi-synthetic sequence derived from human genome
IRYSVAIILFTILPFFLLHRWCSKKK

SEQ ID NO: 18790 - protein, 26 aa, Artificial Sequence
  Quasi-synthetic sequence derived from human genome
VPFARYLAMNKVKKMKRYHVGKVWRR

SEQ ID NO: 18791 - protein, 26 aa, Artificial Sequence
  Quasi-synthetic sequence derived from human genome
LRRLRAVRLRSGAKALGKARRKVTVL

SEQ ID NO: 18792 - protein, 26 aa, Artificial Sequence
  Quasi-synthetic sequence derived from human genome
VRRELLRRTWGRERKVRGLQLRLLFL

SEQ ID NO: 18793 - protein, 26 aa, Artificial Sequence
  Quasi-synthetic sequence derived from human genome
RMLKQLKHPNLVNLLEVFRRKRRLHL

SEQ ID NO: 18794 - protein, 26 aa, Artificial Sequence
  Quasi-synthetic sequence derived from human genome
RRLLFLGPPPPPLLLLVFSRSSRRRL

SEQ ID NO: 18795 - protein, 26 aa, Artificial Sequence
  Quasi-synthetic sequence derived from human genome
VLAFFRFSGLLLGYAVLRLRHWSRRW

SEQ ID NO: 18796 - protein, 26 aa, Artificial Sequence
  Quasi-synthetic sequence derived from human genome
IHLCCRRRRARLRFMKQLRLHPLEKC

SEQ ID NO: 18797 - protein, 26 aa, Artificial Sequence
  Quasi-synthetic sequence derived from human genome
LVIIVILSALFLGTLACFCVWRRKRK

SEQ ID NO: 18798 - protein, 26 aa, Artificial Sequence
  Quasi-synthetic sequence derived from human genome
IYWIHRGLHHRLVYKRLHKPHHIWKI

SEQ ID NO: 18799 - protein, 26 aa, Artificial Sequence
  Quasi-synthetic sequence derived from human genome
LLGTLVRRGRGGLRLGLRGPLRKLVL

SEQ ID NO: 18800 - protein, 26 aa, Artificial Sequence
  Quasi-synthetic sequence derived from human genome
RVLPRMQARMRGFQARKRYLRRRAAL

SEQ ID NO: 18801 - protein, 26 aa, Artificial Sequence
  Quasi-synthetic sequence derived from human genome
RIPLQRLKLKCIFCRHRVKRVSGACI

SEQ ID NO: 18802 - protein, 26 aa, Artificial Sequence
  Quasi-synthetic sequence derived from human genome
RTVRVLRPLRAINRVPSMRILVTLLL

SEQ ID NO: 18803 - protein, 26 aa, Artificial Sequence
  Quasi-synthetic sequence derived from human genome
LQPSSFRNLRLPKRLRVVYFLARTRL

SEQ ID NO: 18804 - protein, 26 aa, Artificial Sequence
  Quasi-synthetic sequence derived from human genome
LLLLPIPLIVWVKRKEVQKTCRKHRK

SEQ ID NO: 18805 - protein, 26 aa, Artificial Sequence
  Quasi-synthetic sequence derived from human genome
KKGSLSVLRSFRLLRVFKLAKSWPTL

SEQ ID NO: 18806 - protein, 26 aa, Artificial Sequence
  Quasi-synthetic sequence derived from human genome
LLLVFIMSVFVAAGLFVLVMKRRKKN

SEQ ID NO: 18807 - protein, 26 aa, Artificial Sequence
  Quasi-synthetic sequence derived from human genome
LRTLLRRRLFSYPTKYYFMVLVLSLI

SEQ ID NO: 18808 - protein, 26 aa, Artificial Sequence
  Quasi-synthetic sequence derived from human genome
LRRHRLTRKLVVLITPQVSSLLRVIL

SEQ ID NO: 18809 - protein, 26 aa, Artificial Sequence
  Quasi-synthetic sequence derived from human genome
LKIRGTLKSWTKLWCVLKPGVLLIYK

SEQ ID NO: 18810 - protein, 26 aa, Artificial Sequence
  Quasi-synthetic sequence derived from human genome
KKKVKRLLSFQRYFHASRLLRGIIPQ

SEQ ID NO: 18811 - protein, 26 aa, Artificial Sequence
  Quasi-synthetic sequence derived from human genome
RVAQVLRLMRIFRILKLARHSTGLRS

SEQ ID NO: 18812 - protein, 26 aa, Artificial Sequence
  Quasi-synthetic sequence derived from human genome
KVVQVFRLMRIFRVLKLARHSTGLRS

SEQ ID NO: 18813 - protein, 26 aa, Artificial Sequence
  Quasi-synthetic sequence derived from human genome
AIILLLLVLLILCFIKRSKGGKYSVK

SEQ ID NO: 18814 - protein, 26 aa, Artificial Sequence
  Quasi-synthetic sequence derived from human genome
ILRVLRVLRPLRAINRAKGLKHVVQC

SEQ ID NO: 18815 - protein, 26 aa, Artificial Sequence
  Quasi-synthetic sequence derived from human genome
VCFNMGQIVLAKKMLRKALKLLNRIF

SEQ ID NO: 18816 - protein, 26 aa, Artificial Sequence
  Quasi-synthetic sequence derived from human genome
IVLFLLLVLVVIVVCSIRKSSRTLKK

SEQ ID NO: 18817 - protein, 26 aa, Artificial Sequence
  Quasi-synthetic sequence derived from human genome
LWKWFGKPTQRRGMKGKARKLFYKAI

SEQ ID NO: 18818 - protein, 26 aa, Artificial Sequence
  Quasi-synthetic sequence derived from human genome
RWLRIKLWISTVALALVPFLLLIPKF

SEQ ID NO: 18819 - protein, 26 aa, Artificial Sequence
  Quasi-synthetic sequence derived from human genome
FIFIMSLLLISGQRPVNLTMRRKLRK

SEQ ID NO: 18820 - protein, 26 aa, Artificial Sequence
  Quasi-synthetic sequence derived from human genome
RARKNRSRIPLLRKRRFQLGRSMNLR

SEQ ID NO: 18821 - protein, 26 aa, Artificial Sequence
  Quasi-synthetic sequence derived from human genome
LIVLRLRHLNINAIRDYSFKRLYRLK

SEQ ID NO: 18822 - protein, 26 aa, Artificial Sequence
  Quasi-synthetic sequence derived from human genome
AFLALFKAAEFAKLSIKWMIKIRKRY

SEQ ID NO: 18823 - protein, 26 aa, Artificial Sequence
  Quasi-synthetic sequence derived from human genome
LIFLHLKRRVKSVILVMLLGPLLFLA

SEQ ID NO: 18824 - protein, 26 aa, Artificial Sequence
  Quasi-synthetic sequence derived from human genome
FIFLHLKRRVKSVILVMLLGPLLFLA

SEQ ID NO: 18825 - protein, 26 aa, Artificial Sequence
  Quasi-synthetic sequence derived from human genome
INMYGRLIHRVRYRRGLWRTRQILNL

SEQ ID NO: 18826 - protein, 26 aa, Artificial Sequence
  Quasi-synthetic sequence derived from human genome
WFICSLCVPRVRKLWSSRRPRTRRNL

SEQ ID NO: 18827 - protein, 26 aa, Artificial Sequence
  Quasi-synthetic sequence derived from human genome
WPRRPGRRWPASPLGMKVFRRKALVL

SEQ ID NO: 18828 - protein, 26 aa, Artificial Sequence
  Quasi-synthetic sequence derived from human genome
SCRSTWLRVRKARPQLILSRRPRRRL

SEQ ID NO: 18829 - protein, 26 aa, Artificial Sequence
  Quasi-synthetic sequence derived from human genome
LLKKIGISWNKKYRKQHGPLRKFLQL

SEQ ID NO: 18830 - protein, 26 aa, Artificial Sequence
  Quasi-synthetic sequence derived from human genome
LKRFQLTKLPPYLIFCIKRFTKNNFF

SEQ ID NO: 18831 - protein, 26 aa, Artificial Sequence
  Quasi-synthetic sequence derived from human genome
FAGLLAILLVVAVFCILWNWNKRKKR

SEQ ID NO: 18832 - protein, 26 aa, Artificial Sequence
  Quasi-synthetic sequence derived from human genome
KQLRRQMWWRGCKIKAIMALVAAILL

SEQ ID NO: 18833 - protein, 26 aa, Artificial Sequence
  Quasi-synthetic sequence derived from human genome
PYWRRLLVLCWYLPGWRAGRVTWLRL

SEQ ID NO: 18834 - protein, 26 aa, Artificial Sequence
  Quasi-synthetic sequence derived from human genome
FLFLSFQIIRLPLRLINISHLIRKIL

SEQ ID NO: 18835 - protein, 26 aa, Artificial Sequence
  Quasi-synthetic sequence derived from human genome
FVRKARHRRPLSSFVRKARHRRTLFA

SEQ ID NO: 18836 - protein, 26 aa, Artificial Sequence
  Quasi-synthetic sequence derived from human genome
LRKRRRLLSIIVVLVVTFALCWMPYH

SEQ ID NO: 18837 - protein, 26 aa, Artificial Sequence
  Quasi-synthetic sequence derived from human genome
PYLHFLIFLFILRCLEMNCRKKLMRK

SEQ ID NO: 18838 - protein, 26 aa, Artificial Sequence
  Quasi-synthetic sequence derived from human genome
FLGIVAAVLVKKYQAVLRRKALLIFL

SEQ ID NO: 18839 - protein, 26 aa, Artificial Sequence
  Quasi-synthetic sequence derived from human genome
AWLGKWLRKRRIVSGNPRCQKPFFLK

SEQ ID NO: 18840 - protein, 26 aa, Artificial Sequence
  Quasi-synthetic sequence derived from human genome
VVLAFFVVQINKAKSRPKRRKPRVKR

SEQ ID NO: 18841 - protein, 26 aa, Artificial Sequence
  Quasi-synthetic sequence derived from human genome
KQLKFLLARSRWQRSLMSYKSILVMR

SEQ ID NO: 18842 - protein, 26 aa, Artificial Sequence
  Quasi-synthetic sequence derived from human genome
GRSRRQGSRFLWLLKILVIILVLGIV

SEQ ID NO: 18843 - protein, 26 aa, Artificial Sequence
  Quasi-synthetic sequence derived from human genome
LWRKFARLACNFVVIFIPWEMRIKKI

SEQ ID NO: 18844 - protein, 26 aa, Artificial Sequence
  Quasi-synthetic sequence derived from human genome
RRRRMHVLRRRWDLGSLCRALLTRGL

SEQ ID NO: 18845 - protein, 26 aa, Artificial Sequence
  Quasi-synthetic sequence derived from human genome
LCLIFKVKKRSILISSRHFWTILVVV

SEQ ID NO: 18846 - protein, 26 aa, Artificial Sequence
  Quasi-synthetic sequence derived from human genome
VGLVLLVILVTVLQRRRPAWLPVRLR

SEQ ID NO: 18847 - protein, 26 aa, Artificial Sequence
  Quasi-synthetic sequence derived from human genome
IFLKRSQQKKKTSPLNFKKRLFLLTV

SEQ ID NO: 18848 - protein, 26 aa, Artificial Sequence
  Quasi-synthetic sequence derived from human genome
FLCFWKKSLPTFTDKLRLLARHLRKI

SEQ ID NO: 18849 - protein, 26 aa, Artificial Sequence
  Quasi-synthetic sequence derived from human genome
VFIIILVLCLRLLQSRCPRVLPKKLQ

SEQ ID NO: 18850 - protein, 26 aa, Artificial Sequence
  Quasi-synthetic sequence derived from human genome
LLGSLLKRKMLPRAALLVTTRPRALR

SEQ ID NO: 18851 - protein, 26 aa, Artificial Sequence
  Quasi-synthetic sequence derived from human genome
KWKNFKGLKLLCRDKIRLNNAIWRAW

SEQ ID NO: 18852 - protein, 26 aa, Artificial Sequence
  Quasi-synthetic sequence derived from human genome
IGKKEIKPFKRFLRKKSKPKKCVKKF

SEQ ID NO: 18853 - protein, 26 aa, Artificial Sequence
  Quasi-synthetic sequence derived from human genome
PPFRLIRKMFSFKVSRWMGLACFRSL

SEQ ID NO: 18854 - protein, 26 aa, Artificial Sequence
  Quasi-synthetic sequence derived from human genome
VLALPLRSRKIRKQLRSVVSRMAALR

SEQ ID NO: 18855 - protein, 26 aa, Artificial Sequence
  Quasi-synthetic sequence derived from human genome
RLSLTWSVRLPRSPGRLAWAFRLRLL

SEQ ID NO: 18856 - protein, 26 aa, Artificial Sequence
  Quasi-synthetic sequence derived from human genome
RLLLVHGRWSYFRMCKFLCYFFYKNF

SEQ ID NO: 18857 - protein, 26 aa, Artificial Sequence
  Quasi-synthetic sequence derived from human genome
LKRSIKLLSLIKWKGSKSSKLNSKFW

SEQ ID NO: 18858 - protein, 26 aa, Artificial Sequence
  Quasi-synthetic sequence derived from human genome
PPFKRKGKLSTIGKIFKPWKWRKKKT

SEQ ID NO: 18859 - protein, 26 aa, Artificial Sequence
  Quasi-synthetic sequence derived from human genome
IYRPFVDKALKQMGLRKLILRLHKLM

SEQ ID NO: 18860 - protein, 26 aa, Artificial Sequence
  Quasi-synthetic sequence derived from human genome
QRFRKKRRRSQRRPRLRQFSDLWVRL

SEQ ID NO: 18861 - protein, 26 aa, Artificial Sequence
  Quasi-synthetic sequence derived from human genome
KRKLGASVVKVNKVGQLRVLLAFRRL

SEQ ID NO: 18862 - protein, 26 aa, Artificial Sequence
  Quasi-synthetic sequence derived from human genome
FFGLKVALIFPVLVLLTVFIFVVRKK

SEQ ID NO: 18863 - protein, 26 aa, Artificial Sequence
  Quasi-synthetic sequence derived from human genome
RMWLCKRRHKPRIDGLVKVGTLKKRL

SEQ ID NO: 18864 - protein, 26 aa, Artificial Sequence
  Quasi-synthetic sequence derived from human genome
WLFLRYKSIVGRRFCFIIGTLYLYRC

SEQ ID NO: 18865 - protein, 26 aa, Artificial Sequence
  Quasi-synthetic sequence derived from human genome
WLKEIRKLQKSTHLLIRKLPFSRLAR

SEQ ID NO: 18866 - protein, 26 aa, Artificial Sequence
  Quasi-synthetic sequence derived from human genome
FFFIIGLWWCTKSILKYICKKQKRTC

SEQ ID NO: 18867 - protein, 26 aa, Artificial Sequence
  Quasi-synthetic sequence derived from human genome
LLSRIVTLRAKRNLPLKLLIMSATLR

SEQ ID NO: 18868 - protein, 26 aa, Artificial Sequence
  Quasi-synthetic sequence derived from human genome
RISITFFRLFRVMRLVKLLSRGEGIR

SEQ ID NO: 18869 - protein, 26 aa, Artificial Sequence
  Quasi-synthetic sequence derived from human genome
LRMRVPALLVLLFCFRGRAGWSRYWI

SEQ ID NO: 18870 - protein, 26 aa, Artificial Sequence
  Quasi-synthetic sequence derived from human genome
LLALAAWASRWLRRKLRARRKGGAPV

SEQ ID NO: 18871 - protein, 26 aa, Artificial Sequence
  Quasi-synthetic sequence derived from human genome
MKLFRAQRNLYIAGFSLLLSFLLRRL

SEQ ID NO: 18872 - protein, 26 aa, Artificial Sequence
  Quasi-synthetic sequence derived from human genome
LYLLAVAVVIILFIILLGVIMAKRKR

SEQ ID NO: 18873 - protein, 26 aa, Artificial Sequence
  Quasi-synthetic sequence derived from human genome
RIFRIPRRPRKLTLKGYRQHWVVFKE

SEQ ID NO: 18874 - protein, 26 aa, Artificial Sequence
  Quasi-synthetic sequence derived from human genome
RFPFQPFYWPHRYLTYRYFPRRRLQR

SEQ ID NO: 18875 - protein, 26 aa, Artificial Sequence
  Quasi-synthetic sequence derived from human genome
RYRRKLKKYGKNVGKVIIKGCRYVVI

SEQ ID NO: 18876 - protein, 26 aa, Artificial Sequence
  Quasi-synthetic sequence derived from human genome
WLRSPVQNFCYIFWKRYRFKLIAFMV

SEQ ID NO: 18877 - protein, 26 aa, Artificial Sequence
  Quasi-synthetic sequence derived from human genome
IILSVVFAVCLLACLLGVALRKFKRR

SEQ ID NO: 18878 - protein, 26 aa, Artificial Sequence
  Quasi-synthetic sequence derived from human genome
ALRRAKFKFPGRQKIHISKKWGFTKF

SEQ ID NO: 18879 - protein, 26 aa, Artificial Sequence
  Quasi-synthetic sequence derived from human genome
RRRLGRLWNRLFHRPRAPRGQIPLLT

SEQ ID NO: 18880 - protein, 26 aa, Artificial Sequence
  Quasi-synthetic sequence derived from human genome
FLLYKYKIKKSVTKGEMLKIVGKRFR

SEQ ID NO: 18881 - protein, 26 aa, Artificial Sequence
  Quasi-synthetic sequence derived from human genome
WPRLIRKLRCYLKEMKTLGKLVFSRC

SEQ ID NO: 18882 - protein, 26 aa, Artificial Sequence
  Quasi-synthetic sequence derived from human genome
MPLWVRQIFIHKLPLYLRLKRPKPER

SEQ ID NO: 18883 - protein, 26 aa, Artificial Sequence
  Quasi-synthetic sequence derived from human genome
ALCWWIFISLTQTMKLLKLRRNIVKL

SEQ ID NO: 18884 - protein, 26 aa, Artificial Sequence
  Quasi-synthetic sequence derived from human genome
HTLIRFLPRPIRQQLLYKRRYIFSVV

SEQ ID NO: 18885 - protein, 26 aa, Artificial Sequence
  Quasi-synthetic sequence derived from human genome
FRATRKPLVQTTPRLVYKWFLLIYKI

SEQ ID NO: 18886 - protein, 26 aa, Artificial Sequence
  Quasi-synthetic sequence derived from human genome
RTRFLNVRASAIIIQRKWRAILPAKI

SEQ ID NO: 18887 - protein, 26 aa, Artificial Sequence
  Quasi-synthetic sequence derived from human genome
KTFVKIKASHNLKKKILRFRSGSLKL

SEQ ID NO: 18888 - protein, 26 aa, Artificial Sequence
  Quasi-synthetic sequence derived from human genome
LKRRLSRKLSLRPTVAELQARRILRF

SEQ ID NO: 18889 - protein, 26 aa, Artificial Sequence
  Quasi-synthetic sequence derived from human genome
LKKIIKRKHTLPNYKIRFKPFFPYQT

SEQ ID NO: 18890 - protein, 26 aa, Artificial Sequence
  Quasi-synthetic sequence derived from human genome
RFLGTAFMLWLLDFLCIRKHFLGRRR

SEQ ID NO: 18891 - protein, 26 aa, Artificial Sequence
  Quasi-synthetic sequence derived from human genome
RVDFWWRRLRASLRLTVWAPLLPLRI

SEQ ID NO: 18892 - protein, 26 aa, Artificial Sequence
  Quasi-synthetic sequence derived from human genome
KKRMFKFHQMKHIFEILDKMRCLRKR

SEQ ID NO: 18893 - protein, 26 aa, Artificial Sequence
  Quasi-synthetic sequence derived from human genome
KKLLGKKLTRCLKPFENSRLRLWTKW

SEQ ID NO: 18894 - protein, 26 aa, Artificial Sequence
  Quasi-synthetic sequence derived from human genome
LLAKRKLDGKFYAVKVLQKKIVLNRK

SEQ ID NO: 18895 - protein, 26 aa, Artificial Sequence
  Quasi-synthetic sequence derived from human genome
RTVRVLRPLKAINRVPSMRILVNLLL

SEQ ID NO: 18896 - protein, 26 aa, Artificial Sequence
  Quasi-synthetic sequence derived from human genome
RKLFIQRAKKIDKISRIGFPMAFLIF

SEQ ID NO: 18897 - protein, 26 aa, Artificial Sequence
  Quasi-synthetic sequence derived from human genome
FRKTLLLWQVRLKSNRPSYYMFPRFL

SEQ ID NO: 18898 - protein, 26 aa, Artificial Sequence
  Quasi-synthetic sequence derived from human genome
LWLALLLSIQRRLPRERKIKYSKLLS

SEQ ID NO: 18899 - protein, 26 aa, Artificial Sequence
  Quasi-synthetic sequence derived from human genome
KYICTSFYPWVNILKISFKRKKFFIH

SEQ ID NO: 18900 - protein, 26 aa, Artificial Sequence
  Quasi-synthetic sequence derived from human genome
MNYLPFPIIQQYKFLRFRRSLLLLVK

SEQ ID NO: 18901 - protein, 26 aa, Artificial Sequence
  Quasi-synthetic sequence derived from human genome
LWSLKPHIRQMWLKALLVILYKYPYR

SEQ ID NO: 18902 - protein, 26 aa, Artificial Sequence
  Quasi-synthetic sequence derived from human genome
FVMREWKKSRKLLGQRLFNKLMKMTF

SEQ ID NO: 18903 - protein, 26 aa, Artificial Sequence
  Quasi-synthetic sequence derived from human genome
WLSRRFQKVKLRCRKGIPSSLRAKAW

SEQ ID NO: 18904 - protein, 26 aa, Artificial Sequence
  Quasi-synthetic sequence derived from human genome
LRIQNWLSAKVRKQLRLKPFYLVPKH

SEQ ID NO: 18905 - protein, 26 aa, Artificial Sequence
  Quasi-synthetic sequence derived from human genome
RIYGKFLGLRAYIRKQINNIFYRFIY

SEQ ID NO: 18906 - protein, 26 aa, Artificial Sequence
  Quasi-synthetic sequence derived from human genome
TILIIRRLHKVLRPFLLRRLKKEVEA

SEQ ID NO: 18907 - protein, 26 aa, Artificial Sequence
  Quasi-synthetic sequence derived from human genome
MLRHQGLLKCRCRMLFNDLKVFLLRR

SEQ ID NO: 18908 - protein, 26 aa, Artificial Sequence
  Quasi-synthetic sequence derived from human genome
LRRAPRLWKVRAMMIFNTFNLILGFI

SEQ ID NO: 18909 - protein, 26 aa, Artificial Sequence
  Quasi-synthetic sequence derived from human genome
KFWARGRKPWKLAIQILKIAMVTIQL

SEQ ID NO: 18910 - protein, 26 aa, Artificial Sequence
  Quasi-synthetic sequence derived from human genome
RRFLWGVLFALCFSCLLSQAWRVRRL

SEQ ID NO: 18911 - protein, 26 aa, Artificial Sequence
  Quasi-synthetic sequence derived from human genome
CAIARVRLLKLKHERKALLALLLILM

SEQ ID NO: 18912 - protein, 26 aa, Artificial Sequence
  Quasi-synthetic sequence derived from human genome
IKYGYQPRRNFWPARLATRLLKLRYL

SEQ ID NO: 18913 - protein, 26 aa, Artificial Sequence
  Quasi-synthetic sequence derived from human genome
LLVFVPHMRRFLSRKKIRHHIYVLNQ

SEQ ID NO: 18914 - protein, 26 aa, Artificial Sequence
  Quasi-synthetic sequence derived from human genome
IAMLWGSGKCKALTKFKFVFFLRLSR

SEQ ID NO: 18915 - protein, 26 aa, Artificial Sequence
  Quasi-synthetic sequence derived from human genome
RNWLYFVPLLLLVPLLLCCVWRLCRK

SEQ ID NO: 18916 - protein, 26 aa, Artificial Sequence
  Quasi-synthetic sequence derived from human genome
RRMRFYIRRMVKTQAFYWTVLSLVAL

SEQ ID NO: 18917 - protein, 26 aa, Artificial Sequence
  Quasi-synthetic sequence derived from human genome
YSKVRSRYSFIQALVRRIRGLLRISR

SEQ ID NO: 18918 - protein, 26 aa, Artificial Sequence
  Quasi-synthetic sequence derived from human genome
RRLRKNLKSLIIVHPSWFIRTLLAVT

SEQ ID NO: 18919 - protein, 26 aa, Artificial Sequence
  Quasi-synthetic sequence derived from human genome
AAYLKLRHWQWWRLFTKVKPLLQVTR

SEQ ID NO: 18920 - protein, 26 aa, Artificial Sequence
  Quasi-synthetic sequence derived from human genome
RLILFVLLLFGIYGLLKNPFLSVRFR

SEQ ID NO: 18921 - protein, 26 aa, Artificial Sequence
  Quasi-synthetic sequence derived from human genome
VIIILGCLALFLLLQRKNLRRPPCIK

SEQ ID NO: 18922 - protein, 26 aa, Artificial Sequence
  Quasi-synthetic sequence derived from human genome
HIAKVKMKFRFLGKLMAKAIMDFRLV

SEQ ID NO: 18923 - protein, 26 aa, Artificial Sequence
  Quasi-synthetic sequence derived from human genome
LRRAVKRHRERRERQKRVFRMSLLII

SEQ ID NO: 18924 - protein, 26 aa, Artificial Sequence
  Quasi-synthetic sequence derived from human genome
LKLFRPKKLLPKAFKQYWFIFKDTSI

SEQ ID NO: 18925 - protein, 26 aa, Artificial Sequence
  Quasi-synthetic sequence derived from human genome
RRIPKLVQRINSIYNAKRGKKRLKKL

SEQ ID NO: 18926 - protein, 26 aa, Artificial Sequence
  Quasi-synthetic sequence derived from human genome
LFRAARLIKLLRQGYTIRILLWTFVQ

SEQ ID NO: 18927 - protein, 26 aa, Artificial Sequence
  Quasi-synthetic sequence derived from human genome
GLIALLLLLLVFTVALYAQRRWQKRR

SEQ ID NO: 18928 - protein, 26 aa, Artificial Sequence
  Quasi-synthetic sequence derived from human genome
WFLNPLKSARYFLWHTYRWLLLKLLL

SEQ ID NO: 18929 - protein, 26 aa, Artificial Sequence
  Quasi-synthetic sequence derived from human genome
RFRPRWKVILTFFVGAAILWLLCSHR

SEQ ID NO: 18930 - protein, 26 aa, Artificial Sequence
  Quasi-synthetic sequence derived from human genome
KDINTIKSLRVLRVLRPLKTIKRLPK

SEQ ID NO: 18931 - protein, 26 aa, Artificial Sequence
  Quasi-synthetic sequence derived from human genome
KLITFLRTFMKSRPTKQKLKQRGILK

SEQ ID NO: 18932 - protein, 26 aa, Artificial Sequence
  Quasi-synthetic sequence derived from human genome
SRQRGLRARVRPLFCALLLSLGRFVR

SEQ ID NO: 18933 - protein, 26 aa, Artificial Sequence
  Quasi-synthetic sequence derived from human genome
NLISKLKKWIKILEAKTKQLPKFFLI

SEQ ID NO: 18934 - protein, 26 aa, Artificial Sequence
  Quasi-synthetic sequence derived from human genome
KKKKKKKRKEIPPNFLLFNLYRTRVK

SEQ ID NO: 18935 - protein, 26 aa, Artificial Sequence
  Quasi-synthetic sequence derived from human genome
RFHLKKKMRVWRDSFLVERGKLLHKR

SEQ ID NO: 18936 - protein, 26 aa, Artificial Sequence
  Quasi-synthetic sequence derived from human genome
LHMLLARNKIRTLKNNMFSKFKKLKS

SEQ ID NO: 18937 - protein, 26 aa, Artificial Sequence
  Quasi-synthetic sequence derived from human genome
WLLLKYKSIISRRFFCIVGTLYLYRC

SEQ ID NO: 18938 - protein, 26 aa, Artificial Sequence
  Quasi-synthetic sequence derived from human genome
LLYFPVFILYFKPSVFRCIALRWVRL

SEQ ID NO: 18939 - protein, 26 aa, Artificial Sequence
  Quasi-synthetic sequence derived from human genome
IKTKKRILLYTMNPNKFRACQFLIKF

SEQ ID NO: 18940 - protein, 26 aa, Artificial Sequence
  Quasi-synthetic sequence derived from human genome
WLKVRQFHGLLVKRFHCARRNSKALF

SEQ ID NO: 18941 - protein, 26 aa, Artificial Sequence
  Quasi-synthetic sequence derived from human genome
IQSKLLKHKQIHTRNKAFRALLLKKR

SEQ ID NO: 18942 - protein, 26 aa, Artificial Sequence
  Quasi-synthetic sequence derived from human genome
KIKVRFSFFLQIYLIMIFLGLYINFR

SEQ ID NO: 18943 - protein, 26 aa, Artificial Sequence
  Quasi-synthetic sequence derived from human genome
LFFLWRSFRSVRSRLYVGREKKLALM

SEQ ID NO: 18944 - protein, 26 aa, Artificial Sequence
  Quasi-synthetic sequence derived from human genome
CFLRRPGAPASWIWWRMLRQVLRRGL

SEQ ID NO: 18945 - protein, 26 aa, Artificial Sequence
  Quasi-synthetic sequence derived from human genome
FFLWRSFRSVRSRLYVGREKKLALML

SEQ ID NO: 18946 - protein, 26 aa, Artificial Sequence
  Quasi-synthetic sequence derived from human genome
MRARRGLLRLPRRSLLAALFFFSLSS

SEQ ID NO: 18947 - protein, 26 aa, Artificial Sequence
  Quasi-synthetic sequence derived from human genome
GRIVQVLRLLRALRMLKLGRHSTGLR

SEQ ID NO: 18948 - protein, 26 aa, Artificial Sequence
  Quasi-synthetic sequence derived from human genome
FAICKKQSFCFWLLRFNLHLKDKKRF

SEQ ID NO: 18949 - protein, 26 aa, Artificial Sequence
  Quasi-synthetic sequence derived from human genome
RLLREKEAKIRKALDRLRKKRHLLRR

SEQ ID NO: 18950 - protein, 26 aa, Artificial Sequence
  Quasi-synthetic sequence derived from human genome
AVIQRCYRKYKQLTWIALKFALYKKM

SEQ ID NO: 18951 - protein, 26 aa, Artificial Sequence
  Quasi-synthetic sequence derived from human genome
CVCLVIVLWGIRLLLQRKKKLVSTSK

SEQ ID NO: 18952 - protein, 26 aa, Artificial Sequence
  Quasi-synthetic sequence derived from human genome
RRAATIVLQSYLRGFLARNRYRKILR

SEQ ID NO: 18953 - protein, 26 aa, Artificial Sequence
  Quasi-synthetic sequence derived from human genome
RRAALRLLTYLSCRFGLARVHWAFKF

SEQ ID NO: 18954 - protein, 26 aa, Artificial Sequence
  Quasi-synthetic sequence derived from human genome
LLRKKRFGQWTKLLCVIKDTKLLCYK

SEQ ID NO: 18955 - protein, 26 aa, Artificial Sequence
  Quasi-synthetic sequence derived from human genome
LLGKRKRRELNMKAQALKLAAKRFIF

SEQ ID NO: 18956 - protein, 26 aa, Artificial Sequence
  Quasi-synthetic sequence derived from human genome
LTFWKNWHFRLLLDLTAKMKFCLRWK

SEQ ID NO: 18957 - protein, 26 aa, Artificial Sequence
  Quasi-synthetic sequence derived from human genome
LLQAVFFVLFVLSVHYLWKKWKKHQK

SEQ ID NO: 18958 - protein, 26 aa, Artificial Sequence
  Quasi-synthetic sequence derived from human genome
VKVKRIIKVNNRILRLKFEEKFQKFL

SEQ ID NO: 18959 - protein, 26 aa, Artificial Sequence
  Quasi-synthetic sequence derived from human genome
RLSKVFTLFQARAQGKLMRIKFQKIL

SEQ ID NO: 18960 - protein, 26 aa, Artificial Sequence
  Quasi-synthetic sequence derived from human genome
WLRKPYYLQARFSYVRMKYLFFSWLV

SEQ ID NO: 18961 - protein, 26 aa, Artificial Sequence
  Quasi-synthetic sequence derived from human genome
RGRRLGLALGLLLALVLAPRVLRAKP

SEQ ID NO: 18962 - protein, 26 aa, Artificial Sequence
  Quasi-synthetic sequence derived from human genome
ILKTLLRCRNEKKRHRAVRVIFTIMI

SEQ ID NO: 18963 - protein, 26 aa, Artificial Sequence
  Quasi-synthetic sequence derived from human genome
IFDLGCIWRFAWRKSIKKYHAWRSRR

SEQ ID NO: 18964 - protein, 26 aa, Artificial Sequence
  Quasi-synthetic sequence derived from human genome
ICYTGIIKTLLRCPSKKKYKAIRLIF

SEQ ID NO: 18965 - protein, 26 aa, Artificial Sequence
  Quasi-synthetic sequence derived from human genome
AWYWRRRPKRLSAVVCALLWVLSLLV

SEQ ID NO: 18966 - protein, 26 aa, Artificial Sequence
  Quasi-synthetic sequence derived from human genome
LLRRVTRNLVRNKLAVITRLLQNLIM

SEQ ID NO: 18967 - protein, 26 aa, Artificial Sequence
  Quasi-synthetic sequence derived from human genome
LLLALHRRLRGLRRAAAGTSRLLFQR

SEQ ID NO: 18968 - protein, 26 aa, Artificial Sequence
  Quasi-synthetic sequence derived from human genome
LLFRIVLKRRLNWIQWASLLTLFLSI

SEQ ID NO: 18969 - protein, 26 aa, Artificial Sequence
  Quasi-synthetic sequence derived from human genome
PGLLLLLVVIILILAFWVLPKYKTRK

SEQ ID NO: 18970 - protein, 26 aa, Artificial Sequence
  Quasi-synthetic sequence derived from human genome
RNIYSIYPMRNLKIRPYFNRVIRPRR

SEQ ID NO: 18971 - protein, 26 aa, Artificial Sequence
  Quasi-synthetic sequence derived from human genome
WAAHWLMRRRRRKQRKKKAWIYCESL

SEQ ID NO: 18972 - protein, 26 aa, Artificial Sequence
  Quasi-synthetic sequence derived from human genome
RLLLTRKKLQLLMLGPFQYAFLKITL

SEQ ID NO: 18973 - protein, 26 aa, Artificial Sequence
  Quasi-synthetic sequence derived from human genome
LIKSNIYPIVLFIRVCEKNIKRFRKL

SEQ ID NO: 18974 - protein, 26 aa, Artificial Sequence
  Quasi-synthetic sequence derived from human genome
RKAIGKYRIKLLDTLPLPGRLIRYLK

SEQ ID NO: 18975 - protein, 26 aa, Artificial Sequence
  Quasi-synthetic sequence derived from human genome
RCYAKFLRRTKAATIIQKYWRMYVVR

SEQ ID NO: 18976 - protein, 26 aa, Artificial Sequence
  Quasi-synthetic sequence derived from human genome
RARRRRTFCLLVVIVVVFAVCWLPLH

SEQ ID NO: 18977 - protein, 26 aa, Artificial Sequence
  Quasi-synthetic sequence derived from human genome
GTMFFSLRLLINESLIKKLRLFFRKF

SEQ ID NO: 18978 - protein, 26 aa, Artificial Sequence
  Quasi-synthetic sequence derived from human genome
IFKRGVFESRRKNKAVFRPKIRINLR

SEQ ID NO: 18979 - protein, 26 aa, Artificial Sequence
  Quasi-synthetic sequence derived from human genome
LVRKQMRLQRKAVISLQSYFRMRKAR

SEQ ID NO: 18980 - protein, 26 aa, Artificial Sequence
  Quasi-synthetic sequence derived from human genome
VRKRRFQLRRCMNPRARKNRSQIVLF

SEQ ID NO: 18981 - protein, 26 aa, Artificial Sequence
  Quasi-synthetic sequence derived from human genome
RMLKDNKKNWRRVYKSLLLLAYLIRN

SEQ ID NO: 18982 - protein, 26 aa, Artificial Sequence
  Quasi-synthetic sequence derived from human genome
VLWLRNAVPLISSQRLRLSRRALRVL

SEQ ID NO: 18983 - protein, 26 aa, Artificial Sequence
  Quasi-synthetic sequence derived from human genome
VWHWKHRVATRFTLPRFLQRRSSRRK

SEQ ID NO: 18984 - protein, 26 aa, Artificial Sequence
  Quasi-synthetic sequence derived from human genome
PRIRKRFLLRRILEMLFFTQLQVGLI

SEQ ID NO: 18985 - protein, 26 aa, Artificial Sequence
  Quasi-synthetic sequence derived from human genome
WVTGPVLAVILIILIVIAILLFKRKR

SEQ ID NO: 18986 - protein, 26 aa, Artificial Sequence
  Quasi-synthetic sequence derived from human genome
RRLRKNLKSFIIVHPSWFIRTILAVT

SEQ ID NO: 18987 - protein, 26 aa, Artificial Sequence
  Quasi-synthetic sequence derived from human genome
LLNLLIYSLRNSEMKRALMKLWRRRV

SEQ ID NO: 18988 - protein, 26 aa, Artificial Sequence
  Quasi-synthetic sequence derived from human genome
VIFCIIIVAIALLILSGIWQRRRKNK

SEQ ID NO: 18989 - protein, 26 aa, Artificial Sequence
  Quasi-synthetic sequence derived from human genome
YSLRAFCGILYMKPRMKIFLRQKKVT

SEQ ID NO: 18990 - protein, 26 aa, Artificial Sequence
  Quasi-synthetic sequence derived from human genome
VRAMLRGSRLRKIRSRTWHKERLYRL

SEQ ID NO: 18991 - protein, 26 aa, Artificial Sequence
  Quasi-synthetic sequence derived from human genome
KSWRKIKNMVHWSPFVMSFKKKYPWI

SEQ ID NO: 18992 - protein, 26 aa, Artificial Sequence
  Quasi-synthetic sequence derived from human genome
VLYVFVGVKFRTHLKHVLRQFWFCRL

SEQ ID NO: 18993 - protein, 26 aa, Artificial Sequence
  Quasi-synthetic sequence derived from human genome
KNKKLVELLRRKVRLAQPYVGVFLKR

SEQ ID NO: 18994 - protein, 26 aa, Artificial Sequence
  Quasi-synthetic sequence derived from human genome
LARKIILRCKRKLGLKTLGSGRHVHL

SEQ ID NO: 18995 - protein, 26 aa, Artificial Sequence
  Quasi-synthetic sequence derived from human genome
LKKFLRKLHLPRDLPQKKKLKYMKQS

SEQ ID NO: 18996 - protein, 26 aa, Artificial Sequence
  Quasi-synthetic sequence derived from human genome
VIILILAFWVLPKYKTRKAMRNNVPR

SEQ ID NO: 18997 - protein, 26 aa, Artificial Sequence
  Quasi-synthetic sequence derived from human genome
IGVGLLLSGFLVIFYCYIRKRCLKLK

SEQ ID NO: 18998 - protein, 26 aa, Artificial Sequence
  Quasi-synthetic sequence derived from human genome
RKGLTRRERRELRRRTILLLYYLLRS

SEQ ID NO: 18999 - protein, 26 aa, Artificial Sequence
  Quasi-synthetic sequence derived from human genome
LSAIRIKKPIKTKFRLPVFNWTALKP

SEQ ID NO: 19000 - protein, 26 aa, Artificial Sequence
  Quasi-synthetic sequence derived from human genome
FLARNRYRKILREHKAVIIQKRVRGW

SEQ ID NO: 19001 - protein, 27 aa, Artificial Sequence
  Quasi-synthetic sequence derived from human genome
RIFKRKKRIKRRALLFLSYILTHFIFL

SEQ ID NO: 19002 - protein, 27 aa, Artificial Sequence
  Quasi-synthetic sequence derived from human genome
LLFFLFRLLLRFLRLCRSFYITCRRLR

SEQ ID NO: 19003 - protein, 27 aa, Artificial Sequence
  Quasi-synthetic sequence derived from human genome
RALRIVRFTKILSLLRLLRLSRLIRYI

SEQ ID NO: 19004 - protein, 27 aa, Artificial Sequence
  Quasi-synthetic sequence derived from human genome
LILSRRPRRRLGSLRWCGRRRLRWRLL

SEQ ID NO: 19005 - protein, 27 aa, Artificial Sequence
  Quasi-synthetic sequence derived from human genome
VMKFFRWVRRAWQRIISWVFFWRQKIK

SEQ ID NO: 19006 - protein, 27 aa, Artificial Sequence
  Quasi-synthetic sequence derived from human genome
RTFRLLRVLKLVRFLPALRRQLVVLVK

SEQ ID NO: 19007 - protein, 27 aa, Artificial Sequence
  Quasi-synthetic sequence derived from human genome
KTMKFILWRRFRWAIILFIILFILLLF

SEQ ID NO: 19008 - protein, 27 aa, Artificial Sequence
  Quasi-synthetic sequence derived from human genome
LFRILKVFKSLRALRAIRVLRRLSFLT

SEQ ID NO: 19009 - protein, 27 aa, Artificial Sequence
  Quasi-synthetic sequence derived from human genome
FKRAFLRLLRCQCRRRRRRRPLWRVYG

SEQ ID NO: 19010 - protein, 27 aa, Artificial Sequence
  Quasi-synthetic sequence derived from human genome
RTFRLLRVLKLVRFMPALRRQLVVLMK

SEQ ID NO: 19011 - protein, 27 aa, Artificial Sequence
  Quasi-synthetic sequence derived from human genome
ILDPWVYLLLRKILLRKFCQMRKRRLR

SEQ ID NO: 19012 - protein, 27 aa, Artificial Sequence
  Quasi-synthetic sequence derived from human genome
LKRLVKLHIKRHYHKKFWKLGAVIFFF

SEQ ID NO: 19013 - protein, 27 aa, Artificial Sequence
  Quasi-synthetic sequence derived from human genome
GVFYPWRFRLLCLLRRWLPRPRAWFIR

SEQ ID NO: 19014 - protein, 27 aa, Artificial Sequence
  Quasi-synthetic sequence derived from human genome
FWRRYGKLSRHLMKVKLKKYTKFLFVR

SEQ ID NO: 19015 - protein, 27 aa, Artificial Sequence
  Quasi-synthetic sequence derived from human genome
LFRVIRLARIGRILRLIRAAKGIRTLL

SEQ ID NO: 19016 - protein, 27 aa, Artificial Sequence
  Quasi-synthetic sequence derived from human genome
RRFRTLMMRRRFLSLKKTAILIQRKYR

SEQ ID NO: 19017 - protein, 27 aa, Artificial Sequence
  Quasi-synthetic sequence derived from human genome
RAARPPLLLRPVKLLRRRFRLLLALAV

SEQ ID NO: 19018 - protein, 27 aa, Artificial Sequence
  Quasi-synthetic sequence derived from human genome
LKRLLGPKLRRFLKPQGHPRLLLWFKR

SEQ ID NO: 19019 - protein, 27 aa, Artificial Sequence
  Quasi-synthetic sequence derived from human genome
AGILLFVIIFLGVVLVMKKRKLAKKRK

SEQ ID NO: 19020 - protein, 27 aa, Artificial Sequence
  Quasi-synthetic sequence derived from human genome
LLVVALGIGLFMRRRHIVRKRTLRRLL

SEQ ID NO: 19021 - protein, 27 aa, Artificial Sequence
  Quasi-synthetic sequence derived from human genome
IFIIFRSPVFRIFFHKIFIRPLRYRSR

SEQ ID NO: 19022 - protein, 27 aa, Artificial Sequence
  Quasi-synthetic sequence derived from human genome
LLRGLRRRNVQKKVALAKKLLAKLRFL

SEQ ID NO: 19023 - protein, 27 aa, Artificial Sequence
  Quasi-synthetic sequence derived from human genome
VLGFLRVVRFVRILRIFKLTRHFVGLR

SEQ ID NO: 19024 - protein, 27 aa, Artificial Sequence
  Quasi-synthetic sequence derived from human genome
FTKINAFNWAKVRKLSFKRKRFLIKLR

SEQ ID NO: 19025 - protein, 27 aa, Artificial Sequence
  Quasi-synthetic sequence derived from human genome
RRKSWRLEFLFLRRRCFLLTFYLWFLF

SEQ ID NO: 19026 - protein, 27 aa, Artificial Sequence
  Quasi-synthetic sequence derived from human genome
RKLTHLRKRIHRPRRRTTRRWKRWFKF

SEQ ID NO: 19027 - protein, 27 aa, Artificial Sequence
  Quasi-synthetic sequence derived from human genome
IPLLLMLVLYGRIFRAARFRIRKTVKK

SEQ ID NO: 19028 - protein, 27 aa, Artificial Sequence
  Quasi-synthetic sequence derived from human genome
LFRVIRLARIGRILRLIRGAKGIRTLL

SEQ ID NO: 19029 - protein, 27 aa, Artificial Sequence
  Quasi-synthetic sequence derived from human genome
RRRGFGLFFFLRLHRLLLLFLVLRGTL

SEQ ID NO: 19030 - protein, 27 aa, Artificial Sequence
  Quasi-synthetic sequence derived from human genome
LRAPRKKIHRRVLKKNPLKNLRIMLKL

SEQ ID NO: 19031 - protein, 27 aa, Artificial Sequence
  Quasi-synthetic sequence derived from human genome
RLLRLIILLRIFHLFHQKRQLEKLIRR

SEQ ID NO: 19032 - protein, 27 aa, Artificial Sequence
  Quasi-synthetic sequence derived from human genome
VFLPIVVLIFKSILFLPCLRKKILKIR

SEQ ID NO: 19033 - protein, 27 aa, Artificial Sequence
  Quasi-synthetic sequence derived from human genome
RLSLIMQLVALLLVVLWIRWKCRRLRI

SEQ ID NO: 19034 - protein, 27 aa, Artificial Sequence
  Quasi-synthetic sequence derived from human genome
MKRALGRRKGVWLRLRKILFCVLGLYI

SEQ ID NO: 19035 - protein, 27 aa, Artificial Sequence
  Quasi-synthetic sequence derived from human genome
KRFLKHAGKWSLRWFLSPRWILQFRRW

SEQ ID NO: 19036 - protein, 27 aa, Artificial Sequence
  Quasi-synthetic sequence derived from human genome
RCLRGFFIKRRFRSLRHKIILLQSRAR

SEQ ID NO: 19037 - protein, 27 aa, Artificial Sequence
  Quasi-synthetic sequence derived from human genome
YFALRRKKKKTIKMLMLVVVLFALCWF

SEQ ID NO: 19038 - protein, 27 aa, Artificial Sequence
  Quasi-synthetic sequence derived from human genome
LFRVIRLARIGRILRLIKGAKGIRTLL

SEQ ID NO: 19039 - protein, 27 aa, Artificial Sequence
  Quasi-synthetic sequence derived from human genome
FAGLLLLMLLILALWKIGFFKRPLKKK

SEQ ID NO: 19040 - protein, 27 aa, Artificial Sequence
  Quasi-synthetic sequence derived from human genome
RIWVFRLKRRKRIARRLVDTLRNCFMF

SEQ ID NO: 19041 - protein, 27 aa, Artificial Sequence
  Quasi-synthetic sequence derived from human genome
SKRWTHLVRLLRLIILIRIFHLLHQKR

SEQ ID NO: 19042 - protein, 27 aa, Artificial Sequence
  Quasi-synthetic sequence derived from human genome
RALSRRYLRRLLLLLLLLLLRQPVTRA

SEQ ID NO: 19043 - protein, 27 aa, Artificial Sequence
  Quasi-synthetic sequence derived from human genome
RLIPIIVLLLQKAWRGTLARWRCRRLR

SEQ ID NO: 19044 - protein, 27 aa, Artificial Sequence
  Quasi-synthetic sequence derived from human genome
YLKRFKVMKPKVLRSWCRQILKGLLFL

SEQ ID NO: 19045 - protein, 27 aa, Artificial Sequence
  Quasi-synthetic sequence derived from human genome
PFIVTLLVYIKIYIVLRRRRKRVNTKR

SEQ ID NO: 19046 - protein, 27 aa, Artificial Sequence
  Quasi-synthetic sequence derived from human genome
IKTIKSLRVLRVLRPLKTIKRLPKLKA

SEQ ID NO: 19047 - protein, 27 aa, Artificial Sequence
  Quasi-synthetic sequence derived from human genome
FRLLRVLKLVRFMPALRRQLVVLMKTM

SEQ ID NO: 19048 - protein, 27 aa, Artificial Sequence
  Quasi-synthetic sequence derived from human genome
MAKLWFKFQRYFRRKPVRFFTFLALYL

SEQ ID NO: 19049 - protein, 27 aa, Artificial Sequence
  Quasi-synthetic sequence derived from human genome
LARWRCRRLRAIYTIMRWFRRHKVRAH

SEQ ID NO: 19050 - protein, 27 aa, Artificial Sequence
  Quasi-synthetic sequence derived from human genome
LLRLLGLRRGLRRLRRLWAGPRVQRGR

SEQ ID NO: 19051 - protein, 27 aa, Artificial Sequence
  Quasi-synthetic sequence derived from human genome
LFRVIRLARIGRVLRLIRGAKGIRTLL

SEQ ID NO: 19052 - protein, 27 aa, Artificial Sequence
  Quasi-synthetic sequence derived from human genome
LLKRLRLLPALLILRAFKPHRKIRDYR

SEQ ID NO: 19053 - protein, 27 aa, Artificial Sequence
  Quasi-synthetic sequence derived from human genome
KLRAACIRIQKTIRGWLLRKKYLRMRK

SEQ ID NO: 19054 - protein, 27 aa, Artificial Sequence
  Quasi-synthetic sequence derived from human genome
LKSRKRRKMSKKLPPVIIKYIIINRFR

SEQ ID NO: 19055 - protein, 27 aa, Artificial Sequence
  Quasi-synthetic sequence derived from human genome
RLLRLIILIRIFHLLHQKRQLEKLMRR

SEQ ID NO: 19056 - protein, 27 aa, Artificial Sequence
  Quasi-synthetic sequence derived from human genome
MFWLIFLLIILSYIKIGKNLLRISKRR

SEQ ID NO: 19057 - protein, 27 aa, Artificial Sequence
  Quasi-synthetic sequence derived from human genome
LFRVIRLARIGRILRLVKGAKGIRTLL

SEQ ID NO: 19058 - protein, 27 aa, Artificial Sequence
  Quasi-synthetic sequence derived from human genome
FRARFRRLWPCGRRRRHRARRALRRVR

SEQ ID NO: 19059 - protein, 27 aa, Artificial Sequence
  Quasi-synthetic sequence derived from human genome
LKIRRRKMNHHKYRKLVKKTRFLRRKV

SEQ ID NO: 19060 - protein, 27 aa, Artificial Sequence
  Quasi-synthetic sequence derived from human genome
LKTYLKRFKVMKIKVLRSWCRQILKGL

SEQ ID NO: 19061 - protein, 27 aa, Artificial Sequence
  Quasi-synthetic sequence derived from human genome
RKVLYCVVIIQKNYRAFLLRRRFLHLK

SEQ ID NO: 19062 - protein, 27 aa, Artificial Sequence
  Quasi-synthetic sequence derived from human genome
IWVPVKVILHKKRYIYRKIKGWRPVLM

SEQ ID NO: 19063 - protein, 27 aa, Artificial Sequence
  Quasi-synthetic sequence derived from human genome
VVLFVIFILVVLFIVFRKKVFRKNYSR

SEQ ID NO: 19064 - protein, 27 aa, Artificial Sequence
  Quasi-synthetic sequence derived from human genome
LVIVGLTFAVYVRRKSIKKKRALRRFL

SEQ ID NO: 19065 - protein, 27 aa, Artificial Sequence
  Quasi-synthetic sequence derived from human genome
FAELKIKRLRKKFAQKMLRKARRKLIY

SEQ ID NO: 19066 - protein, 27 aa, Artificial Sequence
  Quasi-synthetic sequence derived from human genome
IFLLIIIFLTVLLLKLRKRHRKHTQQR

SEQ ID NO: 19067 - protein, 27 aa, Artificial Sequence
  Quasi-synthetic sequence derived from human genome
WLVWLRFHKKKWQLQARQRLARRKRQR

SEQ ID NO: 19068 - protein, 27 aa, Artificial Sequence
  Quasi-synthetic sequence derived from human genome
VRVLLRFQRKLSVLLLLLGRRRVDFRL

SEQ ID NO: 19069 - protein, 27 aa, Artificial Sequence
  Quasi-synthetic sequence derived from human genome
WKVLKVVAKVIRALLRILCCLLKAICR

SEQ ID NO: 19070 - protein, 27 aa, Artificial Sequence
  Quasi-synthetic sequence derived from human genome
VGILLFLILVGLLIFFLKRRNKKKQQK

SEQ ID NO: 19071 - protein, 27 aa, Artificial Sequence
  Quasi-synthetic sequence derived from human genome
CRGRKRCIKKFSIQRFPKILVLHLKRF

SEQ ID NO: 19072 - protein, 27 aa, Artificial Sequence
  Quasi-synthetic sequence derived from human genome
WAKIRKLSFKRKHFLIKLHANILVLCK

SEQ ID NO: 19073 - protein, 27 aa, Artificial Sequence
  Quasi-synthetic sequence derived from human genome
FKHNFLLLFMKLRWFLKRWRQGKVLPS

SEQ ID NO: 19074 - protein, 27 aa, Artificial Sequence
  Quasi-synthetic sequence derived from human genome
WRRRSCWRKWKQLSRLQRNMILFLLAF

SEQ ID NO: 19075 - protein, 27 aa, Artificial Sequence
  Quasi-synthetic sequence derived from human genome
VFMIRKFRRSLLQLLCLRLLRCQRPAK

SEQ ID NO: 19076 - protein, 27 aa, Artificial Sequence
  Quasi-synthetic sequence derived from human genome
FILVIVGLTFAVYVRRKSIKKKRALRR

SEQ ID NO: 19077 - protein, 27 aa, Artificial Sequence
  Quasi-synthetic sequence derived from human genome
FLRMLIQVCLYFYCKFLWRCLKFVMRK

SEQ ID NO: 19078 - protein, 27 aa, Artificial Sequence
  Quasi-synthetic sequence derived from human genome
FRNLRLPKRLRVVYFLARTRLAQRLIM

SEQ ID NO: 19079 - protein, 27 aa, Artificial Sequence
  Quasi-synthetic sequence derived from human genome
SRPFTRFRTAVRVVIAILRLRFLVKKW

SEQ ID NO: 19080 - protein, 27 aa, Artificial Sequence
  Quasi-synthetic sequence derived from human genome
VILATLGVALLFIVRKKRKEKRLKRLR

SEQ ID NO: 19081 - protein, 27 aa, Artificial Sequence
  Quasi-synthetic sequence derived from human genome
LGLLHALLLVLLLCRLRRLRARARARA

SEQ ID NO: 19082 - protein, 27 aa, Artificial Sequence
  Quasi-synthetic sequence derived from human genome
RFRSLLVRRRFISLKKATIFVQRKYRA

SEQ ID NO: 19083 - protein, 27 aa, Artificial Sequence
  Quasi-synthetic sequence derived from human genome
LRLLLFFRFKRTLDRICVLFLLGWHRK

SEQ ID NO: 19084 - protein, 27 aa, Artificial Sequence
  Quasi-synthetic sequence derived from human genome
KAYRIMKRHLRLIHPTKLYKLMLRRFG

SEQ ID NO: 19085 - protein, 27 aa, Artificial Sequence
  Quasi-synthetic sequence derived from human genome
AVLVKKYQAVLRRKALLIFLVVHRLRW

SEQ ID NO: 19086 - protein, 27 aa, Artificial Sequence
  Quasi-synthetic sequence derived from human genome
RLRINRFAWPKILKISYKRSNFYIKIR

SEQ ID NO: 19087 - protein, 27 aa, Artificial Sequence
  Quasi-synthetic sequence derived from human genome
RSKKKKKKKKKRQCFAFLIYFRLGIKM

SEQ ID NO: 19088 - protein, 27 aa, Artificial Sequence
  Quasi-synthetic sequence derived from human genome
RKNVRVLSRTSKFRRLRQLLRRRKKRW

SEQ ID NO: 19089 - protein, 27 aa, Artificial Sequence
  Quasi-synthetic sequence derived from human genome
RKGVWLRLRKILFCVLGLYIAIPFLIK

SEQ ID NO: 19090 - protein, 27 aa, Artificial Sequence
  Quasi-synthetic sequence derived from human genome
RLCLRLLLLLGYRRRCPPLLRGLVQRW

SEQ ID NO: 19091 - protein, 27 aa, Artificial Sequence
  Quasi-synthetic sequence derived from human genome
LRKRFGGRRIRLYLSVLSLFLYIFTKI

SEQ ID NO: 19092 - protein, 27 aa, Artificial Sequence
  Quasi-synthetic sequence derived from human genome
KTKRRLVLGLREVLKHLKLKKLKCVII

SEQ ID NO: 19093 - protein, 27 aa, Artificial Sequence
  Quasi-synthetic sequence derived from human genome
ILLKKYLMKRRWKKNFIAVSAANRFKK

SEQ ID NO: 19094 - protein, 27 aa, Artificial Sequence
  Quasi-synthetic sequence derived from human genome
RTFRLMRVLKLVRFLPALQRQLVVLMK

SEQ ID NO: 19095 - protein, 27 aa, Artificial Sequence
  Quasi-synthetic sequence derived from human genome
IQKYFFSPTLFRVIRLARIGRILRLIR

SEQ ID NO: 19096 - protein, 27 aa, Artificial Sequence
  Quasi-synthetic sequence derived from human genome
LTRFVKWPRYIRLQRQRAILYKRLKVP

SEQ ID NO: 19097 - protein, 27 aa, Artificial Sequence
  Quasi-synthetic sequence derived from human genome
LVILAMGLWVIRVQKRHKMPRMKKLMR

SEQ ID NO: 19098 - protein, 27 aa, Artificial Sequence
  Quasi-synthetic sequence derived from human genome
VRIRVIKKKKVIMKKRKKLTLTRPTPL

SEQ ID NO: 19099 - protein, 27 aa, Artificial Sequence
  Quasi-synthetic sequence derived from human genome
PGARRRQRGRLMRRLVRRLRRWGLLPR

SEQ ID NO: 19100 - protein, 27 aa, Artificial Sequence
  Quasi-synthetic sequence derived from human genome
FLRLFRAARLIKLLRQGYTIRILLWTF

SEQ ID NO: 19101 - protein, 27 aa, Artificial Sequence
  Quasi-synthetic sequence derived from human genome
RVKRSVTRIKKRSRSVFYRLTILILVF

SEQ ID NO: 19102 - protein, 27 aa, Artificial Sequence
  Quasi-synthetic sequence derived from human genome
WFFWIRLYKIRRGRTRPQALLFLCMIL

SEQ ID NO: 19103 - protein, 27 aa, Artificial Sequence
  Quasi-synthetic sequence derived from human genome
LFFWMLFKALLIIYGILVIFRRMMKSR

SEQ ID NO: 19104 - protein, 27 aa, Artificial Sequence
  Quasi-synthetic sequence derived from human genome
RKIVQVMRKQKTINRFLMRKRLLFPAL

SEQ ID NO: 19105 - protein, 27 aa, Artificial Sequence
  Quasi-synthetic sequence derived from human genome
LLRLIILIRIFHLLHQKRQLEKLMRRL

SEQ ID NO: 19106 - protein, 27 aa, Artificial Sequence
  Quasi-synthetic sequence derived from human genome
CILLLIVLFILLCCLYRLCKKSKPIKK

SEQ ID NO: 19107 - protein, 27 aa, Artificial Sequence
  Quasi-synthetic sequence derived from human genome
RRRNTPFHERFFRFLLRKLYVFRRSFL

SEQ ID NO: 19108 - protein, 27 aa, Artificial Sequence
  Quasi-synthetic sequence derived from human genome
VLQFQNVRRVVQIFRIMRILRILKLAR

SEQ ID NO: 19109 - protein, 27 aa, Artificial Sequence
  Quasi-synthetic sequence derived from human genome
RRRRRRRRRRDLLLSQLCFLASVALLL

SEQ ID NO: 19110 - protein, 27 aa, Artificial Sequence
  Quasi-synthetic sequence derived from human genome
FLKLFRAARLIKLLRQGYTIRILLWTF

SEQ ID NO: 19111 - protein, 27 aa, Artificial Sequence
  Quasi-synthetic sequence derived from human genome
VNALLVLLALAAWASRWLRRKLRARRK

SEQ ID NO: 19112 - protein, 27 aa, Artificial Sequence
  Quasi-synthetic sequence derived from human genome
LPRLCIRKFFPKKKCFVFDLPIHRRKL

SEQ ID NO: 19113 - protein, 27 aa, Artificial Sequence
  Quasi-synthetic sequence derived from human genome
ILRRVLVLMASKHAFLALCALRFKRKI

SEQ ID NO: 19114 - protein, 27 aa, Artificial Sequence
  Quasi-synthetic sequence derived from human genome
VVKMRKEVKRIRVLVIRKLVRSVGRLK

SEQ ID NO: 19115 - protein, 27 aa, Artificial Sequence
  Quasi-synthetic sequence derived from human genome
IAMFLVIFPMFTFPKKLPPRHKKKKKK

SEQ ID NO: 19116 - protein, 27 aa, Artificial Sequence
  Quasi-synthetic sequence derived from human genome
LRVIRLVRVFRIFKLSRHSKGLQILGK

SEQ ID NO: 19117 - protein, 27 aa, Artificial Sequence
  Quasi-synthetic sequence derived from human genome
RLRINRFAWPKVLKISYKRNNFYIKIR

SEQ ID NO: 19118 - protein, 27 aa, Artificial Sequence
  Quasi-synthetic sequence derived from human genome
RLRINRFAWPKILKISYKRSNFYIKVR

SEQ ID NO: 19119 - protein, 27 aa, Artificial Sequence
  Quasi-synthetic sequence derived from human genome
RLRKRVNAALVIQKYWRRVLAQRKLLM

SEQ ID NO: 19120 - protein, 27 aa, Artificial Sequence
  Quasi-synthetic sequence derived from human genome
ALFKAAEFAKLSIKWMIKIRKRYLKRR

SEQ ID NO: 19121 - protein, 27 aa, Artificial Sequence
  Quasi-synthetic sequence derived from human genome
KRLFVIRPSRFYDRRFLKLLRFYIALT

SEQ ID NO: 19122 - protein, 27 aa, Artificial Sequence
  Quasi-synthetic sequence derived from human genome
RLRELRIRCVARKFLYLWIRMTFGRVF

SEQ ID NO: 19123 - protein, 27 aa, Artificial Sequence
  Quasi-synthetic sequence derived from human genome
RRFLGKKYRKYYYKSPKPLLRPFLCRI

SEQ ID NO: 19124 - protein, 27 aa, Artificial Sequence
  Quasi-synthetic sequence derived from human genome
LAILRVIRLVRVFRIFKLSRHSKGLQI

SEQ ID NO: 19125 - protein, 27 aa, Artificial Sequence
  Quasi-synthetic sequence derived from human genome
RFRKYLRQLFHRRVAVHLVKWLPFLSV

SEQ ID NO: 19126 - protein, 27 aa, Artificial Sequence
  Quasi-synthetic sequence derived from human genome
LRPLKKFLRKLHLPRDLPQKKKLKYMK

SEQ ID NO: 19127 - protein, 27 aa, Artificial Sequence
  Quasi-synthetic sequence derived from human genome
RMQVFAMARLRFLKLKRQTKVLLTLLL

SEQ ID NO: 19128 - protein, 27 aa, Artificial Sequence
  Quasi-synthetic sequence derived from human genome
RRGIGYLKLICFLIPFLLSLKKKMKVP

SEQ ID NO: 19129 - protein, 27 aa, Artificial Sequence
  Quasi-synthetic sequence derived from human genome
RMIRKHVRKNYMKFKAKFSLIQFHRII

SEQ ID NO: 19130 - protein, 27 aa, Artificial Sequence
  Quasi-synthetic sequence derived from human genome
LKTYLKRFKVMKPKVLRSWCRQILKGL

SEQ ID NO: 19131 - protein, 27 aa, Artificial Sequence
  Quasi-synthetic sequence derived from human genome
RIRRLLRPFFLLQNSSMMKKTLKCIRW

SEQ ID NO: 19132 - protein, 27 aa, Artificial Sequence
  Quasi-synthetic sequence derived from human genome
WSLRRRPARTLGLLLLVVLGFLVLRRL

SEQ ID NO: 19133 - protein, 27 aa, Artificial Sequence
  Quasi-synthetic sequence derived from human genome
AIHLCCRRRRARLRFMKQKFNIVCLKI

SEQ ID NO: 19134 - protein, 27 aa, Artificial Sequence
  Quasi-synthetic sequence derived from human genome
SFLIFILFIIVQLFIMKLRKAHVIWKK

SEQ ID NO: 19135 - protein, 27 aa, Artificial Sequence
  Quasi-synthetic sequence derived from human genome
IGRRLQARRFRRSRRTGRLVVLIILTF

SEQ ID NO: 19136 - protein, 27 aa, Artificial Sequence
  Quasi-synthetic sequence derived from human genome
MLLRKRYRHRPCRLQFLLLLLMLGCVL

SEQ ID NO: 19137 - protein, 27 aa, Artificial Sequence
  Quasi-synthetic sequence derived from human genome
LPRLCIRKFFPKKKCFVFDRPVHRRKL

SEQ ID NO: 19138 - protein, 27 aa, Artificial Sequence
  Quasi-synthetic sequence derived from human genome
FGLLLKKIMAILIKRFHHTRRNWKGLI

SEQ ID NO: 19139 - protein, 27 aa, Artificial Sequence
  Quasi-synthetic sequence derived from human genome
IKLLPLRTFRVFRALKAISVVSRLKVI

SEQ ID NO: 19140 - protein, 27 aa, Artificial Sequence
  Quasi-synthetic sequence derived from human genome
VLRVLRLLRTLRPLRVISRAPGLKLVV

SEQ ID NO: 19141 - protein, 27 aa, Artificial Sequence
  Quasi-synthetic sequence derived from human genome
PLRLRHLRRPRVARLLCLGVWALILVF

SEQ ID NO: 19142 - protein, 27 aa, Artificial Sequence
  Quasi-synthetic sequence derived from human genome
KIVPKKKKPLKLGPIKKKDLKKLVLYL

SEQ ID NO: 19143 - protein, 27 aa, Artificial Sequence
  Quasi-synthetic sequence derived from human genome
RFIRHKCKQRFTKITQYLIRIRKLTLK

SEQ ID NO: 19144 - protein, 27 aa, Artificial Sequence
  Quasi-synthetic sequence derived from human genome
LLILILLIKKLIIFILKKTREKKKECL

SEQ ID NO: 19145 - protein, 27 aa, Artificial Sequence
  Quasi-synthetic sequence derived from human genome
LIFFFIALVFFLYRRRKGSRKDVTLRK

SEQ ID NO: 19146 - protein, 27 aa, Artificial Sequence
  Quasi-synthetic sequence derived from human genome
RSFRRHIRQHSALTRLRLRNVFRRFLR

SEQ ID NO: 19147 - protein, 27 aa, Artificial Sequence
  Quasi-synthetic sequence derived from human genome
IVKQGYVKIRSRKLGIFRRCWLVFKKA

SEQ ID NO: 19148 - protein, 27 aa, Artificial Sequence
  Quasi-synthetic sequence derived from human genome
WRRWNRFCRRKCRAAVKSNVFYWLVIF

SEQ ID NO: 19149 - protein, 27 aa, Artificial Sequence
  Quasi-synthetic sequence derived from human genome
RLARIGRILRLIRGAKGIRTLLFALMM

SEQ ID NO: 19150 - protein, 27 aa, Artificial Sequence
  Quasi-synthetic sequence derived from human genome
KLLAKKRVVRMLLVIVVLFFLCWLPVY

SEQ ID NO: 19151 - protein, 27 aa, Artificial Sequence
  Quasi-synthetic sequence derived from human genome
IYIYMNFFFFFSVGRKFKKFNKVRVVR

SEQ ID NO: 19152 - protein, 27 aa, Artificial Sequence
  Quasi-synthetic sequence derived from human genome
RAQMLIRIVLFLQKVWRGTLARMRYKR

SEQ ID NO: 19153 - protein, 27 aa, Artificial Sequence
  Quasi-synthetic sequence derived from human genome
RRWRRWNRFNRRRCRAAVKSVTFYWLV

SEQ ID NO: 19154 - protein, 27 aa, Artificial Sequence
  Quasi-synthetic sequence derived from human genome
LIFCLCSLVGILHLQRALVLRRKRKRM

SEQ ID NO: 19155 - protein, 27 aa, Artificial Sequence
  Quasi-synthetic sequence derived from human genome
WPRLIRKLRCYLKEMKNLRKLVFSRCL

SEQ ID NO: 19156 - protein, 27 aa, Artificial Sequence
  Quasi-synthetic sequence derived from human genome
RSRTVAKKLVVFRPRLFLLCFGIIFLI

SEQ ID NO: 19157 - protein, 27 aa, Artificial Sequence
  Quasi-synthetic sequence derived from human genome
MLQVSKKRLISVKNYRMIKKRKGLRLI

SEQ ID NO: 19158 - protein, 27 aa, Artificial Sequence
  Quasi-synthetic sequence derived from human genome
VVKILRVLRVLRPLRAINRAKGLKHVV

SEQ ID NO: 19159 - protein, 27 aa, Artificial Sequence
  Quasi-synthetic sequence derived from human genome
ILRVIRLVRVFRIFKLSRHSKGLQILG

SEQ ID NO: 19160 - protein, 27 aa, Artificial Sequence
  Quasi-synthetic sequence derived from human genome
RPLRARVLVTRRRVRALIAVLWAVALL

SEQ ID NO: 19161 - protein, 27 aa, Artificial Sequence
  Quasi-synthetic sequence derived from human genome
RIIMRFRKRKNFKKKRIVTTPQTVLRI

SEQ ID NO: 19162 - protein, 27 aa, Artificial Sequence
  Quasi-synthetic sequence derived from human genome
LLLLLVVIILILAFWVLPKYKTRKAMR

SEQ ID NO: 19163 - protein, 27 aa, Artificial Sequence
  Quasi-synthetic sequence derived from human genome
WRFIRVFIKTIRRDIFGGLVLLKVKAK

SEQ ID NO: 19164 - protein, 27 aa, Artificial Sequence
  Quasi-synthetic sequence derived from human genome
WKTWIFWKTWIFWKTWIFRKTYIGWKT

SEQ ID NO: 19165 - protein, 27 aa, Artificial Sequence
  Quasi-synthetic sequence derived from human genome
RLKRLRNIHYLFNTALFLIAWRLLIAR

SEQ ID NO: 19166 - protein, 27 aa, Artificial Sequence
  Quasi-synthetic sequence derived from human genome
AQLLMVLRCLRPLRIFKLVPQMRKVVR

SEQ ID NO: 19167 - protein, 27 aa, Artificial Sequence
  Quasi-synthetic sequence derived from human genome
RIFGKLVFLPLRLVWKEVILRKILILV

SEQ ID NO: 19168 - protein, 27 aa, Artificial Sequence
  Quasi-synthetic sequence derived from human genome
LVLILKTIRRRLPFSKWRLAFRFAGPH

SEQ ID NO: 19169 - protein, 27 aa, Artificial Sequence
  Quasi-synthetic sequence derived from human genome
LLRRRFLHLKKAAIVFQKQLRGQIARR

SEQ ID NO: 19170 - protein, 27 aa, Artificial Sequence
  Quasi-synthetic sequence derived from human genome
RKQLVLRRGLLLLGVFLILLVGILVRF

SEQ ID NO: 19171 - protein, 27 aa, Artificial Sequence
  Quasi-synthetic sequence derived from human genome
ILLLLLIIALMLWRLHWRRLLSKAERR

SEQ ID NO: 19172 - protein, 27 aa, Artificial Sequence
  Quasi-synthetic sequence derived from human genome
VLRRIILLQRWFRVLLCRQHFLHLRQA

SEQ ID NO: 19173 - protein, 27 aa, Artificial Sequence
  Quasi-synthetic sequence derived from human genome
WLRRKLRGKRRPVIAFCLLMILSAMAV

SEQ ID NO: 19174 - protein, 27 aa, Artificial Sequence
  Quasi-synthetic sequence derived from human genome
RLKLFFIKNQRSSLRIRLFNFSLKLLS

SEQ ID NO: 19175 - protein, 27 aa, Artificial Sequence
  Quasi-synthetic sequence derived from human genome
ALRFLLGRLPWRVASGARRFRRWLNRY

SEQ ID NO: 19176 - protein, 27 aa, Artificial Sequence
  Quasi-synthetic sequence derived from human genome
LIFLRIKRRVKSVVLVILLGPLLFLVC

SEQ ID NO: 19177 - protein, 27 aa, Artificial Sequence
  Quasi-synthetic sequence derived from human genome
LLAVIVLVALLLLWRRRQKRRTGALVL

SEQ ID NO: 19178 - protein, 27 aa, Artificial Sequence
  Quasi-synthetic sequence derived from human genome
RLMNFFVFSRGLLQYINQRKKFRRRWV

SEQ ID NO: 19179 - protein, 27 aa, Artificial Sequence
  Quasi-synthetic sequence derived from human genome
MLRVLRLLRTLRPLRVISRAQGLKLVV

SEQ ID NO: 19180 - protein, 27 aa, Artificial Sequence
  Quasi-synthetic sequence derived from human genome
LRIARFRFRAFHFLNRFPSVYLRCKMV

SEQ ID NO: 19181 - protein, 27 aa, Artificial Sequence
  Quasi-synthetic sequence derived from human genome
LRINRFPWPKVLKISYKRSSFFIKIRP

SEQ ID NO: 19182 - protein, 27 aa, Artificial Sequence
  Quasi-synthetic sequence derived from human genome
KKTFKGLIRIFRKGVIAVLAANRLKIL

SEQ ID NO: 19183 - protein, 27 aa, Artificial Sequence
  Quasi-synthetic sequence derived from human genome
VVLGVVFGILIKRRQQKIRKYTMRRLL

SEQ ID NO: 19184 - protein, 27 aa, Artificial Sequence
  Quasi-synthetic sequence derived from human genome
IFFFLPVFCLTVLYSLIGRKLWRRRRG

SEQ ID NO: 19185 - protein, 27 aa, Artificial Sequence
  Quasi-synthetic sequence derived from human genome
LFFRKRRADMPRVFVFRALLLVLIFLF

SEQ ID NO: 19186 - protein, 27 aa, Artificial Sequence
  Quasi-synthetic sequence derived from human genome
SALARFLLKRGLRNKRIGHFLFWFLRS

SEQ ID NO: 19187 - protein, 27 aa, Artificial Sequence
  Quasi-synthetic sequence derived from human genome
PRLPVKKIRKQMKLLLLLLLLSCAAWL

SEQ ID NO: 19188 - protein, 27 aa, Artificial Sequence
  Quasi-synthetic sequence derived from human genome
KKNRKMLVILILFVIIIVLIVVLVGVK

SEQ ID NO: 19189 - protein, 27 aa, Artificial Sequence
  Quasi-synthetic sequence derived from human genome
RLKKHRWYKKILKSRDPIIFSVGWRRF

SEQ ID NO: 19190 - protein, 27 aa, Artificial Sequence
  Quasi-synthetic sequence derived from human genome
IFYFLYGKTRSRIPLLRKRRFQLCRCM

SEQ ID NO: 19191 - protein, 27 aa, Artificial Sequence
  Quasi-synthetic sequence derived from human genome
RLKSMLRLLLVKKPSVRSLALKLLAFH

SEQ ID NO: 19192 - protein, 27 aa, Artificial Sequence
  Quasi-synthetic sequence derived from human genome
VIPSPKSLWYLIKWIWTHLCKKKMRRK

SEQ ID NO: 19193 - protein, 27 aa, Artificial Sequence
  Quasi-synthetic sequence derived from human genome
IFKAIAHFKRTTFLKKHRMLGRLKYKV

SEQ ID NO: 19194 - protein, 27 aa, Artificial Sequence
  Quasi-synthetic sequence derived from human genome
FLQRLLLVHGRWSYVRICKFLRYFFYK

SEQ ID NO: 19195 - protein, 27 aa, Artificial Sequence
  Quasi-synthetic sequence derived from human genome
LVLLVVLLVVCGPLAYKKLVKKFRQKK

SEQ ID NO: 19196 - protein, 27 aa, Artificial Sequence
  Quasi-synthetic sequence derived from human genome
LRVMRLMRIFRILKLARHSTGLRAFGF

SEQ ID NO: 19197 - protein, 27 aa, Artificial Sequence
  Quasi-synthetic sequence derived from human genome
RILFLYNDLLKKRAAFTKLRRAAILRR

SEQ ID NO: 19198 - protein, 27 aa, Artificial Sequence
  Quasi-synthetic sequence derived from human genome
RKIYYLPRRYKFMSRIDKQISRFRRWL

SEQ ID NO: 19199 - protein, 27 aa, Artificial Sequence
  Quasi-synthetic sequence derived from human genome
FRRRTCIILALFILFIFSLMMGLKMLR

SEQ ID NO: 19200 - protein, 27 aa, Artificial Sequence
  Quasi-synthetic sequence derived from human genome
IRRMFRVRNCLRGLGLFLLVFSFFFLL

SEQ ID NO: 19201 - protein, 27 aa, Artificial Sequence
  Quasi-synthetic sequence derived from human genome
LRYNILTLMRMLSLKSLKKQMKKVKKM

SEQ ID NO: 19202 - protein, 27 aa, Artificial Sequence
  Quasi-synthetic sequence derived from human genome
KKNPKLINALRRCFFWRFMFYGIFLYL

SEQ ID NO: 19203 - protein, 27 aa, Artificial Sequence
  Quasi-synthetic sequence derived from human genome
LLLKRFLLARRSRRGLFAQIVLPALFV

SEQ ID NO: 19204 - protein, 27 aa, Artificial Sequence
  Quasi-synthetic sequence derived from human genome
RKRMGLKMLMMMALLVPLVYTIKRHKW

SEQ ID NO: 19205 - protein, 27 aa, Artificial Sequence
  Quasi-synthetic sequence derived from human genome
WKKKKSMIGMSTKLWKVKKALKMTIFW

SEQ ID NO: 19206 - protein, 27 aa, Artificial Sequence
  Quasi-synthetic sequence derived from human genome
LIMGNSKLREAFLKMLRFVKCFLRRRK

SEQ ID NO: 19207 - protein, 27 aa, Artificial Sequence
  Quasi-synthetic sequence derived from human genome
MKGRRRRRREYCKFALLLVLYTLVLLL

SEQ ID NO: 19208 - protein, 27 aa, Artificial Sequence
  Quasi-synthetic sequence derived from human genome
RFLLLFTFLKKNRKKKLMVFFSSCMSV

SEQ ID NO: 19209 - protein, 27 aa, Artificial Sequence
  Quasi-synthetic sequence derived from human genome
LKRRYSFRLHIGRNIARPWKLIYYRAK

SEQ ID NO: 19210 - protein, 27 aa, Artificial Sequence
  Quasi-synthetic sequence derived from human genome
YNRFRKFPFFTRPLLSKWCPKSLFKKK

SEQ ID NO: 19211 - protein, 27 aa, Artificial Sequence
  Quasi-synthetic sequence derived from human genome
AILLCILTITVITLLIFLRRRLRKQAR

SEQ ID NO: 19212 - protein, 27 aa, Artificial Sequence
  Quasi-synthetic sequence derived from human genome
FSRGRRKKKCKICKLRSFFRKLNTRLM

SEQ ID NO: 19213 - protein, 27 aa, Artificial Sequence
  Quasi-synthetic sequence derived from human genome
LKRKYWWKNLKMMIILGVICAIILIII

SEQ ID NO: 19214 - protein, 27 aa, Artificial Sequence
  Quasi-synthetic sequence derived from human genome
KRRPKRREIPLKVLVKAVLFACMLMRK

SEQ ID NO: 19215 - protein, 27 aa, Artificial Sequence
  Quasi-synthetic sequence derived from human genome
LFFRRPKASLPRVFVLRALLMVLVFLL

SEQ ID NO: 19216 - protein, 27 aa, Artificial Sequence
  Quasi-synthetic sequence derived from human genome
ARRKARRLLKTVLMILLAFLVCWGPLF

SEQ ID NO: 19217 - protein, 27 aa, Artificial Sequence
  Quasi-synthetic sequence derived from human genome
LLRKRWFQLGRSMNPRARKKRSRIPLL

SEQ ID NO: 19218 - protein, 27 aa, Artificial Sequence
  Quasi-synthetic sequence derived from human genome
IVVFVAGIFLLVVVFVLCRKMISRKKK

SEQ ID NO: 19219 - protein, 27 aa, Artificial Sequence
  Quasi-synthetic sequence derived from human genome
PGRLLRGLWQRWRRYKYRFVPWIALNL

SEQ ID NO: 19220 - protein, 27 aa, Artificial Sequence
  Quasi-synthetic sequence derived from human genome
KKSRKKMCILVLVLSVIILILGLIIWL

SEQ ID NO: 19221 - protein, 27 aa, Artificial Sequence
  Quasi-synthetic sequence derived from human genome
LSRVSKKNIFLLFKKLCSFRYRRDLLR

SEQ ID NO: 19222 - protein, 27 aa, Artificial Sequence
  Quasi-synthetic sequence derived from human genome
VLRSFRLLRVFKLAKSWPTLNMLIKII

SEQ ID NO: 19223 - protein, 27 aa, Artificial Sequence
  Quasi-synthetic sequence derived from human genome
AAKRWLGRWRRKRRWRRVRKAGPRDLL

SEQ ID NO: 19224 - protein, 27 aa, Artificial Sequence
  Quasi-synthetic sequence derived from human genome
LLIVLFCLFIFVLIYVRVFRKSRRSLN

SEQ ID NO: 19225 - protein, 27 aa, Artificial Sequence
  Quasi-synthetic sequence derived from human genome
RICRVLRSLKLLAQFRQIQIIILVLVR

SEQ ID NO: 19226 - protein, 27 aa, Artificial Sequence
  Quasi-synthetic sequence derived from human genome
IFLGLYINFRHLYKQRRRRYGQKKKKI

SEQ ID NO: 19227 - protein, 27 aa, Artificial Sequence
  Quasi-synthetic sequence derived from human genome
RHRGLRPRRQKALRMILAVVLVFFVCW

SEQ ID NO: 19228 - protein, 27 aa, Artificial Sequence
  Quasi-synthetic sequence derived from human genome
LSRCKRGKRHWKKLWFVIKGKVLYTYM

SEQ ID NO: 19229 - protein, 27 aa, Artificial Sequence
  Quasi-synthetic sequence derived from human genome
LLLSIVILYCRIYSLVRTRSRRLTFRK

SEQ ID NO: 19230 - protein, 27 aa, Artificial Sequence
  Quasi-synthetic sequence derived from human genome
LLASVLLSLLLILKAGRRWNKYFKSRR

SEQ ID NO: 19231 - protein, 27 aa, Artificial Sequence
  Quasi-synthetic sequence derived from human genome
VLLALCLLLPLLLLGGWKRWRRGRAAR

SEQ ID NO: 19232 - protein, 27 aa, Artificial Sequence
  Quasi-synthetic sequence derived from human genome
LIFLRLKRRVKSVILVVLLGPLLFLAC

SEQ ID NO: 19233 - protein, 27 aa, Artificial Sequence
  Quasi-synthetic sequence derived from human genome
FHLLRRQMVRNFRKPLIVASPKMLLRL

SEQ ID NO: 19234 - protein, 27 aa, Artificial Sequence
  Quasi-synthetic sequence derived from human genome
MGKVVQILRLMRIFRILKLARHSVGLR

SEQ ID NO: 19235 - protein, 27 aa, Artificial Sequence
  Quasi-synthetic sequence derived from human genome
LAMFFLLVLILSSVFLFRLFKRRQGRI

SEQ ID NO: 19236 - protein, 27 aa, Artificial Sequence
  Quasi-synthetic sequence derived from human genome
KKQKSTKKFWIQKLPKVLCLHLKRFHW

SEQ ID NO: 19237 - protein, 27 aa, Artificial Sequence
  Quasi-synthetic sequence derived from human genome
ILGLWKIARKWMRRKMGKWPAVVVMGW

SEQ ID NO: 19238 - protein, 27 aa, Artificial Sequence
  Quasi-synthetic sequence derived from human genome
AIQRRKWAVRIIRKFIKGFISRNKPLC

SEQ ID NO: 19239 - protein, 27 aa, Artificial Sequence
  Quasi-synthetic sequence derived from human genome
FFRRKLIDAVGFSPLRILRKRNKALRK

SEQ ID NO: 19240 - protein, 27 aa, Artificial Sequence
  Quasi-synthetic sequence derived from human genome
YFRRKEKMFRFFIRRMVKAQSFYWVVL

SEQ ID NO: 19241 - protein, 27 aa, Artificial Sequence
  Quasi-synthetic sequence derived from human genome
LALQLYVRRRKKLPSVLLFKKPSPFIF

SEQ ID NO: 19242 - protein, 27 aa, Artificial Sequence
  Quasi-synthetic sequence derived from human genome
YLFSGCFLVVLLAILLYLLRLRRIHRR

SEQ ID NO: 19243 - protein, 27 aa, Artificial Sequence
  Quasi-synthetic sequence derived from human genome
YSIKTKQIRQRIIKKFQFIKSLRCFWK

SEQ ID NO: 19244 - protein, 27 aa, Artificial Sequence
  Quasi-synthetic sequence derived from human genome
LAPRPRRRRSLRRLFSRFLLALGSRSR

SEQ ID NO: 19245 - protein, 27 aa, Artificial Sequence
  Quasi-synthetic sequence derived from human genome
MGFVRQIQLLLWKNWTLRKRQKIRFVV

SEQ ID NO: 19246 - protein, 27 aa, Artificial Sequence
  Quasi-synthetic sequence derived from human genome
KAFRDTFRLLLLCRWDKRRWRKIPKRP

SEQ ID NO: 19247 - protein, 27 aa, Artificial Sequence
  Quasi-synthetic sequence derived from human genome
RRARSRSRRISLRKKLKLPIGKRNWLK

SEQ ID NO: 19248 - protein, 27 aa, Artificial Sequence
  Quasi-synthetic sequence derived from human genome
LLSKAKQKLLRHLVPAAALRRKRKALW

SEQ ID NO: 19249 - protein, 27 aa, Artificial Sequence
  Quasi-synthetic sequence derived from human genome
LLRLFRMLRIFKLGKYWPTFQILMWSL

SEQ ID NO: 19250 - protein, 27 aa, Artificial Sequence
  Quasi-synthetic sequence derived from human genome
LRIIRLVRVFRIFKLSRHSKGLQILGH

SEQ ID NO: 19251 - protein, 27 aa, Artificial Sequence
  Quasi-synthetic sequence derived from human genome
VVVVVIIIFTVVLILLKMYNRKMRTRR

SEQ ID NO: 19252 - protein, 27 aa, Artificial Sequence
  Quasi-synthetic sequence derived from human genome
LAKIILALKVSRKNLLNVCKLIFKISR

SEQ ID NO: 19253 - protein, 27 aa, Artificial Sequence
  Quasi-synthetic sequence derived from human genome
LIILLIFRLIWRSVKKWQIIKGTGIIL

SEQ ID NO: 19254 - protein, 27 aa, Artificial Sequence
  Quasi-synthetic sequence derived from human genome
RKHLNKLRNIRYGFNTILVILIWRIFI

SEQ ID NO: 19255 - protein, 27 aa, Artificial Sequence
  Quasi-synthetic sequence derived from human genome
MLGSLVLRRKALAPRLLLRLLRSPTLR

SEQ ID NO: 19256 - protein, 27 aa, Artificial Sequence
  Quasi-synthetic sequence derived from human genome
FLRLHCGLWVRRKAGYKKKLWKKTPAR

SEQ ID NO: 19257 - protein, 27 aa, Artificial Sequence
  Quasi-synthetic sequence derived from human genome
CLLGRLLIYKQGRKLFPIKLKNKKGLV

SEQ ID NO: 19258 - protein, 27 aa, Artificial Sequence
  Quasi-synthetic sequence derived from human genome
IRLRLSKLRRCVQWLKVMGLFAFVVLC

SEQ ID NO: 19259 - protein, 27 aa, Artificial Sequence
  Quasi-synthetic sequence derived from human genome
KRKIPKLVLRINAIYEVRRGKKRVKRL

SEQ ID NO: 19260 - protein, 27 aa, Artificial Sequence
  Quasi-synthetic sequence derived from human genome
MVVFIILVIGVCTCCHPLRKRRKRKKK

SEQ ID NO: 19261 - protein, 27 aa, Artificial Sequence
  Quasi-synthetic sequence derived from human genome
FIRPKLVTIIRSGVKPRKAVRILLNKK

SEQ ID NO: 19262 - protein, 27 aa, Artificial Sequence
  Quasi-synthetic sequence derived from human genome
IRKRLRCRRKTVLVLMCILTAYVLCWA

SEQ ID NO: 19263 - protein, 27 aa, Artificial Sequence
  Quasi-synthetic sequence derived from human genome
KKKIKPTLPLRIFINVSRFFCVQLKKM

SEQ ID NO: 19264 - protein, 27 aa, Artificial Sequence
  Quasi-synthetic sequence derived from human genome
LKHLCRLKIRKCMGRLHLRCPVFMSFL

SEQ ID NO: 19265 - protein, 27 aa, Artificial Sequence
  Quasi-synthetic sequence derived from human genome
WLRKSPPEKKLRRYAWKKRWFILRSGR

SEQ ID NO: 19266 - protein, 27 aa, Artificial Sequence
  Quasi-synthetic sequence derived from human genome
WRRQIYAVATLRFLKLRRERRALLCLL

SEQ ID NO: 19267 - protein, 27 aa, Artificial Sequence
  Quasi-synthetic sequence derived from human genome
KYWRMYVVRRRYKIRRAATIVLQSYLR

SEQ ID NO: 19268 - protein, 27 aa, Artificial Sequence
  Quasi-synthetic sequence derived from human genome
RLSLKSFLILPFQRITRLKLLLQNILK

SEQ ID NO: 19269 - protein, 27 aa, Artificial Sequence
  Quasi-synthetic sequence derived from human genome
LLKQGIPWKKIPLNALIRRFAHLLVKK

SEQ ID NO: 19270 - protein, 27 aa, Artificial Sequence
  Quasi-synthetic sequence derived from human genome
RRVFQAMWLSFLKHKLPLSLYKKVLLI

SEQ ID NO: 19271 - protein, 27 aa, Artificial Sequence
  Quasi-synthetic sequence derived from human genome
FKRAFVRILGCQCRGRGRRRRRRRRRL

SEQ ID NO: 19272 - protein, 27 aa, Artificial Sequence
  Quasi-synthetic sequence derived from human genome
PLVVTLLVRYRHYFRLLVRTVLLRSLR

SEQ ID NO: 19273 - protein, 27 aa, Artificial Sequence
  Quasi-synthetic sequence derived from human genome
LRRNFMNIRPVKLKNLILLVKHWYRQV

SEQ ID NO: 19274 - protein, 27 aa, Artificial Sequence
  Quasi-synthetic sequence derived from human genome
RRLRKNLRALVVVHATWYVKAFLALLR

SEQ ID NO: 19275 - protein, 27 aa, Artificial Sequence
  Quasi-synthetic sequence derived from human genome
KILLRRPNEKKSKAVRLIFVIMIIFFL

SEQ ID NO: 19276 - protein, 27 aa, Artificial Sequence
  Quasi-synthetic sequence derived from human genome
IMFITIVFCAAGIVVLVLHRRRRYKKK

SEQ ID NO: 19277 - protein, 27 aa, Artificial Sequence
  Quasi-synthetic sequence derived from human genome
KARRLTILLLLAFYVCFLPFHILRVIR

SEQ ID NO: 19278 - protein, 27 aa, Artificial Sequence
  Quasi-synthetic sequence derived from human genome
MVLQRRKFLQMKRRKYGFIYKTHLFGR

SEQ ID NO: 19279 - protein, 27 aa, Artificial Sequence
  Quasi-synthetic sequence derived from human genome
LFRATRKPLSGRTPRLVYKWFLLIYKL

SEQ ID NO: 19280 - protein, 27 aa, Artificial Sequence
  Quasi-synthetic sequence derived from human genome
LRTLFRSRSKRRHRTVKLIFAIVVAYF

SEQ ID NO: 19281 - protein, 27 aa, Artificial Sequence
  Quasi-synthetic sequence derived from human genome
LRALRLLRIFKVTKYWASLRNLVVSLL

SEQ ID NO: 19282 - protein, 27 aa, Artificial Sequence
  Quasi-synthetic sequence derived from human genome
LLRGARAALLLLLPPRLLARPSLLLRR

SEQ ID NO: 19283 - protein, 27 aa, Artificial Sequence
  Quasi-synthetic sequence derived from human genome
FKLLSSLPRWRRIAQKIIRERRKKRVP

SEQ ID NO: 19284 - protein, 27 aa, Artificial Sequence
  Quasi-synthetic sequence derived from human genome
VILFVYLVIRALRLWRTAKLQVTLKKY

SEQ ID NO: 19285 - protein, 27 aa, Artificial Sequence
  Quasi-synthetic sequence derived from human genome
LIRKKFRMMKIPKPILFGLNIAMKKQT

SEQ ID NO: 19286 - protein, 27 aa, Artificial Sequence
  Quasi-synthetic sequence derived from human genome
LFSYLIEKVKRKKNVLRLCCKKLKIFA

SEQ ID NO: 19287 - protein, 27 aa, Artificial Sequence
  Quasi-synthetic sequence derived from human genome
LRVKLTVRYKRVTTHRRIWLALGLCWL

SEQ ID NO: 19288 - protein, 27 aa, Artificial Sequence
  Quasi-synthetic sequence derived from human genome
ARIRRLGFSHRILFANFIKRYYLLCYK

SEQ ID NO: 19289 - protein, 27 aa, Artificial Sequence
  Quasi-synthetic sequence derived from human genome
KKKKVSIMVSVDGVKVILKKKKKLLLL

SEQ ID NO: 19290 - protein, 27 aa, Artificial Sequence
  Quasi-synthetic sequence derived from human genome
LKRIRKIKNVTNQIALLKLGKLPLLYK

SEQ ID NO: 19291 - protein, 27 aa, Artificial Sequence
  Quasi-synthetic sequence derived from human genome
LLKLNQLKFRKKKLRFGRSRIHEWGLF

SEQ ID NO: 19292 - protein, 27 aa, Artificial Sequence
  Quasi-synthetic sequence derived from human genome
VLLLLFVISITTIIVIFLNRRRRRERR

SEQ ID NO: 19293 - protein, 27 aa, Artificial Sequence
  Quasi-synthetic sequence derived from human genome
LLVTLITTLVIGLVLCKRKRRTKTIRR

SEQ ID NO: 19294 - protein, 27 aa, Artificial Sequence
  Quasi-synthetic sequence derived from human genome
KKKRKKGLRIKGKRRRKKLILAKKFSK

SEQ ID NO: 19295 - protein, 27 aa, Artificial Sequence
  Quasi-synthetic sequence derived from human genome
LGTFFIAFFLRKFRNSRFLGGKARRII

SEQ ID NO: 19296 - protein, 27 aa, Artificial Sequence
  Quasi-synthetic sequence derived from human genome
LRRLPKLRKRMRKMCLTFMKESPLPRL

SEQ ID NO: 19297 - protein, 27 aa, Artificial Sequence
  Quasi-synthetic sequence derived from human genome
LRALRLLRIFKITKYWASLRNLVVSLM

SEQ ID NO: 19298 - protein, 27 aa, Artificial Sequence
  Quasi-synthetic sequence derived from human genome
IPVFRLARRRKKILFYCHFPDLLLTKR

SEQ ID NO: 19299 - protein, 27 aa, Artificial Sequence
  Quasi-synthetic sequence derived from human genome
LLRLKAFILFGKLARVVGMSKKHFFKG

SEQ ID NO: 19300 - protein, 27 aa, Artificial Sequence
  Quasi-synthetic sequence derived from human genome
RRPSARCARRRRPGLLLPGLWLLLLAR

SEQ ID NO: 19301 - protein, 27 aa, Artificial Sequence
  Quasi-synthetic sequence derived from human genome
FQLWFHFKRYRYRRPGPCWRPIRHCRR

SEQ ID NO: 19302 - protein, 27 aa, Artificial Sequence
  Quasi-synthetic sequence derived from human genome
RKFWWKNVKMIVLICVIVFIIILFIVL

SEQ ID NO: 19303 - protein, 27 aa, Artificial Sequence
  Quasi-synthetic sequence derived from human genome
AAVLLALLVLLVAPPLLRRAGRLRWRR

SEQ ID NO: 19304 - protein, 27 aa, Artificial Sequence
  Quasi-synthetic sequence derived from human genome
RRLRRLAHLVLFCPFSKRLQGRLPGLR

SEQ ID NO: 19305 - protein, 27 aa, Artificial Sequence
  Quasi-synthetic sequence derived from human genome
LILLIAVLVYWRGCNKIKSKGFPRRFR

SEQ ID NO: 19306 - protein, 27 aa, Artificial Sequence
  Quasi-synthetic sequence derived from human genome
KKKRMVVPAALKVVRLKPTRKFALLGR

SEQ ID NO: 19307 - protein, 27 aa, Artificial Sequence
  Quasi-synthetic sequence derived from human genome
KLLFTPQHKMLRLRLPNLKMVRLRVSF

SEQ ID NO: 19308 - protein, 27 aa, Artificial Sequence
  Quasi-synthetic sequence derived from human genome
RYVSWRRKKLYLLFAQHRYISRLFSVL

SEQ ID NO: 19309 - protein, 27 aa, Artificial Sequence
  Quasi-synthetic sequence derived from human genome
LMLIILVALLMLVFRSKREVKRQKYRL

SEQ ID NO: 19310 - protein, 27 aa, Artificial Sequence
  Quasi-synthetic sequence derived from human genome
RRFRSLKMWFVFRMYGVKGLQAYIRKH

SEQ ID NO: 19311 - protein, 27 aa, Artificial Sequence
  Quasi-synthetic sequence derived from human genome
LFLCLLPLIVKHIRKKQAKKAAAIRAK

SEQ ID NO: 19312 - protein, 27 aa, Artificial Sequence
  Quasi-synthetic sequence derived from human genome
RIRILCCLTFLVKVKSKALLKNRLLPP

SEQ ID NO: 19313 - protein, 27 aa, Artificial Sequence
  Quasi-synthetic sequence derived from human genome
MLVTISCILVGVLLLFVLLLVVRRRRR

SEQ ID NO: 19314 - protein, 27 aa, Artificial Sequence
  Quasi-synthetic sequence derived from human genome
KLSMIRFRYRILRSQHFRTKSKVCKLR

SEQ ID NO: 19315 - protein, 27 aa, Artificial Sequence
  Quasi-synthetic sequence derived from human genome
LRKRQKIRFVVELVWPLSLFLVLIWLR

SEQ ID NO: 19316 - protein, 27 aa, Artificial Sequence
  Quasi-synthetic sequence derived from human genome
ITAVLPTVIICVMVFCLILWKWKKKKR

SEQ ID NO: 19317 - protein, 27 aa, Artificial Sequence
  Quasi-synthetic sequence derived from human genome
MRRAKRIRNAALQHLFIRKSFRPFKCL

SEQ ID NO: 19318 - protein, 27 aa, Artificial Sequence
  Quasi-synthetic sequence derived from human genome
KAARDVLGFLRVVRFVRILRIFKLTRH

SEQ ID NO: 19319 - protein, 27 aa, Artificial Sequence
  Quasi-synthetic sequence derived from human genome
FTRFRSAVRVSIAISRMKFLVRRWHRV

SEQ ID NO: 19320 - protein, 27 aa, Artificial Sequence
  Quasi-synthetic sequence derived from human genome
RRTLLVAALRAWMIQCWWRTLVQRRIR

SEQ ID NO: 19321 - protein, 27 aa, Artificial Sequence
  Quasi-synthetic sequence derived from human genome
FAGFWLIWGLIVLLCCFCSFLRRRLKR

SEQ ID NO: 19322 - protein, 27 aa, Artificial Sequence
  Quasi-synthetic sequence derived from human genome
LLLPKGVVLKLKPVATRFPRKAWRQKR

SEQ ID NO: 19323 - protein, 27 aa, Artificial Sequence
  Quasi-synthetic sequence derived from human genome
KFFMARVRLQLKIILCFSPVGRTLRVR

SEQ ID NO: 19324 - protein, 27 aa, Artificial Sequence
  Quasi-synthetic sequence derived from human genome
CVATVIFIITKFCLFCFRKLAKKGKKK

SEQ ID NO: 19325 - protein, 27 aa, Artificial Sequence
  Quasi-synthetic sequence derived from human genome
MRRFLSKVYSFPMRKLILFLVFPVVRQ

SEQ ID NO: 19326 - protein, 27 aa, Artificial Sequence
  Quasi-synthetic sequence derived from human genome
ILIIHLKRFQFVNGRWIKSQKIVKFPR

SEQ ID NO: 19327 - protein, 27 aa, Artificial Sequence
  Quasi-synthetic sequence derived from human genome
WRLPRISARAPYRLRRLRRHTYWPPRR

SEQ ID NO: 19328 - protein, 27 aa, Artificial Sequence
  Quasi-synthetic sequence derived from human genome
LLWKRLLIARRSRKGFFAQIVLPAVFV

SEQ ID NO: 19329 - protein, 27 aa, Artificial Sequence
  Quasi-synthetic sequence derived from human genome
LIFFIFYLRNMKKKYTKMVKLLHKSAP

SEQ ID NO: 19330 - protein, 27 aa, Artificial Sequence
  Quasi-synthetic sequence derived from human genome
LRIANFNHPLFFLMKRKIIVLMPWLLR

SEQ ID NO: 19331 - protein, 27 aa, Artificial Sequence
  Quasi-synthetic sequence derived from human genome
IAAAIALLALTALLLVAMICRRRRRRK

SEQ ID NO: 19332 - protein, 27 aa, Artificial Sequence
  Quasi-synthetic sequence derived from human genome
RRLLRKRWVLALVFGLSLVYFLSSTFK

SEQ ID NO: 19333 - protein, 27 aa, Artificial Sequence
  Quasi-synthetic sequence derived from human genome
WKRIFWRQILLTLGLLGLFLYGLPKFR

SEQ ID NO: 19334 - protein, 27 aa, Artificial Sequence
  Quasi-synthetic sequence derived from human genome
RRRRRLRRRPRGLRCSRLPPPPPLPLL

SEQ ID NO: 19335 - protein, 27 aa, Artificial Sequence
  Quasi-synthetic sequence derived from human genome
MRLLRRRHMPLRLAMVGCAFVLFLFLL

SEQ ID NO: 19336 - protein, 27 aa, Artificial Sequence
  Quasi-synthetic sequence derived from human genome
AGTFFIAFFLRKFKNSRFFPGRIRRVI

SEQ ID NO: 19337 - protein, 27 aa, Artificial Sequence
  Quasi-synthetic sequence derived from human genome
ALAMVPILLLGTPLHLLHRHRRRLRRR

SEQ ID NO: 19338 - protein, 27 aa, Artificial Sequence
  Quasi-synthetic sequence derived from human genome
RNMSWPRLIRKLRCYLKEMKNLRKLVF

SEQ ID NO: 19339 - protein, 27 aa, Artificial Sequence
  Quasi-synthetic sequence derived from human genome
KLKLFRHYYVLIVCYIYFTRIIAFLLK

SEQ ID NO: 19340 - protein, 27 aa, Artificial Sequence
  Quasi-synthetic sequence derived from human genome
IFYLLKIVNFSRLIFHHLKRKAKSVVL

SEQ ID NO: 19341 - protein, 27 aa, Artificial Sequence
  Quasi-synthetic sequence derived from human genome
KAAKDVLGFLRVVRFVRILRIFKLTRH

SEQ ID NO: 19342 - protein, 27 aa, Artificial Sequence
  Quasi-synthetic sequence derived from human genome
LPFFCFLLGKCFKKGLKGKGFVLLVKL

SEQ ID NO: 19343 - protein, 27 aa, Artificial Sequence
  Quasi-synthetic sequence derived from human genome
WMRIFIQAKRVKTKHLCYCLYRPRKYL

SEQ ID NO: 19344 - protein, 27 aa, Artificial Sequence
  Quasi-synthetic sequence derived from human genome
KKIWWIIRGPMMLCVTVNFFIFLKILK

SEQ ID NO: 19345 - protein, 27 aa, Artificial Sequence
  Quasi-synthetic sequence derived from human genome
LLVLQYFGPLCFIFICYFKIYIRLKRR

SEQ ID NO: 19346 - protein, 27 aa, Artificial Sequence
  Quasi-synthetic sequence derived from human genome
AKKAGLLMALARLCFLLGRLCSRRLKL

SEQ ID NO: 19347 - protein, 27 aa, Artificial Sequence
  Quasi-synthetic sequence derived from human genome
IVAVLLVLTCCFCICKKCLFKKKNKKK

SEQ ID NO: 19348 - protein, 27 aa, Artificial Sequence
  Quasi-synthetic sequence derived from human genome
LLRRVLVLMNSKHTFLALCALRFMRRI

SEQ ID NO: 19349 - protein, 27 aa, Artificial Sequence
  Quasi-synthetic sequence derived from human genome
RVRMNTFPWLKIVKISFKCKQFFIQLR

SEQ ID NO: 19350 - protein, 27 aa, Artificial Sequence
  Quasi-synthetic sequence derived from human genome
LRALRLLRIFKVTKYWSSLRNLVVSLL

SEQ ID NO: 19351 - protein, 27 aa, Artificial Sequence
  Quasi-synthetic sequence derived from human genome
RFLGTAFMLWLLDFLCIRKHFLGRRRR

SEQ ID NO: 19352 - protein, 27 aa, Artificial Sequence
  Quasi-synthetic sequence derived from human genome
VIRAFVKCTKARYLKKKNMRTLWINRI

SEQ ID NO: 19353 - protein, 27 aa, Artificial Sequence
  Quasi-synthetic sequence derived from human genome
QNMSLAILRIIRLVRVFRIFKLSRHSK

SEQ ID NO: 19354 - protein, 27 aa, Artificial Sequence
  Quasi-synthetic sequence derived from human genome
RVIRLVRVFRIFKLSRHSKGLQILGKT

SEQ ID NO: 19355 - protein, 27 aa, Artificial Sequence
  Quasi-synthetic sequence derived from human genome
RRLTRRLVLPVFGVLWITVLLFFWVTK

SEQ ID NO: 19356 - protein, 27 aa, Artificial Sequence
  Quasi-synthetic sequence derived from human genome
RYLRRRLVPRYRLQLLGIACMVICTRF

SEQ ID NO: 19357 - protein, 27 aa, Artificial Sequence
  Quasi-synthetic sequence derived from human genome
KRMRVKKLPMILALHLKRFKYMEQLHR

SEQ ID NO: 19358 - protein, 27 aa, Artificial Sequence
  Quasi-synthetic sequence derived from human genome
VLGLSRLLFFLLGFLRIRVRGQRASRL

SEQ ID NO: 19359 - protein, 27 aa, Artificial Sequence
  Quasi-synthetic sequence derived from human genome
WVLLALALLAWCRRSRGLKALRLCRAL

SEQ ID NO: 19360 - protein, 27 aa, Artificial Sequence
  Quasi-synthetic sequence derived from human genome
WRRAPLRRGVGSSPRARRLMRPLWLLL

SEQ ID NO: 19361 - protein, 27 aa, Artificial Sequence
  Quasi-synthetic sequence derived from human genome
GPRVRRGISRLWLRVLLRLSPMAFRAL

SEQ ID NO: 19362 - protein, 27 aa, Artificial Sequence
  Quasi-synthetic sequence derived from human genome
LKTFVFFIWRRYWRTLVLLLLVLLTVF

SEQ ID NO: 19363 - protein, 27 aa, Artificial Sequence
  Quasi-synthetic sequence derived from human genome
KVCYLPLNTFLLKPIQRLLHYRLLLRR

SEQ ID NO: 19364 - protein, 27 aa, Artificial Sequence
  Quasi-synthetic sequence derived from human genome
FKRFHPFCLVLRKRKSTLFWGARYVRT

SEQ ID NO: 19365 - protein, 27 aa, Artificial Sequence
  Quasi-synthetic sequence derived from human genome
LSKGRRTLRKPKRVPSIYKLKLRPRIR

SEQ ID NO: 19366 - protein, 27 aa, Artificial Sequence
  Quasi-synthetic sequence derived from human genome
LKRALKVKQAMLQLYVLKLLKLQTKYL

SEQ ID NO: 19367 - protein, 27 aa, Artificial Sequence
  Quasi-synthetic sequence derived from human genome
YRHLKTKRILRRNLLALIHRMIEFVVR

SEQ ID NO: 19368 - protein, 27 aa, Artificial Sequence
  Quasi-synthetic sequence derived from human genome
LKKKLLPWQRRGLLRAQGLRGWKARRA

SEQ ID NO: 19369 - protein, 27 aa, Artificial Sequence
  Quasi-synthetic sequence derived from human genome
GLIALLLLLLVFTVALYAQRRWQKRRR

SEQ ID NO: 19370 - protein, 27 aa, Artificial Sequence
  Quasi-synthetic sequence derived from human genome
KRACAKALKKKKKMPKLRFASRIRKIR

SEQ ID NO: 19371 - protein, 27 aa, Artificial Sequence
  Quasi-synthetic sequence derived from human genome
RRTMNIVPRTKVKTIKMFLILNLLFLL

SEQ ID NO: 19372 - protein, 27 aa, Artificial Sequence
  Quasi-synthetic sequence derived from human genome
FLPKCIRAKIQDYHILTRKRIRYRFRR

SEQ ID NO: 19373 - protein, 27 aa, Artificial Sequence
  Quasi-synthetic sequence derived from human genome
KKKKIVKYGMGGLIILFLIAIIWFPLL

SEQ ID NO: 19374 - protein, 27 aa, Artificial Sequence
  Quasi-synthetic sequence derived from human genome
YMKWRRKSAYWKALKVFKLPVEFLLLL

SEQ ID NO: 19375 - protein, 27 aa, Artificial Sequence
  Quasi-synthetic sequence derived from human genome
VILGFCGLTALYFLIRAFRLKKPQRRR

SEQ ID NO: 19376 - protein, 27 aa, Artificial Sequence
  Quasi-synthetic sequence derived from human genome
LRRILSLLMELKVAAQKNFILKRLFWK

SEQ ID NO: 19377 - protein, 27 aa, Artificial Sequence
  Quasi-synthetic sequence derived from human genome
RLLLVHGRWSYIRMCKFLRYFFYKNFA

SEQ ID NO: 19378 - protein, 27 aa, Artificial Sequence
  Quasi-synthetic sequence derived from human genome
QKVKKIWQKQFRWPKNRLQILKFCKAR

SEQ ID NO: 19379 - protein, 27 aa, Artificial Sequence
  Quasi-synthetic sequence derived from human genome
LFNPIIYSLRNKQIKVAIKKIMKRIFY

SEQ ID NO: 19380 - protein, 27 aa, Artificial Sequence
  Quasi-synthetic sequence derived from human genome
LLRKLGVKLVQRLGLTFLKPKVAAWRY

SEQ ID NO: 19381 - protein, 27 aa, Artificial Sequence
  Quasi-synthetic sequence derived from human genome
KKLKQIFLSVLRHVRYWVKDRSLRLHR

SEQ ID NO: 19382 - protein, 27 aa, Artificial Sequence
  Quasi-synthetic sequence derived from human genome
WLRKSPPEKKLKRYAWKRRWFVLRSGR

SEQ ID NO: 19383 - protein, 27 aa, Artificial Sequence
  Quasi-synthetic sequence derived from human genome
LVPCVVILAKALFLLPCISRRLARIRR

SEQ ID NO: 19384 - protein, 27 aa, Artificial Sequence
  Quasi-synthetic sequence derived from human genome
RRKLKFFFMNPCEKFWARGRKPWKLAI

SEQ ID NO: 19385 - protein, 27 aa, Artificial Sequence
  Quasi-synthetic sequence derived from human genome
LVRRRRRYALSGSVWKKRTLTWRVRSF

SEQ ID NO: 19386 - protein, 27 aa, Artificial Sequence
  Quasi-synthetic sequence derived from human genome
FLRSFRVLRVFKLAKSWPTLNTLIKII

SEQ ID NO: 19387 - protein, 27 aa, Artificial Sequence
  Quasi-synthetic sequence derived from human genome
VLRSFRLLRVFKLAKSWPTLNTLIKII

SEQ ID NO: 19388 - protein, 27 aa, Artificial Sequence
  Quasi-synthetic sequence derived from human genome
FMVFFLINPTKTFYYKSRFWLLKLLFR

SEQ ID NO: 19389 - protein, 27 aa, Artificial Sequence
  Quasi-synthetic sequence derived from human genome
LLLLLLLLFLILRHRRQGKHWTSTQRK

SEQ ID NO: 19390 - protein, 27 aa, Artificial Sequence
  Quasi-synthetic sequence derived from human genome
IAKVRFLKLKKERKSLWTILLLFGISF

SEQ ID NO: 19391 - protein, 27 aa, Artificial Sequence
  Quasi-synthetic sequence derived from human genome
RRFLVTLRIRRACGPPRVRVFVVHIPR

SEQ ID NO: 19392 - protein, 27 aa, Artificial Sequence
  Quasi-synthetic sequence derived from human genome
LNINLKRKFIKKRIIIISNYSKRNSLL

SEQ ID NO: 19393 - protein, 27 aa, Artificial Sequence
  Quasi-synthetic sequence derived from human genome
LVSLLQKPRHRCRKRKPLLAIGFYLYR

SEQ ID NO: 19394 - protein, 27 aa, Artificial Sequence
  Quasi-synthetic sequence derived from human genome
KRMKVKKLPMILALHLKRFKYMDQLHR

SEQ ID NO: 19395 - protein, 27 aa, Artificial Sequence
  Quasi-synthetic sequence derived from human genome
LTSTALLFLLFFLTLRFSVVKRGRKKL

SEQ ID NO: 19396 - protein, 27 aa, Artificial Sequence
  Quasi-synthetic sequence derived from human genome
RLCGRFSRISMKLPRIPLRRQKLPKVV

SEQ ID NO: 19397 - protein, 27 aa, Artificial Sequence
  Quasi-synthetic sequence derived from human genome
RLFRIKCVTRIQAYWRGCVVRKWYRNL

SEQ ID NO: 19398 - protein, 27 aa, Artificial Sequence
  Quasi-synthetic sequence derived from human genome
RRRRRACIALFLVLLFAFGTLMGLRTL

SEQ ID NO: 19399 - protein, 27 aa, Artificial Sequence
  Quasi-synthetic sequence derived from human genome
MLYKSIKKELVVLRLASLLFKRFLSLR

SEQ ID NO: 19400 - protein, 27 aa, Artificial Sequence
  Quasi-synthetic sequence derived from human genome
LTFQWRFYLSFRKLMRWILILVIALWF

SEQ ID NO: 19401 - protein, 27 aa, Artificial Sequence
  Quasi-synthetic sequence derived from human genome
KKARRHLKMMHIAATLIQRRFRTLMMR

SEQ ID NO: 19402 - protein, 27 aa, Artificial Sequence
  Quasi-synthetic sequence derived from human genome
QRKQIKRKAPRGFLKRVFKRKKPQLRL

SEQ ID NO: 19403 - protein, 27 aa, Artificial Sequence
  Quasi-synthetic sequence derived from human genome
LLRRLRAVRLRSGAKALGKARRKVTVL

SEQ ID NO: 19404 - protein, 27 aa, Artificial Sequence
  Quasi-synthetic sequence derived from human genome
ILGVVLLAIFVALFFLTKKRRQRQRLA

SEQ ID NO: 19405 - protein, 27 aa, Artificial Sequence
  Quasi-synthetic sequence derived from human genome
TKINTFNWSKVRKLSFKRKRFLIKLHP

SEQ ID NO: 19406 - protein, 27 aa, Artificial Sequence
  Quasi-synthetic sequence derived from human genome
LKVFYKFINLNRYKIRHTRKKPFKCKN

SEQ ID NO: 19407 - protein, 27 aa, Artificial Sequence
  Quasi-synthetic sequence derived from human genome
RARRRRPLFALLLLCALLARLQVALQI

SEQ ID NO: 19408 - protein, 27 aa, Artificial Sequence
  Quasi-synthetic sequence derived from human genome
IRILGILLSKLRTRQMRCRDYRLRLAR

SEQ ID NO: 19409 - protein, 27 aa, Artificial Sequence
  Quasi-synthetic sequence derived from human genome
IRRRSKFANLGRIFKPWKWRKKKSEKF

SEQ ID NO: 19410 - protein, 27 aa, Artificial Sequence
  Quasi-synthetic sequence derived from human genome
MKKFLYIKSVFHTLRMAQRRHKRVRTW

SEQ ID NO: 19411 - protein, 27 aa, Artificial Sequence
  Quasi-synthetic sequence derived from human genome
PVLIVQRWIRGFLVRKNLSPVFFHKKK

SEQ ID NO: 19412 - protein, 27 aa, Artificial Sequence
  Quasi-synthetic sequence derived from human genome
RKRLHFKLCKKSSILVHKLLDKLLVLC

SEQ ID NO: 19413 - protein, 27 aa, Artificial Sequence
  Quasi-synthetic sequence derived from human genome
WLVKSPPERKLQRYAWRKRWFVLRRGR

SEQ ID NO: 19414 - protein, 27 aa, Artificial Sequence
  Quasi-synthetic sequence derived from human genome
WQRRLRRAARRQVLSGHLPFCRFRLRY

SEQ ID NO: 19415 - protein, 27 aa, Artificial Sequence
  Quasi-synthetic sequence derived from human genome
KKKRYLRASSNRNFLLTMRPFLKRAIL

SEQ ID NO: 19416 - protein, 27 aa, Artificial Sequence
  Quasi-synthetic sequence derived from human genome
RKRKISVCQQTWALLCKNFLKKWRMKR

SEQ ID NO: 19417 - protein, 27 aa, Artificial Sequence
  Quasi-synthetic sequence derived from human genome
LQAVFFVLFVLSVHYLWKKWKKHQKKL

SEQ ID NO: 19418 - protein, 27 aa, Artificial Sequence
  Quasi-synthetic sequence derived from human genome
WRRYRAKKYLCKVKAACKIQAWYRCWR

SEQ ID NO: 19419 - protein, 27 aa, Artificial Sequence
  Quasi-synthetic sequence derived from human genome
LILIQWNIRAFMAVKNWPWMRLFFKIK

SEQ ID NO: 19420 - protein, 27 aa, Artificial Sequence
  Quasi-synthetic sequence derived from human genome
LAALALLVLILLCLLIYYCRRRCLKPR

SEQ ID NO: 19421 - protein, 27 aa, Artificial Sequence
  Quasi-synthetic sequence derived from human genome
RRRFQSIRRFVLNIQLTYRVQRLQKKL

SEQ ID NO: 19422 - protein, 27 aa, Artificial Sequence
  Quasi-synthetic sequence derived from human genome
ALFLLAGLVAVALVVRKVKLRNLQKKR

SEQ ID NO: 19423 - protein, 27 aa, Artificial Sequence
  Quasi-synthetic sequence derived from human genome
LVPLFCWLRATFWLLATKRRKQQLVLR

SEQ ID NO: 19424 - protein, 27 aa, Artificial Sequence
  Quasi-synthetic sequence derived from human genome
LLSCLLLPAARLARQYLLPLLRRLARR

SEQ ID NO: 19425 - protein, 27 aa, Artificial Sequence
  Quasi-synthetic sequence derived from human genome
FSRLKIHFTKVFSAFALVRTIRYLYRR

SEQ ID NO: 19426 - protein, 27 aa, Artificial Sequence
  Quasi-synthetic sequence derived from human genome
LCLLLAVYFIARKIRKKRLENRKSVVF

SEQ ID NO: 19427 - protein, 27 aa, Artificial Sequence
  Quasi-synthetic sequence derived from human genome
LWSRFKKKCFKLTRKMPIIGRKIQDKL

SEQ ID NO: 19428 - protein, 27 aa, Artificial Sequence
  Quasi-synthetic sequence derived from human genome
KKRMVVPAALKVVRLKPTRKFAYLGRL

SEQ ID NO: 19429 - protein, 27 aa, Artificial Sequence
  Quasi-synthetic sequence derived from human genome
KVGLVLRVLRALRILYVMRLARHSLGL

SEQ ID NO: 19430 - protein, 27 aa, Artificial Sequence
  Quasi-synthetic sequence derived from human genome
QYVLALYHCQVFLKRFLRLRYGRQRRR

SEQ ID NO: 19431 - protein, 27 aa, Artificial Sequence
  Quasi-synthetic sequence derived from human genome
LKRKYWWKNCKMWAIGITVLVIFIIII

SEQ ID NO: 19432 - protein, 27 aa, Artificial Sequence
  Quasi-synthetic sequence derived from human genome
VVFLFLILIRRALSASQKKKVIIAALR

SEQ ID NO: 19433 - protein, 27 aa, Artificial Sequence
  Quasi-synthetic sequence derived from human genome
RLRVRKAIGKYRIKLLDTLPLPGRLIR

SEQ ID NO: 19434 - protein, 27 aa, Artificial Sequence
  Quasi-synthetic sequence derived from human genome
AALPINPTIIRIMRVLRIARVLKLLKM

SEQ ID NO: 19435 - protein, 27 aa, Artificial Sequence
  Quasi-synthetic sequence derived from human genome
RLRHPRTRWKNWWVRGILTLAMIAFFF

SEQ ID NO: 19436 - protein, 27 aa, Artificial Sequence
  Quasi-synthetic sequence derived from human genome
LRVFRVFRIFKFSRHSQGLRILGYTLK

SEQ ID NO: 19437 - protein, 27 aa, Artificial Sequence
  Quasi-synthetic sequence derived from human genome
RKGIVRVVFFPFFFRWWLQVTSKVIFF

SEQ ID NO: 19438 - protein, 27 aa, Artificial Sequence
  Quasi-synthetic sequence derived from human genome
KVTWMRRMRILRRLLRRYRESKKIDRH

SEQ ID NO: 19439 - protein, 27 aa, Artificial Sequence
  Quasi-synthetic sequence derived from human genome
KVFVKIKASHALKKKILRFRSGSLKVM

SEQ ID NO: 19440 - protein, 27 aa, Artificial Sequence
  Quasi-synthetic sequence derived from human genome
RALHIRKLLLTLPRSVLIVMRYLFAFL

SEQ ID NO: 19441 - protein, 27 aa, Artificial Sequence
  Quasi-synthetic sequence derived from human genome
MHRNVRYNCRVIFLNRKILLIRPKMAL

SEQ ID NO: 19442 - protein, 27 aa, Artificial Sequence
  Quasi-synthetic sequence derived from human genome
YKKWCRSILRRTSLILARVFGLHLRLT

SEQ ID NO: 19443 - protein, 27 aa, Artificial Sequence
  Quasi-synthetic sequence derived from human genome
ALVRGGWLWRQSSILRRWKRNWFALWL

SEQ ID NO: 19444 - protein, 27 aa, Artificial Sequence
  Quasi-synthetic sequence derived from human genome
RIAMLWGSGKCKALTKFKFVFFLRLSR

SEQ ID NO: 19445 - protein, 27 aa, Artificial Sequence
  Quasi-synthetic sequence derived from human genome
RSLKQNIFLFYVKLRWLLKHWRQGKQM

SEQ ID NO: 19446 - protein, 27 aa, Artificial Sequence
  Quasi-synthetic sequence derived from human genome
LARQRIIQFQARCRAYLVRKAFRHRLW

SEQ ID NO: 19447 - protein, 27 aa, Artificial Sequence
  Quasi-synthetic sequence derived from human genome
RRLRKNLKSLIIVHPSWFIRTLLAVTR

SEQ ID NO: 19448 - protein, 27 aa, Artificial Sequence
  Quasi-synthetic sequence derived from human genome
FVWFLNPLKSIKYLICTRYKWLIIKIV

SEQ ID NO: 19449 - protein, 27 aa, Artificial Sequence
  Quasi-synthetic sequence derived from human genome
KIMKTRVCRRLRRANRVLRARCRRAVK

SEQ ID NO: 19450 - protein, 27 aa, Artificial Sequence
  Quasi-synthetic sequence derived from human genome
PRWILQFRRWARKWSRFTRSSFQVRWA

SEQ ID NO: 19451 - protein, 27 aa, Artificial Sequence
  Quasi-synthetic sequence derived from human genome
GIFLAFFVVVSLVCLILLVKIKLKQRR

SEQ ID NO: 19452 - protein, 27 aa, Artificial Sequence
  Quasi-synthetic sequence derived from human genome
FLWFTNPCKTMKFIVWRRFKWVIIGLL

SEQ ID NO: 19453 - protein, 27 aa, Artificial Sequence
  Quasi-synthetic sequence derived from human genome
NVRRVVQIFRIMRILRILKLARHSTGL

SEQ ID NO: 19454 - protein, 27 aa, Artificial Sequence
  Quasi-synthetic sequence derived from human genome
LARRRIRLWHRGAMVIQATWRGYRVRR

SEQ ID NO: 19455 - protein, 27 aa, Artificial Sequence
  Quasi-synthetic sequence derived from human genome
GVILFVYLVIRALRLWRTAKLQVTLKK

SEQ ID NO: 19456 - protein, 27 aa, Artificial Sequence
  Quasi-synthetic sequence derived from human genome
ALIAILACVLTLLVLILLIVTMRRRKK

SEQ ID NO: 19457 - protein, 27 aa, Artificial Sequence
  Quasi-synthetic sequence derived from human genome
ARLYCLKIHGLSSLWRLFRGKKWNVLR

SEQ ID NO: 19458 - protein, 27 aa, Artificial Sequence
  Quasi-synthetic sequence derived from human genome
GQLMKTIIRKINKMKTLKRKKLLNQIL

SEQ ID NO: 19459 - protein, 27 aa, Artificial Sequence
  Quasi-synthetic sequence derived from human genome
VVLKRLFMSRTNRPPLSLSRMIRKMKL

SEQ ID NO: 19460 - protein, 27 aa, Artificial Sequence
  Quasi-synthetic sequence derived from human genome
WLRRRYLRLRYEDLVRQPRAQLRRLLR

SEQ ID NO: 19461 - protein, 27 aa, Artificial Sequence
  Quasi-synthetic sequence derived from human genome
RLKTLRRPRVRDRLPILLQRRMRVKEL

SEQ ID NO: 19462 - protein, 27 aa, Artificial Sequence
  Quasi-synthetic sequence derived from human genome
GALGKGKGKRWFAFKMMMAKKWAKFLR

SEQ ID NO: 19463 - protein, 27 aa, Artificial Sequence
  Quasi-synthetic sequence derived from human genome
QYLIRIRKLTLKRQRKLVPLSKKVERR

SEQ ID NO: 19464 - protein, 27 aa, Artificial Sequence
  Quasi-synthetic sequence derived from human genome
LRILRKRNKALRKIRKLQKQGLLQVTP

SEQ ID NO: 19465 - protein, 27 aa, Artificial Sequence
  Quasi-synthetic sequence derived from human genome
LSKWKIMMGKKQGLRRRRRRARHSVRW

SEQ ID NO: 19466 - protein, 27 aa, Artificial Sequence
  Quasi-synthetic sequence derived from human genome
LFVLLLVVRRRRREQRLKRLRDAKSLA

SEQ ID NO: 19467 - protein, 27 aa, Artificial Sequence
  Quasi-synthetic sequence derived from human genome
LRRLKLVKMYRSKNDLSQLQLLIKKWR

SEQ ID NO: 19468 - protein, 27 aa, Artificial Sequence
  Quasi-synthetic sequence derived from human genome
RMMRIFWVIKLARHFIGLQTLGLTLKR

SEQ ID NO: 19469 - protein, 27 aa, Artificial Sequence
  Quasi-synthetic sequence derived from human genome
KHTLIRFLPRPIRQQLLYKRRYIFSVV

SEQ ID NO: 19470 - protein, 27 aa, Artificial Sequence
  Quasi-synthetic sequence derived from human genome
LLWRGRIPGRQWIGKHRRPRFVSLRAK

SEQ ID NO: 19471 - protein, 27 aa, Artificial Sequence
  Quasi-synthetic sequence derived from human genome
RFSWFCKRRRAFWHTPRLPTLPKRVPR

SEQ ID NO: 19472 - protein, 27 aa, Artificial Sequence
  Quasi-synthetic sequence derived from human genome
FILLSHLQLFIKRVVLKTPAKRHKQLK

SEQ ID NO: 19473 - protein, 27 aa, Artificial Sequence
  Quasi-synthetic sequence derived from human genome
PFGVTVLVYARIYVVLKQRRRKRILTR

SEQ ID NO: 19474 - protein, 27 aa, Artificial Sequence
  Quasi-synthetic sequence derived from human genome
VLFLRLRSIRCLRNIIHWNLISAFILR

SEQ ID NO: 19475 - protein, 27 aa, Artificial Sequence
  Quasi-synthetic sequence derived from human genome
LFIVLILVGYISVKVMLKSIKTRLGRR

SEQ ID NO: 19476 - protein, 27 aa, Artificial Sequence
  Quasi-synthetic sequence derived from human genome
LLRKLYVFRRSFLMTCISLRNLILGRP

SEQ ID NO: 19477 - protein, 27 aa, Artificial Sequence
  Quasi-synthetic sequence derived from human genome
KLIRMGPQERWLLRTKRLHWSRLLFLL

SEQ ID NO: 19478 - protein, 27 aa, Artificial Sequence
  Quasi-synthetic sequence derived from human genome
LLFVLENMLGLLRHRGLRPRCCRRKRR

SEQ ID NO: 19479 - protein, 27 aa, Artificial Sequence
  Quasi-synthetic sequence derived from human genome
RRLRKNLKSFIIVHPSWFIRTILAVTR

SEQ ID NO: 19480 - protein, 27 aa, Artificial Sequence
  Quasi-synthetic sequence derived from human genome
LGRRKAAKRKWAAQTIRRLIRGFVLRH

SEQ ID NO: 19481 - protein, 27 aa, Artificial Sequence
  Quasi-synthetic sequence derived from human genome
KKWNSCVRRRKWIRYRRYKSRDIWAKI

SEQ ID NO: 19482 - protein, 27 aa, Artificial Sequence
  Quasi-synthetic sequence derived from human genome
VAVMKLFNKAKVNVNLLIFLLNKKFLR

SEQ ID NO: 19483 - protein, 27 aa, Artificial Sequence
  Quasi-synthetic sequence derived from human genome
LFYGFLGKKFKRYFLQLLKYIPPKAKS

SEQ ID NO: 19484 - protein, 27 aa, Artificial Sequence
  Quasi-synthetic sequence derived from human genome
WVRMWCVRQRYCRLLNAVRIIQVYWRW

SEQ ID NO: 19485 - protein, 27 aa, Artificial Sequence
  Quasi-synthetic sequence derived from human genome
LAFVIRIRGINGVSPKVRKVLQLLRLR

SEQ ID NO: 19486 - protein, 27 aa, Artificial Sequence
  Quasi-synthetic sequence derived from human genome
RFLRIMMLSVLRNTKTPVKFWLLKNYL

SEQ ID NO: 19487 - protein, 27 aa, Artificial Sequence
  Quasi-synthetic sequence derived from human genome
ILLVVAVFCILWNWNKRKKRQVPYLRV

SEQ ID NO: 19488 - protein, 27 aa, Artificial Sequence
  Quasi-synthetic sequence derived from human genome
LLSVLAMFFLLVLILSSVFLFRLFKRR

SEQ ID NO: 19489 - protein, 27 aa, Artificial Sequence
  Quasi-synthetic sequence derived from human genome
FKIVWSLRRRQQLARQARMKKATRFIM

SEQ ID NO: 19490 - protein, 27 aa, Artificial Sequence
  Quasi-synthetic sequence derived from human genome
KKFYGPQRRKMMFMGFIRLGVWYNFFR

SEQ ID NO: 19491 - protein, 27 aa, Artificial Sequence
  Quasi-synthetic sequence derived from human genome
FMLKKRKWPLKGWHKRFFVLDNGMLKY

SEQ ID NO: 19492 - protein, 27 aa, Artificial Sequence
  Quasi-synthetic sequence derived from human genome
LRAPALRRLLPPLLLLLLSLPPRARAK

SEQ ID NO: 19493 - protein, 27 aa, Artificial Sequence
  Quasi-synthetic sequence derived from human genome
RRLRKNLKSLIIVHPSWFIRTVLAISR

SEQ ID NO: 19494 - protein, 27 aa, Artificial Sequence
  Quasi-synthetic sequence derived from human genome
RKRLKKLPSAVIALQRSFRSKRSKMLL

SEQ ID NO: 19495 - protein, 27 aa, Artificial Sequence
  Quasi-synthetic sequence derived from human genome
RIFRPWRLRCPALHLPSLSVFSLRWKL

SEQ ID NO: 19496 - protein, 27 aa, Artificial Sequence
  Quasi-synthetic sequence derived from human genome
FKFLQRLLLVHGRWSYLRMCKFLCYFF

SEQ ID NO: 19497 - protein, 27 aa, Artificial Sequence
  Quasi-synthetic sequence derived from human genome
VKTVIRSIRILKFLVAKRKFKETLRPY

SEQ ID NO: 19498 - protein, 27 aa, Artificial Sequence
  Quasi-synthetic sequence derived from human genome
RGRYGRRRPFIWALSLGILLSLFLIPR

SEQ ID NO: 19499 - protein, 27 aa, Artificial Sequence
  Quasi-synthetic sequence derived from human genome
VPWMLLFKPLVLRRQYLRRKHLGTLNF

SEQ ID NO: 19500 - protein, 27 aa, Artificial Sequence
  Quasi-synthetic sequence derived from human genome
FLLLILLCMSLLLFQVIRLYQRRRWMI

SEQ ID NO: 19501 - protein, 27 aa, Artificial Sequence
  Quasi-synthetic sequence derived from human genome
VLVYIKRRLAMCARKLGRIREAVKIMR

SEQ ID NO: 19502 - protein, 27 aa, Artificial Sequence
  Quasi-synthetic sequence derived from human genome
ARKQLMIYRLPQVLRLHLKRFRWSGRN

SEQ ID NO: 19503 - protein, 27 aa, Artificial Sequence
  Quasi-synthetic sequence derived from human genome
RAGLVLRLLRALRVLYVMRLARHSLGL

SEQ ID NO: 19504 - protein, 27 aa, Artificial Sequence
  Quasi-synthetic sequence derived from human genome
VRPALILILKRLDRMFNKIHKMPTLRR

SEQ ID NO: 19505 - protein, 27 aa, Artificial Sequence
  Quasi-synthetic sequence derived from human genome
RLFRVMRLIKLLSRAEGVRTLLWTFIK

SEQ ID NO: 19506 - protein, 27 aa, Artificial Sequence
  Quasi-synthetic sequence derived from human genome
LLHAALSACIIQCWWRLILSKILKKRR

SEQ ID NO: 19507 - protein, 27 aa, Artificial Sequence
  Quasi-synthetic sequence derived from human genome
LLLWVKQRRDLLHLCCKKLKILGMPFR

SEQ ID NO: 19508 - protein, 27 aa, Artificial Sequence
  Quasi-synthetic sequence derived from human genome
LLLLLLVLLLAAYFFRFRKQRKAVVST

SEQ ID NO: 19509 - protein, 27 aa, Artificial Sequence
  Quasi-synthetic sequence derived from human genome
LRLLVKLYRFLARRTNSTFNQVVLKRL

SEQ ID NO: 19510 - protein, 27 aa, Artificial Sequence
  Quasi-synthetic sequence derived from human genome
LNFPRSPRIRKRFLLRRILEMLFFTQL

SEQ ID NO: 19511 - protein, 27 aa, Artificial Sequence
  Quasi-synthetic sequence derived from human genome
LLRKINQVLLFLLIVTLCVILYKKVHK

SEQ ID NO: 19512 - protein, 27 aa, Artificial Sequence
  Quasi-synthetic sequence derived from human genome
RGQRVKVFGWVHRLRRQGKNLMFLVLR

SEQ ID NO: 19513 - protein, 27 aa, Artificial Sequence
  Quasi-synthetic sequence derived from human genome
WFICSLCVPRVRKLWSSRRPRTRRNLL

SEQ ID NO: 19514 - protein, 27 aa, Artificial Sequence
  Quasi-synthetic sequence derived from human genome
PYFTRLILFLFCLMVLVESRKPKRKRW

SEQ ID NO: 19515 - protein, 27 aa, Artificial Sequence
  Quasi-synthetic sequence derived from human genome
IPQNVHRILINLMKYLQKWKRYRPLWK

SEQ ID NO: 19516 - protein, 27 aa, Artificial Sequence
  Quasi-synthetic sequence derived from human genome
RMMVPKVRLLYSLAFNARFLRHLWFLI

SEQ ID NO: 19517 - protein, 27 aa, Artificial Sequence
  Quasi-synthetic sequence derived from human genome
LIAFDRFLKIIRPLRNIFLKKPVFAKT

SEQ ID NO: 19518 - protein, 27 aa, Artificial Sequence
  Quasi-synthetic sequence derived from human genome
LLRKRRFQLGRSMNLRARKNRSQIVLF

SEQ ID NO: 19519 - protein, 27 aa, Artificial Sequence
  Quasi-synthetic sequence derived from human genome
IVKQGYVKMKSRKLGIYRRCWLVFRKS

SEQ ID NO: 19520 - protein, 27 aa, Artificial Sequence
  Quasi-synthetic sequence derived from human genome
LKIANFSNLLFLHLKRRVRSVILVILL

SEQ ID NO: 19521 - protein, 27 aa, Artificial Sequence
  Quasi-synthetic sequence derived from human genome
WLTFWRRLQSAFLKNRSLRTKSSLWRR

SEQ ID NO: 19522 - protein, 27 aa, Artificial Sequence
  Quasi-synthetic sequence derived from human genome
LVFFIYMISFIFRKRRKNSGLWSFYFF

SEQ ID NO: 19523 - protein, 27 aa, Artificial Sequence
  Quasi-synthetic sequence derived from human genome
LAWLGKWLRKRRIVSGNPRCQKPFFLK

SEQ ID NO: 19524 - protein, 27 aa, Artificial Sequence
  Quasi-synthetic sequence derived from human genome
IVPLIVCAIFIFIKRDQLWRSYFRKKR

SEQ ID NO: 19525 - protein, 27 aa, Artificial Sequence
  Quasi-synthetic sequence derived from human genome
CRGYLVKMGGKIKSWKKRWFVFDRLKR

SEQ ID NO: 19526 - protein, 27 aa, Artificial Sequence
  Quasi-synthetic sequence derived from human genome
LYPLLIKKHWLWTRKCFVCKMYTARWV

SEQ ID NO: 19527 - protein, 27 aa, Artificial Sequence
  Quasi-synthetic sequence derived from human genome
TNVLIFFWCLAFLWGLLILLKYRWRKL

SEQ ID NO: 19528 - protein, 27 aa, Artificial Sequence
  Quasi-synthetic sequence derived from human genome
PIIYCCLNKRFRAGFKRAFRWCPFIKV

SEQ ID NO: 19529 - protein, 27 aa, Artificial Sequence
  Quasi-synthetic sequence derived from human genome
WTLKRQILILFNIILISKLLGARWFPK

SEQ ID NO: 19530 - protein, 27 aa, Artificial Sequence
  Quasi-synthetic sequence derived from human genome
KVFIKYTKLKKIFLQHNCIRHISRKAF

SEQ ID NO: 19531 - protein, 27 aa, Artificial Sequence
  Quasi-synthetic sequence derived from human genome
ASLPINPTIIRIMRVLRIARVLKLLKM

SEQ ID NO: 19532 - protein, 27 aa, Artificial Sequence
  Quasi-synthetic sequence derived from human genome
LVAVVLLLLLLLLLFLILRHRRQGKHW

SEQ ID NO: 19533 - protein, 27 aa, Artificial Sequence
  Quasi-synthetic sequence derived from human genome
RFLRIMMLSVLKNTKTPVKFWFLKNYL

SEQ ID NO: 19534 - protein, 27 aa, Artificial Sequence
  Quasi-synthetic sequence derived from human genome
MIKVFLSSLKFHIRRFIFLFFILVIGI

SEQ ID NO: 19535 - protein, 27 aa, Artificial Sequence
  Quasi-synthetic sequence derived from human genome
TRIFVRVIQLLKINNSKHRWFWLLPVK

SEQ ID NO: 19536 - protein, 27 aa, Artificial Sequence
  Quasi-synthetic sequence derived from human genome
PVFPRFIKIIEVKNKKLVELLRRKVRL

SEQ ID NO: 19537 - protein, 27 aa, Artificial Sequence
  Quasi-synthetic sequence derived from human genome
MSHLPMKLLRKKIEKRNLKLRQRNLKF

SEQ ID NO: 19538 - protein, 27 aa, Artificial Sequence
  Quasi-synthetic sequence derived from human genome
NVYLIVILVSFGLFMYAKRNKRRIMRI

SEQ ID NO: 19539 - protein, 27 aa, Artificial Sequence
  Quasi-synthetic sequence derived from human genome
IRMWLCKRRHKPRIDGLVKVGTLKKRL

SEQ ID NO: 19540 - protein, 27 aa, Artificial Sequence
  Quasi-synthetic sequence derived from human genome
LLIFILLLTLTILTIWLFKHRRARFLH

SEQ ID NO: 19541 - protein, 27 aa, Artificial Sequence
  Quasi-synthetic sequence derived from human genome
ISGYLKIRRSYALVSLSFFRKLRLIRG

SEQ ID NO: 19542 - protein, 27 aa, Artificial Sequence
  Quasi-synthetic sequence derived from human genome
KFIWNHGITLPLKNVRKRRFRKTAKKK

SEQ ID NO: 19543 - protein, 27 aa, Artificial Sequence
  Quasi-synthetic sequence derived from human genome
KNLFYRTYMLFKNASGKRRFLLCLLLF

SEQ ID NO: 19544 - protein, 27 aa, Artificial Sequence
  Quasi-synthetic sequence derived from human genome
LFALLSRGRRRRMHVLRRRWDLGSLCR

SEQ ID NO: 19545 - protein, 27 aa, Artificial Sequence
  Quasi-synthetic sequence derived from human genome
LRIFRIPRRPRKLTLKGYRQHWVVFKE

SEQ ID NO: 19546 - protein, 27 aa, Artificial Sequence
  Quasi-synthetic sequence derived from human genome
LLLKRGSCRSTWLRVRKARPQLILSRR

SEQ ID NO: 19547 - protein, 27 aa, Artificial Sequence
  Quasi-synthetic sequence derived from human genome
VKLKKYTKFLFVRDPFVRLISAFRSKF

SEQ ID NO: 19548 - protein, 27 aa, Artificial Sequence
  Quasi-synthetic sequence derived from human genome
KLRGLKRKWIRCSAQATVLHLKKFIAK

SEQ ID NO: 19549 - protein, 27 aa, Artificial Sequence
  Quasi-synthetic sequence derived from human genome
IARLRLKKIFSGVFVKVTPQNLKMLRI

SEQ ID NO: 19550 - protein, 27 aa, Artificial Sequence
  Quasi-synthetic sequence derived from human genome
KTARLFSKKIFCCLFFITLFFIRLLSY

SEQ ID NO: 19551 - protein, 27 aa, Artificial Sequence
  Quasi-synthetic sequence derived from human genome
IRILAVITIQAGVRGYLARRRIRLWHR

SEQ ID NO: 19552 - protein, 27 aa, Artificial Sequence
  Quasi-synthetic sequence derived from human genome
MKMRRYKLFLMFCMAGLCLISFLHFFK

SEQ ID NO: 19553 - protein, 27 aa, Artificial Sequence
  Quasi-synthetic sequence derived from human genome
LGKVVQVFRLMRIFRVLKLARHSTGLR

SEQ ID NO: 19554 - protein, 27 aa, Artificial Sequence
  Quasi-synthetic sequence derived from human genome
RVAQVLRLMRIFRILKLARHSTGLRSL

SEQ ID NO: 19555 - protein, 27 aa, Artificial Sequence
  Quasi-synthetic sequence derived from human genome
LLLWVKQRKDLLHLCCKKLKILGMPFR

SEQ ID NO: 19556 - protein, 27 aa, Artificial Sequence
  Quasi-synthetic sequence derived from human genome
LKKIIKRKHTLPNYKIRFKPFFPYQTL

SEQ ID NO: 19557 - protein, 27 aa, Artificial Sequence
  Quasi-synthetic sequence derived from human genome
KVIVVRNRRLGVLYRAVQLLILLYFVW

SEQ ID NO: 19558 - protein, 27 aa, Artificial Sequence
  Quasi-synthetic sequence derived from human genome
RRRPALGWLARLLRSRAGSRKRPLTLL

SEQ ID NO: 19559 - protein, 27 aa, Artificial Sequence
  Quasi-synthetic sequence derived from human genome
VIILKKWFLKPYKGQTLPGRVLFLRYV

SEQ ID NO: 19560 - protein, 27 aa, Artificial Sequence
  Quasi-synthetic sequence derived from human genome
RCRGKLLVHSLNLLAKQGLRLLRGLRR

SEQ ID NO: 19561 - protein, 27 aa, Artificial Sequence
  Quasi-synthetic sequence derived from human genome
RSSLRIRLFNFSLKLLTCLLYIVRVLL

SEQ ID NO: 19562 - protein, 27 aa, Artificial Sequence
  Quasi-synthetic sequence derived from human genome
LKKLLGKKLTRCLKPFENSRLRLWTKW

SEQ ID NO: 19563 - protein, 27 aa, Artificial Sequence
  Quasi-synthetic sequence derived from human genome
LLVMLFLLKLARHSKFGMKGFVLFHKI

SEQ ID NO: 19564 - protein, 27 aa, Artificial Sequence
  Quasi-synthetic sequence derived from human genome
KKIRWDPVRRRFIQSCPIIRIPNRFLR

SEQ ID NO: 19565 - protein, 27 aa, Artificial Sequence
  Quasi-synthetic sequence derived from human genome
FLLKLQKWTQKKEKGKKLSRMKLLLKH

SEQ ID NO: 19566 - protein, 27 aa, Artificial Sequence
  Quasi-synthetic sequence derived from human genome
VWMMAGIPLLLFRWKPLWGVRLRLRPC

SEQ ID NO: 19567 - protein, 27 aa, Artificial Sequence
  Quasi-synthetic sequence derived from human genome
VLKRPARLPCSHIFCKKCILRWLARQK

SEQ ID NO: 19568 - protein, 27 aa, Artificial Sequence
  Quasi-synthetic sequence derived from human genome
FACILVVLLAIFLYLLRLRRIHHRQTR

SEQ ID NO: 19569 - protein, 27 aa, Artificial Sequence
  Quasi-synthetic sequence derived from human genome
KLLKKIGISWNKKYRKQHGPLRKFLQL

SEQ ID NO: 19570 - protein, 27 aa, Artificial Sequence
  Quasi-synthetic sequence derived from human genome
KWRHHRRLLTPAFHFNILKPYIKIFSK

SEQ ID NO: 19571 - protein, 27 aa, Artificial Sequence
  Quasi-synthetic sequence derived from human genome
SKIKTFLSLVWKRRILFFVVTLVSVFL

SEQ ID NO: 19572 - protein, 27 aa, Artificial Sequence
  Quasi-synthetic sequence derived from human genome
RFLKLKYYSIILQSRIRMIIAVTSYKR

SEQ ID NO: 19573 - protein, 27 aa, Artificial Sequence
  Quasi-synthetic sequence derived from human genome
LYSKVRSRYSFIQALVRRIRGLLRISR

SEQ ID NO: 19574 - protein, 27 aa, Artificial Sequence
  Quasi-synthetic sequence derived from human genome
RGKMMQRRPRSAEVKYFYFFKILLRLR

SEQ ID NO: 19575 - protein, 27 aa, Artificial Sequence
  Quasi-synthetic sequence derived from human genome
WRRLRLQQLRRLRGLLRVLRGRPGAGS

SEQ ID NO: 19576 - protein, 27 aa, Artificial Sequence
  Quasi-synthetic sequence derived from human genome
KAVINMYGRLIHRVRYRRGLWRTRQIL

SEQ ID NO: 19577 - protein, 27 aa, Artificial Sequence
  Quasi-synthetic sequence derived from human genome
VHKFLQLRFWGWWKLYNKVKPLLNVAR

SEQ ID NO: 19578 - protein, 27 aa, Artificial Sequence
  Quasi-synthetic sequence derived from human genome
RRILIRYYIKSIIYYMVTSPKLLSWIK

SEQ ID NO: 19579 - protein, 27 aa, Artificial Sequence
  Quasi-synthetic sequence derived from human genome
FKSAPILKRALKVKQAMMQLYVLKLLK

SEQ ID NO: 19580 - protein, 27 aa, Artificial Sequence
  Quasi-synthetic sequence derived from human genome
VIKRKIPYILKRQLYENKPRRPYILKR

SEQ ID NO: 19581 - protein, 27 aa, Artificial Sequence
  Quasi-synthetic sequence derived from human genome
KDINTIKSLRVLRVLRPLKTIKRLPKL

SEQ ID NO: 19582 - protein, 27 aa, Artificial Sequence
  Quasi-synthetic sequence derived from human genome
RRTRLILFVLLLFGIYGLLKNPFLSVR

SEQ ID NO: 19583 - protein, 27 aa, Artificial Sequence
  Quasi-synthetic sequence derived from human genome
LVRTLRVLLDSPVKRRLLPMLRLVIPR

SEQ ID NO: 19584 - protein, 27 aa, Artificial Sequence
  Quasi-synthetic sequence derived from human genome
LHMLLARNKIRTLKNNMFSKFKKLKSL

SEQ ID NO: 19585 - protein, 27 aa, Artificial Sequence
  Quasi-synthetic sequence derived from human genome
WLKIRGTLKSWTKLWCVLKPGVLLIYK

SEQ ID NO: 19586 - protein, 27 aa, Artificial Sequence
  Quasi-synthetic sequence derived from human genome
IRMLKQLKHPNLVNLLEVFRRKRRLHL

SEQ ID NO: 19587 - protein, 27 aa, Artificial Sequence
  Quasi-synthetic sequence derived from human genome
KKWGMLFLVNQLFKIYFKINKLHLCKP

SEQ ID NO: 19588 - protein, 27 aa, Artificial Sequence
  Quasi-synthetic sequence derived from human genome
KWRRKSAYWKALKVFKLPVEFLLLLTV

SEQ ID NO: 19589 - protein, 27 aa, Artificial Sequence
  Quasi-synthetic sequence derived from human genome
LVVKRAVERRKALSRRARRLAVRMRAL

SEQ ID NO: 19590 - protein, 27 aa, Artificial Sequence
  Quasi-synthetic sequence derived from human genome
VPLLLMILKPVQKLFAIIVGRGIRKWW

SEQ ID NO: 19591 - protein, 27 aa, Artificial Sequence
  Quasi-synthetic sequence derived from human genome
GILGGILALLILILLLLLFLRRRAVVK

SEQ ID NO: 19592 - protein, 27 aa, Artificial Sequence
  Quasi-synthetic sequence derived from human genome
ATIILYFIPLRYIILIWGINKFTKKLR

SEQ ID NO: 19593 - protein, 27 aa, Artificial Sequence
  Quasi-synthetic sequence derived from human genome
LKRSIKLLSLIKWKGSKSSKLNSKFWK

SEQ ID NO: 19594 - protein, 27 aa, Artificial Sequence
  Quasi-synthetic sequence derived from human genome
VSFLIFILFIIVQLFIMKLRKAHVIWK

SEQ ID NO: 19595 - protein, 27 aa, Artificial Sequence
  Quasi-synthetic sequence derived from human genome
IFQRQKRRKFWKAKNLQHIPLKKGKRV

SEQ ID NO: 19596 - protein, 27 aa, Artificial Sequence
  Quasi-synthetic sequence derived from human genome
IPIFSLFRKWKAFSVWRKNVRSKKITG

SEQ ID NO: 19597 - protein, 27 aa, Artificial Sequence
  Quasi-synthetic sequence derived from human genome
IFHPLLYAFTRQKFQKVLKSKMKKRVV

SEQ ID NO: 19598 - protein, 27 aa, Artificial Sequence
  Quasi-synthetic sequence derived from human genome
ALRAWIIQCWWRQVLEKLLAKRRRMVL

SEQ ID NO: 19599 - protein, 27 aa, Artificial Sequence
  Quasi-synthetic sequence derived from human genome
KRKLGASVVKVNKVGQLRVLLAFRRLK

SEQ ID NO: 19600 - protein, 27 aa, Artificial Sequence
  Quasi-synthetic sequence derived from human genome
TLLVLLLLAGGSLAFILLRVRRRRKSP

SEQ ID NO: 19601 - protein, 27 aa, Artificial Sequence
  Quasi-synthetic sequence derived from human genome
LRFLRLFGPGKNVPSVWRSARRKRKKK

SEQ ID NO: 19602 - protein, 27 aa, Artificial Sequence
  Quasi-synthetic sequence derived from human genome
RCYAKFLRRTKAATIIQKYWRMYVVRR

SEQ ID NO: 19603 - protein, 27 aa, Artificial Sequence
  Quasi-synthetic sequence derived from human genome
KRRIICLVGLGLVVFFFSFLLSIFRSK

SEQ ID NO: 19604 - protein, 27 aa, Artificial Sequence
  Quasi-synthetic sequence derived from human genome
AGLLLLGLIILLLWKCGFFKRARTRAL

SEQ ID NO: 19605 - protein, 27 aa, Artificial Sequence
  Quasi-synthetic sequence derived from human genome
KLPWSNPLKVWKINASFKKKKAKRKKI

SEQ ID NO: 19606 - protein, 27 aa, Artificial Sequence
  Quasi-synthetic sequence derived from human genome
RLWKWLKSPRSWRLGLALLLGGALLFW

SEQ ID NO: 19607 - protein, 27 aa, Artificial Sequence
  Quasi-synthetic sequence derived from human genome
IKYQSKARRKLMFIIICVIVLLVILGI

SEQ ID NO: 19608 - protein, 27 aa, Artificial Sequence
  Quasi-synthetic sequence derived from human genome
QVKHLYNWNLPPRRILFIKRFIIYSIR

SEQ ID NO: 19609 - protein, 27 aa, Artificial Sequence
  Quasi-synthetic sequence derived from human genome
RKGKRKTVKAVIDRFLRLHCGLWVRRK

SEQ ID NO: 19610 - protein, 27 aa, Artificial Sequence
  Quasi-synthetic sequence derived from human genome
RILRRLFNLCKRCHRQPRFRLPKERSL

SEQ ID NO: 19611 - protein, 27 aa, Artificial Sequence
  Quasi-synthetic sequence derived from human genome
LRRFILSVIVFGSIVLLMLWLPIRIIK

SEQ ID NO: 19612 - protein, 27 aa, Artificial Sequence
  Quasi-synthetic sequence derived from human genome
FRCIALRWVRLLGFAIVYGTIILKLYR

SEQ ID NO: 19613 - protein, 27 aa, Artificial Sequence
  Quasi-synthetic sequence derived from human genome
AILAGILMLALLVFILWKCGFFKRNKK

SEQ ID NO: 19614 - protein, 27 aa, Artificial Sequence
  Quasi-synthetic sequence derived from human genome
FIFLKILKLLISKLKAHQMCFRDYKYR

SEQ ID NO: 19615 - protein, 27 aa, Artificial Sequence
  Quasi-synthetic sequence derived from human genome
LKIYIRKRRPSKPHMFPKILMKITDLR

SEQ ID NO: 19616 - protein, 27 aa, Artificial Sequence
  Quasi-synthetic sequence derived from human genome
AAGLSLLTLAPFLLWLRKCLRKAKKFV

SEQ ID NO: 19617 - protein, 27 aa, Artificial Sequence
  Quasi-synthetic sequence derived from human genome
KTKKGRSIPVWIKILLFVVVAVFLFLV

SEQ ID NO: 19618 - protein, 27 aa, Artificial Sequence
  Quasi-synthetic sequence derived from human genome
MKRMVSWSFHKLKTMKHLLLLLLCVFL

SEQ ID NO: 19619 - protein, 27 aa, Artificial Sequence
  Quasi-synthetic sequence derived from human genome
YFTRLILFLFCLMVLVESRKPKRKRWT

SEQ ID NO: 19620 - protein, 27 aa, Artificial Sequence
  Quasi-synthetic sequence derived from human genome
LCGRFSRISMKLPRIPLRRQKLPKVVV

SEQ ID NO: 19621 - protein, 27 aa, Artificial Sequence
  Quasi-synthetic sequence derived from human genome
IIIPLLNPFIYSLRNKKVMHALRRVIR

SEQ ID NO: 19622 - protein, 27 aa, Artificial Sequence
  Quasi-synthetic sequence derived from human genome
MFLNLVYKSLKADIVLRRVKAFVKRLL

SEQ ID NO: 19623 - protein, 27 aa, Artificial Sequence
  Quasi-synthetic sequence derived from human genome
LFYLGLTMVGKIKRLKKSAFVVLILLI

SEQ ID NO: 19624 - protein, 27 aa, Artificial Sequence
  Quasi-synthetic sequence derived from human genome
KYLTILKAVKVLQASFRGVRVRRTLRK

SEQ ID NO: 19625 - protein, 27 aa, Artificial Sequence
  Quasi-synthetic sequence derived from human genome
QMRRSLVKFRSLVHAYVSRRRYLKLRA

SEQ ID NO: 19626 - protein, 27 aa, Artificial Sequence
  Quasi-synthetic sequence derived from human genome
LLRWRRPALHRPIKVNLLIPVAYLVFW

SEQ ID NO: 19627 - protein, 27 aa, Artificial Sequence
  Quasi-synthetic sequence derived from human genome
IGKKEIKPFKRFLRKKSKPKKCVKKFV

SEQ ID NO: 19628 - protein, 27 aa, Artificial Sequence
  Quasi-synthetic sequence derived from human genome
FFIFIMSLLLISGQRPVNLTMRRKLRK

SEQ ID NO: 19629 - protein, 27 aa, Artificial Sequence
  Quasi-synthetic sequence derived from human genome
LRFSVVKRGRKKLLYIFKQPFMRPVQT

SEQ ID NO: 19630 - protein, 27 aa, Artificial Sequence
  Quasi-synthetic sequence derived from human genome
FQKQFYRLGGFRVCHKLIFMIIQKLFR

SEQ ID NO: 19631 - protein, 27 aa, Artificial Sequence
  Quasi-synthetic sequence derived from human genome
ALRRKRKALWAHLFSSLRGYLKSLPRV

SEQ ID NO: 19632 - protein, 27 aa, Artificial Sequence
  Quasi-synthetic sequence derived from human genome
LLGLRTFVAFAAKLWSFFIYLLRRQIR

SEQ ID NO: 19633 - protein, 27 aa, Artificial Sequence
  Quasi-synthetic sequence derived from human genome
RFLLLFIGFVCVLLSFFMARVFMRMKL

SEQ ID NO: 19634 - protein, 27 aa, Artificial Sequence
  Quasi-synthetic sequence derived from human genome
KHLSVRRFFWWARFIAINTFLFFLFFF

SEQ ID NO: 19635 - protein, 27 aa, Artificial Sequence
  Quasi-synthetic sequence derived from human genome
YWKRRIEVVMREYHKWRIYYKKRLRKP

SEQ ID NO: 19636 - protein, 27 aa, Artificial Sequence
  Quasi-synthetic sequence derived from human genome
RLFRVMRLVKLLSRGEGIRTLLWTFIK

SEQ ID NO: 19637 - protein, 27 aa, Artificial Sequence
  Quasi-synthetic sequence derived from human genome
FLKRFQLTKLPPYLIFCIKRFTKNNFF

SEQ ID NO: 19638 - protein, 27 aa, Artificial Sequence
  Quasi-synthetic sequence derived from human genome
RIKKILKEGPMLKNCNSFKRWKLRYFL

SEQ ID NO: 19639 - protein, 27 aa, Artificial Sequence
  Quasi-synthetic sequence derived from human genome
KQLRRQMWWRGCKIKAIMALVAAILLL

SEQ ID NO: 19640 - protein, 27 aa, Artificial Sequence
  Quasi-synthetic sequence derived from human genome
PFGLKLRRTRRYNVLSKNCFVTRIRLL

SEQ ID NO: 19641 - protein, 27 aa, Artificial Sequence
  Quasi-synthetic sequence derived from human genome
IQSKLLKHKQIHTRNKAFRALLLKKRR

SEQ ID NO: 19642 - protein, 27 aa, Artificial Sequence
  Quasi-synthetic sequence derived from human genome
RFKKGKIVLLFSLLCWVLFNLGIGFVK

SEQ ID NO: 19643 - protein, 27 aa, Artificial Sequence
  Quasi-synthetic sequence derived from human genome
KRLNFHLYMALKKALFKPGAWFKGILI

SEQ ID NO: 19644 - protein, 27 aa, Artificial Sequence
  Quasi-synthetic sequence derived from human genome
WSRMLKDNKKNWRRVYKSLLLLAYLIR

SEQ ID NO: 19645 - protein, 27 aa, Artificial Sequence
  Quasi-synthetic sequence derived from human genome
RALLVVVNALLRKRRYHAALAVLKGFR

SEQ ID NO: 19646 - protein, 27 aa, Artificial Sequence
  Quasi-synthetic sequence derived from human genome
ARKRFLGPLHPSFNLVKIIRSFLLKVL

SEQ ID NO: 19647 - protein, 27 aa, Artificial Sequence
  Quasi-synthetic sequence derived from human genome
ATWYVKAFLALLRPFISSKFTRKIRFL

SEQ ID NO: 19648 - protein, 27 aa, Artificial Sequence
  Quasi-synthetic sequence derived from human genome
LLRKRRFQLCRCMNPRARKNRSQIVLF

SEQ ID NO: 19649 - protein, 27 aa, Artificial Sequence
  Quasi-synthetic sequence derived from human genome
LCLFKKHFMALIFSAKRLKIIPFICMY

SEQ ID NO: 19650 - protein, 27 aa, Artificial Sequence
  Quasi-synthetic sequence derived from human genome
VMVTAFSGLAFIIWLARRLKKGKKSKR

SEQ ID NO: 19651 - protein, 27 aa, Artificial Sequence
  Quasi-synthetic sequence derived from human genome
KCALVRHKFNRLPRVLILHLKRYSFNV

SEQ ID NO: 19652 - protein, 27 aa, Artificial Sequence
  Quasi-synthetic sequence derived from human genome
RRCHCLPFPKRGMQRWMLPLRRGARLL

SEQ ID NO: 19653 - protein, 27 aa, Artificial Sequence
  Quasi-synthetic sequence derived from human genome
KALLRLVSAVNRRRMKLLLGIALLAYV

SEQ ID NO: 19654 - protein, 27 aa, Artificial Sequence
  Quasi-synthetic sequence derived from human genome
LRKFYKGKKYKPLDLRPKKTRAMRRRL

SEQ ID NO: 19655 - protein, 27 aa, Artificial Sequence
  Quasi-synthetic sequence derived from human genome
KKRKWPLKGWHKRFFYLDKGILKYAKS

SEQ ID NO: 19656 - protein, 27 aa, Artificial Sequence
  Quasi-synthetic sequence derived from human genome
RIVQVLRLLRALRMLKLGRHSTGLRSL

SEQ ID NO: 19657 - protein, 27 aa, Artificial Sequence
  Quasi-synthetic sequence derived from human genome
YLRRFREMKPRVLQRWSRQILRGLHFL

SEQ ID NO: 19658 - protein, 27 aa, Artificial Sequence
  Quasi-synthetic sequence derived from human genome
SKRRFILKTCGTTLLLKALVPLLKLAR

SEQ ID NO: 19659 - protein, 27 aa, Artificial Sequence
  Quasi-synthetic sequence derived from human genome
IRTVRVLRPLRAINRVPSMRILVTLLL

SEQ ID NO: 19660 - protein, 27 aa, Artificial Sequence
  Quasi-synthetic sequence derived from human genome
LAVVGGVIGLLILILLIKKLIIFILKK

SEQ ID NO: 19661 - protein, 27 aa, Artificial Sequence
  Quasi-synthetic sequence derived from human genome
IFYLLKIANFSNFIFLHLKRRVKSVIL

SEQ ID NO: 19662 - protein, 27 aa, Artificial Sequence
  Quasi-synthetic sequence derived from human genome
IFYLLKIANFSNLIFLHLKRRVKSVIL

SEQ ID NO: 19663 - protein, 27 aa, Artificial Sequence
  Quasi-synthetic sequence derived from human genome
FLLRKKRFGQWTKLLCVIKDTKLLCYK

SEQ ID NO: 19664 - protein, 27 aa, Artificial Sequence
  Quasi-synthetic sequence derived from human genome
LRGFLARNRYRKILREHKAVIIQKRVR

SEQ ID NO: 19665 - protein, 27 aa, Artificial Sequence
  Quasi-synthetic sequence derived from human genome
MVVLAFFVVQINKAKSRPKRRKPRVKR

SEQ ID NO: 19666 - protein, 27 aa, Artificial Sequence
  Quasi-synthetic sequence derived from human genome
FIFDLGCIWRFAWRKSIKKYHAWRSRR

SEQ ID NO: 19667 - protein, 27 aa, Artificial Sequence
  Quasi-synthetic sequence derived from human genome
LLLALHRRLRGLRRAAAGTSRLLFQRL

SEQ ID NO: 19668 - protein, 27 aa, Artificial Sequence
  Quasi-synthetic sequence derived from human genome
KKAVKYQSKARRKKIMIIICCVILGIV

SEQ ID NO: 19669 - protein, 27 aa, Artificial Sequence
  Quasi-synthetic sequence derived from human genome
LARIGRILRLVRAARGIRTLLFALMMS

SEQ ID NO: 19670 - protein, 27 aa, Artificial Sequence
  Quasi-synthetic sequence derived from human genome
KIPSRFKRSYNYKTIVKKILAKLKRAR

SEQ ID NO: 19671 - protein, 27 aa, Artificial Sequence
  Quasi-synthetic sequence derived from human genome
RAQVRRILQRVPGKQRFGIYRFLPFFF

SEQ ID NO: 19672 - protein, 27 aa, Artificial Sequence
  Quasi-synthetic sequence derived from human genome
LRPAILVIPCLLLIKCHLKLYRTKLIY

SEQ ID NO: 19673 - protein, 27 aa, Artificial Sequence
  Quasi-synthetic sequence derived from human genome
LVWVPIIKKKQKHRQKSNFLRSLKSFF

SEQ ID NO: 19674 - protein, 27 aa, Artificial Sequence
  Quasi-synthetic sequence derived from human genome
FLVIIVILSALFLGTLACFCVWRRKRK

SEQ ID NO: 19675 - protein, 27 aa, Artificial Sequence
  Quasi-synthetic sequence derived from human genome
IKVSSFTHHIFLWLRWRILRLFPWILL

SEQ ID NO: 19676 - protein, 27 aa, Artificial Sequence
  Quasi-synthetic sequence derived from human genome
LLLLIPNVLFLIFLLWKLPSARAKIRI

SEQ ID NO: 19677 - protein, 27 aa, Artificial Sequence
  Quasi-synthetic sequence derived from human genome
RRIYPFLLMVVVLMAILSFQVRQFKRL

SEQ ID NO: 19678 - protein, 27 aa, Artificial Sequence
  Quasi-synthetic sequence derived from human genome
VRTRGVGKVPRKKVNVKVFIIIAVFFI

SEQ ID NO: 19679 - protein, 27 aa, Artificial Sequence
  Quasi-synthetic sequence derived from human genome
RLFRVMRLVKLLSKGEGIRTLLWTFIK

SEQ ID NO: 19680 - protein, 27 aa, Artificial Sequence
  Quasi-synthetic sequence derived from human genome
FFRILRIFKLIAPKLLQIIDKRMSHQK

SEQ ID NO: 19681 - protein, 27 aa, Artificial Sequence
  Quasi-synthetic sequence derived from human genome
KLLAKIAKLQRRIKTVLLFQRNCLKPN

SEQ ID NO: 19682 - protein, 27 aa, Artificial Sequence
  Quasi-synthetic sequence derived from human genome
LALVLPSIVILGKIILFLPCISRKLKR

SEQ ID NO: 19683 - protein, 27 aa, Artificial Sequence
  Quasi-synthetic sequence derived from human genome
FVIVICLASLILCTRSIVLALRLRKRF

SEQ ID NO: 19684 - protein, 27 aa, Artificial Sequence
  Quasi-synthetic sequence derived from human genome
LRRPPRLRLCARLPDFFLLLLFRGCLI

SEQ ID NO: 19685 - protein, 27 aa, Artificial Sequence
  Quasi-synthetic sequence derived from human genome
SPPILTKPTLKRKKPFLHRRRRVRKRK

SEQ ID NO: 19686 - protein, 27 aa, Artificial Sequence
  Quasi-synthetic sequence derived from human genome
LVFFVSRKRRILISGSRRRDVIKSIVK

SEQ ID NO: 19687 - protein, 27 aa, Artificial Sequence
  Quasi-synthetic sequence derived from human genome
RHKVWYKKFFHHLLHITVLNSYILFKK

SEQ ID NO: 19688 - protein, 27 aa, Artificial Sequence
  Quasi-synthetic sequence derived from human genome
CKAFKIRKHYLHLRATVVSIQRRYRKL

SEQ ID NO: 19689 - protein, 27 aa, Artificial Sequence
  Quasi-synthetic sequence derived from human genome
VSVAFVLLLFLLLFLLLRRQRHSKHRT

SEQ ID NO: 19690 - protein, 27 aa, Artificial Sequence
  Quasi-synthetic sequence derived from human genome
RIKYIEFKKSTVILQALVRGWLVRKRF

SEQ ID NO: 19691 - protein, 27 aa, Artificial Sequence
  Quasi-synthetic sequence derived from human genome
RLVLRSMSRRDVLIKRWPPPLRWQYFR

SEQ ID NO: 19692 - protein, 27 aa, Artificial Sequence
  Quasi-synthetic sequence derived from human genome
LQQKVFILFLTLWLLSLLKLLNVRRLF

SEQ ID NO: 19693 - protein, 27 aa, Artificial Sequence
  Quasi-synthetic sequence derived from human genome
FCLRLMHIFTISKTLGPKIIIVKRMMK

SEQ ID NO: 19694 - protein, 27 aa, Artificial Sequence
  Quasi-synthetic sequence derived from human genome
KLTKWKHSRTMMLVVFKSAPILKRALK

SEQ ID NO: 19695 - protein, 27 aa, Artificial Sequence
  Quasi-synthetic sequence derived from human genome
RRSRHRLLLLLLRYLVVALGYHKAYGF

SEQ ID NO: 19696 - protein, 27 aa, Artificial Sequence
  Quasi-synthetic sequence derived from human genome
LRKRRRLLSIIVVLVVTFALCWMPYHL

SEQ ID NO: 19697 - protein, 27 aa, Artificial Sequence
  Quasi-synthetic sequence derived from human genome
YAFIGQKFRNYFLKILKDLWCVRRKYK

SEQ ID NO: 19698 - protein, 27 aa, Artificial Sequence
  Quasi-synthetic sequence derived from human genome
KLLCRDKIRLNNAIWRAWYIQYVKRRK

SEQ ID NO: 19699 - protein, 27 aa, Artificial Sequence
  Quasi-synthetic sequence derived from human genome
LNLAMVYRYCCKINKKLKSITMLRKKI

SEQ ID NO: 19700 - protein, 27 aa, Artificial Sequence
  Quasi-synthetic sequence derived from human genome
LRRQWKCVQRRCLRHLAHRLRRRHQRC

SEQ ID NO: 19701 - protein, 27 aa, Artificial Sequence
  Quasi-synthetic sequence derived from human genome
ILIIRRLHKVLRPFLLRRLKKEVEAQL

SEQ ID NO: 19702 - protein, 27 aa, Artificial Sequence
  Quasi-synthetic sequence derived from human genome
RSRRQGSRFLWLLKILVIILVLGIVGF

SEQ ID NO: 19703 - protein, 27 aa, Artificial Sequence
  Quasi-synthetic sequence derived from human genome
KRLNIRKVIPYIASQFRKDKIWLRRTK

SEQ ID NO: 19704 - protein, 27 aa, Artificial Sequence
  Quasi-synthetic sequence derived from human genome
FRQRIILRVWWSTWRQRLGQVRVSRAL

SEQ ID NO: 19705 - protein, 27 aa, Artificial Sequence
  Quasi-synthetic sequence derived from human genome
LWKWFGKPTQRRGMKGKARKLFYKAIV

SEQ ID NO: 19706 - protein, 27 aa, Artificial Sequence
  Quasi-synthetic sequence derived from human genome
VAAVLKRRLLQPSRRVKRSRRRPLLPP

SEQ ID NO: 19707 - protein, 27 aa, Artificial Sequence
  Quasi-synthetic sequence derived from human genome
LVGLVLLVILVTVLQRRRPAWLPVRLR

SEQ ID NO: 19708 - protein, 27 aa, Artificial Sequence
  Quasi-synthetic sequence derived from human genome
FYLPLCVVLFVYWKIYKAAKFRVGSRK

SEQ ID NO: 19709 - protein, 27 aa, Artificial Sequence
  Quasi-synthetic sequence derived from human genome
KKVGLLYRLLQASILAYLVVWVFLIKK

SEQ ID NO: 19710 - protein, 27 aa, Artificial Sequence
  Quasi-synthetic sequence derived from human genome
KQVRWKFIKRWKTRYFTLAGNQLLFQK

SEQ ID NO: 19711 - protein, 27 aa, Artificial Sequence
  Quasi-synthetic sequence derived from human genome
KKQRLSKKLRRKLQMWLWSQTFCPVLY

SEQ ID NO: 19712 - protein, 27 aa, Artificial Sequence
  Quasi-synthetic sequence derived from human genome
GFLQLRGSGRKLWKRFFCFLRRSGLYY

SEQ ID NO: 19713 - protein, 27 aa, Artificial Sequence
  Quasi-synthetic sequence derived from human genome
FLQLRGSGRKLWKRFFCFLRRSGLYYS

SEQ ID NO: 19714 - protein, 27 aa, Artificial Sequence
  Quasi-synthetic sequence derived from human genome
LFFLWRSFRSVRSRLYVGREKKLALML

SEQ ID NO: 19715 - protein, 27 aa, Artificial Sequence
  Quasi-synthetic sequence derived from human genome
FLLSASKKKRISKQCKLMRLPFARVPL

SEQ ID NO: 19716 - protein, 27 aa, Artificial Sequence
  Quasi-synthetic sequence derived from human genome
LNSYKSRFLCGKEIKKKKCIFRLRIRV

SEQ ID NO: 19717 - protein, 27 aa, Artificial Sequence
  Quasi-synthetic sequence derived from human genome
RVAKMGLILAIRSILLVIPFPFTLRRL

SEQ ID NO: 19718 - protein, 27 aa, Artificial Sequence
  Quasi-synthetic sequence derived from human genome
LCVCLVIVLWGIRLLLQRKKKLVSTSK

SEQ ID NO: 19719 - protein, 27 aa, Artificial Sequence
  Quasi-synthetic sequence derived from human genome
IRKALDRLRKKRHLLRRQRTRREFPVI

SEQ ID NO: 19720 - protein, 27 aa, Artificial Sequence
  Quasi-synthetic sequence derived from human genome
MILFMVSGICIVFGFIILLLLVLRKRR

SEQ ID NO: 19721 - protein, 27 aa, Artificial Sequence
  Quasi-synthetic sequence derived from human genome
WCPKKRRKVTRKEPPVIIKYIIINRFK

SEQ ID NO: 19722 - protein, 27 aa, Artificial Sequence
  Quasi-synthetic sequence derived from human genome
KRYRRKLKKYGKNVGKVIIKGCRYVVI

SEQ ID NO: 19723 - protein, 27 aa, Artificial Sequence
  Quasi-synthetic sequence derived from human genome
LYYAKVYYRLGRLTFCQLKVRARLPRF

SEQ ID NO: 19724 - protein, 27 aa, Artificial Sequence
  Quasi-synthetic sequence derived from human genome
VIIPMCLVLLLLALILPLLFYLRKRNK

SEQ ID NO: 19725 - protein, 27 aa, Artificial Sequence
  Quasi-synthetic sequence derived from human genome
IVKQGYVRIRSRRLGIYQRCWLVFKKA

SEQ ID NO: 19726 - protein, 27 aa, Artificial Sequence
  Quasi-synthetic sequence derived from human genome
HRIYGKFLGLRAFIRKQINNIFLRFVY

SEQ ID NO: 19727 - protein, 27 aa, Artificial Sequence
  Quasi-synthetic sequence derived from human genome
MSIMALLLLLLLLLLYKYKQKPKYQVR

SEQ ID NO: 19728 - protein, 27 aa, Artificial Sequence
  Quasi-synthetic sequence derived from human genome
WRGTLARMRYKRTKAALTIIRYYRRYK

SEQ ID NO: 19729 - protein, 27 aa, Artificial Sequence
  Quasi-synthetic sequence derived from human genome
IRTVRVLRPLKAINRVPSMRILVNLLL

SEQ ID NO: 19730 - protein, 27 aa, Artificial Sequence
  Quasi-synthetic sequence derived from human genome
VIRNLQRVIPIRRAPLRSKIEIVRRIL

SEQ ID NO: 19731 - protein, 27 aa, Artificial Sequence
  Quasi-synthetic sequence derived from human genome
LIKSNIYPIVLFIRVCEKNIKRFRKLL

SEQ ID NO: 19732 - protein, 27 aa, Artificial Sequence
  Quasi-synthetic sequence derived from human genome
IVRYSFKKQWSLGFIPKLKRKIPVNYW

SEQ ID NO: 19733 - protein, 27 aa, Artificial Sequence
  Quasi-synthetic sequence derived from human genome
AFGAMFAKTWRVHAIFKNVKMKKKIIK

SEQ ID NO: 19734 - protein, 27 aa, Artificial Sequence
  Quasi-synthetic sequence derived from human genome
LLRKRRFQLGRSMNPRARKNRSRIPLL

SEQ ID NO: 19735 - protein, 27 aa, Artificial Sequence
  Quasi-synthetic sequence derived from human genome
KVLNLLKGAFPARLKKVLIVGAPIWFR

SEQ ID NO: 19736 - protein, 27 aa, Artificial Sequence
  Quasi-synthetic sequence derived from human genome
LIILSVVFAVCLLACLLGVALRKFKRR

SEQ ID NO: 19737 - protein, 27 aa, Artificial Sequence
  Quasi-synthetic sequence derived from human genome
KRKFKSLLLHKRTAIQHAYRLLISQRR

SEQ ID NO: 19738 - protein, 27 aa, Artificial Sequence
  Quasi-synthetic sequence derived from human genome
KTFVKIKASHNLKKKILRFRSGSLKLM

SEQ ID NO: 19739 - protein, 27 aa, Artificial Sequence
  Quasi-synthetic sequence derived from human genome
LRCRNEKKRHRAVRVIFTIMIVYFLFW

SEQ ID NO: 19740 - protein, 27 aa, Artificial Sequence
  Quasi-synthetic sequence derived from human genome
RCFLKLTVNRVIWKIAKPPTCVLVRVR

SEQ ID NO: 19741 - protein, 27 aa, Artificial Sequence
  Quasi-synthetic sequence derived from human genome
RGLRLRLPRRESLLRGLCRPLRPLLGF

SEQ ID NO: 19742 - protein, 27 aa, Artificial Sequence
  Quasi-synthetic sequence derived from human genome
LLTFILLLTLTILTIWLFKHRRVRFLH

SEQ ID NO: 19743 - protein, 27 aa, Artificial Sequence
  Quasi-synthetic sequence derived from human genome
VVRKILLLQSWFRMVLERRHFLQMKRA

SEQ ID NO: 19744 - protein, 27 aa, Artificial Sequence
  Quasi-synthetic sequence derived from human genome
NSCFHLYRAPYFWIKRRILLLIPKWLY

SEQ ID NO: 19745 - protein, 27 aa, Artificial Sequence
  Quasi-synthetic sequence derived from human genome
PGPRRPAGSRLRLLLLLLLPPLLLLLR

SEQ ID NO: 19746 - protein, 27 aa, Artificial Sequence
  Quasi-synthetic sequence derived from human genome
KFIIGYLFPLLTMSICYLCLIFKVKKR

SEQ ID NO: 19747 - protein, 27 aa, Artificial Sequence
  Quasi-synthetic sequence derived from human genome
RPLIMIRAFRIYFRFELPRTRITNILK

SEQ ID NO: 19748 - protein, 27 aa, Artificial Sequence
  Quasi-synthetic sequence derived from human genome
FLKLFICFIFIRSSPTIVSNKRVSKRK

SEQ ID NO: 19749 - protein, 27 aa, Artificial Sequence
  Quasi-synthetic sequence derived from human genome
FLLLILLCMSLLLFQVIRLYQRRRWTI

SEQ ID NO: 19750 - protein, 27 aa, Artificial Sequence
  Quasi-synthetic sequence derived from human genome
ALYRKVKLLNQVRLLRVQLCHMKNMFK

SEQ ID NO: 19751 - protein, 27 aa, Artificial Sequence
  Quasi-synthetic sequence derived from human genome
LRRQMWWRGCKIKAIMALVAAILLLVI

SEQ ID NO: 19752 - protein, 27 aa, Artificial Sequence
  Quasi-synthetic sequence derived from human genome
WRRDIFGRIIWHKFKQWVIPWHLNKRY

SEQ ID NO: 19753 - protein, 27 aa, Artificial Sequence
  Quasi-synthetic sequence derived from human genome
RRRQAGRRLRYLPTGSFPFLLLLLLLC

SEQ ID NO: 19754 - protein, 27 aa, Artificial Sequence
  Quasi-synthetic sequence derived from human genome
LQHGNMRKNMRVLSRISKFRRLRQLLR

SEQ ID NO: 19755 - protein, 27 aa, Artificial Sequence
  Quasi-synthetic sequence derived from human genome
WLLRKKYLRMRKAAITMQRYVRGYQAR

SEQ ID NO: 19756 - protein, 27 aa, Artificial Sequence
  Quasi-synthetic sequence derived from human genome
IKIVKKLKLTGFPYKIFKNTSFIKGMF

SEQ ID NO: 19757 - protein, 27 aa, Artificial Sequence
  Quasi-synthetic sequence derived from human genome
WALNYRTGVRLRGAILTMAFKKILKLK

SEQ ID NO: 19758 - protein, 27 aa, Artificial Sequence
  Quasi-synthetic sequence derived from human genome
PTSRIVLWGFRWLIFRIMLGAGLIKIR

SEQ ID NO: 19759 - protein, 27 aa, Artificial Sequence
  Quasi-synthetic sequence derived from human genome
VAIHLCCRRRRARLRFMKQLRLHPLEK

SEQ ID NO: 19760 - protein, 27 aa, Artificial Sequence
  Quasi-synthetic sequence derived from human genome
RSRLLLLLCIFLGTLRGFRARQIRYSV

SEQ ID NO: 19761 - protein, 27 aa, Artificial Sequence
  Quasi-synthetic sequence derived from human genome
VRRELLRRTWGRERKVRGLQLRLLFLV

SEQ ID NO: 19762 - protein, 27 aa, Artificial Sequence
  Quasi-synthetic sequence derived from human genome
IFMMLGGTFLYWRGRRIQNKRAMRRYL

SEQ ID NO: 19763 - protein, 27 aa, Artificial Sequence
  Quasi-synthetic sequence derived from human genome
HWFKKLSQKRFKQLVERLLQFISLRLF

SEQ ID NO: 19764 - protein, 27 aa, Artificial Sequence
  Quasi-synthetic sequence derived from human genome
WLFLRYKSIVGRRFCFIIGTLYLYRCI

SEQ ID NO: 19765 - protein, 27 aa, Artificial Sequence
  Quasi-synthetic sequence derived from human genome
VVVLFVIGLFAAGAFILYKFKRKRPGR

SEQ ID NO: 19766 - protein, 27 aa, Artificial Sequence
  Quasi-synthetic sequence derived from human genome
VIYTVFNQDFRRSFKHILFRRRRRGFR

SEQ ID NO: 19767 - protein, 27 aa, Artificial Sequence
  Quasi-synthetic sequence derived from human genome
LWLRAKFQRLLFKLGCYIQKNCGKFLV

SEQ ID NO: 19768 - protein, 27 aa, Artificial Sequence
  Quasi-synthetic sequence derived from human genome
CAIILLMSMAFLTCCLLKCVKKSKRRR

SEQ ID NO: 19769 - protein, 27 aa, Artificial Sequence
  Quasi-synthetic sequence derived from human genome
MKLLKLRRNIVKLSLYRHFTNTLILAV

SEQ ID NO: 19770 - protein, 27 aa, Artificial Sequence
  Quasi-synthetic sequence derived from human genome
LLTMRPFLKRAILVLSYVLVILYFRLW

SEQ ID NO: 19771 - protein, 27 aa, Artificial Sequence
  Quasi-synthetic sequence derived from human genome
MRLKRACIRKAKISAVAFRKAFCHHKL

SEQ ID NO: 19772 - protein, 27 aa, Artificial Sequence
  Quasi-synthetic sequence derived from human genome
KFKKFDHRYLRKILIRKNLPKSSIVSL

SEQ ID NO: 19773 - protein, 27 aa, Artificial Sequence
  Quasi-synthetic sequence derived from human genome
IFIPSKFKSKRLGSLNKFKAKARSILL

SEQ ID NO: 19774 - protein, 27 aa, Artificial Sequence
  Quasi-synthetic sequence derived from human genome
WLRSPVQNFCYIFWKRYRFKLIAFMVI

SEQ ID NO: 19775 - protein, 27 aa, Artificial Sequence
  Quasi-synthetic sequence derived from human genome
WRQKFLRVKRSAICIQSWWRGTLGRRK

SEQ ID NO: 19776 - protein, 27 aa, Artificial Sequence
  Quasi-synthetic sequence derived from human genome
RFKRSKKIMPAGLVAGLSLMMILRLVL

SEQ ID NO: 19777 - protein, 27 aa, Artificial Sequence
  Quasi-synthetic sequence derived from human genome
RSVVRRRSFSISPVRLRRSRTPLRRRF

SEQ ID NO: 19778 - protein, 27 aa, Artificial Sequence
  Quasi-synthetic sequence derived from human genome
ARSKLSLIRKFRLFPRPQVKLFGKEKL

SEQ ID NO: 19779 - protein, 27 aa, Artificial Sequence
  Quasi-synthetic sequence derived from human genome
PCLIMILVYLRIYLIAKRSNRRGPRAK

SEQ ID NO: 19780 - protein, 27 aa, Artificial Sequence
  Quasi-synthetic sequence derived from human genome
AGKAFLRLKRKFIQMRRPFLERRDLII

SEQ ID NO: 19781 - protein, 27 aa, Artificial Sequence
  Quasi-synthetic sequence derived from human genome
LLKYYVLNALKHRPPKAQKKRYLFRSF

SEQ ID NO: 19782 - protein, 27 aa, Artificial Sequence
  Quasi-synthetic sequence derived from human genome
LLTFWKNWHFRLLLDLTAKMKFCLRWK

SEQ ID NO: 19783 - protein, 27 aa, Artificial Sequence
  Quasi-synthetic sequence derived from human genome
FPPRRRLRLGPRGLPLLLSGLLLPLCR

SEQ ID NO: 19784 - protein, 27 aa, Artificial Sequence
  Quasi-synthetic sequence derived from human genome
FRILKLIVRRRNAPVSRPHSWHVAKLL

SEQ ID NO: 19785 - protein, 27 aa, Artificial Sequence
  Quasi-synthetic sequence derived from human genome
RCGIFLILEKLKIITYRNLFKKVYLLL

SEQ ID NO: 19786 - protein, 27 aa, Artificial Sequence
  Quasi-synthetic sequence derived from human genome
FKKFAARKKWKQSVRLISLCQRLSRSF

SEQ ID NO: 19787 - protein, 27 aa, Artificial Sequence
  Quasi-synthetic sequence derived from human genome
ICAIARVRLLKLKHERKALLALLLILM

SEQ ID NO: 19788 - protein, 27 aa, Artificial Sequence
  Quasi-synthetic sequence derived from human genome
GGWWWARAARLARLRFRRSLLPPQRPR

SEQ ID NO: 19789 - protein, 27 aa, Artificial Sequence
  Quasi-synthetic sequence derived from human genome
ILLIFISLFPEILLIVLKNVRRRSARR

SEQ ID NO: 19790 - protein, 27 aa, Artificial Sequence
  Quasi-synthetic sequence derived from human genome
MIFKRGVFESRRKNKAVFRPKIRINLR

SEQ ID NO: 19791 - protein, 27 aa, Artificial Sequence
  Quasi-synthetic sequence derived from human genome
LGVAKKGSLSVLRSFRLLRVFKLAKSW

SEQ ID NO: 19792 - protein, 27 aa, Artificial Sequence
  Quasi-synthetic sequence derived from human genome
RFPVFLAILINFFIFVRIVQLLVAKLR

SEQ ID NO: 19793 - protein, 27 aa, Artificial Sequence
  Quasi-synthetic sequence derived from human genome
IFFLIVFLLLLAILLFFAVKYLLRWKY

SEQ ID NO: 19794 - protein, 27 aa, Artificial Sequence
  Quasi-synthetic sequence derived from human genome
LLYLLAVAVVIILFIILLGVIMAKRKR

SEQ ID NO: 19795 - protein, 27 aa, Artificial Sequence
  Quasi-synthetic sequence derived from human genome
HFRLKKVQNIKMWLSLRSYLKRRGPQR

SEQ ID NO: 19796 - protein, 27 aa, Artificial Sequence
  Quasi-synthetic sequence derived from human genome
PFVVLVLCLSFMLLFSLWRQSCRRRKL

SEQ ID NO: 19797 - protein, 27 aa, Artificial Sequence
  Quasi-synthetic sequence derived from human genome
SKCIAMKQGVIKSLKIKYRHCLIKKFL

SEQ ID NO: 19798 - protein, 27 aa, Artificial Sequence
  Quasi-synthetic sequence derived from human genome
VALLFAFFVWLFVCPWMRRKITGKLQK

SEQ ID NO: 19799 - protein, 27 aa, Artificial Sequence
  Quasi-synthetic sequence derived from human genome
RMKLVLRWYLSGFYKKPKGIKKPYNPI

SEQ ID NO: 19800 - protein, 27 aa, Artificial Sequence
  Quasi-synthetic sequence derived from human genome
VLLAKRKLDGKFYAVKVLQKKIVLNRK

SEQ ID NO: 19801 - protein, 27 aa, Artificial Sequence
  Quasi-synthetic sequence derived from human genome
INKLIIYLFSQNNRIRFSKLLLKILFY

SEQ ID NO: 19802 - protein, 27 aa, Artificial Sequence
  Quasi-synthetic sequence derived from human genome
RRGKVELIKFVRVQWRRPQVEWRRRRW

SEQ ID NO: 19803 - protein, 27 aa, Artificial Sequence
  Quasi-synthetic sequence derived from human genome
RRVLLVMSKAKRKWVSVRPLPSIRNFP

SEQ ID NO: 19804 - protein, 27 aa, Artificial Sequence
  Quasi-synthetic sequence derived from human genome
LKTVIRAIRIMKFHVAKRKFKETLRPY

SEQ ID NO: 19805 - protein, 27 aa, Artificial Sequence
  Quasi-synthetic sequence derived from human genome
CRPFLAFCRRHVRAARPVPWNALLRRR

SEQ ID NO: 19806 - protein, 27 aa, Artificial Sequence
  Quasi-synthetic sequence derived from human genome
VRTVRVLRPLRAINRVPSMRILVTLLL

SEQ ID NO: 19807 - protein, 27 aa, Artificial Sequence
  Quasi-synthetic sequence derived from human genome
PILPIKTVNRKFFGFKFPGLRVLTYRK

SEQ ID NO: 19808 - protein, 27 aa, Artificial Sequence
  Quasi-synthetic sequence derived from human genome
VLLGSLLKRKMLPRAALLVTTRPRALR

SEQ ID NO: 19809 - protein, 27 aa, Artificial Sequence
  Quasi-synthetic sequence derived from human genome
RLFFGPQHRPVILRLPNRRALRLRASF

SEQ ID NO: 19810 - protein, 27 aa, Artificial Sequence
  Quasi-synthetic sequence derived from human genome
LRRWKHWLLLLGICCPKPHGRVSSRLR

SEQ ID NO: 19811 - protein, 27 aa, Artificial Sequence
  Quasi-synthetic sequence derived from human genome
RFLPLFKIIVPILIRIADVQIKKRLSL

SEQ ID NO: 19812 - protein, 27 aa, Artificial Sequence
  Quasi-synthetic sequence derived from human genome
WLLLKYKSIISRRFFCIVGTLYLYRCI

SEQ ID NO: 19813 - protein, 27 aa, Artificial Sequence
  Quasi-synthetic sequence derived from human genome
KCLRKRIWEKIALRKKELFKVRPPWVS

SEQ ID NO: 19814 - protein, 27 aa, Artificial Sequence
  Quasi-synthetic sequence derived from human genome
IRLVRVFRIFKLSRHSKGLQILGQTLK

SEQ ID NO: 19815 - protein, 27 aa, Artificial Sequence
  Quasi-synthetic sequence derived from human genome
RKWAKKSHMTWAHARLCFLLGRLSIRK

SEQ ID NO: 19816 - protein, 27 aa, Artificial Sequence
  Quasi-synthetic sequence derived from human genome
LIPYLLGRKRRWSKCKIRVFVGGQINR

SEQ ID NO: 19817 - protein, 27 aa, Artificial Sequence
  Quasi-synthetic sequence derived from human genome
LRQLLRLQRVSRAFRSLVQLHLAGLRR

SEQ ID NO: 19818 - protein, 27 aa, Artificial Sequence
  Quasi-synthetic sequence derived from human genome
PRQFLRKKVLLRGFSPSHLRAYARRMF

SEQ ID NO: 19819 - protein, 27 aa, Artificial Sequence
  Quasi-synthetic sequence derived from human genome
VWHWKHRVATRFTLPRFLQRRSSRRKV

SEQ ID NO: 19820 - protein, 27 aa, Artificial Sequence
  Quasi-synthetic sequence derived from human genome
FLLSRKILRLITIRKLFTAIGVLFPSV

SEQ ID NO: 19821 - protein, 27 aa, Artificial Sequence
  Quasi-synthetic sequence derived from human genome
HKFRCKVVDCLKFFRKAKLLHYHMKYF

SEQ ID NO: 19822 - protein, 27 aa, Artificial Sequence
  Quasi-synthetic sequence derived from human genome
KLRYLSLLCLLPLVAFLLFCLHVLFKK

SEQ ID NO: 19823 - protein, 27 aa, Artificial Sequence
  Quasi-synthetic sequence derived from human genome
ARKVKRLHGMLRSLLVYMLFLLVTLLA

SEQ ID NO: 19824 - protein, 27 aa, Artificial Sequence
  Quasi-synthetic sequence derived from human genome
GFLIKMGGKIKTWKKRWFVFDRNKRTF

SEQ ID NO: 19825 - protein, 27 aa, Artificial Sequence
  Quasi-synthetic sequence derived from human genome
YRRLCLRLRLADCLVPYSRALYRRRRA

SEQ ID NO: 19826 - protein, 27 aa, Artificial Sequence
  Quasi-synthetic sequence derived from human genome
RKKLVRALFIVPRQRLDLLPFYARLVA

SEQ ID NO: 19827 - protein, 27 aa, Artificial Sequence
  Quasi-synthetic sequence derived from human genome
AILLFLAAMLFVLMNWYYRTVHKRKLK

SEQ ID NO: 19828 - protein, 27 aa, Artificial Sequence
  Quasi-synthetic sequence derived from human genome
FRNWLYFVPLLLLVPLLLCCVWRLCRK

SEQ ID NO: 19829 - protein, 27 aa, Artificial Sequence
  Quasi-synthetic sequence derived from human genome
FVRILRIFKLTRHFVGLRVLGHTLRAS

SEQ ID NO: 19830 - protein, 27 aa, Artificial Sequence
  Quasi-synthetic sequence derived from human genome
FYFLKIANFSNSIFLYLKWRVKKVVLV

SEQ ID NO: 19831 - protein, 27 aa, Artificial Sequence
  Quasi-synthetic sequence derived from human genome
RGLHSKAKYKKVQLVRLVGMMLLIFAR

SEQ ID NO: 19832 - protein, 27 aa, Artificial Sequence
  Quasi-synthetic sequence derived from human genome
FVRIWAAGCCCRYRGWRGRLKFARKPF

SEQ ID NO: 19833 - protein, 27 aa, Artificial Sequence
  Quasi-synthetic sequence derived from human genome
MVELFLRRLRLWMGLSKVKEFRHKVRF

SEQ ID NO: 19834 - protein, 27 aa, Artificial Sequence
  Quasi-synthetic sequence derived from human genome
LLRKRRFQLYRSTNPRARKNRSRIPLL

SEQ ID NO: 19835 - protein, 27 aa, Artificial Sequence
  Quasi-synthetic sequence derived from human genome
LAKRLKPLKVRRIKSEKLHLKDFRINL

SEQ ID NO: 19836 - protein, 27 aa, Artificial Sequence
  Quasi-synthetic sequence derived from human genome
YFCVIFLLNVSMFIVVLVQLCRIKKKK

SEQ ID NO: 19837 - protein, 27 aa, Artificial Sequence
  Quasi-synthetic sequence derived from human genome
WFLNPLKSARYFLWHTYRWLLLKLLLL

SEQ ID NO: 19838 - protein, 27 aa, Artificial Sequence
  Quasi-synthetic sequence derived from human genome
KFRAKGRKPCKLMLQVVKILVVTVQLI

SEQ ID NO: 19839 - protein, 27 aa, Artificial Sequence
  Quasi-synthetic sequence derived from human genome
LKRIYGKYLRAESFRKALIYQKKYLLL

SEQ ID NO: 19840 - protein, 27 aa, Artificial Sequence
  Quasi-synthetic sequence derived from human genome
RKYKKNLKALYVVHPTSFIKVLWNILK

SEQ ID NO: 19841 - protein, 27 aa, Artificial Sequence
  Quasi-synthetic sequence derived from human genome
ILIIRRLHKVLRPFLLRRLKKEVESQL

SEQ ID NO: 19842 - protein, 27 aa, Artificial Sequence
  Quasi-synthetic sequence derived from human genome
FRIIQTLFSCKNHKKAKAIKLILLVVI

SEQ ID NO: 19843 - protein, 27 aa, Artificial Sequence
  Quasi-synthetic sequence derived from human genome
CRISRRLRRPPHVGRARRNSLRIIFAI

SEQ ID NO: 19844 - protein, 27 aa, Artificial Sequence
  Quasi-synthetic sequence derived from human genome
ALGLLILLRLWRVARIINGIIISVKTR

SEQ ID NO: 19845 - protein, 27 aa, Artificial Sequence
  Quasi-synthetic sequence derived from human genome
MLRTLLRRRLFSYPTKYYFMVLVLSLI

SEQ ID NO: 19846 - protein, 27 aa, Artificial Sequence
  Quasi-synthetic sequence derived from human genome
LVSANFRHIFLATLACLCPVWRRRRKR

SEQ ID NO: 19847 - protein, 27 aa, Artificial Sequence
  Quasi-synthetic sequence derived from human genome
LRRKVLWCLQYIGLGFFCCKQKTRLRA

SEQ ID NO: 19848 - protein, 27 aa, Artificial Sequence
  Quasi-synthetic sequence derived from human genome
VIRYSVAIILFTILPFFLLHRWCSKKK

SEQ ID NO: 19849 - protein, 27 aa, Artificial Sequence
  Quasi-synthetic sequence derived from human genome
KRALGNWKLLAKGLLIRERLKRRYGPK

SEQ ID NO: 19850 - protein, 27 aa, Artificial Sequence
  Quasi-synthetic sequence derived from human genome
FLLLYFPVFILYFKPSVFRCIALRWVR

SEQ ID NO: 19851 - protein, 27 aa, Artificial Sequence
  Quasi-synthetic sequence derived from human genome
FRHKVLILFKLILLEKKVLFYISPVNK

SEQ ID NO: 19852 - protein, 27 aa, Artificial Sequence
  Quasi-synthetic sequence derived from human genome
RKHAVAVIWAYWLGLKVRREYRKFFRA

SEQ ID NO: 19853 - protein, 27 aa, Artificial Sequence
  Quasi-synthetic sequence derived from human genome
RWLNKLMKLLQRLPNSVVRRLHRERYK

SEQ ID NO: 19854 - protein, 27 aa, Artificial Sequence
  Quasi-synthetic sequence derived from human genome
VIMATICFILLILSLICKIKLGPVRRK

SEQ ID NO: 19855 - protein, 27 aa, Artificial Sequence
  Quasi-synthetic sequence derived from human genome
LIVCRRPYLKVFNPRRKLEFALLFLVF

SEQ ID NO: 19856 - protein, 27 aa, Artificial Sequence
  Quasi-synthetic sequence derived from human genome
MIVLFLLLVLVVIVVCSIRKSSRTLKK

SEQ ID NO: 19857 - protein, 27 aa, Artificial Sequence
  Quasi-synthetic sequence derived from human genome
NRTFRKTFKMLLLCRWKKKKVEEKLYW

SEQ ID NO: 19858 - protein, 27 aa, Artificial Sequence
  Quasi-synthetic sequence derived from human genome
WLTRKHIQRLHAAATVIKRAWQKWRIR

SEQ ID NO: 19859 - protein, 27 aa, Artificial Sequence
  Quasi-synthetic sequence derived from human genome
NRGFKAGRNMRRKLFGVLRLKCHSLFL

SEQ ID NO: 19860 - protein, 27 aa, Artificial Sequence
  Quasi-synthetic sequence derived from human genome
RMVRAATLIQALWKGYLVRSLLRSKKK

SEQ ID NO: 19861 - protein, 27 aa, Artificial Sequence
  Quasi-synthetic sequence derived from human genome
FFHKKERRMRFYIRRMVKTQAFYWTVL

SEQ ID NO: 19862 - protein, 27 aa, Artificial Sequence
  Quasi-synthetic sequence derived from human genome
FIFLIIKSYRKYRRERLPISPGPLLRW

SEQ ID NO: 19863 - protein, 27 aa, Artificial Sequence
  Quasi-synthetic sequence derived from human genome
LHLCCKKLKILGMPFRNIRSILKMVNL

SEQ ID NO: 19864 - protein, 27 aa, Artificial Sequence
  Quasi-synthetic sequence derived from human genome
PKLCRIKASKALKKKIRRFQPTALKVM

SEQ ID NO: 19865 - protein, 27 aa, Artificial Sequence
  Quasi-synthetic sequence derived from human genome
PFYFIVVLRPLQLLRLFKLKERYRNVL

SEQ ID NO: 19866 - protein, 27 aa, Artificial Sequence
  Quasi-synthetic sequence derived from human genome
LFLLQYFVPLGFILICYLKIVICLRRR

SEQ ID NO: 19867 - protein, 27 aa, Artificial Sequence
  Quasi-synthetic sequence derived from human genome
KRNRVRGILRIIKPCNHVLSLSFPIRR

SEQ ID NO: 19868 - protein, 27 aa, Artificial Sequence
  Quasi-synthetic sequence derived from human genome
LLLRLLRGAPRQRVCTLFIIGFKFTFF

SEQ ID NO: 19869 - protein, 27 aa, Artificial Sequence
  Quasi-synthetic sequence derived from human genome
LLLHKHRSILLRRLCSLMGTVFLLRCF

SEQ ID NO: 19870 - protein, 27 aa, Artificial Sequence
  Quasi-synthetic sequence derived from human genome
RYKPLRRRVIWLIGQWISVKFKSDLRP

SEQ ID NO: 19871 - protein, 27 aa, Artificial Sequence
  Quasi-synthetic sequence derived from human genome
LKTFKNSFFNYRKKLASYFMGRKLRPW

SEQ ID NO: 19872 - protein, 27 aa, Artificial Sequence
  Quasi-synthetic sequence derived from human genome
RWNLHKRIALRTLLWVGAKPARLMLGF

SEQ ID NO: 19873 - protein, 27 aa, Artificial Sequence
  Quasi-synthetic sequence derived from human genome
IMLLLFLIVVLLGLFAWHRRRQKEKGR

SEQ ID NO: 19874 - protein, 27 aa, Artificial Sequence
  Quasi-synthetic sequence derived from human genome
IFSMFCLIGLATWQVFYLRRFFKAKKL

SEQ ID NO: 19875 - protein, 27 aa, Artificial Sequence
  Quasi-synthetic sequence derived from human genome
MAWAALLGLLAALLLLLLLSRRRTRRP

SEQ ID NO: 19876 - protein, 27 aa, Artificial Sequence
  Quasi-synthetic sequence derived from human genome
LLSRIVTLRAKRNLPLKLLIMSATLRV

SEQ ID NO: 19877 - protein, 27 aa, Artificial Sequence
  Quasi-synthetic sequence derived from human genome
KCPPWWYRFAHKFLIWNCSPYWIKFKK

SEQ ID NO: 19878 - protein, 27 aa, Artificial Sequence
  Quasi-synthetic sequence derived from human genome
LNLFWICKTCFRCLKRLKMSWFLPTVL

SEQ ID NO: 19879 - protein, 27 aa, Artificial Sequence
  Quasi-synthetic sequence derived from human genome
KGFAIAFVVLLFLFLIVMIFRCAKLVK

SEQ ID NO: 19880 - protein, 27 aa, Artificial Sequence
  Quasi-synthetic sequence derived from human genome
MRKLFIQRAKKIDKISRIGFPMAFLIF

SEQ ID NO: 19881 - protein, 27 aa, Artificial Sequence
  Quasi-synthetic sequence derived from human genome
LLRKRRFQLYRSMNSRARKNRSQIVLF

SEQ ID NO: 19882 - protein, 27 aa, Artificial Sequence
  Quasi-synthetic sequence derived from human genome
LWVTGPVLAVILIILIVIAILLFKRKR

SEQ ID NO: 19883 - protein, 27 aa, Artificial Sequence
  Quasi-synthetic sequence derived from human genome
AARRHQRKLLAAINAFRQVRLKHRKLR

SEQ ID NO: 19884 - protein, 27 aa, Artificial Sequence
  Quasi-synthetic sequence derived from human genome
FPLLKVAVLLLLSYVLLRCRHAVRQRF

SEQ ID NO: 19885 - protein, 27 aa, Artificial Sequence
  Quasi-synthetic sequence derived from human genome
LKWRVKKVVLVLLLVTSVFLFLNIALI

SEQ ID NO: 19886 - protein, 27 aa, Artificial Sequence
  Quasi-synthetic sequence derived from human genome
IRCRPLQFQPSKSHKKVLKKMLKFLAK

SEQ ID NO: 19887 - protein, 27 aa, Artificial Sequence
  Quasi-synthetic sequence derived from human genome
KIMVRRCLVTLRPFRLFVLGIGFFTLC

SEQ ID NO: 19888 - protein, 27 aa, Artificial Sequence
  Quasi-synthetic sequence derived from human genome
MRKNMRVLSRTSKFRRRKQLLRRRKKT

SEQ ID NO: 19889 - protein, 27 aa, Artificial Sequence
  Quasi-synthetic sequence derived from human genome
VTVLGIMILGLICLLRWRRRKGQQRTK

SEQ ID NO: 19890 - protein, 27 aa, Artificial Sequence
  Quasi-synthetic sequence derived from human genome
RLKVIVGALLRSVKKLVNVIILTFFCL

SEQ ID NO: 19891 - protein, 27 aa, Artificial Sequence
  Quasi-synthetic sequence derived from human genome
LLRQKLKKVFQQHYTNKIRALRNRLIV

SEQ ID NO: 19892 - protein, 27 aa, Artificial Sequence
  Quasi-synthetic sequence derived from human genome
KRGVRTLHQRFLAQLRKYFNMRVFRQR

SEQ ID NO: 19893 - protein, 27 aa, Artificial Sequence
  Quasi-synthetic sequence derived from human genome
RLVWRNSIRSSFISSLSFFLKKMGKRL

SEQ ID NO: 19894 - protein, 27 aa, Artificial Sequence
  Quasi-synthetic sequence derived from human genome
PRTELKKKLFKRRRVLNRERRLRHRVV

SEQ ID NO: 19895 - protein, 27 aa, Artificial Sequence
  Quasi-synthetic sequence derived from human genome
AFLLKAVKFRERVLQRGLVARIYYKVK

SEQ ID NO: 19896 - protein, 27 aa, Artificial Sequence
  Quasi-synthetic sequence derived from human genome
RVRLRALRLALLILLTFILCWTPYYLL

SEQ ID NO: 19897 - protein, 27 aa, Artificial Sequence
  Quasi-synthetic sequence derived from human genome
PFFKYCLLRKSFTCWKKNVRLQGLHRL

SEQ ID NO: 19898 - protein, 27 aa, Artificial Sequence
  Quasi-synthetic sequence derived from human genome
IRVRRAGYAYRRIFQKFLQRYAILTKA

SEQ ID NO: 19899 - protein, 27 aa, Artificial Sequence
  Quasi-synthetic sequence derived from human genome
ALVGLIFILLLVFVLIIRGQSKKYAKK

SEQ ID NO: 19900 - protein, 27 aa, Artificial Sequence
  Quasi-synthetic sequence derived from human genome
GGKMLFWVLGLLILCGFLWTRKGKLKI

SEQ ID NO: 19901 - protein, 27 aa, Artificial Sequence
  Quasi-synthetic sequence derived from human genome
NLRKLRNVSNLKPVPLIGPKLKRRWPI

SEQ ID NO: 19902 - protein, 27 aa, Artificial Sequence
  Quasi-synthetic sequence derived from human genome
WRRRPNCGIRLPRIRRWRSVRQKRTQI

SEQ ID NO: 19903 - protein, 27 aa, Artificial Sequence
  Quasi-synthetic sequence derived from human genome
IRHWRQWNRIFRWKCHDIVKSKVFYWL

SEQ ID NO: 19904 - protein, 27 aa, Artificial Sequence
  Quasi-synthetic sequence derived from human genome
WILVRLWRGCGFGYRYTRLPHLLKTKL

SEQ ID NO: 19905 - protein, 27 aa, Artificial Sequence
  Quasi-synthetic sequence derived from human genome
LRALYSMYLRKTKSLNKLLYHLFRLMP

SEQ ID NO: 19906 - protein, 27 aa, Artificial Sequence
  Quasi-synthetic sequence derived from human genome
QIFILFIFTFFAMLALVLHQKRKRLFL

SEQ ID NO: 19907 - protein, 27 aa, Artificial Sequence
  Quasi-synthetic sequence derived from human genome
RFHGLWYMKMMWAWLQAKRKPRKAPSR

SEQ ID NO: 19908 - protein, 27 aa, Artificial Sequence
  Quasi-synthetic sequence derived from human genome
LCLIFKVKKRSILISSRHFWTILVVVV

SEQ ID NO: 19909 - protein, 27 aa, Artificial Sequence
  Quasi-synthetic sequence derived from human genome
RIMRILRILKLARHSTGLQSLGFTLRR

SEQ ID NO: 19910 - protein, 27 aa, Artificial Sequence
  Quasi-synthetic sequence derived from human genome
QVRAYIRHLNRIVTIIQKWWRSFLGRK

SEQ ID NO: 19911 - protein, 27 aa, Artificial Sequence
  Quasi-synthetic sequence derived from human genome
ICYTGIIKTLLRCPSKKKYKAIRLIFV

SEQ ID NO: 19912 - protein, 27 aa, Artificial Sequence
  Quasi-synthetic sequence derived from human genome
KTLRLRKNTVKFSLYRHFKNTLIFAVL

SEQ ID NO: 19913 - protein, 27 aa, Artificial Sequence
  Quasi-synthetic sequence derived from human genome
LRRRLKYFFMSPCDKFRAKGRKPCKLM

SEQ ID NO: 19914 - protein, 27 aa, Artificial Sequence
  Quasi-synthetic sequence derived from human genome
LFCITMKRQIKHMIKYRYIPFTHGKRR

SEQ ID NO: 19915 - protein, 27 aa, Artificial Sequence
  Quasi-synthetic sequence derived from human genome
MLRMRVPALLVLLFCFRGRAGWSRYWI

SEQ ID NO: 19916 - protein, 27 aa, Artificial Sequence
  Quasi-synthetic sequence derived from human genome
KVLKKYPRLWCMTKPPSRRPKLYIVNL

SEQ ID NO: 19917 - protein, 27 aa, Artificial Sequence
  Quasi-synthetic sequence derived from human genome
LRHPRTGCKFKFFFQRNPYFRNKLIVK

SEQ ID NO: 19918 - protein, 27 aa, Artificial Sequence
  Quasi-synthetic sequence derived from human genome
RAARLIKLLRQGYTIRILLWTFVQSFK

SEQ ID NO: 19919 - protein, 27 aa, Artificial Sequence
  Quasi-synthetic sequence derived from human genome
VLKSLRYLVPLQSKNKLRKRLAPLVYV

SEQ ID NO: 19920 - protein, 27 aa, Artificial Sequence
  Quasi-synthetic sequence derived from human genome
KLHNLISKLKKWIKILEAKTKQLPKFF

SEQ ID NO: 19921 - protein, 27 aa, Artificial Sequence
  Quasi-synthetic sequence derived from human genome
KLSRALRYYYNKRILHKTKGKRFTYKF

SEQ ID NO: 19922 - protein, 27 aa, Artificial Sequence
  Quasi-synthetic sequence derived from human genome
MCFLRRPGAPASWIWWRMLRQVLRRGL

SEQ ID NO: 19923 - protein, 27 aa, Artificial Sequence
  Quasi-synthetic sequence derived from human genome
MSLKLTCSAFRLQRALRFLLGRLPWRV

SEQ ID NO: 19924 - protein, 27 aa, Artificial Sequence
  Quasi-synthetic sequence derived from human genome
LRRVKVLLVLNLIAVAGFVLFLAKCRP

SEQ ID NO: 19925 - protein, 27 aa, Artificial Sequence
  Quasi-synthetic sequence derived from human genome
FRMKLRNLFTKFIRKFGFELVKRLLPE

SEQ ID NO: 19926 - protein, 27 aa, Artificial Sequence
  Quasi-synthetic sequence derived from human genome
IRMLKQLKHPNLVNLIEVFRRKRKMHL

SEQ ID NO: 19927 - protein, 27 aa, Artificial Sequence
  Quasi-synthetic sequence derived from human genome
FRLGRQLSKALQVNCVVRKLLVQLRRL

SEQ ID NO: 19928 - protein, 27 aa, Artificial Sequence
  Quasi-synthetic sequence derived from human genome
KKKKVVKYGMGGMIIVLLICIVWFPLL

SEQ ID NO: 19929 - protein, 27 aa, Artificial Sequence
  Quasi-synthetic sequence derived from human genome
WRRLLVLCWYLPGWRAGRVTWLRLATW

SEQ ID NO: 19930 - protein, 27 aa, Artificial Sequence
  Quasi-synthetic sequence derived from human genome
RRRKSLWLALSASWLLLVLLGGFSLLR

SEQ ID NO: 19931 - protein, 27 aa, Artificial Sequence
  Quasi-synthetic sequence derived from human genome
RNRLAKTKKPFKIIVTIIITFFLCWCP

SEQ ID NO: 19932 - protein, 27 aa, Artificial Sequence
  Quasi-synthetic sequence derived from human genome
LVFVTSAFTVVGMLVFILRNRKRSKRR

SEQ ID NO: 19933 - protein, 27 aa, Artificial Sequence
  Quasi-synthetic sequence derived from human genome
KVRRVFVRKVYTILLIQLLVTLAVVAL

SEQ ID NO: 19934 - protein, 27 aa, Artificial Sequence
  Quasi-synthetic sequence derived from human genome
LDPWVYILFRRAVLRRLQPRLSTRPRR

SEQ ID NO: 19935 - protein, 27 aa, Artificial Sequence
  Quasi-synthetic sequence derived from human genome
HLKLFLSRRRWQRSQISYKCHLVLRPI

SEQ ID NO: 19936 - protein, 27 aa, Artificial Sequence
  Quasi-synthetic sequence derived from human genome
FGEKFKLFTLVSACIPVFRLARRRKKI

SEQ ID NO: 19937 - protein, 27 aa, Artificial Sequence
  Quasi-synthetic sequence derived from human genome
LIFLHLKRRVKSVVLVILLGPLLFLVC

SEQ ID NO: 19938 - protein, 27 aa, Artificial Sequence
  Quasi-synthetic sequence derived from human genome
NIRLLHKQRLLFSCLLWLTFMYFFWKL

SEQ ID NO: 19939 - protein, 27 aa, Artificial Sequence
  Quasi-synthetic sequence derived from human genome
KFMVLLWKNFILKRRRCIALVVEMVLT

SEQ ID NO: 19940 - protein, 27 aa, Artificial Sequence
  Quasi-synthetic sequence derived from human genome
KLKNILLRIQQIIYCHKLTIILTKWRN

SEQ ID NO: 19941 - protein, 27 aa, Artificial Sequence
  Quasi-synthetic sequence derived from human genome
KKRHRAVRLIFTIMIVYFLFWAPYNIV

SEQ ID NO: 19942 - protein, 27 aa, Artificial Sequence
  Quasi-synthetic sequence derived from human genome
YLVRKQMRLQRKAVISLQSYFRMRKAR

SEQ ID NO: 19943 - protein, 27 aa, Artificial Sequence
  Quasi-synthetic sequence derived from human genome
MKLFRAQRNLYIAGFSLLLSFLLRRLV

SEQ ID NO: 19944 - protein, 27 aa, Artificial Sequence
  Quasi-synthetic sequence derived from human genome
RRLGLALGLLLALVLAPRVLRAKPTVR

SEQ ID NO: 19945 - protein, 27 aa, Artificial Sequence
  Quasi-synthetic sequence derived from human genome
LLPRRRRCFPARAPLLRVALCLLCWTP

SEQ ID NO: 19946 - protein, 27 aa, Artificial Sequence
  Quasi-synthetic sequence derived from human genome
KRKQLLKPVFLNSWIDLRATYKLFYRR

SEQ ID NO: 19947 - protein, 27 aa, Artificial Sequence
  Quasi-synthetic sequence derived from human genome
MWICQICRPRKKGRKLLQKKAAQIKRR

SEQ ID NO: 19948 - protein, 27 aa, Artificial Sequence
  Quasi-synthetic sequence derived from human genome
KLCLLIRVANLRKSLLIGSHIYGKLLK

SEQ ID NO: 19949 - protein, 27 aa, Artificial Sequence
  Quasi-synthetic sequence derived from human genome
FPVKKCSAFQFFKKRVRRWIKSPMVSV

SEQ ID NO: 19950 - protein, 27 aa, Artificial Sequence
  Quasi-synthetic sequence derived from human genome
RFAKGRGRRPVKTLELTRLLPLKFVKI

SEQ ID NO: 19951 - protein, 27 aa, Artificial Sequence
  Quasi-synthetic sequence derived from human genome
VWRRFKWVIIGLLFLLILLLFVAVLLY

SEQ ID NO: 19952 - protein, 27 aa, Artificial Sequence
  Quasi-synthetic sequence derived from human genome
LQRRKKGLLLRPVAPLRTRPPLLISLP

SEQ ID NO: 19953 - protein, 27 aa, Artificial Sequence
  Quasi-synthetic sequence derived from human genome
KLLSLEVRKRRRRSSRLRAMRPKYPVI

SEQ ID NO: 19954 - protein, 27 aa, Artificial Sequence
  Quasi-synthetic sequence derived from human genome
NRIRKFFRGSGRVLAFIFVASVIWLLF

SEQ ID NO: 19955 - protein, 27 aa, Artificial Sequence
  Quasi-synthetic sequence derived from human genome
IKGSVGGLLVLIVILVILFKCGFFKRK

SEQ ID NO: 19956 - protein, 27 aa, Artificial Sequence
  Quasi-synthetic sequence derived from human genome
IKRSRKIIFVITHHLLKDPLCKRFKVH

SEQ ID NO: 19957 - protein, 27 aa, Artificial Sequence
  Quasi-synthetic sequence derived from human genome
IKLEAHWRGALARKAIQRRKWAVRIIR

SEQ ID NO: 19958 - protein, 27 aa, Artificial Sequence
  Quasi-synthetic sequence derived from human genome
LIRKTRRLSAFQQGFFRNKILVIAIVF

SEQ ID NO: 19959 - protein, 27 aa, Artificial Sequence
  Quasi-synthetic sequence derived from human genome
YFWKRFCFWKATRSYLQYRGKKFKDRK

SEQ ID NO: 19960 - protein, 27 aa, Artificial Sequence
  Quasi-synthetic sequence derived from human genome
FLFLSFQIIRLPLRLINISHLIRKILV

SEQ ID NO: 19961 - protein, 27 aa, Artificial Sequence
  Quasi-synthetic sequence derived from human genome
FVMREWKKSRKLLGQRLFNKLMKMTFY

SEQ ID NO: 19962 - protein, 27 aa, Artificial Sequence
  Quasi-synthetic sequence derived from human genome
HKTFRIKRFLAKKQKQNRPIPQWIRMK

SEQ ID NO: 19963 - protein, 27 aa, Artificial Sequence
  Quasi-synthetic sequence derived from human genome
SIFLTNKKGFPVLSKMHQRLIFRLLKL

SEQ ID NO: 19964 - protein, 27 aa, Artificial Sequence
  Quasi-synthetic sequence derived from human genome
NLLRPPIISRFIRLIPLGWHVRIAIRM

SEQ ID NO: 19965 - protein, 27 aa, Artificial Sequence
  Quasi-synthetic sequence derived from human genome
VRVDFWWRRLRASLRLTVWAPLLPLRI

SEQ ID NO: 19966 - protein, 27 aa, Artificial Sequence
  Quasi-synthetic sequence derived from human genome
KKAVKYQSQARKKLIIIIVLVVVLLGI

SEQ ID NO: 19967 - protein, 27 aa, Artificial Sequence
  Quasi-synthetic sequence derived from human genome
LRQRSRRPKMRPARRRGGRRQLLLRAL

SEQ ID NO: 19968 - protein, 27 aa, Artificial Sequence
  Quasi-synthetic sequence derived from human genome
MLWKLLLRSQSCRLCSFRKMRSPPKYR

SEQ ID NO: 19969 - protein, 27 aa, Artificial Sequence
  Quasi-synthetic sequence derived from human genome
RKRRGAFNSKQLLYLEKYRPKMRLRFR

SEQ ID NO: 19970 - protein, 27 aa, Artificial Sequence
  Quasi-synthetic sequence derived from human genome
FLNNAWGIQKKQNAKRFKRRWMVRKMK

SEQ ID NO: 19971 - protein, 27 aa, Artificial Sequence
  Quasi-synthetic sequence derived from human genome
RKKYEPKLKQFTKILRRKRLLPKRCNK

SEQ ID NO: 19972 - protein, 27 aa, Artificial Sequence
  Quasi-synthetic sequence derived from human genome
LLKVSKDKRALKFIKKRVGTHIRAKRK

SEQ ID NO: 19973 - protein, 27 aa, Artificial Sequence
  Quasi-synthetic sequence derived from human genome
WYRMHKELRKYIYIRSCVVIIQKRFRC

SEQ ID NO: 19974 - protein, 27 aa, Artificial Sequence
  Quasi-synthetic sequence derived from human genome
MMMNLYNAMAVRIQRRWRGYRVRKYLF

SEQ ID NO: 19975 - protein, 27 aa, Artificial Sequence
  Quasi-synthetic sequence derived from human genome
LLLPKGVVLKLKPVADRFPKKAWRQKR

SEQ ID NO: 19976 - protein, 27 aa, Artificial Sequence
  Quasi-synthetic sequence derived from human genome
VLLRRVTRNLVRNKLAVITRLLQNLIM

SEQ ID NO: 19977 - protein, 27 aa, Artificial Sequence
  Quasi-synthetic sequence derived from human genome
VWTLKGRTWKPTLVILRINRAARCVRW

SEQ ID NO: 19978 - protein, 27 aa, Artificial Sequence
  Quasi-synthetic sequence derived from human genome
FRLRRRDLLLGFNKRAIDKCWKIRHFP

SEQ ID NO: 19979 - protein, 27 aa, Artificial Sequence
  Quasi-synthetic sequence derived from human genome
FFFIIGLWWCTKSILKYICKKQKRTCY

SEQ ID NO: 19980 - protein, 27 aa, Artificial Sequence
  Quasi-synthetic sequence derived from human genome
RCMWYRLRLLKPQPNIIPTVKKIVLLA

SEQ ID NO: 19981 - protein, 27 aa, Artificial Sequence
  Quasi-synthetic sequence derived from human genome
LRRAPRLWKVRAMMIFNTFNLILGFIV

SEQ ID NO: 19982 - protein, 27 aa, Artificial Sequence
  Quasi-synthetic sequence derived from human genome
VRRFLWGVLFALCFSCLLSQAWRVRRL

SEQ ID NO: 19983 - protein, 27 aa, Artificial Sequence
  Quasi-synthetic sequence derived from human genome
VGLWALRLWGALRLGAVILRWRYHALR

SEQ ID NO: 19984 - protein, 27 aa, Artificial Sequence
  Quasi-synthetic sequence derived from human genome
IPIKQGMLLKRSGKWLKTWKKKYVTLC

SEQ ID NO: 19985 - protein, 27 aa, Artificial Sequence
  Quasi-synthetic sequence derived from human genome
AIIKIQAWARMWAARRQYLRRLHYFQK

SEQ ID NO: 19986 - protein, 27 aa, Artificial Sequence
  Quasi-synthetic sequence derived from human genome
SITAQRINSANFLKKVRRLIMKRIVKI

SEQ ID NO: 19987 - protein, 27 aa, Artificial Sequence
  Quasi-synthetic sequence derived from human genome
RENVLVKRKRTKGKKLLLSIGVLLHKW

SEQ ID NO: 19988 - protein, 27 aa, Artificial Sequence
  Quasi-synthetic sequence derived from human genome
IYRMIKPRIVLLIFVSGKVVLTGAKVR

SEQ ID NO: 19989 - protein, 27 aa, Artificial Sequence
  Quasi-synthetic sequence derived from human genome
RKRIRYRFRRFIQQFSQCKATARNLKL

SEQ ID NO: 19990 - protein, 27 aa, Artificial Sequence
  Quasi-synthetic sequence derived from human genome
RTLLRFNAVLRKLLIVFPHFCLGRGLI

SEQ ID NO: 19991 - protein, 27 aa, Artificial Sequence
  Quasi-synthetic sequence derived from human genome
PFILIWGNKKLKQTFLSVLRQVRYWVK

SEQ ID NO: 19992 - protein, 27 aa, Artificial Sequence
  Quasi-synthetic sequence derived from human genome
KRLVLRTKLHKLIDFLLRKESIICKPK

SEQ ID NO: 19993 - protein, 27 aa, Artificial Sequence
  Quasi-synthetic sequence derived from human genome
KMYGYFAGLCRRLQKFWRVTVKGFFVK

SEQ ID NO: 19994 - protein, 27 aa, Artificial Sequence
  Quasi-synthetic sequence derived from human genome
IRYLLYRAQRAIRLRHALRLHPQLHRA

SEQ ID NO: 19995 - protein, 27 aa, Artificial Sequence
  Quasi-synthetic sequence derived from human genome
VYLKRKTLIRLLFTNKKTTIEKLRCVR

SEQ ID NO: 19996 - protein, 27 aa, Artificial Sequence
  Quasi-synthetic sequence derived from human genome
ISVHRCLGVLRPLRSLRWGRARYARRV

SEQ ID NO: 19997 - protein, 27 aa, Artificial Sequence
  Quasi-synthetic sequence derived from human genome
LLNLLIYSLRNSEMKRALMKLWRRRVV

SEQ ID NO: 19998 - protein, 27 aa, Artificial Sequence
  Quasi-synthetic sequence derived from human genome
IFKNVKMKKKIIKDQKLLVIVGGMLLI

SEQ ID NO: 19999 - protein, 27 aa, Artificial Sequence
  Quasi-synthetic sequence derived from human genome
FRMLLYSKSTSLTFHWKLWGRHRGRRR

SEQ ID NO: 20000 - protein, 27 aa, Artificial Sequence
  Quasi-synthetic sequence derived from human genome
TLQQHKLLKVIRKKLVRKTLDMIKKIA

SEQ ID NO: 20001 - protein, 28 aa, Artificial Sequence
  Quasi-synthetic sequence derived from human genome
IRIFKRKKRIKRRALLFLSYILTHFIFL

SEQ ID NO: 20002 - protein, 28 aa, Artificial Sequence
  Quasi-synthetic sequence derived from human genome
FLLFFLFRLLLRFLRLCRSFYITCRRLR

SEQ ID NO: 20003 - protein, 28 aa, Artificial Sequence
  Quasi-synthetic sequence derived from human genome
RIRASLVLILKTIRRRLPFSKWRLAFRF

SEQ ID NO: 20004 - protein, 28 aa, Artificial Sequence
  Quasi-synthetic sequence derived from human genome
WVYLLLRKILLRKFCQMRKRRLREQFWR

SEQ ID NO: 20005 - protein, 28 aa, Artificial Sequence
  Quasi-synthetic sequence derived from human genome
ARALRIVRFTKILSLLRLLRLSRLIRYI

SEQ ID NO: 20006 - protein, 28 aa, Artificial Sequence
  Quasi-synthetic sequence derived from human genome
VVMKFFRWVRRAWQRIISWVFFWRQKIK

SEQ ID NO: 20007 - protein, 28 aa, Artificial Sequence
  Quasi-synthetic sequence derived from human genome
RLLRLIILLRIFHLFHQKRQLEKLIRRR

SEQ ID NO: 20008 - protein, 28 aa, Artificial Sequence
  Quasi-synthetic sequence derived from human genome
KFWRRYGKLSRHLMKVKLKKYTKFLFVR

SEQ ID NO: 20009 - protein, 28 aa, Artificial Sequence
  Quasi-synthetic sequence derived from human genome
ALLFLLFFLTLRFSVVKRGRKKLLYIFK

SEQ ID NO: 20010 - protein, 28 aa, Artificial Sequence
  Quasi-synthetic sequence derived from human genome
LKRLVKLHIKRHYHKKFWKLGAVIFFFI

SEQ ID NO: 20011 - protein, 28 aa, Artificial Sequence
  Quasi-synthetic sequence derived from human genome
RLLKRLLGPKLRRFLKPQGHPRLLLWFK

SEQ ID NO: 20012 - protein, 28 aa, Artificial Sequence
  Quasi-synthetic sequence derived from human genome
LFRVIRLARIGRILRLIRAAKGIRTLLF

SEQ ID NO: 20013 - protein, 28 aa, Artificial Sequence
  Quasi-synthetic sequence derived from human genome
LRLLRGLRRRNVQKKVALAKKLLAKLRF

SEQ ID NO: 20014 - protein, 28 aa, Artificial Sequence
  Quasi-synthetic sequence derived from human genome
KLLRNIPRWTHLLRLLRLIILLRIFHLF

SEQ ID NO: 20015 - protein, 28 aa, Artificial Sequence
  Quasi-synthetic sequence derived from human genome
WIFIIFRSPVFRIFFHKIFIRPLRYRSR

SEQ ID NO: 20016 - protein, 28 aa, Artificial Sequence
  Quasi-synthetic sequence derived from human genome
IAGILLFVIIFLGVVLVMKKRKLAKKRK

SEQ ID NO: 20017 - protein, 28 aa, Artificial Sequence
  Quasi-synthetic sequence derived from human genome
LFRIVRLARIGRILRLVRAARGIRTLLF

SEQ ID NO: 20018 - protein, 28 aa, Artificial Sequence
  Quasi-synthetic sequence derived from human genome
LFRVIRLARIGRILRLIRGAKGIRTLLF

SEQ ID NO: 20019 - protein, 28 aa, Artificial Sequence
  Quasi-synthetic sequence derived from human genome
LGFLRVVRFVRILRIFKLTRHFVGLRVL

SEQ ID NO: 20020 - protein, 28 aa, Artificial Sequence
  Quasi-synthetic sequence derived from human genome
LARWRCRRLRAIYTIMRWFRRHKVRAHL

SEQ ID NO: 20021 - protein, 28 aa, Artificial Sequence
  Quasi-synthetic sequence derived from human genome
RKLTHLRKRIHRPRRRTTRRWKRWFKFR

SEQ ID NO: 20022 - protein, 28 aa, Artificial Sequence
  Quasi-synthetic sequence derived from human genome
LFRVIRLARIGRILRLIKGAKGIRTLLF

SEQ ID NO: 20023 - protein, 28 aa, Artificial Sequence
  Quasi-synthetic sequence derived from human genome
KLLKRLRLLPALLILRAFKPHRKIRDYR

SEQ ID NO: 20024 - protein, 28 aa, Artificial Sequence
  Quasi-synthetic sequence derived from human genome
FKRAFLRLLRCQCRRRRRRRPLWRVYGH

SEQ ID NO: 20025 - protein, 28 aa, Artificial Sequence
  Quasi-synthetic sequence derived from human genome
RAARPPLLLRPVKLLRRRFRLLLALAVV

SEQ ID NO: 20026 - protein, 28 aa, Artificial Sequence
  Quasi-synthetic sequence derived from human genome
KLLRNIPRWTHLVRLLRLIILIRIFHLL

SEQ ID NO: 20027 - protein, 28 aa, Artificial Sequence
  Quasi-synthetic sequence derived from human genome
RRKSWRLEFLFLRRRCFLLTFYLWFLFF

SEQ ID NO: 20028 - protein, 28 aa, Artificial Sequence
  Quasi-synthetic sequence derived from human genome
RRKGVWLRLRKILFCVLGLYIAIPFLIK

SEQ ID NO: 20029 - protein, 28 aa, Artificial Sequence
  Quasi-synthetic sequence derived from human genome
LFRILKVFKSLRALRAIRVLRRLSFLTS

SEQ ID NO: 20030 - protein, 28 aa, Artificial Sequence
  Quasi-synthetic sequence derived from human genome
RKVLYCVVIIQKNYRAFLLRRRFLHLKK

SEQ ID NO: 20031 - protein, 28 aa, Artificial Sequence
  Quasi-synthetic sequence derived from human genome
WLVWLRFHKKKWQLQARQRLARRKRQRL

SEQ ID NO: 20032 - protein, 28 aa, Artificial Sequence
  Quasi-synthetic sequence derived from human genome
KRWTHLVRLLRLIILIRIFHLLHQKRQL

SEQ ID NO: 20033 - protein, 28 aa, Artificial Sequence
  Quasi-synthetic sequence derived from human genome
LFRVIRLARIGRVLRLIRGAKGIRTLLF

SEQ ID NO: 20034 - protein, 28 aa, Artificial Sequence
  Quasi-synthetic sequence derived from human genome
LPVLGAVLALLFLLLVLLLLVRKKRKIK

SEQ ID NO: 20035 - protein, 28 aa, Artificial Sequence
  Quasi-synthetic sequence derived from human genome
IPLLLMLVLYGRIFRAARFRIRKTVKKV

SEQ ID NO: 20036 - protein, 28 aa, Artificial Sequence
  Quasi-synthetic sequence derived from human genome
LFRVIRLARIGRILRLVKGAKGIRTLLF

SEQ ID NO: 20037 - protein, 28 aa, Artificial Sequence
  Quasi-synthetic sequence derived from human genome
RLCLRLLLLLGYRRRCPPLLRGLVQRWR

SEQ ID NO: 20038 - protein, 28 aa, Artificial Sequence
  Quasi-synthetic sequence derived from human genome
FALRRKKKKTIKMLMLVVVLFALCWFPL

SEQ ID NO: 20039 - protein, 28 aa, Artificial Sequence
  Quasi-synthetic sequence derived from human genome
RLLRLIILIRIFHLLHQKRQLEKLMRRL

SEQ ID NO: 20040 - protein, 28 aa, Artificial Sequence
  Quasi-synthetic sequence derived from human genome
VKRFLKHAGKWSLRWFLSPRWILQFRRW

SEQ ID NO: 20041 - protein, 28 aa, Artificial Sequence
  Quasi-synthetic sequence derived from human genome
RCRGRKRCIKKFSIQRFPKILVLHLKRF

SEQ ID NO: 20042 - protein, 28 aa, Artificial Sequence
  Quasi-synthetic sequence derived from human genome
FILVIVGLTFAVYVRRKSIKKKRALRRF

SEQ ID NO: 20043 - protein, 28 aa, Artificial Sequence
  Quasi-synthetic sequence derived from human genome
RRFRTLMMRRRFLSLKKTAILIQRKYRA

SEQ ID NO: 20044 - protein, 28 aa, Artificial Sequence
  Quasi-synthetic sequence derived from human genome
WVYLLLRKILLRKFCQMRKRRLREQLIC

SEQ ID NO: 20045 - protein, 28 aa, Artificial Sequence
  Quasi-synthetic sequence derived from human genome
QILDPWVYLLLRKILLRKFCQMRKRRLR

SEQ ID NO: 20046 - protein, 28 aa, Artificial Sequence
  Quasi-synthetic sequence derived from human genome
FVGILLFLILVGLLIFFLKRRNKKKQQK

SEQ ID NO: 20047 - protein, 28 aa, Artificial Sequence
  Quasi-synthetic sequence derived from human genome
KKKKFCYLCILLLIVLFILLCCLYRLCK

SEQ ID NO: 20048 - protein, 28 aa, Artificial Sequence
  Quasi-synthetic sequence derived from human genome
ALRAPRKKIHRRVLKKNPLKNLRIMLKL

SEQ ID NO: 20049 - protein, 28 aa, Artificial Sequence
  Quasi-synthetic sequence derived from human genome
ILLKKYLMKRRWKKNFIAVSAANRFKKI

SEQ ID NO: 20050 - protein, 28 aa, Artificial Sequence
  Quasi-synthetic sequence derived from human genome
MRKNVRVLSRTSKFRRLRQLLRRRKKRW

SEQ ID NO: 20051 - protein, 28 aa, Artificial Sequence
  Quasi-synthetic sequence derived from human genome
IWVPVKVILHKKRYIYRKIKGWRPVLMM

SEQ ID NO: 20052 - protein, 28 aa, Artificial Sequence
  Quasi-synthetic sequence derived from human genome
RLFKLKPPVWYLRSLVQNLLLIRRFKKT

SEQ ID NO: 20053 - protein, 28 aa, Artificial Sequence
  Quasi-synthetic sequence derived from human genome
LHALLLVLLLCRLRRLRARARARAAARL

SEQ ID NO: 20054 - protein, 28 aa, Artificial Sequence
  Quasi-synthetic sequence derived from human genome
FLRMLIQVCLYFYCKFLWRCLKFVMRKL

SEQ ID NO: 20055 - protein, 28 aa, Artificial Sequence
  Quasi-synthetic sequence derived from human genome
RRRGFGLFFFLRLHRLLLLFLVLRGTLA

SEQ ID NO: 20056 - protein, 28 aa, Artificial Sequence
  Quasi-synthetic sequence derived from human genome
RLLLFFRFKRTLDRICVLFLLGWHRKPR

SEQ ID NO: 20057 - protein, 28 aa, Artificial Sequence
  Quasi-synthetic sequence derived from human genome
LLVYIKIYIVLRRRRKRVNTKRSSRAFR

SEQ ID NO: 20058 - protein, 28 aa, Artificial Sequence
  Quasi-synthetic sequence derived from human genome
RRRRRRRRRRDLLLSQLCFLASVALLLW

SEQ ID NO: 20059 - protein, 28 aa, Artificial Sequence
  Quasi-synthetic sequence derived from human genome
LRGFFIKRRFRSLRHKIILLQSRARGYL

SEQ ID NO: 20060 - protein, 28 aa, Artificial Sequence
  Quasi-synthetic sequence derived from human genome
LLVILAMGLWVIRVQKRHKMPRMKKLMR

SEQ ID NO: 20061 - protein, 28 aa, Artificial Sequence
  Quasi-synthetic sequence derived from human genome
MRKNMRVLSRISKFRRLRQLLRRRKKTR

SEQ ID NO: 20062 - protein, 28 aa, Artificial Sequence
  Quasi-synthetic sequence derived from human genome
KFRRRTCIILALFILFIFSLMMGLKMLR

SEQ ID NO: 20063 - protein, 28 aa, Artificial Sequence
  Quasi-synthetic sequence derived from human genome
TFRLLRVLKLVRFLPALRRQLVVLVKTM

SEQ ID NO: 20064 - protein, 28 aa, Artificial Sequence
  Quasi-synthetic sequence derived from human genome
AMFLVIFPMFTFPKKLPPRHKKKKKKKF

SEQ ID NO: 20065 - protein, 28 aa, Artificial Sequence
  Quasi-synthetic sequence derived from human genome
WKVLKVVAKVIRALLRILCCLLKAICRV

SEQ ID NO: 20066 - protein, 28 aa, Artificial Sequence
  Quasi-synthetic sequence derived from human genome
RARLIPIIVLLLQKAWRGTLARWRCRRL

SEQ ID NO: 20067 - protein, 28 aa, Artificial Sequence
  Quasi-synthetic sequence derived from human genome
RLRKRVNAALVIQKYWRRVLAQRKLLML

SEQ ID NO: 20068 - protein, 28 aa, Artificial Sequence
  Quasi-synthetic sequence derived from human genome
LAILRIIRLVRVFRIFKLSRHSKGLQIL

SEQ ID NO: 20069 - protein, 28 aa, Artificial Sequence
  Quasi-synthetic sequence derived from human genome
FAILRIIRLVRVFRIFKLSRHSKGLQIL

SEQ ID NO: 20070 - protein, 28 aa, Artificial Sequence
  Quasi-synthetic sequence derived from human genome
LALFKAAEFAKLSIKWMIKIRKRYLKRR

SEQ ID NO: 20071 - protein, 28 aa, Artificial Sequence
  Quasi-synthetic sequence derived from human genome
TIIRIMRVLRIARVLKLLKMAVGMRALL

SEQ ID NO: 20072 - protein, 28 aa, Artificial Sequence
  Quasi-synthetic sequence derived from human genome
KLRAACIRIQKTIRGWLLRKKYLRMRKA

SEQ ID NO: 20073 - protein, 28 aa, Artificial Sequence
  Quasi-synthetic sequence derived from human genome
ALLRLLGLRRGLRRLRRLWAGPRVQRGR

SEQ ID NO: 20074 - protein, 28 aa, Artificial Sequence
  Quasi-synthetic sequence derived from human genome
VRIRVIKKKKVIMKKRKKLTLTRPTPLV

SEQ ID NO: 20075 - protein, 28 aa, Artificial Sequence
  Quasi-synthetic sequence derived from human genome
IIQKYFFSPTLFRVIRLARIGRILRLIR

SEQ ID NO: 20076 - protein, 28 aa, Artificial Sequence
  Quasi-synthetic sequence derived from human genome
RHFRARFRRLWPCGRRRRHRARRALRRV

SEQ ID NO: 20077 - protein, 28 aa, Artificial Sequence
  Quasi-synthetic sequence derived from human genome
YVFMIRKFRRSLLQLLCLRLLRCQRPAK

SEQ ID NO: 20078 - protein, 28 aa, Artificial Sequence
  Quasi-synthetic sequence derived from human genome
VATVIFIITKFCLFCFRKLAKKGKKKKR

SEQ ID NO: 20079 - protein, 28 aa, Artificial Sequence
  Quasi-synthetic sequence derived from human genome
KGFLLKKRKWPLKGWHKRFFYLDKGILK

SEQ ID NO: 20080 - protein, 28 aa, Artificial Sequence
  Quasi-synthetic sequence derived from human genome
ILRVIRLVRVFRIFKLSRHSKGLQILGK

SEQ ID NO: 20081 - protein, 28 aa, Artificial Sequence
  Quasi-synthetic sequence derived from human genome
WFFWIRLYKIRRGRTRPQALLFLCMILL

SEQ ID NO: 20082 - protein, 28 aa, Artificial Sequence
  Quasi-synthetic sequence derived from human genome
MIALLLSILCLVMILYTRRRWCKRRRVP

SEQ ID NO: 20083 - protein, 28 aa, Artificial Sequence
  Quasi-synthetic sequence derived from human genome
IMALLLLLLLLLLYKYKQKPKYQVRWKI

SEQ ID NO: 20084 - protein, 28 aa, Artificial Sequence
  Quasi-synthetic sequence derived from human genome
SRALSRRYLRRLLLLLLLLLLRQPVTRA

SEQ ID NO: 20085 - protein, 28 aa, Artificial Sequence
  Quasi-synthetic sequence derived from human genome
LIGIAVVLFVIFILVVLFIVFRKKVFRK

SEQ ID NO: 20086 - protein, 28 aa, Artificial Sequence
  Quasi-synthetic sequence derived from human genome
ILRRVLVLMASKHAFLALCALRFKRKII

SEQ ID NO: 20087 - protein, 28 aa, Artificial Sequence
  Quasi-synthetic sequence derived from human genome
TFRLLRVLKLVRFMPALRRQLVVLMKTM

SEQ ID NO: 20088 - protein, 28 aa, Artificial Sequence
  Quasi-synthetic sequence derived from human genome
LIFLLIILSYIKIGKNLLRISKRRSKFP

SEQ ID NO: 20089 - protein, 28 aa, Artificial Sequence
  Quasi-synthetic sequence derived from human genome
MAKLWFKFQRYFRRKPVRFFTFLALYLT

SEQ ID NO: 20090 - protein, 28 aa, Artificial Sequence
  Quasi-synthetic sequence derived from human genome
KKAIKYQSKARRKLMFIIICVIVLLVIL

SEQ ID NO: 20091 - protein, 28 aa, Artificial Sequence
  Quasi-synthetic sequence derived from human genome
LAILRVIRLVRVFRIFKLSRHSKGLQIL

SEQ ID NO: 20092 - protein, 28 aa, Artificial Sequence
  Quasi-synthetic sequence derived from human genome
KRFKVMKPKVLRSWCRQILKGLLFLHTR

SEQ ID NO: 20093 - protein, 28 aa, Artificial Sequence
  Quasi-synthetic sequence derived from human genome
RRWRRWNRFNRRRCRAAVKSVTFYWLVI

SEQ ID NO: 20094 - protein, 28 aa, Artificial Sequence
  Quasi-synthetic sequence derived from human genome
RFIRHKCKQRFTKITQYLIRIRKLTLKR

SEQ ID NO: 20095 - protein, 28 aa, Artificial Sequence
  Quasi-synthetic sequence derived from human genome
FSRSKKKKKKKKKRQCFAFLIYFRLGIK

SEQ ID NO: 20096 - protein, 28 aa, Artificial Sequence
  Quasi-synthetic sequence derived from human genome
FAGFWLIWGLIVLLCCFCSFLRRRLKRR

SEQ ID NO: 20097 - protein, 28 aa, Artificial Sequence
  Quasi-synthetic sequence derived from human genome
RKIVQVMRKQKTINRFLMRKRLLFPALV

SEQ ID NO: 20098 - protein, 28 aa, Artificial Sequence
  Quasi-synthetic sequence derived from human genome
LKSRKRRKMSKKLPPVIIKYIIINRFRG

SEQ ID NO: 20099 - protein, 28 aa, Artificial Sequence
  Quasi-synthetic sequence derived from human genome
WRRWNRFCRRKCRAAVKSNVFYWLVIFL

SEQ ID NO: 20100 - protein, 28 aa, Artificial Sequence
  Quasi-synthetic sequence derived from human genome
LVKKYQAVLRRKALLIFLVVHRLRWSSK

SEQ ID NO: 20101 - protein, 28 aa, Artificial Sequence
  Quasi-synthetic sequence derived from human genome
LPIVVLIFKSILFLPCLRKKILKIRHGW

SEQ ID NO: 20102 - protein, 28 aa, Artificial Sequence
  Quasi-synthetic sequence derived from human genome
YLRKRFGGRRIRLYLSVLSLFLYIFTKI

SEQ ID NO: 20103 - protein, 28 aa, Artificial Sequence
  Quasi-synthetic sequence derived from human genome
RRRNTPFHERFFRFLLRKLYVFRRSFLM

SEQ ID NO: 20104 - protein, 28 aa, Artificial Sequence
  Quasi-synthetic sequence derived from human genome
IRRGIGYLKLICFLIPFLLSLKKKMKVP

SEQ ID NO: 20105 - protein, 28 aa, Artificial Sequence
  Quasi-synthetic sequence derived from human genome
FLLRRRFLHLKKAAIVFQKQLRGQIARR

SEQ ID NO: 20106 - protein, 28 aa, Artificial Sequence
  Quasi-synthetic sequence derived from human genome
KMLVTISCILVGVLLLFVLLLVVRRRRR

SEQ ID NO: 20107 - protein, 28 aa, Artificial Sequence
  Quasi-synthetic sequence derived from human genome
LRAQMLIRIVLFLQKVWRGTLARMRYKR

SEQ ID NO: 20108 - protein, 28 aa, Artificial Sequence
  Quasi-synthetic sequence derived from human genome
RLSLKSFLILPFQRITRLKLLLQNILKR

SEQ ID NO: 20109 - protein, 28 aa, Artificial Sequence
  Quasi-synthetic sequence derived from human genome
KILGVLRVLRLLRTLRPLRVISRAPGLK

SEQ ID NO: 20110 - protein, 28 aa, Artificial Sequence
  Quasi-synthetic sequence derived from human genome
KKKTFKGLIRIFRKGVIAVLAANRLKIL

SEQ ID NO: 20111 - protein, 28 aa, Artificial Sequence
  Quasi-synthetic sequence derived from human genome
KKIVPKKKKPLKLGPIKKKDLKKLVLYL

SEQ ID NO: 20112 - protein, 28 aa, Artificial Sequence
  Quasi-synthetic sequence derived from human genome
LRLIILLRIFHLFHQKRQLEKLIRRRVS

SEQ ID NO: 20113 - protein, 28 aa, Artificial Sequence
  Quasi-synthetic sequence derived from human genome
PVILATLGVALLFIVRKKRKEKRLKRLR

SEQ ID NO: 20114 - protein, 28 aa, Artificial Sequence
  Quasi-synthetic sequence derived from human genome
FRNLRLPKRLRVVYFLARTRLAQRLIMA

SEQ ID NO: 20115 - protein, 28 aa, Artificial Sequence
  Quasi-synthetic sequence derived from human genome
RDIKTIKSLRVLRVLRPLKTIKRLPKLK

SEQ ID NO: 20116 - protein, 28 aa, Artificial Sequence
  Quasi-synthetic sequence derived from human genome
RRLTRRLVLPVFGVLWITVLLFFWVTKR

SEQ ID NO: 20117 - protein, 28 aa, Artificial Sequence
  Quasi-synthetic sequence derived from human genome
KTLLRCPSKKKYKAIRLIFVIMAVFFIF

SEQ ID NO: 20118 - protein, 28 aa, Artificial Sequence
  Quasi-synthetic sequence derived from human genome
FLRLFRAARLIKLLRQGYTIRILLWTFV

SEQ ID NO: 20119 - protein, 28 aa, Artificial Sequence
  Quasi-synthetic sequence derived from human genome
FIYIYMNFFFFFSVGRKFKKFNKVRVVR

SEQ ID NO: 20120 - protein, 28 aa, Artificial Sequence
  Quasi-synthetic sequence derived from human genome
FRRKIYYLPRRYKFMSRIDKQISRFRRW

SEQ ID NO: 20121 - protein, 28 aa, Artificial Sequence
  Quasi-synthetic sequence derived from human genome
KRILFLYNDLLKKRAAFTKLRRAAILRR

SEQ ID NO: 20122 - protein, 28 aa, Artificial Sequence
  Quasi-synthetic sequence derived from human genome
RVALAVAVLKTVILGLLCLLLLWWRRRK

SEQ ID NO: 20123 - protein, 28 aa, Artificial Sequence
  Quasi-synthetic sequence derived from human genome
RYLQRLLLVHGRWSYIRMCKFLRYFFYK

SEQ ID NO: 20124 - protein, 28 aa, Artificial Sequence
  Quasi-synthetic sequence derived from human genome
LLVLILLCLLIYYCRRRCLKPRQQHRKL

SEQ ID NO: 20125 - protein, 28 aa, Artificial Sequence
  Quasi-synthetic sequence derived from human genome
YLLQLKGKKHVLHLWPKRLLLPRHLRVF

SEQ ID NO: 20126 - protein, 28 aa, Artificial Sequence
  Quasi-synthetic sequence derived from human genome
FWKKKKSMIGMSTKLWKVKKALKMTIFW

SEQ ID NO: 20127 - protein, 28 aa, Artificial Sequence
  Quasi-synthetic sequence derived from human genome
YSGWLRKSPPEKKLRLFAWRKRWFILRR

SEQ ID NO: 20128 - protein, 28 aa, Artificial Sequence
  Quasi-synthetic sequence derived from human genome
RLRFLKLKRQTKVLLTLLLVFGIAIFPL

SEQ ID NO: 20129 - protein, 28 aa, Artificial Sequence
  Quasi-synthetic sequence derived from human genome
RFIRVFIKTIRRDIFGGLVLLKVKAKVR

SEQ ID NO: 20130 - protein, 28 aa, Artificial Sequence
  Quasi-synthetic sequence derived from human genome
RFVKWPRYIRLQRQRAILYKRLKVPPAI

SEQ ID NO: 20131 - protein, 28 aa, Artificial Sequence
  Quasi-synthetic sequence derived from human genome
LFFWMLFKALLIIYGILVIFRRMMKSRM

SEQ ID NO: 20132 - protein, 28 aa, Artificial Sequence
  Quasi-synthetic sequence derived from human genome
FLLLILLCMSLLLFQVIRLYQRRRWMIR

SEQ ID NO: 20133 - protein, 28 aa, Artificial Sequence
  Quasi-synthetic sequence derived from human genome
FLKLFRAARLIKLLRQGYTIRILLWTFV

SEQ ID NO: 20134 - protein, 28 aa, Artificial Sequence
  Quasi-synthetic sequence derived from human genome
TIIRIMRVLRIARVLKLLKMATGMRALL

SEQ ID NO: 20135 - protein, 28 aa, Artificial Sequence
  Quasi-synthetic sequence derived from human genome
KLAKIILALKVSRKNLLNVCKLIFKISR

SEQ ID NO: 20136 - protein, 28 aa, Artificial Sequence
  Quasi-synthetic sequence derived from human genome
YLRPLKKFLRKLHLPRDLPQKKKLKYMK

SEQ ID NO: 20137 - protein, 28 aa, Artificial Sequence
  Quasi-synthetic sequence derived from human genome
AKTKRRLVLGLREVLKHLKLKKLKCVII

SEQ ID NO: 20138 - protein, 28 aa, Artificial Sequence
  Quasi-synthetic sequence derived from human genome
LLRIANFSNLIFLRIKRRVKSVVLVILL

SEQ ID NO: 20139 - protein, 28 aa, Artificial Sequence
  Quasi-synthetic sequence derived from human genome
NWAKIRKLSFKRKHFLIKLHANILVLCK

SEQ ID NO: 20140 - protein, 28 aa, Artificial Sequence
  Quasi-synthetic sequence derived from human genome
KILGMLRVLRLLRTLRPLRVISRAQGLK

SEQ ID NO: 20141 - protein, 28 aa, Artificial Sequence
  Quasi-synthetic sequence derived from human genome
KRLAIMMMKKREKYLYQKIMFGKRRKIR

SEQ ID NO: 20142 - protein, 28 aa, Artificial Sequence
  Quasi-synthetic sequence derived from human genome
LLKIANFSNLIFLRLKRRVKSVILVVLL

SEQ ID NO: 20143 - protein, 28 aa, Artificial Sequence
  Quasi-synthetic sequence derived from human genome
QQFKHNFLLLFMKLRWFLKRWRQGKVLP

SEQ ID NO: 20144 - protein, 28 aa, Artificial Sequence
  Quasi-synthetic sequence derived from human genome
LLRKRWFQLGRSMNPRARKKRSRIPLLR

SEQ ID NO: 20145 - protein, 28 aa, Artificial Sequence
  Quasi-synthetic sequence derived from human genome
RRLQARRFRRSRRTGRLVVLIILTFAAF

SEQ ID NO: 20146 - protein, 28 aa, Artificial Sequence
  Quasi-synthetic sequence derived from human genome
LKRRYSFRLHIGRNIARPWKLIYYRAKK

SEQ ID NO: 20147 - protein, 28 aa, Artificial Sequence
  Quasi-synthetic sequence derived from human genome
LSRVSKKNIFLLFKKLCSFRYRRDLLRL

SEQ ID NO: 20148 - protein, 28 aa, Artificial Sequence
  Quasi-synthetic sequence derived from human genome
KRFKVMKIKVLRSWCRQILKGLQFLHTR

SEQ ID NO: 20149 - protein, 28 aa, Artificial Sequence
  Quasi-synthetic sequence derived from human genome
TSRPFTRFRTAVRVVIAILRLRFLVKKW

SEQ ID NO: 20150 - protein, 28 aa, Artificial Sequence
  Quasi-synthetic sequence derived from human genome
ILIMGNSKLREAFLKMLRFVKCFLRRRK

SEQ ID NO: 20151 - protein, 28 aa, Artificial Sequence
  Quasi-synthetic sequence derived from human genome
RIIRFLPLFKIIVPILIRIADVQIKKRL

SEQ ID NO: 20152 - protein, 28 aa, Artificial Sequence
  Quasi-synthetic sequence derived from human genome
RFRSLLVRRRFISLKKATIFVQRKYRAT

SEQ ID NO: 20153 - protein, 28 aa, Artificial Sequence
  Quasi-synthetic sequence derived from human genome
IKLLPLRTFRVFRALKAISVVSRLKVIV

SEQ ID NO: 20154 - protein, 28 aa, Artificial Sequence
  Quasi-synthetic sequence derived from human genome
MLLRKRYRHRPCRLQFLLLLLMLGCVLM

SEQ ID NO: 20155 - protein, 28 aa, Artificial Sequence
  Quasi-synthetic sequence derived from human genome
RLLRRRHMPLRLAMVGCAFVLFLFLLHR

SEQ ID NO: 20156 - protein, 28 aa, Artificial Sequence
  Quasi-synthetic sequence derived from human genome
RIFGKLVFLPLRLVWKEVILRKILILVL

SEQ ID NO: 20157 - protein, 28 aa, Artificial Sequence
  Quasi-synthetic sequence derived from human genome
RRRRRLRRRPRGLRCSRLPPPPPLPLLL

SEQ ID NO: 20158 - protein, 28 aa, Artificial Sequence
  Quasi-synthetic sequence derived from human genome
VGAGCVIFLLIIIFLTVLLLKLRKRHRK

SEQ ID NO: 20159 - protein, 28 aa, Artificial Sequence
  Quasi-synthetic sequence derived from human genome
FLWFTSPYKTMKFILWRRFRWAIILFII

SEQ ID NO: 20160 - protein, 28 aa, Artificial Sequence
  Quasi-synthetic sequence derived from human genome
LILCTRSIVLALRLRKRFLNFFLEKYKR

SEQ ID NO: 20161 - protein, 28 aa, Artificial Sequence
  Quasi-synthetic sequence derived from human genome
KKKQKSTKKFWIQKLPKVLCLHLKRFHW

SEQ ID NO: 20162 - protein, 28 aa, Artificial Sequence
  Quasi-synthetic sequence derived from human genome
VSFLIFILFIIVQLFIMKLRKAHVIWKK

SEQ ID NO: 20163 - protein, 28 aa, Artificial Sequence
  Quasi-synthetic sequence derived from human genome
LIVRVLVRAHRHRGLRPRRQKALRMILA

SEQ ID NO: 20164 - protein, 28 aa, Artificial Sequence
  Quasi-synthetic sequence derived from human genome
IILLLLLIIALMLWRLHWRRLLSKAERR

SEQ ID NO: 20165 - protein, 28 aa, Artificial Sequence
  Quasi-synthetic sequence derived from human genome
RRFLGKKYRKYYYKSPKPLLRPFLCRIC

SEQ ID NO: 20166 - protein, 28 aa, Artificial Sequence
  Quasi-synthetic sequence derived from human genome
LIRKKFRMMKIPKPILFGLNIAMKKQTK

SEQ ID NO: 20167 - protein, 28 aa, Artificial Sequence
  Quasi-synthetic sequence derived from human genome
VLQFQNVRRVVQIFRIMRILRILKLARH

SEQ ID NO: 20168 - protein, 28 aa, Artificial Sequence
  Quasi-synthetic sequence derived from human genome
IAAAIALLALTALLLVAMICRRRRRRKK

SEQ ID NO: 20169 - protein, 28 aa, Artificial Sequence
  Quasi-synthetic sequence derived from human genome
LPRLCIRKFFPKKKCFVFDLPIHRRKLA

SEQ ID NO: 20170 - protein, 28 aa, Artificial Sequence
  Quasi-synthetic sequence derived from human genome
LRICRVLRSLKLLAQFRQIQIIILVLVR

SEQ ID NO: 20171 - protein, 28 aa, Artificial Sequence
  Quasi-synthetic sequence derived from human genome
LRTLFRSRSKRRHRTVKLIFAIVVAYFL

SEQ ID NO: 20172 - protein, 28 aa, Artificial Sequence
  Quasi-synthetic sequence derived from human genome
LLVVVLGVVFGILIKRRQQKIRKYTMRR

SEQ ID NO: 20173 - protein, 28 aa, Artificial Sequence
  Quasi-synthetic sequence derived from human genome
RRRRRACIALFLVLLFAFGTLMGLRTLK

SEQ ID NO: 20174 - protein, 28 aa, Artificial Sequence
  Quasi-synthetic sequence derived from human genome
ARRHLKMMHIAATLIQRRFRTLMMRRRF

SEQ ID NO: 20175 - protein, 28 aa, Artificial Sequence
  Quasi-synthetic sequence derived from human genome
IKKKKVSIMVSVDGVKVILKKKKKLLLL

SEQ ID NO: 20176 - protein, 28 aa, Artificial Sequence
  Quasi-synthetic sequence derived from human genome
LVLLALCLLLPLLLLGGWKRWRRGRAAR

SEQ ID NO: 20177 - protein, 28 aa, Artificial Sequence
  Quasi-synthetic sequence derived from human genome
LFLCLLPLIVKHIRKKQAKKAAAIRAKK

SEQ ID NO: 20178 - protein, 28 aa, Artificial Sequence
  Quasi-synthetic sequence derived from human genome
IVLAKKMLRKALKLLNRIFPYNLISLFL

SEQ ID NO: 20179 - protein, 28 aa, Artificial Sequence
  Quasi-synthetic sequence derived from human genome
RVRMNTFPWLKIVKISFKCKQFFIQLRK

SEQ ID NO: 20180 - protein, 28 aa, Artificial Sequence
  Quasi-synthetic sequence derived from human genome
LALQLYVRRRKKLPSVLLFKKPSPFIFI

SEQ ID NO: 20181 - protein, 28 aa, Artificial Sequence
  Quasi-synthetic sequence derived from human genome
WRRQIYAVATLRFLKLRRERRALLCLLL

SEQ ID NO: 20182 - protein, 28 aa, Artificial Sequence
  Quasi-synthetic sequence derived from human genome
LAVIVLVALLLLWRRRQKRRTGALVLSR

SEQ ID NO: 20183 - protein, 28 aa, Artificial Sequence
  Quasi-synthetic sequence derived from human genome
FLRLHCGLWVRRKAGYKKKLWKKTPARK

SEQ ID NO: 20184 - protein, 28 aa, Artificial Sequence
  Quasi-synthetic sequence derived from human genome
LRIARFRFRAFHFLNRFPSVYLRCKMVV

SEQ ID NO: 20185 - protein, 28 aa, Artificial Sequence
  Quasi-synthetic sequence derived from human genome
RLRELRIRCVARKFLYLWIRMTFGRVFP

SEQ ID NO: 20186 - protein, 28 aa, Artificial Sequence
  Quasi-synthetic sequence derived from human genome
YLIFCLCSLVGILHLQRALVLRRKRKRM

SEQ ID NO: 20187 - protein, 28 aa, Artificial Sequence
  Quasi-synthetic sequence derived from human genome
LIMFITIVFCAAGIVVLVLHRRRRYKKK

SEQ ID NO: 20188 - protein, 28 aa, Artificial Sequence
  Quasi-synthetic sequence derived from human genome
HGKRLFVIRPSRFYDRRFLKLLRFYIAL

SEQ ID NO: 20189 - protein, 28 aa, Artificial Sequence
  Quasi-synthetic sequence derived from human genome
LSRRWRRWNRFNRRRCRAAVKSVTFYWL

SEQ ID NO: 20190 - protein, 28 aa, Artificial Sequence
  Quasi-synthetic sequence derived from human genome
LRAWMIQCWWRTLVQRRIRQRRQALLRV

SEQ ID NO: 20191 - protein, 28 aa, Artificial Sequence
  Quasi-synthetic sequence derived from human genome
KAKQRLKRLRNIHYLFNTALFLIAWRLL

SEQ ID NO: 20192 - protein, 28 aa, Artificial Sequence
  Quasi-synthetic sequence derived from human genome
PICYALCNRTFRKTFKMLLLCRWKKKKV

SEQ ID NO: 20193 - protein, 28 aa, Artificial Sequence
  Quasi-synthetic sequence derived from human genome
KIRSRKLGIFRRCWLVFKKASSKGPRRL

SEQ ID NO: 20194 - protein, 28 aa, Artificial Sequence
  Quasi-synthetic sequence derived from human genome
WLRKSPPEKKLKRYAWKRRWFVLRSGRL

SEQ ID NO: 20195 - protein, 28 aa, Artificial Sequence
  Quasi-synthetic sequence derived from human genome
MPRLPVKKIRKQMKLLLLLLLLSCAAWL

SEQ ID NO: 20196 - protein, 28 aa, Artificial Sequence
  Quasi-synthetic sequence derived from human genome
VLRVMRLMRIFRILKLARHSTGLRAFGF

SEQ ID NO: 20197 - protein, 28 aa, Artificial Sequence
  Quasi-synthetic sequence derived from human genome
MHKNMRVLSRTSKFRRLRQLLRRRKKRR

SEQ ID NO: 20198 - protein, 28 aa, Artificial Sequence
  Quasi-synthetic sequence derived from human genome
VKMRKEVKRIRVLVIRKLVRSVGRLKSK

SEQ ID NO: 20199 - protein, 28 aa, Artificial Sequence
  Quasi-synthetic sequence derived from human genome
FLLLILLCMSLLLFQVIRLYQRRRWTIR

SEQ ID NO: 20200 - protein, 28 aa, Artificial Sequence
  Quasi-synthetic sequence derived from human genome
LPRLCIRKFFPKKKCFVFDRPVHRRKLA

SEQ ID NO: 20201 - protein, 28 aa, Artificial Sequence
  Quasi-synthetic sequence derived from human genome
RLGGYWKTWIFWKTWIFWKTWIFRKTYI

SEQ ID NO: 20202 - protein, 28 aa, Artificial Sequence
  Quasi-synthetic sequence derived from human genome
KKRKIPKLVLRINAIYEVRRGKKRVKRL

SEQ ID NO: 20203 - protein, 28 aa, Artificial Sequence
  Quasi-synthetic sequence derived from human genome
RRKARRLLKTVLMILLAFLVCWGPLFGL

SEQ ID NO: 20204 - protein, 28 aa, Artificial Sequence
  Quasi-synthetic sequence derived from human genome
KMILFMVSGICIVFGFIILLLLVLRKRR

SEQ ID NO: 20205 - protein, 28 aa, Artificial Sequence
  Quasi-synthetic sequence derived from human genome
KFKLLSSLPRWRRIAQKIIRERRKKRVP

SEQ ID NO: 20206 - protein, 28 aa, Artificial Sequence
  Quasi-synthetic sequence derived from human genome
LAMFFLLVLILSSVFLFRLFKRRQGRIF

SEQ ID NO: 20207 - protein, 28 aa, Artificial Sequence
  Quasi-synthetic sequence derived from human genome
MKGRRRRRREYCKFALLLVLYTLVLLLV

SEQ ID NO: 20208 - protein, 28 aa, Artificial Sequence
  Quasi-synthetic sequence derived from human genome
FLPKCIRAKIQDYHILTRKRIRYRFRRF

SEQ ID NO: 20209 - protein, 28 aa, Artificial Sequence
  Quasi-synthetic sequence derived from human genome
VLFFSAVFVAAGLFAYVLRRRRKKLPFR

SEQ ID NO: 20210 - protein, 28 aa, Artificial Sequence
  Quasi-synthetic sequence derived from human genome
RAGLVLRLLRALRVLYVMRLARHSLGLR

SEQ ID NO: 20211 - protein, 28 aa, Artificial Sequence
  Quasi-synthetic sequence derived from human genome
ILFRATRKPLSGRTPRLVYKWFLLIYKL

SEQ ID NO: 20212 - protein, 28 aa, Artificial Sequence
  Quasi-synthetic sequence derived from human genome
RIRILCCLTFLVKVKSKALLKNRLLPPL

SEQ ID NO: 20213 - protein, 28 aa, Artificial Sequence
  Quasi-synthetic sequence derived from human genome
WLRKSPPEKKLRRYAWKKRWFILRSGRM

SEQ ID NO: 20214 - protein, 28 aa, Artificial Sequence
  Quasi-synthetic sequence derived from human genome
MPGRLLRGLWQRWRRYKYRFVPWIALNL

SEQ ID NO: 20215 - protein, 28 aa, Artificial Sequence
  Quasi-synthetic sequence derived from human genome
KILLRRPNEKKSKAVRLIFVIMIIFFLF

SEQ ID NO: 20216 - protein, 28 aa, Artificial Sequence
  Quasi-synthetic sequence derived from human genome
RLFRIKCVTRIQAYWRGCVVRKWYRNLR

SEQ ID NO: 20217 - protein, 28 aa, Artificial Sequence
  Quasi-synthetic sequence derived from human genome
LFFRKRRADMPRVFVFRALLLVLIFLFV

SEQ ID NO: 20218 - protein, 28 aa, Artificial Sequence
  Quasi-synthetic sequence derived from human genome
FGLLLKKIMAILIKRFHHTRRNWKGLIA

SEQ ID NO: 20219 - protein, 28 aa, Artificial Sequence
  Quasi-synthetic sequence derived from human genome
RVIRLVRVFRIFKLSRHSKGLQILGKTL

SEQ ID NO: 20220 - protein, 28 aa, Artificial Sequence
  Quasi-synthetic sequence derived from human genome
KKIKPTLPLRIFINVSRFFCVQLKKMVR

SEQ ID NO: 20221 - protein, 28 aa, Artificial Sequence
  Quasi-synthetic sequence derived from human genome
VNALLVLLALAAWASRWLRRKLRARRKG

SEQ ID NO: 20222 - protein, 28 aa, Artificial Sequence
  Quasi-synthetic sequence derived from human genome
AFYKNIVKKGYLLKKGKGKRWKNLYFIL

SEQ ID NO: 20223 - protein, 28 aa, Artificial Sequence
  Quasi-synthetic sequence derived from human genome
WITAVLPTVIICVMVFCLILWKWKKKKR

SEQ ID NO: 20224 - protein, 28 aa, Artificial Sequence
  Quasi-synthetic sequence derived from human genome
KLSMIRFRYRILRSQHFRTKSKVCKLRK

SEQ ID NO: 20225 - protein, 28 aa, Artificial Sequence
  Quasi-synthetic sequence derived from human genome
RYLRVKLTVRYKRVTTHRRIWLALGLCW

SEQ ID NO: 20226 - protein, 28 aa, Artificial Sequence
  Quasi-synthetic sequence derived from human genome
LTRLMNFFVFSRGLLQYINQRKKFRRRW

SEQ ID NO: 20227 - protein, 28 aa, Artificial Sequence
  Quasi-synthetic sequence derived from human genome
VFRLKRRKRIARRLVDTLRNCFMFGCFL

SEQ ID NO: 20228 - protein, 28 aa, Artificial Sequence
  Quasi-synthetic sequence derived from human genome
IRNMSWPRLIRKLRCYLKEMKNLRKLVF

SEQ ID NO: 20229 - protein, 28 aa, Artificial Sequence
  Quasi-synthetic sequence derived from human genome
KLRYLSLLCLLPLVAFLLFCLHVLFKKR

SEQ ID NO: 20230 - protein, 28 aa, Artificial Sequence
  Quasi-synthetic sequence derived from human genome
VMVVFIILVIGVCTCCHPLRKRRKRKKK

SEQ ID NO: 20231 - protein, 28 aa, Artificial Sequence
  Quasi-synthetic sequence derived from human genome
ISVVKILRVLRVLRPLRAINRAKGLKHV

SEQ ID NO: 20232 - protein, 28 aa, Artificial Sequence
  Quasi-synthetic sequence derived from human genome
INVVKILRVLRVLRPLRAINRAKGLKHV

SEQ ID NO: 20233 - protein, 28 aa, Artificial Sequence
  Quasi-synthetic sequence derived from human genome
FINLSFLRLFRAARLIKLLRQGYTIRIL

SEQ ID NO: 20234 - protein, 28 aa, Artificial Sequence
  Quasi-synthetic sequence derived from human genome
HPLRLRHLRRPRVARLLCLGVWALILVF

SEQ ID NO: 20235 - protein, 28 aa, Artificial Sequence
  Quasi-synthetic sequence derived from human genome
GGVIGLLILILLIKKLIIFILKKTREKK

SEQ ID NO: 20236 - protein, 28 aa, Artificial Sequence
  Quasi-synthetic sequence derived from human genome
KWRLPRISARAPYRLRRLRRHTYWPPRR

SEQ ID NO: 20237 - protein, 28 aa, Artificial Sequence
  Quasi-synthetic sequence derived from human genome
KAAKDVLGFLRVVRFVRILRIFKLTRHF

SEQ ID NO: 20238 - protein, 28 aa, Artificial Sequence
  Quasi-synthetic sequence derived from human genome
YLSRCKRGKRHWKKLWFVIKGKVLYTYM

SEQ ID NO: 20239 - protein, 28 aa, Artificial Sequence
  Quasi-synthetic sequence derived from human genome
WRRLLRKRWVLALVFGLSLVYFLSSTFK

SEQ ID NO: 20240 - protein, 28 aa, Artificial Sequence
  Quasi-synthetic sequence derived from human genome
FQGFTKINAFNWAKVRKLSFKRKRFLIK

SEQ ID NO: 20241 - protein, 28 aa, Artificial Sequence
  Quasi-synthetic sequence derived from human genome
KKLKQIFLSVLRHVRYWVKDRSLRLHRF

SEQ ID NO: 20242 - protein, 28 aa, Artificial Sequence
  Quasi-synthetic sequence derived from human genome
LLYLLAVAVVIILFIILLGVIMAKRKRK

SEQ ID NO: 20243 - protein, 28 aa, Artificial Sequence
  Quasi-synthetic sequence derived from human genome
KRMVSWSFHKLKTMKHLLLLLLCVFLVK

SEQ ID NO: 20244 - protein, 28 aa, Artificial Sequence
  Quasi-synthetic sequence derived from human genome
RLARQRIIQFQARCRAYLVRKAFRHRLW

SEQ ID NO: 20245 - protein, 28 aa, Artificial Sequence
  Quasi-synthetic sequence derived from human genome
LRFGFGFRRGRSFLLRSWHHLMKRVQIK

SEQ ID NO: 20246 - protein, 28 aa, Artificial Sequence
  Quasi-synthetic sequence derived from human genome
CRPLRARVLVTRRRVRALIAVLWAVALL

SEQ ID NO: 20247 - protein, 28 aa, Artificial Sequence
  Quasi-synthetic sequence derived from human genome
LIALLLLLLVFTVALYAQRRWQKRRRIP

SEQ ID NO: 20248 - protein, 28 aa, Artificial Sequence
  Quasi-synthetic sequence derived from human genome
WVYILFRRAVLRRLQPRLSTRPRRSLTL

SEQ ID NO: 20249 - protein, 28 aa, Artificial Sequence
  Quasi-synthetic sequence derived from human genome
LFFRRPKASLPRVFVLRALLMVLVFLLV

SEQ ID NO: 20250 - protein, 28 aa, Artificial Sequence
  Quasi-synthetic sequence derived from human genome
RRFLVTLRIRRACGPPRVRVFVVHIPRL

SEQ ID NO: 20251 - protein, 28 aa, Artificial Sequence
  Quasi-synthetic sequence derived from human genome
FLFIPFFIIFCVLIAIMVKVNFQRKKWR

SEQ ID NO: 20252 - protein, 28 aa, Artificial Sequence
  Quasi-synthetic sequence derived from human genome
RPTQAKLLAKKRVVRMLLVIVVLFFLCW

SEQ ID NO: 20253 - protein, 28 aa, Artificial Sequence
  Quasi-synthetic sequence derived from human genome
LRRKLRGKRRPVIAFCLLMILSAMAVTR

SEQ ID NO: 20254 - protein, 28 aa, Artificial Sequence
  Quasi-synthetic sequence derived from human genome
VGFSPLRILRKRNKALRKIRKLQKQGLL

SEQ ID NO: 20255 - protein, 28 aa, Artificial Sequence
  Quasi-synthetic sequence derived from human genome
ARRRQRGRLMRRLVRRLRRWGLLPRTNT

SEQ ID NO: 20256 - protein, 28 aa, Artificial Sequence
  Quasi-synthetic sequence derived from human genome
FIRILGILLSKLRTRQMRCRDYRLRLAR

SEQ ID NO: 20257 - protein, 28 aa, Artificial Sequence
  Quasi-synthetic sequence derived from human genome
KARRLTILLLLAFYVCFLPFHILRVIRI

SEQ ID NO: 20258 - protein, 28 aa, Artificial Sequence
  Quasi-synthetic sequence derived from human genome
IMATICFILLILSLICKIKLGPVRRKLK

SEQ ID NO: 20259 - protein, 28 aa, Artificial Sequence
  Quasi-synthetic sequence derived from human genome
TWSLRRRPARTLGLLLLVVLGFLVLRRL

SEQ ID NO: 20260 - protein, 28 aa, Artificial Sequence
  Quasi-synthetic sequence derived from human genome
FVTFFSGLIILLIFRLIWRSVKKWQIIK

SEQ ID NO: 20261 - protein, 28 aa, Artificial Sequence
  Quasi-synthetic sequence derived from human genome
ILMLGTFFIAFFLRKFRNSRFLGGKARR

SEQ ID NO: 20262 - protein, 28 aa, Artificial Sequence
  Quasi-synthetic sequence derived from human genome
KLAFVIRIRGINGVSPKVRKVLQLLRLR

SEQ ID NO: 20263 - protein, 28 aa, Artificial Sequence
  Quasi-synthetic sequence derived from human genome
YLLASVLLSLLLILKAGRRWNKYFKSRR

SEQ ID NO: 20264 - protein, 28 aa, Artificial Sequence
  Quasi-synthetic sequence derived from human genome
LKSARYFLWHTYRWLLLKLLLLLLLLLL

SEQ ID NO: 20265 - protein, 28 aa, Artificial Sequence
  Quasi-synthetic sequence derived from human genome
KKKFYGPQRRKMMFMGFIRLGVWYNFFR

SEQ ID NO: 20266 - protein, 28 aa, Artificial Sequence
  Quasi-synthetic sequence derived from human genome
KTFLSLVWKRRILFFVVTLVSVFLVWKF

SEQ ID NO: 20267 - protein, 28 aa, Artificial Sequence
  Quasi-synthetic sequence derived from human genome
MRRLRRLAHLVLFCPFSKRLQGRLPGLR

SEQ ID NO: 20268 - protein, 28 aa, Artificial Sequence
  Quasi-synthetic sequence derived from human genome
IRHKLKEVRLFLKNYSKTRFGYRIKWRI

SEQ ID NO: 20269 - protein, 28 aa, Artificial Sequence
  Quasi-synthetic sequence derived from human genome
IASGCIIFIVIIITLVVLLLKYRRRHRK

SEQ ID NO: 20270 - protein, 28 aa, Artificial Sequence
  Quasi-synthetic sequence derived from human genome
LLMVLRCLRPLRIFKLVPQMRKVVRELF

SEQ ID NO: 20271 - protein, 28 aa, Artificial Sequence
  Quasi-synthetic sequence derived from human genome
YFHLLRRQMVRNFRKPLIVASPKMLLRL

SEQ ID NO: 20272 - protein, 28 aa, Artificial Sequence
  Quasi-synthetic sequence derived from human genome
LFVKRLRRKTYLSNMAKTMRMVLKSKRR

SEQ ID NO: 20273 - protein, 28 aa, Artificial Sequence
  Quasi-synthetic sequence derived from human genome
ILKRALKVKQAMLQLYVLKLLKLQTKYL

SEQ ID NO: 20274 - protein, 28 aa, Artificial Sequence
  Quasi-synthetic sequence derived from human genome
VKRSVTRIKKRSRSVFYRLTILILVFAV

SEQ ID NO: 20275 - protein, 28 aa, Artificial Sequence
  Quasi-synthetic sequence derived from human genome
LRIANFNHPLFFLMKRKIIVLMPWLLRL

SEQ ID NO: 20276 - protein, 28 aa, Artificial Sequence
  Quasi-synthetic sequence derived from human genome
KVCYLPLNTFLLKPIQRLLHYRLLLRRL

SEQ ID NO: 20277 - protein, 28 aa, Artificial Sequence
  Quasi-synthetic sequence derived from human genome
RKQLMIYRLPQVLRLHLKRFRWSGRNHR

SEQ ID NO: 20278 - protein, 28 aa, Artificial Sequence
  Quasi-synthetic sequence derived from human genome
VIPSPKSLWYLIKWIWTHLCKKKMRRKP

SEQ ID NO: 20279 - protein, 28 aa, Artificial Sequence
  Quasi-synthetic sequence derived from human genome
WLSLFVNWKVSMFVEVHKAIKKRRRRRK

SEQ ID NO: 20280 - protein, 28 aa, Artificial Sequence
  Quasi-synthetic sequence derived from human genome
KFLQRLLLVHGRWSYLRMCKFLCYFFYK

SEQ ID NO: 20281 - protein, 28 aa, Artificial Sequence
  Quasi-synthetic sequence derived from human genome
WRMYVVRRRYKIRRAATIVLQSYLRGFL

SEQ ID NO: 20282 - protein, 28 aa, Artificial Sequence
  Quasi-synthetic sequence derived from human genome
KKKKRYLRASSNRNFLLTMRPFLKRAIL

SEQ ID NO: 20283 - protein, 28 aa, Artificial Sequence
  Quasi-synthetic sequence derived from human genome
ALRYNILTLMRMLSLKSLKKQMKKVKKM

SEQ ID NO: 20284 - protein, 28 aa, Artificial Sequence
  Quasi-synthetic sequence derived from human genome
RLYCLKIHGLSSLWRLFRGKKWNVLRQR

SEQ ID NO: 20285 - protein, 28 aa, Artificial Sequence
  Quasi-synthetic sequence derived from human genome
LGLAITALLLLMVACRLRLVKQKLKKAR

SEQ ID NO: 20286 - protein, 28 aa, Artificial Sequence
  Quasi-synthetic sequence derived from human genome
LLRRVLVLMNSKHTFLALCALRFMRRII

SEQ ID NO: 20287 - protein, 28 aa, Artificial Sequence
  Quasi-synthetic sequence derived from human genome
WLRRRYLRLRYEDLVRQPRAQLRRLLRF

SEQ ID NO: 20288 - protein, 28 aa, Artificial Sequence
  Quasi-synthetic sequence derived from human genome
KLKLFRHYYVLIVCYIYFTRIIAFLLKL

SEQ ID NO: 20289 - protein, 28 aa, Artificial Sequence
  Quasi-synthetic sequence derived from human genome
KNMQFLFVNKRLVLRTKLHKLIDFLLRK

SEQ ID NO: 20290 - protein, 28 aa, Artificial Sequence
  Quasi-synthetic sequence derived from human genome
RWLTFWRRLQSAFLKNRSLRTKSSLWRR

SEQ ID NO: 20291 - protein, 28 aa, Artificial Sequence
  Quasi-synthetic sequence derived from human genome
LRLIILIRIFHLLHQKRQLEKLMRRLVS

SEQ ID NO: 20292 - protein, 28 aa, Artificial Sequence
  Quasi-synthetic sequence derived from human genome
KKIWWIIRGPMMLCVTVNFFIFLKILKL

SEQ ID NO: 20293 - protein, 28 aa, Artificial Sequence
  Quasi-synthetic sequence derived from human genome
LLLVLQYFGPLCFIFICYFKIYIRLKRR

SEQ ID NO: 20294 - protein, 28 aa, Artificial Sequence
  Quasi-synthetic sequence derived from human genome
AAAKRWLGRWRRKRRWRRVRKAGPRDLL

SEQ ID NO: 20295 - protein, 28 aa, Artificial Sequence
  Quasi-synthetic sequence derived from human genome
LRGLGKLRQVSLRRNRLRALPRALFRNL

SEQ ID NO: 20296 - protein, 28 aa, Artificial Sequence
  Quasi-synthetic sequence derived from human genome
STWLRVRKARPQLILSRRPRRRLGSLRW

SEQ ID NO: 20297 - protein, 28 aa, Artificial Sequence
  Quasi-synthetic sequence derived from human genome
LLVPCVVILAKALFLLPCISRRLARIRR

SEQ ID NO: 20298 - protein, 28 aa, Artificial Sequence
  Quasi-synthetic sequence derived from human genome
FLLFVLENMLGLLRHRGLRPRCCRRKRR

SEQ ID NO: 20299 - protein, 28 aa, Artificial Sequence
  Quasi-synthetic sequence derived from human genome
NMRKNMRVLSRTSKFRRLRQLLRRRKKR

SEQ ID NO: 20300 - protein, 28 aa, Artificial Sequence
  Quasi-synthetic sequence derived from human genome
YNRFRKFPFFTRPLLSKWCPKSLFKKKP

SEQ ID NO: 20301 - protein, 28 aa, Artificial Sequence
  Quasi-synthetic sequence derived from human genome
VLRALRLLRIFKVTKYWASLRNLVVSLL

SEQ ID NO: 20302 - protein, 28 aa, Artificial Sequence
  Quasi-synthetic sequence derived from human genome
LLLLLLLLLFLILRHRRQGKHWTSTQRK

SEQ ID NO: 20303 - protein, 28 aa, Artificial Sequence
  Quasi-synthetic sequence derived from human genome
IKRLRKKFAQKMLRKARRKLIYEKAKHY

SEQ ID NO: 20304 - protein, 28 aa, Artificial Sequence
  Quasi-synthetic sequence derived from human genome
VLLRGARAALLLLLPPRLLARPSLLLRR

SEQ ID NO: 20305 - protein, 28 aa, Artificial Sequence
  Quasi-synthetic sequence derived from human genome
KKRKKGLRIKGKRRRKKLILAKKFSKDL

SEQ ID NO: 20306 - protein, 28 aa, Artificial Sequence
  Quasi-synthetic sequence derived from human genome
FRRKEKMFRFFIRRMVKAQSFYWVVLCV

SEQ ID NO: 20307 - protein, 28 aa, Artificial Sequence
  Quasi-synthetic sequence derived from human genome
RLARIGRILRLIRGAKGIRTLLFALMMS

SEQ ID NO: 20308 - protein, 28 aa, Artificial Sequence
  Quasi-synthetic sequence derived from human genome
HRKRMGLKMLMMMALLVPLVYTIKRHKW

SEQ ID NO: 20309 - protein, 28 aa, Artificial Sequence
  Quasi-synthetic sequence derived from human genome
RSCWRKWKQLSRLQRNMILFLLAFLLFC

SEQ ID NO: 20310 - protein, 28 aa, Artificial Sequence
  Quasi-synthetic sequence derived from human genome
ISHLIFFIFYLRNMKKKYTKMVKLLHKS

SEQ ID NO: 20311 - protein, 28 aa, Artificial Sequence
  Quasi-synthetic sequence derived from human genome
ALLLKRFLLARRSRRGLFAQIVLPALFV

SEQ ID NO: 20312 - protein, 28 aa, Artificial Sequence
  Quasi-synthetic sequence derived from human genome
VLRALRLLRIFKITKYWASLRNLVVSLM

SEQ ID NO: 20313 - protein, 28 aa, Artificial Sequence
  Quasi-synthetic sequence derived from human genome
LRGLKRKWIRCSAQATVLHLKKFIAKKL

SEQ ID NO: 20314 - protein, 28 aa, Artificial Sequence
  Quasi-synthetic sequence derived from human genome
RCRGKLLVHSLNLLAKQGLRLLRGLRRR

SEQ ID NO: 20315 - protein, 28 aa, Artificial Sequence
  Quasi-synthetic sequence derived from human genome
KRFKVMKPKVLRSWCRQILKGLQFLHTR

SEQ ID NO: 20316 - protein, 28 aa, Artificial Sequence
  Quasi-synthetic sequence derived from human genome
KYRKLVKKTRFLRRKVQEGRLRRKQIKF

SEQ ID NO: 20317 - protein, 28 aa, Artificial Sequence
  Quasi-synthetic sequence derived from human genome
VVCPSEKRFLLLFTFLKKNRKKKLMVFF

SEQ ID NO: 20318 - protein, 28 aa, Artificial Sequence
  Quasi-synthetic sequence derived from human genome
VVKILRVLRVLRPLRAINRAKGLKHVVQ

SEQ ID NO: 20319 - protein, 28 aa, Artificial Sequence
  Quasi-synthetic sequence derived from human genome
SKQLLLWRLPNVLIVQLKRFSFRSFIWR

SEQ ID NO: 20320 - protein, 28 aa, Artificial Sequence
  Quasi-synthetic sequence derived from human genome
FLLKLQKWTQKKEKGKKLSRMKLLLKHL

SEQ ID NO: 20321 - protein, 28 aa, Artificial Sequence
  Quasi-synthetic sequence derived from human genome
RLLLSCLLLPAARLARQYLLPLLRRLAR

SEQ ID NO: 20322 - protein, 28 aa, Artificial Sequence
  Quasi-synthetic sequence derived from human genome
KVFSAFALVRTIRYLYRRLQRMLGLRRG

SEQ ID NO: 20323 - protein, 28 aa, Artificial Sequence
  Quasi-synthetic sequence derived from human genome
WFICSLCVPRVRKLWSSRRPRTRRNLLL

SEQ ID NO: 20324 - protein, 28 aa, Artificial Sequence
  Quasi-synthetic sequence derived from human genome
YAKFLRRTKAATIIQKYWRMYVVRRRYK

SEQ ID NO: 20325 - protein, 28 aa, Artificial Sequence
  Quasi-synthetic sequence derived from human genome
GLLLLLVVIILILAFWVLPKYKTRKAMR

SEQ ID NO: 20326 - protein, 28 aa, Artificial Sequence
  Quasi-synthetic sequence derived from human genome
LLRKALILMNSKHTHLILCVLRFMRRMI

SEQ ID NO: 20327 - protein, 28 aa, Artificial Sequence
  Quasi-synthetic sequence derived from human genome
VVLYVASSLFLMVMYFFFRVRSRRWKVK

SEQ ID NO: 20328 - protein, 28 aa, Artificial Sequence
  Quasi-synthetic sequence derived from human genome
WGVILFVYLVIRALRLWRTAKLQVTLKK

SEQ ID NO: 20329 - protein, 28 aa, Artificial Sequence
  Quasi-synthetic sequence derived from human genome
MRKRKISVCQQTWALLCKNFLKKWRMKR

SEQ ID NO: 20330 - protein, 28 aa, Artificial Sequence
  Quasi-synthetic sequence derived from human genome
MWRRYRAKKYLCKVKAACKIQAWYRCWR

SEQ ID NO: 20331 - protein, 28 aa, Artificial Sequence
  Quasi-synthetic sequence derived from human genome
IRRRSKFANLGRIFKPWKWRKKKSEKFK

SEQ ID NO: 20332 - protein, 28 aa, Artificial Sequence
  Quasi-synthetic sequence derived from human genome
RYLRRFREMKPRVLQRWSRQILRGLHFL

SEQ ID NO: 20333 - protein, 28 aa, Artificial Sequence
  Quasi-synthetic sequence derived from human genome
VYRKYICTSFYPWVNILKISFKRKKFFI

SEQ ID NO: 20334 - protein, 28 aa, Artificial Sequence
  Quasi-synthetic sequence derived from human genome
LSITWLLLGALLWMWWRRNRRGKLGRLA

SEQ ID NO: 20335 - protein, 28 aa, Artificial Sequence
  Quasi-synthetic sequence derived from human genome
RRMFRVRNCLRGLGLFLLVFSFFFLLTW

SEQ ID NO: 20336 - protein, 28 aa, Artificial Sequence
  Quasi-synthetic sequence derived from human genome
LRRLRAVRLRSGAKALGKARRKVTVLVL

SEQ ID NO: 20337 - protein, 28 aa, Artificial Sequence
  Quasi-synthetic sequence derived from human genome
LWWFWLLWTVLILFSCCCAFRHRRAKLR

SEQ ID NO: 20338 - protein, 28 aa, Artificial Sequence
  Quasi-synthetic sequence derived from human genome
PLAPRPRRRRSLRRLFSRFLLALGSRSR

SEQ ID NO: 20339 - protein, 28 aa, Artificial Sequence
  Quasi-synthetic sequence derived from human genome
KVTWMRRMRILRRLLRRYRESKKIDRHM

SEQ ID NO: 20340 - protein, 28 aa, Artificial Sequence
  Quasi-synthetic sequence derived from human genome
LRRIILLQRWFRVLLCRQHFLHLRQASV

SEQ ID NO: 20341 - protein, 28 aa, Artificial Sequence
  Quasi-synthetic sequence derived from human genome
WLVKSPPERKLQRYAWRKRWFVLRRGRM

SEQ ID NO: 20342 - protein, 28 aa, Artificial Sequence
  Quasi-synthetic sequence derived from human genome
KKTFKCIKCSKSFFMLSCLIRHKRIHIR

SEQ ID NO: 20343 - protein, 28 aa, Artificial Sequence
  Quasi-synthetic sequence derived from human genome
KRYLVKFICLSIWGLSLLLALPVLLFRR

SEQ ID NO: 20344 - protein, 28 aa, Artificial Sequence
  Quasi-synthetic sequence derived from human genome
ALVAILLCVLILLILVVLFAALKRQRKK

SEQ ID NO: 20345 - protein, 28 aa, Artificial Sequence
  Quasi-synthetic sequence derived from human genome
RIVRFTKILSLLRLLRLSRLIRYIHQWE

SEQ ID NO: 20346 - protein, 28 aa, Artificial Sequence
  Quasi-synthetic sequence derived from human genome
RLRHPRTRWKNWWVRGILTLAMIAFFFI

SEQ ID NO: 20347 - protein, 28 aa, Artificial Sequence
  Quasi-synthetic sequence derived from human genome
LLSKAKQKLLRHLVPAAALRRKRKALWA

SEQ ID NO: 20348 - protein, 28 aa, Artificial Sequence
  Quasi-synthetic sequence derived from human genome
RKGIVRVVFFPFFFRWWLQVTSKVIFFW

SEQ ID NO: 20349 - protein, 28 aa, Artificial Sequence
  Quasi-synthetic sequence derived from human genome
FLKKLLGKKLTRCLKPFENSRLRLWTKW

SEQ ID NO: 20350 - protein, 28 aa, Artificial Sequence
  Quasi-synthetic sequence derived from human genome
IFKAIAHFKRTTFLKKHRMLGRLKYKVT

SEQ ID NO: 20351 - protein, 28 aa, Artificial Sequence
  Quasi-synthetic sequence derived from human genome
LVVVLVLVIVGIGVLILLVRYRKCIKLK

SEQ ID NO: 20352 - protein, 28 aa, Artificial Sequence
  Quasi-synthetic sequence derived from human genome
LVLFILFLTWCRVQKQKHLPLRVSTRRR

SEQ ID NO: 20353 - protein, 28 aa, Artificial Sequence
  Quasi-synthetic sequence derived from human genome
AILGLWKIARKWMRRKMGKWPAVVVMGW

SEQ ID NO: 20354 - protein, 28 aa, Artificial Sequence
  Quasi-synthetic sequence derived from human genome
SSIFFFLPVFCLTVLYSLIGRKLWRRRR

SEQ ID NO: 20355 - protein, 28 aa, Artificial Sequence
  Quasi-synthetic sequence derived from human genome
LVSLLQKPRHRCRKRKPLLAIGFYLYRM

SEQ ID NO: 20356 - protein, 28 aa, Artificial Sequence
  Quasi-synthetic sequence derived from human genome
KKMLRKALKLLNRIFPYNLISLFLHIHV

SEQ ID NO: 20357 - protein, 28 aa, Artificial Sequence
  Quasi-synthetic sequence derived from human genome
QKVFILFLTLWLLSLLKLLNVRRLFPQK

SEQ ID NO: 20358 - protein, 28 aa, Artificial Sequence
  Quasi-synthetic sequence derived from human genome
FRKKSFKIHQKAIKKKGNLYGFALLRRR

SEQ ID NO: 20359 - protein, 28 aa, Artificial Sequence
  Quasi-synthetic sequence derived from human genome
RKRLRCRRKTVLVLMCILTAYVLCWAPF

SEQ ID NO: 20360 - protein, 28 aa, Artificial Sequence
  Quasi-synthetic sequence derived from human genome
AVVGGVIGLLILILLIKKLIIFILKKTR

SEQ ID NO: 20361 - protein, 28 aa, Artificial Sequence
  Quasi-synthetic sequence derived from human genome
LRMMRIFWVIKLARHFIGLQTLGLTLKR

SEQ ID NO: 20362 - protein, 28 aa, Artificial Sequence
  Quasi-synthetic sequence derived from human genome
RAWLARRRFQSIRRFVLNIQLTYRVQRL

SEQ ID NO: 20363 - protein, 28 aa, Artificial Sequence
  Quasi-synthetic sequence derived from human genome
LSPRWILQFRRWARKWSRFTRSSFQVRW

SEQ ID NO: 20364 - protein, 28 aa, Artificial Sequence
  Quasi-synthetic sequence derived from human genome
LRGKMMQRRPRSAEVKYFYFFKILLRLR

SEQ ID NO: 20365 - protein, 28 aa, Artificial Sequence
  Quasi-synthetic sequence derived from human genome
QKKNRKMLVILILFVIIIVLIVVLVGVK

SEQ ID NO: 20366 - protein, 28 aa, Artificial Sequence
  Quasi-synthetic sequence derived from human genome
IFYLLKIVNFSRLIFHHLKRKAKSVVLV

SEQ ID NO: 20367 - protein, 28 aa, Artificial Sequence
  Quasi-synthetic sequence derived from human genome
KGRRTLRKPKRVPSIYKLKLRPRIRPRR

SEQ ID NO: 20368 - protein, 28 aa, Artificial Sequence
  Quasi-synthetic sequence derived from human genome
KKVLNLLKGAFPARLKKVLIVGAPIWFR

SEQ ID NO: 20369 - protein, 28 aa, Artificial Sequence
  Quasi-synthetic sequence derived from human genome
RSLKHLCRLKIRKCMGRLHLRCPVFMSF

SEQ ID NO: 20370 - protein, 28 aa, Artificial Sequence
  Quasi-synthetic sequence derived from human genome
WRGRYGRRRPFIWALSLGILLSLFLIPR

SEQ ID NO: 20371 - protein, 28 aa, Artificial Sequence
  Quasi-synthetic sequence derived from human genome
WMRIFIQAKRVKTKHLCYCLYRPRKYLY

SEQ ID NO: 20372 - protein, 28 aa, Artificial Sequence
  Quasi-synthetic sequence derived from human genome
RRLLGKRKRRELNMKAQALKLAAKRFIF

SEQ ID NO: 20373 - protein, 28 aa, Artificial Sequence
  Quasi-synthetic sequence derived from human genome
RWLRIKLWISTVALALVPFLLLIPKFAR

SEQ ID NO: 20374 - protein, 28 aa, Artificial Sequence
  Quasi-synthetic sequence derived from human genome
KDINTIKSLRVLRVLRPLKTIKRLPKLK

SEQ ID NO: 20375 - protein, 28 aa, Artificial Sequence
  Quasi-synthetic sequence derived from human genome
FIWNHGITLPLKNVRKRRFRKTAKKKYI

SEQ ID NO: 20376 - protein, 28 aa, Artificial Sequence
  Quasi-synthetic sequence derived from human genome
FVWFLNPLKSIKYLICTRYKWLIIKIVL

SEQ ID NO: 20377 - protein, 28 aa, Artificial Sequence
  Quasi-synthetic sequence derived from human genome
IQWNIRAFMAVKNWPWMRLFFKIKPLVK

SEQ ID NO: 20378 - protein, 28 aa, Artificial Sequence
  Quasi-synthetic sequence derived from human genome
FKIQSKLLKHKQIHTRNKAFRALLLKKR

SEQ ID NO: 20379 - protein, 28 aa, Artificial Sequence
  Quasi-synthetic sequence derived from human genome
FLWFTNPCKTMKFIVWRRFKWVIIGLLF

SEQ ID NO: 20380 - protein, 28 aa, Artificial Sequence
  Quasi-synthetic sequence derived from human genome
RSRSRRISLRKKLKLPIGKRNWLKRSSL

SEQ ID NO: 20381 - protein, 28 aa, Artificial Sequence
  Quasi-synthetic sequence derived from human genome
IIVNQLKKIIKRKHTLPNYKIRFKPFFP

SEQ ID NO: 20382 - protein, 28 aa, Artificial Sequence
  Quasi-synthetic sequence derived from human genome
RRFLWGVLFALCFSCLLSQAWRVRRLVR

SEQ ID NO: 20383 - protein, 28 aa, Artificial Sequence
  Quasi-synthetic sequence derived from human genome
KQNIFHFLYGKNRSRIPLLRKRRFQLYR

SEQ ID NO: 20384 - protein, 28 aa, Artificial Sequence
  Quasi-synthetic sequence derived from human genome
SKKNPKLINALRRCFFWRFMFYGIFLYL

SEQ ID NO: 20385 - protein, 28 aa, Artificial Sequence
  Quasi-synthetic sequence derived from human genome
LKRKYWWKNCKMWAIGITVLVIFIIIII

SEQ ID NO: 20386 - protein, 28 aa, Artificial Sequence
  Quasi-synthetic sequence derived from human genome
AVVVVVIIIFTVVLILLKMYNRKMRTRR

SEQ ID NO: 20387 - protein, 28 aa, Artificial Sequence
  Quasi-synthetic sequence derived from human genome
LAEKAKRCNRRLKSQILLKKYLMKRRWK

SEQ ID NO: 20388 - protein, 28 aa, Artificial Sequence
  Quasi-synthetic sequence derived from human genome
RKYKKNIKALYIVHPTMFIKTLLILFKP

SEQ ID NO: 20389 - protein, 28 aa, Artificial Sequence
  Quasi-synthetic sequence derived from human genome
RGLRLRLPRRESLLRGLCRPLRPLLGFR

SEQ ID NO: 20390 - protein, 28 aa, Artificial Sequence
  Quasi-synthetic sequence derived from human genome
KRRPKRREIPLKVLVKAVLFACMLMRKT

SEQ ID NO: 20391 - protein, 28 aa, Artificial Sequence
  Quasi-synthetic sequence derived from human genome
LSVLRSFRLLRVFKLAKSWPTLNMLIKI

SEQ ID NO: 20392 - protein, 28 aa, Artificial Sequence
  Quasi-synthetic sequence derived from human genome
RRPRGSTARTLLRLLLRLLLFLGLLALA

SEQ ID NO: 20393 - protein, 28 aa, Artificial Sequence
  Quasi-synthetic sequence derived from human genome
ALLRLFRMLRIFKLGKYWPTFQILMWSL

SEQ ID NO: 20394 - protein, 28 aa, Artificial Sequence
  Quasi-synthetic sequence derived from human genome
ARKHLNKLRNIRYGFNTILVILIWRIFI

SEQ ID NO: 20395 - protein, 28 aa, Artificial Sequence
  Quasi-synthetic sequence derived from human genome
VRRTMNIVPRTKVKTIKMFLILNLLFLL

SEQ ID NO: 20396 - protein, 28 aa, Artificial Sequence
  Quasi-synthetic sequence derived from human genome
HIRLRLSKLRRCVQWLKVMGLFAFVVLC

SEQ ID NO: 20397 - protein, 28 aa, Artificial Sequence
  Quasi-synthetic sequence derived from human genome
MCKNMRVLSRTSKFRRLRELLRRRKKRR

SEQ ID NO: 20398 - protein, 28 aa, Artificial Sequence
  Quasi-synthetic sequence derived from human genome
MVLQRRKFLQMKRRKYGFIYKTHLFGRP

SEQ ID NO: 20399 - protein, 28 aa, Artificial Sequence
  Quasi-synthetic sequence derived from human genome
RAFFGLKVALIFPVLVLLTVFIFVVRKK

SEQ ID NO: 20400 - protein, 28 aa, Artificial Sequence
  Quasi-synthetic sequence derived from human genome
FWRIEVVNRKFGNRIKVLRSRIRFIHLV

SEQ ID NO: 20401 - protein, 28 aa, Artificial Sequence
  Quasi-synthetic sequence derived from human genome
RPKGFTRFRSAVRVSIAISRMKFLVRRW

SEQ ID NO: 20402 - protein, 28 aa, Artificial Sequence
  Quasi-synthetic sequence derived from human genome
RYLQRLLLVHGRWSYFRMCKFLCYFFYK

SEQ ID NO: 20403 - protein, 28 aa, Artificial Sequence
  Quasi-synthetic sequence derived from human genome
LVIVGLTFAVYVRRKSIKKKRALRRFLE

SEQ ID NO: 20404 - protein, 28 aa, Artificial Sequence
  Quasi-synthetic sequence derived from human genome
WRRLPRELKIRVRKLQKERITILLPKRP

SEQ ID NO: 20405 - protein, 28 aa, Artificial Sequence
  Quasi-synthetic sequence derived from human genome
LRRNFMNIRPVKLKNLILLVKHWYRQVA

SEQ ID NO: 20406 - protein, 28 aa, Artificial Sequence
  Quasi-synthetic sequence derived from human genome
LTMVGKIKRLKKSAFVVLILLITAKLLV

SEQ ID NO: 20407 - protein, 28 aa, Artificial Sequence
  Quasi-synthetic sequence derived from human genome
FVLFLRLRSIRCLRNIIHWNLISAFILR

SEQ ID NO: 20408 - protein, 28 aa, Artificial Sequence
  Quasi-synthetic sequence derived from human genome
LTFQWRFYLSFRKLMRWILILVIALWFI

SEQ ID NO: 20409 - protein, 28 aa, Artificial Sequence
  Quasi-synthetic sequence derived from human genome
LQVIHNRYKPLRRRVIWLIGQWISVKFK

SEQ ID NO: 20410 - protein, 28 aa, Artificial Sequence
  Quasi-synthetic sequence derived from human genome
RLKIKQILPTIYKRKNLSLFLSISLLIF

SEQ ID NO: 20411 - protein, 28 aa, Artificial Sequence
  Quasi-synthetic sequence derived from human genome
RRLRKNLRALVVVHATWYVKAFLALLRP

SEQ ID NO: 20412 - protein, 28 aa, Artificial Sequence
  Quasi-synthetic sequence derived from human genome
LLALALLAWCRRSRGLKALRLCRALALL

SEQ ID NO: 20413 - protein, 28 aa, Artificial Sequence
  Quasi-synthetic sequence derived from human genome
LGLIAFDRFLKIIRPLRNIFLKKPVFAK

SEQ ID NO: 20414 - protein, 28 aa, Artificial Sequence
  Quasi-synthetic sequence derived from human genome
LCCRRRRARLRFMKQKFNIVCLKISGFT

SEQ ID NO: 20415 - protein, 28 aa, Artificial Sequence
  Quasi-synthetic sequence derived from human genome
NVYLIVILVSFGLFMYAKRNKRRIMRIF

SEQ ID NO: 20416 - protein, 28 aa, Artificial Sequence
  Quasi-synthetic sequence derived from human genome
LLKLNQLKFRKKKLRFGRSRIHEWGLFA

SEQ ID NO: 20417 - protein, 28 aa, Artificial Sequence
  Quasi-synthetic sequence derived from human genome
LKLKPVATRFPRKAWRQKRSSVLKPLLI

SEQ ID NO: 20418 - protein, 28 aa, Artificial Sequence
  Quasi-synthetic sequence derived from human genome
LLRCRNEKKRHRAVRLIFTIMIVYFLFW

SEQ ID NO: 20419 - protein, 28 aa, Artificial Sequence
  Quasi-synthetic sequence derived from human genome
SVLRSFRLLRVFKLAKSWPTLNMLIKII

SEQ ID NO: 20420 - protein, 28 aa, Artificial Sequence
  Quasi-synthetic sequence derived from human genome
RRSSRRLFFCSLWHLPLLLLLMLTCKRP

SEQ ID NO: 20421 - protein, 28 aa, Artificial Sequence
  Quasi-synthetic sequence derived from human genome
FKNLFYRTYMLFKNASGKRRFLLCLLLF

SEQ ID NO: 20422 - protein, 28 aa, Artificial Sequence
  Quasi-synthetic sequence derived from human genome
YVILGFCGLTALYFLIRAFRLKKPQRRR

SEQ ID NO: 20423 - protein, 28 aa, Artificial Sequence
  Quasi-synthetic sequence derived from human genome
LVWVPIIKKKQKHRQKSNFLRSLKSFFL

SEQ ID NO: 20424 - protein, 28 aa, Artificial Sequence
  Quasi-synthetic sequence derived from human genome
RRPSARCARRRRPGLLLPGLWLLLLARP

SEQ ID NO: 20425 - protein, 28 aa, Artificial Sequence
  Quasi-synthetic sequence derived from human genome
VIFCYLRIWILVLQVRQRVKPDRKPKLK

SEQ ID NO: 20426 - protein, 28 aa, Artificial Sequence
  Quasi-synthetic sequence derived from human genome
ILGVVLLAIFVALFFLTKKRRQRQRLAV

SEQ ID NO: 20427 - protein, 28 aa, Artificial Sequence
  Quasi-synthetic sequence derived from human genome
VMHRNVRYNCRVIFLNRKILLIRPKMAL

SEQ ID NO: 20428 - protein, 28 aa, Artificial Sequence
  Quasi-synthetic sequence derived from human genome
CNKAFRDTFRLLLLCRWDKRRWRKIPKR

SEQ ID NO: 20429 - protein, 28 aa, Artificial Sequence
  Quasi-synthetic sequence derived from human genome
AKLLFTPQHKMLRLRLPNLKMVRLRVSF

SEQ ID NO: 20430 - protein, 28 aa, Artificial Sequence
  Quasi-synthetic sequence derived from human genome
LLKIANFSNLLFLHLKRRVRSVILVILL

SEQ ID NO: 20431 - protein, 28 aa, Artificial Sequence
  Quasi-synthetic sequence derived from human genome
LWSRMLKDNKKNWRRVYKSLLLLAYLIR

SEQ ID NO: 20432 - protein, 28 aa, Artificial Sequence
  Quasi-synthetic sequence derived from human genome
LKLLCRDKIRLNNAIWRAWYIQYVKRRK

SEQ ID NO: 20433 - protein, 28 aa, Artificial Sequence
  Quasi-synthetic sequence derived from human genome
LRALLVVVNALLRKRRYHAALAVLKGFR

SEQ ID NO: 20434 - protein, 28 aa, Artificial Sequence
  Quasi-synthetic sequence derived from human genome
MVFFLINPTKTFYYKSRFWLLKLLFRVF

SEQ ID NO: 20435 - protein, 28 aa, Artificial Sequence
  Quasi-synthetic sequence derived from human genome
KGTMRRMALSMIERRKRWRTIKLLLRRG

SEQ ID NO: 20436 - protein, 28 aa, Artificial Sequence
  Quasi-synthetic sequence derived from human genome
LARMRYKRTKAALTIIRYYRRYKVKSYI

SEQ ID NO: 20437 - protein, 28 aa, Artificial Sequence
  Quasi-synthetic sequence derived from human genome
RRPWGAWLSARLWKWLKSPRSWRLGLAL

SEQ ID NO: 20438 - protein, 28 aa, Artificial Sequence
  Quasi-synthetic sequence derived from human genome
YLRKRFGGIRIPIILAVLYLFIYIFTKI

SEQ ID NO: 20439 - protein, 28 aa, Artificial Sequence
  Quasi-synthetic sequence derived from human genome
KAAVTLQRAALKFLAKCRKKKKLFAPWR

SEQ ID NO: 20440 - protein, 28 aa, Artificial Sequence
  Quasi-synthetic sequence derived from human genome
TFRLMRVLKLVRFLPALQRQLVVLMKTM

SEQ ID NO: 20441 - protein, 28 aa, Artificial Sequence
  Quasi-synthetic sequence derived from human genome
MALVRGGWLWRQSSILRRWKRNWFALWL

SEQ ID NO: 20442 - protein, 28 aa, Artificial Sequence
  Quasi-synthetic sequence derived from human genome
VVVFLFLILIRRALSASQKKKVIIAALR

SEQ ID NO: 20443 - protein, 28 aa, Artificial Sequence
  Quasi-synthetic sequence derived from human genome
YLARRRIRLWHRGAMVIQATWRGYRVRR

SEQ ID NO: 20444 - protein, 28 aa, Artificial Sequence
  Quasi-synthetic sequence derived from human genome
KKAIKYQSKARRKKWIIIAVSVVLVAII

SEQ ID NO: 20445 - protein, 28 aa, Artificial Sequence
  Quasi-synthetic sequence derived from human genome
RYFAICFPLRAKVVVTKGRVKLVIFVIW

SEQ ID NO: 20446 - protein, 28 aa, Artificial Sequence
  Quasi-synthetic sequence derived from human genome
LLQAFGYRLRRVIAAFYFPKREKKRILF

SEQ ID NO: 20447 - protein, 28 aa, Artificial Sequence
  Quasi-synthetic sequence derived from human genome
WLLLRKAPGGFMGPRWRRRWFVLKGHTL

SEQ ID NO: 20448 - protein, 28 aa, Artificial Sequence
  Quasi-synthetic sequence derived from human genome
RVAWVWLLVLEKWLAREKKLLPVVFRRK

SEQ ID NO: 20449 - protein, 28 aa, Artificial Sequence
  Quasi-synthetic sequence derived from human genome
RLPPILIIHLKRFQFVNGRWIKSQKIVK

SEQ ID NO: 20450 - protein, 28 aa, Artificial Sequence
  Quasi-synthetic sequence derived from human genome
IVILGKIILFLPCISRKLKRIKKGWEKS

SEQ ID NO: 20451 - protein, 28 aa, Artificial Sequence
  Quasi-synthetic sequence derived from human genome
ARLWLHVLPTLPGTLCLRIFRWGPRRRR

SEQ ID NO: 20452 - protein, 28 aa, Artificial Sequence
  Quasi-synthetic sequence derived from human genome
KVLRFLRLFGPGKNVPSVWRSARRKRKK

SEQ ID NO: 20453 - protein, 28 aa, Artificial Sequence
  Quasi-synthetic sequence derived from human genome
FIRPKLVTIIRSGVKPRKAVRILLNKKT

SEQ ID NO: 20454 - protein, 28 aa, Artificial Sequence
  Quasi-synthetic sequence derived from human genome
FFIFLKILKLLISKLKAHQMCFRDYKYR

SEQ ID NO: 20455 - protein, 28 aa, Artificial Sequence
  Quasi-synthetic sequence derived from human genome
CCFFSTLVLLLSIAIFQRQKRRKFWKAK

SEQ ID NO: 20456 - protein, 28 aa, Artificial Sequence
  Quasi-synthetic sequence derived from human genome
LVFFVSRKRRILISGSRRRDVIKSIVKI

SEQ ID NO: 20457 - protein, 28 aa, Artificial Sequence
  Quasi-synthetic sequence derived from human genome
RNFLLTMRPFLKRAILVLSYVLVILYFR

SEQ ID NO: 20458 - protein, 28 aa, Artificial Sequence
  Quasi-synthetic sequence derived from human genome
VVALGIGLFMRRRHIVRKRTLRRLLQER

SEQ ID NO: 20459 - protein, 28 aa, Artificial Sequence
  Quasi-synthetic sequence derived from human genome
KTRALMALKKRTKDKLFQFLKLRKYSIK

SEQ ID NO: 20460 - protein, 28 aa, Artificial Sequence
  Quasi-synthetic sequence derived from human genome
FVALLWKRLLIARRSRKGFFAQIVLPAV

SEQ ID NO: 20461 - protein, 28 aa, Artificial Sequence
  Quasi-synthetic sequence derived from human genome
FRLFRVMRLVKLLSRGEGIRTLLWTFIK

SEQ ID NO: 20462 - protein, 28 aa, Artificial Sequence
  Quasi-synthetic sequence derived from human genome
MLGSLVLRRKALAPRLLLRLLRSPTLRG

SEQ ID NO: 20463 - protein, 28 aa, Artificial Sequence
  Quasi-synthetic sequence derived from human genome
KKLKKSIKIIFIVVAAFLVSWLPFNTFK

SEQ ID NO: 20464 - protein, 28 aa, Artificial Sequence
  Quasi-synthetic sequence derived from human genome
ARTRAGAARVARWRRLRLQQLRRLRGLL

SEQ ID NO: 20465 - protein, 28 aa, Artificial Sequence
  Quasi-synthetic sequence derived from human genome
KMCICFSFCLWFVLQVLIVVLRIVRYRK

SEQ ID NO: 20466 - protein, 28 aa, Artificial Sequence
  Quasi-synthetic sequence derived from human genome
MGIFLAFFVVVSLVCLILLVKIKLKQRR

SEQ ID NO: 20467 - protein, 28 aa, Artificial Sequence
  Quasi-synthetic sequence derived from human genome
LYAFIGQKFRNYFLKILKDLWCVRRKYK

SEQ ID NO: 20468 - protein, 28 aa, Artificial Sequence
  Quasi-synthetic sequence derived from human genome
SAFRLQRALRFLLGRLPWRVASGARRFR

SEQ ID NO: 20469 - protein, 28 aa, Artificial Sequence
  Quasi-synthetic sequence derived from human genome
RLLVKLYRFLARRTNSTFNQVVLKRLFM

SEQ ID NO: 20470 - protein, 28 aa, Artificial Sequence
  Quasi-synthetic sequence derived from human genome
RRLGLALGLLLALVLAPRVLRAKPTVRK

SEQ ID NO: 20471 - protein, 28 aa, Artificial Sequence
  Quasi-synthetic sequence derived from human genome
RCFLKLTVNRVIWKIAKPPTCVLVRVRW

SEQ ID NO: 20472 - protein, 28 aa, Artificial Sequence
  Quasi-synthetic sequence derived from human genome
RTRLILFVLLLFGIYGLLKNPFLSVRFR

SEQ ID NO: 20473 - protein, 28 aa, Artificial Sequence
  Quasi-synthetic sequence derived from human genome
IFSIAFITVLIFKVYMFKCVWRCYRLIK

SEQ ID NO: 20474 - protein, 28 aa, Artificial Sequence
  Quasi-synthetic sequence derived from human genome
KKWCRSILRRTSLILARVFGLHLRLTSL

SEQ ID NO: 20475 - protein, 28 aa, Artificial Sequence
  Quasi-synthetic sequence derived from human genome
RKRCLYLFVLLLLIILVVNLALTIWILK

SEQ ID NO: 20476 - protein, 28 aa, Artificial Sequence
  Quasi-synthetic sequence derived from human genome
SRRPRRRLGSLRWCGRRRLRWRLLQAQA

SEQ ID NO: 20477 - protein, 28 aa, Artificial Sequence
  Quasi-synthetic sequence derived from human genome
LRAWKRIFWRQILLTLGLLGLFLYGLPK

SEQ ID NO: 20478 - protein, 28 aa, Artificial Sequence
  Quasi-synthetic sequence derived from human genome
LFIVLILVGYISVKVMLKSIKTRLGRRV

SEQ ID NO: 20479 - protein, 28 aa, Artificial Sequence
  Quasi-synthetic sequence derived from human genome
FLKIANFSNSIFLYLKWRVKKVVLVLLL

SEQ ID NO: 20480 - protein, 28 aa, Artificial Sequence
  Quasi-synthetic sequence derived from human genome
FRKRRQCTFRTFTRIFSAKRLVSILNKL

SEQ ID NO: 20481 - protein, 28 aa, Artificial Sequence
  Quasi-synthetic sequence derived from human genome
AAKKAGLLMALARLCFLLGRLCSRRLKL

SEQ ID NO: 20482 - protein, 28 aa, Artificial Sequence
  Quasi-synthetic sequence derived from human genome
FKRAFVRILGCQCRGRGRRRRRRRRRLG

SEQ ID NO: 20483 - protein, 28 aa, Artificial Sequence
  Quasi-synthetic sequence derived from human genome
CYRHLKTKRILRRNLLALIHRMIEFVVR

SEQ ID NO: 20484 - protein, 28 aa, Artificial Sequence
  Quasi-synthetic sequence derived from human genome
CWWIFISLTQTMKLLKLRRNIVKLSLYR

SEQ ID NO: 20485 - protein, 28 aa, Artificial Sequence
  Quasi-synthetic sequence derived from human genome
LLRKRRFQLGRSMNPRARKNRSRIPLLR

SEQ ID NO: 20486 - protein, 28 aa, Artificial Sequence
  Quasi-synthetic sequence derived from human genome
LVIRNLQRVIPIRRAPLRSKIEIVRRIL

SEQ ID NO: 20487 - protein, 28 aa, Artificial Sequence
  Quasi-synthetic sequence derived from human genome
IILALVLLVVLLVVCGPLAYKKLVKKFR

SEQ ID NO: 20488 - protein, 28 aa, Artificial Sequence
  Quasi-synthetic sequence derived from human genome
MRIFRPWRLRCPALHLPSLSVFSLRWKL

SEQ ID NO: 20489 - protein, 28 aa, Artificial Sequence
  Quasi-synthetic sequence derived from human genome
WRRAPLRRGVGSSPRARRLMRPLWLLLA

SEQ ID NO: 20490 - protein, 28 aa, Artificial Sequence
  Quasi-synthetic sequence derived from human genome
ALPFFCFLLGKCFKKGLKGKGFVLLVKL

SEQ ID NO: 20491 - protein, 28 aa, Artificial Sequence
  Quasi-synthetic sequence derived from human genome
RPFLAFCRRHVRAARPVPWNALLRRRAR

SEQ ID NO: 20492 - protein, 28 aa, Artificial Sequence
  Quasi-synthetic sequence derived from human genome
KRKKNVLRLCCKKLKIFAMPMQDIKMIL

SEQ ID NO: 20493 - protein, 28 aa, Artificial Sequence
  Quasi-synthetic sequence derived from human genome
RMKLVLRWYLSGFYKKPKGIKKPYNPIL

SEQ ID NO: 20494 - protein, 28 aa, Artificial Sequence
  Quasi-synthetic sequence derived from human genome
LAILLVVAVFCILWNWNKRKKRQVPYLR

SEQ ID NO: 20495 - protein, 28 aa, Artificial Sequence
  Quasi-synthetic sequence derived from human genome
KYLTILKAVKVLQASFRGVRVRRTLRKM

SEQ ID NO: 20496 - protein, 28 aa, Artificial Sequence
  Quasi-synthetic sequence derived from human genome
RMVRAATLIQALWKGYLVRSLLRSKKKR

SEQ ID NO: 20497 - protein, 28 aa, Artificial Sequence
  Quasi-synthetic sequence derived from human genome
KIYRGWKCRTHFLLMKKSQIVIAAWYRR

SEQ ID NO: 20498 - protein, 28 aa, Artificial Sequence
  Quasi-synthetic sequence derived from human genome
KQNIFHFLYRKNRSRIPLLRKRWFQLGH

SEQ ID NO: 20499 - protein, 28 aa, Artificial Sequence
  Quasi-synthetic sequence derived from human genome
FLKLFICFIFIRSSPTIVSNKRVSKRKF

SEQ ID NO: 20500 - protein, 28 aa, Artificial Sequence
  Quasi-synthetic sequence derived from human genome
KLLKYYVLNALKHRPPKAQKKRYLFRSF

SEQ ID NO: 20501 - protein, 28 aa, Artificial Sequence
  Quasi-synthetic sequence derived from human genome
LVRRRRRYALSGSVWKKRTLTWRVRSFP

SEQ ID NO: 20502 - protein, 28 aa, Artificial Sequence
  Quasi-synthetic sequence derived from human genome
RKRYRRKLKKYGKNVGKVIIKGCRYVVI

SEQ ID NO: 20503 - protein, 28 aa, Artificial Sequence
  Quasi-synthetic sequence derived from human genome
MPYFTRLILFLFCLMVLVESRKPKRKRW

SEQ ID NO: 20504 - protein, 28 aa, Artificial Sequence
  Quasi-synthetic sequence derived from human genome
LVALLLVVLWIRWKCRRLRIREAWLLGT

SEQ ID NO: 20505 - protein, 28 aa, Artificial Sequence
  Quasi-synthetic sequence derived from human genome
ARVRLQLKIILCFSPVGRTLRVRARKFP

SEQ ID NO: 20506 - protein, 28 aa, Artificial Sequence
  Quasi-synthetic sequence derived from human genome
KKLPGVMLFKKKKTRKLKIALALSDLVI

SEQ ID NO: 20507 - protein, 28 aa, Artificial Sequence
  Quasi-synthetic sequence derived from human genome
LLIPYLLGRKRRWSKCKIRVFVGGQINR

SEQ ID NO: 20508 - protein, 28 aa, Artificial Sequence
  Quasi-synthetic sequence derived from human genome
LRKLGVKLVQRLGLTFLKPKVAAWRYQR

SEQ ID NO: 20509 - protein, 28 aa, Artificial Sequence
  Quasi-synthetic sequence derived from human genome
RYFALVQPFRLTRWRTRYKTIRINLGLW

SEQ ID NO: 20510 - protein, 28 aa, Artificial Sequence
  Quasi-synthetic sequence derived from human genome
RMLKQLKHPNLVNLLEVFRRKRRLHLVF

SEQ ID NO: 20511 - protein, 28 aa, Artificial Sequence
  Quasi-synthetic sequence derived from human genome
KTSAGLKLILKRYKIGASRKTFWKRKKI

SEQ ID NO: 20512 - protein, 28 aa, Artificial Sequence
  Quasi-synthetic sequence derived from human genome
KRAFAKWRRNHNHIWQVLMYARRVFYKI

SEQ ID NO: 20513 - protein, 28 aa, Artificial Sequence
  Quasi-synthetic sequence derived from human genome
ILKRALKVKQAMMQLYVLKLLKVQTKYL

SEQ ID NO: 20514 - protein, 28 aa, Artificial Sequence
  Quasi-synthetic sequence derived from human genome
KFFKRKPKVLGVVRILIALMSLSMGIIM

SEQ ID NO: 20515 - protein, 28 aa, Artificial Sequence
  Quasi-synthetic sequence derived from human genome
LMKKFIRCSTRVTVGTIKKFLSLKLKLP

SEQ ID NO: 20516 - protein, 28 aa, Artificial Sequence
  Quasi-synthetic sequence derived from human genome
KKFLYIKSVFHTLRMAQRRHKRVRTWTR

SEQ ID NO: 20517 - protein, 28 aa, Artificial Sequence
  Quasi-synthetic sequence derived from human genome
IARLRLKKIFSGVFVKVTPQNLKMLRIV

SEQ ID NO: 20518 - protein, 28 aa, Artificial Sequence
  Quasi-synthetic sequence derived from human genome
PLFNPIIYSLRNKQIKVAIKKIMKRIFY

SEQ ID NO: 20519 - protein, 28 aa, Artificial Sequence
  Quasi-synthetic sequence derived from human genome
LRRRQQLARQARMKKATRFIMVVAIVFI

SEQ ID NO: 20520 - protein, 28 aa, Artificial Sequence
  Quasi-synthetic sequence derived from human genome
VLIPLILLVLLLLSVVFLATYYKRKRTK

SEQ ID NO: 20521 - protein, 28 aa, Artificial Sequence
  Quasi-synthetic sequence derived from human genome
WFVNPLKTFVFFIWRRYWRTLVLLLLVL

SEQ ID NO: 20522 - protein, 28 aa, Artificial Sequence
  Quasi-synthetic sequence derived from human genome
LGILGGILALLILILLLLLFLRRRAVVK

SEQ ID NO: 20523 - protein, 28 aa, Artificial Sequence
  Quasi-synthetic sequence derived from human genome
CLSKWKIMMGKKQGLRRRRRRARHSVRW

SEQ ID NO: 20524 - protein, 28 aa, Artificial Sequence
  Quasi-synthetic sequence derived from human genome
MLLFKPLVLRRQYLRRKHLGTLNFGGIR

SEQ ID NO: 20525 - protein, 28 aa, Artificial Sequence
  Quasi-synthetic sequence derived from human genome
FNRGFKAGRNMRRKLFGVLRLKCHSLFL

SEQ ID NO: 20526 - protein, 28 aa, Artificial Sequence
  Quasi-synthetic sequence derived from human genome
KTVLHRIYGKFLGLRAFIRKQINNIFLR

SEQ ID NO: 20527 - protein, 28 aa, Artificial Sequence
  Quasi-synthetic sequence derived from human genome
YRRRPALGWLARLLRSRAGSRKRPLTLL

SEQ ID NO: 20528 - protein, 28 aa, Artificial Sequence
  Quasi-synthetic sequence derived from human genome
MRRFLSKVYSFPMRKLILFLVFPVVRQT

SEQ ID NO: 20529 - protein, 28 aa, Artificial Sequence
  Quasi-synthetic sequence derived from human genome
KIRKALDRLRKKRHLLRRQRTRREFPVI

SEQ ID NO: 20530 - protein, 28 aa, Artificial Sequence
  Quasi-synthetic sequence derived from human genome
MPFGLKLRRTRRYNVLSKNCFVTRIRLL

SEQ ID NO: 20531 - protein, 28 aa, Artificial Sequence
  Quasi-synthetic sequence derived from human genome
IIRIMRVLRIARVLKLLKMATGMRALLD

SEQ ID NO: 20532 - protein, 28 aa, Artificial Sequence
  Quasi-synthetic sequence derived from human genome
RRVVQIFRIMRILRILKLARHSTGLQSL

SEQ ID NO: 20533 - protein, 28 aa, Artificial Sequence
  Quasi-synthetic sequence derived from human genome
LLLQKYIAQRKWKKHFYVVTAANRLRKF

SEQ ID NO: 20534 - protein, 28 aa, Artificial Sequence
  Quasi-synthetic sequence derived from human genome
HLVRLLRLIILIRIFHLLHQKRQLEKLM

SEQ ID NO: 20535 - protein, 28 aa, Artificial Sequence
  Quasi-synthetic sequence derived from human genome
WKHLSVRRFFWWARFIAINTFLFFLFFF

SEQ ID NO: 20536 - protein, 28 aa, Artificial Sequence
  Quasi-synthetic sequence derived from human genome
WQRRLRRAARRQVLSGHLPFCRFRLRYP

SEQ ID NO: 20537 - protein, 28 aa, Artificial Sequence
  Quasi-synthetic sequence derived from human genome
LLRCRNEKKRHRAVRVIFTIMIVYFLFW

SEQ ID NO: 20538 - protein, 28 aa, Artificial Sequence
  Quasi-synthetic sequence derived from human genome
KLAKRLKPLKVRRIKSEKLHLKDFRINL

SEQ ID NO: 20539 - protein, 28 aa, Artificial Sequence
  Quasi-synthetic sequence derived from human genome
LFCLQYLGVRVLLRFQRKLSVLLLLLGR

SEQ ID NO: 20540 - protein, 28 aa, Artificial Sequence
  Quasi-synthetic sequence derived from human genome
LRAPALRRLLPPLLLLLLSLPPRARAKY

SEQ ID NO: 20541 - protein, 28 aa, Artificial Sequence
  Quasi-synthetic sequence derived from human genome
RTLHQRFLAQLRKYFNMRVFRQRTYRIW

SEQ ID NO: 20542 - protein, 28 aa, Artificial Sequence
  Quasi-synthetic sequence derived from human genome
MWTLKRQILILFNIILISKLLGARWFPK

SEQ ID NO: 20543 - protein, 28 aa, Artificial Sequence
  Quasi-synthetic sequence derived from human genome
ALIAILLCIVILLAIVVLYVALRRQKKK

SEQ ID NO: 20544 - protein, 28 aa, Artificial Sequence
  Quasi-synthetic sequence derived from human genome
PIPLTIKAIFERFKNRKKRYKKKKKRRY

SEQ ID NO: 20545 - protein, 28 aa, Artificial Sequence
  Quasi-synthetic sequence derived from human genome
KRKQLLKPVFLNSWIDLRATYKLFYRRK

SEQ ID NO: 20546 - protein, 28 aa, Artificial Sequence
  Quasi-synthetic sequence derived from human genome
FRLKKVVKWYLSGFYKKPKGLKKPYNPI

SEQ ID NO: 20547 - protein, 28 aa, Artificial Sequence
  Quasi-synthetic sequence derived from human genome
RKLLALGTWLLALLLTLPVMLAMRLVRR

SEQ ID NO: 20548 - protein, 28 aa, Artificial Sequence
  Quasi-synthetic sequence derived from human genome
LLRRWKHWLLLLGICCPKPHGRVSSRLR

SEQ ID NO: 20549 - protein, 28 aa, Artificial Sequence
  Quasi-synthetic sequence derived from human genome
RNKLAVITRLLQNLIMGLFLLFFVLRVR

SEQ ID NO: 20550 - protein, 28 aa, Artificial Sequence
  Quasi-synthetic sequence derived from human genome
PCRCRRRVRPSIRLLSPVLSLILLLIAL

SEQ ID NO: 20551 - protein, 28 aa, Artificial Sequence
  Quasi-synthetic sequence derived from human genome
PAWWFMSVKVKLKRKKRQKTPNRKLPRR

SEQ ID NO: 20552 - protein, 28 aa, Artificial Sequence
  Quasi-synthetic sequence derived from human genome
VAFAFTTLLIACLLLRVFRSGKRLKKTR

SEQ ID NO: 20553 - protein, 28 aa, Artificial Sequence
  Quasi-synthetic sequence derived from human genome
RIKKILKEGPMLKNCNSFKRWKLRYFLV

SEQ ID NO: 20554 - protein, 28 aa, Artificial Sequence
  Quasi-synthetic sequence derived from human genome
RWLNKLMKLLQRLPNSVVRRLHRERYKK

SEQ ID NO: 20555 - protein, 28 aa, Artificial Sequence
  Quasi-synthetic sequence derived from human genome
LRQLLRLQRVSRAFRSLVQLHLAGLRRF

SEQ ID NO: 20556 - protein, 28 aa, Artificial Sequence
  Quasi-synthetic sequence derived from human genome
VIILKKWFLKPYKGQTLPGRVLFLRYVV

SEQ ID NO: 20557 - protein, 28 aa, Artificial Sequence
  Quasi-synthetic sequence derived from human genome
LLVLLLHKHRSILLRRLCSLMGTVFLLR

SEQ ID NO: 20558 - protein, 28 aa, Artificial Sequence
  Quasi-synthetic sequence derived from human genome
RKRLHFKLCKKSSILVHKLLDKLLVLCP

SEQ ID NO: 20559 - protein, 28 aa, Artificial Sequence
  Quasi-synthetic sequence derived from human genome
RLLFFLLGFLRIRVRGQRASRLQAPVLV

SEQ ID NO: 20560 - protein, 28 aa, Artificial Sequence
  Quasi-synthetic sequence derived from human genome
PRASGRCVIAPVRAVLRLRRRVCVLRKR

SEQ ID NO: 20561 - protein, 28 aa, Artificial Sequence
  Quasi-synthetic sequence derived from human genome
LLRKRRFQLYRSTNPRARKNRSRIPLLR

SEQ ID NO: 20562 - protein, 28 aa, Artificial Sequence
  Quasi-synthetic sequence derived from human genome
LAVRTVIRAFVKCTKARYLKKKNMRTLW

SEQ ID NO: 20563 - protein, 28 aa, Artificial Sequence
  Quasi-synthetic sequence derived from human genome
MKWRRKSAYWKALKVFKLPVEFLLLLTV

SEQ ID NO: 20564 - protein, 28 aa, Artificial Sequence
  Quasi-synthetic sequence derived from human genome
PRARRRRPLFALLLLCALLARLQVALQI

SEQ ID NO: 20565 - protein, 28 aa, Artificial Sequence
  Quasi-synthetic sequence derived from human genome
KFRAKGRKPCKLMLQVVKILVVTVQLIL

SEQ ID NO: 20566 - protein, 28 aa, Artificial Sequence
  Quasi-synthetic sequence derived from human genome
KLEAHWRGALARKAIQRRKWAVRIIRKF

SEQ ID NO: 20567 - protein, 28 aa, Artificial Sequence
  Quasi-synthetic sequence derived from human genome
LKSMLRLLLVKKPSVRSLALKLLAFHLT

SEQ ID NO: 20568 - protein, 28 aa, Artificial Sequence
  Quasi-synthetic sequence derived from human genome
LKRIYGKYLRAESFRKALIYQKKYLLLL

SEQ ID NO: 20569 - protein, 28 aa, Artificial Sequence
  Quasi-synthetic sequence derived from human genome
LASQKVKKIWQKQFRWPKNRLQILKFCK

SEQ ID NO: 20570 - protein, 28 aa, Artificial Sequence
  Quasi-synthetic sequence derived from human genome
RKRCLYFFVLLLMILILVNLAMTIWILK

SEQ ID NO: 20571 - protein, 28 aa, Artificial Sequence
  Quasi-synthetic sequence derived from human genome
MYGYFAGLCRRLQKFWRVTVKGFFVKKK

SEQ ID NO: 20572 - protein, 28 aa, Artificial Sequence
  Quasi-synthetic sequence derived from human genome
RFKRSKKIMPAGLVAGLSLMMILRLVLL

SEQ ID NO: 20573 - protein, 28 aa, Artificial Sequence
  Quasi-synthetic sequence derived from human genome
RVRVLSVARPGLWLYTHPLIKLLFLPRR

SEQ ID NO: 20574 - protein, 28 aa, Artificial Sequence
  Quasi-synthetic sequence derived from human genome
LARFLLKRGLRNKRIGHFLFWFLRSEIA

SEQ ID NO: 20575 - protein, 28 aa, Artificial Sequence
  Quasi-synthetic sequence derived from human genome
LIRIRKLTLKRQRKLVPLSKKVERREKR

SEQ ID NO: 20576 - protein, 28 aa, Artificial Sequence
  Quasi-synthetic sequence derived from human genome
LTKPQSVAIKRKRPFVLKKKRGRKRRRI

SEQ ID NO: 20577 - protein, 28 aa, Artificial Sequence
  Quasi-synthetic sequence derived from human genome
RKLKHRLRLDSYLLKPVQRITKYQLLLK

SEQ ID NO: 20578 - protein, 28 aa, Artificial Sequence
  Quasi-synthetic sequence derived from human genome
QRINSANFLKKVRRLIMKRIVKISKCNL

SEQ ID NO: 20579 - protein, 28 aa, Artificial Sequence
  Quasi-synthetic sequence derived from human genome
ILSLLLVFIMSVFVAAGLFVLVMKRRKK

SEQ ID NO: 20580 - protein, 28 aa, Artificial Sequence
  Quasi-synthetic sequence derived from human genome
KLLAKIAKLQRRIKTVLLFQRNCLKPNM

SEQ ID NO: 20581 - protein, 28 aa, Artificial Sequence
  Quasi-synthetic sequence derived from human genome
IKRRKTKPVLSIRMKKLTERTSVRILFF

SEQ ID NO: 20582 - protein, 28 aa, Artificial Sequence
  Quasi-synthetic sequence derived from human genome
RKVKLLNQVRLLRVQLCHMKNMFKTCRL

SEQ ID NO: 20583 - protein, 28 aa, Artificial Sequence
  Quasi-synthetic sequence derived from human genome
WWRGTLGRRKAAKRKWAAQTIRRLIRGF

SEQ ID NO: 20584 - protein, 28 aa, Artificial Sequence
  Quasi-synthetic sequence derived from human genome
KQFYRLGGFRVCHKLIFMIIQKLFRSHK

SEQ ID NO: 20585 - protein, 28 aa, Artificial Sequence
  Quasi-synthetic sequence derived from human genome
FYLAFVFCLALGLLQAIKLYLRRQRLLR

SEQ ID NO: 20586 - protein, 28 aa, Artificial Sequence
  Quasi-synthetic sequence derived from human genome
ELKKKLFKRRRVLNRERRLRHRVVGAVI

SEQ ID NO: 20587 - protein, 28 aa, Artificial Sequence
  Quasi-synthetic sequence derived from human genome
INAALPINPTIIRIMRVLRIARVLKLLK

SEQ ID NO: 20588 - protein, 28 aa, Artificial Sequence
  Quasi-synthetic sequence derived from human genome
ILYNLISKKYRAAAFKLLLARKSRPRGF

SEQ ID NO: 20589 - protein, 28 aa, Artificial Sequence
  Quasi-synthetic sequence derived from human genome
RRRQAGRRLRYLPTGSFPFLLLLLLLCI

SEQ ID NO: 20590 - protein, 28 aa, Artificial Sequence
  Quasi-synthetic sequence derived from human genome
RVRRGISRLWLRVLLRLSPMAFRALQGC

SEQ ID NO: 20591 - protein, 28 aa, Artificial Sequence
  Quasi-synthetic sequence derived from human genome
KKIFCCLFFITLFFIRLLSYMFFHVRFI

SEQ ID NO: 20592 - protein, 28 aa, Artificial Sequence
  Quasi-synthetic sequence derived from human genome
RLKTLRRPRVRDRLPILLQRRMRVKELA

SEQ ID NO: 20593 - protein, 28 aa, Artificial Sequence
  Quasi-synthetic sequence derived from human genome
KRIHLLTRRNFLLGKWIIFSGQMFGRIL

SEQ ID NO: 20594 - protein, 28 aa, Artificial Sequence
  Quasi-synthetic sequence derived from human genome
VTNVLIFFWCLAFLWGLLILLKYRWRKL

SEQ ID NO: 20595 - protein, 28 aa, Artificial Sequence
  Quasi-synthetic sequence derived from human genome
LIPYLHFLIFLFILRCLEMNCRKKLMRK

SEQ ID NO: 20596 - protein, 28 aa, Artificial Sequence
  Quasi-synthetic sequence derived from human genome
RRLRKNLKSLIIVHPSWFIRTLLAVTRP

SEQ ID NO: 20597 - protein, 28 aa, Artificial Sequence
  Quasi-synthetic sequence derived from human genome
KICAFLLRKKRFGQWTKLLCVIKDTKLL

SEQ ID NO: 20598 - protein, 28 aa, Artificial Sequence
  Quasi-synthetic sequence derived from human genome
KKWNSCVRRRKWIRYRRYKSRDIWAKIP

SEQ ID NO: 20599 - protein, 28 aa, Artificial Sequence
  Quasi-synthetic sequence derived from human genome
KTLKYLLLGRWRKKHLTFRILNLPSTLP

SEQ ID NO: 20600 - protein, 28 aa, Artificial Sequence
  Quasi-synthetic sequence derived from human genome
KIIRTIFKRLKSFICPKLHMGFKSSLRS

SEQ ID NO: 20601 - protein, 28 aa, Artificial Sequence
  Quasi-synthetic sequence derived from human genome
LKKKLLPWQRRGLLRAQGLRGWKARRAT

SEQ ID NO: 20602 - protein, 28 aa, Artificial Sequence
  Quasi-synthetic sequence derived from human genome
RRSLVKFRSLVHAYVSRRRYLKLRAEWR

SEQ ID NO: 20603 - protein, 28 aa, Artificial Sequence
  Quasi-synthetic sequence derived from human genome
LRENVLVKRKRTKGKKLLLSIGVLLHKW

SEQ ID NO: 20604 - protein, 28 aa, Artificial Sequence
  Quasi-synthetic sequence derived from human genome
TRLPIRMAKALGKRTAKYRWFAVLYLLV

SEQ ID NO: 20605 - protein, 28 aa, Artificial Sequence
  Quasi-synthetic sequence derived from human genome
IGVSVAFVLLLFLLLFLLLRRQRHSKHR

SEQ ID NO: 20606 - protein, 28 aa, Artificial Sequence
  Quasi-synthetic sequence derived from human genome
VVLKRLFMSRTNRPPLSLSRMIRKMKLP

SEQ ID NO: 20607 - protein, 28 aa, Artificial Sequence
  Quasi-synthetic sequence derived from human genome
ALLWRGRIPGRQWIGKHRRPRFVSLRAK

SEQ ID NO: 20608 - protein, 28 aa, Artificial Sequence
  Quasi-synthetic sequence derived from human genome
RFSWFCKRRRAFWHTPRLPTLPKRVPRA

SEQ ID NO: 20609 - protein, 28 aa, Artificial Sequence
  Quasi-synthetic sequence derived from human genome
LRYYYNKRILHKTKGKRFTYKFNFSKLI

SEQ ID NO: 20610 - protein, 28 aa, Artificial Sequence
  Quasi-synthetic sequence derived from human genome
VFSKAFLRLVRKLHKCVSQHFLKHYFVR

SEQ ID NO: 20611 - protein, 28 aa, Artificial Sequence
  Quasi-synthetic sequence derived from human genome
KLTKWKHSRTMMLVVFKSAPILKRALKV

SEQ ID NO: 20612 - protein, 28 aa, Artificial Sequence
  Quasi-synthetic sequence derived from human genome
LVPSPKSFVYFIMRIVNFPKCRRRRLQK

SEQ ID NO: 20613 - protein, 28 aa, Artificial Sequence
  Quasi-synthetic sequence derived from human genome
LNLAMVYRYCCKINKKLKSITMLRKKIV

SEQ ID NO: 20614 - protein, 28 aa, Artificial Sequence
  Quasi-synthetic sequence derived from human genome
KLWIGLFLMVCLLCVGIFSWCIWKRKGR

SEQ ID NO: 20615 - protein, 28 aa, Artificial Sequence
  Quasi-synthetic sequence derived from human genome
LIVLRLRHLNINAIRDYSFKRLYRLKVL

SEQ ID NO: 20616 - protein, 28 aa, Artificial Sequence
  Quasi-synthetic sequence derived from human genome
RTRGVGKVPRKKVNVKVFIIIAVFFICF

SEQ ID NO: 20617 - protein, 28 aa, Artificial Sequence
  Quasi-synthetic sequence derived from human genome
LNYRTGVRLRGAILTMAFKKILKLKNIK

SEQ ID NO: 20618 - protein, 28 aa, Artificial Sequence
  Quasi-synthetic sequence derived from human genome
RAQVRRILQRVPGKQRFGIYRFLPFFFV

SEQ ID NO: 20619 - protein, 28 aa, Artificial Sequence
  Quasi-synthetic sequence derived from human genome
YLRGFLARNRYRKILREHKAVIIQKRVR

SEQ ID NO: 20620 - protein, 28 aa, Artificial Sequence
  Quasi-synthetic sequence derived from human genome
KLHNLISKLKKWIKILEAKTKQLPKFFL

SEQ ID NO: 20621 - protein, 28 aa, Artificial Sequence
  Quasi-synthetic sequence derived from human genome
APKQKVKYLTFRFIFALRLSKKQKKKKQ

SEQ ID NO: 20622 - protein, 28 aa, Artificial Sequence
  Quasi-synthetic sequence derived from human genome
RLFFYRKSVWSKLQSIGIRQHLKRVQLR

SEQ ID NO: 20623 - protein, 28 aa, Artificial Sequence
  Quasi-synthetic sequence derived from human genome
KQLRRQMWWRGCKIKAIMALVAAILLLV

SEQ ID NO: 20624 - protein, 28 aa, Artificial Sequence
  Quasi-synthetic sequence derived from human genome
VILQALVRGWLVRKRFLEQRAKIRLLHF

SEQ ID NO: 20625 - protein, 28 aa, Artificial Sequence
  Quasi-synthetic sequence derived from human genome
IPMCLVLLLLALILPLLFYLRKRNKTGK

SEQ ID NO: 20626 - protein, 28 aa, Artificial Sequence
  Quasi-synthetic sequence derived from human genome
LRRILSLLMELKVAAQKNFILKRLFWKT

SEQ ID NO: 20627 - protein, 28 aa, Artificial Sequence
  Quasi-synthetic sequence derived from human genome
LLVFVTSAFTVVGMLVFILRNRKRSKRR

SEQ ID NO: 20628 - protein, 28 aa, Artificial Sequence
  Quasi-synthetic sequence derived from human genome
RRDLLHLCCKKLKILGMPFRNIRSILKM

SEQ ID NO: 20629 - protein, 28 aa, Artificial Sequence
  Quasi-synthetic sequence derived from human genome
FGEKFKLFTLVSACIPVFRLARRRKKIL

SEQ ID NO: 20630 - protein, 28 aa, Artificial Sequence
  Quasi-synthetic sequence derived from human genome
QQAMSLAILRVIRLVRVFRIFKLSRHSK

SEQ ID NO: 20631 - protein, 28 aa, Artificial Sequence
  Quasi-synthetic sequence derived from human genome
IKSNIYPIVLFIRVCEKNIKRFRKLLPR

SEQ ID NO: 20632 - protein, 28 aa, Artificial Sequence
  Quasi-synthetic sequence derived from human genome
PLVRKRRFQLRRCMNPRARKNRSQIVLF

SEQ ID NO: 20633 - protein, 28 aa, Artificial Sequence
  Quasi-synthetic sequence derived from human genome
VATMIFMITKCCLFCFRKLAKTGKKKKR

SEQ ID NO: 20634 - protein, 28 aa, Artificial Sequence
  Quasi-synthetic sequence derived from human genome
LGVVLLLLLLFYVVRYCWLRRQAALQRR

SEQ ID NO: 20635 - protein, 28 aa, Artificial Sequence
  Quasi-synthetic sequence derived from human genome
NPILYGFLSYRFKQGFRRVLLRPSRRVR

SEQ ID NO: 20636 - protein, 28 aa, Artificial Sequence
  Quasi-synthetic sequence derived from human genome
PFILLSHLQLFIKRVVLKTPAKRHKQLK

SEQ ID NO: 20637 - protein, 28 aa, Artificial Sequence
  Quasi-synthetic sequence derived from human genome
KQNIFHFLYGKNRSRIPLLRKRWFQLGR

SEQ ID NO: 20638 - protein, 28 aa, Artificial Sequence
  Quasi-synthetic sequence derived from human genome
LVVIFMMLGGTFLYWRGRRIQNKRAMRR

SEQ ID NO: 20639 - protein, 28 aa, Artificial Sequence
  Quasi-synthetic sequence derived from human genome
LLHLCCKKLKILGMPFRNIRSILKMVNL

SEQ ID NO: 20640 - protein, 28 aa, Artificial Sequence
  Quasi-synthetic sequence derived from human genome
RRLRKNLKSFIIVHPSWFIRTILAVTRP

SEQ ID NO: 20641 - protein, 28 aa, Artificial Sequence
  Quasi-synthetic sequence derived from human genome
ATQTQFFHVKVLNINLKRKFIKKRIIII

SEQ ID NO: 20642 - protein, 28 aa, Artificial Sequence
  Quasi-synthetic sequence derived from human genome
FRCIALRWVRLLGFAIVYGTIILKLYRV

SEQ ID NO: 20643 - protein, 28 aa, Artificial Sequence
  Quasi-synthetic sequence derived from human genome
KVIVVRNRRLGVLYRAVQLLILLYFVWY

SEQ ID NO: 20644 - protein, 28 aa, Artificial Sequence
  Quasi-synthetic sequence derived from human genome
PKMLKMSKGLDARSKRWLKIIWRRHGIW

SEQ ID NO: 20645 - protein, 28 aa, Artificial Sequence
  Quasi-synthetic sequence derived from human genome
MRLKRACIRKAKISAVAFRKAFCHHKLV

SEQ ID NO: 20646 - protein, 28 aa, Artificial Sequence
  Quasi-synthetic sequence derived from human genome
RKLLSLEVRKRRRRSSRLRAMRPKYPVI

SEQ ID NO: 20647 - protein, 28 aa, Artificial Sequence
  Quasi-synthetic sequence derived from human genome
MIKVFLSSLKFHIRRFIFLFFILVIGIY

SEQ ID NO: 20648 - protein, 28 aa, Artificial Sequence
  Quasi-synthetic sequence derived from human genome
WRRFRWAIILFIILFILLLFLAIFIYAF

SEQ ID NO: 20649 - protein, 28 aa, Artificial Sequence
  Quasi-synthetic sequence derived from human genome
AWRRAWPRRRRRLQQVGTVAKLWIYPVK

SEQ ID NO: 20650 - protein, 28 aa, Artificial Sequence
  Quasi-synthetic sequence derived from human genome
VRQIQLLLWKNWTLRKRQKIRFVVELVW

SEQ ID NO: 20651 - protein, 28 aa, Artificial Sequence
  Quasi-synthetic sequence derived from human genome
KKAHKLTSAPLKQNFQKLLKLFYIKKLK

SEQ ID NO: 20652 - protein, 28 aa, Artificial Sequence
  Quasi-synthetic sequence derived from human genome
RCKKLRNGVKYCKVLRLPEILCIHLKRF

SEQ ID NO: 20653 - protein, 28 aa, Artificial Sequence
  Quasi-synthetic sequence derived from human genome
SRFKRSYNYKTIVKKILAKLKRARSKKL

SEQ ID NO: 20654 - protein, 28 aa, Artificial Sequence
  Quasi-synthetic sequence derived from human genome
RRLLRPFFLLQNSSMMKKTLKCIRWSLP

SEQ ID NO: 20655 - protein, 28 aa, Artificial Sequence
  Quasi-synthetic sequence derived from human genome
FIPFFKYCLLRKSFTCWKKNVRLQGLHR

SEQ ID NO: 20656 - protein, 28 aa, Artificial Sequence
  Quasi-synthetic sequence derived from human genome
LLWLALLLSIQRRLPRERKIKYSKLLSM

SEQ ID NO: 20657 - protein, 28 aa, Artificial Sequence
  Quasi-synthetic sequence derived from human genome
WWYRFAHKFLIWNCSPYWIKFKKCIYFI

SEQ ID NO: 20658 - protein, 28 aa, Artificial Sequence
  Quasi-synthetic sequence derived from human genome
RGIRYLLYRAQRAIRLRHALRLHPQLHR

SEQ ID NO: 20659 - protein, 28 aa, Artificial Sequence
  Quasi-synthetic sequence derived from human genome
KKKYPLAKYLCVLLIVAGVALFMYKPKK

SEQ ID NO: 20660 - protein, 28 aa, Artificial Sequence
  Quasi-synthetic sequence derived from human genome
LLLLLLVIVFIPAFWSLKTHPLWRLWKK

SEQ ID NO: 20661 - protein, 28 aa, Artificial Sequence
  Quasi-synthetic sequence derived from human genome
RRLRKNLKSLIIVHPSWFIRTVLAISRP

SEQ ID NO: 20662 - protein, 28 aa, Artificial Sequence
  Quasi-synthetic sequence derived from human genome
FGNYLFRQNRFYDAKVRYKRALLLLRRR

SEQ ID NO: 20663 - protein, 28 aa, Artificial Sequence
  Quasi-synthetic sequence derived from human genome
RSPRIRKRFLLRRILEMLFFTQLQVGLI

SEQ ID NO: 20664 - protein, 28 aa, Artificial Sequence
  Quasi-synthetic sequence derived from human genome
RGRRKKKCKICKLRSFFRKLNTRLMSQR

SEQ ID NO: 20665 - protein, 28 aa, Artificial Sequence
  Quasi-synthetic sequence derived from human genome
RRRRAMRAFRMLLYSKSTSLTFHWKLWG

SEQ ID NO: 20666 - protein, 28 aa, Artificial Sequence
  Quasi-synthetic sequence derived from human genome
ILGGMAFILLVLLCLLLYYCRRKCLKPR

SEQ ID NO: 20667 - protein, 28 aa, Artificial Sequence
  Quasi-synthetic sequence derived from human genome
VMIFKRGVFESRRKNKAVFRPKIRINLR

SEQ ID NO: 20668 - protein, 28 aa, Artificial Sequence
  Quasi-synthetic sequence derived from human genome
PLLRKRRFQLGRSMNLRARKNRSQIVLF

SEQ ID NO: 20669 - protein, 28 aa, Artificial Sequence
  Quasi-synthetic sequence derived from human genome
WVRMWCVRQRYCRLLNAVRIIQVYWRWH

SEQ ID NO: 20670 - protein, 28 aa, Artificial Sequence
  Quasi-synthetic sequence derived from human genome
SVLRSFRLLRVFKLAKSWPTLNTLIKII

SEQ ID NO: 20671 - protein, 28 aa, Artificial Sequence
  Quasi-synthetic sequence derived from human genome
FLRSFRVLRVFKLAKSWPTLNTLIKIIG

SEQ ID NO: 20672 - protein, 28 aa, Artificial Sequence
  Quasi-synthetic sequence derived from human genome
RGGATRAAGVFYPWRFRLLCLLRRWLPR

SEQ ID NO: 20673 - protein, 28 aa, Artificial Sequence
  Quasi-synthetic sequence derived from human genome
IPTLKAAIRAVRILQFRLYKKKFKETLR

SEQ ID NO: 20674 - protein, 28 aa, Artificial Sequence
  Quasi-synthetic sequence derived from human genome
RRCKKRMFKFHQMKHIFEILDKMRCLRK

SEQ ID NO: 20675 - protein, 28 aa, Artificial Sequence
  Quasi-synthetic sequence derived from human genome
ILVLRTALNLFFKLKNFKTAATFARRLL

SEQ ID NO: 20676 - protein, 28 aa, Artificial Sequence
  Quasi-synthetic sequence derived from human genome
WMIVLFLLLVLVVIVVCSIRKSSRTLKK

SEQ ID NO: 20677 - protein, 28 aa, Artificial Sequence
  Quasi-synthetic sequence derived from human genome
AAVSCVFLAFVIVLLVLRLRRWHKSRLL

SEQ ID NO: 20678 - protein, 28 aa, Artificial Sequence
  Quasi-synthetic sequence derived from human genome
KFWARGRKPWKLAIQILKIAMVTIQLVL

SEQ ID NO: 20679 - protein, 28 aa, Artificial Sequence
  Quasi-synthetic sequence derived from human genome
RKVRRKEPKSQDIYLRLLVKLYRFLARR

SEQ ID NO: 20680 - protein, 28 aa, Artificial Sequence
  Quasi-synthetic sequence derived from human genome
KLGLLLLTFLGIVAAVLVKKYQAVLRRK

SEQ ID NO: 20681 - protein, 28 aa, Artificial Sequence
  Quasi-synthetic sequence derived from human genome
VPTLPFPLRKPRKAHKYLRLSRKKFPPR

SEQ ID NO: 20682 - protein, 28 aa, Artificial Sequence
  Quasi-synthetic sequence derived from human genome
AVRPALILILKRLDRMFNKIHKMPTLRR

SEQ ID NO: 20683 - protein, 28 aa, Artificial Sequence
  Quasi-synthetic sequence derived from human genome
MKHSGYLWAIGKNVWKRWKKRFFVLVQV

SEQ ID NO: 20684 - protein, 28 aa, Artificial Sequence
  Quasi-synthetic sequence derived from human genome
LGLFLLALLGLVVKRAVERRKALSRRAR

SEQ ID NO: 20685 - protein, 28 aa, Artificial Sequence
  Quasi-synthetic sequence derived from human genome
FLKRSQQKKKTSPLNFKKRLFLLTVHKL

SEQ ID NO: 20686 - protein, 28 aa, Artificial Sequence
  Quasi-synthetic sequence derived from human genome
IILLIFISLFPEILLIVLKNVRRRSARR

SEQ ID NO: 20687 - protein, 28 aa, Artificial Sequence
  Quasi-synthetic sequence derived from human genome
HLAWLGKWLRKRRIVSGNPRCQKPFFLK

SEQ ID NO: 20688 - protein, 28 aa, Artificial Sequence
  Quasi-synthetic sequence derived from human genome
IFYLLKIANFSNFIFLHLKRRVKSVILV

SEQ ID NO: 20689 - protein, 28 aa, Artificial Sequence
  Quasi-synthetic sequence derived from human genome
IFYLLKIANFSNLIFLHLKRRVKSVILV

SEQ ID NO: 20690 - protein, 28 aa, Artificial Sequence
  Quasi-synthetic sequence derived from human genome
AAVSCVFLAFVILLLALRLRRWHKSRLL

SEQ ID NO: 20691 - protein, 28 aa, Artificial Sequence
  Quasi-synthetic sequence derived from human genome
YFIFDLGCIWRFAWRKSIKKYHAWRSRR

SEQ ID NO: 20692 - protein, 28 aa, Artificial Sequence
  Quasi-synthetic sequence derived from human genome
SQRKQIKRKAPRGFLKRVFKRKKPQLRL

SEQ ID NO: 20693 - protein, 28 aa, Artificial Sequence
  Quasi-synthetic sequence derived from human genome
AHIIRLMLKYQKILWKVPSFLITQVRRM

SEQ ID NO: 20694 - protein, 28 aa, Artificial Sequence
  Quasi-synthetic sequence derived from human genome
VPKLCRIKASKALKKKIRRFQPTALKVM

SEQ ID NO: 20695 - protein, 28 aa, Artificial Sequence
  Quasi-synthetic sequence derived from human genome
LVKMGGKIKSWKKRWFVFDRLKRTLSYY

SEQ ID NO: 20696 - protein, 28 aa, Artificial Sequence
  Quasi-synthetic sequence derived from human genome
LMVVSGAVLVYFVVRTVRMRRRNRKTRR

SEQ ID NO: 20697 - protein, 28 aa, Artificial Sequence
  Quasi-synthetic sequence derived from human genome
PWVYILFRRAVLRRLQPRLSTRPRSLSL

SEQ ID NO: 20698 - protein, 28 aa, Artificial Sequence
  Quasi-synthetic sequence derived from human genome
WKRRIEVVMREYHKWRIYYKKRLRKPSR

SEQ ID NO: 20699 - protein, 28 aa, Artificial Sequence
  Quasi-synthetic sequence derived from human genome
KRRIICLVGLGLVVFFFSFLLSIFRSKY

SEQ ID NO: 20700 - protein, 28 aa, Artificial Sequence
  Quasi-synthetic sequence derived from human genome
KRKHFRLVLRLVLRGGRELGTFHSRLIK

SEQ ID NO: 20701 - protein, 28 aa, Artificial Sequence
  Quasi-synthetic sequence derived from human genome
IVPLVLLVTLITTLVIGLVLCKRKRRTK

SEQ ID NO: 20702 - protein, 28 aa, Artificial Sequence
  Quasi-synthetic sequence derived from human genome
IKNQRSSLRIRLFNFSLKLLSCLLYIIR

SEQ ID NO: 20703 - protein, 28 aa, Artificial Sequence
  Quasi-synthetic sequence derived from human genome
RVFHLSLWRLMKKVQITKPPPNFKFAFR

SEQ ID NO: 20704 - protein, 28 aa, Artificial Sequence
  Quasi-synthetic sequence derived from human genome
RLCIRKFFPKRKCFVFDWPAPKKYLAHL

SEQ ID NO: 20705 - protein, 28 aa, Artificial Sequence
  Quasi-synthetic sequence derived from human genome
IVSTLQRWRLNVLRLNFRGCLLRPKTFR

SEQ ID NO: 20706 - protein, 28 aa, Artificial Sequence
  Quasi-synthetic sequence derived from human genome
INKLIIYLFSQNNRIRFSKLLLKILFYI

SEQ ID NO: 20707 - protein, 28 aa, Artificial Sequence
  Quasi-synthetic sequence derived from human genome
LRRKRKALWAHLFSSLRGYLKSLPRVQV

SEQ ID NO: 20708 - protein, 28 aa, Artificial Sequence
  Quasi-synthetic sequence derived from human genome
FWANSCFHLYRAPYFWIKRRILLLIPKW

SEQ ID NO: 20709 - protein, 28 aa, Artificial Sequence
  Quasi-synthetic sequence derived from human genome
ALLHAALSACIIQCWWRLILSKILKKRR

SEQ ID NO: 20710 - protein, 28 aa, Artificial Sequence
  Quasi-synthetic sequence derived from human genome
FIKYTKLKKIFLQHNCIRHISRKAFFGL

SEQ ID NO: 20711 - protein, 28 aa, Artificial Sequence
  Quasi-synthetic sequence derived from human genome
VLFFLWRSFRSVRSRLYVGREKKLALML

SEQ ID NO: 20712 - protein, 28 aa, Artificial Sequence
  Quasi-synthetic sequence derived from human genome
VLRLMRIFRILKLARHSTGLRSLGATLK

SEQ ID NO: 20713 - protein, 28 aa, Artificial Sequence
  Quasi-synthetic sequence derived from human genome
LFCYCRISRRLRRPPHVGRARRNSLRII

SEQ ID NO: 20714 - protein, 28 aa, Artificial Sequence
  Quasi-synthetic sequence derived from human genome
TLRVFRVFRIFKFSRHSQGLRILGYTLK

SEQ ID NO: 20715 - protein, 28 aa, Artificial Sequence
  Quasi-synthetic sequence derived from human genome
RLLLKFIKIMKHLRKLNNFNSYLAILSA

SEQ ID NO: 20716 - protein, 28 aa, Artificial Sequence
  Quasi-synthetic sequence derived from human genome
RRRLRLGPRGLPLLLSGLLLPLCRAFNL

SEQ ID NO: 20717 - protein, 28 aa, Artificial Sequence
  Quasi-synthetic sequence derived from human genome
GALFLLAGLVAVALVVRKVKLRNLQKKR

SEQ ID NO: 20718 - protein, 28 aa, Artificial Sequence
  Quasi-synthetic sequence derived from human genome
RIRAKLRSYKPRRLFQSVKLHCPKCHLL

SEQ ID NO: 20719 - protein, 28 aa, Artificial Sequence
  Quasi-synthetic sequence derived from human genome
KMRRYKLFLMFCMAGLCLISFLHFFKTL

SEQ ID NO: 20720 - protein, 28 aa, Artificial Sequence
  Quasi-synthetic sequence derived from human genome
SLVPLFCWLRATFWLLATKRRKQQLVLR

SEQ ID NO: 20721 - protein, 28 aa, Artificial Sequence
  Quasi-synthetic sequence derived from human genome
LLGLIILLLWKCGFFKRARTRALYEAKR

SEQ ID NO: 20722 - protein, 28 aa, Artificial Sequence
  Quasi-synthetic sequence derived from human genome
LRRHRLTRKLVVLITPQVSSLLRVILSK

SEQ ID NO: 20723 - protein, 28 aa, Artificial Sequence
  Quasi-synthetic sequence derived from human genome
LLFKKLVGTKVLMASVQGSKRRKLRVYL

SEQ ID NO: 20724 - protein, 28 aa, Artificial Sequence
  Quasi-synthetic sequence derived from human genome
LRLLGQLLRVLARHDLLPHLARKRRRPV

SEQ ID NO: 20725 - protein, 28 aa, Artificial Sequence
  Quasi-synthetic sequence derived from human genome
LLSLKKNKIHSLPDKVFIKYTKLKKIFL

SEQ ID NO: 20726 - protein, 28 aa, Artificial Sequence
  Quasi-synthetic sequence derived from human genome
KKAVKYQSQARKKLIIIIVLVVVLLGIL

SEQ ID NO: 20727 - protein, 28 aa, Artificial Sequence
  Quasi-synthetic sequence derived from human genome
PLFALLSRGRRRRMHVLRRRWDLGSLCR

SEQ ID NO: 20728 - protein, 28 aa, Artificial Sequence
  Quasi-synthetic sequence derived from human genome
RNPVFPRFIKIIEVKNKKLVELLRRKVR

SEQ ID NO: 20729 - protein, 28 aa, Artificial Sequence
  Quasi-synthetic sequence derived from human genome
MRKNMRVLSRTSKFRRRKQLLRRRKKTR

SEQ ID NO: 20730 - protein, 28 aa, Artificial Sequence
  Quasi-synthetic sequence derived from human genome
RYQQLGAGLKVLFKKTHRILRRLFNLCK

SEQ ID NO: 20731 - protein, 28 aa, Artificial Sequence
  Quasi-synthetic sequence derived from human genome
IRASLTFNRGFKAGRNMRRKLFGVLRLK

SEQ ID NO: 20732 - protein, 28 aa, Artificial Sequence
  Quasi-synthetic sequence derived from human genome
ALGKGKGKRWFAFKMMMAKKWAKFLRDF

SEQ ID NO: 20733 - protein, 28 aa, Artificial Sequence
  Quasi-synthetic sequence derived from human genome
FFFIIGLWWCTKSILKYICKKQKRTCYL

SEQ ID NO: 20734 - protein, 28 aa, Artificial Sequence
  Quasi-synthetic sequence derived from human genome
ALLRKINQVLLFLLIVTLCVILYKKVHK

SEQ ID NO: 20735 - protein, 28 aa, Artificial Sequence
  Quasi-synthetic sequence derived from human genome
LKHARHFRGRKNRCYRLAVRTVIRAFVK

SEQ ID NO: 20736 - protein, 28 aa, Artificial Sequence
  Quasi-synthetic sequence derived from human genome
RKKLKDFSGGWRMRVALARALFIRPFML

SEQ ID NO: 20737 - protein, 28 aa, Artificial Sequence
  Quasi-synthetic sequence derived from human genome
VGGTLLVLLLLAGGSLAFILLRVRRRRK

SEQ ID NO: 20738 - protein, 28 aa, Artificial Sequence
  Quasi-synthetic sequence derived from human genome
MLKKRKWPLKGWHKRFFVLDNGMLKYSK

SEQ ID NO: 20739 - protein, 28 aa, Artificial Sequence
  Quasi-synthetic sequence derived from human genome
LACVATVIFIITKFCLFCFWKFARKGKK

SEQ ID NO: 20740 - protein, 28 aa, Artificial Sequence
  Quasi-synthetic sequence derived from human genome
LALFLKIPSDKIRISKIRGKSLRRKRSM

SEQ ID NO: 20741 - protein, 28 aa, Artificial Sequence
  Quasi-synthetic sequence derived from human genome
FPLLKVAVLLLLSYVLLRCRHAVRQRFL

SEQ ID NO: 20742 - protein, 28 aa, Artificial Sequence
  Quasi-synthetic sequence derived from human genome
LISSLAILLMVSLLLLSLWKLWRVKKFL

SEQ ID NO: 20743 - protein, 28 aa, Artificial Sequence
  Quasi-synthetic sequence derived from human genome
LLRQFKIFSDFRMNKAFVTWKLNVKRIK

SEQ ID NO: 20744 - protein, 28 aa, Artificial Sequence
  Quasi-synthetic sequence derived from human genome
LIYRMIKPRIVLLIFVSGKVVLTGAKVR

SEQ ID NO: 20745 - protein, 28 aa, Artificial Sequence
  Quasi-synthetic sequence derived from human genome
KLLKKIGISWNKKYRKQHGPLRKFLQLH

SEQ ID NO: 20746 - protein, 28 aa, Artificial Sequence
  Quasi-synthetic sequence derived from human genome
KIMVRRCLVTLRPFRLFVLGIGFFTLCF

SEQ ID NO: 20747 - protein, 28 aa, Artificial Sequence
  Quasi-synthetic sequence derived from human genome
LLTMRPFLKRAILVLSYVLVILYFRLWI

SEQ ID NO: 20748 - protein, 28 aa, Artificial Sequence
  Quasi-synthetic sequence derived from human genome
LRIQNWLSAKVRKQLRLKPFYLVPKHAK

SEQ ID NO: 20749 - protein, 28 aa, Artificial Sequence
  Quasi-synthetic sequence derived from human genome
FFIALVFFLYRRRKGSRKDVTLRKLDIK

SEQ ID NO: 20750 - protein, 28 aa, Artificial Sequence
  Quasi-synthetic sequence derived from human genome
RALHIRKLLLTLPRSVLIVMRYLFAFLN

SEQ ID NO: 20751 - protein, 28 aa, Artificial Sequence
  Quasi-synthetic sequence derived from human genome
WRRRKSLWLALSASWLLLVLLGGFSLLR

SEQ ID NO: 20752 - protein, 28 aa, Artificial Sequence
  Quasi-synthetic sequence derived from human genome
AVLAPLKPALWTRLRTLRAPELRRLRRR

SEQ ID NO: 20753 - protein, 28 aa, Artificial Sequence
  Quasi-synthetic sequence derived from human genome
VPRQFLRKKVLLRGFSPSHLRAYARRMF

SEQ ID NO: 20754 - protein, 28 aa, Artificial Sequence
  Quasi-synthetic sequence derived from human genome
TFPLIFGLFIILLVIFLIWRCFLRNKTR

SEQ ID NO: 20755 - protein, 28 aa, Artificial Sequence
  Quasi-synthetic sequence derived from human genome
VLALIGLIFLMVLYLNRRGIQRWMRNLR

SEQ ID NO: 20756 - protein, 28 aa, Artificial Sequence
  Quasi-synthetic sequence derived from human genome
LLRKRWFQLGHSMNPRARKNRSRIPLLR

SEQ ID NO: 20757 - protein, 28 aa, Artificial Sequence
  Quasi-synthetic sequence derived from human genome
RRLLILILKIGRRWTELIRTMESRVLLR

SEQ ID NO: 20758 - protein, 28 aa, Artificial Sequence
  Quasi-synthetic sequence derived from human genome
WLTRKHIQRLHAAATVIKRAWQKWRIRM

SEQ ID NO: 20759 - protein, 28 aa, Artificial Sequence
  Quasi-synthetic sequence derived from human genome
HLGKVVQVFRLMRIFRVLKLARHSTGLR

SEQ ID NO: 20760 - protein, 28 aa, Artificial Sequence
  Quasi-synthetic sequence derived from human genome
FSRRRCEALKLMVQAWPFRRLPLRPLIK

SEQ ID NO: 20761 - protein, 28 aa, Artificial Sequence
  Quasi-synthetic sequence derived from human genome
KIMKTRVCRRLRRANRVLRARCRRAVKS

SEQ ID NO: 20762 - protein, 28 aa, Artificial Sequence
  Quasi-synthetic sequence derived from human genome
RLFKFCTCLATVFSFLKRLICRSGRGRK

SEQ ID NO: 20763 - protein, 28 aa, Artificial Sequence
  Quasi-synthetic sequence derived from human genome
LLSPKSSWVKRHRSSFRNRFPLLKVLIL

SEQ ID NO: 20764 - protein, 28 aa, Artificial Sequence
  Quasi-synthetic sequence derived from human genome
LLLMILKPVQKLFAIIVGRGIRKWWQAL

SEQ ID NO: 20765 - protein, 28 aa, Artificial Sequence
  Quasi-synthetic sequence derived from human genome
IYRRGARRWRKLYRANGHLFQAKRFNRR

SEQ ID NO: 20766 - protein, 28 aa, Artificial Sequence
  Quasi-synthetic sequence derived from human genome
LRDLIQGLSFVTRRRIRRTVRRALRRVA

SEQ ID NO: 20767 - protein, 28 aa, Artificial Sequence
  Quasi-synthetic sequence derived from human genome
VHWFKKLSQKRFKQLVERLLQFISLRLF

SEQ ID NO: 20768 - protein, 28 aa, Artificial Sequence
  Quasi-synthetic sequence derived from human genome
ARKGKRKTVKAVIDRFLRLHCGLWVRRK

SEQ ID NO: 20769 - protein, 28 aa, Artificial Sequence
  Quasi-synthetic sequence derived from human genome
RRGRGGLRLGLRGPLRKLVLQSLVPLLL

SEQ ID NO: 20770 - protein, 28 aa, Artificial Sequence
  Quasi-synthetic sequence derived from human genome
KLYQFLHLRKAAITIQSSYRRLMVKKKL

SEQ ID NO: 20771 - protein, 28 aa, Artificial Sequence
  Quasi-synthetic sequence derived from human genome
RKRIRYRFRRFIQQFSQCKATARNLKLK

SEQ ID NO: 20772 - protein, 28 aa, Artificial Sequence
  Quasi-synthetic sequence derived from human genome
IFSMFCLIGLATWQVFYLRRFFKAKKLI

SEQ ID NO: 20773 - protein, 28 aa, Artificial Sequence
  Quasi-synthetic sequence derived from human genome
CLLVMLFLLKLARHSKFGMKGFVLFHKI

SEQ ID NO: 20774 - protein, 28 aa, Artificial Sequence
  Quasi-synthetic sequence derived from human genome
LSKSRKILRSMSRKVTTNKLLLSIIILL

SEQ ID NO: 20775 - protein, 28 aa, Artificial Sequence
  Quasi-synthetic sequence derived from human genome
RRRWKLSFSIVSLCNHLTRSLMKKVHLR

SEQ ID NO: 20776 - protein, 28 aa, Artificial Sequence
  Quasi-synthetic sequence derived from human genome
RLLIYKQGRKLFPIKLKNKKGLVSLIDL

SEQ ID NO: 20777 - protein, 28 aa, Artificial Sequence
  Quasi-synthetic sequence derived from human genome
IKAVICAGLYPKVAKIRLNLGKKRKMVK

SEQ ID NO: 20778 - protein, 28 aa, Artificial Sequence
  Quasi-synthetic sequence derived from human genome
MPGPRRPAGSRLRLLLLLLLPPLLLLLR

SEQ ID NO: 20779 - protein, 28 aa, Artificial Sequence
  Quasi-synthetic sequence derived from human genome
LWLRAKFQRLLFKLGCYIQKNCGKFLVV

SEQ ID NO: 20780 - protein, 28 aa, Artificial Sequence
  Quasi-synthetic sequence derived from human genome
KFMVLLWKNFILKRRRCIALVVEMVLTF

SEQ ID NO: 20781 - protein, 28 aa, Artificial Sequence
  Quasi-synthetic sequence derived from human genome
QKYVLARRRLVKVINNRAKLLSLCSFII

SEQ ID NO: 20782 - protein, 28 aa, Artificial Sequence
  Quasi-synthetic sequence derived from human genome
NGQLMKTIIRKINKMKTLKRKKLLNQIL

SEQ ID NO: 20783 - protein, 28 aa, Artificial Sequence
  Quasi-synthetic sequence derived from human genome
FLLLYFPVFILYFKPSVFRCIALRWVRL

SEQ ID NO: 20784 - protein, 28 aa, Artificial Sequence
  Quasi-synthetic sequence derived from human genome
RGVRVDFWWRRLRASLRLTVWAPLLPLR

SEQ ID NO: 20785 - protein, 28 aa, Artificial Sequence
  Quasi-synthetic sequence derived from human genome
RHKAVVLRCHAVLLARAHKARALARLLR

SEQ ID NO: 20786 - protein, 28 aa, Artificial Sequence
  Quasi-synthetic sequence derived from human genome
KQRIIPFLPGKILFRRSHIRDVAVKRLI

SEQ ID NO: 20787 - protein, 28 aa, Artificial Sequence
  Quasi-synthetic sequence derived from human genome
VIRLVRVFRIFKLSRHSKGLQILGQTLK

SEQ ID NO: 20788 - protein, 28 aa, Artificial Sequence
  Quasi-synthetic sequence derived from human genome
LLLRRTYARNLPAFVNRLGILTVRHLKR

SEQ ID NO: 20789 - protein, 28 aa, Artificial Sequence
  Quasi-synthetic sequence derived from human genome
FFAPCLIMILVYLRIYLIAKRSNRRGPR

SEQ ID NO: 20790 - protein, 28 aa, Artificial Sequence
  Quasi-synthetic sequence derived from human genome
KFKKFDHRYLRKILIRKNLPKSSIVSLY

SEQ ID NO: 20791 - protein, 28 aa, Artificial Sequence
  Quasi-synthetic sequence derived from human genome
RRIYPFLLMVVVLMAILSFQVRQFKRLY

SEQ ID NO: 20792 - protein, 28 aa, Artificial Sequence
  Quasi-synthetic sequence derived from human genome
HRILRRLFNLCKRCHRQPRFRLPKERSL

SEQ ID NO: 20793 - protein, 28 aa, Artificial Sequence
  Quasi-synthetic sequence derived from human genome
FLKVAAVGRRVRSYGKRRPARTILRAFL

SEQ ID NO: 20794 - protein, 28 aa, Artificial Sequence
  Quasi-synthetic sequence derived from human genome
YIFIPSKFKSKRLGSLNKFKAKARSILL

SEQ ID NO: 20795 - protein, 28 aa, Artificial Sequence
  Quasi-synthetic sequence derived from human genome
LLRKRRFQLYRSMNPRARKNRSHIPLVR

SEQ ID NO: 20796 - protein, 28 aa, Artificial Sequence
  Quasi-synthetic sequence derived from human genome
MYFWKRFCFWKATRSYLQYRGKKFKDRK

SEQ ID NO: 20797 - protein, 28 aa, Artificial Sequence
  Quasi-synthetic sequence derived from human genome
LRRKVLWCLQYIGLGFFCCKQKTRLRAM

SEQ ID NO: 20798 - protein, 28 aa, Artificial Sequence
  Quasi-synthetic sequence derived from human genome
LLKAKRRRVSKGLHPKKQRHLLHLRERW

SEQ ID NO: 20799 - protein, 28 aa, Artificial Sequence
  Quasi-synthetic sequence derived from human genome
KMRKTIGGVALWRQQICAIARVRLLKLK

SEQ ID NO: 20800 - protein, 28 aa, Artificial Sequence
  Quasi-synthetic sequence derived from human genome
LWRQQVCAIAKVRFLKLKKERKSLWTIL

SEQ ID NO: 20801 - protein, 28 aa, Artificial Sequence
  Quasi-synthetic sequence derived from human genome
IALVGLIFILLLVFVLIIRGQSKKYAKK

SEQ ID NO: 20802 - protein, 28 aa, Artificial Sequence
  Quasi-synthetic sequence derived from human genome
VKFIIGYLFPLLTMSICYLCLIFKVKKR

SEQ ID NO: 20803 - protein, 28 aa, Artificial Sequence
  Quasi-synthetic sequence derived from human genome
ISLFLIISMCLLFLWKKYQPYKVIKQKL

SEQ ID NO: 20804 - protein, 28 aa, Artificial Sequence
  Quasi-synthetic sequence derived from human genome
IFRNWLYFVPLLLLVPLLLCCVWRLCRK

SEQ ID NO: 20805 - protein, 28 aa, Artificial Sequence
  Quasi-synthetic sequence derived from human genome
MLFCITMKRQIKHMIKYRYIPFTHGKRR

SEQ ID NO: 20806 - protein, 28 aa, Artificial Sequence
  Quasi-synthetic sequence derived from human genome
KYFMKLVNLYKGAVLYLLRGRKTFLIPV

SEQ ID NO: 20807 - protein, 28 aa, Artificial Sequence
  Quasi-synthetic sequence derived from human genome
LLPGLLLLLVVIILILAFWVLPKYKTRK

SEQ ID NO: 20808 - protein, 28 aa, Artificial Sequence
  Quasi-synthetic sequence derived from human genome
WLVLRYRHKRLSYQSVFLFLCLFWASLR

SEQ ID NO: 20809 - protein, 28 aa, Artificial Sequence
  Quasi-synthetic sequence derived from human genome
WWVRLLYRPYCKKNPQHLYSFIAKILWR

SEQ ID NO: 20810 - protein, 28 aa, Artificial Sequence
  Quasi-synthetic sequence derived from human genome
IRKKAVLIMYKVFLKYPESLRPAFPRLK

SEQ ID NO: 20811 - protein, 28 aa, Artificial Sequence
  Quasi-synthetic sequence derived from human genome
WIWLEPMKPIIRQIRRPKNVVLRLAVKF

SEQ ID NO: 20812 - protein, 28 aa, Artificial Sequence
  Quasi-synthetic sequence derived from human genome
LRKLYVFRRSFLMTCISLRNLILGRPSL

SEQ ID NO: 20813 - protein, 28 aa, Artificial Sequence
  Quasi-synthetic sequence derived from human genome
LIKPFGARKKRSWYLTWKYKLTNQRALR

SEQ ID NO: 20814 - protein, 28 aa, Artificial Sequence
  Quasi-synthetic sequence derived from human genome
GKLIRMGPQERWLLRTKRLHWSRLLFLL

SEQ ID NO: 20815 - protein, 28 aa, Artificial Sequence
  Quasi-synthetic sequence derived from human genome
RRQIIRALCLLLLLLHAGSAKNIWKRAL

SEQ ID NO: 20816 - protein, 28 aa, Artificial Sequence
  Quasi-synthetic sequence derived from human genome
RKPTIRRKNLRKLRRKCAVPSSSWLPWI

SEQ ID NO: 20817 - protein, 28 aa, Artificial Sequence
  Quasi-synthetic sequence derived from human genome
LRRVKVLLVLNLIAVAGFVLFLAKCRPI

SEQ ID NO: 20818 - protein, 28 aa, Artificial Sequence
  Quasi-synthetic sequence derived from human genome
RKGLTRRERRELRRRTILLLYYLLRSPF

SEQ ID NO: 20819 - protein, 28 aa, Artificial Sequence
  Quasi-synthetic sequence derived from human genome
FVCVLLSFFMARVFMRMKLPRSLALLPR

SEQ ID NO: 20820 - protein, 28 aa, Artificial Sequence
  Quasi-synthetic sequence derived from human genome
LMQLYSARQRRRLNRGLRRKQHSLLKRL

SEQ ID NO: 20821 - protein, 28 aa, Artificial Sequence
  Quasi-synthetic sequence derived from human genome
RRLFVRRGQPFTIILYFRAPVRAFLPAL

SEQ ID NO: 20822 - protein, 28 aa, Artificial Sequence
  Quasi-synthetic sequence derived from human genome
RFKHLKKLLLVHGHWCYSRLARMVVYYL

SEQ ID NO: 20823 - protein, 28 aa, Artificial Sequence
  Quasi-synthetic sequence derived from human genome
KLKFYYNPNFKRGYPQLLVRVKRRIGVK

SEQ ID NO: 20824 - protein, 28 aa, Artificial Sequence
  Quasi-synthetic sequence derived from human genome
LVALLMLVFRSKREVKRQKYRLSQLYKW

SEQ ID NO: 20825 - protein, 28 aa, Artificial Sequence
  Quasi-synthetic sequence derived from human genome
RFKVMKAKKMRNRIIKNEVKKLQKAALL

SEQ ID NO: 20826 - protein, 28 aa, Artificial Sequence
  Quasi-synthetic sequence derived from human genome
PLLRKRRFQLCRCMNPRARKNRSQIVLF

SEQ ID NO: 20827 - protein, 28 aa, Artificial Sequence
  Quasi-synthetic sequence derived from human genome
RMLKQLKHPNLVNLIEVFRRKRKMHLVF

SEQ ID NO: 20828 - protein, 28 aa, Artificial Sequence
  Quasi-synthetic sequence derived from human genome
RFLRIMMLSVLRNTKTPVKFWLLKNYLS

SEQ ID NO: 20829 - protein, 28 aa, Artificial Sequence
  Quasi-synthetic sequence derived from human genome
AALRAWIIQCWWRQVLEKLLAKRRRMVL

SEQ ID NO: 20830 - protein, 28 aa, Artificial Sequence
  Quasi-synthetic sequence derived from human genome
TILCLLAAGFVVYLKRKTLIRLLFTNKK

SEQ ID NO: 20831 - protein, 28 aa, Artificial Sequence
  Quasi-synthetic sequence derived from human genome
IIMRFRKRKNFKKKRIVTTPQTVLRINS

SEQ ID NO: 20832 - protein, 28 aa, Artificial Sequence
  Quasi-synthetic sequence derived from human genome
LARRLLFLGPPPPPLLLLVFSRSSRRRL

SEQ ID NO: 20833 - protein, 28 aa, Artificial Sequence
  Quasi-synthetic sequence derived from human genome
GLLSVLAMFFLLVLILSSVFLFRLFKRR

SEQ ID NO: 20834 - protein, 28 aa, Artificial Sequence
  Quasi-synthetic sequence derived from human genome
AMVVLAFFVVQINKAKSRPKRRKPRVKR

SEQ ID NO: 20835 - protein, 28 aa, Artificial Sequence
  Quasi-synthetic sequence derived from human genome
RHLRRFILSVIVFGSIVLLMLWLPIRII

SEQ ID NO: 20836 - protein, 28 aa, Artificial Sequence
  Quasi-synthetic sequence derived from human genome
SFFLQIYLIMIFLGLYINFRHLYKQRRR

SEQ ID NO: 20837 - protein, 28 aa, Artificial Sequence
  Quasi-synthetic sequence derived from human genome
MKQKHYVRGRALRSRLLRKQAWKQKWRK

SEQ ID NO: 20838 - protein, 28 aa, Artificial Sequence
  Quasi-synthetic sequence derived from human genome
KKKPVPVLLGSLLKRKMLPRAALLVTTR

SEQ ID NO: 20839 - protein, 28 aa, Artificial Sequence
  Quasi-synthetic sequence derived from human genome
IIKGSVGGLLVLIVILVILFKCGFFKRK

SEQ ID NO: 20840 - protein, 28 aa, Artificial Sequence
  Quasi-synthetic sequence derived from human genome
VAMIFVNWKELIMCNIKLLKALRVRKKM

SEQ ID NO: 20841 - protein, 28 aa, Artificial Sequence
  Quasi-synthetic sequence derived from human genome
RALALFVITCLVIFVLVHSFLKKLLGKK

SEQ ID NO: 20842 - protein, 28 aa, Artificial Sequence
  Quasi-synthetic sequence derived from human genome
KRRKRWDIQRIREQRILQRLQLRMYKKK

SEQ ID NO: 20843 - protein, 28 aa, Artificial Sequence
  Quasi-synthetic sequence derived from human genome
AATIILYFIPLRYIILIWGINKFTKKLR

SEQ ID NO: 20844 - protein, 28 aa, Artificial Sequence
  Quasi-synthetic sequence derived from human genome
RVYLGLSIALRFPALVLYIVFIFAMKKK

SEQ ID NO: 20845 - protein, 28 aa, Artificial Sequence
  Quasi-synthetic sequence derived from human genome
VIKHFLRKIIMVHPKVRFHFSVKVNGIL

SEQ ID NO: 20846 - protein, 28 aa, Artificial Sequence
  Quasi-synthetic sequence derived from human genome
IIYAFVGEKFRRYLSVFFRKHITKRFCK

SEQ ID NO: 20847 - protein, 28 aa, Artificial Sequence
  Quasi-synthetic sequence derived from human genome
RRRKKILFYCHFPDLLLTKRDSFLKRLY

SEQ ID NO: 20848 - protein, 28 aa, Artificial Sequence
  Quasi-synthetic sequence derived from human genome
FLIKMGGKIKTWKKRWFVFDRNKRTFSY

SEQ ID NO: 20849 - protein, 28 aa, Artificial Sequence
  Quasi-synthetic sequence derived from human genome
LLRGGRRLFLSGAPRFRHRGKVIAFQLK

SEQ ID NO: 20850 - protein, 28 aa, Artificial Sequence
  Quasi-synthetic sequence derived from human genome
AVMVTAFSGLAFIIWLARRLKKGKKSKR

SEQ ID NO: 20851 - protein, 28 aa, Artificial Sequence
  Quasi-synthetic sequence derived from human genome
LRYYYNKRILHKTKGKRFTYKFNFNKLV

SEQ ID NO: 20852 - protein, 28 aa, Artificial Sequence
  Quasi-synthetic sequence derived from human genome
RSYPYWRRLLVLCWYLPGWRAGRVTWLR

SEQ ID NO: 20853 - protein, 28 aa, Artificial Sequence
  Quasi-synthetic sequence derived from human genome
RARRIPKLVQRINSIYNAKRGKKRLKKL

SEQ ID NO: 20854 - protein, 28 aa, Artificial Sequence
  Quasi-synthetic sequence derived from human genome
LKYITIALKCLIVALPKIILAVKSKGKF

SEQ ID NO: 20855 - protein, 28 aa, Artificial Sequence
  Quasi-synthetic sequence derived from human genome
LGYLFRKYIAYRLIQHARNNIMKRLKAI

SEQ ID NO: 20856 - protein, 28 aa, Artificial Sequence
  Quasi-synthetic sequence derived from human genome
RRWRGLGSLFRRACCVALPLQLLLLLFL

SEQ ID NO: 20857 - protein, 28 aa, Artificial Sequence
  Quasi-synthetic sequence derived from human genome
WLRKPYYLQARFSYVRMKYLFFSWLVVF

SEQ ID NO: 20858 - protein, 28 aa, Artificial Sequence
  Quasi-synthetic sequence derived from human genome
RRCHCLPFPKRGMQRWMLPLRRGARLLP

SEQ ID NO: 20859 - protein, 28 aa, Artificial Sequence
  Quasi-synthetic sequence derived from human genome
RRSQRASFKRARRPGARALRLVLGIVLL

SEQ ID NO: 20860 - protein, 28 aa, Artificial Sequence
  Quasi-synthetic sequence derived from human genome
FVLLLFLLLFLLLRRQRHSKHRTSDQRK

SEQ ID NO: 20861 - protein, 28 aa, Artificial Sequence
  Quasi-synthetic sequence derived from human genome
LIPFLHFIIFLFTLRCLEWKFGKKSMRK

SEQ ID NO: 20862 - protein, 28 aa, Artificial Sequence
  Quasi-synthetic sequence derived from human genome
CLLGLRTFVAFAAKLWSFFIYLLRRQIR

SEQ ID NO: 20863 - protein, 28 aa, Artificial Sequence
  Quasi-synthetic sequence derived from human genome
RSVAGLLPRRRRCFPARAPLLRVALCLL

SEQ ID NO: 20864 - protein, 28 aa, Artificial Sequence
  Quasi-synthetic sequence derived from human genome
RKKYEPKLKQFTKILRRKRLLPKRCNKK

SEQ ID NO: 20865 - protein, 28 aa, Artificial Sequence
  Quasi-synthetic sequence derived from human genome
AMFLNLVYKSLKADIVLRRVKAFVKRLL

SEQ ID NO: 20866 - protein, 28 aa, Artificial Sequence
  Quasi-synthetic sequence derived from human genome
FVRPKLVTIIRSGVKPRKAVRVLLNKKT

SEQ ID NO: 20867 - protein, 28 aa, Artificial Sequence
  Quasi-synthetic sequence derived from human genome
IFYLLKIANFSNLIFLHLKRRVKSVVLV

SEQ ID NO: 20868 - protein, 28 aa, Artificial Sequence
  Quasi-synthetic sequence derived from human genome
RFAKLLLRLPALRSIGLKCLEHLFFFKL

SEQ ID NO: 20869 - protein, 28 aa, Artificial Sequence
  Quasi-synthetic sequence derived from human genome
FYIHAIGIGKCKRRIVKCGKLHKKGRKL

SEQ ID NO: 20870 - protein, 28 aa, Artificial Sequence
  Quasi-synthetic sequence derived from human genome
AFFIFIMSLLLISGQRPVNLTMRRKLRK

SEQ ID NO: 20871 - protein, 28 aa, Artificial Sequence
  Quasi-synthetic sequence derived from human genome
RIIQTLFSCKNHKKAKAIKLILLVVIVF

SEQ ID NO: 20872 - protein, 28 aa, Artificial Sequence
  Quasi-synthetic sequence derived from human genome
RARRRRTFCLLVVIVVVFAVCWLPLHVF

SEQ ID NO: 20873 - protein, 28 aa, Artificial Sequence
  Quasi-synthetic sequence derived from human genome
LTPMLNPLIYSLRKKDVKRAIRKVMLKR

SEQ ID NO: 20874 - protein, 28 aa, Artificial Sequence
  Quasi-synthetic sequence derived from human genome
VSKIPLPRFKLKCIFCKKRRKRTAGCCV

SEQ ID NO: 20875 - protein, 28 aa, Artificial Sequence
  Quasi-synthetic sequence derived from human genome
RWNLHKRIALRTLLWVGAKPARLMLGFM

SEQ ID NO: 20876 - protein, 28 aa, Artificial Sequence
  Quasi-synthetic sequence derived from human genome
KVLRFLHLFGPGKNVPSVWRSARRKRKK

SEQ ID NO: 20877 - protein, 28 aa, Artificial Sequence
  Quasi-synthetic sequence derived from human genome
RLPPRLPALLTATRRAVRKRGLLRSLLP

SEQ ID NO: 20878 - protein, 28 aa, Artificial Sequence
  Quasi-synthetic sequence derived from human genome
IKNQRSSLRIRLFNFSLKLLTCLLYIVR

SEQ ID NO: 20879 - protein, 28 aa, Artificial Sequence
  Quasi-synthetic sequence derived from human genome
RIRSRRLGIYQRCWLVFKKASSKGPKRL

SEQ ID NO: 20880 - protein, 28 aa, Artificial Sequence
  Quasi-synthetic sequence derived from human genome
FLPARQLWKWFGKPTQRRGMKGKARKLF

SEQ ID NO: 20881 - protein, 28 aa, Artificial Sequence
  Quasi-synthetic sequence derived from human genome
SIIKRRIRKGRIEYLVKWKGWAIKYSTW

SEQ ID NO: 20882 - protein, 28 aa, Artificial Sequence
  Quasi-synthetic sequence derived from human genome
LIPSIPLLLLLVVTTVVCWVWICRKRKR

SEQ ID NO: 20883 - protein, 28 aa, Artificial Sequence
  Quasi-synthetic sequence derived from human genome
FFSRGRFSSGFRRTLILSSGFRLVKKKL

SEQ ID NO: 20884 - protein, 28 aa, Artificial Sequence
  Quasi-synthetic sequence derived from human genome
RRDIFGRIIWHKFKQWVIPWHLNKRYNR

SEQ ID NO: 20885 - protein, 28 aa, Artificial Sequence
  Quasi-synthetic sequence derived from human genome
RMMVPKVRLLYSLAFNARFLRHLWFLIS

SEQ ID NO: 20886 - protein, 28 aa, Artificial Sequence
  Quasi-synthetic sequence derived from human genome
LRWRRPALHRPIKVNLLIPVAYLVFWAF

SEQ ID NO: 20887 - protein, 28 aa, Artificial Sequence
  Quasi-synthetic sequence derived from human genome
FIFLIIKSYRKYRRERLPISPGPLLRWV

SEQ ID NO: 20888 - protein, 28 aa, Artificial Sequence
  Quasi-synthetic sequence derived from human genome
ARKRFLGPLHPSFNLVKIIRSFLLKVLP

SEQ ID NO: 20889 - protein, 28 aa, Artificial Sequence
  Quasi-synthetic sequence derived from human genome
RVKKLPMILALHLKRFKYMEQLHRYTKL

SEQ ID NO: 20890 - protein, 28 aa, Artificial Sequence
  Quasi-synthetic sequence derived from human genome
LIVCGTLCVCLVIVLWGIRLLLQRKKKL

SEQ ID NO: 20891 - protein, 28 aa, Artificial Sequence
  Quasi-synthetic sequence derived from human genome
TIRMWLCKRRHKPRIDGLVKVGTLKKRL

SEQ ID NO: 20892 - protein, 28 aa, Artificial Sequence
  Quasi-synthetic sequence derived from human genome
IVKQGYVKMKSRKLGIYRRCWLVFRKSS

SEQ ID NO: 20893 - protein, 28 aa, Artificial Sequence
  Quasi-synthetic sequence derived from human genome
IWCALFPFLVMLVCYGFIFRVARVKARK

SEQ ID NO: 20894 - protein, 28 aa, Artificial Sequence
  Quasi-synthetic sequence derived from human genome
YLSFIKILLKRGGVRVSTKNLIKLFQII

SEQ ID NO: 20895 - protein, 28 aa, Artificial Sequence
  Quasi-synthetic sequence derived from human genome
MLFTGYFVLCCSWSFRRLKKLCRPLPWK

SEQ ID NO: 20896 - protein, 28 aa, Artificial Sequence
  Quasi-synthetic sequence derived from human genome
KALLRLVSAVNRRRMKLLLGIALLAYVA

SEQ ID NO: 20897 - protein, 28 aa, Artificial Sequence
  Quasi-synthetic sequence derived from human genome
RLFVRRGQPFTIILYFRAPVRAFLPALK

SEQ ID NO: 20898 - protein, 28 aa, Artificial Sequence
  Quasi-synthetic sequence derived from human genome
HCKAFKIRKHYLHLRATVVSIQRRYRKL

SEQ ID NO: 20899 - protein, 28 aa, Artificial Sequence
  Quasi-synthetic sequence derived from human genome
KFKLLSSLPHWRRIAQKIIREPRKKRVP

SEQ ID NO: 20900 - protein, 28 aa, Artificial Sequence
  Quasi-synthetic sequence derived from human genome
LCWSRFAQIRAELMKKVRHLRHPKRILF

SEQ ID NO: 20901 - protein, 28 aa, Artificial Sequence
  Quasi-synthetic sequence derived from human genome
NPIIYCCLNKRFRAGFKRAFRWCPFIKV

SEQ ID NO: 20902 - protein, 28 aa, Artificial Sequence
  Quasi-synthetic sequence derived from human genome
RLAFRNLGALLPRLHQLCCRMPRTLRRL

SEQ ID NO: 20903 - protein, 28 aa, Artificial Sequence
  Quasi-synthetic sequence derived from human genome
LLALHRRLRGLRRAAAGTSRLLFQRLLP

SEQ ID NO: 20904 - protein, 28 aa, Artificial Sequence
  Quasi-synthetic sequence derived from human genome
LIFISLFPEILLIVLKNVRRRSARVTKR

SEQ ID NO: 20905 - protein, 28 aa, Artificial Sequence
  Quasi-synthetic sequence derived from human genome
RFKKGKIVLLFSLLCWVLFNLGIGFVKP

SEQ ID NO: 20906 - protein, 28 aa, Artificial Sequence
  Quasi-synthetic sequence derived from human genome
KKGGTQLQLLKWPLRFVIIHKRCVYYFK

SEQ ID NO: 20907 - protein, 28 aa, Artificial Sequence
  Quasi-synthetic sequence derived from human genome
RWKFIKRWKTRYFTLAGNQLLFQKGKSK

SEQ ID NO: 20908 - protein, 28 aa, Artificial Sequence
  Quasi-synthetic sequence derived from human genome
IPIIFGILFAILLVLVFIKKVAKKPTNK

SEQ ID NO: 20909 - protein, 28 aa, Artificial Sequence
  Quasi-synthetic sequence derived from human genome
KNFALKPRMRKIFSRLIYIAQSKGAWIL

SEQ ID NO: 20910 - protein, 28 aa, Artificial Sequence
  Quasi-synthetic sequence derived from human genome
LISMKFLRPLRVLSQFERMKVVVRALIK

SEQ ID NO: 20911 - protein, 28 aa, Artificial Sequence
  Quasi-synthetic sequence derived from human genome
LLCLHRTLTSWLRVRFGTWNWIWRRCCR

SEQ ID NO: 20912 - protein, 28 aa, Artificial Sequence
  Quasi-synthetic sequence derived from human genome
TRIFVRVIQLLKINNSKHRWFWLLPVKQ

SEQ ID NO: 20913 - protein, 28 aa, Artificial Sequence
  Quasi-synthetic sequence derived from human genome
RFLLLFIGFVCVLLSFFMARVFMRMKLP

SEQ ID NO: 20914 - protein, 28 aa, Artificial Sequence
  Quasi-synthetic sequence derived from human genome
ILILLIKKLIIFILKKTREKKKECLVSS

SEQ ID NO: 20915 - protein, 28 aa, Artificial Sequence
  Quasi-synthetic sequence derived from human genome
AAVSCVFLAFVIVLLALRLRRWHKSRLL

SEQ ID NO: 20916 - protein, 28 aa, Artificial Sequence
  Quasi-synthetic sequence derived from human genome
KRLNIRKVIPYIASQFRKDKIWLRRTKP

SEQ ID NO: 20917 - protein, 28 aa, Artificial Sequence
  Quasi-synthetic sequence derived from human genome
YNAMAVRIQRRWRGYRVRKYLFNYYYLK

SEQ ID NO: 20918 - protein, 28 aa, Artificial Sequence
  Quasi-synthetic sequence derived from human genome
RARRGLLRLPRRSLLAALFFFSLSSSLL

SEQ ID NO: 20919 - protein, 28 aa, Artificial Sequence
  Quasi-synthetic sequence derived from human genome
MSHLPMKLLRKKIEKRNLKLRQRNLKFQ

SEQ ID NO: 20920 - protein, 28 aa, Artificial Sequence
  Quasi-synthetic sequence derived from human genome
LKLKYYSIILQSRIRMIIAVTSYKRYLW

SEQ ID NO: 20921 - protein, 28 aa, Artificial Sequence
  Quasi-synthetic sequence derived from human genome
RRARGRWEGSAPRRLLLALHRRLRGLRR

SEQ ID NO: 20922 - protein, 28 aa, Artificial Sequence
  Quasi-synthetic sequence derived from human genome
LIFAGLAFIVGLLILLSRRFRCGGNKKR

SEQ ID NO: 20923 - protein, 28 aa, Artificial Sequence
  Quasi-synthetic sequence derived from human genome
FHWRQKFLRVKRSAICIQSWWRGTLGRR

SEQ ID NO: 20924 - protein, 28 aa, Artificial Sequence
  Quasi-synthetic sequence derived from human genome
RKTLRFREQRYSLFKLVFAIMVVFLLMW

SEQ ID NO: 20925 - protein, 28 aa, Artificial Sequence
  Quasi-synthetic sequence derived from human genome
ANLLIFILLLTLTILTIWLFKHRRARFL

SEQ ID NO: 20926 - protein, 28 aa, Artificial Sequence
  Quasi-synthetic sequence derived from human genome
VGERFRKYLRQLFHRRVAVHLVKWLPFL

SEQ ID NO: 20927 - protein, 28 aa, Artificial Sequence
  Quasi-synthetic sequence derived from human genome
LVVLILTVFVAFCLLVFVLRRNKKPTVK

SEQ ID NO: 20928 - protein, 28 aa, Artificial Sequence
  Quasi-synthetic sequence derived from human genome
RHKVLILFKLILLEKKVLFYISPVNKLV

SEQ ID NO: 20929 - protein, 28 aa, Artificial Sequence
  Quasi-synthetic sequence derived from human genome
LWKLLLRSQSCRLCSFRKMRSPPKYRPF

SEQ ID NO: 20930 - protein, 28 aa, Artificial Sequence
  Quasi-synthetic sequence derived from human genome
LRKLRNVSNLKPVPLIGPKLKRRWPISY

SEQ ID NO: 20931 - protein, 28 aa, Artificial Sequence
  Quasi-synthetic sequence derived from human genome
ALNSYKSRFLCGKEIKKKKCIFRLRIRV

SEQ ID NO: 20932 - protein, 28 aa, Artificial Sequence
  Quasi-synthetic sequence derived from human genome
LKRLRRKRPPRQKPLGHSLHHCSRLRIL

SEQ ID NO: 20933 - protein, 28 aa, Artificial Sequence
  Quasi-synthetic sequence derived from human genome
RWLVRILGTIFRFCDRSVPPARALLKRR

SEQ ID NO: 20934 - protein, 28 aa, Artificial Sequence
  Quasi-synthetic sequence derived from human genome
LFKRRVVRRLASLKTRRCRLSRAAQGLP

SEQ ID NO: 20935 - protein, 28 aa, Artificial Sequence
  Quasi-synthetic sequence derived from human genome
WLLRKKYLRMRKAAITMQRYVRGYQARC

SEQ ID NO: 20936 - protein, 28 aa, Artificial Sequence
  Quasi-synthetic sequence derived from human genome
LVPSPKSFYYLIMRIKMCLIKLCKSKAK

SEQ ID NO: 20937 - protein, 28 aa, Artificial Sequence
  Quasi-synthetic sequence derived from human genome
RLGFLRLQALHRSRKLHQQYRLARQRII

SEQ ID NO: 20938 - protein, 28 aa, Artificial Sequence
  Quasi-synthetic sequence derived from human genome
KLRIRTKAAVKIQAWWRGTLVRRTLLHA

SEQ ID NO: 20939 - protein, 28 aa, Artificial Sequence
  Quasi-synthetic sequence derived from human genome
KKQRLSKKLRRKLQMWLWSQTFCPVLYA

SEQ ID NO: 20940 - protein, 28 aa, Artificial Sequence
  Quasi-synthetic sequence derived from human genome
KRVRFTKRKQKVPGFPKRFTVKPVVLGF

SEQ ID NO: 20941 - protein, 28 aa, Artificial Sequence
  Quasi-synthetic sequence derived from human genome
IRILAVITIQAGVRGYLARRRIRLWHRG

SEQ ID NO: 20942 - protein, 28 aa, Artificial Sequence
  Quasi-synthetic sequence derived from human genome
CIKVSSFTHHIFLWLRWRILRLFPWILL

SEQ ID NO: 20943 - protein, 28 aa, Artificial Sequence
  Quasi-synthetic sequence derived from human genome
LRPAILVIPCLLLIKCHLKLYRTKLIYH

SEQ ID NO: 20944 - protein, 28 aa, Artificial Sequence
  Quasi-synthetic sequence derived from human genome
LLLVALSALFLGRWLVVRLATKWCQRKL

SEQ ID NO: 20945 - protein, 28 aa, Artificial Sequence
  Quasi-synthetic sequence derived from human genome
LVLSYFRYMRIYRRYIYEPLHKPQRKRK

SEQ ID NO: 20946 - protein, 28 aa, Artificial Sequence
  Quasi-synthetic sequence derived from human genome
LVRKAFRHRLWAVLTVQAYARGMIARRL

SEQ ID NO: 20947 - protein, 28 aa, Artificial Sequence
  Quasi-synthetic sequence derived from human genome
RKILRLITIRKLFTAIGVLFPSVILVSL

SEQ ID NO: 20948 - protein, 28 aa, Artificial Sequence
  Quasi-synthetic sequence derived from human genome
PFLVIIVILSALFLGTLACFCVWRRKRK

SEQ ID NO: 20949 - protein, 28 aa, Artificial Sequence
  Quasi-synthetic sequence derived from human genome
LLLRLLRGAPRQRVCTLFIIGFKFTFFV

SEQ ID NO: 20950 - protein, 28 aa, Artificial Sequence
  Quasi-synthetic sequence derived from human genome
LGLRLLCQGLRHPVCRLRTLWLKICRLT

SEQ ID NO: 20951 - protein, 28 aa, Artificial Sequence
  Quasi-synthetic sequence derived from human genome
SLGVGILVGCLCLLLAVYFIARKIRKKR

SEQ ID NO: 20952 - protein, 28 aa, Artificial Sequence
  Quasi-synthetic sequence derived from human genome
WVILMGFSIWLYWRRKKRKGLSNYAVTF

SEQ ID NO: 20953 - protein, 28 aa, Artificial Sequence
  Quasi-synthetic sequence derived from human genome
RPKKGLATAKQRLGRILKIHRNGKLLLR

SEQ ID NO: 20954 - protein, 28 aa, Artificial Sequence
  Quasi-synthetic sequence derived from human genome
FVRGYLVRKQMRLQRKAVISLQSYFRMR

SEQ ID NO: 20955 - protein, 28 aa, Artificial Sequence
  Quasi-synthetic sequence derived from human genome
RLGRQLSKALQVNCVVRKLLVQLRRLYW

SEQ ID NO: 20956 - protein, 28 aa, Artificial Sequence
  Quasi-synthetic sequence derived from human genome
LVISLGIFVFFRKLTTIFPLNWKYRKAL

SEQ ID NO: 20957 - protein, 28 aa, Artificial Sequence
  Quasi-synthetic sequence derived from human genome
KRKFKSLLLHKRTAIQHAYRLLISQRRP

SEQ ID NO: 20958 - protein, 28 aa, Artificial Sequence
  Quasi-synthetic sequence derived from human genome
RLLRRTLIRYANLASVLVLRSVSTRVLK

SEQ ID NO: 20959 - protein, 28 aa, Artificial Sequence
  Quasi-synthetic sequence derived from human genome
LLQYFVPLGFILICYLKIVICLRRRNAK

SEQ ID NO: 20960 - protein, 28 aa, Artificial Sequence
  Quasi-synthetic sequence derived from human genome
VFKLGLAKSIHHARVLIRQRHIRVRKQV

SEQ ID NO: 20961 - protein, 28 aa, Artificial Sequence
  Quasi-synthetic sequence derived from human genome
YLSFIKILLKRGGVKVSTKNLIKLFQII

SEQ ID NO: 20962 - protein, 28 aa, Artificial Sequence
  Quasi-synthetic sequence derived from human genome
KWRHHRRLLTPAFHFNILKPYIKIFSKS

SEQ ID NO: 20963 - protein, 28 aa, Artificial Sequence
  Quasi-synthetic sequence derived from human genome
WLKIRGTLKSWTKLWCVLKPGVLLIYKT

SEQ ID NO: 20964 - protein, 28 aa, Artificial Sequence
  Quasi-synthetic sequence derived from human genome
RQRVLPRMQARMRGFQARKRYLRRRAAL

SEQ ID NO: 20965 - protein, 28 aa, Artificial Sequence
  Quasi-synthetic sequence derived from human genome
ILLRFVIMLALNIWVTVTVLRYRKTAIK

SEQ ID NO: 20966 - protein, 28 aa, Artificial Sequence
  Quasi-synthetic sequence derived from human genome
ARRSRHRLLLLLLRYLVVALGYHKAYGF

SEQ ID NO: 20967 - protein, 28 aa, Artificial Sequence
  Quasi-synthetic sequence derived from human genome
LYIRCIQVVHKLLCYQKKCRVRLHYTWR

SEQ ID NO: 20968 - protein, 28 aa, Artificial Sequence
  Quasi-synthetic sequence derived from human genome
LFRRFGRQRKIGGRGRIISPYRTPVLRR

SEQ ID NO: 20969 - protein, 28 aa, Artificial Sequence
  Quasi-synthetic sequence derived from human genome
GLYSKVRSRYSFIQALVRRIRGLLRISR

SEQ ID NO: 20970 - protein, 28 aa, Artificial Sequence
  Quasi-synthetic sequence derived from human genome
LAWCTFFLIPSIIFAVKTSKYFRPIRKR

SEQ ID NO: 20971 - protein, 28 aa, Artificial Sequence
  Quasi-synthetic sequence derived from human genome
LRPLVKPKIVKKRTKKFIRHQSDRYVKI

SEQ ID NO: 20972 - protein, 28 aa, Artificial Sequence
  Quasi-synthetic sequence derived from human genome
KFPLPIYKSKKGWTAYKLQLFKMFPIIL

SEQ ID NO: 20973 - protein, 28 aa, Artificial Sequence
  Quasi-synthetic sequence derived from human genome
ALRRPPRLRLCARLPDFFLLLLFRGCLI

SEQ ID NO: 20974 - protein, 28 aa, Artificial Sequence
  Quasi-synthetic sequence derived from human genome
VLIRKTRRLSAFQQGFFRNKILVIAIVF

SEQ ID NO: 20975 - protein, 28 aa, Artificial Sequence
  Quasi-synthetic sequence derived from human genome
RLLKILQLQRFKMYVQQLDLTYFLRKIK

SEQ ID NO: 20976 - protein, 28 aa, Artificial Sequence
  Quasi-synthetic sequence derived from human genome
GVLCHRFHGLWYMKMMWAWLQAKRKPRK

SEQ ID NO: 20977 - protein, 28 aa, Artificial Sequence
  Quasi-synthetic sequence derived from human genome
ALYYAKVYYRLGRLTFCQLKVRARLPRF

SEQ ID NO: 20978 - protein, 28 aa, Artificial Sequence
  Quasi-synthetic sequence derived from human genome
LLAILLYLLRLRRIHRRTPRSSSAAALW

SEQ ID NO: 20979 - protein, 28 aa, Artificial Sequence
  Quasi-synthetic sequence derived from human genome
LKKKLFLTLKENEKLRKRLQAQRLVMRR

SEQ ID NO: 20980 - protein, 28 aa, Artificial Sequence
  Quasi-synthetic sequence derived from human genome
NVHKFLQLRFWGWWKLYNKVKPLLNVAR

SEQ ID NO: 20981 - protein, 28 aa, Artificial Sequence
  Quasi-synthetic sequence derived from human genome
LRRLRGLLRVLRGRPGAGSRRRGRMALC

SEQ ID NO: 20982 - protein, 28 aa, Artificial Sequence
  Quasi-synthetic sequence derived from human genome
MKKYCKVIRVIVHTQMKLLPFRQKKAHI

SEQ ID NO: 20983 - protein, 28 aa, Artificial Sequence
  Quasi-synthetic sequence derived from human genome
KCNKKVDTVKRLLIKKLPPVLAIQLKRF

SEQ ID NO: 20984 - protein, 28 aa, Artificial Sequence
  Quasi-synthetic sequence derived from human genome
LKQLLHKHQRKSIFKIKKKSLSTSIVWI

SEQ ID NO: 20985 - protein, 28 aa, Artificial Sequence
  Quasi-synthetic sequence derived from human genome
RRILIRYYIKSIIYYMVTSPKLLSWIKN

SEQ ID NO: 20986 - protein, 28 aa, Artificial Sequence
  Quasi-synthetic sequence derived from human genome
VRAYIRHLNRIVTIIQKWWRSFLGRKQY

SEQ ID NO: 20987 - protein, 28 aa, Artificial Sequence
  Quasi-synthetic sequence derived from human genome
FHRWKVVLLVRTDKRSDSLIRKKFRMMK

SEQ ID NO: 20988 - protein, 28 aa, Artificial Sequence
  Quasi-synthetic sequence derived from human genome
RMRIFAPNHVVAKSRFWYFVSQLKKMKK

SEQ ID NO: 20989 - protein, 28 aa, Artificial Sequence
  Quasi-synthetic sequence derived from human genome
KKRKRAIKLIVTVLAMYLICFTPSNLLL

SEQ ID NO: 20990 - protein, 28 aa, Artificial Sequence
  Quasi-synthetic sequence derived from human genome
RLWEAVKRRKALCKRKSWMSKVFSGKRL

SEQ ID NO: 20991 - protein, 28 aa, Artificial Sequence
  Quasi-synthetic sequence derived from human genome
LSSFVRKARHRRPLSSFVRKARHRRTLF

SEQ ID NO: 20992 - protein, 28 aa, Artificial Sequence
  Quasi-synthetic sequence derived from human genome
VRKAIGKYRIKLLDTLPLPGRLIRYLKY

SEQ ID NO: 20993 - protein, 28 aa, Artificial Sequence
  Quasi-synthetic sequence derived from human genome
RLILKAFLLKFVNAYSPIFYVAFFKGRF

SEQ ID NO: 20994 - protein, 28 aa, Artificial Sequence
  Quasi-synthetic sequence derived from human genome
LRSKIHKKVDRKASKGRKLRFHVLSKLL

SEQ ID NO: 20995 - protein, 28 aa, Artificial Sequence
  Quasi-synthetic sequence derived from human genome
VKRRYLDWRALMKRKRMKANIKLVGSGF

SEQ ID NO: 20996 - protein, 28 aa, Artificial Sequence
  Quasi-synthetic sequence derived from human genome
LVRTLRVLLDSPVKRRLLPMLRLVIPRS

SEQ ID NO: 20997 - protein, 28 aa, Artificial Sequence
  Quasi-synthetic sequence derived from human genome
MLRCLYHWHRPVLNRRWSRLCLPKQYLF

SEQ ID NO: 20998 - protein, 28 aa, Artificial Sequence
  Quasi-synthetic sequence derived from human genome
LIVLVTLIFCLIVLSLSTFHIHKRRMKK

SEQ ID NO: 20999 - protein, 28 aa, Artificial Sequence
  Quasi-synthetic sequence derived from human genome
RWIRGFLVRKNLSPVFFHKKKQQEKIIR

SEQ ID NO: 21000 - protein, 28 aa, Artificial Sequence
  Quasi-synthetic sequence derived from human genome
ATVSCVFLAFVLVLLALRLRRWHKSRLL

SEQ ID NO: 21001 - protein, 29 aa, Artificial Sequence
  Quasi-synthetic sequence derived from human genome
LFLLFFLFRLLLRFLRLCRSFYITCRRLR

SEQ ID NO: 21002 - protein, 29 aa, Artificial Sequence
  Quasi-synthetic sequence derived from human genome
RIFKRKKRIKRRALLFLSYILTHFIFLAL

SEQ ID NO: 21003 - protein, 29 aa, Artificial Sequence
  Quasi-synthetic sequence derived from human genome
RLLKRLLGPKLRRFLKPQGHPRLLLWFKR

SEQ ID NO: 21004 - protein, 29 aa, Artificial Sequence
  Quasi-synthetic sequence derived from human genome
IRLSLIMQLVALLLVVLWIRWKCRRLRIR

SEQ ID NO: 21005 - protein, 29 aa, Artificial Sequence
  Quasi-synthetic sequence derived from human genome
LRLLRLIILLRIFHLFHQKRQLEKLIRRR

SEQ ID NO: 21006 - protein, 29 aa, Artificial Sequence
  Quasi-synthetic sequence derived from human genome
LKRLVKLHIKRHYHKKFWKLGAVIFFFII

SEQ ID NO: 21007 - protein, 29 aa, Artificial Sequence
  Quasi-synthetic sequence derived from human genome
VVVMKFFRWVRRAWQRIISWVFFWRQKIK

SEQ ID NO: 21008 - protein, 29 aa, Artificial Sequence
  Quasi-synthetic sequence derived from human genome
YKTARALRIVRFTKILSLLRLLRLSRLIR

SEQ ID NO: 21009 - protein, 29 aa, Artificial Sequence
  Quasi-synthetic sequence derived from human genome
RIRASLVLILKTIRRRLPFSKWRLAFRFA

SEQ ID NO: 21010 - protein, 29 aa, Artificial Sequence
  Quasi-synthetic sequence derived from human genome
KKKKKFCYLCILLLIVLFILLCCLYRLCK

SEQ ID NO: 21011 - protein, 29 aa, Artificial Sequence
  Quasi-synthetic sequence derived from human genome
YKTMKFILWRRFRWAIILFIILFILLLFL

SEQ ID NO: 21012 - protein, 29 aa, Artificial Sequence
  Quasi-synthetic sequence derived from human genome
PWVYLLLRKILLRKFCQMRKRRLREQFWR

SEQ ID NO: 21013 - protein, 29 aa, Artificial Sequence
  Quasi-synthetic sequence derived from human genome
VIAGILLFVIIFLGVVLVMKKRKLAKKRK

SEQ ID NO: 21014 - protein, 29 aa, Artificial Sequence
  Quasi-synthetic sequence derived from human genome
RRKGVWLRLRKILFCVLGLYIAIPFLIKL

SEQ ID NO: 21015 - protein, 29 aa, Artificial Sequence
  Quasi-synthetic sequence derived from human genome
RKLTHLRKRIHRPRRRTTRRWKRWFKFRK

SEQ ID NO: 21016 - protein, 29 aa, Artificial Sequence
  Quasi-synthetic sequence derived from human genome
FILVIVGLTFAVYVRRKSIKKKRALRRFL

SEQ ID NO: 21017 - protein, 29 aa, Artificial Sequence
  Quasi-synthetic sequence derived from human genome
WRGTLARWRCRRLRAIYTIMRWFRRHKVR

SEQ ID NO: 21018 - protein, 29 aa, Artificial Sequence
  Quasi-synthetic sequence derived from human genome
RFFRFLLRKLYVFRRSFLMTCISLRNLIL

SEQ ID NO: 21019 - protein, 29 aa, Artificial Sequence
  Quasi-synthetic sequence derived from human genome
KLLKRLRLLPALLILRAFKPHRKIRDYRV

SEQ ID NO: 21020 - protein, 29 aa, Artificial Sequence
  Quasi-synthetic sequence derived from human genome
IKLLRNIPRWTHLVRLLRLIILIRIFHLL

SEQ ID NO: 21021 - protein, 29 aa, Artificial Sequence
  Quasi-synthetic sequence derived from human genome
LLIWVPVKVILHKKRYIYRKIKGWRPVLM

SEQ ID NO: 21022 - protein, 29 aa, Artificial Sequence
  Quasi-synthetic sequence derived from human genome
LRTFRLLRVLKLVRFMPALRRQLVVLMKT

SEQ ID NO: 21023 - protein, 29 aa, Artificial Sequence
  Quasi-synthetic sequence derived from human genome
VLGFLRVVRFVRILRIFKLTRHFVGLRVL

SEQ ID NO: 21024 - protein, 29 aa, Artificial Sequence
  Quasi-synthetic sequence derived from human genome
RLLRGLRRRNVQKKVALAKKLLAKLRFLA

SEQ ID NO: 21025 - protein, 29 aa, Artificial Sequence
  Quasi-synthetic sequence derived from human genome
KRFLKHAGKWSLRWFLSPRWILQFRRWAR

SEQ ID NO: 21026 - protein, 29 aa, Artificial Sequence
  Quasi-synthetic sequence derived from human genome
LFRVIRLARIGRILRLIRAAKGIRTLLFA

SEQ ID NO: 21027 - protein, 29 aa, Artificial Sequence
  Quasi-synthetic sequence derived from human genome
ILPVLGAVLALLFLLLVLLLLVRKKRKIK

SEQ ID NO: 21028 - protein, 29 aa, Artificial Sequence
  Quasi-synthetic sequence derived from human genome
RAFLRLLRCQCRRRRRRRPLWRVYGHHWR

SEQ ID NO: 21029 - protein, 29 aa, Artificial Sequence
  Quasi-synthetic sequence derived from human genome
LFRILKVFKSLRALRAIRVLRRLSFLTSV

SEQ ID NO: 21030 - protein, 29 aa, Artificial Sequence
  Quasi-synthetic sequence derived from human genome
WIFIIFRSPVFRIFFHKIFIRPLRYRSRC

SEQ ID NO: 21031 - protein, 29 aa, Artificial Sequence
  Quasi-synthetic sequence derived from human genome
IQRRFRTLMMRRRFLSLKKTAILIQRKYR

SEQ ID NO: 21032 - protein, 29 aa, Artificial Sequence
  Quasi-synthetic sequence derived from human genome
FNKFWRRYGKLSRHLMKVKLKKYTKFLFV

SEQ ID NO: 21033 - protein, 29 aa, Artificial Sequence
  Quasi-synthetic sequence derived from human genome
TALLFLLFFLTLRFSVVKRGRKKLLYIFK

SEQ ID NO: 21034 - protein, 29 aa, Artificial Sequence
  Quasi-synthetic sequence derived from human genome
RALRAPRKKIHRRVLKKNPLKNLRIMLKL

SEQ ID NO: 21035 - protein, 29 aa, Artificial Sequence
  Quasi-synthetic sequence derived from human genome
LFRIVRLARIGRILRLVRAARGIRTLLFA

SEQ ID NO: 21036 - protein, 29 aa, Artificial Sequence
  Quasi-synthetic sequence derived from human genome
LFRVIRLARIGRILRLIRGAKGIRTLLFA

SEQ ID NO: 21037 - protein, 29 aa, Artificial Sequence
  Quasi-synthetic sequence derived from human genome
RTFRLLRVLKLVRFMPALRRQLVVLMKTM

SEQ ID NO: 21038 - protein, 29 aa, Artificial Sequence
  Quasi-synthetic sequence derived from human genome
LLHALLLVLLLCRLRRLRARARARAAARL

SEQ ID NO: 21039 - protein, 29 aa, Artificial Sequence
  Quasi-synthetic sequence derived from human genome
LFRVIRLARIGRILRLIKGAKGIRTLLFA

SEQ ID NO: 21040 - protein, 29 aa, Artificial Sequence
  Quasi-synthetic sequence derived from human genome
IAMFLVIFPMFTFPKKLPPRHKKKKKKKF

SEQ ID NO: 21041 - protein, 29 aa, Artificial Sequence
  Quasi-synthetic sequence derived from human genome
RLFKLKPPVWYLRSLVQNLLLIRRFKKTI

SEQ ID NO: 21042 - protein, 29 aa, Artificial Sequence
  Quasi-synthetic sequence derived from human genome
RLRKRVNAALVIQKYWRRVLAQRKLLMLK

SEQ ID NO: 21043 - protein, 29 aa, Artificial Sequence
  Quasi-synthetic sequence derived from human genome
LLLVILAMGLWVIRVQKRHKMPRMKKLMR

SEQ ID NO: 21044 - protein, 29 aa, Artificial Sequence
  Quasi-synthetic sequence derived from human genome
RLCLRLLLLLGYRRRCPPLLRGLVQRWRY

SEQ ID NO: 21045 - protein, 29 aa, Artificial Sequence
  Quasi-synthetic sequence derived from human genome
RRLTRRLVLPVFGVLWITVLLFFWVTKRK

SEQ ID NO: 21046 - protein, 29 aa, Artificial Sequence
  Quasi-synthetic sequence derived from human genome
LRLLLFFRFKRTLDRICVLFLLGWHRKPR

SEQ ID NO: 21047 - protein, 29 aa, Artificial Sequence
  Quasi-synthetic sequence derived from human genome
LQRCLRGFFIKRRFRSLRHKIILLQSRAR

SEQ ID NO: 21048 - protein, 29 aa, Artificial Sequence
  Quasi-synthetic sequence derived from human genome
PRAARPPLLLRPVKLLRRRFRLLLALAVV

SEQ ID NO: 21049 - protein, 29 aa, Artificial Sequence
  Quasi-synthetic sequence derived from human genome
KHFLRMLIQVCLYFYCKFLWRCLKFVMRK

SEQ ID NO: 21050 - protein, 29 aa, Artificial Sequence
  Quasi-synthetic sequence derived from human genome
YFALRRKKKKTIKMLMLVVVLFALCWFPL

SEQ ID NO: 21051 - protein, 29 aa, Artificial Sequence
  Quasi-synthetic sequence derived from human genome
LLFLMRKDKKKLRRLLKYMFIRDYKSKIV

SEQ ID NO: 21052 - protein, 29 aa, Artificial Sequence
  Quasi-synthetic sequence derived from human genome
LFRVIRLARIGRVLRLIRGAKGIRTLLFA

SEQ ID NO: 21053 - protein, 29 aa, Artificial Sequence
  Quasi-synthetic sequence derived from human genome
KFLRRTKAATIIQKYWRMYVVRRRYKIRR

SEQ ID NO: 21054 - protein, 29 aa, Artificial Sequence
  Quasi-synthetic sequence derived from human genome
CRCRGRKRCIKKFSIQRFPKILVLHLKRF

SEQ ID NO: 21055 - protein, 29 aa, Artificial Sequence
  Quasi-synthetic sequence derived from human genome
IAVFLPIVVLIFKSILFLPCLRKKILKIR

SEQ ID NO: 21056 - protein, 29 aa, Artificial Sequence
  Quasi-synthetic sequence derived from human genome
PISKRWTHLVRLLRLIILIRIFHLLHQKR

SEQ ID NO: 21057 - protein, 29 aa, Artificial Sequence
  Quasi-synthetic sequence derived from human genome
RHFRARFRRLWPCGRRRRHRARRALRRVR

SEQ ID NO: 21058 - protein, 29 aa, Artificial Sequence
  Quasi-synthetic sequence derived from human genome
LFRVIRLARIGRILRLVKGAKGIRTLLFA

SEQ ID NO: 21059 - protein, 29 aa, Artificial Sequence
  Quasi-synthetic sequence derived from human genome
LKRFKVMKPKVLRSWCRQILKGLLFLHTR

SEQ ID NO: 21060 - protein, 29 aa, Artificial Sequence
  Quasi-synthetic sequence derived from human genome
RKSWRLEFLFLRRRCFLLTFYLWFLFFSR

SEQ ID NO: 21061 - protein, 29 aa, Artificial Sequence
  Quasi-synthetic sequence derived from human genome
LLRLLGLRRGLRRLRRLWAGPRVQRGRGR

SEQ ID NO: 21062 - protein, 29 aa, Artificial Sequence
  Quasi-synthetic sequence derived from human genome
FRRKIYYLPRRYKFMSRIDKQISRFRRWL

SEQ ID NO: 21063 - protein, 29 aa, Artificial Sequence
  Quasi-synthetic sequence derived from human genome
WLIFLLIILSYIKIGKNLLRISKRRSKFP

SEQ ID NO: 21064 - protein, 29 aa, Artificial Sequence
  Quasi-synthetic sequence derived from human genome
LIYWPRFIRHKCKQRFTKITQYLIRIRKL

SEQ ID NO: 21065 - protein, 29 aa, Artificial Sequence
  Quasi-synthetic sequence derived from human genome
FWKKKKSMIGMSTKLWKVKKALKMTIFWR

SEQ ID NO: 21066 - protein, 29 aa, Artificial Sequence
  Quasi-synthetic sequence derived from human genome
LKSRKRRKMSKKLPPVIIKYIIINRFRGR

SEQ ID NO: 21067 - protein, 29 aa, Artificial Sequence
  Quasi-synthetic sequence derived from human genome
WVYLLLRKILLRKFCQMRKRRLREQAPLL

SEQ ID NO: 21068 - protein, 29 aa, Artificial Sequence
  Quasi-synthetic sequence derived from human genome
FLLKKRKWPLKGWHKRFFYLDKGILKYAK

SEQ ID NO: 21069 - protein, 29 aa, Artificial Sequence
  Quasi-synthetic sequence derived from human genome
FIVTLLVYIKIYIVLRRRRKRVNTKRSSR

SEQ ID NO: 21070 - protein, 29 aa, Artificial Sequence
  Quasi-synthetic sequence derived from human genome
FSRSKKKKKKKKKRQCFAFLIYFRLGIKM

SEQ ID NO: 21071 - protein, 29 aa, Artificial Sequence
  Quasi-synthetic sequence derived from human genome
PWVYLLLRKILLRKFCQMRKRRLREQLIC

SEQ ID NO: 21072 - protein, 29 aa, Artificial Sequence
  Quasi-synthetic sequence derived from human genome
KILGVLRVLRLLRTLRPLRVISRAPGLKL

SEQ ID NO: 21073 - protein, 29 aa, Artificial Sequence
  Quasi-synthetic sequence derived from human genome
KKRILFLYNDLLKKRAAFTKLRRAAILRR

SEQ ID NO: 21074 - protein, 29 aa, Artificial Sequence
  Quasi-synthetic sequence derived from human genome
LYSGWLRKSPPEKKLRLFAWRKRWFILRR

SEQ ID NO: 21075 - protein, 29 aa, Artificial Sequence
  Quasi-synthetic sequence derived from human genome
VLRTFRLMRVLKLVRFLPALQRQLVVLMK

SEQ ID NO: 21076 - protein, 29 aa, Artificial Sequence
  Quasi-synthetic sequence derived from human genome
AFVGILLFLILVGLLIFFLKRRNKKKQQK

SEQ ID NO: 21077 - protein, 29 aa, Artificial Sequence
  Quasi-synthetic sequence derived from human genome
WRFIRVFIKTIRRDIFGGLVLLKVKAKVR

SEQ ID NO: 21078 - protein, 29 aa, Artificial Sequence
  Quasi-synthetic sequence derived from human genome
IMALLLLLLLLLLYKYKQKPKYQVRWKII

SEQ ID NO: 21079 - protein, 29 aa, Artificial Sequence
  Quasi-synthetic sequence derived from human genome
RRLQARRFRRSRRTGRLVVLIILTFAAFW

SEQ ID NO: 21080 - protein, 29 aa, Artificial Sequence
  Quasi-synthetic sequence derived from human genome
KTLLRCPSKKKYKAIRLIFVIMAVFFIFW

SEQ ID NO: 21081 - protein, 29 aa, Artificial Sequence
  Quasi-synthetic sequence derived from human genome
KKIVPKKKKPLKLGPIKKKDLKKLVLYLK

SEQ ID NO: 21082 - protein, 29 aa, Artificial Sequence
  Quasi-synthetic sequence derived from human genome
KAKTKRRLVLGLREVLKHLKLKKLKCVII

SEQ ID NO: 21083 - protein, 29 aa, Artificial Sequence
  Quasi-synthetic sequence derived from human genome
RRWRRWNRFNRRRCRAAVKSVTFYWLVIV

SEQ ID NO: 21084 - protein, 29 aa, Artificial Sequence
  Quasi-synthetic sequence derived from human genome
LKRFKVMKIKVLRSWCRQILKGLQFLHTR

SEQ ID NO: 21085 - protein, 29 aa, Artificial Sequence
  Quasi-synthetic sequence derived from human genome
FRYLQRLLLVHGRWSYIRMCKFLRYFFYK

SEQ ID NO: 21086 - protein, 29 aa, Artificial Sequence
  Quasi-synthetic sequence derived from human genome
FFRRKLIDAVGFSPLRILRKRNKALRKIR

SEQ ID NO: 21087 - protein, 29 aa, Artificial Sequence
  Quasi-synthetic sequence derived from human genome
IRNIGIWFFWIRLYKIRRGRTRPQALLFL

SEQ ID NO: 21088 - protein, 29 aa, Artificial Sequence
  Quasi-synthetic sequence derived from human genome
LKLAKIILALKVSRKNLLNVCKLIFKISR

SEQ ID NO: 21089 - protein, 29 aa, Artificial Sequence
  Quasi-synthetic sequence derived from human genome
RYWRRWNRFCRRKCRAAVKSNVFYWLVIF

SEQ ID NO: 21090 - protein, 29 aa, Artificial Sequence
  Quasi-synthetic sequence derived from human genome
LRAACIRIQKTIRGWLLRKKYLRMRKAAI

SEQ ID NO: 21091 - protein, 29 aa, Artificial Sequence
  Quasi-synthetic sequence derived from human genome
FNWAKIRKLSFKRKHFLIKLHANILVLCK

SEQ ID NO: 21092 - protein, 29 aa, Artificial Sequence
  Quasi-synthetic sequence derived from human genome
RFRSLLVRRRFISLKKATIFVQRKYRATI

SEQ ID NO: 21093 - protein, 29 aa, Artificial Sequence
  Quasi-synthetic sequence derived from human genome
RWRRWNRFNRRRCRAAVKSVTFYWLVIVL

SEQ ID NO: 21094 - protein, 29 aa, Artificial Sequence
  Quasi-synthetic sequence derived from human genome
LRVKRSVTRIKKRSRSVFYRLTILILVFA

SEQ ID NO: 21095 - protein, 29 aa, Artificial Sequence
  Quasi-synthetic sequence derived from human genome
RARRRRRRRRRRDLLLSQLCFLASVALLL

SEQ ID NO: 21096 - protein, 29 aa, Artificial Sequence
  Quasi-synthetic sequence derived from human genome
KIKTFLSLVWKRRILFFVVTLVSVFLVWK

SEQ ID NO: 21097 - protein, 29 aa, Artificial Sequence
  Quasi-synthetic sequence derived from human genome
NQILDPWVYLLLRKILLRKFCQMRKRRLR

SEQ ID NO: 21098 - protein, 29 aa, Artificial Sequence
  Quasi-synthetic sequence derived from human genome
FILIMGNSKLREAFLKMLRFVKCFLRRRK

SEQ ID NO: 21099 - protein, 29 aa, Artificial Sequence
  Quasi-synthetic sequence derived from human genome
MKKKTFKGLIRIFRKGVIAVLAANRLKIL

SEQ ID NO: 21100 - protein, 29 aa, Artificial Sequence
  Quasi-synthetic sequence derived from human genome
VLVKKYQAVLRRKALLIFLVVHRLRWSSK

SEQ ID NO: 21101 - protein, 29 aa, Artificial Sequence
  Quasi-synthetic sequence derived from human genome
HVRIRVIKKKKVIMKKRKKLTLTRPTPLV

SEQ ID NO: 21102 - protein, 29 aa, Artificial Sequence
  Quasi-synthetic sequence derived from human genome
AKFRRRTCIILALFILFIFSLMMGLKMLR

SEQ ID NO: 21103 - protein, 29 aa, Artificial Sequence
  Quasi-synthetic sequence derived from human genome
LLRKRWFQLGRSMNPRARKKRSRIPLLRK

SEQ ID NO: 21104 - protein, 29 aa, Artificial Sequence
  Quasi-synthetic sequence derived from human genome
QILLKKYLMKRRWKKNFIAVSAANRFKKI

SEQ ID NO: 21105 - protein, 29 aa, Artificial Sequence
  Quasi-synthetic sequence derived from human genome
CVATVIFIITKFCLFCFRKLAKKGKKKKR

SEQ ID NO: 21106 - protein, 29 aa, Artificial Sequence
  Quasi-synthetic sequence derived from human genome
LLFLCLLPLIVKHIRKKQAKKAAAIRAKK

SEQ ID NO: 21107 - protein, 29 aa, Artificial Sequence
  Quasi-synthetic sequence derived from human genome
PTIIRIMRVLRIARVLKLLKMAVGMRALL

SEQ ID NO: 21108 - protein, 29 aa, Artificial Sequence
  Quasi-synthetic sequence derived from human genome
WKTWIFWKTWIFWKTWIFRKTYIGWKTWI

SEQ ID NO: 21109 - protein, 29 aa, Artificial Sequence
  Quasi-synthetic sequence derived from human genome
LIRKKFRMMKIPKPILFGLNIAMKKQTKI

SEQ ID NO: 21110 - protein, 29 aa, Artificial Sequence
  Quasi-synthetic sequence derived from human genome
RRVLVLMASKHAFLALCALRFKRKIIGLK

SEQ ID NO: 21111 - protein, 29 aa, Artificial Sequence
  Quasi-synthetic sequence derived from human genome
RRGIGYLKLICFLIPFLLSLKKKMKVPYL

SEQ ID NO: 21112 - protein, 29 aa, Artificial Sequence
  Quasi-synthetic sequence derived from human genome
KARRHLKMMHIAATLIQRRFRTLMMRRRF

SEQ ID NO: 21113 - protein, 29 aa, Artificial Sequence
  Quasi-synthetic sequence derived from human genome
KRRYSFRLHIGRNIARPWKLIYYRAKKMF

SEQ ID NO: 21114 - protein, 29 aa, Artificial Sequence
  Quasi-synthetic sequence derived from human genome
SRRRGFGLFFFLRLHRLLLLFLVLRGTLA

SEQ ID NO: 21115 - protein, 29 aa, Artificial Sequence
  Quasi-synthetic sequence derived from human genome
RRSCWRKWKQLSRLQRNMILFLLAFLLFC

SEQ ID NO: 21116 - protein, 29 aa, Artificial Sequence
  Quasi-synthetic sequence derived from human genome
LRIIRFLPLFKIIVPILIRIADVQIKKRL

SEQ ID NO: 21117 - protein, 29 aa, Artificial Sequence
  Quasi-synthetic sequence derived from human genome
LLVVVLGVVFGILIKRRQQKIRKYTMRRL

SEQ ID NO: 21118 - protein, 29 aa, Artificial Sequence
  Quasi-synthetic sequence derived from human genome
RLLLSCLLLPAARLARQYLLPLLRRLARR

SEQ ID NO: 21119 - protein, 29 aa, Artificial Sequence
  Quasi-synthetic sequence derived from human genome
IQKNYRAFLLRRRFLHLKKAAIVFQKQLR

SEQ ID NO: 21120 - protein, 29 aa, Artificial Sequence
  Quasi-synthetic sequence derived from human genome
RFLRLHCGLWVRRKAGYKKKLWKKTPARK

SEQ ID NO: 21121 - protein, 29 aa, Artificial Sequence
  Quasi-synthetic sequence derived from human genome
AILRVIRLVRVFRIFKLSRHSKGLQILGK

SEQ ID NO: 21122 - protein, 29 aa, Artificial Sequence
  Quasi-synthetic sequence derived from human genome
ILRTLFRSRSKRRHRTVKLIFAIVVAYFL

SEQ ID NO: 21123 - protein, 29 aa, Artificial Sequence
  Quasi-synthetic sequence derived from human genome
NMRKNMRVLSRISKFRRLRQLLRRRKKTR

SEQ ID NO: 21124 - protein, 29 aa, Artificial Sequence
  Quasi-synthetic sequence derived from human genome
KKKIKPTLPLRIFINVSRFFCVQLKKMVR

SEQ ID NO: 21125 - protein, 29 aa, Artificial Sequence
  Quasi-synthetic sequence derived from human genome
LWRRQIYAVATLRFLKLRRERRALLCLLL

SEQ ID NO: 21126 - protein, 29 aa, Artificial Sequence
  Quasi-synthetic sequence derived from human genome
LLAVIVLVALLLLWRRRQKRRTGALVLSR

SEQ ID NO: 21127 - protein, 29 aa, Artificial Sequence
  Quasi-synthetic sequence derived from human genome
FLPKCIRAKIQDYHILTRKRIRYRFRRFI

SEQ ID NO: 21128 - protein, 29 aa, Artificial Sequence
  Quasi-synthetic sequence derived from human genome
LAILRIIRLVRVFRIFKLSRHSKGLQILG

SEQ ID NO: 21129 - protein, 29 aa, Artificial Sequence
  Quasi-synthetic sequence derived from human genome
SFAILRIIRLVRVFRIFKLSRHSKGLQIL

SEQ ID NO: 21130 - protein, 29 aa, Artificial Sequence
  Quasi-synthetic sequence derived from human genome
LLIMFITIVFCAAGIVVLVLHRRRRYKKK

SEQ ID NO: 21131 - protein, 29 aa, Artificial Sequence
  Quasi-synthetic sequence derived from human genome
LSWNVIRYSLQKLRLVRWLLKKVFQCRRA

SEQ ID NO: 21132 - protein, 29 aa, Artificial Sequence
  Quasi-synthetic sequence derived from human genome
KQRLKRLRNIHYLFNTALFLIAWRLLIAR

SEQ ID NO: 21133 - protein, 29 aa, Artificial Sequence
  Quasi-synthetic sequence derived from human genome
LLQLKGKKHVLHLWPKRLLLPRHLRVFSF

SEQ ID NO: 21134 - protein, 29 aa, Artificial Sequence
  Quasi-synthetic sequence derived from human genome
WVFRLKRRKRIARRLVDTLRNCFMFGCFL

SEQ ID NO: 21135 - protein, 29 aa, Artificial Sequence
  Quasi-synthetic sequence derived from human genome
RLFRIKCVTRIQAYWRGCVVRKWYRNLRK

SEQ ID NO: 21136 - protein, 29 aa, Artificial Sequence
  Quasi-synthetic sequence derived from human genome
LLRICRVLRSLKLLAQFRQIQIIILVLVR

SEQ ID NO: 21137 - protein, 29 aa, Artificial Sequence
  Quasi-synthetic sequence derived from human genome
LFFWMLFKALLIIYGILVIFRRMMKSRMM

SEQ ID NO: 21138 - protein, 29 aa, Artificial Sequence
  Quasi-synthetic sequence derived from human genome
MAKLWFKFQRYFRRKPVRFFTFLALYLTA

SEQ ID NO: 21139 - protein, 29 aa, Artificial Sequence
  Quasi-synthetic sequence derived from human genome
RRLRRLAHLVLFCPFSKRLQGRLPGLRVR

SEQ ID NO: 21140 - protein, 29 aa, Artificial Sequence
  Quasi-synthetic sequence derived from human genome
KRDLTRFVKWPRYIRLQRQRAILYKRLKV

SEQ ID NO: 21141 - protein, 29 aa, Artificial Sequence
  Quasi-synthetic sequence derived from human genome
LVSFLIFILFIIVQLFIMKLRKAHVIWKK

SEQ ID NO: 21142 - protein, 29 aa, Artificial Sequence
  Quasi-synthetic sequence derived from human genome
RKKRKIPKLVLRINAIYEVRRGKKRVKRL

SEQ ID NO: 21143 - protein, 29 aa, Artificial Sequence
  Quasi-synthetic sequence derived from human genome
IIQKYFFSPTLFRVIRLARIGRILRLIRG

SEQ ID NO: 21144 - protein, 29 aa, Artificial Sequence
  Quasi-synthetic sequence derived from human genome
RYLRVKLTVRYKRVTTHRRIWLALGLCWL

SEQ ID NO: 21145 - protein, 29 aa, Artificial Sequence
  Quasi-synthetic sequence derived from human genome
FNLPRLCIRKFFPKKKCFVFDLPIHRRKL

SEQ ID NO: 21146 - protein, 29 aa, Artificial Sequence
  Quasi-synthetic sequence derived from human genome
CFAGFWLIWGLIVLLCCFCSFLRRRLKRR

SEQ ID NO: 21147 - protein, 29 aa, Artificial Sequence
  Quasi-synthetic sequence derived from human genome
WVYILFRRAVLRRLQPRLSTRPRRSLTLW

SEQ ID NO: 21148 - protein, 29 aa, Artificial Sequence
  Quasi-synthetic sequence derived from human genome
IMSKFKLLSSLPRWRRIAQKIIRERRKKR

SEQ ID NO: 21149 - protein, 29 aa, Artificial Sequence
  Quasi-synthetic sequence derived from human genome
LIVRVLVRAHRHRGLRPRRQKALRMILAV

SEQ ID NO: 21150 - protein, 29 aa, Artificial Sequence
  Quasi-synthetic sequence derived from human genome
LVLFFSAVFVAAGLFAYVLRRRRKKLPFR

SEQ ID NO: 21151 - protein, 29 aa, Artificial Sequence
  Quasi-synthetic sequence derived from human genome
RIRILCCLTFLVKVKSKALLKNRLLPPLL

SEQ ID NO: 21152 - protein, 29 aa, Artificial Sequence
  Quasi-synthetic sequence derived from human genome
RKHLNKLRNIRYGFNTILVILIWRIFIAR

SEQ ID NO: 21153 - protein, 29 aa, Artificial Sequence
  Quasi-synthetic sequence derived from human genome
WLRRKLRGKRRPVIAFCLLMILSAMAVTR

SEQ ID NO: 21154 - protein, 29 aa, Artificial Sequence
  Quasi-synthetic sequence derived from human genome
VKMRKEVKRIRVLVIRKLVRSVGRLKSKK

SEQ ID NO: 21155 - protein, 29 aa, Artificial Sequence
  Quasi-synthetic sequence derived from human genome
LIRHKLKEVRLFLKNYSKTRFGYRIKWRI

SEQ ID NO: 21156 - protein, 29 aa, Artificial Sequence
  Quasi-synthetic sequence derived from human genome
RRTRLILFVLLLFGIYGLLKNPFLSVRFR

SEQ ID NO: 21157 - protein, 29 aa, Artificial Sequence
  Quasi-synthetic sequence derived from human genome
ILTRLMNFFVFSRGLLQYINQRKKFRRRW

SEQ ID NO: 21158 - protein, 29 aa, Artificial Sequence
  Quasi-synthetic sequence derived from human genome
RDIKTIKSLRVLRVLRPLKTIKRLPKLKA

SEQ ID NO: 21159 - protein, 29 aa, Artificial Sequence
  Quasi-synthetic sequence derived from human genome
LSFLRLFRAARLIKLLRQGYTIRILLWTF

SEQ ID NO: 21160 - protein, 29 aa, Artificial Sequence
  Quasi-synthetic sequence derived from human genome
RAWKRIFWRQILLTLGLLGLFLYGLPKFR

SEQ ID NO: 21161 - protein, 29 aa, Artificial Sequence
  Quasi-synthetic sequence derived from human genome
WRWLTFWRRLQSAFLKNRSLRTKSSLWRR

SEQ ID NO: 21162 - protein, 29 aa, Artificial Sequence
  Quasi-synthetic sequence derived from human genome
FNLPRLCIRKFFPKKKCFVFDRPVHRRKL

SEQ ID NO: 21163 - protein, 29 aa, Artificial Sequence
  Quasi-synthetic sequence derived from human genome
VKIRSRKLGIFRRCWLVFKKASSKGPRRL

SEQ ID NO: 21164 - protein, 29 aa, Artificial Sequence
  Quasi-synthetic sequence derived from human genome
MLLRKRYRHRPCRLQFLLLLLMLGCVLMM

SEQ ID NO: 21165 - protein, 29 aa, Artificial Sequence
  Quasi-synthetic sequence derived from human genome
KILLRRPNEKKSKAVRLIFVIMIIFFLFW

SEQ ID NO: 21166 - protein, 29 aa, Artificial Sequence
  Quasi-synthetic sequence derived from human genome
YLLRIANFSNLIFLRIKRRVKSVVLVILL

SEQ ID NO: 21167 - protein, 29 aa, Artificial Sequence
  Quasi-synthetic sequence derived from human genome
MRLLRRRHMPLRLAMVGCAFVLFLFLLHR

SEQ ID NO: 21168 - protein, 29 aa, Artificial Sequence
  Quasi-synthetic sequence derived from human genome
RRKARRLLKTVLMILLAFLVCWGPLFGLL

SEQ ID NO: 21169 - protein, 29 aa, Artificial Sequence
  Quasi-synthetic sequence derived from human genome
RVMRLMRIFRILKLARHSTGLRAFGFTLR

SEQ ID NO: 21170 - protein, 29 aa, Artificial Sequence
  Quasi-synthetic sequence derived from human genome
MLIRIVLFLQKVWRGTLARMRYKRTKAAL

SEQ ID NO: 21171 - protein, 29 aa, Artificial Sequence
  Quasi-synthetic sequence derived from human genome
FTKITQYLIRIRKLTLKRQRKLVPLSKKV

SEQ ID NO: 21172 - protein, 29 aa, Artificial Sequence
  Quasi-synthetic sequence derived from human genome
KKFWIQKLPKVLCLHLKRFHWTAYLRNKV

SEQ ID NO: 21173 - protein, 29 aa, Artificial Sequence
  Quasi-synthetic sequence derived from human genome
VLVKRKRTKGKKLLLSIGVLLHKWKNVCI

SEQ ID NO: 21174 - protein, 29 aa, Artificial Sequence
  Quasi-synthetic sequence derived from human genome
GMIALLLSILCLVMILYTRRRWCKRRRVP

SEQ ID NO: 21175 - protein, 29 aa, Artificial Sequence
  Quasi-synthetic sequence derived from human genome
GSRALSRRYLRRLLLLLLLLLLRQPVTRA

SEQ ID NO: 21176 - protein, 29 aa, Artificial Sequence
  Quasi-synthetic sequence derived from human genome
LLRGLGKLRQVSLRRNRLRALPRALFRNL

SEQ ID NO: 21177 - protein, 29 aa, Artificial Sequence
  Quasi-synthetic sequence derived from human genome
TKKAIKYQSKARRKLMFIIICVIVLLVIL

SEQ ID NO: 21178 - protein, 29 aa, Artificial Sequence
  Quasi-synthetic sequence derived from human genome
IYIYMNFFFFFSVGRKFKKFNKVRVVRAL

SEQ ID NO: 21179 - protein, 29 aa, Artificial Sequence
  Quasi-synthetic sequence derived from human genome
LALLVLILLCLLIYYCRRRCLKPRQQHRK

SEQ ID NO: 21180 - protein, 29 aa, Artificial Sequence
  Quasi-synthetic sequence derived from human genome
LRKRFGGRRIRLYLSVLSLFLYIFTKISV

SEQ ID NO: 21181 - protein, 29 aa, Artificial Sequence
  Quasi-synthetic sequence derived from human genome
RIARFRFRAFHFLNRFPSVYLRCKMVVCR

SEQ ID NO: 21182 - protein, 29 aa, Artificial Sequence
  Quasi-synthetic sequence derived from human genome
LLRRLRAVRLRSGAKALGKARRKVTVLVL

SEQ ID NO: 21183 - protein, 29 aa, Artificial Sequence
  Quasi-synthetic sequence derived from human genome
LPTVIICVMVFCLILWKWKKKKRPRNSYK

SEQ ID NO: 21184 - protein, 29 aa, Artificial Sequence
  Quasi-synthetic sequence derived from human genome
RIFGKLVFLPLRLVWKEVILRKILILVLV

SEQ ID NO: 21185 - protein, 29 aa, Artificial Sequence
  Quasi-synthetic sequence derived from human genome
EWLVWLRFHKKKWQLQARQRLARRKRQRL

SEQ ID NO: 21186 - protein, 29 aa, Artificial Sequence
  Quasi-synthetic sequence derived from human genome
SLAILRVIRLVRVFRIFKLSRHSKGLQIL

SEQ ID NO: 21187 - protein, 29 aa, Artificial Sequence
  Quasi-synthetic sequence derived from human genome
LKRFKVMKPKVLRSWCRQILKGLQFLHTR

SEQ ID NO: 21188 - protein, 29 aa, Artificial Sequence
  Quasi-synthetic sequence derived from human genome
ILLLLLIIALMLWRLHWRRLLSKAERRVL

SEQ ID NO: 21189 - protein, 29 aa, Artificial Sequence
  Quasi-synthetic sequence derived from human genome
KRLFVIRPSRFYDRRFLKLLRFYIALTGI

SEQ ID NO: 21190 - protein, 29 aa, Artificial Sequence
  Quasi-synthetic sequence derived from human genome
RLKLFFIKNQRSSLRIRLFNFSLKLLSCL

SEQ ID NO: 21191 - protein, 29 aa, Artificial Sequence
  Quasi-synthetic sequence derived from human genome
RSTWLRVRKARPQLILSRRPRRRLGSLRW

SEQ ID NO: 21192 - protein, 29 aa, Artificial Sequence
  Quasi-synthetic sequence derived from human genome
AKRLAIMMMKKREKYLYQKIMFGKRRKIR

SEQ ID NO: 21193 - protein, 29 aa, Artificial Sequence
  Quasi-synthetic sequence derived from human genome
ICRPLRARVLVTRRRVRALIAVLWAVALL

SEQ ID NO: 21194 - protein, 29 aa, Artificial Sequence
  Quasi-synthetic sequence derived from human genome
LILMLGTFFIAFFLRKFRNSRFLGGKARR

SEQ ID NO: 21195 - protein, 29 aa, Artificial Sequence
  Quasi-synthetic sequence derived from human genome
ILGMLRVLRLLRTLRPLRVISRAQGLKLV

SEQ ID NO: 21196 - protein, 29 aa, Artificial Sequence
  Quasi-synthetic sequence derived from human genome
AAAIALLALTALLLVAMICRRRRRRKKAR

SEQ ID NO: 21197 - protein, 29 aa, Artificial Sequence
  Quasi-synthetic sequence derived from human genome
RLKIHFTKVFSAFALVRTIRYLYRRLQRM

SEQ ID NO: 21198 - protein, 29 aa, Artificial Sequence
  Quasi-synthetic sequence derived from human genome
LLLFVLLLVVRRRRREQRLKRLRDAKSLA

SEQ ID NO: 21199 - protein, 29 aa, Artificial Sequence
  Quasi-synthetic sequence derived from human genome
FYLLASVLLSLLLILKAGRRWNKYFKSRR

SEQ ID NO: 21200 - protein, 29 aa, Artificial Sequence
  Quasi-synthetic sequence derived from human genome
PLLLMLVLYGRIFRAARFRIRKTVKKVEK

SEQ ID NO: 21201 - protein, 29 aa, Artificial Sequence
  Quasi-synthetic sequence derived from human genome
LFLLFVLENMLGLLRHRGLRPRCCRRKRR

SEQ ID NO: 21202 - protein, 29 aa, Artificial Sequence
  Quasi-synthetic sequence derived from human genome
LLLILLCMSLLLFQVIRLYQRRRWMIRAL

SEQ ID NO: 21203 - protein, 29 aa, Artificial Sequence
  Quasi-synthetic sequence derived from human genome
PTIIRIMRVLRIARVLKLLKMATGMRALL

SEQ ID NO: 21204 - protein, 29 aa, Artificial Sequence
  Quasi-synthetic sequence derived from human genome
RPTQAKLLAKKRVVRMLLVIVVLFFLCWL

SEQ ID NO: 21205 - protein, 29 aa, Artificial Sequence
  Quasi-synthetic sequence derived from human genome
RLSLKSFLILPFQRITRLKLLLQNILKRT

SEQ ID NO: 21206 - protein, 29 aa, Artificial Sequence
  Quasi-synthetic sequence derived from human genome
FFLQIYLIMIFLGLYINFRHLYKQRRRRY

SEQ ID NO: 21207 - protein, 29 aa, Artificial Sequence
  Quasi-synthetic sequence derived from human genome
TFPLIFGLFIILLVIFLIWRCFLRNKTRR

SEQ ID NO: 21208 - protein, 29 aa, Artificial Sequence
  Quasi-synthetic sequence derived from human genome
KKKKKRYLRASSNRNFLLTMRPFLKRAIL

SEQ ID NO: 21209 - protein, 29 aa, Artificial Sequence
  Quasi-synthetic sequence derived from human genome
KLRGLKRKWIRCSAQATVLHLKKFIAKKL

SEQ ID NO: 21210 - protein, 29 aa, Artificial Sequence
  Quasi-synthetic sequence derived from human genome
LAYLIFCLCSLVGILHLQRALVLRRKRKR

SEQ ID NO: 21211 - protein, 29 aa, Artificial Sequence
  Quasi-synthetic sequence derived from human genome
ITIKLLPLRTFRVFRALKAISVVSRLKVI

SEQ ID NO: 21212 - protein, 29 aa, Artificial Sequence
  Quasi-synthetic sequence derived from human genome
SFRNLRLPKRLRVVYFLARTRLAQRLIMA

SEQ ID NO: 21213 - protein, 29 aa, Artificial Sequence
  Quasi-synthetic sequence derived from human genome
RLARIGRILRLIRGAKGIRTLLFALMMSL

SEQ ID NO: 21214 - protein, 29 aa, Artificial Sequence
  Quasi-synthetic sequence derived from human genome
LRAWMIQCWWRTLVQRRIRQRRQALLRVY

SEQ ID NO: 21215 - protein, 29 aa, Artificial Sequence
  Quasi-synthetic sequence derived from human genome
FFLFIPFFIIFCVLIAIMVKVNFQRKKWR

SEQ ID NO: 21216 - protein, 29 aa, Artificial Sequence
  Quasi-synthetic sequence derived from human genome
KAARDVLGFLRVVRFVRILRIFKLTRHFV

SEQ ID NO: 21217 - protein, 29 aa, Artificial Sequence
  Quasi-synthetic sequence derived from human genome
RVALAVAVLKTVILGLLCLLLLWWRRRKG

SEQ ID NO: 21218 - protein, 29 aa, Artificial Sequence
  Quasi-synthetic sequence derived from human genome
FKFLQRLLLVHGRWSYLRMCKFLCYFFYK

SEQ ID NO: 21219 - protein, 29 aa, Artificial Sequence
  Quasi-synthetic sequence derived from human genome
INVVKILRVLRVLRPLRAINRAKGLKHVV

SEQ ID NO: 21220 - protein, 29 aa, Artificial Sequence
  Quasi-synthetic sequence derived from human genome
ISVVKILRVLRVLRPLRAINRAKGLKHVV

SEQ ID NO: 21221 - protein, 29 aa, Artificial Sequence
  Quasi-synthetic sequence derived from human genome
KFILISSLAILLMVSLLLLSLWKLWRVKK

SEQ ID NO: 21222 - protein, 29 aa, Artificial Sequence
  Quasi-synthetic sequence derived from human genome
LKRKYWWKNLKMMIILGVICAIILIIIIV

SEQ ID NO: 21223 - protein, 29 aa, Artificial Sequence
  Quasi-synthetic sequence derived from human genome
LLRLIILIRIFHLLHQKRQLEKLMRRLVS

SEQ ID NO: 21224 - protein, 29 aa, Artificial Sequence
  Quasi-synthetic sequence derived from human genome
RIRNRCVMTSRPRGVKRRWRLSRIVFRHL

SEQ ID NO: 21225 - protein, 29 aa, Artificial Sequence
  Quasi-synthetic sequence derived from human genome
LRGKMMQRRPRSAEVKYFYFFKILLRLRL

SEQ ID NO: 21226 - protein, 29 aa, Artificial Sequence
  Quasi-synthetic sequence derived from human genome
MSFLKLFRAARLIKLLRQGYTIRILLWTF

SEQ ID NO: 21227 - protein, 29 aa, Artificial Sequence
  Quasi-synthetic sequence derived from human genome
LILCTRSIVLALRLRKRFLNFFLEKYKRP

SEQ ID NO: 21228 - protein, 29 aa, Artificial Sequence
  Quasi-synthetic sequence derived from human genome
RSLKHLCRLKIRKCMGRLHLRCPVFMSFL

SEQ ID NO: 21229 - protein, 29 aa, Artificial Sequence
  Quasi-synthetic sequence derived from human genome
FNVIPSPKSLWYLIKWIWTHLCKKKMRRK

SEQ ID NO: 21230 - protein, 29 aa, Artificial Sequence
  Quasi-synthetic sequence derived from human genome
RLRINRFAWPKILKISYKRSNFYIKIRPG

SEQ ID NO: 21231 - protein, 29 aa, Artificial Sequence
  Quasi-synthetic sequence derived from human genome
VLALAMVPILLLGTPLHLLHRHRRRLRRR

SEQ ID NO: 21232 - protein, 29 aa, Artificial Sequence
  Quasi-synthetic sequence derived from human genome
VRRFLVTLRIRRACGPPRVRVFVVHIPRL

SEQ ID NO: 21233 - protein, 29 aa, Artificial Sequence
  Quasi-synthetic sequence derived from human genome
AVGAGCVIFLLIIIFLTVLLLKLRKRHRK

SEQ ID NO: 21234 - protein, 29 aa, Artificial Sequence
  Quasi-synthetic sequence derived from human genome
FKIQSKLLKHKQIHTRNKAFRALLLKKRR

SEQ ID NO: 21235 - protein, 29 aa, Artificial Sequence
  Quasi-synthetic sequence derived from human genome
RRRRLRRRPRGLRCSRLPPPPPLPLLLGL

SEQ ID NO: 21236 - protein, 29 aa, Artificial Sequence
  Quasi-synthetic sequence derived from human genome
VLAMFFLLVLILSSVFLFRLFKRRQGRIF

SEQ ID NO: 21237 - protein, 29 aa, Artificial Sequence
  Quasi-synthetic sequence derived from human genome
KAAKDVLGFLRVVRFVRILRIFKLTRHFV

SEQ ID NO: 21238 - protein, 29 aa, Artificial Sequence
  Quasi-synthetic sequence derived from human genome
LSRRPRRRLGSLRWCGRRRLRWRLLQAQA

SEQ ID NO: 21239 - protein, 29 aa, Artificial Sequence
  Quasi-synthetic sequence derived from human genome
AISLLVGILIFLLLAVLLWKMGFFRRRYK

SEQ ID NO: 21240 - protein, 29 aa, Artificial Sequence
  Quasi-synthetic sequence derived from human genome
YILFRATRKPLSGRTPRLVYKWFLLIYKL

SEQ ID NO: 21241 - protein, 29 aa, Artificial Sequence
  Quasi-synthetic sequence derived from human genome
RHLRRFILSVIVFGSIVLLMLWLPIRIIK

SEQ ID NO: 21242 - protein, 29 aa, Artificial Sequence
  Quasi-synthetic sequence derived from human genome
TRLKSMLRLLLVKKPSVRSLALKLLAFHL

SEQ ID NO: 21243 - protein, 29 aa, Artificial Sequence
  Quasi-synthetic sequence derived from human genome
WALFFRKRRADMPRVFVFRALLLVLIFLF

SEQ ID NO: 21244 - protein, 29 aa, Artificial Sequence
  Quasi-synthetic sequence derived from human genome
YLRPLKKFLRKLHLPRDLPQKKKLKYMKQ

SEQ ID NO: 21245 - protein, 29 aa, Artificial Sequence
  Quasi-synthetic sequence derived from human genome
RFLLLFIGFVCVLLSFFMARVFMRMKLPR

SEQ ID NO: 21246 - protein, 29 aa, Artificial Sequence
  Quasi-synthetic sequence derived from human genome
LLVLFILFLTWCRVQKQKHLPLRVSTRRR

SEQ ID NO: 21247 - protein, 29 aa, Artificial Sequence
  Quasi-synthetic sequence derived from human genome
ILLLLLLLLLFLILRHRRQGKHWTSTQRK

SEQ ID NO: 21248 - protein, 29 aa, Artificial Sequence
  Quasi-synthetic sequence derived from human genome
MKRMVSWSFHKLKTMKHLLLLLLCVFLVK

SEQ ID NO: 21249 - protein, 29 aa, Artificial Sequence
  Quasi-synthetic sequence derived from human genome
VGGVIGLLILILLIKKLIIFILKKTREKK

SEQ ID NO: 21250 - protein, 29 aa, Artificial Sequence
  Quasi-synthetic sequence derived from human genome
KKIWWIIRGPMMLCVTVNFFIFLKILKLL

SEQ ID NO: 21251 - protein, 29 aa, Artificial Sequence
  Quasi-synthetic sequence derived from human genome
KVIRALLRILCCLLKAICRVLSIPVRVLV

SEQ ID NO: 21252 - protein, 29 aa, Artificial Sequence
  Quasi-synthetic sequence derived from human genome
LKSARYFLWHTYRWLLLKLLLLLLLLLLL

SEQ ID NO: 21253 - protein, 29 aa, Artificial Sequence
  Quasi-synthetic sequence derived from human genome
VWRRLLRKRWVLALVFGLSLVYFLSSTFK

SEQ ID NO: 21254 - protein, 29 aa, Artificial Sequence
  Quasi-synthetic sequence derived from human genome
VRNLKKKLLPWQRRGLLRAQGLRGWKARR

SEQ ID NO: 21255 - protein, 29 aa, Artificial Sequence
  Quasi-synthetic sequence derived from human genome
IALLLLLLVFTVALYAQRRWQKRRRIPQK

SEQ ID NO: 21256 - protein, 29 aa, Artificial Sequence
  Quasi-synthetic sequence derived from human genome
CLALQLYVRRRKKLPSVLLFKKPSPFIFI

SEQ ID NO: 21257 - protein, 29 aa, Artificial Sequence
  Quasi-synthetic sequence derived from human genome
SAFRLQRALRFLLGRLPWRVASGARRFRR

SEQ ID NO: 21258 - protein, 29 aa, Artificial Sequence
  Quasi-synthetic sequence derived from human genome
CLVLLALCLLLPLLLLGGWKRWRRGRAAR

SEQ ID NO: 21259 - protein, 29 aa, Artificial Sequence
  Quasi-synthetic sequence derived from human genome
ARRRRRACIALFLVLLFAFGTLMGLRTLK

SEQ ID NO: 21260 - protein, 29 aa, Artificial Sequence
  Quasi-synthetic sequence derived from human genome
KFIWNHGITLPLKNVRKRRFRKTAKKKYI

SEQ ID NO: 21261 - protein, 29 aa, Artificial Sequence
  Quasi-synthetic sequence derived from human genome
MKILLLCLCLILLRVRSCRRKAARAALGM

SEQ ID NO: 21262 - protein, 29 aa, Artificial Sequence
  Quasi-synthetic sequence derived from human genome
RLYCLKIHGLSSLWRLFRGKKWNVLRQRV

SEQ ID NO: 21263 - protein, 29 aa, Artificial Sequence
  Quasi-synthetic sequence derived from human genome
LFLCGLLSKAKQKLLRHLVPAAALRRKRK

SEQ ID NO: 21264 - protein, 29 aa, Artificial Sequence
  Quasi-synthetic sequence derived from human genome
RKYKKNIKALYIVHPTMFIKTLLILFKPL

SEQ ID NO: 21265 - protein, 29 aa, Artificial Sequence
  Quasi-synthetic sequence derived from human genome
LRIVRFTKILSLLRLLRLSRLIRYIHQWE

SEQ ID NO: 21266 - protein, 29 aa, Artificial Sequence
  Quasi-synthetic sequence derived from human genome
IRKRLRCRRKTVLVLMCILTAYVLCWAPF

SEQ ID NO: 21267 - protein, 29 aa, Artificial Sequence
  Quasi-synthetic sequence derived from human genome
VIMATICFILLILSLICKIKLGPVRRKLK

SEQ ID NO: 21268 - protein, 29 aa, Artificial Sequence
  Quasi-synthetic sequence derived from human genome
WALFFRRPKASLPRVFVLRALLMVLVFLL

SEQ ID NO: 21269 - protein, 29 aa, Artificial Sequence
  Quasi-synthetic sequence derived from human genome
IVLAKKMLRKALKLLNRIFPYNLISLFLH

SEQ ID NO: 21270 - protein, 29 aa, Artificial Sequence
  Quasi-synthetic sequence derived from human genome
MKVKLKKYTKFLFVRDPFVRLISAFRSKF

SEQ ID NO: 21271 - protein, 29 aa, Artificial Sequence
  Quasi-synthetic sequence derived from human genome
KRKYWWKNCKMMIMLGAICAIIVVVIVRR

SEQ ID NO: 21272 - protein, 29 aa, Artificial Sequence
  Quasi-synthetic sequence derived from human genome
KYLKVFYKFINLNRYKIRHTRKKPFKCKN

SEQ ID NO: 21273 - protein, 29 aa, Artificial Sequence
  Quasi-synthetic sequence derived from human genome
RRLRKNLRALVVVHATWYVKAFLALLRPF

SEQ ID NO: 21274 - protein, 29 aa, Artificial Sequence
  Quasi-synthetic sequence derived from human genome
LRRIILLQRWFRVLLCRQHFLHLRQASVI

SEQ ID NO: 21275 - protein, 29 aa, Artificial Sequence
  Quasi-synthetic sequence derived from human genome
LWWFWLLWTVLILFSCCCAFRHRRAKLRL

SEQ ID NO: 21276 - protein, 29 aa, Artificial Sequence
  Quasi-synthetic sequence derived from human genome
MSWPRLIRKLRCYLKEMKNLRKLVFSRCL

SEQ ID NO: 21277 - protein, 29 aa, Artificial Sequence
  Quasi-synthetic sequence derived from human genome
LIQWNIRAFMAVKNWPWMRLFFKIKPLVK

SEQ ID NO: 21278 - protein, 29 aa, Artificial Sequence
  Quasi-synthetic sequence derived from human genome
RLRHPRTRWKNWWVRGILTLAMIAFFFII

SEQ ID NO: 21279 - protein, 29 aa, Artificial Sequence
  Quasi-synthetic sequence derived from human genome
FYVILGFCGLTALYFLIRAFRLKKPQRRR

SEQ ID NO: 21280 - protein, 29 aa, Artificial Sequence
  Quasi-synthetic sequence derived from human genome
RLPVKKIRKQMKLLLLLLLLSCAAWLTYV

SEQ ID NO: 21281 - protein, 29 aa, Artificial Sequence
  Quasi-synthetic sequence derived from human genome
LLLKRFLLARRSRRGLFAQIVLPALFVGL

SEQ ID NO: 21282 - protein, 29 aa, Artificial Sequence
  Quasi-synthetic sequence derived from human genome
IFYLLKIVNFSRLIFHHLKRKAKSVVLVI

SEQ ID NO: 21283 - protein, 29 aa, Artificial Sequence
  Quasi-synthetic sequence derived from human genome
RLKIKQILPTIYKRKNLSLFLSISLLIFW

SEQ ID NO: 21284 - protein, 29 aa, Artificial Sequence
  Quasi-synthetic sequence derived from human genome
RRPRGSTARTLLRLLLRLLLFLGLLALAL

SEQ ID NO: 21285 - protein, 29 aa, Artificial Sequence
  Quasi-synthetic sequence derived from human genome
IVQVMRKQKTINRFLMRKRLLFPALVTLL

SEQ ID NO: 21286 - protein, 29 aa, Artificial Sequence
  Quasi-synthetic sequence derived from human genome
RKGIVRVVFFPFFFRWWLQVTSKVIFFWL

SEQ ID NO: 21287 - protein, 29 aa, Artificial Sequence
  Quasi-synthetic sequence derived from human genome
KLSMIRFRYRILRSQHFRTKSKVCKLRKA

SEQ ID NO: 21288 - protein, 29 aa, Artificial Sequence
  Quasi-synthetic sequence derived from human genome
LVVALGIGLFMRRRHIVRKRTLRRLLQER

SEQ ID NO: 21289 - protein, 29 aa, Artificial Sequence
  Quasi-synthetic sequence derived from human genome
IRRMFRVRNCLRGLGLFLLVFSFFFLLTW

SEQ ID NO: 21290 - protein, 29 aa, Artificial Sequence
  Quasi-synthetic sequence derived from human genome
RWLRIKLWISTVALALVPFLLLIPKFARW

SEQ ID NO: 21291 - protein, 29 aa, Artificial Sequence
  Quasi-synthetic sequence derived from human genome
FRRKEKMFRFFIRRMVKAQSFYWVVLCVV

SEQ ID NO: 21292 - protein, 29 aa, Artificial Sequence
  Quasi-synthetic sequence derived from human genome
QMRLKKHRWYKKILKSRDPIIFSVGWRRF

SEQ ID NO: 21293 - protein, 29 aa, Artificial Sequence
  Quasi-synthetic sequence derived from human genome
FRYLQRLLLVHGRWSYFRMCKFLCYFFYK

SEQ ID NO: 21294 - protein, 29 aa, Artificial Sequence
  Quasi-synthetic sequence derived from human genome
LKMLMMMALLVPLVYTIKRHKWSVLKSRK

SEQ ID NO: 21295 - protein, 29 aa, Artificial Sequence
  Quasi-synthetic sequence derived from human genome
MKGRRRRRREYCKFALLLVLYTLVLLLVP

SEQ ID NO: 21296 - protein, 29 aa, Artificial Sequence
  Quasi-synthetic sequence derived from human genome
RQGRLRELRIRCVARKFLYLWIRMTFGRV

SEQ ID NO: 21297 - protein, 29 aa, Artificial Sequence
  Quasi-synthetic sequence derived from human genome
ARTRAGAARVARWRRLRLQQLRRLRGLLR

SEQ ID NO: 21298 - protein, 29 aa, Artificial Sequence
  Quasi-synthetic sequence derived from human genome
LTMVGKIKRLKKSAFVVLILLITAKLLVL

SEQ ID NO: 21299 - protein, 29 aa, Artificial Sequence
  Quasi-synthetic sequence derived from human genome
VAFAFTTLLIACLLLRVFRSGKRLKKTRK

SEQ ID NO: 21300 - protein, 29 aa, Artificial Sequence
  Quasi-synthetic sequence derived from human genome
RRVLVLMNSKHTFLALCALRFMRRIIGLK

SEQ ID NO: 21301 - protein, 29 aa, Artificial Sequence
  Quasi-synthetic sequence derived from human genome
WLARRRFQSIRRFVLNIQLTYRVQRLQKK

SEQ ID NO: 21302 - protein, 29 aa, Artificial Sequence
  Quasi-synthetic sequence derived from human genome
KRKKNVLRLCCKKLKIFAMPMQDIKMILK

SEQ ID NO: 21303 - protein, 29 aa, Artificial Sequence
  Quasi-synthetic sequence derived from human genome
RRPWGAWLSARLWKWLKSPRSWRLGLALL

SEQ ID NO: 21304 - protein, 29 aa, Artificial Sequence
  Quasi-synthetic sequence derived from human genome
PFLLLILLCMSLLLFQVIRLYQRRRWTIR

SEQ ID NO: 21305 - protein, 29 aa, Artificial Sequence
  Quasi-synthetic sequence derived from human genome
RRALLHAALSACIIQCWWRLILSKILKKR

SEQ ID NO: 21306 - protein, 29 aa, Artificial Sequence
  Quasi-synthetic sequence derived from human genome
LIFLRLKRRVKSVILVVLLGPLLFLACHL

SEQ ID NO: 21307 - protein, 29 aa, Artificial Sequence
  Quasi-synthetic sequence derived from human genome
SRRFLGKKYRKYYYKSPKPLLRPFLCRIC

SEQ ID NO: 21308 - protein, 29 aa, Artificial Sequence
  Quasi-synthetic sequence derived from human genome
LLGLIAFDRFLKIIRPLRNIFLKKPVFAK

SEQ ID NO: 21309 - protein, 29 aa, Artificial Sequence
  Quasi-synthetic sequence derived from human genome
PKWRLPRISARAPYRLRRLRRHTYWPPRR

SEQ ID NO: 21310 - protein, 29 aa, Artificial Sequence
  Quasi-synthetic sequence derived from human genome
LLQAFGYRLRRVIAAFYFPKREKKRILFL

SEQ ID NO: 21311 - protein, 29 aa, Artificial Sequence
  Quasi-synthetic sequence derived from human genome
IKAGKAFLRLKRKFIQMRRPFLERRDLII

SEQ ID NO: 21312 - protein, 29 aa, Artificial Sequence
  Quasi-synthetic sequence derived from human genome
LSVLRSFRLLRVFKLAKSWPTLNMLIKII

SEQ ID NO: 21313 - protein, 29 aa, Artificial Sequence
  Quasi-synthetic sequence derived from human genome
VLLLLLLLLLFLILRHRRQGKHWTSTQRK

SEQ ID NO: 21314 - protein, 29 aa, Artificial Sequence
  Quasi-synthetic sequence derived from human genome
ILVVVLVLVIVGIGVLILLVRYRKCIKLK

SEQ ID NO: 21315 - protein, 29 aa, Artificial Sequence
  Quasi-synthetic sequence derived from human genome
LKRALKVKQAMLQLYVLKLLKLQTKYLGR

SEQ ID NO: 21316 - protein, 29 aa, Artificial Sequence
  Quasi-synthetic sequence derived from human genome
LLVLLALAAWASRWLRRKLRARRKGGAPV

SEQ ID NO: 21317 - protein, 29 aa, Artificial Sequence
  Quasi-synthetic sequence derived from human genome
FLWFTNPCKTMKFIVWRRFKWVIIGLLFL

SEQ ID NO: 21318 - protein, 29 aa, Artificial Sequence
  Quasi-synthetic sequence derived from human genome
IVIFCYLRIWILVLQVRQRVKPDRKPKLK

SEQ ID NO: 21319 - protein, 29 aa, Artificial Sequence
  Quasi-synthetic sequence derived from human genome
RLRINRFAWPKVLKISYKRNNFYIKIRPG

SEQ ID NO: 21320 - protein, 29 aa, Artificial Sequence
  Quasi-synthetic sequence derived from human genome
LKSIKYLICTRYKWLIIKIVLALLGLLML

SEQ ID NO: 21321 - protein, 29 aa, Artificial Sequence
  Quasi-synthetic sequence derived from human genome
AVMVVFIILVIGVCTCCHPLRKRRKRKKK

SEQ ID NO: 21322 - protein, 29 aa, Artificial Sequence
  Quasi-synthetic sequence derived from human genome
LKTFVFFIWRRYWRTLVLLLLVLLTVFLL

SEQ ID NO: 21323 - protein, 29 aa, Artificial Sequence
  Quasi-synthetic sequence derived from human genome
RCFLKLTVNRVIWKIAKPPTCVLVRVRWW

SEQ ID NO: 21324 - protein, 29 aa, Artificial Sequence
  Quasi-synthetic sequence derived from human genome
KRRPKRREIPLKVLVKAVLFACMLMRKTM

SEQ ID NO: 21325 - protein, 29 aa, Artificial Sequence
  Quasi-synthetic sequence derived from human genome
RAPALRRLLPPLLLLLLSLPPRARAKYVR

SEQ ID NO: 21326 - protein, 29 aa, Artificial Sequence
  Quasi-synthetic sequence derived from human genome
FLKKLLGKKLTRCLKPFENSRLRLWTKWV

SEQ ID NO: 21327 - protein, 29 aa, Artificial Sequence
  Quasi-synthetic sequence derived from human genome
ARRRQRGRLMRRLVRRLRRWGLLPRTNTP

SEQ ID NO: 21328 - protein, 29 aa, Artificial Sequence
  Quasi-synthetic sequence derived from human genome
KVTWMRRMRILRRLLRRYRESKKIDRHMY

SEQ ID NO: 21329 - protein, 29 aa, Artificial Sequence
  Quasi-synthetic sequence derived from human genome
YLSRCKRGKRHWKKLWFVIKGKVLYTYMA

SEQ ID NO: 21330 - protein, 29 aa, Artificial Sequence
  Quasi-synthetic sequence derived from human genome
VLVSLLQKPRHRCRKRKPLLAIGFYLYRM

SEQ ID NO: 21331 - protein, 29 aa, Artificial Sequence
  Quasi-synthetic sequence derived from human genome
RNMSWPRLIRKLRCYLKEMKNLRKLVFSR

SEQ ID NO: 21332 - protein, 29 aa, Artificial Sequence
  Quasi-synthetic sequence derived from human genome
NIKKKKVSIMVSVDGVKVILKKKKKLLLL

SEQ ID NO: 21333 - protein, 29 aa, Artificial Sequence
  Quasi-synthetic sequence derived from human genome
PWITAVLPTVIICVMVFCLILWKWKKKKR

SEQ ID NO: 21334 - protein, 29 aa, Artificial Sequence
  Quasi-synthetic sequence derived from human genome
LSKGRRTLRKPKRVPSIYKLKLRPRIRPR

SEQ ID NO: 21335 - protein, 29 aa, Artificial Sequence
  Quasi-synthetic sequence derived from human genome
KNRVRMNTFPWLKIVKISFKCKQFFIQLR

SEQ ID NO: 21336 - protein, 29 aa, Artificial Sequence
  Quasi-synthetic sequence derived from human genome
VVLMLIILVALLMLVFRSKREVKRQKYRL

SEQ ID NO: 21337 - protein, 29 aa, Artificial Sequence
  Quasi-synthetic sequence derived from human genome
HRILINLMKYLQKWKRYRPLWKLDKAIVM

SEQ ID NO: 21338 - protein, 29 aa, Artificial Sequence
  Quasi-synthetic sequence derived from human genome
WMRIFIQAKRVKTKHLCYCLYRPRKYLYV

SEQ ID NO: 21339 - protein, 29 aa, Artificial Sequence
  Quasi-synthetic sequence derived from human genome
VWGVILFVYLVIRALRLWRTAKLQVTLKK

SEQ ID NO: 21340 - protein, 29 aa, Artificial Sequence
  Quasi-synthetic sequence derived from human genome
KGFTRFRSAVRVSIAISRMKFLVRRWHRV

SEQ ID NO: 21341 - protein, 29 aa, Artificial Sequence
  Quasi-synthetic sequence derived from human genome
RRARSRSRRISLRKKLKLPIGKRNWLKRS

SEQ ID NO: 21342 - protein, 29 aa, Artificial Sequence
  Quasi-synthetic sequence derived from human genome
RLPIRMAKALGKRTAKYRWFAVLYLLVCF

SEQ ID NO: 21343 - protein, 29 aa, Artificial Sequence
  Quasi-synthetic sequence derived from human genome
LCYRHLKTKRILRRNLLALIHRMIEFVVR

SEQ ID NO: 21344 - protein, 29 aa, Artificial Sequence
  Quasi-synthetic sequence derived from human genome
KLLKYYVLNALKHRPPKAQKKRYLFRSFK

SEQ ID NO: 21345 - protein, 29 aa, Artificial Sequence
  Quasi-synthetic sequence derived from human genome
RVAWVWLLVLEKWLAREKKLLPVVFRRKL

SEQ ID NO: 21346 - protein, 29 aa, Artificial Sequence
  Quasi-synthetic sequence derived from human genome
WLRKSPPEKKLKRYAWKRRWFVLRSGRLT

SEQ ID NO: 21347 - protein, 29 aa, Artificial Sequence
  Quasi-synthetic sequence derived from human genome
LGLFLLALLGLVVKRAVERRKALSRRARR

SEQ ID NO: 21348 - protein, 29 aa, Artificial Sequence
  Quasi-synthetic sequence derived from human genome
RLAVRTVIRAFVKCTKARYLKKKNMRTLW

SEQ ID NO: 21349 - protein, 29 aa, Artificial Sequence
  Quasi-synthetic sequence derived from human genome
YVVCPSEKRFLLLFTFLKKNRKKKLMVFF

SEQ ID NO: 21350 - protein, 29 aa, Artificial Sequence
  Quasi-synthetic sequence derived from human genome
RGWRRAPLRRGVGSSPRARRLMRPLWLLL

SEQ ID NO: 21351 - protein, 29 aa, Artificial Sequence
  Quasi-synthetic sequence derived from human genome
KKVLNLLKGAFPARLKKVLIVGAPIWFRV

SEQ ID NO: 21352 - protein, 29 aa, Artificial Sequence
  Quasi-synthetic sequence derived from human genome
FFIFLKILKLLISKLKAHQMCFRDYKYRL

SEQ ID NO: 21353 - protein, 29 aa, Artificial Sequence
  Quasi-synthetic sequence derived from human genome
VLKLKPVATRFPRKAWRQKRSSVLKPLLI

SEQ ID NO: 21354 - protein, 29 aa, Artificial Sequence
  Quasi-synthetic sequence derived from human genome
RVRLQLKIILCFSPVGRTLRVRARKFPAI

SEQ ID NO: 21355 - protein, 29 aa, Artificial Sequence
  Quasi-synthetic sequence derived from human genome
LFLKLFICFIFIRSSPTIVSNKRVSKRKF

SEQ ID NO: 21356 - protein, 29 aa, Artificial Sequence
  Quasi-synthetic sequence derived from human genome
LVLRLLRALRVLYVMRLARHSLGLRSLGL

SEQ ID NO: 21357 - protein, 29 aa, Artificial Sequence
  Quasi-synthetic sequence derived from human genome
FVALLWKRLLIARRSRKGFFAQIVLPAVF

SEQ ID NO: 21358 - protein, 29 aa, Artificial Sequence
  Quasi-synthetic sequence derived from human genome
LLYLLAVAVVIILFIILLGVIMAKRKRKH

SEQ ID NO: 21359 - protein, 29 aa, Artificial Sequence
  Quasi-synthetic sequence derived from human genome
RVIRLVRVFRIFKLSRHSKGLQILGQTLR

SEQ ID NO: 21360 - protein, 29 aa, Artificial Sequence
  Quasi-synthetic sequence derived from human genome
KVLRFLRLFGPGKNVPSVWRSARRKRKKK

SEQ ID NO: 21361 - protein, 29 aa, Artificial Sequence
  Quasi-synthetic sequence derived from human genome
VNPICYALCNRTFRKTFKMLLLCRWKKKK

SEQ ID NO: 21362 - protein, 29 aa, Artificial Sequence
  Quasi-synthetic sequence derived from human genome
KMYGYFAGLCRRLQKFWRVTVKGFFVKKK

SEQ ID NO: 21363 - protein, 29 aa, Artificial Sequence
  Quasi-synthetic sequence derived from human genome
WMLLFKPLVLRRQYLRRKHLGTLNFGGIR

SEQ ID NO: 21364 - protein, 29 aa, Artificial Sequence
  Quasi-synthetic sequence derived from human genome
FFRLFRVMRLVKLLSRGEGIRTLLWTFIK

SEQ ID NO: 21365 - protein, 29 aa, Artificial Sequence
  Quasi-synthetic sequence derived from human genome
RMYVVRRRYKIRRAATIVLQSYLRGFLAR

SEQ ID NO: 21366 - protein, 29 aa, Artificial Sequence
  Quasi-synthetic sequence derived from human genome
RLRLSKLRRCVQWLKVMGLFAFVVLCSIL

SEQ ID NO: 21367 - protein, 29 aa, Artificial Sequence
  Quasi-synthetic sequence derived from human genome
NMHKNMRVLSRTSKFRRLRQLLRRRKKRR

SEQ ID NO: 21368 - protein, 29 aa, Artificial Sequence
  Quasi-synthetic sequence derived from human genome
LLKLNQLKFRKKKLRFGRSRIHEWGLFAM

SEQ ID NO: 21369 - protein, 29 aa, Artificial Sequence
  Quasi-synthetic sequence derived from human genome
KKLKKSIKIIFIVVAAFLVSWLPFNTFKF

SEQ ID NO: 21370 - protein, 29 aa, Artificial Sequence
  Quasi-synthetic sequence derived from human genome
TKMILFMVSGICIVFGFIILLLLVLRKRR

SEQ ID NO: 21371 - protein, 29 aa, Artificial Sequence
  Quasi-synthetic sequence derived from human genome
LIVLVTLIFCLIVLSLSTFHIHKRRMKKR

SEQ ID NO: 21372 - protein, 29 aa, Artificial Sequence
  Quasi-synthetic sequence derived from human genome
PKLAFVIRIRGINGVSPKVRKVLQLLRLR

SEQ ID NO: 21373 - protein, 29 aa, Artificial Sequence
  Quasi-synthetic sequence derived from human genome
VSSIFFFLPVFCLTVLYSLIGRKLWRRRR

SEQ ID NO: 21374 - protein, 29 aa, Artificial Sequence
  Quasi-synthetic sequence derived from human genome
FMVFFLINPTKTFYYKSRFWLLKLLFRVF

SEQ ID NO: 21375 - protein, 29 aa, Artificial Sequence
  Quasi-synthetic sequence derived from human genome
KYRRRPALGWLARLLRSRAGSRKRPLTLL

SEQ ID NO: 21376 - protein, 29 aa, Artificial Sequence
  Quasi-synthetic sequence derived from human genome
KLEAHWRGALARKAIQRRKWAVRIIRKFI

SEQ ID NO: 21377 - protein, 29 aa, Artificial Sequence
  Quasi-synthetic sequence derived from human genome
RVLRMMRIFWVIKLARHFIGLQTLGLTLK

SEQ ID NO: 21378 - protein, 29 aa, Artificial Sequence
  Quasi-synthetic sequence derived from human genome
ILASQKVKKIWQKQFRWPKNRLQILKFCK

SEQ ID NO: 21379 - protein, 29 aa, Artificial Sequence
  Quasi-synthetic sequence derived from human genome
LVPTLPFPLRKPRKAHKYLRLSRKKFPPR

SEQ ID NO: 21380 - protein, 29 aa, Artificial Sequence
  Quasi-synthetic sequence derived from human genome
KLKQIFLSVLRHVRYWVKDRSLRLHRFTR

SEQ ID NO: 21381 - protein, 29 aa, Artificial Sequence
  Quasi-synthetic sequence derived from human genome
HAAAKRWLGRWRRKRRWRRVRKAGPRDLL

SEQ ID NO: 21382 - protein, 29 aa, Artificial Sequence
  Quasi-synthetic sequence derived from human genome
RKYICTSFYPWVNILKISFKRKKFFIHQR

SEQ ID NO: 21383 - protein, 29 aa, Artificial Sequence
  Quasi-synthetic sequence derived from human genome
LRFLKLKRQTKVLLTLLLVFGIAIFPLIV

SEQ ID NO: 21384 - protein, 29 aa, Artificial Sequence
  Quasi-synthetic sequence derived from human genome
PRASGRCVIAPVRAVLRLRRRVCVLRKRR

SEQ ID NO: 21385 - protein, 29 aa, Artificial Sequence
  Quasi-synthetic sequence derived from human genome
KLLAKIAKLQRRIKTVLLFQRNCLKPNML

SEQ ID NO: 21386 - protein, 29 aa, Artificial Sequence
  Quasi-synthetic sequence derived from human genome
ARKQLMIYRLPQVLRLHLKRFRWSGRNHR

SEQ ID NO: 21387 - protein, 29 aa, Artificial Sequence
  Quasi-synthetic sequence derived from human genome
ILALVLLVVLLVVCGPLAYKKLVKKFRQK

SEQ ID NO: 21388 - protein, 29 aa, Artificial Sequence
  Quasi-synthetic sequence derived from human genome
IKRLRKKFAQKMLRKARRKLIYEKAKHYH

SEQ ID NO: 21389 - protein, 29 aa, Artificial Sequence
  Quasi-synthetic sequence derived from human genome
LKTVLHRIYGKFLGLRAFIRKQINNIFLR

SEQ ID NO: 21390 - protein, 29 aa, Artificial Sequence
  Quasi-synthetic sequence derived from human genome
IPLVRKRRFQLRRCMNPRARKNRSQIVLF

SEQ ID NO: 21391 - protein, 29 aa, Artificial Sequence
  Quasi-synthetic sequence derived from human genome
RRRRAMRAFRMLLYSKSTSLTFHWKLWGR

SEQ ID NO: 21392 - protein, 29 aa, Artificial Sequence
  Quasi-synthetic sequence derived from human genome
GWLRKSPPEKKLRRYAWKKRWFILRSGRM

SEQ ID NO: 21393 - protein, 29 aa, Artificial Sequence
  Quasi-synthetic sequence derived from human genome
YFHLLRRQMVRNFRKPLIVASPKMLLRLP

SEQ ID NO: 21394 - protein, 29 aa, Artificial Sequence
  Quasi-synthetic sequence derived from human genome
KTRALMALKKRTKDKLFQFLKLRKYSIKV

SEQ ID NO: 21395 - protein, 29 aa, Artificial Sequence
  Quasi-synthetic sequence derived from human genome
MPGRLLRGLWQRWRRYKYRFVPWIALNLS

SEQ ID NO: 21396 - protein, 29 aa, Artificial Sequence
  Quasi-synthetic sequence derived from human genome
KVCYLPLNTFLLKPIQRLLHYRLLLRRLC

SEQ ID NO: 21397 - protein, 29 aa, Artificial Sequence
  Quasi-synthetic sequence derived from human genome
KLTKWKHSRTMMLVVFKSAPILKRALKVK

SEQ ID NO: 21398 - protein, 29 aa, Artificial Sequence
  Quasi-synthetic sequence derived from human genome
ITWLLLGALLWMWWRRNRRGKLGRLAAAF

SEQ ID NO: 21399 - protein, 29 aa, Artificial Sequence
  Quasi-synthetic sequence derived from human genome
FKKKAHKLTSAPLKQNFQKLLKLFYIKKL

SEQ ID NO: 21400 - protein, 29 aa, Artificial Sequence
  Quasi-synthetic sequence derived from human genome
LLRKRRFQLGRSMNPRARKNRSRIPLLRK

SEQ ID NO: 21401 - protein, 29 aa, Artificial Sequence
  Quasi-synthetic sequence derived from human genome
LLAILLVVAVFCILWNWNKRKKRQVPYLR

SEQ ID NO: 21402 - protein, 29 aa, Artificial Sequence
  Quasi-synthetic sequence derived from human genome
HKYRKLVKKTRFLRRKVQEGRLRRKQIKF

SEQ ID NO: 21403 - protein, 29 aa, Artificial Sequence
  Quasi-synthetic sequence derived from human genome
LLRGARAALLLLLPPRLLARPSLLLRRSL

SEQ ID NO: 21404 - protein, 29 aa, Artificial Sequence
  Quasi-synthetic sequence derived from human genome
RRGRGGLRLGLRGPLRKLVLQSLVPLLLR

SEQ ID NO: 21405 - protein, 29 aa, Artificial Sequence
  Quasi-synthetic sequence derived from human genome
IASGCIIFIVIIITLVVLLLKYRRRHRKH

SEQ ID NO: 21406 - protein, 29 aa, Artificial Sequence
  Quasi-synthetic sequence derived from human genome
YYFTRRKYLLKALFKALKRLKSLRDQFSF

SEQ ID NO: 21407 - protein, 29 aa, Artificial Sequence
  Quasi-synthetic sequence derived from human genome
IRMLKQLKHPNLVNLLEVFRRKRRLHLVF

SEQ ID NO: 21408 - protein, 29 aa, Artificial Sequence
  Quasi-synthetic sequence derived from human genome
LLRRWKHWLLLLGICCPKPHGRVSSRLRL

SEQ ID NO: 21409 - protein, 29 aa, Artificial Sequence
  Quasi-synthetic sequence derived from human genome
RNFLLTMRPFLKRAILVLSYVLVILYFRL

SEQ ID NO: 21410 - protein, 29 aa, Artificial Sequence
  Quasi-synthetic sequence derived from human genome
RRLFVRRGQPFTIILYFRAPVRAFLPALK

SEQ ID NO: 21411 - protein, 29 aa, Artificial Sequence
  Quasi-synthetic sequence derived from human genome
AWLRRRYLRLRYEDLVRQPRAQLRRLLRF

SEQ ID NO: 21412 - protein, 29 aa, Artificial Sequence
  Quasi-synthetic sequence derived from human genome
RVIRLVRVFRIFKLSRHSKGLQILGQTLK

SEQ ID NO: 21413 - protein, 29 aa, Artificial Sequence
  Quasi-synthetic sequence derived from human genome
RLLLRRTYARNLPAFVNRLGILTVRHLKR

SEQ ID NO: 21414 - protein, 29 aa, Artificial Sequence
  Quasi-synthetic sequence derived from human genome
WVLLALALLAWCRRSRGLKALRLCRALAL

SEQ ID NO: 21415 - protein, 29 aa, Artificial Sequence
  Quasi-synthetic sequence derived from human genome
RKRLHFKLCKKSSILVHKLLDKLLVLCPF

SEQ ID NO: 21416 - protein, 29 aa, Artificial Sequence
  Quasi-synthetic sequence derived from human genome
ALGLAITALLLLMVACRLRLVKQKLKKAR

SEQ ID NO: 21417 - protein, 29 aa, Artificial Sequence
  Quasi-synthetic sequence derived from human genome
KLRYLSLLCLLPLVAFLLFCLHVLFKKRT

SEQ ID NO: 21418 - protein, 29 aa, Artificial Sequence
  Quasi-synthetic sequence derived from human genome
KRKYWWKNCKMWAIGITVLVIFIIIIIVW

SEQ ID NO: 21419 - protein, 29 aa, Artificial Sequence
  Quasi-synthetic sequence derived from human genome
IKRRKTKPVLSIRMKKLTERTSVRILFFK

SEQ ID NO: 21420 - protein, 29 aa, Artificial Sequence
  Quasi-synthetic sequence derived from human genome
LIFAGLAFIVGLLILLSRRFRCGGNKKRR

SEQ ID NO: 21421 - protein, 29 aa, Artificial Sequence
  Quasi-synthetic sequence derived from human genome
KFRAKGRKPCKLMLQVVKILVVTVQLILF

SEQ ID NO: 21422 - protein, 29 aa, Artificial Sequence
  Quasi-synthetic sequence derived from human genome
KDILRRVLVLMASKHAFLALCALRFKRKI

SEQ ID NO: 21423 - protein, 29 aa, Artificial Sequence
  Quasi-synthetic sequence derived from human genome
FLLKAVKFRERVLQRGLVARIYYKVKTKK

SEQ ID NO: 21424 - protein, 29 aa, Artificial Sequence
  Quasi-synthetic sequence derived from human genome
LKRIYGKYLRAESFRKALIYQKKYLLLLL

SEQ ID NO: 21425 - protein, 29 aa, Artificial Sequence
  Quasi-synthetic sequence derived from human genome
RFRKYLRQLFHRRVAVHLVKWLPFLSVDR

SEQ ID NO: 21426 - protein, 29 aa, Artificial Sequence
  Quasi-synthetic sequence derived from human genome
MLWSRMLKDNKKNWRRVYKSLLLLAYLIR

SEQ ID NO: 21427 - protein, 29 aa, Artificial Sequence
  Quasi-synthetic sequence derived from human genome
PIRRRSKFANLGRIFKPWKWRKKKSEKFK

SEQ ID NO: 21428 - protein, 29 aa, Artificial Sequence
  Quasi-synthetic sequence derived from human genome
RKSFRLRRRDLLLGFNKRAIDKCWKIRHF

SEQ ID NO: 21429 - protein, 29 aa, Artificial Sequence
  Quasi-synthetic sequence derived from human genome
YKAAVTLQRAALKFLAKCRKKKKLFAPWR

SEQ ID NO: 21430 - protein, 29 aa, Artificial Sequence
  Quasi-synthetic sequence derived from human genome
MKKFLYIKSVFHTLRMAQRRHKRVRTWTR

SEQ ID NO: 21431 - protein, 29 aa, Artificial Sequence
  Quasi-synthetic sequence derived from human genome
HRRVFQAMWLSFLKHKLPLSLYKKVLLIV

SEQ ID NO: 21432 - protein, 29 aa, Artificial Sequence
  Quasi-synthetic sequence derived from human genome
KGLMKKFIRCSTRVTVGTIKKFLSLKLKL

SEQ ID NO: 21433 - protein, 29 aa, Artificial Sequence
  Quasi-synthetic sequence derived from human genome
LFKAAEFAKLSIKWMIKIRKRYLKRRGQA

SEQ ID NO: 21434 - protein, 29 aa, Artificial Sequence
  Quasi-synthetic sequence derived from human genome
CFFSTLVLLLSIAIFQRQKRRKFWKAKNL

SEQ ID NO: 21435 - protein, 29 aa, Artificial Sequence
  Quasi-synthetic sequence derived from human genome
KMLKMSKGLDARSKRWLKIIWRRHGIWPL

SEQ ID NO: 21436 - protein, 29 aa, Artificial Sequence
  Quasi-synthetic sequence derived from human genome
LFCYCRISRRLRRPPHVGRARRNSLRIIF

SEQ ID NO: 21437 - protein, 29 aa, Artificial Sequence
  Quasi-synthetic sequence derived from human genome
RRCKKRMFKFHQMKHIFEILDKMRCLRKR

SEQ ID NO: 21438 - protein, 29 aa, Artificial Sequence
  Quasi-synthetic sequence derived from human genome
VYLIVILVSFGLFMYAKRNKRRIMRIFSV

SEQ ID NO: 21439 - protein, 29 aa, Artificial Sequence
  Quasi-synthetic sequence derived from human genome
MRLVVSCISSFLILSLLLFMVHRLRQRRR

SEQ ID NO: 21440 - protein, 29 aa, Artificial Sequence
  Quasi-synthetic sequence derived from human genome
LAKLKLFRHYYVLIVCYIYFTRIIAFLLK

SEQ ID NO: 21441 - protein, 29 aa, Artificial Sequence
  Quasi-synthetic sequence derived from human genome
ILFCLRLMHIFTISKTLGPKIIIVKRMMK

SEQ ID NO: 21442 - protein, 29 aa, Artificial Sequence
  Quasi-synthetic sequence derived from human genome
ARKFWWKNVKMIVLICVIVFIIILFIVLF

SEQ ID NO: 21443 - protein, 29 aa, Artificial Sequence
  Quasi-synthetic sequence derived from human genome
RRLRKNLKSLIIVHPSWFIRTLLAVTRPF

SEQ ID NO: 21444 - protein, 29 aa, Artificial Sequence
  Quasi-synthetic sequence derived from human genome
VRRRGKVELIKFVRVQWRRPQVEWRRRRW

SEQ ID NO: 21445 - protein, 29 aa, Artificial Sequence
  Quasi-synthetic sequence derived from human genome
AMWRRYRAKKYLCKVKAACKIQAWYRCWR

SEQ ID NO: 21446 - protein, 29 aa, Artificial Sequence
  Quasi-synthetic sequence derived from human genome
YQKKNRKMLVILILFVIIIVLIVVLVGVK

SEQ ID NO: 21447 - protein, 29 aa, Artificial Sequence
  Quasi-synthetic sequence derived from human genome
RKPQPCRCRRRVRPSIRLLSPVLSLILLL

SEQ ID NO: 21448 - protein, 29 aa, Artificial Sequence
  Quasi-synthetic sequence derived from human genome
RRRKKILFYCHFPDLLLTKRDSFLKRLYR

SEQ ID NO: 21449 - protein, 29 aa, Artificial Sequence
  Quasi-synthetic sequence derived from human genome
FFKYCLLRKSFTCWKKNVRLQGLHRLQKF

SEQ ID NO: 21450 - protein, 29 aa, Artificial Sequence
  Quasi-synthetic sequence derived from human genome
LLLLLLLLLFLILRHRRQGKHWTSTQRKA

SEQ ID NO: 21451 - protein, 29 aa, Artificial Sequence
  Quasi-synthetic sequence derived from human genome
ISHLIFFIFYLRNMKKKYTKMVKLLHKSA

SEQ ID NO: 21452 - protein, 29 aa, Artificial Sequence
  Quasi-synthetic sequence derived from human genome
RLFVRRGQPFTIILYFRAPVRAFLPALKK

SEQ ID NO: 21453 - protein, 29 aa, Artificial Sequence
  Quasi-synthetic sequence derived from human genome
IIFSIAFITVLIFKVYMFKCVWRCYRLIK

SEQ ID NO: 21454 - protein, 29 aa, Artificial Sequence
  Quasi-synthetic sequence derived from human genome
WTLRKRQKIRFVVELVWPLSLFLVLIWLR

SEQ ID NO: 21455 - protein, 29 aa, Artificial Sequence
  Quasi-synthetic sequence derived from human genome
IPLLRKRRFQLGRSMNLRARKNRSQIVLF

SEQ ID NO: 21456 - protein, 29 aa, Artificial Sequence
  Quasi-synthetic sequence derived from human genome
AVILGSAVLLFHFCIFHRRKMKAIRRSLK

SEQ ID NO: 21457 - protein, 29 aa, Artificial Sequence
  Quasi-synthetic sequence derived from human genome
WRKRCLYLFVLLLLIILVVNLALTIWILK

SEQ ID NO: 21458 - protein, 29 aa, Artificial Sequence
  Quasi-synthetic sequence derived from human genome
RAQVRRILQRVPGKQRFGIYRFLPFFFVL

SEQ ID NO: 21459 - protein, 29 aa, Artificial Sequence
  Quasi-synthetic sequence derived from human genome
PLAPRPRRRRSLRRLFSRFLLALGSRSRP

SEQ ID NO: 21460 - protein, 29 aa, Artificial Sequence
  Quasi-synthetic sequence derived from human genome
TTWSLRRRPARTLGLLLLVVLGFLVLRRL

SEQ ID NO: 21461 - protein, 29 aa, Artificial Sequence
  Quasi-synthetic sequence derived from human genome
IFLKRSQQKKKTSPLNFKKRLFLLTVHKL

SEQ ID NO: 21462 - protein, 29 aa, Artificial Sequence
  Quasi-synthetic sequence derived from human genome
RGSIFKAIAHFKRTTFLKKHRMLGRLKYK

SEQ ID NO: 21463 - protein, 29 aa, Artificial Sequence
  Quasi-synthetic sequence derived from human genome
CVVLYVASSLFLMVMYFFFRVRSRRWKVK

SEQ ID NO: 21464 - protein, 29 aa, Artificial Sequence
  Quasi-synthetic sequence derived from human genome
PRYLRRFREMKPRVLQRWSRQILRGLHFL

SEQ ID NO: 21465 - protein, 29 aa, Artificial Sequence
  Quasi-synthetic sequence derived from human genome
LARRRIRLWHRGAMVIQATWRGYRVRRNL

SEQ ID NO: 21466 - protein, 29 aa, Artificial Sequence
  Quasi-synthetic sequence derived from human genome
FGEKFKLFTLVSACIPVFRLARRRKKILF

SEQ ID NO: 21467 - protein, 29 aa, Artificial Sequence
  Quasi-synthetic sequence derived from human genome
VAAAVLLALLVLLVAPPLLRRAGRLRWRR

SEQ ID NO: 21468 - protein, 29 aa, Artificial Sequence
  Quasi-synthetic sequence derived from human genome
QKARRLTILLLLAFYVCFLPFHILRVIRI

SEQ ID NO: 21469 - protein, 29 aa, Artificial Sequence
  Quasi-synthetic sequence derived from human genome
FILLSHLQLFIKRVVLKTPAKRHKQLKNK

SEQ ID NO: 21470 - protein, 29 aa, Artificial Sequence
  Quasi-synthetic sequence derived from human genome
LIKSNIYPIVLFIRVCEKNIKRFRKLLPR

SEQ ID NO: 21471 - protein, 29 aa, Artificial Sequence
  Quasi-synthetic sequence derived from human genome
HFRKKSFKIHQKAIKKKGNLYGFALLRRR

SEQ ID NO: 21472 - protein, 29 aa, Artificial Sequence
  Quasi-synthetic sequence derived from human genome
LKTLLRCRNEKKRHRAVRLIFTIMIVYFL

SEQ ID NO: 21473 - protein, 29 aa, Artificial Sequence
  Quasi-synthetic sequence derived from human genome
VVVVFLFLILIRRALSASQKKKVIIAALR

SEQ ID NO: 21474 - protein, 29 aa, Artificial Sequence
  Quasi-synthetic sequence derived from human genome
QRTAILGLWKIARKWMRRKMGKWPAVVVM

SEQ ID NO: 21475 - protein, 29 aa, Artificial Sequence
  Quasi-synthetic sequence derived from human genome
LLRKRRFQLYRSTNPRARKNRSRIPLLRK

SEQ ID NO: 21476 - protein, 29 aa, Artificial Sequence
  Quasi-synthetic sequence derived from human genome
ASKQLLLWRLPNVLIVQLKRFSFRSFIWR

SEQ ID NO: 21477 - protein, 29 aa, Artificial Sequence
  Quasi-synthetic sequence derived from human genome
RRLRKNLKSFIIVHPSWFIRTILAVTRPF

SEQ ID NO: 21478 - protein, 29 aa, Artificial Sequence
  Quasi-synthetic sequence derived from human genome
SFVTFFSGLIILLIFRLIWRSVKKWQIIK

SEQ ID NO: 21479 - protein, 29 aa, Artificial Sequence
  Quasi-synthetic sequence derived from human genome
KDHLRIFRIPRRPRKLTLKGYRQHWVVFK

SEQ ID NO: 21480 - protein, 29 aa, Artificial Sequence
  Quasi-synthetic sequence derived from human genome
LLIPYLLGRKRRWSKCKIRVFVGGQINRM

SEQ ID NO: 21481 - protein, 29 aa, Artificial Sequence
  Quasi-synthetic sequence derived from human genome
FLTALLWRGRIPGRQWIGKHRRPRFVSLR

SEQ ID NO: 21482 - protein, 29 aa, Artificial Sequence
  Quasi-synthetic sequence derived from human genome
WLLVLLLHKHRSILLRRLCSLMGTVFLLR

SEQ ID NO: 21483 - protein, 29 aa, Artificial Sequence
  Quasi-synthetic sequence derived from human genome
VLYAFIGQKFRNYFLKILKDLWCVRRKYK

SEQ ID NO: 21484 - protein, 29 aa, Artificial Sequence
  Quasi-synthetic sequence derived from human genome
RNPVFPRFIKIIEVKNKKLVELLRRKVRL

SEQ ID NO: 21485 - protein, 29 aa, Artificial Sequence
  Quasi-synthetic sequence derived from human genome
LFALLSRGRRRRMHVLRRRWDLGSLCRAL

SEQ ID NO: 21486 - protein, 29 aa, Artificial Sequence
  Quasi-synthetic sequence derived from human genome
RTIARLRLKKIFSGVFVKVTPQNLKMLRI

SEQ ID NO: 21487 - protein, 29 aa, Artificial Sequence
  Quasi-synthetic sequence derived from human genome
FLARNRYRKILREHKAVIIQKRVRGWLAR

SEQ ID NO: 21488 - protein, 29 aa, Artificial Sequence
  Quasi-synthetic sequence derived from human genome
KLLVHSLNLLAKQGLRLLRGLRRRNVQKK

SEQ ID NO: 21489 - protein, 29 aa, Artificial Sequence
  Quasi-synthetic sequence derived from human genome
FMLKKRKWPLKGWHKRFFVLDNGMLKYSK

SEQ ID NO: 21490 - protein, 29 aa, Artificial Sequence
  Quasi-synthetic sequence derived from human genome
LKKKYPLAKYLCVLLIVAGVALFMYKPKK

SEQ ID NO: 21491 - protein, 29 aa, Artificial Sequence
  Quasi-synthetic sequence derived from human genome
IFRIMRILRILKLARHSTGLQSLGFTLRR

SEQ ID NO: 21492 - protein, 29 aa, Artificial Sequence
  Quasi-synthetic sequence derived from human genome
PGLLLLLVVIILILAFWVLPKYKTRKAMR

SEQ ID NO: 21493 - protein, 29 aa, Artificial Sequence
  Quasi-synthetic sequence derived from human genome
VKKLPGVMLFKKKKTRKLKIALALSDLVI

SEQ ID NO: 21494 - protein, 29 aa, Artificial Sequence
  Quasi-synthetic sequence derived from human genome
RRTMNIVPRTKVKTIKMFLILNLLFLLSW

SEQ ID NO: 21495 - protein, 29 aa, Artificial Sequence
  Quasi-synthetic sequence derived from human genome
QLLMVLRCLRPLRIFKLVPQMRKVVRELF

SEQ ID NO: 21496 - protein, 29 aa, Artificial Sequence
  Quasi-synthetic sequence derived from human genome
LKKIMAILIKRFHHTRRNWKGLIAQVILP

SEQ ID NO: 21497 - protein, 29 aa, Artificial Sequence
  Quasi-synthetic sequence derived from human genome
RWLVRILGTIFRFCDRSVPPARALLKRRR

SEQ ID NO: 21498 - protein, 29 aa, Artificial Sequence
  Quasi-synthetic sequence derived from human genome
KLHNLISKLKKWIKILEAKTKQLPKFFLI

SEQ ID NO: 21499 - protein, 29 aa, Artificial Sequence
  Quasi-synthetic sequence derived from human genome
RSKQLRRQMWWRGCKIKAIMALVAAILLL

SEQ ID NO: 21500 - protein, 29 aa, Artificial Sequence
  Quasi-synthetic sequence derived from human genome
RSALFALRYNILTLMRMLSLKSLKKQMKK

SEQ ID NO: 21501 - protein, 29 aa, Artificial Sequence
  Quasi-synthetic sequence derived from human genome
VKRRLSLYLTKIHFWLPVLKMIRKKQMDM

SEQ ID NO: 21502 - protein, 29 aa, Artificial Sequence
  Quasi-synthetic sequence derived from human genome
WLCLLLLPIPLIVWVKRKEVQKTCRKHRK

SEQ ID NO: 21503 - protein, 29 aa, Artificial Sequence
  Quasi-synthetic sequence derived from human genome
WLLLRKAPGGFMGPRWRRRWFVLKGHTLY

SEQ ID NO: 21504 - protein, 29 aa, Artificial Sequence
  Quasi-synthetic sequence derived from human genome
RYQQMRRSLVKFRSLVHAYVSRRRYLKLR

SEQ ID NO: 21505 - protein, 29 aa, Artificial Sequence
  Quasi-synthetic sequence derived from human genome
LSPRWILQFRRWARKWSRFTRSSFQVRWA

SEQ ID NO: 21506 - protein, 29 aa, Artificial Sequence
  Quasi-synthetic sequence derived from human genome
FRLFKFCTCLATVFSFLKRLICRSGRGRK

SEQ ID NO: 21507 - protein, 29 aa, Artificial Sequence
  Quasi-synthetic sequence derived from human genome
KNKKVGLLYRLLQASILAYLVVWVFLIKK

SEQ ID NO: 21508 - protein, 29 aa, Artificial Sequence
  Quasi-synthetic sequence derived from human genome
KDINTIKSLRVLRVLRPLKTIKRLPKLKA

SEQ ID NO: 21509 - protein, 29 aa, Artificial Sequence
  Quasi-synthetic sequence derived from human genome
IIMRFRKRKNFKKKRIVTTPQTVLRINSI

SEQ ID NO: 21510 - protein, 29 aa, Artificial Sequence
  Quasi-synthetic sequence derived from human genome
WWRGTLGRRKAAKRKWAAQTIRRLIRGFV

SEQ ID NO: 21511 - protein, 29 aa, Artificial Sequence
  Quasi-synthetic sequence derived from human genome
VSQRKQIKRKAPRGFLKRVFKRKKPQLRL

SEQ ID NO: 21512 - protein, 29 aa, Artificial Sequence
  Quasi-synthetic sequence derived from human genome
KTARLFSKKIFCCLFFITLFFIRLLSYMF

SEQ ID NO: 21513 - protein, 29 aa, Artificial Sequence
  Quasi-synthetic sequence derived from human genome
GLKMLVTISCILVGVLLLFVLLLVVRRRR

SEQ ID NO: 21514 - protein, 29 aa, Artificial Sequence
  Quasi-synthetic sequence derived from human genome
RLLRRTLIRYANLASVLVLRSVSTRVLKR

SEQ ID NO: 21515 - protein, 29 aa, Artificial Sequence
  Quasi-synthetic sequence derived from human genome
RPFTRFRTAVRVVIAILRLRFLVKKWQEV

SEQ ID NO: 21516 - protein, 29 aa, Artificial Sequence
  Quasi-synthetic sequence derived from human genome
LRYYYNKRILHKTKGKRFTYKFNFNKLVL

SEQ ID NO: 21517 - protein, 29 aa, Artificial Sequence
  Quasi-synthetic sequence derived from human genome
RRDIFGRIIWHKFKQWVIPWHLNKRYNRK

SEQ ID NO: 21518 - protein, 29 aa, Artificial Sequence
  Quasi-synthetic sequence derived from human genome
FVPLGFILICYLKIVICLRRRNAKVDKKK

SEQ ID NO: 21519 - protein, 29 aa, Artificial Sequence
  Quasi-synthetic sequence derived from human genome
LVPCVVILAKALFLLPCISRRLARIRRGW

SEQ ID NO: 21520 - protein, 29 aa, Artificial Sequence
  Quasi-synthetic sequence derived from human genome
FRVFHLSLWRLMKKVQITKPPPNFKFAFR

SEQ ID NO: 21521 - protein, 29 aa, Artificial Sequence
  Quasi-synthetic sequence derived from human genome
LILSLLLVFIMSVFVAAGLFVLVMKRRKK

SEQ ID NO: 21522 - protein, 29 aa, Artificial Sequence
  Quasi-synthetic sequence derived from human genome
KGVWLRLRKILFCVLGLYIAIPFLIKLCP

SEQ ID NO: 21523 - protein, 29 aa, Artificial Sequence
  Quasi-synthetic sequence derived from human genome
RRSQRASFKRARRPGARALRLVLGIVLLF

SEQ ID NO: 21524 - protein, 29 aa, Artificial Sequence
  Quasi-synthetic sequence derived from human genome
KFKKFDHRYLRKILIRKNLPKSSIVSLYK

SEQ ID NO: 21525 - protein, 29 aa, Artificial Sequence
  Quasi-synthetic sequence derived from human genome
CRGYLVKMGGKIKSWKKRWFVFDRLKRTL

SEQ ID NO: 21526 - protein, 29 aa, Artificial Sequence
  Quasi-synthetic sequence derived from human genome
RIRYRFRRFIQQFSQCKATARNLKLKYLI

SEQ ID NO: 21527 - protein, 29 aa, Artificial Sequence
  Quasi-synthetic sequence derived from human genome
TLLLVLQYFGPLCFIFICYFKIYIRLKRR

SEQ ID NO: 21528 - protein, 29 aa, Artificial Sequence
  Quasi-synthetic sequence derived from human genome
AAAKAGMNRVFLQRLLWLLRLLFPRVLCR

SEQ ID NO: 21529 - protein, 29 aa, Artificial Sequence
  Quasi-synthetic sequence derived from human genome
IKPFGARKKRSWYLTWKYKLTNQRALRRF

SEQ ID NO: 21530 - protein, 29 aa, Artificial Sequence
  Quasi-synthetic sequence derived from human genome
RVRKAIGKYRIKLLDTLPLPGRLIRYLKY

SEQ ID NO: 21531 - protein, 29 aa, Artificial Sequence
  Quasi-synthetic sequence derived from human genome
LLRRLKLVKMYRSKNDLSQLQLLIKKWRS

SEQ ID NO: 21532 - protein, 29 aa, Artificial Sequence
  Quasi-synthetic sequence derived from human genome
VRTLHQRFLAQLRKYFNMRVFRQRTYRIW

SEQ ID NO: 21533 - protein, 29 aa, Artificial Sequence
  Quasi-synthetic sequence derived from human genome
WKHLSVRRFFWWARFIAINTFLFFLFFFL

SEQ ID NO: 21534 - protein, 29 aa, Artificial Sequence
  Quasi-synthetic sequence derived from human genome
RKKLKDFSGGWRMRVALARALFIRPFMLL

SEQ ID NO: 21535 - protein, 29 aa, Artificial Sequence
  Quasi-synthetic sequence derived from human genome
IRGGATRAAGVFYPWRFRLLCLLRRWLPR

SEQ ID NO: 21536 - protein, 29 aa, Artificial Sequence
  Quasi-synthetic sequence derived from human genome
LLIPYLHFLIFLFILRCLEMNCRKKLMRK

SEQ ID NO: 21537 - protein, 29 aa, Artificial Sequence
  Quasi-synthetic sequence derived from human genome
HWRGRYGRRRPFIWALSLGILLSLFLIPR

SEQ ID NO: 21538 - protein, 29 aa, Artificial Sequence
  Quasi-synthetic sequence derived from human genome
RKSYPMLKLVRLKLWFPRFMNVNPFPVPR

SEQ ID NO: 21539 - protein, 29 aa, Artificial Sequence
  Quasi-synthetic sequence derived from human genome
PRGLRLRLPRRESLLRGLCRPLRPLLGFR

SEQ ID NO: 21540 - protein, 29 aa, Artificial Sequence
  Quasi-synthetic sequence derived from human genome
YLLKIANFSNLLFLHLKRRVRSVILVILL

SEQ ID NO: 21541 - protein, 29 aa, Artificial Sequence
  Quasi-synthetic sequence derived from human genome
FFFIALVFFLYRRRKGSRKDVTLRKLDIK

SEQ ID NO: 21542 - protein, 29 aa, Artificial Sequence
  Quasi-synthetic sequence derived from human genome
WFKKLSQKRFKQLVERLLQFISLRLFPAK

SEQ ID NO: 21543 - protein, 29 aa, Artificial Sequence
  Quasi-synthetic sequence derived from human genome
NMRKNMRVLSRTSKFRRLRQLLRRRKKRQ

SEQ ID NO: 21544 - protein, 29 aa, Artificial Sequence
  Quasi-synthetic sequence derived from human genome
SYNRFRKFPFFTRPLLSKWCPKSLFKKKP

SEQ ID NO: 21545 - protein, 29 aa, Artificial Sequence
  Quasi-synthetic sequence derived from human genome
LIGVSVAFVLLLFLLLFLLLRRQRHSKHR

SEQ ID NO: 21546 - protein, 29 aa, Artificial Sequence
  Quasi-synthetic sequence derived from human genome
PLVLLVTLITTLVIGLVLCKRKRRTKTIR

SEQ ID NO: 21547 - protein, 29 aa, Artificial Sequence
  Quasi-synthetic sequence derived from human genome
ILGKIILFLPCISRKLKRIKKGWEKSQFL

SEQ ID NO: 21548 - protein, 29 aa, Artificial Sequence
  Quasi-synthetic sequence derived from human genome
WRRLPRELKIRVRKLQKERITILLPKRPP

SEQ ID NO: 21549 - protein, 29 aa, Artificial Sequence
  Quasi-synthetic sequence derived from human genome
LSVLRSFRLLRVFKLAKSWPTLNTLIKII

SEQ ID NO: 21550 - protein, 29 aa, Artificial Sequence
  Quasi-synthetic sequence derived from human genome
LLRKRWFQLGHSMNPRARKNRSRIPLLRK

SEQ ID NO: 21551 - protein, 29 aa, Artificial Sequence
  Quasi-synthetic sequence derived from human genome
ILRKRNKALRKIRKLQKQGLLQVTPKGFI

SEQ ID NO: 21552 - protein, 29 aa, Artificial Sequence
  Quasi-synthetic sequence derived from human genome
WRKRCLYFFVLLLMILILVNLAMTIWILK

SEQ ID NO: 21553 - protein, 29 aa, Artificial Sequence
  Quasi-synthetic sequence derived from human genome
IPLLRKRRFQLCRCMNPRARKNRSQIVLF

SEQ ID NO: 21554 - protein, 29 aa, Artificial Sequence
  Quasi-synthetic sequence derived from human genome
KKRKKGLRIKGKRRRKKLILAKKFSKDLG

SEQ ID NO: 21555 - protein, 29 aa, Artificial Sequence
  Quasi-synthetic sequence derived from human genome
FFCFLLGKCFKKGLKGKGFVLLVKLACIV

SEQ ID NO: 21556 - protein, 29 aa, Artificial Sequence
  Quasi-synthetic sequence derived from human genome
KFFKRKPKVLGVVRILIALMSLSMGIIMM

SEQ ID NO: 21557 - protein, 29 aa, Artificial Sequence
  Quasi-synthetic sequence derived from human genome
KIYRGWKCRTHFLLMKKSQIVIAAWYRRY

SEQ ID NO: 21558 - protein, 29 aa, Artificial Sequence
  Quasi-synthetic sequence derived from human genome
KFWARGRKPWKLAIQILKIAMVTIQLVLF

SEQ ID NO: 21559 - protein, 29 aa, Artificial Sequence
  Quasi-synthetic sequence derived from human genome
FLLKLQKWTQKKEKGKKLSRMKLLLKHLT

SEQ ID NO: 21560 - protein, 29 aa, Artificial Sequence
  Quasi-synthetic sequence derived from human genome
FLKIANFSNSIFLYLKWRVKKVVLVLLLV

SEQ ID NO: 21561 - protein, 29 aa, Artificial Sequence
  Quasi-synthetic sequence derived from human genome
LFCITMKRQIKHMIKYRYIPFTHGKRRYR

SEQ ID NO: 21562 - protein, 29 aa, Artificial Sequence
  Quasi-synthetic sequence derived from human genome
LASKKNPKLINALRRCFFWRFMFYGIFLY

SEQ ID NO: 21563 - protein, 29 aa, Artificial Sequence
  Quasi-synthetic sequence derived from human genome
LRYYYNKRILHKTKGKRFTYKFNFSKLIV

SEQ ID NO: 21564 - protein, 29 aa, Artificial Sequence
  Quasi-synthetic sequence derived from human genome
AAVVVVVIIIFTVVLILLKMYNRKMRTRR

SEQ ID NO: 21565 - protein, 29 aa, Artificial Sequence
  Quasi-synthetic sequence derived from human genome
RLLIYKQGRKLFPIKLKNKKGLVSLIDLL

SEQ ID NO: 21566 - protein, 29 aa, Artificial Sequence
  Quasi-synthetic sequence derived from human genome
LGVVLLLLLLFYVVRYCWLRRQAALQRRL

SEQ ID NO: 21567 - protein, 29 aa, Artificial Sequence
  Quasi-synthetic sequence derived from human genome
LMQLYSARQRRRLNRGLRRKQHSLLKRLR

SEQ ID NO: 21568 - protein, 29 aa, Artificial Sequence
  Quasi-synthetic sequence derived from human genome
LRRNFMNIRPVKLKNLILLVKHWYRQVAA

SEQ ID NO: 21569 - protein, 29 aa, Artificial Sequence
  Quasi-synthetic sequence derived from human genome
GALIAILLCIIILLVIVVLFAALKRQRKK

SEQ ID NO: 21570 - protein, 29 aa, Artificial Sequence
  Quasi-synthetic sequence derived from human genome
RLLLKFIKIMKHLRKLNNFNSYLAILSAL

SEQ ID NO: 21571 - protein, 29 aa, Artificial Sequence
  Quasi-synthetic sequence derived from human genome
FRCIALRWVRLLGFAIVYGTIILKLYRVL

SEQ ID NO: 21572 - protein, 29 aa, Artificial Sequence
  Quasi-synthetic sequence derived from human genome
LVAILAGILMLALLVFILWKCGFFKRNKK

SEQ ID NO: 21573 - protein, 29 aa, Artificial Sequence
  Quasi-synthetic sequence derived from human genome
LWRQQVCAIAKVRFLKLKKERKSLWTILL

SEQ ID NO: 21574 - protein, 29 aa, Artificial Sequence
  Quasi-synthetic sequence derived from human genome
RTPILMTILINFLIFIRILGILLSKLRTR

SEQ ID NO: 21575 - protein, 29 aa, Artificial Sequence
  Quasi-synthetic sequence derived from human genome
NWFICSLCVPRVRKLWSSRRPRTRRNLLL

SEQ ID NO: 21576 - protein, 29 aa, Artificial Sequence
  Quasi-synthetic sequence derived from human genome
FFFSRGRFSSGFRRTLILSSGFRLVKKKL

SEQ ID NO: 21577 - protein, 29 aa, Artificial Sequence
  Quasi-synthetic sequence derived from human genome
RKAPLWLRAKFQRLLFKLGCYIQKNCGKF

SEQ ID NO: 21578 - protein, 29 aa, Artificial Sequence
  Quasi-synthetic sequence derived from human genome
RYAAIVHPLRLRHLRRPRVARLLCLGVWA

SEQ ID NO: 21579 - protein, 29 aa, Artificial Sequence
  Quasi-synthetic sequence derived from human genome
RRPSARCARRRRPGLLLPGLWLLLLARPA

SEQ ID NO: 21580 - protein, 29 aa, Artificial Sequence
  Quasi-synthetic sequence derived from human genome
LLACVATVIFIITKFCLFCFWKFARKGKK

SEQ ID NO: 21581 - protein, 29 aa, Artificial Sequence
  Quasi-synthetic sequence derived from human genome
KGTMRRMALSMIERRKRWRTIKLLLRRGA

SEQ ID NO: 21582 - protein, 29 aa, Artificial Sequence
  Quasi-synthetic sequence derived from human genome
KKQRLSKKLRRKLQMWLWSQTFCPVLYAW

SEQ ID NO: 21583 - protein, 29 aa, Artificial Sequence
  Quasi-synthetic sequence derived from human genome
HKRMKVKKLPMILALHLKRFKYMDQLHRY

SEQ ID NO: 21584 - protein, 29 aa, Artificial Sequence
  Quasi-synthetic sequence derived from human genome
LARMRYKRTKAALTIIRYYRRYKVKSYIH

SEQ ID NO: 21585 - protein, 29 aa, Artificial Sequence
  Quasi-synthetic sequence derived from human genome
RYKPLRRRVIWLIGQWISVKFKSDLRPML

SEQ ID NO: 21586 - protein, 29 aa, Artificial Sequence
  Quasi-synthetic sequence derived from human genome
KVFIKYTKLKKIFLQHNCIRHISRKAFFG

SEQ ID NO: 21587 - protein, 29 aa, Artificial Sequence
  Quasi-synthetic sequence derived from human genome
IIPMCLVLLLLALILPLLFYLRKRNKTGK

SEQ ID NO: 21588 - protein, 29 aa, Artificial Sequence
  Quasi-synthetic sequence derived from human genome
LRGRGAPLGPWLRALGPWLRVRRGLLVLR

SEQ ID NO: 21589 - protein, 29 aa, Artificial Sequence
  Quasi-synthetic sequence derived from human genome
VAWRRAWPRRRRRLQQVGTVAKLWIYPVK

SEQ ID NO: 21590 - protein, 29 aa, Artificial Sequence
  Quasi-synthetic sequence derived from human genome
AFVLFLRLRSIRCLRNIIHWNLISAFILR

SEQ ID NO: 21591 - protein, 29 aa, Artificial Sequence
  Quasi-synthetic sequence derived from human genome
MVLIPLILLVLLLLSVVFLATYYKRKRTK

SEQ ID NO: 21592 - protein, 29 aa, Artificial Sequence
  Quasi-synthetic sequence derived from human genome
RLRRANRVLRARCRRAVKSNACYWAVLLL

SEQ ID NO: 21593 - protein, 29 aa, Artificial Sequence
  Quasi-synthetic sequence derived from human genome
AGVLVLLVSLGVAIHLCCRRRRARLRFMK

SEQ ID NO: 21594 - protein, 29 aa, Artificial Sequence
  Quasi-synthetic sequence derived from human genome
KRYLVKFICLSIWGLSLLLALPVLLFRRT

SEQ ID NO: 21595 - protein, 29 aa, Artificial Sequence
  Quasi-synthetic sequence derived from human genome
LWKLLLRSQSCRLCSFRKMRSPPKYRPFL

SEQ ID NO: 21596 - protein, 29 aa, Artificial Sequence
  Quasi-synthetic sequence derived from human genome
VMHRNVRYNCRVIFLNRKILLIRPKMALA

SEQ ID NO: 21597 - protein, 29 aa, Artificial Sequence
  Quasi-synthetic sequence derived from human genome
FKKTHRILRRLFNLCKRCHRQPRFRLPKE

SEQ ID NO: 21598 - protein, 29 aa, Artificial Sequence
  Quasi-synthetic sequence derived from human genome
GWLVKSPPERKLQRYAWRKRWFVLRRGRM

SEQ ID NO: 21599 - protein, 29 aa, Artificial Sequence
  Quasi-synthetic sequence derived from human genome
LLRKRRFQLYRSMNPRARKNRSHIPLVRK

SEQ ID NO: 21600 - protein, 29 aa, Artificial Sequence
  Quasi-synthetic sequence derived from human genome
FKHTLQQKVFILFLTLWLLSLLKLLNVRR

SEQ ID NO: 21601 - protein, 29 aa, Artificial Sequence
  Quasi-synthetic sequence derived from human genome
KKAIKYQSKARRKKWIIIAVSVVLVAIIA

SEQ ID NO: 21602 - protein, 29 aa, Artificial Sequence
  Quasi-synthetic sequence derived from human genome
GALVAILLCVLILLILVVLFAALKRQRKK

SEQ ID NO: 21603 - protein, 29 aa, Artificial Sequence
  Quasi-synthetic sequence derived from human genome
FWANSCFHLYRAPYFWIKRRILLLIPKWL

SEQ ID NO: 21604 - protein, 29 aa, Artificial Sequence
  Quasi-synthetic sequence derived from human genome
VLKHARHFRGRKNRCYRLAVRTVIRAFVK

SEQ ID NO: 21605 - protein, 29 aa, Artificial Sequence
  Quasi-synthetic sequence derived from human genome
LVLSYFRYMRIYRRYIYEPLHKPQRKRKK

SEQ ID NO: 21606 - protein, 29 aa, Artificial Sequence
  Quasi-synthetic sequence derived from human genome
KCALVRHKFNRLPRVLILHLKRYSFNVAL

SEQ ID NO: 21607 - protein, 29 aa, Artificial Sequence
  Quasi-synthetic sequence derived from human genome
MIPTLKAAIRAVRILQFRLYKKKFKETLR

SEQ ID NO: 21608 - protein, 29 aa, Artificial Sequence
  Quasi-synthetic sequence derived from human genome
FVRGYLVRKQMRLQRKAVISLQSYFRMRK

SEQ ID NO: 21609 - protein, 29 aa, Artificial Sequence
  Quasi-synthetic sequence derived from human genome
LFLKIPSDKIRISKIRGKSLRRKRSMGFI

SEQ ID NO: 21610 - protein, 29 aa, Artificial Sequence
  Quasi-synthetic sequence derived from human genome
IILAVVGGVIGLLILILLIKKLIIFILKK

SEQ ID NO: 21611 - protein, 29 aa, Artificial Sequence
  Quasi-synthetic sequence derived from human genome
FIRPKLVTIIRSGVKPRKAVRILLNKKTA

SEQ ID NO: 21612 - protein, 29 aa, Artificial Sequence
  Quasi-synthetic sequence derived from human genome
VLMVVSGAVLVYFVVRTVRMRRRNRKTRR

SEQ ID NO: 21613 - protein, 29 aa, Artificial Sequence
  Quasi-synthetic sequence derived from human genome
FLLSRKILRLITIRKLFTAIGVLFPSVIL

SEQ ID NO: 21614 - protein, 29 aa, Artificial Sequence
  Quasi-synthetic sequence derived from human genome
GKKKIRWDPVRRRFIQSCPIIRIPNRFLR

SEQ ID NO: 21615 - protein, 29 aa, Artificial Sequence
  Quasi-synthetic sequence derived from human genome
CRGFLIKMGGKIKTWKKRWFVFDRNKRTF

SEQ ID NO: 21616 - protein, 29 aa, Artificial Sequence
  Quasi-synthetic sequence derived from human genome
VYLVLWAVRKHLRRLYRRQERHRRHHVRC

SEQ ID NO: 21617 - protein, 29 aa, Artificial Sequence
  Quasi-synthetic sequence derived from human genome
VRTRGVGKVPRKKVNVKVFIIIAVFFICF

SEQ ID NO: 21618 - protein, 29 aa, Artificial Sequence
  Quasi-synthetic sequence derived from human genome
VRNKLAVITRLLQNLIMGLFLLFFVLRVR

SEQ ID NO: 21619 - protein, 29 aa, Artificial Sequence
  Quasi-synthetic sequence derived from human genome
IRRLLILILKIGRRWTELIRTMESRVLLR

SEQ ID NO: 21620 - protein, 29 aa, Artificial Sequence
  Quasi-synthetic sequence derived from human genome
RSRRQGSRFLWLLKILVIILVLGIVGFMF

SEQ ID NO: 21621 - protein, 29 aa, Artificial Sequence
  Quasi-synthetic sequence derived from human genome
WIWLEPMKPIIRQIRRPKNVVLRLAVKFF

SEQ ID NO: 21622 - protein, 29 aa, Artificial Sequence
  Quasi-synthetic sequence derived from human genome
IRMLKQLKHPNLVNLIEVFRRKRKMHLVF

SEQ ID NO: 21623 - protein, 29 aa, Artificial Sequence
  Quasi-synthetic sequence derived from human genome
KTIRMWLCKRRHKPRIDGLVKVGTLKKRL

SEQ ID NO: 21624 - protein, 29 aa, Artificial Sequence
  Quasi-synthetic sequence derived from human genome
RLAFRNLGALLPRLHQLCCRMPRTLRRLF

SEQ ID NO: 21625 - protein, 29 aa, Artificial Sequence
  Quasi-synthetic sequence derived from human genome
LLLALHRRLRGLRRAAAGTSRLLFQRLLP

SEQ ID NO: 21626 - protein, 29 aa, Artificial Sequence
  Quasi-synthetic sequence derived from human genome
KIMVRRCLVTLRPFRLFVLGIGFFTLCFL

SEQ ID NO: 21627 - protein, 29 aa, Artificial Sequence
  Quasi-synthetic sequence derived from human genome
KILLHYKFNNRTSVMLKDRWRTMKKLKLI

SEQ ID NO: 21628 - protein, 29 aa, Artificial Sequence
  Quasi-synthetic sequence derived from human genome
RRDLLHLCCKKLKILGMPFRNIRSILKMV

SEQ ID NO: 21629 - protein, 29 aa, Artificial Sequence
  Quasi-synthetic sequence derived from human genome
LVFFVSRKRRILISGSRRRDVIKSIVKIP

SEQ ID NO: 21630 - protein, 29 aa, Artificial Sequence
  Quasi-synthetic sequence derived from human genome
LAFCAGVLLTLLLIAFIFLIIKSYRKYRR

SEQ ID NO: 21631 - protein, 29 aa, Artificial Sequence
  Quasi-synthetic sequence derived from human genome
LLLLLLLVIVFIPAFWSLKTHPLWRLWKK

SEQ ID NO: 21632 - protein, 29 aa, Artificial Sequence
  Quasi-synthetic sequence derived from human genome
KLKQLLHKHQRKSIFKIKKKSLSTSIVWI

SEQ ID NO: 21633 - protein, 29 aa, Artificial Sequence
  Quasi-synthetic sequence derived from human genome
WRRRKSLWLALSASWLLLVLLGGFSLLRL

SEQ ID NO: 21634 - protein, 29 aa, Artificial Sequence
  Quasi-synthetic sequence derived from human genome
RFKVMKAKKMRNRIIKNEVKKLQKAALLK

SEQ ID NO: 21635 - protein, 29 aa, Artificial Sequence
  Quasi-synthetic sequence derived from human genome
KFRLILIESRIHRLARYYKTKRVLPPNWK

SEQ ID NO: 21636 - protein, 29 aa, Artificial Sequence
  Quasi-synthetic sequence derived from human genome
KRMRVKKLPMILALHLKRFKYMEQLHRYT

SEQ ID NO: 21637 - protein, 29 aa, Artificial Sequence
  Quasi-synthetic sequence derived from human genome
KFKLLSSLPHWRRIAQKIIREPRKKRVPK

SEQ ID NO: 21638 - protein, 29 aa, Artificial Sequence
  Quasi-synthetic sequence derived from human genome
KHCKAFKIRKHYLHLRATVVSIQRRYRKL

SEQ ID NO: 21639 - protein, 29 aa, Artificial Sequence
  Quasi-synthetic sequence derived from human genome
RLGRQLSKALQVNCVVRKLLVQLRRLYWW

SEQ ID NO: 21640 - protein, 29 aa, Artificial Sequence
  Quasi-synthetic sequence derived from human genome
CRPFLAFCRRHVRAARPVPWNALLRRRAR

SEQ ID NO: 21641 - protein, 29 aa, Artificial Sequence
  Quasi-synthetic sequence derived from human genome
LKRALKVKQAMMQLYVLKLLKVQTKYLGR

SEQ ID NO: 21642 - protein, 29 aa, Artificial Sequence
  Quasi-synthetic sequence derived from human genome
RRARRIPKLVQRINSIYNAKRGKKRLKKL

SEQ ID NO: 21643 - protein, 29 aa, Artificial Sequence
  Quasi-synthetic sequence derived from human genome
HARLWLHVLPTLPGTLCLRIFRWGPRRRR

SEQ ID NO: 21644 - protein, 29 aa, Artificial Sequence
  Quasi-synthetic sequence derived from human genome
SVLRALRLLRIFKVTKYWSSLRNLVVSLL

SEQ ID NO: 21645 - protein, 29 aa, Artificial Sequence
  Quasi-synthetic sequence derived from human genome
VATQTQFFHVKVLNINLKRKFIKKRIIII

SEQ ID NO: 21646 - protein, 29 aa, Artificial Sequence
  Quasi-synthetic sequence derived from human genome
WSRIKKILKEGPMLKNCNSFKRWKLRYFL

SEQ ID NO: 21647 - protein, 29 aa, Artificial Sequence
  Quasi-synthetic sequence derived from human genome
RGAAKKAGLLMALARLCFLLGRLCSRRLK

SEQ ID NO: 21648 - protein, 29 aa, Artificial Sequence
  Quasi-synthetic sequence derived from human genome
RGVRVDFWWRRLRASLRLTVWAPLLPLRI

SEQ ID NO: 21649 - protein, 29 aa, Artificial Sequence
  Quasi-synthetic sequence derived from human genome
LIQAMWRRYRAKKYLCKVKAACKIQAWYR

SEQ ID NO: 21650 - protein, 29 aa, Artificial Sequence
  Quasi-synthetic sequence derived from human genome
LKVLQRNCAAYLKLRHWQWWRVFTKVKPL

SEQ ID NO: 21651 - protein, 29 aa, Artificial Sequence
  Quasi-synthetic sequence derived from human genome
FAQVKHLYNWNLPPRRILFIKRFIIYSIR

SEQ ID NO: 21652 - protein, 29 aa, Artificial Sequence
  Quasi-synthetic sequence derived from human genome
LVIKHFLRKIIMVHPKVRFHFSVKVNGIL

SEQ ID NO: 21653 - protein, 29 aa, Artificial Sequence
  Quasi-synthetic sequence derived from human genome
WVKFIIGYLFPLLTMSICYLCLIFKVKKR

SEQ ID NO: 21654 - protein, 29 aa, Artificial Sequence
  Quasi-synthetic sequence derived from human genome
KRKHFRLVLRLVLRGGRELGTFHSRLIKV

SEQ ID NO: 21655 - protein, 29 aa, Artificial Sequence
  Quasi-synthetic sequence derived from human genome
RSYPYWRRLLVLCWYLPGWRAGRVTWLRL

SEQ ID NO: 21656 - protein, 29 aa, Artificial Sequence
  Quasi-synthetic sequence derived from human genome
MLGSLVLRRKALAPRLLLRLLRSPTLRGH

SEQ ID NO: 21657 - protein, 29 aa, Artificial Sequence
  Quasi-synthetic sequence derived from human genome
RVRAARLHQRLLHQLRRGPFQRCQLLRLL

SEQ ID NO: 21658 - protein, 29 aa, Artificial Sequence
  Quasi-synthetic sequence derived from human genome
SKQNIFHFLYGKNRSRIPLLRKRRFQLYR

SEQ ID NO: 21659 - protein, 29 aa, Artificial Sequence
  Quasi-synthetic sequence derived from human genome
FWRIEVVNRKFGNRIKVLRSRIRFIHLVT

SEQ ID NO: 21660 - protein, 29 aa, Artificial Sequence
  Quasi-synthetic sequence derived from human genome
FCLLVMLFLLKLARHSKFGMKGFVLFHKI

SEQ ID NO: 21661 - protein, 29 aa, Artificial Sequence
  Quasi-synthetic sequence derived from human genome
LVIVGLTFAVYVRRKSIKKKRALRRFLET

SEQ ID NO: 21662 - protein, 29 aa, Artificial Sequence
  Quasi-synthetic sequence derived from human genome
RKKAKPRIFFLFNDILVYGSIVLNKRKYR

SEQ ID NO: 21663 - protein, 29 aa, Artificial Sequence
  Quasi-synthetic sequence derived from human genome
KFYIHAIGIGKCKRRIVKCGKLHKKGRKL

SEQ ID NO: 21664 - protein, 29 aa, Artificial Sequence
  Quasi-synthetic sequence derived from human genome
LGKVVQVFRLMRIFRVLKLARHSTGLRSL

SEQ ID NO: 21665 - protein, 29 aa, Artificial Sequence
  Quasi-synthetic sequence derived from human genome
KFMVLLWKNFILKRRRCIALVVEMVLTFL

SEQ ID NO: 21666 - protein, 29 aa, Artificial Sequence
  Quasi-synthetic sequence derived from human genome
YMKWRRKSAYWKALKVFKLPVEFLLLLTV

SEQ ID NO: 21667 - protein, 29 aa, Artificial Sequence
  Quasi-synthetic sequence derived from human genome
FAFFIFIMSLLLISGQRPVNLTMRRKLRK

SEQ ID NO: 21668 - protein, 29 aa, Artificial Sequence
  Quasi-synthetic sequence derived from human genome
RIIQTLFSCKNHKKAKAIKLILLVVIVFF

SEQ ID NO: 21669 - protein, 29 aa, Artificial Sequence
  Quasi-synthetic sequence derived from human genome
AKTSAGLKLILKRYKIGASRKTFWKRKKI

SEQ ID NO: 21670 - protein, 29 aa, Artificial Sequence
  Quasi-synthetic sequence derived from human genome
RRLWEAVKRRKALCKRKSWMSKVFSGKRL

SEQ ID NO: 21671 - protein, 29 aa, Artificial Sequence
  Quasi-synthetic sequence derived from human genome
FIKNQRSSLRIRLFNFSLKLLTCLLYIVR

SEQ ID NO: 21672 - protein, 29 aa, Artificial Sequence
  Quasi-synthetic sequence derived from human genome
YWKRRIEVVMREYHKWRIYYKKRLRKPSR

SEQ ID NO: 21673 - protein, 29 aa, Artificial Sequence
  Quasi-synthetic sequence derived from human genome
NMCKNMRVLSRTSKFRRLRELLRRRKKRR

SEQ ID NO: 21674 - protein, 29 aa, Artificial Sequence
  Quasi-synthetic sequence derived from human genome
LLKKINFHKITLRLWNTKDKMSRKVRYYR

SEQ ID NO: 21675 - protein, 29 aa, Artificial Sequence
  Quasi-synthetic sequence derived from human genome
KPARSKLSLIRKFRLFPRPQVKLFGKEKL

SEQ ID NO: 21676 - protein, 29 aa, Artificial Sequence
  Quasi-synthetic sequence derived from human genome
GRAFFGLKVALIFPVLVLLTVFIFVVRKK

SEQ ID NO: 21677 - protein, 29 aa, Artificial Sequence
  Quasi-synthetic sequence derived from human genome
RFLRIVCKTARRDLFGLSVLIRVRLELRR

SEQ ID NO: 21678 - protein, 29 aa, Artificial Sequence
  Quasi-synthetic sequence derived from human genome
LCCRRRRARLRFMKQKFNIVCLKISGFTT

SEQ ID NO: 21679 - protein, 29 aa, Artificial Sequence
  Quasi-synthetic sequence derived from human genome
RFRSLKMWFVFRMYGVKGLQAYIRKHVQL

SEQ ID NO: 21680 - protein, 29 aa, Artificial Sequence
  Quasi-synthetic sequence derived from human genome
FHRWKVVLLVRTDKRSDSLIRKKFRMMKI

SEQ ID NO: 21681 - protein, 29 aa, Artificial Sequence
  Quasi-synthetic sequence derived from human genome
RKALTWKYYAKKILYYLRQQKILNNLKAF

SEQ ID NO: 21682 - protein, 29 aa, Artificial Sequence
  Quasi-synthetic sequence derived from human genome
SFSRGRRKKKCKICKLRSFFRKLNTRLMS

SEQ ID NO: 21683 - protein, 29 aa, Artificial Sequence
  Quasi-synthetic sequence derived from human genome
LMKTIIRKINKMKTLKRKKLLNQILSSSV

SEQ ID NO: 21684 - protein, 29 aa, Artificial Sequence
  Quasi-synthetic sequence derived from human genome
VLKRLFMSRTNRPPLSLSRMIRKMKLPGR

SEQ ID NO: 21685 - protein, 29 aa, Artificial Sequence
  Quasi-synthetic sequence derived from human genome
RKRCLYFFVLLLMILILVNLAMTIWILKV

SEQ ID NO: 21686 - protein, 29 aa, Artificial Sequence
  Quasi-synthetic sequence derived from human genome
WWIIRGPVILSILINFILFINILRILMRK

SEQ ID NO: 21687 - protein, 29 aa, Artificial Sequence
  Quasi-synthetic sequence derived from human genome
IFSKVRIFGLKKRRLRRQDPQLKGIVTRL

SEQ ID NO: 21688 - protein, 29 aa, Artificial Sequence
  Quasi-synthetic sequence derived from human genome
LLIFISLFPEILLIVLKNVRRRSARVTKR

SEQ ID NO: 21689 - protein, 29 aa, Artificial Sequence
  Quasi-synthetic sequence derived from human genome
RKDLLHLCCKKLKILGMPFRNIRSILKMV

SEQ ID NO: 21690 - protein, 29 aa, Artificial Sequence
  Quasi-synthetic sequence derived from human genome
LFIVLILVGYISVKVMLKSIKTRLGRRVP

SEQ ID NO: 21691 - protein, 29 aa, Artificial Sequence
  Quasi-synthetic sequence derived from human genome
FLLTMRPFLKRAILVLSYVLVILYFRLWI

SEQ ID NO: 21692 - protein, 29 aa, Artificial Sequence
  Quasi-synthetic sequence derived from human genome
FKNLFYRTYMLFKNASGKRRFLLCLLLFT

SEQ ID NO: 21693 - protein, 29 aa, Artificial Sequence
  Quasi-synthetic sequence derived from human genome
MILVLRTALNLFFKLKNFKTAATFARRLL

SEQ ID NO: 21694 - protein, 29 aa, Artificial Sequence
  Quasi-synthetic sequence derived from human genome
LVWVPIIKKKQKHRQKSNFLRSLKSFFLT

SEQ ID NO: 21695 - protein, 29 aa, Artificial Sequence
  Quasi-synthetic sequence derived from human genome
LRKRFGGIRIPIILAVLYLFIYIFTKISV

SEQ ID NO: 21696 - protein, 29 aa, Artificial Sequence
  Quasi-synthetic sequence derived from human genome
AKIRKALDRLRKKRHLLRRQRTRREFPVI

SEQ ID NO: 21697 - protein, 29 aa, Artificial Sequence
  Quasi-synthetic sequence derived from human genome
IKLKNKIKYRAEACIKMQKTIRMWLCKRR

SEQ ID NO: 21698 - protein, 29 aa, Artificial Sequence
  Quasi-synthetic sequence derived from human genome
IFHPLLYAFTRQKFQKVLKSKMKKRVVSI

SEQ ID NO: 21699 - protein, 29 aa, Artificial Sequence
  Quasi-synthetic sequence derived from human genome
LWFAAWLKVFYCLRIANFNHPLFFLMKRK

SEQ ID NO: 21700 - protein, 29 aa, Artificial Sequence
  Quasi-synthetic sequence derived from human genome
RHPAWWFMSVKVKLKRKKRQKTPNRKLPR

SEQ ID NO: 21701 - protein, 29 aa, Artificial Sequence
  Quasi-synthetic sequence derived from human genome
RQKCPPWWYRFAHKFLIWNCSPYWIKFKK

SEQ ID NO: 21702 - protein, 29 aa, Artificial Sequence
  Quasi-synthetic sequence derived from human genome
MRIFRPWRLRCPALHLPSLSVFSLRWKLP

SEQ ID NO: 21703 - protein, 29 aa, Artificial Sequence
  Quasi-synthetic sequence derived from human genome
VTLRVFRVFRIFKFSRHSQGLRILGYTLK

SEQ ID NO: 21704 - protein, 29 aa, Artificial Sequence
  Quasi-synthetic sequence derived from human genome
SVLRSFRLLRVFKLAKSWPTLNMLIKIIG

SEQ ID NO: 21705 - protein, 29 aa, Artificial Sequence
  Quasi-synthetic sequence derived from human genome
VVIFMMLGGTFLYWRGRRIQNKRAMRRYL

SEQ ID NO: 21706 - protein, 29 aa, Artificial Sequence
  Quasi-synthetic sequence derived from human genome
RRSSRRLFFCSLWHLPLLLLLMLTCKRPS

SEQ ID NO: 21707 - protein, 29 aa, Artificial Sequence
  Quasi-synthetic sequence derived from human genome
LYRRLATVHMSRMINKYKRRRFQKTKNLL

SEQ ID NO: 21708 - protein, 29 aa, Artificial Sequence
  Quasi-synthetic sequence derived from human genome
LRRHRLTRKLVVLITPQVSSLLRVILSKV

SEQ ID NO: 21709 - protein, 29 aa, Artificial Sequence
  Quasi-synthetic sequence derived from human genome
YLLKIANFSNLIFLHLKRRVKSVILVMLL

SEQ ID NO: 21710 - protein, 29 aa, Artificial Sequence
  Quasi-synthetic sequence derived from human genome
YLLKIANFSNFIFLHLKRRVKSVILVMLL

SEQ ID NO: 21711 - protein, 29 aa, Artificial Sequence
  Quasi-synthetic sequence derived from human genome
RALALFVITCLVIFVLVHSFLKKLLGKKL

SEQ ID NO: 21712 - protein, 29 aa, Artificial Sequence
  Quasi-synthetic sequence derived from human genome
KLQLLSLVTKKKRFWCWQRPKYQFLSLTL

SEQ ID NO: 21713 - protein, 29 aa, Artificial Sequence
  Quasi-synthetic sequence derived from human genome
LRYYYNKRILHKTKGKRFTYKFNFNKLVM

SEQ ID NO: 21714 - protein, 29 aa, Artificial Sequence
  Quasi-synthetic sequence derived from human genome
RVYLGLSIALRFPALVLYIVFIFAMKKKF

SEQ ID NO: 21715 - protein, 29 aa, Artificial Sequence
  Quasi-synthetic sequence derived from human genome
RRRCCRLCIWLLQTLVHLLQLGQVWRYLR

SEQ ID NO: 21716 - protein, 29 aa, Artificial Sequence
  Quasi-synthetic sequence derived from human genome
VRRRWKLSFSIVSLCNHLTRSLMKKVHLR

SEQ ID NO: 21717 - protein, 29 aa, Artificial Sequence
  Quasi-synthetic sequence derived from human genome
RQRGVGQQAMSLAILRVIRLVRVFRIFKL

SEQ ID NO: 21718 - protein, 29 aa, Artificial Sequence
  Quasi-synthetic sequence derived from human genome
RYLLYRAQRAIRLRHALRLHPQLHRAPIR

SEQ ID NO: 21719 - protein, 29 aa, Artificial Sequence
  Quasi-synthetic sequence derived from human genome
FSRRRCEALKLMVQAWPFRRLPLRPLIKM

SEQ ID NO: 21720 - protein, 29 aa, Artificial Sequence
  Quasi-synthetic sequence derived from human genome
YRIRAKLRSYKPRRLFQSVKLHCPKCHLL

SEQ ID NO: 21721 - protein, 29 aa, Artificial Sequence
  Quasi-synthetic sequence derived from human genome
AAICYFRRLHLYSGHKLKWWIGYLQRKFK

SEQ ID NO: 21722 - protein, 29 aa, Artificial Sequence
  Quasi-synthetic sequence derived from human genome
VRIRSRRLGIYQRCWLVFKKASSKGPKRL

SEQ ID NO: 21723 - protein, 29 aa, Artificial Sequence
  Quasi-synthetic sequence derived from human genome
RRWRGLGSLFRRACCVALPLQLLLLLFLL

SEQ ID NO: 21724 - protein, 29 aa, Artificial Sequence
  Quasi-synthetic sequence derived from human genome
MKQKHYVRGRALRSRLLRKQAWKQKWRKK

SEQ ID NO: 21725 - protein, 29 aa, Artificial Sequence
  Quasi-synthetic sequence derived from human genome
CKRKQLLKPVFLNSWIDLRATYKLFYRRK

SEQ ID NO: 21726 - protein, 29 aa, Artificial Sequence
  Quasi-synthetic sequence derived from human genome
KKRVRFTKRKQKVPGFPKRFTVKPVVLGF

SEQ ID NO: 21727 - protein, 29 aa, Artificial Sequence
  Quasi-synthetic sequence derived from human genome
KVIVVRNRRLGVLYRAVQLLILLYFVWYV

SEQ ID NO: 21728 - protein, 29 aa, Artificial Sequence
  Quasi-synthetic sequence derived from human genome
FLIPFLHFIIFLFTLRCLEWKFGKKSMRK

SEQ ID NO: 21729 - protein, 29 aa, Artificial Sequence
  Quasi-synthetic sequence derived from human genome
LSLGVGILVGCLCLLLAVYFIARKIRKKR

SEQ ID NO: 21730 - protein, 29 aa, Artificial Sequence
  Quasi-synthetic sequence derived from human genome
VGILGVVLLAIFVALFFLTKKRRQRQRLA

SEQ ID NO: 21731 - protein, 29 aa, Artificial Sequence
  Quasi-synthetic sequence derived from human genome
YLLKIANFSNLIFLHLKRRVKSVVLVILL

SEQ ID NO: 21732 - protein, 29 aa, Artificial Sequence
  Quasi-synthetic sequence derived from human genome
KRPKKGLATAKQRLGRILKIHRNGKLLLR

SEQ ID NO: 21733 - protein, 29 aa, Artificial Sequence
  Quasi-synthetic sequence derived from human genome
FLLLYFPVFILYFKPSVFRCIALRWVRLL

SEQ ID NO: 21734 - protein, 29 aa, Artificial Sequence
  Quasi-synthetic sequence derived from human genome
WLSLLFKKLVGTKVLMASVQGSKRRKLRV

SEQ ID NO: 21735 - protein, 29 aa, Artificial Sequence
  Quasi-synthetic sequence derived from human genome
KLFRPKKLLPKAFKQYWFIFKDTSIAYFK

SEQ ID NO: 21736 - protein, 29 aa, Artificial Sequence
  Quasi-synthetic sequence derived from human genome
KLAKRLKPLKVRRIKSEKLHLKDFRINLP

SEQ ID NO: 21737 - protein, 29 aa, Artificial Sequence
  Quasi-synthetic sequence derived from human genome
LSRLLFFLLGFLRIRVRGQRASRLQAPVL

SEQ ID NO: 21738 - protein, 29 aa, Artificial Sequence
  Quasi-synthetic sequence derived from human genome
WTLKRQILILFNIILISKLLGARWFPKTL

SEQ ID NO: 21739 - protein, 29 aa, Artificial Sequence
  Quasi-synthetic sequence derived from human genome
IPLLRKRRFQLYRSMNSRARKNRSQIVLF

SEQ ID NO: 21740 - protein, 29 aa, Artificial Sequence
  Quasi-synthetic sequence derived from human genome
AGVLVLLVSLGVAMHLCCRRRRARLRFMK

SEQ ID NO: 21741 - protein, 29 aa, Artificial Sequence
  Quasi-synthetic sequence derived from human genome
FKKSTVILQALVRGWLVRKRFLEQRAKIR

SEQ ID NO: 21742 - protein, 29 aa, Artificial Sequence
  Quasi-synthetic sequence derived from human genome
PPLFNPIIYSLRNKQIKVAIKKIMKRIFY

SEQ ID NO: 21743 - protein, 29 aa, Artificial Sequence
  Quasi-synthetic sequence derived from human genome
FRTMQRRCLPSMAFKKPWRGPVRLQILKR

SEQ ID NO: 21744 - protein, 29 aa, Artificial Sequence
  Quasi-synthetic sequence derived from human genome
FAPCLIMILVYLRIYLIAKRSNRRGPRAK

SEQ ID NO: 21745 - protein, 29 aa, Artificial Sequence
  Quasi-synthetic sequence derived from human genome
LLRWRRPALHRPIKVNLLIPVAYLVFWAF

SEQ ID NO: 21746 - protein, 29 aa, Artificial Sequence
  Quasi-synthetic sequence derived from human genome
AKLLFTPQHKMLRLRLPNLKMVRLRVSFS

SEQ ID NO: 21747 - protein, 29 aa, Artificial Sequence
  Quasi-synthetic sequence derived from human genome
LRPLVKPKIVKKRTKKFIRHQSDRYVKIK

SEQ ID NO: 21748 - protein, 29 aa, Artificial Sequence
  Quasi-synthetic sequence derived from human genome
LLLQKYIAQRKWKKHFYVVTAANRLRKFP

SEQ ID NO: 21749 - protein, 29 aa, Artificial Sequence
  Quasi-synthetic sequence derived from human genome
RPVLPPPMIILSHIYIIIMRLSGRCRKKR

SEQ ID NO: 21750 - protein, 29 aa, Artificial Sequence
  Quasi-synthetic sequence derived from human genome
RWLNKLMKLLQRLPNSVVRRLHRERYKKP

SEQ ID NO: 21751 - protein, 29 aa, Artificial Sequence
  Quasi-synthetic sequence derived from human genome
KGLKLLCRDKIRLNNAIWRAWYIQYVKRR

SEQ ID NO: 21752 - protein, 29 aa, Artificial Sequence
  Quasi-synthetic sequence derived from human genome
QLRALLVVVNALLRKRRYHAALAVLKGFR

SEQ ID NO: 21753 - protein, 29 aa, Artificial Sequence
  Quasi-synthetic sequence derived from human genome
KLFAPVRISITLVSVPLIVRYFRKVGFFK

SEQ ID NO: 21754 - protein, 29 aa, Artificial Sequence
  Quasi-synthetic sequence derived from human genome
IIIKGSVGGLLVLIVILVILFKCGFFKRK

SEQ ID NO: 21755 - protein, 29 aa, Artificial Sequence
  Quasi-synthetic sequence derived from human genome
KLLLPGLLLLLVVIILILAFWVLPKYKTR

SEQ ID NO: 21756 - protein, 29 aa, Artificial Sequence
  Quasi-synthetic sequence derived from human genome
LIRSRLRKVPRFKTMFSNLIHYPRYSLYW

SEQ ID NO: 21757 - protein, 29 aa, Artificial Sequence
  Quasi-synthetic sequence derived from human genome
RFLLKRGLRNKRIGHFLFWFLRSEIAQSR

SEQ ID NO: 21758 - protein, 29 aa, Artificial Sequence
  Quasi-synthetic sequence derived from human genome
RGRRLGLALGLLLALVLAPRVLRAKPTVR

SEQ ID NO: 21759 - protein, 29 aa, Artificial Sequence
  Quasi-synthetic sequence derived from human genome
RKTFWFFFQRHKLKGTSFLLGGVVIVLLR

SEQ ID NO: 21760 - protein, 29 aa, Artificial Sequence
  Quasi-synthetic sequence derived from human genome
TKKLDLWRLPPILIIHLKRFQFVNGRWIK

SEQ ID NO: 21761 - protein, 29 aa, Artificial Sequence
  Quasi-synthetic sequence derived from human genome
KLKEKQVRWKFIKRWKTRYFTLAGNQLLF

SEQ ID NO: 21762 - protein, 29 aa, Artificial Sequence
  Quasi-synthetic sequence derived from human genome
PAKVFVKIKASHALKKKILRFRSGSLKVM

SEQ ID NO: 21763 - protein, 29 aa, Artificial Sequence
  Quasi-synthetic sequence derived from human genome
KKLFVVTAVSAISVIFLAHHFKRKRGKKK

SEQ ID NO: 21764 - protein, 29 aa, Artificial Sequence
  Quasi-synthetic sequence derived from human genome
QLWKWFGKPTQRRGMKGKARKLFYKAIVR

SEQ ID NO: 21765 - protein, 29 aa, Artificial Sequence
  Quasi-synthetic sequence derived from human genome
WRRRKEKLLKELIRKGIPHHFRAIVWQLL

SEQ ID NO: 21766 - protein, 29 aa, Artificial Sequence
  Quasi-synthetic sequence derived from human genome
LLVCVATVIFIVTKCCLFCFWKFARKAKK

SEQ ID NO: 21767 - protein, 29 aa, Artificial Sequence
  Quasi-synthetic sequence derived from human genome
LVPYRCFKRRFPGISRSTYYNWRRKALRR

SEQ ID NO: 21768 - protein, 29 aa, Artificial Sequence
  Quasi-synthetic sequence derived from human genome
LCLFKKHFMALIFSAKRLKIIPFICMYFP

SEQ ID NO: 21769 - protein, 29 aa, Artificial Sequence
  Quasi-synthetic sequence derived from human genome
FLVVLLAILLYLLRLRRIHRRTPRSSSAA

SEQ ID NO: 21770 - protein, 29 aa, Artificial Sequence
  Quasi-synthetic sequence derived from human genome
RYVKIKRNWRKPRGIDNRVRRRFKGQILM

SEQ ID NO: 21771 - protein, 29 aa, Artificial Sequence
  Quasi-synthetic sequence derived from human genome
WPFLVIIVILSALFLGTLACFCVWRRKRK

SEQ ID NO: 21772 - protein, 29 aa, Artificial Sequence
  Quasi-synthetic sequence derived from human genome
RFAKLLLRLPALRSIGLKCLEHLFFFKLI

SEQ ID NO: 21773 - protein, 29 aa, Artificial Sequence
  Quasi-synthetic sequence derived from human genome
INRPRTELKKKLFKRRRVLNRERRLRHRV

SEQ ID NO: 21774 - protein, 29 aa, Artificial Sequence
  Quasi-synthetic sequence derived from human genome
RAIPIKQGMLLKRSGKWLKTWKKKYVTLC

SEQ ID NO: 21775 - protein, 29 aa, Artificial Sequence
  Quasi-synthetic sequence derived from human genome
CIQYNIRSFMNVKHWPWMKLFFKIKPLLK

SEQ ID NO: 21776 - protein, 29 aa, Artificial Sequence
  Quasi-synthetic sequence derived from human genome
WGVYQAVRWLRWKASLIKLRALRRPGGVL

SEQ ID NO: 21777 - protein, 29 aa, Artificial Sequence
  Quasi-synthetic sequence derived from human genome
FWARRASRTRLAAWARRALLSLRSPKARR

SEQ ID NO: 21778 - protein, 29 aa, Artificial Sequence
  Quasi-synthetic sequence derived from human genome
MRRFLSKVYSFPMRKLILFLVFPVVRQTP

SEQ ID NO: 21779 - protein, 29 aa, Artificial Sequence
  Quasi-synthetic sequence derived from human genome
YIVSTLQRWRLNVLRLNFRGCLLRPKTFR

SEQ ID NO: 21780 - protein, 29 aa, Artificial Sequence
  Quasi-synthetic sequence derived from human genome
MKMRRYKLFLMFCMAGLCLISFLHFFKTL

SEQ ID NO: 21781 - protein, 29 aa, Artificial Sequence
  Quasi-synthetic sequence derived from human genome
WAVVVLFVIGLFAAGAFILYKFKRKRPGR

SEQ ID NO: 21782 - protein, 29 aa, Artificial Sequence
  Quasi-synthetic sequence derived from human genome
VAVMVTAFSGLAFIIWLARRLKKGKKSKR

SEQ ID NO: 21783 - protein, 29 aa, Artificial Sequence
  Quasi-synthetic sequence derived from human genome
FRHKVLILFKLILLEKKVLFYISPVNKLV

SEQ ID NO: 21784 - protein, 29 aa, Artificial Sequence
  Quasi-synthetic sequence derived from human genome
VLRLMRIFRILKLARHSTGLRSLGATLKY

SEQ ID NO: 21785 - protein, 29 aa, Artificial Sequence
  Quasi-synthetic sequence derived from human genome
AQRINSANFLKKVRRLIMKRIVKISKCNL

SEQ ID NO: 21786 - protein, 29 aa, Artificial Sequence
  Quasi-synthetic sequence derived from human genome
YFLKVAAVGRRVRSYGKRRPARTILRAFL

SEQ ID NO: 21787 - protein, 29 aa, Artificial Sequence
  Quasi-synthetic sequence derived from human genome
KAFRDTFRLLLLCRWDKRRWRKIPKRPGS

SEQ ID NO: 21788 - protein, 29 aa, Artificial Sequence
  Quasi-synthetic sequence derived from human genome
FKKFAARKKWKQSVRLISLCQRLSRSFLS

SEQ ID NO: 21789 - protein, 29 aa, Artificial Sequence
  Quasi-synthetic sequence derived from human genome
ILIPSIPLLLLLVVTTVVCWVWICRKRKR

SEQ ID NO: 21790 - protein, 29 aa, Artificial Sequence
  Quasi-synthetic sequence derived from human genome
PLRQLLRLQRVSRAFRSLVQLHLAGLRRF

SEQ ID NO: 21791 - protein, 29 aa, Artificial Sequence
  Quasi-synthetic sequence derived from human genome
LRLRWSRFARVLLTRSCAILPTVLVAVFR

SEQ ID NO: 21792 - protein, 29 aa, Artificial Sequence
  Quasi-synthetic sequence derived from human genome
MALLRKINQVLLFLLIVTLCVILYKKVHK

SEQ ID NO: 21793 - protein, 29 aa, Artificial Sequence
  Quasi-synthetic sequence derived from human genome
LWRQQICAIARVRLLKLKHERKALLALLL

SEQ ID NO: 21794 - protein, 29 aa, Artificial Sequence
  Quasi-synthetic sequence derived from human genome
LKFSPIKYGYQPRRNFWPARLATRLLKLR

SEQ ID NO: 21795 - protein, 29 aa, Artificial Sequence
  Quasi-synthetic sequence derived from human genome
PAFPWLVGQGLSSRRRRRLALFLARKHLK

SEQ ID NO: 21796 - protein, 29 aa, Artificial Sequence
  Quasi-synthetic sequence derived from human genome
FFRQLNLYGFRKRRQCTFRTFTRIFSAKR

SEQ ID NO: 21797 - protein, 29 aa, Artificial Sequence
  Quasi-synthetic sequence derived from human genome
IVLFLLLVLVVIVVCSIRKSSRTLKKGPR

SEQ ID NO: 21798 - protein, 29 aa, Artificial Sequence
  Quasi-synthetic sequence derived from human genome
FLRHRYQSRSAFLGRYLKKKKSVVSRLKK

SEQ ID NO: 21799 - protein, 29 aa, Artificial Sequence
  Quasi-synthetic sequence derived from human genome
KWLLLLGLVALSECIMYKVPLIRKKSLRR

SEQ ID NO: 21800 - protein, 29 aa, Artificial Sequence
  Quasi-synthetic sequence derived from human genome
YLLRQFKIFSDFRMNKAFVTWKLNVKRIK

SEQ ID NO: 21801 - protein, 29 aa, Artificial Sequence
  Quasi-synthetic sequence derived from human genome
LRSKKAVWHKLLSKQRKRAVVACFRMAPL

SEQ ID NO: 21802 - protein, 29 aa, Artificial Sequence
  Quasi-synthetic sequence derived from human genome
RKYKKNLKALYVVHPTSFIKVLWNILKPL

SEQ ID NO: 21803 - protein, 29 aa, Artificial Sequence
  Quasi-synthetic sequence derived from human genome
RLFRVMRLVKLLSRGEGIRTLLWTFIKSF

SEQ ID NO: 21804 - protein, 29 aa, Artificial Sequence
  Quasi-synthetic sequence derived from human genome
KICAFLLRKKRFGQWTKLLCVIKDTKLLC

SEQ ID NO: 21805 - protein, 29 aa, Artificial Sequence
  Quasi-synthetic sequence derived from human genome
KFRHCSLLRNRRCTVAYLYDRLLRIRALR

SEQ ID NO: 21806 - protein, 29 aa, Artificial Sequence
  Quasi-synthetic sequence derived from human genome
RLVLRSMSRRDVLIKRWPPPLRWQYFRSL

SEQ ID NO: 21807 - protein, 29 aa, Artificial Sequence
  Quasi-synthetic sequence derived from human genome
CVATMIFMITKCCLFCFRKLAKTGKKKKR

SEQ ID NO: 21808 - protein, 29 aa, Artificial Sequence
  Quasi-synthetic sequence derived from human genome
RLGIHLIRRKIVKPKHHVLMSRKESWKVK

SEQ ID NO: 21809 - protein, 29 aa, Artificial Sequence
  Quasi-synthetic sequence derived from human genome
GKMCICFSFCLWFVLQVLIVVLRIVRYRK

SEQ ID NO: 21810 - protein, 29 aa, Artificial Sequence
  Quasi-synthetic sequence derived from human genome
MGIFLAFFVVVSLVCLILLVKIKLKQRRS

SEQ ID NO: 21811 - protein, 29 aa, Artificial Sequence
  Quasi-synthetic sequence derived from human genome
FRILRIFKLIAPKLLQIIDKRMSHQKTFW

SEQ ID NO: 21812 - protein, 29 aa, Artificial Sequence
  Quasi-synthetic sequence derived from human genome
MGKLIRMGPQERWLLRTKRLHWSRLLFLL

SEQ ID NO: 21813 - protein, 29 aa, Artificial Sequence
  Quasi-synthetic sequence derived from human genome
YYIFIPSKFKSKRLGSLNKFKAKARSILL

SEQ ID NO: 21814 - protein, 29 aa, Artificial Sequence
  Quasi-synthetic sequence derived from human genome
APRARRRRPLFALLLLCALLARLQVALQI

SEQ ID NO: 21815 - protein, 29 aa, Artificial Sequence
  Quasi-synthetic sequence derived from human genome
RRVAVGLGSCLAILILAICGLKLQRRWKR

SEQ ID NO: 21816 - protein, 29 aa, Artificial Sequence
  Quasi-synthetic sequence derived from human genome
RLLVKLYRFLARRTNSTFNQVVLKRLFMS

SEQ ID NO: 21817 - protein, 29 aa, Artificial Sequence
  Quasi-synthetic sequence derived from human genome
WLRQKAARAFWLSLPAAKLRHHSSRWLRR

SEQ ID NO: 21818 - protein, 29 aa, Artificial Sequence
  Quasi-synthetic sequence derived from human genome
ILVVLILTVFVAFCLLVFVLRRNKKPTVK

SEQ ID NO: 21819 - protein, 29 aa, Artificial Sequence
  Quasi-synthetic sequence derived from human genome
KRIHLLTRRNFLLGKWIIFSGQMFGRILC

SEQ ID NO: 21820 - protein, 29 aa, Artificial Sequence
  Quasi-synthetic sequence derived from human genome
HRVRVLSVARPGLWLYTHPLIKLLFLPRR

SEQ ID NO: 21821 - protein, 29 aa, Artificial Sequence
  Quasi-synthetic sequence derived from human genome
RISITFFRLFRVMRLVKLLSRGEGIRTLL

SEQ ID NO: 21822 - protein, 29 aa, Artificial Sequence
  Quasi-synthetic sequence derived from human genome
PSRFKRSYNYKTIVKKILAKLKRARSKKL

SEQ ID NO: 21823 - protein, 29 aa, Artificial Sequence
  Quasi-synthetic sequence derived from human genome
ILLYKTHWMTPIFLKVVINTRRIKHHFKI

SEQ ID NO: 21824 - protein, 29 aa, Artificial Sequence
  Quasi-synthetic sequence derived from human genome
KLSRALRYYYNKRILHKTKGKRFTYKFNF

SEQ ID NO: 21825 - protein, 29 aa, Artificial Sequence
  Quasi-synthetic sequence derived from human genome
LNQHRRIKLSPLMMYEKLSMIRFRYRILR

SEQ ID NO: 21826 - protein, 29 aa, Artificial Sequence
  Quasi-synthetic sequence derived from human genome
PRVRRGISRLWLRVLLRLSPMAFRALQGC

SEQ ID NO: 21827 - protein, 29 aa, Artificial Sequence
  Quasi-synthetic sequence derived from human genome
KTILHRVYGKFLGLRAYIRKQCNHIFLRF

SEQ ID NO: 21828 - protein, 29 aa, Artificial Sequence
  Quasi-synthetic sequence derived from human genome
GMLMLLPFLLRQHKVWRKCRMRIFTVAQM

SEQ ID NO: 21829 - protein, 29 aa, Artificial Sequence
  Quasi-synthetic sequence derived from human genome
RWGRFAKGRGRRPVKTLELTRLLPLKFVK

SEQ ID NO: 21830 - protein, 29 aa, Artificial Sequence
  Quasi-synthetic sequence derived from human genome
FPPRRRLRLGPRGLPLLLSGLLLPLCRAF

SEQ ID NO: 21831 - protein, 29 aa, Artificial Sequence
  Quasi-synthetic sequence derived from human genome
KWRRKSAYWKALKVFKLPVEFLLLLTVPV

SEQ ID NO: 21832 - protein, 29 aa, Artificial Sequence
  Quasi-synthetic sequence derived from human genome
VRPALILILKRLDRMFNKIHKMPTLRRQV

SEQ ID NO: 21833 - protein, 29 aa, Artificial Sequence
  Quasi-synthetic sequence derived from human genome
LRLQQLRRLRGLLRVLRGRPGAGSRRRGR

SEQ ID NO: 21834 - protein, 29 aa, Artificial Sequence
  Quasi-synthetic sequence derived from human genome
LGLIILLLWKCGFFKRARTRALYEAKRQK

SEQ ID NO: 21835 - protein, 29 aa, Artificial Sequence
  Quasi-synthetic sequence derived from human genome
RKGLTRRERRELRRRTILLLYYLLRSPFY

SEQ ID NO: 21836 - protein, 29 aa, Artificial Sequence
  Quasi-synthetic sequence derived from human genome
PLNLAMVYRYCCKINKKLKSITMLRKKIV

SEQ ID NO: 21837 - protein, 29 aa, Artificial Sequence
  Quasi-synthetic sequence derived from human genome
RCSLWSLKPHIRQMWLKALLVILYKYPYR

SEQ ID NO: 21838 - protein, 29 aa, Artificial Sequence
  Quasi-synthetic sequence derived from human genome
SLVIRNLQRVIPIRRAPLRSKIEIVRRIL

SEQ ID NO: 21839 - protein, 29 aa, Artificial Sequence
  Quasi-synthetic sequence derived from human genome
RRRNKKRGIFPKVATNIMRAWLFQHLSRR

SEQ ID NO: 21840 - protein, 29 aa, Artificial Sequence
  Quasi-synthetic sequence derived from human genome
RLKKHIKKLQKRALQFQGKVGLPKARRPW

SEQ ID NO: 21841 - protein, 29 aa, Artificial Sequence
  Quasi-synthetic sequence derived from human genome
RVSKSWRKIKNMVHWSPFVMSFKKKYPWI

SEQ ID NO: 21842 - protein, 29 aa, Artificial Sequence
  Quasi-synthetic sequence derived from human genome
ALNYRTGVRLRGAILTMAFKKILKLKNIK

SEQ ID NO: 21843 - protein, 29 aa, Artificial Sequence
  Quasi-synthetic sequence derived from human genome
MPYFTRLILFLFCLMVLVESRKPKRKRWT

SEQ ID NO: 21844 - protein, 29 aa, Artificial Sequence
  Quasi-synthetic sequence derived from human genome
KYRARRQIPWKLGLQILKIVMVTTQLVRF

SEQ ID NO: 21845 - protein, 29 aa, Artificial Sequence
  Quasi-synthetic sequence derived from human genome
FIRQKRRGAFNSKQLLYLEKYRPKMRLRF

SEQ ID NO: 21846 - protein, 29 aa, Artificial Sequence
  Quasi-synthetic sequence derived from human genome
VTILCLLAAGFVVYLKRKTLIRLLFTNKK

SEQ ID NO: 21847 - protein, 29 aa, Artificial Sequence
  Quasi-synthetic sequence derived from human genome
RLLWRRLKPLILGKLLFAPDTPFTRKLMA

SEQ ID NO: 21848 - protein, 29 aa, Artificial Sequence
  Quasi-synthetic sequence derived from human genome
LVQFLLYKYKIKKSVTKGEMLKIVGKRFR

SEQ ID NO: 21849 - protein, 29 aa, Artificial Sequence
  Quasi-synthetic sequence derived from human genome
PKQRIIPFLPGKILFRRSHIRDVAVKRLK

SEQ ID NO: 21850 - protein, 29 aa, Artificial Sequence
  Quasi-synthetic sequence derived from human genome
RGLPFSSFLILPFQRITRLKLLVQNILKR

SEQ ID NO: 21851 - protein, 29 aa, Artificial Sequence
  Quasi-synthetic sequence derived from human genome
KIFYGHLLKKFRQPNFARKLCIYIWGVVL

SEQ ID NO: 21852 - protein, 29 aa, Artificial Sequence
  Quasi-synthetic sequence derived from human genome
MKKYCKVIRVIVHTQMKLLPFRQKKAHIM

SEQ ID NO: 21853 - protein, 29 aa, Artificial Sequence
  Quasi-synthetic sequence derived from human genome
RPFYLAFVFCLALGLLQAIKLYLRRQRLL

SEQ ID NO: 21854 - protein, 29 aa, Artificial Sequence
  Quasi-synthetic sequence derived from human genome
LSSKCIAMKQGVIKSLKIKYRHCLIKKFL

SEQ ID NO: 21855 - protein, 29 aa, Artificial Sequence
  Quasi-synthetic sequence derived from human genome
RMKLVLRWYLSGFYKKPKGIKKPYNPILG

SEQ ID NO: 21856 - protein, 29 aa, Artificial Sequence
  Quasi-synthetic sequence derived from human genome
KLRLDKLRQSCVMVQKHMRGWLQRKKFLR

SEQ ID NO: 21857 - protein, 29 aa, Artificial Sequence
  Quasi-synthetic sequence derived from human genome
RLLQSRCPRVLPKKLQNWNFLPLWMRSLK

SEQ ID NO: 21858 - protein, 29 aa, Artificial Sequence
  Quasi-synthetic sequence derived from human genome
LLHAALRAWIIQCWWRQVLEKLLAKRRRM

SEQ ID NO: 21859 - protein, 29 aa, Artificial Sequence
  Quasi-synthetic sequence derived from human genome
LRALRLLRIFKVTKYWASLRNLVVSLLNS

SEQ ID NO: 21860 - protein, 29 aa, Artificial Sequence
  Quasi-synthetic sequence derived from human genome
VIALVGLIFILLLVFVLIIRGQSKKYAKK

SEQ ID NO: 21861 - protein, 29 aa, Artificial Sequence
  Quasi-synthetic sequence derived from human genome
LLCKNCLKKWRMKRQTLLEWLFSFLLVLF

SEQ ID NO: 21862 - protein, 29 aa, Artificial Sequence
  Quasi-synthetic sequence derived from human genome
LGRKRRGAFNSKQLLYLEKYRPKMRLRFR

SEQ ID NO: 21863 - protein, 29 aa, Artificial Sequence
  Quasi-synthetic sequence derived from human genome
KYLTILKAVKVLQASFRGVRVRRTLRKMQ

SEQ ID NO: 21864 - protein, 29 aa, Artificial Sequence
  Quasi-synthetic sequence derived from human genome
RLFRVMRLVKLLSKGEGIRTLLWTFIKSF

SEQ ID NO: 21865 - protein, 29 aa, Artificial Sequence
  Quasi-synthetic sequence derived from human genome
KRRYLDWRALMKRKRMKANIKLVGSGFPL

SEQ ID NO: 21866 - protein, 29 aa, Artificial Sequence
  Quasi-synthetic sequence derived from human genome
FVLKYITIALKCLIVALPKIILAVKSKGK

SEQ ID NO: 21867 - protein, 29 aa, Artificial Sequence
  Quasi-synthetic sequence derived from human genome
ANPILYGFLSYRFKQGFRRVLLRPSRRVR

SEQ ID NO: 21868 - protein, 29 aa, Artificial Sequence
  Quasi-synthetic sequence derived from human genome
SKQNIFHFLYRKNRSRIPLLRKRWFQLGH

SEQ ID NO: 21869 - protein, 29 aa, Artificial Sequence
  Quasi-synthetic sequence derived from human genome
AGLVRRRRRYALSGSVWKKRTLTWRVRSF

SEQ ID NO: 21870 - protein, 29 aa, Artificial Sequence
  Quasi-synthetic sequence derived from human genome
RHLVPAAALRRKRKALWAHLFSSLRGYLK

SEQ ID NO: 21871 - protein, 29 aa, Artificial Sequence
  Quasi-synthetic sequence derived from human genome
YIRKKAVLIMYKVFLKYPESLRPAFPRLK

SEQ ID NO: 21872 - protein, 29 aa, Artificial Sequence
  Quasi-synthetic sequence derived from human genome
KLWIGLFLMVCLLCVGIFSWCIWKRKGRC

SEQ ID NO: 21873 - protein, 29 aa, Artificial Sequence
  Quasi-synthetic sequence derived from human genome
FRKGLQEKDKVWLLREQKRKKKLRKLLKR

SEQ ID NO: 21874 - protein, 29 aa, Artificial Sequence
  Quasi-synthetic sequence derived from human genome
VFKLGLAKSIHHARVLIRQRHIRVRKQVV

SEQ ID NO: 21875 - protein, 29 aa, Artificial Sequence
  Quasi-synthetic sequence derived from human genome
LRRRQQLARQARMKKATRFIMVVAIVFIT

SEQ ID NO: 21876 - protein, 29 aa, Artificial Sequence
  Quasi-synthetic sequence derived from human genome
LRLWRVARIINGIIISVKTRSERQLLRLK

SEQ ID NO: 21877 - protein, 29 aa, Artificial Sequence
  Quasi-synthetic sequence derived from human genome
LKMNISVLVLPLFIFTFLYVQMRKTLRFR

SEQ ID NO: 21878 - protein, 29 aa, Artificial Sequence
  Quasi-synthetic sequence derived from human genome
LASYRRLCLRLRLADCLVPYSRALYRRRR

SEQ ID NO: 21879 - protein, 29 aa, Artificial Sequence
  Quasi-synthetic sequence derived from human genome
ANFRHIFLATLACLCPVWRRRRKRPAFSR

SEQ ID NO: 21880 - protein, 29 aa, Artificial Sequence
  Quasi-synthetic sequence derived from human genome
AVTNVLIFFWCLAFLWGLLILLKYRWRKL

SEQ ID NO: 21881 - protein, 29 aa, Artificial Sequence
  Quasi-synthetic sequence derived from human genome
LNFPRSPRIRKRFLLRRILEMLFFTQLQV

SEQ ID NO: 21882 - protein, 29 aa, Artificial Sequence
  Quasi-synthetic sequence derived from human genome
LKVRKEIVSKLMRSLKRAALQRPGIRRVI

SEQ ID NO: 21883 - protein, 29 aa, Artificial Sequence
  Quasi-synthetic sequence derived from human genome
RSRRSLSLNRLLLVPCPPLRRVAVWPVLR

SEQ ID NO: 21884 - protein, 29 aa, Artificial Sequence
  Quasi-synthetic sequence derived from human genome
LLACVATVIFVVTKFCLFCFWKFARKGKK

SEQ ID NO: 21885 - protein, 29 aa, Artificial Sequence
  Quasi-synthetic sequence derived from human genome
TFNRGFKAGRNMRRKLFGVLRLKCHSLFL

SEQ ID NO: 21886 - protein, 29 aa, Artificial Sequence
  Quasi-synthetic sequence derived from human genome
LILAIRSILLVIPFPFTLRRLKYCQKNLL

SEQ ID NO: 21887 - protein, 29 aa, Artificial Sequence
  Quasi-synthetic sequence derived from human genome
LRALRLLRIFKITKYWASLRNLVVSLMSS

SEQ ID NO: 21888 - protein, 29 aa, Artificial Sequence
  Quasi-synthetic sequence derived from human genome
GYRGQRVKVFGWVHRLRRQGKNLMFLVLR

SEQ ID NO: 21889 - protein, 29 aa, Artificial Sequence
  Quasi-synthetic sequence derived from human genome
LKSPRSWRLGLALLLGGALLFWVLLHRRW

SEQ ID NO: 21890 - protein, 29 aa, Artificial Sequence
  Quasi-synthetic sequence derived from human genome
PVPKLCRIKASKALKKKIRRFQPTALKVM

SEQ ID NO: 21891 - protein, 29 aa, Artificial Sequence
  Quasi-synthetic sequence derived from human genome
MRARRGLLRLPRRSLLAALFFFSLSSSLL

SEQ ID NO: 21892 - protein, 29 aa, Artificial Sequence
  Quasi-synthetic sequence derived from human genome
IRASLTFNRGFKAGRNMRRKLFGVLRLKC

SEQ ID NO: 21893 - protein, 29 aa, Artificial Sequence
  Quasi-synthetic sequence derived from human genome
LGLFQGPALGLRNHLGRKLRRRKKKKAKR

SEQ ID NO: 21894 - protein, 29 aa, Artificial Sequence
  Quasi-synthetic sequence derived from human genome
FIKPKLVTVIRSGVKPRKAVRILLNKKTA

SEQ ID NO: 21895 - protein, 29 aa, Artificial Sequence
  Quasi-synthetic sequence derived from human genome
KPAHIAKVKMKFRFLGKLMAKAIMDFRLV

SEQ ID NO: 21896 - protein, 29 aa, Artificial Sequence
  Quasi-synthetic sequence derived from human genome
VLAFFVVQINKAKSRPKRRKPRVKRPQLM

SEQ ID NO: 21897 - protein, 29 aa, Artificial Sequence
  Quasi-synthetic sequence derived from human genome
WLRKPYYLQARFSYVRMKYLFFSWLVVFV

SEQ ID NO: 21898 - protein, 29 aa, Artificial Sequence
  Quasi-synthetic sequence derived from human genome
KRTPRRIKCIILTVWLIAAVISLPPLIYK

SEQ ID NO: 21899 - protein, 29 aa, Artificial Sequence
  Quasi-synthetic sequence derived from human genome
KYYFILSPYRGKRNTNLRFLNKLIPVLKI

SEQ ID NO: 21900 - protein, 29 aa, Artificial Sequence
  Quasi-synthetic sequence derived from human genome
VLQRNIYSIYPMRNLKIRPYFNRVIRPRR

SEQ ID NO: 21901 - protein, 29 aa, Artificial Sequence
  Quasi-synthetic sequence derived from human genome
RFKHLKKLLLVHGHWCYSRLARMVVYYLY

SEQ ID NO: 21902 - protein, 29 aa, Artificial Sequence
  Quasi-synthetic sequence derived from human genome
KPGKKHRYLRLLPEALIRFGGFRKRKKAK

SEQ ID NO: 21903 - protein, 29 aa, Artificial Sequence
  Quasi-synthetic sequence derived from human genome
MRRQMRRHASRRGPSRRRLGRLWNRLFHR

SEQ ID NO: 21904 - protein, 29 aa, Artificial Sequence
  Quasi-synthetic sequence derived from human genome
LIIWVITNCVSTMLLLWTFLLQRRFVKKR

SEQ ID NO: 21905 - protein, 29 aa, Artificial Sequence
  Quasi-synthetic sequence derived from human genome
KVLKKYPRLWCMTKPPSRRPKLYIVNLQW

SEQ ID NO: 21906 - protein, 29 aa, Artificial Sequence
  Quasi-synthetic sequence derived from human genome
MYNPIIYCCLNKRFRAGFKRAFRWCPFIK

SEQ ID NO: 21907 - protein, 29 aa, Artificial Sequence
  Quasi-synthetic sequence derived from human genome
FKRKGKLSTIGKIFKPWKWRKKKTSDKFR

SEQ ID NO: 21908 - protein, 29 aa, Artificial Sequence
  Quasi-synthetic sequence derived from human genome
LLACVATVLFIITKCCLFCFWKFARKGKK

SEQ ID NO: 21909 - protein, 29 aa, Artificial Sequence
  Quasi-synthetic sequence derived from human genome
RRRLGRLWNRLFHRPRAPRGQIPLLTAAR

SEQ ID NO: 21910 - protein, 29 aa, Artificial Sequence
  Quasi-synthetic sequence derived from human genome
RRFRLSSHFIRHRRAHMRRRLYICAGCGR

SEQ ID NO: 21911 - protein, 29 aa, Artificial Sequence
  Quasi-synthetic sequence derived from human genome
RLYTVVPRLVKFVDILTNWYVRMNRRRLK

SEQ ID NO: 21912 - protein, 29 aa, Artificial Sequence
  Quasi-synthetic sequence derived from human genome
KLFRSQRNLYISGFSLFFWLVLRRLVTLI

SEQ ID NO: 21913 - protein, 29 aa, Artificial Sequence
  Quasi-synthetic sequence derived from human genome
WQRRLRRAARRQVLSGHLPFCRFRLRYPS

SEQ ID NO: 21914 - protein, 29 aa, Artificial Sequence
  Quasi-synthetic sequence derived from human genome
LRKFYKGKKYKPLDLRPKKTRAMRRRLNK

SEQ ID NO: 21915 - protein, 29 aa, Artificial Sequence
  Quasi-synthetic sequence derived from human genome
LRKRKKRKFSLWVRQCSSTGFIIQIYVHL

SEQ ID NO: 21916 - protein, 29 aa, Artificial Sequence
  Quasi-synthetic sequence derived from human genome
VWAIFRPGTSFGISVLRALRLLRIFKITK

SEQ ID NO: 21917 - protein, 29 aa, Artificial Sequence
  Quasi-synthetic sequence derived from human genome
CMIKVFLSSLKFHIRRFIFLFFILVIGIY

SEQ ID NO: 21918 - protein, 29 aa, Artificial Sequence
  Quasi-synthetic sequence derived from human genome
KMSRALRHYYKLNIIKKEPGQKLLFRFLK

SEQ ID NO: 21919 - protein, 29 aa, Artificial Sequence
  Quasi-synthetic sequence derived from human genome
RIVLWGFRWLIFRIMLGAGLIKIRGDRCW

SEQ ID NO: 21920 - protein, 29 aa, Artificial Sequence
  Quasi-synthetic sequence derived from human genome
LLVRYRHYFRLLVRTVLLRSLRDCLSGLR

SEQ ID NO: 21921 - protein, 29 aa, Artificial Sequence
  Quasi-synthetic sequence derived from human genome
RYYRLAPMRLYTLSKRHFVLVFVVFFICF

SEQ ID NO: 21922 - protein, 29 aa, Artificial Sequence
  Quasi-synthetic sequence derived from human genome
LKKCYQMIDRRLRKNLKSLIIVHPSWFIR

SEQ ID NO: 21923 - protein, 29 aa, Artificial Sequence
  Quasi-synthetic sequence derived from human genome
PIPLTIKAIFERFKNRKKRYKKKKKRRYQ

SEQ ID NO: 21924 - protein, 29 aa, Artificial Sequence
  Quasi-synthetic sequence derived from human genome
KAKPKKQSKKKVPFWNVQNKIILFTVFLF

SEQ ID NO: 21925 - protein, 29 aa, Artificial Sequence
  Quasi-synthetic sequence derived from human genome
RSRSVVRRRSFSISPVRLRRSRTPLRRRF

SEQ ID NO: 21926 - protein, 29 aa, Artificial Sequence
  Quasi-synthetic sequence derived from human genome
FVRKARHRRPLSSFVRKARHRRTLFASPL

SEQ ID NO: 21927 - protein, 29 aa, Artificial Sequence
  Quasi-synthetic sequence derived from human genome
RCLAVTRPFLAPRLRSPALARRLLLAVWL

SEQ ID NO: 21928 - protein, 29 aa, Artificial Sequence
  Quasi-synthetic sequence derived from human genome
GIRTPPVRRNSKLATLGRIFKPWKWRKKK

SEQ ID NO: 21929 - protein, 29 aa, Artificial Sequence
  Quasi-synthetic sequence derived from human genome
MARRSRHRLLLLLLRYLVVALGYHKAYGF

SEQ ID NO: 21930 - protein, 29 aa, Artificial Sequence
  Quasi-synthetic sequence derived from human genome
LIVCGTLCVCLVIVLWGIRLLLQRKKKLV

SEQ ID NO: 21931 - protein, 29 aa, Artificial Sequence
  Quasi-synthetic sequence derived from human genome
IWCALFPFLVMLVCYGFIFRVARVKARKV

SEQ ID NO: 21932 - protein, 29 aa, Artificial Sequence
  Quasi-synthetic sequence derived from human genome
IYRRGARRWRKLYRANGHLFQAKRFNRRA

SEQ ID NO: 21933 - protein, 29 aa, Artificial Sequence
  Quasi-synthetic sequence derived from human genome
KLCSRFLLKCGFITIPWRCIKKCSPLMPR

SEQ ID NO: 21934 - protein, 29 aa, Artificial Sequence
  Quasi-synthetic sequence derived from human genome
LKIRGTLKSWTKLWCVLKPGVLLIYKTPK

SEQ ID NO: 21935 - protein, 29 aa, Artificial Sequence
  Quasi-synthetic sequence derived from human genome
RQRVLQAAAKNIRVWFIKVRKMKAIYHTL

SEQ ID NO: 21936 - protein, 29 aa, Artificial Sequence
  Quasi-synthetic sequence derived from human genome
FYLAVGIMFLVNTVLWVTIRKELKRKKKW

SEQ ID NO: 21937 - protein, 29 aa, Artificial Sequence
  Quasi-synthetic sequence derived from human genome
QVIILKKWFLKPYKGQTLPGRVLFLRYVV

SEQ ID NO: 21938 - protein, 29 aa, Artificial Sequence
  Quasi-synthetic sequence derived from human genome
KLGLLLLTFLGIVAAVLVKKYQAVLRRKA

SEQ ID NO: 21939 - protein, 29 aa, Artificial Sequence
  Quasi-synthetic sequence derived from human genome
LGVLRPLRSLRWGRARYARRVAGAVWVLV

SEQ ID NO: 21940 - protein, 29 aa, Artificial Sequence
  Quasi-synthetic sequence derived from human genome
RRGRRRTRAAGSLLSRAAILLFISAFLVR

SEQ ID NO: 21941 - protein, 29 aa, Artificial Sequence
  Quasi-synthetic sequence derived from human genome
KGIVRVVFFPFFFRWWLQVTSKVIFFWLL

SEQ ID NO: 21942 - protein, 29 aa, Artificial Sequence
  Quasi-synthetic sequence derived from human genome
MRKTLRFREQRYSLFKLVFAIMVVFLLMW

SEQ ID NO: 21943 - protein, 29 aa, Artificial Sequence
  Quasi-synthetic sequence derived from human genome
PRLCIRKFFPKRKCFVFDWPAPKKYLAHL

SEQ ID NO: 21944 - protein, 29 aa, Artificial Sequence
  Quasi-synthetic sequence derived from human genome
IRLRLHYSEKPPVSITKKKLKKSRFRVKL

SEQ ID NO: 21945 - protein, 29 aa, Artificial Sequence
  Quasi-synthetic sequence derived from human genome
AILGGMAFILLVLLCLLLYYCRRKCLKPR

SEQ ID NO: 21946 - protein, 29 aa, Artificial Sequence
  Quasi-synthetic sequence derived from human genome
FLLTRCLRNICKFLVLLIPLFLLLGLSLR

SEQ ID NO: 21947 - protein, 29 aa, Artificial Sequence
  Quasi-synthetic sequence derived from human genome
VIPIIFGILFAILLVLVFIKKVAKKPTNK

SEQ ID NO: 21948 - protein, 29 aa, Artificial Sequence
  Quasi-synthetic sequence derived from human genome
VLLIFIVSMIYLACKKPKKPQRRQNNRLK

SEQ ID NO: 21949 - protein, 29 aa, Artificial Sequence
  Quasi-synthetic sequence derived from human genome
LFRLRGIKAQVALRLAELARRQRRRQARR

SEQ ID NO: 21950 - protein, 29 aa, Artificial Sequence
  Quasi-synthetic sequence derived from human genome
AAHIIRLMLKYQKILWKVPSFLITQVRRM

SEQ ID NO: 21951 - protein, 29 aa, Artificial Sequence
  Quasi-synthetic sequence derived from human genome
PFSLVPSPKSFVYFIMRIVNFPKCRRRRL

SEQ ID NO: 21952 - protein, 29 aa, Artificial Sequence
  Quasi-synthetic sequence derived from human genome
RKRLCSFLIALYCLFSLYAAYHVFFGRRR

SEQ ID NO: 21953 - protein, 29 aa, Artificial Sequence
  Quasi-synthetic sequence derived from human genome
VKFPLPIYKSKKGWTAYKLQLFKMFPIIL

SEQ ID NO: 21954 - protein, 29 aa, Artificial Sequence
  Quasi-synthetic sequence derived from human genome
VLRFLHLFGPGKNVPSVWRSARRKRKKHR

SEQ ID NO: 21955 - protein, 29 aa, Artificial Sequence
  Quasi-synthetic sequence derived from human genome
AGALFLLAGLVAVALVVRKVKLRNLQKKR

SEQ ID NO: 21956 - protein, 29 aa, Artificial Sequence
  Quasi-synthetic sequence derived from human genome
CRRWGQAISKSKLSRRWRRWNRFNRRRCR

SEQ ID NO: 21957 - protein, 29 aa, Artificial Sequence
  Quasi-synthetic sequence derived from human genome
RKALILMNSKHTHLILCVLRFMRRMICLN

SEQ ID NO: 21958 - protein, 29 aa, Artificial Sequence
  Quasi-synthetic sequence derived from human genome
RALWFWAFSLQAKVWATWLAFVLERRRKK

SEQ ID NO: 21959 - protein, 29 aa, Artificial Sequence
  Quasi-synthetic sequence derived from human genome
KMRRPSLLLKDILKCTLLVFGVWILYILK

SEQ ID NO: 21960 - protein, 29 aa, Artificial Sequence
  Quasi-synthetic sequence derived from human genome
FFSLRLLINESLIKKLRLFFRKFNSSHVR

SEQ ID NO: 21961 - protein, 29 aa, Artificial Sequence
  Quasi-synthetic sequence derived from human genome
VPRQFLRKKVLLRGFSPSHLRAYARRMFP

SEQ ID NO: 21962 - protein, 29 aa, Artificial Sequence
  Quasi-synthetic sequence derived from human genome
QRKLKHRLRLDSYLLKPVQRITKYQLLLK

SEQ ID NO: 21963 - protein, 29 aa, Artificial Sequence
  Quasi-synthetic sequence derived from human genome
AIILLIFISLFPEILLIVLKNVRRRSARR

SEQ ID NO: 21964 - protein, 29 aa, Artificial Sequence
  Quasi-synthetic sequence derived from human genome
LSKKTLLRFWLPFGFILILVIFVTGLLLR

SEQ ID NO: 21965 - protein, 29 aa, Artificial Sequence
  Quasi-synthetic sequence derived from human genome
LLVVLYKYRCYKVSMRHRSLLSTLFFLWL

SEQ ID NO: 21966 - protein, 29 aa, Artificial Sequence
  Quasi-synthetic sequence derived from human genome
RRKFLYQFKNVRWAKGRRETYLCYVVKRR

SEQ ID NO: 21967 - protein, 29 aa, Artificial Sequence
  Quasi-synthetic sequence derived from human genome
KKRKRAIKLIVTVLAMYLICFTPSNLLLV

SEQ ID NO: 21968 - protein, 29 aa, Artificial Sequence
  Quasi-synthetic sequence derived from human genome
RRAKRKVTRMILIVAALFCLCWMPHHALI

SEQ ID NO: 21969 - protein, 29 aa, Artificial Sequence
  Quasi-synthetic sequence derived from human genome
VKRLKAERKFFKGFFGKTGKKAVKAVLWV

SEQ ID NO: 21970 - protein, 29 aa, Artificial Sequence
  Quasi-synthetic sequence derived from human genome
WKCYKARKFFLFYRQQKWASGVIAIAWLL

SEQ ID NO: 21971 - protein, 29 aa, Artificial Sequence
  Quasi-synthetic sequence derived from human genome
IPLSRRFRSVKLWFVIRSFGVKNLQAHVR

SEQ ID NO: 21972 - protein, 29 aa, Artificial Sequence
  Quasi-synthetic sequence derived from human genome
VGRLPPRLPALLTATRRAVRKRGLLRSLL

SEQ ID NO: 21973 - protein, 29 aa, Artificial Sequence
  Quasi-synthetic sequence derived from human genome
FNLIHRLSLMKTSAIKKIRNPKGPLILRL

SEQ ID NO: 21974 - protein, 29 aa, Artificial Sequence
  Quasi-synthetic sequence derived from human genome
KQAMFLNLVYKSLKADIVLRRVKAFVKRL

SEQ ID NO: 21975 - protein, 29 aa, Artificial Sequence
  Quasi-synthetic sequence derived from human genome
LRDLIQGLSFVTRRRIRRTVRRALRRVAA

SEQ ID NO: 21976 - protein, 29 aa, Artificial Sequence
  Quasi-synthetic sequence derived from human genome
RRRMPGLGWMKKCYQMIDRRLRKNLKSFI

SEQ ID NO: 21977 - protein, 29 aa, Artificial Sequence
  Quasi-synthetic sequence derived from human genome
RKRLAKIVLVFVGCFIFCWFPNHILYMYR

SEQ ID NO: 21978 - protein, 29 aa, Artificial Sequence
  Quasi-synthetic sequence derived from human genome
KRRIICLVGLGLVVFFFSFLLSIFRSKYH

SEQ ID NO: 21979 - protein, 29 aa, Artificial Sequence
  Quasi-synthetic sequence derived from human genome
FFHKKERRMRFYIRRMVKTQAFYWTVLSL

SEQ ID NO: 21980 - protein, 29 aa, Artificial Sequence
  Quasi-synthetic sequence derived from human genome
WLTRKHIQRLHAAATVIKRAWQKWRIRMA

SEQ ID NO: 21981 - protein, 29 aa, Artificial Sequence
  Quasi-synthetic sequence derived from human genome
QKQFYRLGGFRVCHKLIFMIIQKLFRSHK

SEQ ID NO: 21982 - protein, 29 aa, Artificial Sequence
  Quasi-synthetic sequence derived from human genome
YLVRKAFRHRLWAVLTVQAYARGMIARRL

SEQ ID NO: 21983 - protein, 29 aa, Artificial Sequence
  Quasi-synthetic sequence derived from human genome
KKPVPVLLGSLLKRKMLPRAALLVTTRPR

SEQ ID NO: 21984 - protein, 29 aa, Artificial Sequence
  Quasi-synthetic sequence derived from human genome
PLLKAKRRRVSKGLHPKKQRHLLHLRERW

SEQ ID NO: 21985 - protein, 29 aa, Artificial Sequence
  Quasi-synthetic sequence derived from human genome
LVPLFCWLRATFWLLATKRRKQQLVLRGP

SEQ ID NO: 21986 - protein, 29 aa, Artificial Sequence
  Quasi-synthetic sequence derived from human genome
FLSVFKKGRRRVPVRNLGKVVHYAKVQLR

SEQ ID NO: 21987 - protein, 29 aa, Artificial Sequence
  Quasi-synthetic sequence derived from human genome
RIVQVLRLLRALRMLKLGRHSTGLRSLGM

SEQ ID NO: 21988 - protein, 29 aa, Artificial Sequence
  Quasi-synthetic sequence derived from human genome
LFFLMKRKIIVLMPWLLRLSVLVSLSFSF

SEQ ID NO: 21989 - protein, 29 aa, Artificial Sequence
  Quasi-synthetic sequence derived from human genome
RIRRLLPSLIGRHFYQRKKVPVSVNLLSK

SEQ ID NO: 21990 - protein, 29 aa, Artificial Sequence
  Quasi-synthetic sequence derived from human genome
KKAVKYQSQARKKLIIIIVLVVVLLGILA

SEQ ID NO: 21991 - protein, 29 aa, Artificial Sequence
  Quasi-synthetic sequence derived from human genome
LVLLLVALSALFLGRWLVVRLATKWCQRK

SEQ ID NO: 21992 - protein, 29 aa, Artificial Sequence
  Quasi-synthetic sequence derived from human genome
PLGIILFCSFKIVWSLRRRQQLARQARMK

SEQ ID NO: 21993 - protein, 29 aa, Artificial Sequence
  Quasi-synthetic sequence derived from human genome
KVRRQLKVILCFSPVGSVLRVRARKFPAV

SEQ ID NO: 21994 - protein, 29 aa, Artificial Sequence
  Quasi-synthetic sequence derived from human genome
KHRSLKIIFLVMAVFLLTQMPFNLMKFIR

SEQ ID NO: 21995 - protein, 29 aa, Artificial Sequence
  Quasi-synthetic sequence derived from human genome
LLLQSFKRRFLAARALRSFRWQSLEAKLR

SEQ ID NO: 21996 - protein, 29 aa, Artificial Sequence
  Quasi-synthetic sequence derived from human genome
RRRQAGRRLRYLPTGSFPFLLLLLLLCIQ

SEQ ID NO: 21997 - protein, 29 aa, Artificial Sequence
  Quasi-synthetic sequence derived from human genome
FLPALCRKMGVPYCIIKGKARLGRLVHRK

SEQ ID NO: 21998 - protein, 29 aa, Artificial Sequence
  Quasi-synthetic sequence derived from human genome
MALRRPPRLRLCARLPDFFLLLLFRGCLI

SEQ ID NO: 21999 - protein, 29 aa, Artificial Sequence
  Quasi-synthetic sequence derived from human genome
AVGGTLLVLLLLAGGSLAFILLRVRRRRK

SEQ ID NO: 22000 - protein, 29 aa, Artificial Sequence
  Quasi-synthetic sequence derived from human genome
IKEKLRIRTKAAVKIQAWWRGTLVRRTLL

SEQ ID NO: 22001 - protein, 30 aa, Artificial Sequence
  Quasi-synthetic sequence derived from human genome
RIFKRKKRIKRRALLFLSYILTHFIFLALL

SEQ ID NO: 22002 - protein, 30 aa, Artificial Sequence
  Quasi-synthetic sequence derived from human genome
LLRLLRLIILLRIFHLFHQKRQLEKLIRRR

SEQ ID NO: 22003 - protein, 30 aa, Artificial Sequence
  Quasi-synthetic sequence derived from human genome
KTARALRIVRFTKILSLLRLLRLSRLIRYI

SEQ ID NO: 22004 - protein, 30 aa, Artificial Sequence
  Quasi-synthetic sequence derived from human genome
LKRLVKLHIKRHYHKKFWKLGAVIFFFIIV

SEQ ID NO: 22005 - protein, 30 aa, Artificial Sequence
  Quasi-synthetic sequence derived from human genome
MVVVMKFFRWVRRAWQRIISWVFFWRQKIK

SEQ ID NO: 22006 - protein, 30 aa, Artificial Sequence
  Quasi-synthetic sequence derived from human genome
KRFLKHAGKWSLRWFLSPRWILQFRRWARK

SEQ ID NO: 22007 - protein, 30 aa, Artificial Sequence
  Quasi-synthetic sequence derived from human genome
AIRLSLIMQLVALLLVVLWIRWKCRRLRIR

SEQ ID NO: 22008 - protein, 30 aa, Artificial Sequence
  Quasi-synthetic sequence derived from human genome
FKRAFLRLLRCQCRRRRRRRPLWRVYGHHW

SEQ ID NO: 22009 - protein, 30 aa, Artificial Sequence
  Quasi-synthetic sequence derived from human genome
RLLKRLLGPKLRRFLKPQGHPRLLLWFKRG

SEQ ID NO: 22010 - protein, 30 aa, Artificial Sequence
  Quasi-synthetic sequence derived from human genome
FLLFFLTLRFSVVKRGRKKLLYIFKQPFMR

SEQ ID NO: 22011 - protein, 30 aa, Artificial Sequence
  Quasi-synthetic sequence derived from human genome
RKLTHLRKRIHRPRRRTTRRWKRWFKFRKR

SEQ ID NO: 22012 - protein, 30 aa, Artificial Sequence
  Quasi-synthetic sequence derived from human genome
LRTFRLLRVLKLVRFLPALRRQLVVLVKTM

SEQ ID NO: 22013 - protein, 30 aa, Artificial Sequence
  Quasi-synthetic sequence derived from human genome
RAAGVFYPWRFRLLCLLRRWLPRPRAWFIR

SEQ ID NO: 22014 - protein, 30 aa, Artificial Sequence
  Quasi-synthetic sequence derived from human genome
LFRIVRLARIGRILRLVRAARGIRTLLFAL

SEQ ID NO: 22015 - protein, 30 aa, Artificial Sequence
  Quasi-synthetic sequence derived from human genome
KLLKRLRLLPALLILRAFKPHRKIRDYRVV

SEQ ID NO: 22016 - protein, 30 aa, Artificial Sequence
  Quasi-synthetic sequence derived from human genome
FILPVLGAVLALLFLLLVLLLLVRKKRKIK

SEQ ID NO: 22017 - protein, 30 aa, Artificial Sequence
  Quasi-synthetic sequence derived from human genome
LFRVIRLARIGRILRLIRGAKGIRTLLFAL

SEQ ID NO: 22018 - protein, 30 aa, Artificial Sequence
  Quasi-synthetic sequence derived from human genome
LFFLFRLLLRFLRLCRSFYITCRRLRCFPQ

SEQ ID NO: 22019 - protein, 30 aa, Artificial Sequence
  Quasi-synthetic sequence derived from human genome
LRTFRLLRVLKLVRFMPALRRQLVVLMKTM

SEQ ID NO: 22020 - protein, 30 aa, Artificial Sequence
  Quasi-synthetic sequence derived from human genome
FRVIRLARIGRILRLIRAAKGIRTLLFALM

SEQ ID NO: 22021 - protein, 30 aa, Artificial Sequence
  Quasi-synthetic sequence derived from human genome
LFRVIRLARIGRILRLIKGAKGIRTLLFAL

SEQ ID NO: 22022 - protein, 30 aa, Artificial Sequence
  Quasi-synthetic sequence derived from human genome
LLFLMRKDKKKLRRLLKYMFIRDYKSKIVK

SEQ ID NO: 22023 - protein, 30 aa, Artificial Sequence
  Quasi-synthetic sequence derived from human genome
FLLLVILAMGLWVIRVQKRHKMPRMKKLMR

SEQ ID NO: 22024 - protein, 30 aa, Artificial Sequence
  Quasi-synthetic sequence derived from human genome
RRFRTLMMRRRFLSLKKTAILIQRKYRAHL

SEQ ID NO: 22025 - protein, 30 aa, Artificial Sequence
  Quasi-synthetic sequence derived from human genome
LLQKAWRGTLARWRCRRLRAIYTIMRWFRR

SEQ ID NO: 22026 - protein, 30 aa, Artificial Sequence
  Quasi-synthetic sequence derived from human genome
RLFKLKPPVWYLRSLVQNLLLIRRFKKTII

SEQ ID NO: 22027 - protein, 30 aa, Artificial Sequence
  Quasi-synthetic sequence derived from human genome
LVRLLRLIILIRIFHLLHQKRQLEKLMRRL

SEQ ID NO: 22028 - protein, 30 aa, Artificial Sequence
  Quasi-synthetic sequence derived from human genome
MFWLIFLLIILSYIKIGKNLLRISKRRSKF

SEQ ID NO: 22029 - protein, 30 aa, Artificial Sequence
  Quasi-synthetic sequence derived from human genome
RRLTRRLVLPVFGVLWITVLLFFWVTKRKL

SEQ ID NO: 22030 - protein, 30 aa, Artificial Sequence
  Quasi-synthetic sequence derived from human genome
KHFLRMLIQVCLYFYCKFLWRCLKFVMRKL

SEQ ID NO: 22031 - protein, 30 aa, Artificial Sequence
  Quasi-synthetic sequence derived from human genome
GRIRASLVLILKTIRRRLPFSKWRLAFRFA

SEQ ID NO: 22032 - protein, 30 aa, Artificial Sequence
  Quasi-synthetic sequence derived from human genome
RFLKIIRPLRNIFLKKPVFAKTVSIFIWFF

SEQ ID NO: 22033 - protein, 30 aa, Artificial Sequence
  Quasi-synthetic sequence derived from human genome
RRKGVWLRLRKILFCVLGLYIAIPFLIKLC

SEQ ID NO: 22034 - protein, 30 aa, Artificial Sequence
  Quasi-synthetic sequence derived from human genome
LFRVIRLARIGRILRLVKGAKGIRTLLFAL

SEQ ID NO: 22035 - protein, 30 aa, Artificial Sequence
  Quasi-synthetic sequence derived from human genome
MRRHFRMKLRNLFTKFIRKFGFELVKRLLP

SEQ ID NO: 22036 - protein, 30 aa, Artificial Sequence
  Quasi-synthetic sequence derived from human genome
LRVVRFVRILRIFKLTRHFVGLRVLGHTLR

SEQ ID NO: 22037 - protein, 30 aa, Artificial Sequence
  Quasi-synthetic sequence derived from human genome
RRRGFGLFFFLRLHRLLLLFLVLRGTLANK

SEQ ID NO: 22038 - protein, 30 aa, Artificial Sequence
  Quasi-synthetic sequence derived from human genome
GVIAGILLFVIIFLGVVLVMKKRKLAKKRK

SEQ ID NO: 22039 - protein, 30 aa, Artificial Sequence
  Quasi-synthetic sequence derived from human genome
RCLRGFFIKRRFRSLRHKIILLQSRARGYL

SEQ ID NO: 22040 - protein, 30 aa, Artificial Sequence
  Quasi-synthetic sequence derived from human genome
RRWRRWNRFNRRRCRAAVKSVTFYWLVIVL

SEQ ID NO: 22041 - protein, 30 aa, Artificial Sequence
  Quasi-synthetic sequence derived from human genome
RRLQARRFRRSRRTGRLVVLIILTFAAFWL

SEQ ID NO: 22042 - protein, 30 aa, Artificial Sequence
  Quasi-synthetic sequence derived from human genome
RKITSRPFTRFRTAVRVVIAILRLRFLVKK

SEQ ID NO: 22043 - protein, 30 aa, Artificial Sequence
  Quasi-synthetic sequence derived from human genome
AFRLQRALRFLLGRLPWRVASGARRFRRWL

SEQ ID NO: 22044 - protein, 30 aa, Artificial Sequence
  Quasi-synthetic sequence derived from human genome
RKSWRLEFLFLRRRCFLLTFYLWFLFFSRF

SEQ ID NO: 22045 - protein, 30 aa, Artificial Sequence
  Quasi-synthetic sequence derived from human genome
RARRRRRRRRRRDLLLSQLCFLASVALLLW

SEQ ID NO: 22046 - protein, 30 aa, Artificial Sequence
  Quasi-synthetic sequence derived from human genome
RKRRKMSKKLPPVIIKYIIINRFRGRKNML

SEQ ID NO: 22047 - protein, 30 aa, Artificial Sequence
  Quasi-synthetic sequence derived from human genome
LAMGLWVIRVQKRHKMPRMKKLMRNRMKLR

SEQ ID NO: 22048 - protein, 30 aa, Artificial Sequence
  Quasi-synthetic sequence derived from human genome
VALVTLLIWVPVKVILHKKRYIYRKIKGWR

SEQ ID NO: 22049 - protein, 30 aa, Artificial Sequence
  Quasi-synthetic sequence derived from human genome
RYWRRWNRFCRRKCRAAVKSNVFYWLVIFL

SEQ ID NO: 22050 - protein, 30 aa, Artificial Sequence
  Quasi-synthetic sequence derived from human genome
RAARPPLLLRPVKLLRRRFRLLLALAVVSV

SEQ ID NO: 22051 - protein, 30 aa, Artificial Sequence
  Quasi-synthetic sequence derived from human genome
MIAVFLPIVVLIFKSILFLPCLRKKILKIR

SEQ ID NO: 22052 - protein, 30 aa, Artificial Sequence
  Quasi-synthetic sequence derived from human genome
SLFRILKVFKSLRALRAIRVLRRLSFLTSV

SEQ ID NO: 22053 - protein, 30 aa, Artificial Sequence
  Quasi-synthetic sequence derived from human genome
KRFLLLFTFLKKNRKKKLMVFFSSCMSVKY

SEQ ID NO: 22054 - protein, 30 aa, Artificial Sequence
  Quasi-synthetic sequence derived from human genome
RLLKRLLGPKLRRFLKPQGHPRLLLWFKRD

SEQ ID NO: 22055 - protein, 30 aa, Artificial Sequence
  Quasi-synthetic sequence derived from human genome
KAKRCNRRLKSQILLKKYLMKRRWKKNFIA

SEQ ID NO: 22056 - protein, 30 aa, Artificial Sequence
  Quasi-synthetic sequence derived from human genome
YLKRFKVMKPKVLRSWCRQILKGLLFLHTR

SEQ ID NO: 22057 - protein, 30 aa, Artificial Sequence
  Quasi-synthetic sequence derived from human genome
IKTLLRCPSKKKYKAIRLIFVIMAVFFIFW

SEQ ID NO: 22058 - protein, 30 aa, Artificial Sequence
  Quasi-synthetic sequence derived from human genome
KARRHLKMMHIAATLIQRRFRTLMMRRRFL

SEQ ID NO: 22059 - protein, 30 aa, Artificial Sequence
  Quasi-synthetic sequence derived from human genome
LKRRYSFRLHIGRNIARPWKLIYYRAKKMF

SEQ ID NO: 22060 - protein, 30 aa, Artificial Sequence
  Quasi-synthetic sequence derived from human genome
ARLCLRLLLLLGYRRRCPPLLRGLVQRWRY

SEQ ID NO: 22061 - protein, 30 aa, Artificial Sequence
  Quasi-synthetic sequence derived from human genome
CLRLLLFFRFKRTLDRICVLFLLGWHRKPR

SEQ ID NO: 22062 - protein, 30 aa, Artificial Sequence
  Quasi-synthetic sequence derived from human genome
SPYKTMKFILWRRFRWAIILFIILFILLLF

SEQ ID NO: 22063 - protein, 30 aa, Artificial Sequence
  Quasi-synthetic sequence derived from human genome
VLYSGWLRKSPPEKKLRLFAWRKRWFILRR

SEQ ID NO: 22064 - protein, 30 aa, Artificial Sequence
  Quasi-synthetic sequence derived from human genome
KNVLKIRRRKMNHHKYRKLVKKTRFLRRKV

SEQ ID NO: 22065 - protein, 30 aa, Artificial Sequence
  Quasi-synthetic sequence derived from human genome
WRMQVFAMARLRFLKLKRQTKVLLTLLLVF

SEQ ID NO: 22066 - protein, 30 aa, Artificial Sequence
  Quasi-synthetic sequence derived from human genome
RVIRLARIGRVLRLIRGAKGIRTLLFALMM

SEQ ID NO: 22067 - protein, 30 aa, Artificial Sequence
  Quasi-synthetic sequence derived from human genome
KILGVLRVLRLLRTLRPLRVISRAPGLKLV

SEQ ID NO: 22068 - protein, 30 aa, Artificial Sequence
  Quasi-synthetic sequence derived from human genome
CCRCRGRKRCIKKFSIQRFPKILVLHLKRF

SEQ ID NO: 22069 - protein, 30 aa, Artificial Sequence
  Quasi-synthetic sequence derived from human genome
RASGRCVIAPVRAVLRLRRRVCVLRKRRLL

SEQ ID NO: 22070 - protein, 30 aa, Artificial Sequence
  Quasi-synthetic sequence derived from human genome
RHFRARFRRLWPCGRRRRHRARRALRRVRP

SEQ ID NO: 22071 - protein, 30 aa, Artificial Sequence
  Quasi-synthetic sequence derived from human genome
VKAKTKRRLVLGLREVLKHLKLKKLKCVII

SEQ ID NO: 22072 - protein, 30 aa, Artificial Sequence
  Quasi-synthetic sequence derived from human genome
LLAWLLLPLLLLLLVLLLAAYFFRFRKQRK

SEQ ID NO: 22073 - protein, 30 aa, Artificial Sequence
  Quasi-synthetic sequence derived from human genome
KTMKFIVWRRFKWVIIGLLFLLILLLFVAV

SEQ ID NO: 22074 - protein, 30 aa, Artificial Sequence
  Quasi-synthetic sequence derived from human genome
QGLRLLRGLRRRNVQKKVALAKKLLAKLRF

SEQ ID NO: 22075 - protein, 30 aa, Artificial Sequence
  Quasi-synthetic sequence derived from human genome
LRRVLVLMASKHAFLALCALRFKRKIIGLK

SEQ ID NO: 22076 - protein, 30 aa, Artificial Sequence
  Quasi-synthetic sequence derived from human genome
FQGFTKINAFNWAKVRKLSFKRKRFLIKLR

SEQ ID NO: 22077 - protein, 30 aa, Artificial Sequence
  Quasi-synthetic sequence derived from human genome
LHALLLVLLLCRLRRLRARARARAAARLSL

SEQ ID NO: 22078 - protein, 30 aa, Artificial Sequence
  Quasi-synthetic sequence derived from human genome
KIKTFLSLVWKRRILFFVVTLVSVFLVWKF

SEQ ID NO: 22079 - protein, 30 aa, Artificial Sequence
  Quasi-synthetic sequence derived from human genome
KKKIKPTLPLRIFINVSRFFCVQLKKMVRL

SEQ ID NO: 22080 - protein, 30 aa, Artificial Sequence
  Quasi-synthetic sequence derived from human genome
LLVVVLGVVFGILIKRRQQKIRKYTMRRLL

SEQ ID NO: 22081 - protein, 30 aa, Artificial Sequence
  Quasi-synthetic sequence derived from human genome
RAFLLRRRFLHLKKAAIVFQKQLRGQIARR

SEQ ID NO: 22082 - protein, 30 aa, Artificial Sequence
  Quasi-synthetic sequence derived from human genome
FSFCLWFVLQVLIVVLRIVRYRKSSKLIKK

SEQ ID NO: 22083 - protein, 30 aa, Artificial Sequence
  Quasi-synthetic sequence derived from human genome
IAMFLVIFPMFTFPKKLPPRHKKKKKKKFS

SEQ ID NO: 22084 - protein, 30 aa, Artificial Sequence
  Quasi-synthetic sequence derived from human genome
ALLRLLGLRRGLRRLRRLWAGPRVQRGRGR

SEQ ID NO: 22085 - protein, 30 aa, Artificial Sequence
  Quasi-synthetic sequence derived from human genome
LAILRVIRLVRVFRIFKLSRHSKGLQILGK

SEQ ID NO: 22086 - protein, 30 aa, Artificial Sequence
  Quasi-synthetic sequence derived from human genome
LALVLPSIVILGKIILFLPCISRKLKRIKK

SEQ ID NO: 22087 - protein, 30 aa, Artificial Sequence
  Quasi-synthetic sequence derived from human genome
IRRGIGYLKLICFLIPFLLSLKKKMKVPYL

SEQ ID NO: 22088 - protein, 30 aa, Artificial Sequence
  Quasi-synthetic sequence derived from human genome
WKTWIFWKTWIFWKTWIFRKTYIGWKTWIF

SEQ ID NO: 22089 - protein, 30 aa, Artificial Sequence
  Quasi-synthetic sequence derived from human genome
YLKRFKVMKIKVLRSWCRQILKGLQFLHTR

SEQ ID NO: 22090 - protein, 30 aa, Artificial Sequence
  Quasi-synthetic sequence derived from human genome
FRRKIYYLPRRYKFMSRIDKQISRFRRWLP

SEQ ID NO: 22091 - protein, 30 aa, Artificial Sequence
  Quasi-synthetic sequence derived from human genome
LRIRCVARKFLYLWIRMTFGRVFPSKARFY

SEQ ID NO: 22092 - protein, 30 aa, Artificial Sequence
  Quasi-synthetic sequence derived from human genome
YFALRRKKKKTIKMLMLVVVLFALCWFPLN

SEQ ID NO: 22093 - protein, 30 aa, Artificial Sequence
  Quasi-synthetic sequence derived from human genome
LRLLLSCLLLPAARLARQYLLPLLRRLARR

SEQ ID NO: 22094 - protein, 30 aa, Artificial Sequence
  Quasi-synthetic sequence derived from human genome
AFSRSKKKKKKKKKRQCFAFLIYFRLGIKM

SEQ ID NO: 22095 - protein, 30 aa, Artificial Sequence
  Quasi-synthetic sequence derived from human genome
WWRWLTFWRRLQSAFLKNRSLRTKSSLWRR

SEQ ID NO: 22096 - protein, 30 aa, Artificial Sequence
  Quasi-synthetic sequence derived from human genome
RSWGYVLLIVLFCLFIFVLIYVRVFRKSRR

SEQ ID NO: 22097 - protein, 30 aa, Artificial Sequence
  Quasi-synthetic sequence derived from human genome
LKTYLKRFKVMKPKVLRSWCRQILKGLQFL

SEQ ID NO: 22098 - protein, 30 aa, Artificial Sequence
  Quasi-synthetic sequence derived from human genome
RTRAGAARVARWRRLRLQQLRRLRGLLRVL

SEQ ID NO: 22099 - protein, 30 aa, Artificial Sequence
  Quasi-synthetic sequence derived from human genome
GKIKRLKKSAFVVLILLITAKLLVLPLLCR

SEQ ID NO: 22100 - protein, 30 aa, Artificial Sequence
  Quasi-synthetic sequence derived from human genome
FGRIIWHKFKQWVIPWHLNKRYNRKRFFAL

SEQ ID NO: 22101 - protein, 30 aa, Artificial Sequence
  Quasi-synthetic sequence derived from human genome
LRLHCGLWVRRKAGYKKKLWKKTPARKKRL

SEQ ID NO: 22102 - protein, 30 aa, Artificial Sequence
  Quasi-synthetic sequence derived from human genome
LFLMRKDKKKLRRLLKYMFIRDYKSKIVKG

SEQ ID NO: 22103 - protein, 30 aa, Artificial Sequence
  Quasi-synthetic sequence derived from human genome
WKVLKVVAKVIRALLRILCCLLKAICRVLS

SEQ ID NO: 22104 - protein, 30 aa, Artificial Sequence
  Quasi-synthetic sequence derived from human genome
RFTKITQYLIRIRKLTLKRQRKLVPLSKKV

SEQ ID NO: 22105 - protein, 30 aa, Artificial Sequence
  Quasi-synthetic sequence derived from human genome
YLIMIFLGLYINFRHLYKQRRRRYGQKKKK

SEQ ID NO: 22106 - protein, 30 aa, Artificial Sequence
  Quasi-synthetic sequence derived from human genome
LFALRYNILTLMRMLSLKSLKKQMKKVKKM

SEQ ID NO: 22107 - protein, 30 aa, Artificial Sequence
  Quasi-synthetic sequence derived from human genome
VGGVIGLLILILLIKKLIIFILKKTREKKK

SEQ ID NO: 22108 - protein, 30 aa, Artificial Sequence
  Quasi-synthetic sequence derived from human genome
WLRRKLRGKRRPVIAFCLLMILSAMAVTRF

SEQ ID NO: 22109 - protein, 30 aa, Artificial Sequence
  Quasi-synthetic sequence derived from human genome
KKSRKKMCILVLVLSVIILILGLIIWLVYK

SEQ ID NO: 22110 - protein, 30 aa, Artificial Sequence
  Quasi-synthetic sequence derived from human genome
LSRRWRRWNRFNRRRCRAAVKSVTFYWLVI

SEQ ID NO: 22111 - protein, 30 aa, Artificial Sequence
  Quasi-synthetic sequence derived from human genome
LVKRKRTKGKKLLLSIGVLLHKWKNVCIVL

SEQ ID NO: 22112 - protein, 30 aa, Artificial Sequence
  Quasi-synthetic sequence derived from human genome
KTAFRIYAVSTLLLFLLFFLFRLLLRFLRL

SEQ ID NO: 22113 - protein, 30 aa, Artificial Sequence
  Quasi-synthetic sequence derived from human genome
LIRHKLKEVRLFLKNYSKTRFGYRIKWRII

SEQ ID NO: 22114 - protein, 30 aa, Artificial Sequence
  Quasi-synthetic sequence derived from human genome
LSAFAGLLLLMLLILALWKIGFFKRPLKKK

SEQ ID NO: 22115 - protein, 30 aa, Artificial Sequence
  Quasi-synthetic sequence derived from human genome
LRAQMLIRIVLFLQKVWRGTLARMRYKRTK

SEQ ID NO: 22116 - protein, 30 aa, Artificial Sequence
  Quasi-synthetic sequence derived from human genome
RICRVLRSLKLLAQFRQIQIIILVLVRALK

SEQ ID NO: 22117 - protein, 30 aa, Artificial Sequence
  Quasi-synthetic sequence derived from human genome
LRVMRLMRIFRILKLARHSTGLRAFGFTLR

SEQ ID NO: 22118 - protein, 30 aa, Artificial Sequence
  Quasi-synthetic sequence derived from human genome
LRIRRLLRPFFLLQNSSMMKKTLKCIRWSL

SEQ ID NO: 22119 - protein, 30 aa, Artificial Sequence
  Quasi-synthetic sequence derived from human genome
MAKFRRRTCIILALFILFIFSLMMGLKMLR

SEQ ID NO: 22120 - protein, 30 aa, Artificial Sequence
  Quasi-synthetic sequence derived from human genome
LRFGFGFRRGRSFLLRSWHHLMKRVQIKIF

SEQ ID NO: 22121 - protein, 30 aa, Artificial Sequence
  Quasi-synthetic sequence derived from human genome
GISAGILVFILLLLVVILIVKKSKLAKKRK

SEQ ID NO: 22122 - protein, 30 aa, Artificial Sequence
  Quasi-synthetic sequence derived from human genome
LRIARFRFRAFHFLNRFPSVYLRCKMVVCR

SEQ ID NO: 22123 - protein, 30 aa, Artificial Sequence
  Quasi-synthetic sequence derived from human genome
RKRWFQLGRSMNPRARKKRSRIPLLRKRRF

SEQ ID NO: 22124 - protein, 30 aa, Artificial Sequence
  Quasi-synthetic sequence derived from human genome
RFRSLLVRRRFISLKKATIFVQRKYRATIC

SEQ ID NO: 22125 - protein, 30 aa, Artificial Sequence
  Quasi-synthetic sequence derived from human genome
LIFIRILGILLSKLRTRQMRCRDYRLRLAR

SEQ ID NO: 22126 - protein, 30 aa, Artificial Sequence
  Quasi-synthetic sequence derived from human genome
KFFMARVRLQLKIILCFSPVGRTLRVRARK

SEQ ID NO: 22127 - protein, 30 aa, Artificial Sequence
  Quasi-synthetic sequence derived from human genome
VVKMRKEVKRIRVLVIRKLVRSVGRLKSKK

SEQ ID NO: 22128 - protein, 30 aa, Artificial Sequence
  Quasi-synthetic sequence derived from human genome
IRIRILCCLTFLVKVKSKALLKNRLLPPLL

SEQ ID NO: 22129 - protein, 30 aa, Artificial Sequence
  Quasi-synthetic sequence derived from human genome
YFFSPTLFRVIRLARIGRILRLIRGAKGIR

SEQ ID NO: 22130 - protein, 30 aa, Artificial Sequence
  Quasi-synthetic sequence derived from human genome
IRNIGIWFFWIRLYKIRRGRTRPQALLFLC

SEQ ID NO: 22131 - protein, 30 aa, Artificial Sequence
  Quasi-synthetic sequence derived from human genome
IAAAIALLALTALLLVAMICRRRRRRKKAR

SEQ ID NO: 22132 - protein, 30 aa, Artificial Sequence
  Quasi-synthetic sequence derived from human genome
RLKIHFTKVFSAFALVRTIRYLYRRLQRML

SEQ ID NO: 22133 - protein, 30 aa, Artificial Sequence
  Quasi-synthetic sequence derived from human genome
KFKLLSSLPRWRRIAQKIIRERRKKRVPKK

SEQ ID NO: 22134 - protein, 30 aa, Artificial Sequence
  Quasi-synthetic sequence derived from human genome
WITAVLPTVIICVMVFCLILWKWKKKKRPR

SEQ ID NO: 22135 - protein, 30 aa, Artificial Sequence
  Quasi-synthetic sequence derived from human genome
RVLVRAHRHRGLRPRRQKALRMILAVVLVF

SEQ ID NO: 22136 - protein, 30 aa, Artificial Sequence
  Quasi-synthetic sequence derived from human genome
FIYIYMNFFFFFSVGRKFKKFNKVRVVRAL

SEQ ID NO: 22137 - protein, 30 aa, Artificial Sequence
  Quasi-synthetic sequence derived from human genome
MRRLRRLAHLVLFCPFSKRLQGRLPGLRVR

SEQ ID NO: 22138 - protein, 30 aa, Artificial Sequence
  Quasi-synthetic sequence derived from human genome
LRAWKRIFWRQILLTLGLLGLFLYGLPKFR

SEQ ID NO: 22139 - protein, 30 aa, Artificial Sequence
  Quasi-synthetic sequence derived from human genome
LRTFRLMRVLKLVRFLPALQRQLVVLMKTM

SEQ ID NO: 22140 - protein, 30 aa, Artificial Sequence
  Quasi-synthetic sequence derived from human genome
KGFLLKKRKWPLKGWHKRFFYLDKGILKYA

SEQ ID NO: 22141 - protein, 30 aa, Artificial Sequence
  Quasi-synthetic sequence derived from human genome
RLKLFFIKNQRSSLRIRLFNFSLKLLTCLL

SEQ ID NO: 22142 - protein, 30 aa, Artificial Sequence
  Quasi-synthetic sequence derived from human genome
FYLLRIANFSNLIFLRIKRRVKSVVLVILL

SEQ ID NO: 22143 - protein, 30 aa, Artificial Sequence
  Quasi-synthetic sequence derived from human genome
RRRRLRRRPRGLRCSRLPPPPPLPLLLGLL

SEQ ID NO: 22144 - protein, 30 aa, Artificial Sequence
  Quasi-synthetic sequence derived from human genome
KKKKRYLRASSNRNFLLTMRPFLKRAILVL

SEQ ID NO: 22145 - protein, 30 aa, Artificial Sequence
  Quasi-synthetic sequence derived from human genome
RRKARRLLKTVLMILLAFLVCWGPLFGLLL

SEQ ID NO: 22146 - protein, 30 aa, Artificial Sequence
  Quasi-synthetic sequence derived from human genome
FYLLKIANFSNLIFLRLKRRVKSVILVVLL

SEQ ID NO: 22147 - protein, 30 aa, Artificial Sequence
  Quasi-synthetic sequence derived from human genome
FLGVAVLVSILAGCLLNRRRAARRRRKRLR

SEQ ID NO: 22148 - protein, 30 aa, Artificial Sequence
  Quasi-synthetic sequence derived from human genome
LTRFVKWPRYIRLQRQRAILYKRLKVPPAI

SEQ ID NO: 22149 - protein, 30 aa, Artificial Sequence
  Quasi-synthetic sequence derived from human genome
RLKLFFIKNQRSSLRIRLFNFSLKLLSCLL

SEQ ID NO: 22150 - protein, 30 aa, Artificial Sequence
  Quasi-synthetic sequence derived from human genome
KLRYLSLLCLLPLVAFLLFCLHVLFKKRTK

SEQ ID NO: 22151 - protein, 30 aa, Artificial Sequence
  Quasi-synthetic sequence derived from human genome
MSLAILRIIRLVRVFRIFKLSRHSKGLQIL

SEQ ID NO: 22152 - protein, 30 aa, Artificial Sequence
  Quasi-synthetic sequence derived from human genome
KVARKFWWKNVKMIVLICVIVFIIILFIVL

SEQ ID NO: 22153 - protein, 30 aa, Artificial Sequence
  Quasi-synthetic sequence derived from human genome
KDVLGFLRVVRFVRILRIFKLTRHFVGLRV

SEQ ID NO: 22154 - protein, 30 aa, Artificial Sequence
  Quasi-synthetic sequence derived from human genome
RDIKTIKSLRVLRVLRPLKTIKRLPKLKAV

SEQ ID NO: 22155 - protein, 30 aa, Artificial Sequence
  Quasi-synthetic sequence derived from human genome
FLAKQRLRKRVNAALVIQKYWRRVLAQRKL

SEQ ID NO: 22156 - protein, 30 aa, Artificial Sequence
  Quasi-synthetic sequence derived from human genome
FILIMGNSKLREAFLKMLRFVKCFLRRRKP

SEQ ID NO: 22157 - protein, 30 aa, Artificial Sequence
  Quasi-synthetic sequence derived from human genome
RRALLHAALSACIIQCWWRLILSKILKKRR

SEQ ID NO: 22158 - protein, 30 aa, Artificial Sequence
  Quasi-synthetic sequence derived from human genome
IKILLRRPNEKKSKAVRLIFVIMIIFFLFW

SEQ ID NO: 22159 - protein, 30 aa, Artificial Sequence
  Quasi-synthetic sequence derived from human genome
LRIIRLVRVFRIFKLSRHSKGLQILGHTLR

SEQ ID NO: 22160 - protein, 30 aa, Artificial Sequence
  Quasi-synthetic sequence derived from human genome
KKAIKYQSKARRKLMFIIICVIVLLVILGI

SEQ ID NO: 22161 - protein, 30 aa, Artificial Sequence
  Quasi-synthetic sequence derived from human genome
YLRIIRFLPLFKIIVPILIRIADVQIKKRL

SEQ ID NO: 22162 - protein, 30 aa, Artificial Sequence
  Quasi-synthetic sequence derived from human genome
RYLRVKLTVRYKRVTTHRRIWLALGLCWLV

SEQ ID NO: 22163 - protein, 30 aa, Artificial Sequence
  Quasi-synthetic sequence derived from human genome
KMMQRRPRSAEVKYFYFFKILLRLRLAILK

SEQ ID NO: 22164 - protein, 30 aa, Artificial Sequence
  Quasi-synthetic sequence derived from human genome
RVLRMMRIFWVIKLARHFIGLQTLGLTLKR

SEQ ID NO: 22165 - protein, 30 aa, Artificial Sequence
  Quasi-synthetic sequence derived from human genome
KCKKKQKSTKKFWIQKLPKVLCLHLKRFHW

SEQ ID NO: 22166 - protein, 30 aa, Artificial Sequence
  Quasi-synthetic sequence derived from human genome
GWRFIRVFIKTIRRDIFGGLVLLKVKAKVR

SEQ ID NO: 22167 - protein, 30 aa, Artificial Sequence
  Quasi-synthetic sequence derived from human genome
LILMLGTFFIAFFLRKFRNSRFLGGKARRI

SEQ ID NO: 22168 - protein, 30 aa, Artificial Sequence
  Quasi-synthetic sequence derived from human genome
SIMALLLLLLLLLLYKYKQKPKYQVRWKII

SEQ ID NO: 22169 - protein, 30 aa, Artificial Sequence
  Quasi-synthetic sequence derived from human genome
IFYLLASVLLSLLLILKAGRRWNKYFKSRR

SEQ ID NO: 22170 - protein, 30 aa, Artificial Sequence
  Quasi-synthetic sequence derived from human genome
QFFHVKVLNINLKRKFIKKRIIIISNYSKR

SEQ ID NO: 22171 - protein, 30 aa, Artificial Sequence
  Quasi-synthetic sequence derived from human genome
LLRRLRAVRLRSGAKALGKARRKVTVLVLV

SEQ ID NO: 22172 - protein, 30 aa, Artificial Sequence
  Quasi-synthetic sequence derived from human genome
YVKIRSRKLGIFRRCWLVFKKASSKGPRRL

SEQ ID NO: 22173 - protein, 30 aa, Artificial Sequence
  Quasi-synthetic sequence derived from human genome
ILTRLMNFFVFSRGLLQYINQRKKFRRRWV

SEQ ID NO: 22174 - protein, 30 aa, Artificial Sequence
  Quasi-synthetic sequence derived from human genome
VYIKIYIVLRRRRKRVNTKRSSRAFRAHLR

SEQ ID NO: 22175 - protein, 30 aa, Artificial Sequence
  Quasi-synthetic sequence derived from human genome
LIVLVTLIFCLIVLSLSTFHIHKRRMKKRK

SEQ ID NO: 22176 - protein, 30 aa, Artificial Sequence
  Quasi-synthetic sequence derived from human genome
ALLFLCLLPLIVKHIRKKQAKKAAAIRAKK

SEQ ID NO: 22177 - protein, 30 aa, Artificial Sequence
  Quasi-synthetic sequence derived from human genome
KKIVPKKKKPLKLGPIKKKDLKKLVLYLKN

SEQ ID NO: 22178 - protein, 30 aa, Artificial Sequence
  Quasi-synthetic sequence derived from human genome
KFSRYWRRWNRFCRRKCRAAVKSNVFYWLV

SEQ ID NO: 22179 - protein, 30 aa, Artificial Sequence
  Quasi-synthetic sequence derived from human genome
GLKMLVTISCILVGVLLLFVLLLVVRRRRR

SEQ ID NO: 22180 - protein, 30 aa, Artificial Sequence
  Quasi-synthetic sequence derived from human genome
QFRYLQRLLLVHGRWSYIRMCKFLRYFFYK

SEQ ID NO: 22181 - protein, 30 aa, Artificial Sequence
  Quasi-synthetic sequence derived from human genome
CYLCILLLIVLFILLCCLYRLCKKSKPIKK

SEQ ID NO: 22182 - protein, 30 aa, Artificial Sequence
  Quasi-synthetic sequence derived from human genome
YLLQLKGKKHVLHLWPKRLLLPRHLRVFSF

SEQ ID NO: 22183 - protein, 30 aa, Artificial Sequence
  Quasi-synthetic sequence derived from human genome
RLRVRKAIGKYRIKLLDTLPLPGRLIRYLK

SEQ ID NO: 22184 - protein, 30 aa, Artificial Sequence
  Quasi-synthetic sequence derived from human genome
ILALVLLVVLLVVCGPLAYKKLVKKFRQKK

SEQ ID NO: 22185 - protein, 30 aa, Artificial Sequence
  Quasi-synthetic sequence derived from human genome
SLKLAKIILALKVSRKNLLNVCKLIFKISR

SEQ ID NO: 22186 - protein, 30 aa, Artificial Sequence
  Quasi-synthetic sequence derived from human genome
CFLVVVALLCVPWMLLFKPLVLRRQYLRRK

SEQ ID NO: 22187 - protein, 30 aa, Artificial Sequence
  Quasi-synthetic sequence derived from human genome
LFFWMLFKALLIIYGILVIFRRMMKSRMMV

SEQ ID NO: 22188 - protein, 30 aa, Artificial Sequence
  Quasi-synthetic sequence derived from human genome
IFIIFRSPVFRIFFHKIFIRPLRYRSRCSN

SEQ ID NO: 22189 - protein, 30 aa, Artificial Sequence
  Quasi-synthetic sequence derived from human genome
CIPRSFRRHIRQHSALTRLRLRNVFRRFLR

SEQ ID NO: 22190 - protein, 30 aa, Artificial Sequence
  Quasi-synthetic sequence derived from human genome
VIVLVALLLLWRRRQKRRTGALVLSRGGKR

SEQ ID NO: 22191 - protein, 30 aa, Artificial Sequence
  Quasi-synthetic sequence derived from human genome
RPVLLRGARAALLLLLPPRLLARPSLLLRR

SEQ ID NO: 22192 - protein, 30 aa, Artificial Sequence
  Quasi-synthetic sequence derived from human genome
FLLLILLCMSLLLFQVIRLYQRRRWMIRAL

SEQ ID NO: 22193 - protein, 30 aa, Artificial Sequence
  Quasi-synthetic sequence derived from human genome
KYWRMYVVRRRYKIRRAATIVLQSYLRGFL

SEQ ID NO: 22194 - protein, 30 aa, Artificial Sequence
  Quasi-synthetic sequence derived from human genome
LLLKKIMAILIKRFHHTRRNWKGLIAQVIL

SEQ ID NO: 22195 - protein, 30 aa, Artificial Sequence
  Quasi-synthetic sequence derived from human genome
MLLRKRYRHRPCRLQFLLLLLMLGCVLMMV

SEQ ID NO: 22196 - protein, 30 aa, Artificial Sequence
  Quasi-synthetic sequence derived from human genome
LRADKLRAACIRIQKTIRGWLLRKKYLRMR

SEQ ID NO: 22197 - protein, 30 aa, Artificial Sequence
  Quasi-synthetic sequence derived from human genome
LLLVLFILFLTWCRVQKQKHLPLRVSTRRR

SEQ ID NO: 22198 - protein, 30 aa, Artificial Sequence
  Quasi-synthetic sequence derived from human genome
LMKVKLKKYTKFLFVRDPFVRLISAFRSKF

SEQ ID NO: 22199 - protein, 30 aa, Artificial Sequence
  Quasi-synthetic sequence derived from human genome
HVRIRVIKKKKVIMKKRKKLTLTRPTPLVT

SEQ ID NO: 22200 - protein, 30 aa, Artificial Sequence
  Quasi-synthetic sequence derived from human genome
VRIRNRCVMTSRPRGVKRRWRLSRIVFRHL

SEQ ID NO: 22201 - protein, 30 aa, Artificial Sequence
  Quasi-synthetic sequence derived from human genome
GCVIFLLIIIFLTVLLLKLRKRHRKHTQQR

SEQ ID NO: 22202 - protein, 30 aa, Artificial Sequence
  Quasi-synthetic sequence derived from human genome
WLARRRFQSIRRFVLNIQLTYRVQRLQKKL

SEQ ID NO: 22203 - protein, 30 aa, Artificial Sequence
  Quasi-synthetic sequence derived from human genome
FRVFRALKAISVVSRLKVIVGALLRSVKKL

SEQ ID NO: 22204 - protein, 30 aa, Artificial Sequence
  Quasi-synthetic sequence derived from human genome
ARLFRIKCVTRIQAYWRGCVVRKWYRNLRK

SEQ ID NO: 22205 - protein, 30 aa, Artificial Sequence
  Quasi-synthetic sequence derived from human genome
KFILISSLAILLMVSLLLLSLWKLWRVKKF

SEQ ID NO: 22206 - protein, 30 aa, Artificial Sequence
  Quasi-synthetic sequence derived from human genome
WPRIIMRFRKRKNFKKKRIVTTPQTVLRIN

SEQ ID NO: 22207 - protein, 30 aa, Artificial Sequence
  Quasi-synthetic sequence derived from human genome
KKFIWNHGITLPLKNVRKRRFRKTAKKKYI

SEQ ID NO: 22208 - protein, 30 aa, Artificial Sequence
  Quasi-synthetic sequence derived from human genome
NMRKNVRVLSRTSKFRRLRQLLRRRKKRWQ

SEQ ID NO: 22209 - protein, 30 aa, Artificial Sequence
  Quasi-synthetic sequence derived from human genome
YLRKRFGGRRIRLYLSVLSLFLYIFTKISV

SEQ ID NO: 22210 - protein, 30 aa, Artificial Sequence
  Quasi-synthetic sequence derived from human genome
RRLFVRRGQPFTIILYFRAPVRAFLPALKK

SEQ ID NO: 22211 - protein, 30 aa, Artificial Sequence
  Quasi-synthetic sequence derived from human genome
LRTLFRSRSKRRHRTVKLIFAIVVAYFLSW

SEQ ID NO: 22212 - protein, 30 aa, Artificial Sequence
  Quasi-synthetic sequence derived from human genome
RRGWRRAPLRRGVGSSPRARRLMRPLWLLL

SEQ ID NO: 22213 - protein, 30 aa, Artificial Sequence
  Quasi-synthetic sequence derived from human genome
RPSRRFLGKKYRKYYYKSPKPLLRPFLCRI

SEQ ID NO: 22214 - protein, 30 aa, Artificial Sequence
  Quasi-synthetic sequence derived from human genome
KLLLPGLLLLLVVIILILAFWVLPKYKTRK

SEQ ID NO: 22215 - protein, 30 aa, Artificial Sequence
  Quasi-synthetic sequence derived from human genome
SLIRKKFRMMKIPKPILFGLNIAMKKQTKI

SEQ ID NO: 22216 - protein, 30 aa, Artificial Sequence
  Quasi-synthetic sequence derived from human genome
IVLKEGFMIKRAQGRKRFGMKNFKKRWFRL

SEQ ID NO: 22217 - protein, 30 aa, Artificial Sequence
  Quasi-synthetic sequence derived from human genome
RLLRALRVLYVMRLARHSLGLRSLGLTMRR

SEQ ID NO: 22218 - protein, 30 aa, Artificial Sequence
  Quasi-synthetic sequence derived from human genome
RKYKKNIKALYIVHPTMFIKTLLILFKPLI

SEQ ID NO: 22219 - protein, 30 aa, Artificial Sequence
  Quasi-synthetic sequence derived from human genome
LLRLLNKLTKWKHSRTMMLVVFKSAPILKR

SEQ ID NO: 22220 - protein, 30 aa, Artificial Sequence
  Quasi-synthetic sequence derived from human genome
RKKQKIIKMLLIVALLFILSWLPLWTLMML

SEQ ID NO: 22221 - protein, 30 aa, Artificial Sequence
  Quasi-synthetic sequence derived from human genome
FTLLLLSIVILYCRIYSLVRTRSRRLTFRK

SEQ ID NO: 22222 - protein, 30 aa, Artificial Sequence
  Quasi-synthetic sequence derived from human genome
IAVMVVFIILVIGVCTCCHPLRKRRKRKKK

SEQ ID NO: 22223 - protein, 30 aa, Artificial Sequence
  Quasi-synthetic sequence derived from human genome
ICYFRRLHLYSGHKLKWWIGYLQRKFKRNL

SEQ ID NO: 22224 - protein, 30 aa, Artificial Sequence
  Quasi-synthetic sequence derived from human genome
IVHPLRLRHLRRPRVARLLCLGVWALILVF

SEQ ID NO: 22225 - protein, 30 aa, Artificial Sequence
  Quasi-synthetic sequence derived from human genome
PWVYILFRRAVLRRLQPRLSTRPRRSLTLW

SEQ ID NO: 22226 - protein, 30 aa, Artificial Sequence
  Quasi-synthetic sequence derived from human genome
FLKKLLGKKLTRCLKPFENSRLRLWTKWVF

SEQ ID NO: 22227 - protein, 30 aa, Artificial Sequence
  Quasi-synthetic sequence derived from human genome
RLFRAARLIKLLRQGYTIRILLWTFVQSFK

SEQ ID NO: 22228 - protein, 30 aa, Artificial Sequence
  Quasi-synthetic sequence derived from human genome
MVRRFLVTLRIRRACGPPRVRVFVVHIPRL

SEQ ID NO: 22229 - protein, 30 aa, Artificial Sequence
  Quasi-synthetic sequence derived from human genome
IRNMSWPRLIRKLRCYLKEMKNLRKLVFSR

SEQ ID NO: 22230 - protein, 30 aa, Artificial Sequence
  Quasi-synthetic sequence derived from human genome
KKLKQIFLSVLRHVRYWVKDRSLRLHRFTR

SEQ ID NO: 22231 - protein, 30 aa, Artificial Sequence
  Quasi-synthetic sequence derived from human genome
IVAFAFTTLLIACLLLRVFRSGKRLKKTRK

SEQ ID NO: 22232 - protein, 30 aa, Artificial Sequence
  Quasi-synthetic sequence derived from human genome
LWRLPPILIIHLKRFQFVNGRWIKSQKIVK

SEQ ID NO: 22233 - protein, 30 aa, Artificial Sequence
  Quasi-synthetic sequence derived from human genome
LKMLMMMALLVPLVYTIKRHKWSVLKSRKL

SEQ ID NO: 22234 - protein, 30 aa, Artificial Sequence
  Quasi-synthetic sequence derived from human genome
RRLRKNLRALVVVHATWYVKAFLALLRPFI

SEQ ID NO: 22235 - protein, 30 aa, Artificial Sequence
  Quasi-synthetic sequence derived from human genome
LRRVLVLMNSKHTFLALCALRFMRRIIGLK

SEQ ID NO: 22236 - protein, 30 aa, Artificial Sequence
  Quasi-synthetic sequence derived from human genome
RRPWGAWLSARLWKWLKSPRSWRLGLALLL

SEQ ID NO: 22237 - protein, 30 aa, Artificial Sequence
  Quasi-synthetic sequence derived from human genome
LPRLCIRKFFPKKKCFVFDRPVHRRKLAQL

SEQ ID NO: 22238 - protein, 30 aa, Artificial Sequence
  Quasi-synthetic sequence derived from human genome
ILKRALKVKQAMLQLYVLKLLKLQTKYLGR

SEQ ID NO: 22239 - protein, 30 aa, Artificial Sequence
  Quasi-synthetic sequence derived from human genome
LLRILNKLTKWKHSRTMMLVVFKSAPILKR

SEQ ID NO: 22240 - protein, 30 aa, Artificial Sequence
  Quasi-synthetic sequence derived from human genome
RRRQRGRLMRRLVRRLRRWGLLPRTNTPAR

SEQ ID NO: 22241 - protein, 30 aa, Artificial Sequence
  Quasi-synthetic sequence derived from human genome
LAWLSLFVNWKVSMFVEVHKAIKKRRRRRK

SEQ ID NO: 22242 - protein, 30 aa, Artificial Sequence
  Quasi-synthetic sequence derived from human genome
LGLFLLALLGLVVKRAVERRKALSRRARRL

SEQ ID NO: 22243 - protein, 30 aa, Artificial Sequence
  Quasi-synthetic sequence derived from human genome
IVIMATICFILLILSLICKIKLGPVRRKLK

SEQ ID NO: 22244 - protein, 30 aa, Artificial Sequence
  Quasi-synthetic sequence derived from human genome
FRKKSFKIHQKAIKKKGNLYGFALLRRRAL

SEQ ID NO: 22245 - protein, 30 aa, Artificial Sequence
  Quasi-synthetic sequence derived from human genome
TWLRVRKARPQLILSRRPRRRLGSLRWCGR

SEQ ID NO: 22246 - protein, 30 aa, Artificial Sequence
  Quasi-synthetic sequence derived from human genome
LRCFLKLTVNRVIWKIAKPPTCVLVRVRWW

SEQ ID NO: 22247 - protein, 30 aa, Artificial Sequence
  Quasi-synthetic sequence derived from human genome
IVLAKKMLRKALKLLNRIFPYNLISLFLHI

SEQ ID NO: 22248 - protein, 30 aa, Artificial Sequence
  Quasi-synthetic sequence derived from human genome
GNMRKNMRVLSRISKFRRLRQLLRRRKKTR

SEQ ID NO: 22249 - protein, 30 aa, Artificial Sequence
  Quasi-synthetic sequence derived from human genome
KKIWWIIRGPMMLCVTVNFFIFLKILKLLI

SEQ ID NO: 22250 - protein, 30 aa, Artificial Sequence
  Quasi-synthetic sequence derived from human genome
LRAPALRRLLPPLLLLLLSLPPRARAKYVR

SEQ ID NO: 22251 - protein, 30 aa, Artificial Sequence
  Quasi-synthetic sequence derived from human genome
IVSQRKQIKRKAPRGFLKRVFKRKKPQLRL

SEQ ID NO: 22252 - protein, 30 aa, Artificial Sequence
  Quasi-synthetic sequence derived from human genome
KLFRAARLIKLLRQGYTIRILLWTFVQSFK

SEQ ID NO: 22253 - protein, 30 aa, Artificial Sequence
  Quasi-synthetic sequence derived from human genome
KTFLPKCIRAKIQDYHILTRKRIRYRFRRF

SEQ ID NO: 22254 - protein, 30 aa, Artificial Sequence
  Quasi-synthetic sequence derived from human genome
LRVIRLVRVFRIFKLSRHSKGLQILGQTLR

SEQ ID NO: 22255 - protein, 30 aa, Artificial Sequence
  Quasi-synthetic sequence derived from human genome
KLWFKFQRYFRRKPVRFFTFLALYLTAGSL

SEQ ID NO: 22256 - protein, 30 aa, Artificial Sequence
  Quasi-synthetic sequence derived from human genome
KLEAHWRGALARKAIQRRKWAVRIIRKFIK

SEQ ID NO: 22257 - protein, 30 aa, Artificial Sequence
  Quasi-synthetic sequence derived from human genome
ILIQWNIRAFMAVKNWPWMRLFFKIKPLVK

SEQ ID NO: 22258 - protein, 30 aa, Artificial Sequence
  Quasi-synthetic sequence derived from human genome
CSLSWNVIRYSLQKLRLVRWLLKKVFQCRR

SEQ ID NO: 22259 - protein, 30 aa, Artificial Sequence
  Quasi-synthetic sequence derived from human genome
CYAKFLRRTKAATIIQKYWRMYVVRRRYKI

SEQ ID NO: 22260 - protein, 30 aa, Artificial Sequence
  Quasi-synthetic sequence derived from human genome
RLRHPRTRWKNWWVRGILTLAMIAFFFIII

SEQ ID NO: 22261 - protein, 30 aa, Artificial Sequence
  Quasi-synthetic sequence derived from human genome
LSRWQRRLRRAARRQVLSGHLPFCRFRLRY

SEQ ID NO: 22262 - protein, 30 aa, Artificial Sequence
  Quasi-synthetic sequence derived from human genome
RLPIRMAKALGKRTAKYRWFAVLYLLVCFL

SEQ ID NO: 22263 - protein, 30 aa, Artificial Sequence
  Quasi-synthetic sequence derived from human genome
PLVLLVTLITTLVIGLVLCKRKRRTKTIRR

SEQ ID NO: 22264 - protein, 30 aa, Artificial Sequence
  Quasi-synthetic sequence derived from human genome
RYPLLLPKGVVLKLKPVATRFPRKAWRQKR

SEQ ID NO: 22265 - protein, 30 aa, Artificial Sequence
  Quasi-synthetic sequence derived from human genome
LLCYRHLKTKRILRRNLLALIHRMIEFVVR

SEQ ID NO: 22266 - protein, 30 aa, Artificial Sequence
  Quasi-synthetic sequence derived from human genome
KRSWPFLRSFRVLRVFKLAKSWPTLNTLIK

SEQ ID NO: 22267 - protein, 30 aa, Artificial Sequence
  Quasi-synthetic sequence derived from human genome
LRPLKKFLRKLHLPRDLPQKKKLKYMKQSL

SEQ ID NO: 22268 - protein, 30 aa, Artificial Sequence
  Quasi-synthetic sequence derived from human genome
KWRLPRISARAPYRLRRLRRHTYWPPRRPV

SEQ ID NO: 22269 - protein, 30 aa, Artificial Sequence
  Quasi-synthetic sequence derived from human genome
FKKKAHKLTSAPLKQNFQKLLKLFYIKKLK

SEQ ID NO: 22270 - protein, 30 aa, Artificial Sequence
  Quasi-synthetic sequence derived from human genome
GLLIMFITIVFCAAGIVVLVLHRRRRYKKK

SEQ ID NO: 22271 - protein, 30 aa, Artificial Sequence
  Quasi-synthetic sequence derived from human genome
RIPLLRKRRFQLGRSMNLRARKNRSQIVLF

SEQ ID NO: 22272 - protein, 30 aa, Artificial Sequence
  Quasi-synthetic sequence derived from human genome
KQRLKRLRNIHYLFNTALFLIAWRLLIARS

SEQ ID NO: 22273 - protein, 30 aa, Artificial Sequence
  Quasi-synthetic sequence derived from human genome
FKRARRPGARALRLVLGIVLLFWACFLPFW

SEQ ID NO: 22274 - protein, 30 aa, Artificial Sequence
  Quasi-synthetic sequence derived from human genome
TLVSFLIFILFIIVQLFIMKLRKAHVIWKK

SEQ ID NO: 22275 - protein, 30 aa, Artificial Sequence
  Quasi-synthetic sequence derived from human genome
RRRNTPFHERFFRFLLRKLYVFRRSFLMTC

SEQ ID NO: 22276 - protein, 30 aa, Artificial Sequence
  Quasi-synthetic sequence derived from human genome
RRGRGGLRLGLRGPLRKLVLQSLVPLLLRL

SEQ ID NO: 22277 - protein, 30 aa, Artificial Sequence
  Quasi-synthetic sequence derived from human genome
MARRRRRACIALFLVLLFAFGTLMGLRTLK

SEQ ID NO: 22278 - protein, 30 aa, Artificial Sequence
  Quasi-synthetic sequence derived from human genome
RKGIVRVVFFPFFFRWWLQVTSKVIFFWLL

SEQ ID NO: 22279 - protein, 30 aa, Artificial Sequence
  Quasi-synthetic sequence derived from human genome
TCFAGFWLIWGLIVLLCCFCSFLRRRLKRR

SEQ ID NO: 22280 - protein, 30 aa, Artificial Sequence
  Quasi-synthetic sequence derived from human genome
RWLRIKLWISTVALALVPFLLLIPKFARWF

SEQ ID NO: 22281 - protein, 30 aa, Artificial Sequence
  Quasi-synthetic sequence derived from human genome
IFYFLYGKTRSRIPLLRKRRFQLCRCMNPR

SEQ ID NO: 22282 - protein, 30 aa, Artificial Sequence
  Quasi-synthetic sequence derived from human genome
RLFSKKIFCCLFFITLFFIRLLSYMFFHVR

SEQ ID NO: 22283 - protein, 30 aa, Artificial Sequence
  Quasi-synthetic sequence derived from human genome
LRVIRLVRVFRIFKLSRHSKGLQILGQTLK

SEQ ID NO: 22284 - protein, 30 aa, Artificial Sequence
  Quasi-synthetic sequence derived from human genome
RLLLRRTYARNLPAFVNRLGILTVRHLKRL

SEQ ID NO: 22285 - protein, 30 aa, Artificial Sequence
  Quasi-synthetic sequence derived from human genome
GRKKRKIPKLVLRINAIYEVRRGKKRVKRL

SEQ ID NO: 22286 - protein, 30 aa, Artificial Sequence
  Quasi-synthetic sequence derived from human genome
MVWRRLLRKRWVLALVFGLSLVYFLSSTFK

SEQ ID NO: 22287 - protein, 30 aa, Artificial Sequence
  Quasi-synthetic sequence derived from human genome
KRKKNVLRLCCKKLKIFAMPMQDIKMILKM

SEQ ID NO: 22288 - protein, 30 aa, Artificial Sequence
  Quasi-synthetic sequence derived from human genome
VKILRVLRVLRPLRAINRAKGLKHVVQCMF

SEQ ID NO: 22289 - protein, 30 aa, Artificial Sequence
  Quasi-synthetic sequence derived from human genome
KRLFVIRPSRFYDRRFLKLLRFYIALTGIP

SEQ ID NO: 22290 - protein, 30 aa, Artificial Sequence
  Quasi-synthetic sequence derived from human genome
VILLLLLLLLLFLILRHRRQGKHWTSTQRK

SEQ ID NO: 22291 - protein, 30 aa, Artificial Sequence
  Quasi-synthetic sequence derived from human genome
RTVRRTMNIVPRTKVKTIKMFLILNLLFLL

SEQ ID NO: 22292 - protein, 30 aa, Artificial Sequence
  Quasi-synthetic sequence derived from human genome
RLLRGLWQRWRRYKYRFVPWIALNLSHNPR

SEQ ID NO: 22293 - protein, 30 aa, Artificial Sequence
  Quasi-synthetic sequence derived from human genome
VLRGNTKINTFNWAKIRKLSFKRKHFLIKL

SEQ ID NO: 22294 - protein, 30 aa, Artificial Sequence
  Quasi-synthetic sequence derived from human genome
WWRGTLGRRKAAKRKWAAQTIRRLIRGFVL

SEQ ID NO: 22295 - protein, 30 aa, Artificial Sequence
  Quasi-synthetic sequence derived from human genome
GCPVILATLGVALLFIVRKKRKEKRLKRLR

SEQ ID NO: 22296 - protein, 30 aa, Artificial Sequence
  Quasi-synthetic sequence derived from human genome
LKTVLHRIYGKFLGLRAFIRKQINNIFLRF

SEQ ID NO: 22297 - protein, 30 aa, Artificial Sequence
  Quasi-synthetic sequence derived from human genome
LIHLFIFRKSNFIFDKLHKVGIKTRRQWRR

SEQ ID NO: 22298 - protein, 30 aa, Artificial Sequence
  Quasi-synthetic sequence derived from human genome
VKILRVLRVLRPLRAINRAKGLKHVVQCVF

SEQ ID NO: 22299 - protein, 30 aa, Artificial Sequence
  Quasi-synthetic sequence derived from human genome
ALFCLQYLGVRVLLRFQRKLSVLLLLLGRR

SEQ ID NO: 22300 - protein, 30 aa, Artificial Sequence
  Quasi-synthetic sequence derived from human genome
RKHLNKLRNIRYGFNTILVILIWRIFIARS

SEQ ID NO: 22301 - protein, 30 aa, Artificial Sequence
  Quasi-synthetic sequence derived from human genome
LLRKRRFQLGRSMNPRARKNRSRIPLLRKR

SEQ ID NO: 22302 - protein, 30 aa, Artificial Sequence
  Quasi-synthetic sequence derived from human genome
YKDKLRINRFPWPKVLKISYKRSSFFIKIR

SEQ ID NO: 22303 - protein, 30 aa, Artificial Sequence
  Quasi-synthetic sequence derived from human genome
LFLKLFICFIFIRSSPTIVSNKRVSKRKFI

SEQ ID NO: 22304 - protein, 30 aa, Artificial Sequence
  Quasi-synthetic sequence derived from human genome
CQRLSLKSFLILPFQRITRLKLLLQNILKR

SEQ ID NO: 22305 - protein, 30 aa, Artificial Sequence
  Quasi-synthetic sequence derived from human genome
WALFFRKRRADMPRVFVFRALLLVLIFLFV

SEQ ID NO: 22306 - protein, 30 aa, Artificial Sequence
  Quasi-synthetic sequence derived from human genome
LIKPFGARKKRSWYLTWKYKLTNQRALRRF

SEQ ID NO: 22307 - protein, 30 aa, Artificial Sequence
  Quasi-synthetic sequence derived from human genome
LLSKAKQKLLRHLVPAAALRRKRKALWAHL

SEQ ID NO: 22308 - protein, 30 aa, Artificial Sequence
  Quasi-synthetic sequence derived from human genome
FFKYCLLRKSFTCWKKNVRLQGLHRLQKFL

SEQ ID NO: 22309 - protein, 30 aa, Artificial Sequence
  Quasi-synthetic sequence derived from human genome
KKLKKSIKIIFIVVAAFLVSWLPFNTFKFL

SEQ ID NO: 22310 - protein, 30 aa, Artificial Sequence
  Quasi-synthetic sequence derived from human genome
LALFVLTCVVLTFLGHRLLKRLLGPKLRRF

SEQ ID NO: 22311 - protein, 30 aa, Artificial Sequence
  Quasi-synthetic sequence derived from human genome
LRFPVFLAILINFFIFVRIVQLLVAKLRAR

SEQ ID NO: 22312 - protein, 30 aa, Artificial Sequence
  Quasi-synthetic sequence derived from human genome
LVLLALCLLLPLLLLGGWKRWRRGRAARHV

SEQ ID NO: 22313 - protein, 30 aa, Artificial Sequence
  Quasi-synthetic sequence derived from human genome
KRSVTRIKKRSRSVFYRLTILILVFAVSWM

SEQ ID NO: 22314 - protein, 30 aa, Artificial Sequence
  Quasi-synthetic sequence derived from human genome
RFRKYLRQLFHRRVAVHLVKWLPFLSVDRL

SEQ ID NO: 22315 - protein, 30 aa, Artificial Sequence
  Quasi-synthetic sequence derived from human genome
FIFLKILKLLISKLKAHQMCFRDYKYRLAK

SEQ ID NO: 22316 - protein, 30 aa, Artificial Sequence
  Quasi-synthetic sequence derived from human genome
FYLLKIVNFSRLIFHHLKRKAKSVVLVIVL

SEQ ID NO: 22317 - protein, 30 aa, Artificial Sequence
  Quasi-synthetic sequence derived from human genome
FILLSHLQLFIKRVVLKTPAKRHKQLKNKL

SEQ ID NO: 22318 - protein, 30 aa, Artificial Sequence
  Quasi-synthetic sequence derived from human genome
YRHLRRFILSVIVFGSIVLLMLWLPIRIIK

SEQ ID NO: 22319 - protein, 30 aa, Artificial Sequence
  Quasi-synthetic sequence derived from human genome
RPFYLAFVFCLALGLLQAIKLYLRRQRLLR

SEQ ID NO: 22320 - protein, 30 aa, Artificial Sequence
  Quasi-synthetic sequence derived from human genome
FKKFDHRYLRKILIRKNLPKSSIVSLYKKL

SEQ ID NO: 22321 - protein, 30 aa, Artificial Sequence
  Quasi-synthetic sequence derived from human genome
LRILRKRNKALRKIRKLQKQGLLQVTPKGF

SEQ ID NO: 22322 - protein, 30 aa, Artificial Sequence
  Quasi-synthetic sequence derived from human genome
FVPAVAKSIPRKRISLKRPKKCFRNLFHIR

SEQ ID NO: 22323 - protein, 30 aa, Artificial Sequence
  Quasi-synthetic sequence derived from human genome
RKPQPCRCRRRVRPSIRLLSPVLSLILLLI

SEQ ID NO: 22324 - protein, 30 aa, Artificial Sequence
  Quasi-synthetic sequence derived from human genome
LKTFVFFIWRRYWRTLVLLLLVLLTVFLLL

SEQ ID NO: 22325 - protein, 30 aa, Artificial Sequence
  Quasi-synthetic sequence derived from human genome
RPKGFTRFRSAVRVSIAISRMKFLVRRWHR

SEQ ID NO: 22326 - protein, 30 aa, Artificial Sequence
  Quasi-synthetic sequence derived from human genome
WALFFRRPKASLPRVFVLRALLMVLVFLLV

SEQ ID NO: 22327 - protein, 30 aa, Artificial Sequence
  Quasi-synthetic sequence derived from human genome
IKRLRKKFAQKMLRKARRKLIYEKAKHYHK

SEQ ID NO: 22328 - protein, 30 aa, Artificial Sequence
  Quasi-synthetic sequence derived from human genome
KTLLRCRNEKKRHRAVRLIFTIMIVYFLFW

SEQ ID NO: 22329 - protein, 30 aa, Artificial Sequence
  Quasi-synthetic sequence derived from human genome
FRLFKFCTCLATVFSFLKRLICRSGRGRKL

SEQ ID NO: 22330 - protein, 30 aa, Artificial Sequence
  Quasi-synthetic sequence derived from human genome
QRIFGKLVFLPLRLVWKEVILRKILILVLV

SEQ ID NO: 22331 - protein, 30 aa, Artificial Sequence
  Quasi-synthetic sequence derived from human genome
WLVWLRFHKKKWQLQARQRLARRKRQRLES

SEQ ID NO: 22332 - protein, 30 aa, Artificial Sequence
  Quasi-synthetic sequence derived from human genome
VKMYGYFAGLCRRLQKFWRVTVKGFFVKKK

SEQ ID NO: 22333 - protein, 30 aa, Artificial Sequence
  Quasi-synthetic sequence derived from human genome
THLVRLLRLIILIRIFHLLHQKRQLEKLMR

SEQ ID NO: 22334 - protein, 30 aa, Artificial Sequence
  Quasi-synthetic sequence derived from human genome
IAIFQRQKRRKFWKAKNLQHIPLKKGKRVV

SEQ ID NO: 22335 - protein, 30 aa, Artificial Sequence
  Quasi-synthetic sequence derived from human genome
PFNVIPSPKSLWYLIKWIWTHLCKKKMRRK

SEQ ID NO: 22336 - protein, 30 aa, Artificial Sequence
  Quasi-synthetic sequence derived from human genome
RLLRRTLIRYANLASVLVLRSVSTRVLKRF

SEQ ID NO: 22337 - protein, 30 aa, Artificial Sequence
  Quasi-synthetic sequence derived from human genome
LRGLKRKWIRCSAQATVLHLKKFIAKKLNL

SEQ ID NO: 22338 - protein, 30 aa, Artificial Sequence
  Quasi-synthetic sequence derived from human genome
LGRRFRSLKMWFVFRMYGVKGLQAYIRKHV

SEQ ID NO: 22339 - protein, 30 aa, Artificial Sequence
  Quasi-synthetic sequence derived from human genome
LLRKRRFQLYRSTNPRARKNRSRIPLLRKR

SEQ ID NO: 22340 - protein, 30 aa, Artificial Sequence
  Quasi-synthetic sequence derived from human genome
RRLRKNLKSLIIVHPSWFIRTLLAVTRPFI

SEQ ID NO: 22341 - protein, 30 aa, Artificial Sequence
  Quasi-synthetic sequence derived from human genome
KLAFVIRIRGINGVSPKVRKVLQLLRLRQI

SEQ ID NO: 22342 - protein, 30 aa, Artificial Sequence
  Quasi-synthetic sequence derived from human genome
WLLLRKAPGGFMGPRWRRRWFVLKGHTLYW

SEQ ID NO: 22343 - protein, 30 aa, Artificial Sequence
  Quasi-synthetic sequence derived from human genome
YFRLKKVVKWYLSGFYKKPKGLKKPYNPIL

SEQ ID NO: 22344 - protein, 30 aa, Artificial Sequence
  Quasi-synthetic sequence derived from human genome
KRIRYRFRRFIQQFSQCKATARNLKLKYLI

SEQ ID NO: 22345 - protein, 30 aa, Artificial Sequence
  Quasi-synthetic sequence derived from human genome
YFRRKEKMFRFFIRRMVKAQSFYWVVLCVV

SEQ ID NO: 22346 - protein, 30 aa, Artificial Sequence
  Quasi-synthetic sequence derived from human genome
VVLLLLLLLLLFLILRHRRQGKHWTSTQRK

SEQ ID NO: 22347 - protein, 30 aa, Artificial Sequence
  Quasi-synthetic sequence derived from human genome
FILFCLRLMHIFTISKTLGPKIIIVKRMMK

SEQ ID NO: 22348 - protein, 30 aa, Artificial Sequence
  Quasi-synthetic sequence derived from human genome
FLLLILLCMSLLLFQVIRLYQRRRWTIRAM

SEQ ID NO: 22349 - protein, 30 aa, Artificial Sequence
  Quasi-synthetic sequence derived from human genome
LLKKKYPLAKYLCVLLIVAGVALFMYKPKK

SEQ ID NO: 22350 - protein, 30 aa, Artificial Sequence
  Quasi-synthetic sequence derived from human genome
RLKIRKCMGRLHLRCPVFMSFLPLPNRLKA

SEQ ID NO: 22351 - protein, 30 aa, Artificial Sequence
  Quasi-synthetic sequence derived from human genome
LLQAFGYRLRRVIAAFYFPKREKKRILFLY

SEQ ID NO: 22352 - protein, 30 aa, Artificial Sequence
  Quasi-synthetic sequence derived from human genome
GMAFILLVLLCLLLYYCRRKCLKPRQHHRK

SEQ ID NO: 22353 - protein, 30 aa, Artificial Sequence
  Quasi-synthetic sequence derived from human genome
KRILFLYNDLLKKRAAFTKLRRAAILRRER

SEQ ID NO: 22354 - protein, 30 aa, Artificial Sequence
  Quasi-synthetic sequence derived from human genome
RRLRRANRVLRARCRRAVKSNACYWAVLLL

SEQ ID NO: 22355 - protein, 30 aa, Artificial Sequence
  Quasi-synthetic sequence derived from human genome
REGSRALSRRYLRRLLLLLLLLLLRQPVTR

SEQ ID NO: 22356 - protein, 30 aa, Artificial Sequence
  Quasi-synthetic sequence derived from human genome
LCVVLYVASSLFLMVMYFFFRVRSRRWKVK

SEQ ID NO: 22357 - protein, 30 aa, Artificial Sequence
  Quasi-synthetic sequence derived from human genome
RRLRKNLKSFIIVHPSWFIRTILAVTRPFI

SEQ ID NO: 22358 - protein, 30 aa, Artificial Sequence
  Quasi-synthetic sequence derived from human genome
MRKNMRVLSRTSKFRRLRQLLRRRKKRQQV

SEQ ID NO: 22359 - protein, 30 aa, Artificial Sequence
  Quasi-synthetic sequence derived from human genome
LRGFLARNRYRKILREHKAVIIQKRVRGWL

SEQ ID NO: 22360 - protein, 30 aa, Artificial Sequence
  Quasi-synthetic sequence derived from human genome
FRNLRLPKRLRVVYFLARTRLAQRLIMAGT

SEQ ID NO: 22361 - protein, 30 aa, Artificial Sequence
  Quasi-synthetic sequence derived from human genome
RRLRKNLKSLIIVHPSWFIRTVLAISRPFI

SEQ ID NO: 22362 - protein, 30 aa, Artificial Sequence
  Quasi-synthetic sequence derived from human genome
KVPRKKVNVKVFIIIAVFFICFVPFHFARI

SEQ ID NO: 22363 - protein, 30 aa, Artificial Sequence
  Quasi-synthetic sequence derived from human genome
RKAPLWLRAKFQRLLFKLGCYIQKNCGKFL

SEQ ID NO: 22364 - protein, 30 aa, Artificial Sequence
  Quasi-synthetic sequence derived from human genome
ILGFCGLTALYFLIRAFRLKKPQRRRYGLL

SEQ ID NO: 22365 - protein, 30 aa, Artificial Sequence
  Quasi-synthetic sequence derived from human genome
KKKTFKGLIRIFRKGVIAVLAANRLKILGQ

SEQ ID NO: 22366 - protein, 30 aa, Artificial Sequence
  Quasi-synthetic sequence derived from human genome
LAKLKLFRHYYVLIVCYIYFTRIIAFLLKL

SEQ ID NO: 22367 - protein, 30 aa, Artificial Sequence
  Quasi-synthetic sequence derived from human genome
FRLARRRKKILFYCHFPDLLLTKRDSFLKR

SEQ ID NO: 22368 - protein, 30 aa, Artificial Sequence
  Quasi-synthetic sequence derived from human genome
RKKLKDFSGGWRMRVALARALFIRPFMLLL

SEQ ID NO: 22369 - protein, 30 aa, Artificial Sequence
  Quasi-synthetic sequence derived from human genome
ARLYCLKIHGLSSLWRLFRGKKWNVLRQRV

SEQ ID NO: 22370 - protein, 30 aa, Artificial Sequence
  Quasi-synthetic sequence derived from human genome
LVSLLQKPRHRCRKRKPLLAIGFYLYRMNK

SEQ ID NO: 22371 - protein, 30 aa, Artificial Sequence
  Quasi-synthetic sequence derived from human genome
RRMRILRRLLRRYRESKKIDRHMYHSLYLK

SEQ ID NO: 22372 - protein, 30 aa, Artificial Sequence
  Quasi-synthetic sequence derived from human genome
LIYKDRLRINRFAWPKILKISYKRSNFYIK

SEQ ID NO: 22373 - protein, 30 aa, Artificial Sequence
  Quasi-synthetic sequence derived from human genome
VKGLMKKFIRCSTRVTVGTIKKFLSLKLKL

SEQ ID NO: 22374 - protein, 30 aa, Artificial Sequence
  Quasi-synthetic sequence derived from human genome
KVFIKYTKLKKIFLQHNCIRHISRKAFFGL

SEQ ID NO: 22375 - protein, 30 aa, Artificial Sequence
  Quasi-synthetic sequence derived from human genome
RGSIFKAIAHFKRTTFLKKHRMLGRLKYKV

SEQ ID NO: 22376 - protein, 30 aa, Artificial Sequence
  Quasi-synthetic sequence derived from human genome
LLQRIAMLWGSGKCKALTKFKFVFFLRLSR

SEQ ID NO: 22377 - protein, 30 aa, Artificial Sequence
  Quasi-synthetic sequence derived from human genome
FVALLWKRLLIARRSRKGFFAQIVLPAVFV

SEQ ID NO: 22378 - protein, 30 aa, Artificial Sequence
  Quasi-synthetic sequence derived from human genome
KRMRVKKLPMILALHLKRFKYMEQLHRYTK

SEQ ID NO: 22379 - protein, 30 aa, Artificial Sequence
  Quasi-synthetic sequence derived from human genome
PLKSARYFLWHTYRWLLLKLLLLLLLLLLL

SEQ ID NO: 22380 - protein, 30 aa, Artificial Sequence
  Quasi-synthetic sequence derived from human genome
IFHFLYGKNRSRIPLLRKRRFQLYRSMNPR

SEQ ID NO: 22381 - protein, 30 aa, Artificial Sequence
  Quasi-synthetic sequence derived from human genome
LVVFKSAPILKRALKVKQAMMQLYVLKLLK

SEQ ID NO: 22382 - protein, 30 aa, Artificial Sequence
  Quasi-synthetic sequence derived from human genome
VALAVAVLKTVILGLLCLLLLWWRRRKGSR

SEQ ID NO: 22383 - protein, 30 aa, Artificial Sequence
  Quasi-synthetic sequence derived from human genome
QFKFLQRLLLVHGRWSYLRMCKFLCYFFYK

SEQ ID NO: 22384 - protein, 30 aa, Artificial Sequence
  Quasi-synthetic sequence derived from human genome
RLKKHRWYKKILKSRDPIIFSVGWRRFQTI

SEQ ID NO: 22385 - protein, 30 aa, Artificial Sequence
  Quasi-synthetic sequence derived from human genome
LLVPCVVILAKALFLLPCISRRLARIRRGW

SEQ ID NO: 22386 - protein, 30 aa, Artificial Sequence
  Quasi-synthetic sequence derived from human genome
KKAIKYQSKARRKKWIIIAVSVVLVAIIAL

SEQ ID NO: 22387 - protein, 30 aa, Artificial Sequence
  Quasi-synthetic sequence derived from human genome
INWFICSLCVPRVRKLWSSRRPRTRRNLLL

SEQ ID NO: 22388 - protein, 30 aa, Artificial Sequence
  Quasi-synthetic sequence derived from human genome
RFQLRRCMNPRARKNRSQIVLFQKRRFHFF

SEQ ID NO: 22389 - protein, 30 aa, Artificial Sequence
  Quasi-synthetic sequence derived from human genome
LLSVLAMFFLLVLILSSVFLFRLFKRRQGR

SEQ ID NO: 22390 - protein, 30 aa, Artificial Sequence
  Quasi-synthetic sequence derived from human genome
LKLFFIKNQRSSLRIRLFNFSLKLLTCLLY

SEQ ID NO: 22391 - protein, 30 aa, Artificial Sequence
  Quasi-synthetic sequence derived from human genome
LFLKIPSDKIRISKIRGKSLRRKRSMGFII

SEQ ID NO: 22392 - protein, 30 aa, Artificial Sequence
  Quasi-synthetic sequence derived from human genome
FKIQSKLLKHKQIHTRNKAFRALLLKKRRT

SEQ ID NO: 22393 - protein, 30 aa, Artificial Sequence
  Quasi-synthetic sequence derived from human genome
YRKYICTSFYPWVNILKISFKRKKFFIHQR

SEQ ID NO: 22394 - protein, 30 aa, Artificial Sequence
  Quasi-synthetic sequence derived from human genome
LWRQQVCAIAKVRFLKLKKERKSLWTILLL

SEQ ID NO: 22395 - protein, 30 aa, Artificial Sequence
  Quasi-synthetic sequence derived from human genome
IRIMRVLRIARVLKLLKMAVGMRALLDTLW

SEQ ID NO: 22396 - protein, 30 aa, Artificial Sequence
  Quasi-synthetic sequence derived from human genome
VLRFLRLFGPGKNVPSVWRSARRKRKKKHR

SEQ ID NO: 22397 - protein, 30 aa, Artificial Sequence
  Quasi-synthetic sequence derived from human genome
LLKKINFHKITLRLWNTKDKMSRKVRYYRL

SEQ ID NO: 22398 - protein, 30 aa, Artificial Sequence
  Quasi-synthetic sequence derived from human genome
LQMVLQRRKFLQMKRRKYGFIYKTHLFGRP

SEQ ID NO: 22399 - protein, 30 aa, Artificial Sequence
  Quasi-synthetic sequence derived from human genome
LKRSIKLLSLIKWKGSKSSKLNSKFWKHLV

SEQ ID NO: 22400 - protein, 30 aa, Artificial Sequence
  Quasi-synthetic sequence derived from human genome
AGISAGILVFILLLLVVILIVKKSKLAKKR

SEQ ID NO: 22401 - protein, 30 aa, Artificial Sequence
  Quasi-synthetic sequence derived from human genome
RKRYRRKLKKYGKNVGKVIIKGCRYVVIGL

SEQ ID NO: 22402 - protein, 30 aa, Artificial Sequence
  Quasi-synthetic sequence derived from human genome
RGRRLGLALGLLLALVLAPRVLRAKPTVRK

SEQ ID NO: 22403 - protein, 30 aa, Artificial Sequence
  Quasi-synthetic sequence derived from human genome
ALQLYVRRRKKLPSVLLFKKPSPFIFISQR

SEQ ID NO: 22404 - protein, 30 aa, Artificial Sequence
  Quasi-synthetic sequence derived from human genome
RIPLLRKRRFQLYRSTNPRARKNRSRIPLL

SEQ ID NO: 22405 - protein, 30 aa, Artificial Sequence
  Quasi-synthetic sequence derived from human genome
MPRLPVKKIRKQMKLLLLLLLLSCAAWLTY

SEQ ID NO: 22406 - protein, 30 aa, Artificial Sequence
  Quasi-synthetic sequence derived from human genome
LRGRGAPLGPWLRALGPWLRVRRGLLVLRL

SEQ ID NO: 22407 - protein, 30 aa, Artificial Sequence
  Quasi-synthetic sequence derived from human genome
LLAILLVVAVFCILWNWNKRKKRQVPYLRV

SEQ ID NO: 22408 - protein, 30 aa, Artificial Sequence
  Quasi-synthetic sequence derived from human genome
KKFLYIKSVFHTLRMAQRRHKRVRTWTRHI

SEQ ID NO: 22409 - protein, 30 aa, Artificial Sequence
  Quasi-synthetic sequence derived from human genome
KKKSMIGMSTKLWKVKKALKMTIFWRGLMP

SEQ ID NO: 22410 - protein, 30 aa, Artificial Sequence
  Quasi-synthetic sequence derived from human genome
FLLKHVRRNKLGYVSVKLLTSFKKVKHLTR

SEQ ID NO: 22411 - protein, 30 aa, Artificial Sequence
  Quasi-synthetic sequence derived from human genome
RGAAKKAGLLMALARLCFLLGRLCSRRLKL

SEQ ID NO: 22412 - protein, 30 aa, Artificial Sequence
  Quasi-synthetic sequence derived from human genome
TTRLKSMLRLLLVKKPSVRSLALKLLAFHL

SEQ ID NO: 22413 - protein, 30 aa, Artificial Sequence
  Quasi-synthetic sequence derived from human genome
MFLTALLWRGRIPGRQWIGKHRRPRFVSLR

SEQ ID NO: 22414 - protein, 30 aa, Artificial Sequence
  Quasi-synthetic sequence derived from human genome
KYIVSTLQRWRLNVLRLNFRGCLLRPKTFR

SEQ ID NO: 22415 - protein, 30 aa, Artificial Sequence
  Quasi-synthetic sequence derived from human genome
WRKWKQLSRLQRNMILFLLAFLLFCGLLFY

SEQ ID NO: 22416 - protein, 30 aa, Artificial Sequence
  Quasi-synthetic sequence derived from human genome
SYILFRATRKPLSGRTPRLVYKWFLLIYKL

SEQ ID NO: 22417 - protein, 30 aa, Artificial Sequence
  Quasi-synthetic sequence derived from human genome
LQALLLKRFLLARRSRRGLFAQIVLPALFV

SEQ ID NO: 22418 - protein, 30 aa, Artificial Sequence
  Quasi-synthetic sequence derived from human genome
IWLLVLLLHKHRSILLRRLCSLMGTVFLLR

SEQ ID NO: 22419 - protein, 30 aa, Artificial Sequence
  Quasi-synthetic sequence derived from human genome
KRMKVKKLPMILALHLKRFKYMDQLHRYTK

SEQ ID NO: 22420 - protein, 30 aa, Artificial Sequence
  Quasi-synthetic sequence derived from human genome
ACVATVIFIITKFCLFCFWKFARKGKKGKR

SEQ ID NO: 22421 - protein, 30 aa, Artificial Sequence
  Quasi-synthetic sequence derived from human genome
KGKDINTIKSLRVLRVLRPLKTIKRLPKLK

SEQ ID NO: 22422 - protein, 30 aa, Artificial Sequence
  Quasi-synthetic sequence derived from human genome
IPSRFKRSYNYKTIVKKILAKLKRARSKKL

SEQ ID NO: 22423 - protein, 30 aa, Artificial Sequence
  Quasi-synthetic sequence derived from human genome
RRPRGSTARTLLRLLLRLLLFLGLLALALH

SEQ ID NO: 22424 - protein, 30 aa, Artificial Sequence
  Quasi-synthetic sequence derived from human genome
LMQLYSARQRRRLNRGLRRKQHSLLKRLRK

SEQ ID NO: 22425 - protein, 30 aa, Artificial Sequence
  Quasi-synthetic sequence derived from human genome
AFFRLFRVMRLIKLLSRAEGVRTLLWTFIK

SEQ ID NO: 22426 - protein, 30 aa, Artificial Sequence
  Quasi-synthetic sequence derived from human genome
RSAFLGRYLKKKKSVVSRLKKAKRTAKVLL

SEQ ID NO: 22427 - protein, 30 aa, Artificial Sequence
  Quasi-synthetic sequence derived from human genome
MIRFRYRILRSQHFRTKSKVCKLRKAQRSW

SEQ ID NO: 22428 - protein, 30 aa, Artificial Sequence
  Quasi-synthetic sequence derived from human genome
KTLLRCRNEKKRHRAVRVIFTIMIVYFLFW

SEQ ID NO: 22429 - protein, 30 aa, Artificial Sequence
  Quasi-synthetic sequence derived from human genome
RVRVLSVARPGLWLYTHPLIKLLFLPRRSR

SEQ ID NO: 22430 - protein, 30 aa, Artificial Sequence
  Quasi-synthetic sequence derived from human genome
KQLRRQMWWRGCKIKAIMALVAAILLLVII

SEQ ID NO: 22431 - protein, 30 aa, Artificial Sequence
  Quasi-synthetic sequence derived from human genome
KRRPKRREIPLKVLVKAVLFACMLMRKTMA

SEQ ID NO: 22432 - protein, 30 aa, Artificial Sequence
  Quasi-synthetic sequence derived from human genome
ILFCSFKIVWSLRRRQQLARQARMKKATRF

SEQ ID NO: 22433 - protein, 30 aa, Artificial Sequence
  Quasi-synthetic sequence derived from human genome
RFLLLFIGFVCVLLSFFMARVFMRMKLPRS

SEQ ID NO: 22434 - protein, 30 aa, Artificial Sequence
  Quasi-synthetic sequence derived from human genome
ILCTRSIVLALRLRKRFLNFFLEKYKRPVC

SEQ ID NO: 22435 - protein, 30 aa, Artificial Sequence
  Quasi-synthetic sequence derived from human genome
RFKHLKKLLLVHGHWCYSRLARMVVYYLYK

SEQ ID NO: 22436 - protein, 30 aa, Artificial Sequence
  Quasi-synthetic sequence derived from human genome
RTIARLRLKKIFSGVFVKVTPQNLKMLRIV

SEQ ID NO: 22437 - protein, 30 aa, Artificial Sequence
  Quasi-synthetic sequence derived from human genome
ISVLRALRLLRIFKVTKYWASLRNLVVSLL

SEQ ID NO: 22438 - protein, 30 aa, Artificial Sequence
  Quasi-synthetic sequence derived from human genome
MKRMVSWSFHKLKTMKHLLLLLLCVFLVKS

SEQ ID NO: 22439 - protein, 30 aa, Artificial Sequence
  Quasi-synthetic sequence derived from human genome
LRYYYNKRILHKTKGKRFTYKFNFNKLVLV

SEQ ID NO: 22440 - protein, 30 aa, Artificial Sequence
  Quasi-synthetic sequence derived from human genome
IRRMFRVRNCLRGLGLFLLVFSFFFLLTWA

SEQ ID NO: 22441 - protein, 30 aa, Artificial Sequence
  Quasi-synthetic sequence derived from human genome
RKALTWKYYAKKILYYLRQQKILNNLKAFL

SEQ ID NO: 22442 - protein, 30 aa, Artificial Sequence
  Quasi-synthetic sequence derived from human genome
RIPLLRKRRFQLYRSMNSRARKNRSQIVLF

SEQ ID NO: 22443 - protein, 30 aa, Artificial Sequence
  Quasi-synthetic sequence derived from human genome
VCRGYLVKMGGKIKSWKKRWFVFDRLKRTL

SEQ ID NO: 22444 - protein, 30 aa, Artificial Sequence
  Quasi-synthetic sequence derived from human genome
LLQRWFRVLLCRQHFLHLRQASVIIQRFWR

SEQ ID NO: 22445 - protein, 30 aa, Artificial Sequence
  Quasi-synthetic sequence derived from human genome
FYLLKIANFSNLLFLHLKRRVRSVILVILL

SEQ ID NO: 22446 - protein, 30 aa, Artificial Sequence
  Quasi-synthetic sequence derived from human genome
VFGEKFKLFTLVSACIPVFRLARRRKKILF

SEQ ID NO: 22447 - protein, 30 aa, Artificial Sequence
  Quasi-synthetic sequence derived from human genome
KRKYWWKNCKMWAIGITVLVIFIIIIIVWV

SEQ ID NO: 22448 - protein, 30 aa, Artificial Sequence
  Quasi-synthetic sequence derived from human genome
RVAKMGLILAIRSILLVIPFPFTLRRLKYC

SEQ ID NO: 22449 - protein, 30 aa, Artificial Sequence
  Quasi-synthetic sequence derived from human genome
NPIIYSIKTKQIRQRIIKKFQFIKSLRCFW

SEQ ID NO: 22450 - protein, 30 aa, Artificial Sequence
  Quasi-synthetic sequence derived from human genome
MTTWSLRRRPARTLGLLLLVVLGFLVLRRL

SEQ ID NO: 22451 - protein, 30 aa, Artificial Sequence
  Quasi-synthetic sequence derived from human genome
ISVLRALRLLRIFKITKYWASLRNLVVSLM

SEQ ID NO: 22452 - protein, 30 aa, Artificial Sequence
  Quasi-synthetic sequence derived from human genome
WRFLRIVCKTARRDLFGLSVLIRVRLELRR

SEQ ID NO: 22453 - protein, 30 aa, Artificial Sequence
  Quasi-synthetic sequence derived from human genome
KGLKLLCRDKIRLNNAIWRAWYIQYVKRRK

SEQ ID NO: 22454 - protein, 30 aa, Artificial Sequence
  Quasi-synthetic sequence derived from human genome
RKQKTINRFLMRKRLLFPALVTLLISTLTF

SEQ ID NO: 22455 - protein, 30 aa, Artificial Sequence
  Quasi-synthetic sequence derived from human genome
KRKHFRLVLRLVLRGGRELGTFHSRLIKVI

SEQ ID NO: 22456 - protein, 30 aa, Artificial Sequence
  Quasi-synthetic sequence derived from human genome
MKLHNLISKLKKWIKILEAKTKQLPKFFLI

SEQ ID NO: 22457 - protein, 30 aa, Artificial Sequence
  Quasi-synthetic sequence derived from human genome
RKRWFQLGHSMNPRARKNRSRIPLLRKRRF

SEQ ID NO: 22458 - protein, 30 aa, Artificial Sequence
  Quasi-synthetic sequence derived from human genome
KFKLLSSLPHWRRIAQKIIREPRKKRVPKK

SEQ ID NO: 22459 - protein, 30 aa, Artificial Sequence
  Quasi-synthetic sequence derived from human genome
MLLRGGRRLFLSGAPRFRHRGKVIAFQLKK

SEQ ID NO: 22460 - protein, 30 aa, Artificial Sequence
  Quasi-synthetic sequence derived from human genome
KRKQLLKPVFLNSWIDLRATYKLFYRRKPK

SEQ ID NO: 22461 - protein, 30 aa, Artificial Sequence
  Quasi-synthetic sequence derived from human genome
KQLLLWRLPNVLIVQLKRFSFRSFIWRDKI

SEQ ID NO: 22462 - protein, 30 aa, Artificial Sequence
  Quasi-synthetic sequence derived from human genome
FVWFLNPLKSIKYLICTRYKWLIIKIVLAL

SEQ ID NO: 22463 - protein, 30 aa, Artificial Sequence
  Quasi-synthetic sequence derived from human genome
PWMRIFIQAKRVKTKHLCYCLYRPRKYLYV

SEQ ID NO: 22464 - protein, 30 aa, Artificial Sequence
  Quasi-synthetic sequence derived from human genome
LASQKVKKIWQKQFRWPKNRLQILKFCKAR

SEQ ID NO: 22465 - protein, 30 aa, Artificial Sequence
  Quasi-synthetic sequence derived from human genome
RLTWRVVSPLLLTIFVAYIILLFWKPLRYK

SEQ ID NO: 22466 - protein, 30 aa, Artificial Sequence
  Quasi-synthetic sequence derived from human genome
FFRQLNLYGFRKRRQCTFRTFTRIFSAKRL

SEQ ID NO: 22467 - protein, 30 aa, Artificial Sequence
  Quasi-synthetic sequence derived from human genome
RGGATRAAGVFYPWRFRLLCLLRRWLPRPR

SEQ ID NO: 22468 - protein, 30 aa, Artificial Sequence
  Quasi-synthetic sequence derived from human genome
LVMAYGSLVFVLLFIFVKRQIMRFAMKSRR

SEQ ID NO: 22469 - protein, 30 aa, Artificial Sequence
  Quasi-synthetic sequence derived from human genome
VRFKRSKKIMPAGLVAGLSLMMILRLVLLL

SEQ ID NO: 22470 - protein, 30 aa, Artificial Sequence
  Quasi-synthetic sequence derived from human genome
HAAAKRWLGRWRRKRRWRRVRKAGPRDLLP

SEQ ID NO: 22471 - protein, 30 aa, Artificial Sequence
  Quasi-synthetic sequence derived from human genome
FKKFAARKKWKQSVRLISLCQRLSRSFLSR

SEQ ID NO: 22472 - protein, 30 aa, Artificial Sequence
  Quasi-synthetic sequence derived from human genome
LVGVLILFMFRRLRQFRQAQPTPQYRFRKR

SEQ ID NO: 22473 - protein, 30 aa, Artificial Sequence
  Quasi-synthetic sequence derived from human genome
IILVALLMLVFRSKREVKRQKYRLSQLYKW

SEQ ID NO: 22474 - protein, 30 aa, Artificial Sequence
  Quasi-synthetic sequence derived from human genome
TLRFLKLRRERRALLCLLLVLGIAFIPIIL

SEQ ID NO: 22475 - protein, 30 aa, Artificial Sequence
  Quasi-synthetic sequence derived from human genome
MFAKTWRVHAIFKNVKMKKKIIKDQKLLVI

SEQ ID NO: 22476 - protein, 30 aa, Artificial Sequence
  Quasi-synthetic sequence derived from human genome
LRYYYNKRILHKTKGKRFTYKFNFSKLIVV

SEQ ID NO: 22477 - protein, 30 aa, Artificial Sequence
  Quasi-synthetic sequence derived from human genome
EIQRALRAPRKKIHRRVLKKNPLKNLRIML

SEQ ID NO: 22478 - protein, 30 aa, Artificial Sequence
  Quasi-synthetic sequence derived from human genome
LRRWKHWLLLLGICCPKPHGRVSSRLRLSR

SEQ ID NO: 22479 - protein, 30 aa, Artificial Sequence
  Quasi-synthetic sequence derived from human genome
KYFMKLVNLYKGAVLYLLRGRKTFLIPVLF

SEQ ID NO: 22480 - protein, 30 aa, Artificial Sequence
  Quasi-synthetic sequence derived from human genome
RKLKFSPIKYGYQPRRNFWPARLATRLLKL

SEQ ID NO: 22481 - protein, 30 aa, Artificial Sequence
  Quasi-synthetic sequence derived from human genome
RTLHQRFLAQLRKYFNMRVFRQRTYRIWAF

SEQ ID NO: 22482 - protein, 30 aa, Artificial Sequence
  Quasi-synthetic sequence derived from human genome
IRGWLLRKKYLRMRKAAITMQRYVRGYQAR

SEQ ID NO: 22483 - protein, 30 aa, Artificial Sequence
  Quasi-synthetic sequence derived from human genome
RKVKLLNQVRLLRVQLCHMKNMFKTCRLAK

SEQ ID NO: 22484 - protein, 30 aa, Artificial Sequence
  Quasi-synthetic sequence derived from human genome
RQLWKWFGKPTQRRGMKGKARKLFYKAIVR

SEQ ID NO: 22485 - protein, 30 aa, Artificial Sequence
  Quasi-synthetic sequence derived from human genome
LMVLIPLILLVLLLLSVVFLATYYKRKRTK

SEQ ID NO: 22486 - protein, 30 aa, Artificial Sequence
  Quasi-synthetic sequence derived from human genome
ILSILLFMLVIVWQSVFNKRKSRVRHYLVK

SEQ ID NO: 22487 - protein, 30 aa, Artificial Sequence
  Quasi-synthetic sequence derived from human genome
LWWFWLLWTVLILFSCCCAFRHRRAKLRLQ

SEQ ID NO: 22488 - protein, 30 aa, Artificial Sequence
  Quasi-synthetic sequence derived from human genome
KFRHCSLLRNRRCTVAYLYDRLLRIRALRW

SEQ ID NO: 22489 - protein, 30 aa, Artificial Sequence
  Quasi-synthetic sequence derived from human genome
RGVLVRRTLLVAALRAWMIQCWWRTLVQRR

SEQ ID NO: 22490 - protein, 30 aa, Artificial Sequence
  Quasi-synthetic sequence derived from human genome
RRRMPGIGWLKKCYQMIDRRLRKNLKSLII

SEQ ID NO: 22491 - protein, 30 aa, Artificial Sequence
  Quasi-synthetic sequence derived from human genome
YRWLVRILGTIFRFCDRSVPPARALLKRRR

SEQ ID NO: 22492 - protein, 30 aa, Artificial Sequence
  Quasi-synthetic sequence derived from human genome
RKRRFQLCRCMNPRARKNRSQIVLFQKLRF

SEQ ID NO: 22493 - protein, 30 aa, Artificial Sequence
  Quasi-synthetic sequence derived from human genome
LVVIFMMLGGTFLYWRGRRIQNKRAMRRYL

SEQ ID NO: 22494 - protein, 30 aa, Artificial Sequence
  Quasi-synthetic sequence derived from human genome
ICLRPPRPGLRRQWKCVQRRCLRHLAHRLR

SEQ ID NO: 22495 - protein, 30 aa, Artificial Sequence
  Quasi-synthetic sequence derived from human genome
FYFLKIANFSNSIFLYLKWRVKKVVLVLLL

SEQ ID NO: 22496 - protein, 30 aa, Artificial Sequence
  Quasi-synthetic sequence derived from human genome
LRRHRLTRKLVVLITPQVSSLLRVILSKVF

SEQ ID NO: 22497 - protein, 30 aa, Artificial Sequence
  Quasi-synthetic sequence derived from human genome
MAKTSAGLKLILKRYKIGASRKTFWKRKKI

SEQ ID NO: 22498 - protein, 30 aa, Artificial Sequence
  Quasi-synthetic sequence derived from human genome
ILVAILAGILMLALLVFILWKCGFFKRNKK

SEQ ID NO: 22499 - protein, 30 aa, Artificial Sequence
  Quasi-synthetic sequence derived from human genome
ALFILGALYSIKVMNRRRRNGFKRHKRKQR

SEQ ID NO: 22500 - protein, 30 aa, Artificial Sequence
  Quasi-synthetic sequence derived from human genome
FKHTLQQKVFILFLTLWLLSLLKLLNVRRL

SEQ ID NO: 22501 - protein, 30 aa, Artificial Sequence
  Quasi-synthetic sequence derived from human genome
LRPLVKPKIVKKRTKKFIRHQSDRYVKIKR

SEQ ID NO: 22502 - protein, 30 aa, Artificial Sequence
  Quasi-synthetic sequence derived from human genome
LFAFFIFIMSLLLISGQRPVNLTMRRKLRK

SEQ ID NO: 22503 - protein, 30 aa, Artificial Sequence
  Quasi-synthetic sequence derived from human genome
RIIQTLFSCKNHKKAKAIKLILLVVIVFFL

SEQ ID NO: 22504 - protein, 30 aa, Artificial Sequence
  Quasi-synthetic sequence derived from human genome
WRRYRAKKYLCKVKAACKIQAWYRCWRAHK

SEQ ID NO: 22505 - protein, 30 aa, Artificial Sequence
  Quasi-synthetic sequence derived from human genome
WRKRCLYLFVLLLLIILVVNLALTIWILKV

SEQ ID NO: 22506 - protein, 30 aa, Artificial Sequence
  Quasi-synthetic sequence derived from human genome
VKFYIHAIGIGKCKRRIVKCGKLHKKGRKL

SEQ ID NO: 22507 - protein, 30 aa, Artificial Sequence
  Quasi-synthetic sequence derived from human genome
PPIRRRSKFANLGRIFKPWKWRKKKSEKFK

SEQ ID NO: 22508 - protein, 30 aa, Artificial Sequence
  Quasi-synthetic sequence derived from human genome
FIRQKRRGAFNSKQLLYLEKYRPKMRLRFR

SEQ ID NO: 22509 - protein, 30 aa, Artificial Sequence
  Quasi-synthetic sequence derived from human genome
KITKRNNGQLMKTIIRKINKMKTLKRKKLL

SEQ ID NO: 22510 - protein, 30 aa, Artificial Sequence
  Quasi-synthetic sequence derived from human genome
RLGKLLLHLFMVLCLTLFLNNIIKKILNLK

SEQ ID NO: 22511 - protein, 30 aa, Artificial Sequence
  Quasi-synthetic sequence derived from human genome
WALNYRTGVRLRGAILTMAFKKILKLKNIK

SEQ ID NO: 22512 - protein, 30 aa, Artificial Sequence
  Quasi-synthetic sequence derived from human genome
QFRYLQRLLLVHGRWSYFRMCKFLCYFFYK

SEQ ID NO: 22513 - protein, 30 aa, Artificial Sequence
  Quasi-synthetic sequence derived from human genome
FFAPCLIMILVYLRIYLIAKRSNRRGPRAK

SEQ ID NO: 22514 - protein, 30 aa, Artificial Sequence
  Quasi-synthetic sequence derived from human genome
RYQQLGAGLKVLFKKTHRILRRLFNLCKRC

SEQ ID NO: 22515 - protein, 30 aa, Artificial Sequence
  Quasi-synthetic sequence derived from human genome
LVRNKLAVITRLLQNLIMGLFLLFFVLRVR

SEQ ID NO: 22516 - protein, 30 aa, Artificial Sequence
  Quasi-synthetic sequence derived from human genome
MKGRRRRRREYCKFALLLVLYTLVLLLVPS

SEQ ID NO: 22517 - protein, 30 aa, Artificial Sequence
  Quasi-synthetic sequence derived from human genome
IFLGCCFFSTLVLLLSIAIFQRQKRRKFWK

SEQ ID NO: 22518 - protein, 30 aa, Artificial Sequence
  Quasi-synthetic sequence derived from human genome
MLWKLLLRSQSCRLCSFRKMRSPPKYRPFL

SEQ ID NO: 22519 - protein, 30 aa, Artificial Sequence
  Quasi-synthetic sequence derived from human genome
LLIFISLFPEILLIVLKNVRRRSARVTKRL

SEQ ID NO: 22520 - protein, 30 aa, Artificial Sequence
  Quasi-synthetic sequence derived from human genome
RRLRGLRRAAAGTSRLLFQRLLPCGVIKFR

SEQ ID NO: 22521 - protein, 30 aa, Artificial Sequence
  Quasi-synthetic sequence derived from human genome
FKCLYYLIWKNYKKYIIIAFILIILIIFLV

SEQ ID NO: 22522 - protein, 30 aa, Artificial Sequence
  Quasi-synthetic sequence derived from human genome
RLLIYKQGRKLFPIKLKNKKGLVSLIDLLV

SEQ ID NO: 22523 - protein, 30 aa, Artificial Sequence
  Quasi-synthetic sequence derived from human genome
TILVVVLVLVIVGIGVLILLVRYRKCIKLK

SEQ ID NO: 22524 - protein, 30 aa, Artificial Sequence
  Quasi-synthetic sequence derived from human genome
VLLALAAWASRWLRRKLRARRKGGAPVHVR

SEQ ID NO: 22525 - protein, 30 aa, Artificial Sequence
  Quasi-synthetic sequence derived from human genome
VPFRRPSTFGIPRLEKILRNKAKIKFIIKK

SEQ ID NO: 22526 - protein, 30 aa, Artificial Sequence
  Quasi-synthetic sequence derived from human genome
PAWLRRRYLRLRYEDLVRQPRAQLRRLLRF

SEQ ID NO: 22527 - protein, 30 aa, Artificial Sequence
  Quasi-synthetic sequence derived from human genome
KHWWVRLLYRPYCKKNPQHLYSFIAKILWR

SEQ ID NO: 22528 - protein, 30 aa, Artificial Sequence
  Quasi-synthetic sequence derived from human genome
IKAGKAFLRLKRKFIQMRRPFLERRDLIIQ

SEQ ID NO: 22529 - protein, 30 aa, Artificial Sequence
  Quasi-synthetic sequence derived from human genome
FRLLLLCRWDKRRWRKIPKRPGSVHRTPSR

SEQ ID NO: 22530 - protein, 30 aa, Artificial Sequence
  Quasi-synthetic sequence derived from human genome
YFVPLGFILICYLKIVICLRRRNAKVDKKK

SEQ ID NO: 22531 - protein, 30 aa, Artificial Sequence
  Quasi-synthetic sequence derived from human genome
LNILIFQLNQEKPKVKKRKGKFKRSRLKLK

SEQ ID NO: 22532 - protein, 30 aa, Artificial Sequence
  Quasi-synthetic sequence derived from human genome
LNLAMVYRYCCKINKKLKSITMLRKKIVHF

SEQ ID NO: 22533 - protein, 30 aa, Artificial Sequence
  Quasi-synthetic sequence derived from human genome
RVPLRQLLRLQRVSRAFRSLVQLHLAGLRR

SEQ ID NO: 22534 - protein, 30 aa, Artificial Sequence
  Quasi-synthetic sequence derived from human genome
MKVLQRNCAAYLKLRNWQWWRLFTKVKPLL

SEQ ID NO: 22535 - protein, 30 aa, Artificial Sequence
  Quasi-synthetic sequence derived from human genome
FFCFLLGKCFKKGLKGKGFVLLVKLACIVV

SEQ ID NO: 22536 - protein, 30 aa, Artificial Sequence
  Quasi-synthetic sequence derived from human genome
VLILSLLLVFIMSVFVAAGLFVLVMKRRKK

SEQ ID NO: 22537 - protein, 30 aa, Artificial Sequence
  Quasi-synthetic sequence derived from human genome
ANFRHIFLATLACLCPVWRRRRKRPAFSRK

SEQ ID NO: 22538 - protein, 30 aa, Artificial Sequence
  Quasi-synthetic sequence derived from human genome
LTLLIPYLLGRKRRWSKCKIRVFVGGQINR

SEQ ID NO: 22539 - protein, 30 aa, Artificial Sequence
  Quasi-synthetic sequence derived from human genome
ISGYLSRCKRGKRHWKKLWFVIKGKVLYTY

SEQ ID NO: 22540 - protein, 30 aa, Artificial Sequence
  Quasi-synthetic sequence derived from human genome
MKAVINMYGRLIHRVRYRRGLWRTRQILNL

SEQ ID NO: 22541 - protein, 30 aa, Artificial Sequence
  Quasi-synthetic sequence derived from human genome
RKTFWFFFQRHKLKGTSFLLGGVVIVLLRW

SEQ ID NO: 22542 - protein, 30 aa, Artificial Sequence
  Quasi-synthetic sequence derived from human genome
FLRRIRPKLKWDNQKRYGGFLRRQFKVVTR

SEQ ID NO: 22543 - protein, 30 aa, Artificial Sequence
  Quasi-synthetic sequence derived from human genome
FEKKKDIRRGIGYLKLICFLIPFLLSLKKK

SEQ ID NO: 22544 - protein, 30 aa, Artificial Sequence
  Quasi-synthetic sequence derived from human genome
KFMVLLWKNFILKRRRCIALVVEMVLTFLF

SEQ ID NO: 22545 - protein, 30 aa, Artificial Sequence
  Quasi-synthetic sequence derived from human genome
RRVKVLLVLNLIAVAGFVLFLAKCRPIAVR

SEQ ID NO: 22546 - protein, 30 aa, Artificial Sequence
  Quasi-synthetic sequence derived from human genome
IFHFLYRKNRSRIPLLRKRWFQLGHSMNPR

SEQ ID NO: 22547 - protein, 30 aa, Artificial Sequence
  Quasi-synthetic sequence derived from human genome
KTRRWRGLGSLFRRACCVALPLQLLLLLFL

SEQ ID NO: 22548 - protein, 30 aa, Artificial Sequence
  Quasi-synthetic sequence derived from human genome
FLRWAGYRPGPVRRRGKVELIKFVRVQWRR

SEQ ID NO: 22549 - protein, 30 aa, Artificial Sequence
  Quasi-synthetic sequence derived from human genome
LFCYCRISRRLRRPPHVGRARRNSLRIIFA

SEQ ID NO: 22550 - protein, 30 aa, Artificial Sequence
  Quasi-synthetic sequence derived from human genome
VAAVVVVVIIIFTVVLILLKMYNRKMRTRR

SEQ ID NO: 22551 - protein, 30 aa, Artificial Sequence
  Quasi-synthetic sequence derived from human genome
RILRRLFNLCKRCHRQPRFRLPKERSLSYW

SEQ ID NO: 22552 - protein, 30 aa, Artificial Sequence
  Quasi-synthetic sequence derived from human genome
IRSWLTRKHIQRLHAAATVIKRAWQKWRIR

SEQ ID NO: 22553 - protein, 30 aa, Artificial Sequence
  Quasi-synthetic sequence derived from human genome
RSRRISLRKKLKLPIGKRNWLKRSSLSGLA

SEQ ID NO: 22554 - protein, 30 aa, Artificial Sequence
  Quasi-synthetic sequence derived from human genome
ILAFCAGVLLTLLLIAFIFLIIKSYRKYRR

SEQ ID NO: 22555 - protein, 30 aa, Artificial Sequence
  Quasi-synthetic sequence derived from human genome
YRRRPALGWLARLLRSRAGSRKRPLTLLQR

SEQ ID NO: 22556 - protein, 30 aa, Artificial Sequence
  Quasi-synthetic sequence derived from human genome
LGRAFFGLKVALIFPVLVLLTVFIFVVRKK

SEQ ID NO: 22557 - protein, 30 aa, Artificial Sequence
  Quasi-synthetic sequence derived from human genome
INRPRTELKKKLFKRRRVLNRERRLRHRVV

SEQ ID NO: 22558 - protein, 30 aa, Artificial Sequence
  Quasi-synthetic sequence derived from human genome
LIILAVVGGVIGLLILILLIKKLIIFILKK

SEQ ID NO: 22559 - protein, 30 aa, Artificial Sequence
  Quasi-synthetic sequence derived from human genome
VIGSYKKWCRSILRRTSLILARVFGLHLRL

SEQ ID NO: 22560 - protein, 30 aa, Artificial Sequence
  Quasi-synthetic sequence derived from human genome
LSLGRKKAPHRLCGRFSRISMKLPRIPLRR

SEQ ID NO: 22561 - protein, 30 aa, Artificial Sequence
  Quasi-synthetic sequence derived from human genome
IKKIKKVQSFLRGWLCRRKWKTIIQDYIRS

SEQ ID NO: 22562 - protein, 30 aa, Artificial Sequence
  Quasi-synthetic sequence derived from human genome
VAGVLVLLVSLGVAIHLCCRRRRARLRFMK

SEQ ID NO: 22563 - protein, 30 aa, Artificial Sequence
  Quasi-synthetic sequence derived from human genome
VIKLKNKIKYRAEACIKMQKTIRMWLCKRR

SEQ ID NO: 22564 - protein, 30 aa, Artificial Sequence
  Quasi-synthetic sequence derived from human genome
LWLIQWLLLKYKSIISRRFFCIVGTLYLYR

SEQ ID NO: 22565 - protein, 30 aa, Artificial Sequence
  Quasi-synthetic sequence derived from human genome
VLIGVSVAFVLLLFLLLFLLLRRQRHSKHR

SEQ ID NO: 22566 - protein, 30 aa, Artificial Sequence
  Quasi-synthetic sequence derived from human genome
KPLVLSEARKQLMIYRLPQVLRLHLKRFRW

SEQ ID NO: 22567 - protein, 30 aa, Artificial Sequence
  Quasi-synthetic sequence derived from human genome
FIRQKRRGAFNSKQLLYLEKYRPKMRLRFK

SEQ ID NO: 22568 - protein, 30 aa, Artificial Sequence
  Quasi-synthetic sequence derived from human genome
FFFSRGRFSSGFRRTLILSSGFRLVKKKLY

SEQ ID NO: 22569 - protein, 30 aa, Artificial Sequence
  Quasi-synthetic sequence derived from human genome
YSSIVSFYVPFIVTLLVYIKIYIVLRRRRK

SEQ ID NO: 22570 - protein, 30 aa, Artificial Sequence
  Quasi-synthetic sequence derived from human genome
LRKRKKRKFSLWVRQCSSTGFIIQIYVHLK

SEQ ID NO: 22571 - protein, 30 aa, Artificial Sequence
  Quasi-synthetic sequence derived from human genome
MKVIQRNCAAYLKLRNWQWWRLFTKVKPLL

SEQ ID NO: 22572 - protein, 30 aa, Artificial Sequence
  Quasi-synthetic sequence derived from human genome
KWLSRRFQKVKLRCRKGIPSSLRAKAWQYL

SEQ ID NO: 22573 - protein, 30 aa, Artificial Sequence
  Quasi-synthetic sequence derived from human genome
FLLVCVATVIFIVTKCCLFCFWKFARKAKK

SEQ ID NO: 22574 - protein, 30 aa, Artificial Sequence
  Quasi-synthetic sequence derived from human genome
IIRIMRVLRIARVLKLLKMAVGMRALLDTV

SEQ ID NO: 22575 - protein, 30 aa, Artificial Sequence
  Quasi-synthetic sequence derived from human genome
VVLKRLFMSRTNRPPLSLSRMIRKMKLPGR

SEQ ID NO: 22576 - protein, 30 aa, Artificial Sequence
  Quasi-synthetic sequence derived from human genome
FCIQYNIRSFMNVKHWPWMKLFFKIKPLLK

SEQ ID NO: 22577 - protein, 30 aa, Artificial Sequence
  Quasi-synthetic sequence derived from human genome
HRRVFQAMWLSFLKHKLPLSLYKKVLLIVH

SEQ ID NO: 22578 - protein, 30 aa, Artificial Sequence
  Quasi-synthetic sequence derived from human genome
QRVAWVWLLVLEKWLAREKKLLPVVFRRKL

SEQ ID NO: 22579 - protein, 30 aa, Artificial Sequence
  Quasi-synthetic sequence derived from human genome
KQRIIPFLPGKILFRRSHIRDVAVKRLKPI

SEQ ID NO: 22580 - protein, 30 aa, Artificial Sequence
  Quasi-synthetic sequence derived from human genome
LARRRIRLWHRGAMVIQATWRGYRVRRNLA

SEQ ID NO: 22581 - protein, 30 aa, Artificial Sequence
  Quasi-synthetic sequence derived from human genome
LLLLLLVIVFIPAFWSLKTHPLWRLWKKIW

SEQ ID NO: 22582 - protein, 30 aa, Artificial Sequence
  Quasi-synthetic sequence derived from human genome
GWLRKSPPEKKLKRYAWKRRWFVLRSGRLT

SEQ ID NO: 22583 - protein, 30 aa, Artificial Sequence
  Quasi-synthetic sequence derived from human genome
ISHLIFFIFYLRNMKKKYTKMVKLLHKSAP

SEQ ID NO: 22584 - protein, 30 aa, Artificial Sequence
  Quasi-synthetic sequence derived from human genome
FYLLKIANFSNLIFLHLKRRVKSVILVMLL

SEQ ID NO: 22585 - protein, 30 aa, Artificial Sequence
  Quasi-synthetic sequence derived from human genome
FYLLKIANFSNFIFLHLKRRVKSVILVMLL

SEQ ID NO: 22586 - protein, 30 aa, Artificial Sequence
  Quasi-synthetic sequence derived from human genome
LKVLKKYPRLWCMTKPPSRRPKLYIVNLQW

SEQ ID NO: 22587 - protein, 30 aa, Artificial Sequence
  Quasi-synthetic sequence derived from human genome
TFFRLFRVMRLVKLLSRGEGIRTLLWTFIK

SEQ ID NO: 22588 - protein, 30 aa, Artificial Sequence
  Quasi-synthetic sequence derived from human genome
RFWPFLVIIVILSALFLGTLACFCVWRRKR

SEQ ID NO: 22589 - protein, 30 aa, Artificial Sequence
  Quasi-synthetic sequence derived from human genome
RKYKKNLKALYVVHPTSFIKVLWNILKPLI

SEQ ID NO: 22590 - protein, 30 aa, Artificial Sequence
  Quasi-synthetic sequence derived from human genome
IIFSIAFITVLIFKVYMFKCVWRCYRLIKC

SEQ ID NO: 22591 - protein, 30 aa, Artificial Sequence
  Quasi-synthetic sequence derived from human genome
VLMVVSGAVLVYFVVRTVRMRRRNRKTRRY

SEQ ID NO: 22592 - protein, 30 aa, Artificial Sequence
  Quasi-synthetic sequence derived from human genome
PRYLRRFREMKPRVLQRWSRQILRGLHFLH

SEQ ID NO: 22593 - protein, 30 aa, Artificial Sequence
  Quasi-synthetic sequence derived from human genome
RLAFRNLGALLPRLHQLCCRMPRTLRRLFV

SEQ ID NO: 22594 - protein, 30 aa, Artificial Sequence
  Quasi-synthetic sequence derived from human genome
LRLLQSRCPRVLPKKLQNWNFLPLWMRSLK

SEQ ID NO: 22595 - protein, 30 aa, Artificial Sequence
  Quasi-synthetic sequence derived from human genome
HPMRALFLIPRNPPPRLKSKKWSKKFFSFI

SEQ ID NO: 22596 - protein, 30 aa, Artificial Sequence
  Quasi-synthetic sequence derived from human genome
KVIVVRNRRLGVLYRAVQLLILLYFVWYVF

SEQ ID NO: 22597 - protein, 30 aa, Artificial Sequence
  Quasi-synthetic sequence derived from human genome
VFRCIALRWVRLLGFAIVYGTIILKLYRVL

SEQ ID NO: 22598 - protein, 30 aa, Artificial Sequence
  Quasi-synthetic sequence derived from human genome
RISITFFRLFRVMRLVKLLSRGEGIRTLLW

SEQ ID NO: 22599 - protein, 30 aa, Artificial Sequence
  Quasi-synthetic sequence derived from human genome
GYIQICFWVIAAARQIQKMRKFYFRRIMRM

SEQ ID NO: 22600 - protein, 30 aa, Artificial Sequence
  Quasi-synthetic sequence derived from human genome
FYLLKIANFSNLIFLHLKRRVKSVVLVILL

SEQ ID NO: 22601 - protein, 30 aa, Artificial Sequence
  Quasi-synthetic sequence derived from human genome
MLQVSKKRLISVKNYRMIKKRKGLRLIDAL

SEQ ID NO: 22602 - protein, 30 aa, Artificial Sequence
  Quasi-synthetic sequence derived from human genome
VLKKNPLKNLRIMLKLNPYAKTMRRNTILR

SEQ ID NO: 22603 - protein, 30 aa, Artificial Sequence
  Quasi-synthetic sequence derived from human genome
KLAGLLRTFMRSRPSRQRLRQRGILRQRVF

SEQ ID NO: 22604 - protein, 30 aa, Artificial Sequence
  Quasi-synthetic sequence derived from human genome
FCIQYNVRAFMNVKHWPWMKLFFKIKPLLK

SEQ ID NO: 22605 - protein, 30 aa, Artificial Sequence
  Quasi-synthetic sequence derived from human genome
FRGRKNRCYRLAVRTVIRAFVKCTKARYLK

SEQ ID NO: 22606 - protein, 30 aa, Artificial Sequence
  Quasi-synthetic sequence derived from human genome
QLLYLLAVAVVIILFIILLGVIMAKRKRKH

SEQ ID NO: 22607 - protein, 30 aa, Artificial Sequence
  Quasi-synthetic sequence derived from human genome
GKVLRFLRLFGPGKNVPSVWRSARRKRKKK

SEQ ID NO: 22608 - protein, 30 aa, Artificial Sequence
  Quasi-synthetic sequence derived from human genome
RYKPLRRRVIWLIGQWISVKFKSDLRPMLY

SEQ ID NO: 22609 - protein, 30 aa, Artificial Sequence
  Quasi-synthetic sequence derived from human genome
WLRHRATQSGQRRWRHALHRRLLNRRLLLA

SEQ ID NO: 22610 - protein, 30 aa, Artificial Sequence
  Quasi-synthetic sequence derived from human genome
FMVFFLINPTKTFYYKSRFWLLKLLFRVFT

SEQ ID NO: 22611 - protein, 30 aa, Artificial Sequence
  Quasi-synthetic sequence derived from human genome
FRLFRVMRLVKLLSRGEGIRTLLWTFIKSF

SEQ ID NO: 22612 - protein, 30 aa, Artificial Sequence
  Quasi-synthetic sequence derived from human genome
KAFKIRKHYLHLRATVVSIQRRYRKLTAVR

SEQ ID NO: 22613 - protein, 30 aa, Artificial Sequence
  Quasi-synthetic sequence derived from human genome
LLRLWRVARIINGIIISVKTRSERQLLRLK

SEQ ID NO: 22614 - protein, 30 aa, Artificial Sequence
  Quasi-synthetic sequence derived from human genome
MFRTMQRRCLPSMAFKKPWRGPVRLQILKR

SEQ ID NO: 22615 - protein, 30 aa, Artificial Sequence
  Quasi-synthetic sequence derived from human genome
NMHKNMRVLSRTSKFRRLRQLLRRRKKRRQ

SEQ ID NO: 22616 - protein, 30 aa, Artificial Sequence
  Quasi-synthetic sequence derived from human genome
LWFAAWLKVFYCLRIANFNHPLFFLMKRKI

SEQ ID NO: 22617 - protein, 30 aa, Artificial Sequence
  Quasi-synthetic sequence derived from human genome
LIKSNIYPIVLFIRVCEKNIKRFRKLLPRP

SEQ ID NO: 22618 - protein, 30 aa, Artificial Sequence
  Quasi-synthetic sequence derived from human genome
LRKVLFATALGTVALALAAHQLKRRRRRKK

SEQ ID NO: 22619 - protein, 30 aa, Artificial Sequence
  Quasi-synthetic sequence derived from human genome
KLIRMGPQERWLLRTKRLHWSRLLFLLGML

SEQ ID NO: 22620 - protein, 30 aa, Artificial Sequence
  Quasi-synthetic sequence derived from human genome
LLLLRWRRPALHRPIKVNLLIPVAYLVFWA

SEQ ID NO: 22621 - protein, 30 aa, Artificial Sequence
  Quasi-synthetic sequence derived from human genome
RVLTFLPAKALLRVACVCRLWRECVRRVLR

SEQ ID NO: 22622 - protein, 30 aa, Artificial Sequence
  Quasi-synthetic sequence derived from human genome
TGWLRKSPPEKKLRRYAWKKRWFILRSGRM

SEQ ID NO: 22623 - protein, 30 aa, Artificial Sequence
  Quasi-synthetic sequence derived from human genome
RNPVFPRFIKIIEVKNKKLVELLRRKVRLA

SEQ ID NO: 22624 - protein, 30 aa, Artificial Sequence
  Quasi-synthetic sequence derived from human genome
FRKQYVRRRWKLSFSIVSLCNHLTRSLMKK

SEQ ID NO: 22625 - protein, 30 aa, Artificial Sequence
  Quasi-synthetic sequence derived from human genome
VAFVLFLRLRSIRCLRNIIHWNLISAFILR

SEQ ID NO: 22626 - protein, 30 aa, Artificial Sequence
  Quasi-synthetic sequence derived from human genome
LKKPPMKSLRKKGSGKILTPAKKSFLRRLF

SEQ ID NO: 22627 - protein, 30 aa, Artificial Sequence
  Quasi-synthetic sequence derived from human genome
YLLIIRSLRQGLRVEKRLKTKAVRMIAIVL

SEQ ID NO: 22628 - protein, 30 aa, Artificial Sequence
  Quasi-synthetic sequence derived from human genome
FMLKKRKWPLKGWHKRFFVLDNGMLKYSKA

SEQ ID NO: 22629 - protein, 30 aa, Artificial Sequence
  Quasi-synthetic sequence derived from human genome
RTLLHAALRAWIIQCWWRQVLEKLLAKRRR

SEQ ID NO: 22630 - protein, 30 aa, Artificial Sequence
  Quasi-synthetic sequence derived from human genome
VAAAVLLALLVLLVAPPLLRRAGRLRWRRH

SEQ ID NO: 22631 - protein, 30 aa, Artificial Sequence
  Quasi-synthetic sequence derived from human genome
KKKYPLAKYLCVLLIVAGVALFMYKPKKVV

SEQ ID NO: 22632 - protein, 30 aa, Artificial Sequence
  Quasi-synthetic sequence derived from human genome
LRYYYNKRILHKTKGKRFTYKFNFSKVVLV

SEQ ID NO: 22633 - protein, 30 aa, Artificial Sequence
  Quasi-synthetic sequence derived from human genome
RKRRFQLYRSMNPRARKNRSHIPLVRKRRF

SEQ ID NO: 22634 - protein, 30 aa, Artificial Sequence
  Quasi-synthetic sequence derived from human genome
LWRQQICAIARVRLLKLKHERKALLALLLI

SEQ ID NO: 22635 - protein, 30 aa, Artificial Sequence
  Quasi-synthetic sequence derived from human genome
KIKEKLRIRTKAAVKIQAWWRGTLVRRTLL

SEQ ID NO: 22636 - protein, 30 aa, Artificial Sequence
  Quasi-synthetic sequence derived from human genome
KRYLVKFICLSIWGLSLLLALPVLLFRRTV

SEQ ID NO: 22637 - protein, 30 aa, Artificial Sequence
  Quasi-synthetic sequence derived from human genome
FWPILVMYFIMLFCITMKRQIKHMIKYRYI

SEQ ID NO: 22638 - protein, 30 aa, Artificial Sequence
  Quasi-synthetic sequence derived from human genome
KNQRSSLRIRLFNFSLKLLTCLLYIVRVLL

SEQ ID NO: 22639 - protein, 30 aa, Artificial Sequence
  Quasi-synthetic sequence derived from human genome
RRRMPGLGWMKKCYQMIDRRLRKNLKSFII

SEQ ID NO: 22640 - protein, 30 aa, Artificial Sequence
  Quasi-synthetic sequence derived from human genome
KLLAKIAKLQRRIKTVLLFQRNCLKPNMLS

SEQ ID NO: 22641 - protein, 30 aa, Artificial Sequence
  Quasi-synthetic sequence derived from human genome
AKLLAKKRVVRMLLVIVVLFFLCWLPVYSA

SEQ ID NO: 22642 - protein, 30 aa, Artificial Sequence
  Quasi-synthetic sequence derived from human genome
KFRLILIESRIHRLARYYKTKRVLPPNWKY

SEQ ID NO: 22643 - protein, 30 aa, Artificial Sequence
  Quasi-synthetic sequence derived from human genome
RLQSWVRMWCVRQRYCRLLNAVRIIQVYWR

SEQ ID NO: 22644 - protein, 30 aa, Artificial Sequence
  Quasi-synthetic sequence derived from human genome
LLRRLKLVKMYRSKNDLSQLQLLIKKWRSC

SEQ ID NO: 22645 - protein, 30 aa, Artificial Sequence
  Quasi-synthetic sequence derived from human genome
LVTILCLLAAGFVVYLKRKTLIRLLFTNKK

SEQ ID NO: 22646 - protein, 30 aa, Artificial Sequence
  Quasi-synthetic sequence derived from human genome
KVCYLPLNTFLLKPIQRLLHYRLLLRRLCG

SEQ ID NO: 22647 - protein, 30 aa, Artificial Sequence
  Quasi-synthetic sequence derived from human genome
RFLRRKVQEGRLRRKQIKFEKDLRRIWLKA

SEQ ID NO: 22648 - protein, 30 aa, Artificial Sequence
  Quasi-synthetic sequence derived from human genome
RKRLRCRRKTVLVLMCILTAYVLCWAPFYG

SEQ ID NO: 22649 - protein, 30 aa, Artificial Sequence
  Quasi-synthetic sequence derived from human genome
KIMVRRCLVTLRPFRLFVLGIGFFTLCFLM

SEQ ID NO: 22650 - protein, 30 aa, Artificial Sequence
  Quasi-synthetic sequence derived from human genome
LRKLRNVSNLKPVPLIGPKLKRRWPISYCR

SEQ ID NO: 22651 - protein, 30 aa, Artificial Sequence
  Quasi-synthetic sequence derived from human genome
FVLKYITIALKCLIVALPKIILAVKSKGKF

SEQ ID NO: 22652 - protein, 30 aa, Artificial Sequence
  Quasi-synthetic sequence derived from human genome
LGVVLLAIFVALFFLTKKRRQRQRLAVSSR

SEQ ID NO: 22653 - protein, 30 aa, Artificial Sequence
  Quasi-synthetic sequence derived from human genome
IFSKVRIFGLKKRRLRRQDPQLKGIVTRLY

SEQ ID NO: 22654 - protein, 30 aa, Artificial Sequence
  Quasi-synthetic sequence derived from human genome
TLKRIYGKYLRAESFRKALIYQKKYLLLLL

SEQ ID NO: 22655 - protein, 30 aa, Artificial Sequence
  Quasi-synthetic sequence derived from human genome
FFSGLIILLIFRLIWRSVKKWQIIKGTGII

SEQ ID NO: 22656 - protein, 30 aa, Artificial Sequence
  Quasi-synthetic sequence derived from human genome
FPMWTLKRQILILFNIILISKLLGARWFPK

SEQ ID NO: 22657 - protein, 30 aa, Artificial Sequence
  Quasi-synthetic sequence derived from human genome
YVRIRSRRLGIYQRCWLVFKKASSKGPKRL

SEQ ID NO: 22658 - protein, 30 aa, Artificial Sequence
  Quasi-synthetic sequence derived from human genome
RVVVALTLLRFRLSVDRTRKVRRKPELILR

SEQ ID NO: 22659 - protein, 30 aa, Artificial Sequence
  Quasi-synthetic sequence derived from human genome
HFRVFHLSLWRLMKKVQITKPPPNFKFAFR

SEQ ID NO: 22660 - protein, 30 aa, Artificial Sequence
  Quasi-synthetic sequence derived from human genome
RKRLHFKLCKKSSILVHKLLDKLLVLCPFS

SEQ ID NO: 22661 - protein, 30 aa, Artificial Sequence
  Quasi-synthetic sequence derived from human genome
RRKTAKMLMVVLLVFALCYLPISVLNVLKR

SEQ ID NO: 22662 - protein, 30 aa, Artificial Sequence
  Quasi-synthetic sequence derived from human genome
RALRYYYNKRILHKTKGKRFTYKFNFNKLV

SEQ ID NO: 22663 - protein, 30 aa, Artificial Sequence
  Quasi-synthetic sequence derived from human genome
FSLVPSPKSFVYFIMRIVNFPKCRRRRLQK

SEQ ID NO: 22664 - protein, 30 aa, Artificial Sequence
  Quasi-synthetic sequence derived from human genome
LLSPVPKLCRIKASKALKKKIRRFQPTALK

SEQ ID NO: 22665 - protein, 30 aa, Artificial Sequence
  Quasi-synthetic sequence derived from human genome
YHARLWLHVLPTLPGTLCLRIFRWGPRRRR

SEQ ID NO: 22666 - protein, 30 aa, Artificial Sequence
  Quasi-synthetic sequence derived from human genome
FLLACVATVIFVVTKFCLFCFWKFARKGKK

SEQ ID NO: 22667 - protein, 30 aa, Artificial Sequence
  Quasi-synthetic sequence derived from human genome
RLCIRKFFPKKKCFVFDLPIHRRKLAQLEK

SEQ ID NO: 22668 - protein, 30 aa, Artificial Sequence
  Quasi-synthetic sequence derived from human genome
IKRRKTKPVLSIRMKKLTERTSVRILFFKN

SEQ ID NO: 22669 - protein, 30 aa, Artificial Sequence
  Quasi-synthetic sequence derived from human genome
LIQGYWRRYSTRQRFLKLKYYSIILQSRIR

SEQ ID NO: 22670 - protein, 30 aa, Artificial Sequence
  Quasi-synthetic sequence derived from human genome
GLIFAGLAFIVGLLILLSRRFRCGGNKKRR

SEQ ID NO: 22671 - protein, 30 aa, Artificial Sequence
  Quasi-synthetic sequence derived from human genome
KFRAKGRKPCKLMLQVVKILVVTVQLILFG

SEQ ID NO: 22672 - protein, 30 aa, Artificial Sequence
  Quasi-synthetic sequence derived from human genome
RRSRSVVRRRSFSISPVRLRRSRTPLRRRF

SEQ ID NO: 22673 - protein, 30 aa, Artificial Sequence
  Quasi-synthetic sequence derived from human genome
RMVIKRVVLSGHPFKIFTKMAVVRYMFFNR

SEQ ID NO: 22674 - protein, 30 aa, Artificial Sequence
  Quasi-synthetic sequence derived from human genome
RAWRPLVRPSLQCVKLGRATARWWWVVKVK

SEQ ID NO: 22675 - protein, 30 aa, Artificial Sequence
  Quasi-synthetic sequence derived from human genome
WLAIQKLRSKIHKKVDRKASKGRKLRFHVL

SEQ ID NO: 22676 - protein, 30 aa, Artificial Sequence
  Quasi-synthetic sequence derived from human genome
MLWSRMLKDNKKNWRRVYKSLLLLAYLIRN

SEQ ID NO: 22677 - protein, 30 aa, Artificial Sequence
  Quasi-synthetic sequence derived from human genome
IFHFLYGKNRSRIPLLRKRWFQLGRSMNPR

SEQ ID NO: 22678 - protein, 30 aa, Artificial Sequence
  Quasi-synthetic sequence derived from human genome
RRWKKKQLRRPSLLLLGCCSFGIMAPSLWK

SEQ ID NO: 22679 - protein, 30 aa, Artificial Sequence
  Quasi-synthetic sequence derived from human genome
RYNKLRHSVIYIQAIFRGKKARRHLKMMHI

SEQ ID NO: 22680 - protein, 30 aa, Artificial Sequence
  Quasi-synthetic sequence derived from human genome
KQAMFLNLVYKSLKADIVLRRVKAFVKRLL

SEQ ID NO: 22681 - protein, 30 aa, Artificial Sequence
  Quasi-synthetic sequence derived from human genome
WQVFSKAFLRLVRKLHKCVSQHFLKHYFVR

SEQ ID NO: 22682 - protein, 30 aa, Artificial Sequence
  Quasi-synthetic sequence derived from human genome
LLLHNQLLYERFKRQQHALRNRRLLRKVIK

SEQ ID NO: 22683 - protein, 30 aa, Artificial Sequence
  Quasi-synthetic sequence derived from human genome
NLFCSLLFIIPKKLMIFLRTVIRLERKTPR

SEQ ID NO: 22684 - protein, 30 aa, Artificial Sequence
  Quasi-synthetic sequence derived from human genome
ALMVKMTKLRVVQYYGNFSRSAKRRRLRLL

SEQ ID NO: 22685 - protein, 30 aa, Artificial Sequence
  Quasi-synthetic sequence derived from human genome
FKNLFYRTYMLFKNASGKRRFLLCLLLFTV

SEQ ID NO: 22686 - protein, 30 aa, Artificial Sequence
  Quasi-synthetic sequence derived from human genome
MFTRAQVRRILQRVPGKQRFGIYRFLPFFF

SEQ ID NO: 22687 - protein, 30 aa, Artificial Sequence
  Quasi-synthetic sequence derived from human genome
FQKQFYRLGGFRVCHKLIFMIIQKLFRSHK

SEQ ID NO: 22688 - protein, 30 aa, Artificial Sequence
  Quasi-synthetic sequence derived from human genome
RRRIKSLLPKLSCGVKNRMHIRRKRIVGGK

SEQ ID NO: 22689 - protein, 30 aa, Artificial Sequence
  Quasi-synthetic sequence derived from human genome
VAGVLVLLVSLGVAMHLCCRRRRARLRFMK

SEQ ID NO: 22690 - protein, 30 aa, Artificial Sequence
  Quasi-synthetic sequence derived from human genome
KFFKRKPKVLGVVRILIALMSLSMGIIMMC

SEQ ID NO: 22691 - protein, 30 aa, Artificial Sequence
  Quasi-synthetic sequence derived from human genome
HWFKKLSQKRFKQLVERLLQFISLRLFPAK

SEQ ID NO: 22692 - protein, 30 aa, Artificial Sequence
  Quasi-synthetic sequence derived from human genome
FWANSCFHLYRAPYFWIKRRILLLIPKWLY

SEQ ID NO: 22693 - protein, 30 aa, Artificial Sequence
  Quasi-synthetic sequence derived from human genome
FVRQIQLLLWKNWTLRKRQKIRFVVELVWP

SEQ ID NO: 22694 - protein, 30 aa, Artificial Sequence
  Quasi-synthetic sequence derived from human genome
FLLACVATVLFIITKCCLFCFWKFARKGKK

SEQ ID NO: 22695 - protein, 30 aa, Artificial Sequence
  Quasi-synthetic sequence derived from human genome
GGALFVYLNRKIVQVMRKQKTINRFLMRKR

SEQ ID NO: 22696 - protein, 30 aa, Artificial Sequence
  Quasi-synthetic sequence derived from human genome
SRRCKKRMFKFHQMKHIFEILDKMRCLRKR

SEQ ID NO: 22697 - protein, 30 aa, Artificial Sequence
  Quasi-synthetic sequence derived from human genome
GMRLVVSCISSFLILSLLLFMVHRLRQRRR

SEQ ID NO: 22698 - protein, 30 aa, Artificial Sequence
  Quasi-synthetic sequence derived from human genome
KLLFTPQHKMLRLRLPNLKMVRLRVSFSAV

SEQ ID NO: 22699 - protein, 30 aa, Artificial Sequence
  Quasi-synthetic sequence derived from human genome
FLGAMVVLAFFVVQINKAKSRPKRRKPRVK

SEQ ID NO: 22700 - protein, 30 aa, Artificial Sequence
  Quasi-synthetic sequence derived from human genome
KKIRWDPVRRRFIQSCPIIRIPNRFLRGHR

SEQ ID NO: 22701 - protein, 30 aa, Artificial Sequence
  Quasi-synthetic sequence derived from human genome
TAVILGSAVLLFHFCIFHRRKMKAIRRSLK

SEQ ID NO: 22702 - protein, 30 aa, Artificial Sequence
  Quasi-synthetic sequence derived from human genome
RRRRTFCLLVVIVVVFAVCWLPLHVFNLLR

SEQ ID NO: 22703 - protein, 30 aa, Artificial Sequence
  Quasi-synthetic sequence derived from human genome
HWRGRYGRRRPFIWALSLGILLSLFLIPRA

SEQ ID NO: 22704 - protein, 30 aa, Artificial Sequence
  Quasi-synthetic sequence derived from human genome
KIQAAWRGFHWRQKFLRVKRSAICIQSWWR

SEQ ID NO: 22705 - protein, 30 aa, Artificial Sequence
  Quasi-synthetic sequence derived from human genome
KIRKALDRLRKKRHLLRRQRTRREFPVISV

SEQ ID NO: 22706 - protein, 30 aa, Artificial Sequence
  Quasi-synthetic sequence derived from human genome
YFAQVKHLYNWNLPPRRILFIKRFIIYSIR

SEQ ID NO: 22707 - protein, 30 aa, Artificial Sequence
  Quasi-synthetic sequence derived from human genome
FLLGCPRFVVIDNCIALKKVASRLKKKRKK

SEQ ID NO: 22708 - protein, 30 aa, Artificial Sequence
  Quasi-synthetic sequence derived from human genome
RFLCGKEIKKKKCIFRLRIRVPPNPPGKLL

SEQ ID NO: 22709 - protein, 30 aa, Artificial Sequence
  Quasi-synthetic sequence derived from human genome
FPRSPRIRKRFLLRRILEMLFFTQLQVGLI

SEQ ID NO: 22710 - protein, 30 aa, Artificial Sequence
  Quasi-synthetic sequence derived from human genome
LLCKNCLKKWRMKRQTLLEWLFSFLLVLFL

SEQ ID NO: 22711 - protein, 30 aa, Artificial Sequence
  Quasi-synthetic sequence derived from human genome
QYQKKNRKMLVILILFVIIIVLIVVLVGVK

SEQ ID NO: 22712 - protein, 30 aa, Artificial Sequence
  Quasi-synthetic sequence derived from human genome
WRGTLARMRYKRTKAALTIIRYYRRYKVKS

SEQ ID NO: 22713 - protein, 30 aa, Artificial Sequence
  Quasi-synthetic sequence derived from human genome
FRLLRVLKLVRFMPALRRQLVVLMKTMDNV

SEQ ID NO: 22714 - protein, 30 aa, Artificial Sequence
  Quasi-synthetic sequence derived from human genome
KKRYIYRKIKGWRPVLMMCVVLTTLPCLTF

SEQ ID NO: 22715 - protein, 30 aa, Artificial Sequence
  Quasi-synthetic sequence derived from human genome
WRRAWPRRRRRLQQVGTVAKLWIYPVKSCK

SEQ ID NO: 22716 - protein, 30 aa, Artificial Sequence
  Quasi-synthetic sequence derived from human genome
FQTRKRLKKLPSAVIALQRSFRSKRSKMLL

SEQ ID NO: 22717 - protein, 30 aa, Artificial Sequence
  Quasi-synthetic sequence derived from human genome
PRWILQFRRWARKWSRFTRSSFQVRWAAVP

SEQ ID NO: 22718 - protein, 30 aa, Artificial Sequence
  Quasi-synthetic sequence derived from human genome
LFYLAVGIMFLVNTVLWVTIRKELKRKKKW

SEQ ID NO: 22719 - protein, 30 aa, Artificial Sequence
  Quasi-synthetic sequence derived from human genome
KLGLLLLTFLGIVAAVLVKKYQAVLRRKAL

SEQ ID NO: 22720 - protein, 30 aa, Artificial Sequence
  Quasi-synthetic sequence derived from human genome
RSVAGLLPRRRRCFPARAPLLRVALCLLCW

SEQ ID NO: 22721 - protein, 30 aa, Artificial Sequence
  Quasi-synthetic sequence derived from human genome
YWLSLLFKKLVGTKVLMASVQGSKRRKLRV

SEQ ID NO: 22722 - protein, 30 aa, Artificial Sequence
  Quasi-synthetic sequence derived from human genome
LSRLLFFLLGFLRIRVRGQRASRLQAPVLV

SEQ ID NO: 22723 - protein, 30 aa, Artificial Sequence
  Quasi-synthetic sequence derived from human genome
GPLAPRPRRRRSLRRLFSRFLLALGSRSRP

SEQ ID NO: 22724 - protein, 30 aa, Artificial Sequence
  Quasi-synthetic sequence derived from human genome
LRRKVLWCLQYIGLGFFCCKQKTRLRAMGK

SEQ ID NO: 22725 - protein, 30 aa, Artificial Sequence
  Quasi-synthetic sequence derived from human genome
VKRRYLDWRALMKRKRMKANIKLVGSGFPL

SEQ ID NO: 22726 - protein, 30 aa, Artificial Sequence
  Quasi-synthetic sequence derived from human genome
SIFLKRSQQKKKTSPLNFKKRLFLLTVHKL

SEQ ID NO: 22727 - protein, 30 aa, Artificial Sequence
  Quasi-synthetic sequence derived from human genome
LWFWAFSLQAKVWATWLAFVLERRRKKARL

SEQ ID NO: 22728 - protein, 30 aa, Artificial Sequence
  Quasi-synthetic sequence derived from human genome
RVLHALLCLHRTLTSWLRVRFGTWNWIWRR

SEQ ID NO: 22729 - protein, 30 aa, Artificial Sequence
  Quasi-synthetic sequence derived from human genome
RRAKRKVTRMILIVAALFCLCWMPHHALIL

SEQ ID NO: 22730 - protein, 30 aa, Artificial Sequence
  Quasi-synthetic sequence derived from human genome
LLVRYRHYFRLLVRTVLLRSLRDCLSGLRI

SEQ ID NO: 22731 - protein, 30 aa, Artificial Sequence
  Quasi-synthetic sequence derived from human genome
KRRKRWDIQRIREQRILQRLQLRMYKKKGI

SEQ ID NO: 22732 - protein, 30 aa, Artificial Sequence
  Quasi-synthetic sequence derived from human genome
VLKVRKEIVSKLMRSLKRAALQRPGIRRVI

SEQ ID NO: 22733 - protein, 30 aa, Artificial Sequence
  Quasi-synthetic sequence derived from human genome
GLPIVVMVTLVLGVLRMAKKRVIVKKLPIV

SEQ ID NO: 22734 - protein, 30 aa, Artificial Sequence
  Quasi-synthetic sequence derived from human genome
WWYRFAHKFLIWNCSPYWIKFKKCIYFIVM

SEQ ID NO: 22735 - protein, 30 aa, Artificial Sequence
  Quasi-synthetic sequence derived from human genome
FLLTMRPFLKRAILVLSYVLVILYFRLWIM

SEQ ID NO: 22736 - protein, 30 aa, Artificial Sequence
  Quasi-synthetic sequence derived from human genome
VFLIPFLHFIIFLFTLRCLEWKFGKKSMRK

SEQ ID NO: 22737 - protein, 30 aa, Artificial Sequence
  Quasi-synthetic sequence derived from human genome
RRRQAGRRLRYLPTGSFPFLLLLLLLCIQL

SEQ ID NO: 22738 - protein, 30 aa, Artificial Sequence
  Quasi-synthetic sequence derived from human genome
LRAFCGILYMKPRMKIFLRQKKVTTQMIAK

SEQ ID NO: 22739 - protein, 30 aa, Artificial Sequence
  Quasi-synthetic sequence derived from human genome
RARRGLLRLPRRSLLAALFFFSLSSSLLYF

SEQ ID NO: 22740 - protein, 30 aa, Artificial Sequence
  Quasi-synthetic sequence derived from human genome
LSLLFKKLVGTKVLMASVQGSKRRKLRVYL

SEQ ID NO: 22741 - protein, 30 aa, Artificial Sequence
  Quasi-synthetic sequence derived from human genome
LRSKKAVWHKLLSKQRKRAVVACFRMAPLY

SEQ ID NO: 22742 - protein, 30 aa, Artificial Sequence
  Quasi-synthetic sequence derived from human genome
MIVLFLLLVLVVIVVCSIRKSSRTLKKGPR

SEQ ID NO: 22743 - protein, 30 aa, Artificial Sequence
  Quasi-synthetic sequence derived from human genome
RFKVMKAKKMRNRIIKNEVKKLQKAALLKA

SEQ ID NO: 22744 - protein, 30 aa, Artificial Sequence
  Quasi-synthetic sequence derived from human genome
RRRRRAKITGRERKAMRVLPVVVGAFLLCW

SEQ ID NO: 22745 - protein, 30 aa, Artificial Sequence
  Quasi-synthetic sequence derived from human genome
FFLLSLGIILFCYVEILRTLFRSRSKRRHR

SEQ ID NO: 22746 - protein, 30 aa, Artificial Sequence
  Quasi-synthetic sequence derived from human genome
MKWLLLLGLVALSECIMYKVPLIRKKSLRR

SEQ ID NO: 22747 - protein, 30 aa, Artificial Sequence
  Quasi-synthetic sequence derived from human genome
MSLVIRNLQRVIPIRRAPLRSKIEIVRRIL

SEQ ID NO: 22748 - protein, 30 aa, Artificial Sequence
  Quasi-synthetic sequence derived from human genome
LKVIQQNVHKFLQLRFWGWWKLYNKVKPLL

SEQ ID NO: 22749 - protein, 30 aa, Artificial Sequence
  Quasi-synthetic sequence derived from human genome
AFVRGYLVRKQMRLQRKAVISLQSYFRMRK

SEQ ID NO: 22750 - protein, 30 aa, Artificial Sequence
  Quasi-synthetic sequence derived from human genome
LRCLYHWHRPVLNRRWSRLCLPKQYLFTMK

SEQ ID NO: 22751 - protein, 30 aa, Artificial Sequence
  Quasi-synthetic sequence derived from human genome
QIFRIMRILRILKLARHSTGLQSLGFTLRR

SEQ ID NO: 22752 - protein, 30 aa, Artificial Sequence
  Quasi-synthetic sequence derived from human genome
YRRRCCRLCIWLLQTLVHLLQLGQVWRYLR

SEQ ID NO: 22753 - protein, 30 aa, Artificial Sequence
  Quasi-synthetic sequence derived from human genome
KAKYKKVQLVRLVGMMLLIFARKDQCRYIR

SEQ ID NO: 22754 - protein, 30 aa, Artificial Sequence
  Quasi-synthetic sequence derived from human genome
KQRIIPFLPGKILFRRSHIRDVAVKRLIPI

SEQ ID NO: 22755 - protein, 30 aa, Artificial Sequence
  Quasi-synthetic sequence derived from human genome
MAPRARRRRPLFALLLLCALLARLQVALQI

SEQ ID NO: 22756 - protein, 30 aa, Artificial Sequence
  Quasi-synthetic sequence derived from human genome
MIPTLKAAIRAVRILQFRLYKKKFKETLRP

SEQ ID NO: 22757 - protein, 30 aa, Artificial Sequence
  Quasi-synthetic sequence derived from human genome
GWLCLLLLPIPLIVWVKRKEVQKTCRKHRK

SEQ ID NO: 22758 - protein, 30 aa, Artificial Sequence
  Quasi-synthetic sequence derived from human genome
YLRKRFGGIRIPIILAVLYLFIYIFTKISV

SEQ ID NO: 22759 - protein, 30 aa, Artificial Sequence
  Quasi-synthetic sequence derived from human genome
FRIKCVTRIQAYWRGCVVRKWYRNLRKTVP

SEQ ID NO: 22760 - protein, 30 aa, Artificial Sequence
  Quasi-synthetic sequence derived from human genome
LFAALKALKYLFRFIIQSRVLYLRFYGQSK

SEQ ID NO: 22761 - protein, 30 aa, Artificial Sequence
  Quasi-synthetic sequence derived from human genome
KKWNSCVRRRKWIRYRRYKSRDIWAKIPSK

SEQ ID NO: 22762 - protein, 30 aa, Artificial Sequence
  Quasi-synthetic sequence derived from human genome
AKPKKQSKKKVPFWNVQNKIILFTVFLFIL

SEQ ID NO: 22763 - protein, 30 aa, Artificial Sequence
  Quasi-synthetic sequence derived from human genome
ILLVVAVFCILWNWNKRKKRQVPYLRVTVM

SEQ ID NO: 22764 - protein, 30 aa, Artificial Sequence
  Quasi-synthetic sequence derived from human genome
FRIKRFLAKKQKQNRPIPQWIRMKTGNKIR

SEQ ID NO: 22765 - protein, 30 aa, Artificial Sequence
  Quasi-synthetic sequence derived from human genome
LFISVAFKLLILLLGSWALFFRRPKASLPR

SEQ ID NO: 22766 - protein, 30 aa, Artificial Sequence
  Quasi-synthetic sequence derived from human genome
RVRAARLHQRLLHQLRRGPFQRCQLLRLLC

SEQ ID NO: 22767 - protein, 30 aa, Artificial Sequence
  Quasi-synthetic sequence derived from human genome
TTLLLVLQYFGPLCFIFICYFKIYIRLKRR

SEQ ID NO: 22768 - protein, 30 aa, Artificial Sequence
  Quasi-synthetic sequence derived from human genome
LIILLLWKCDFFKRTRYYQIMPKYHAVRIR

SEQ ID NO: 22769 - protein, 30 aa, Artificial Sequence
  Quasi-synthetic sequence derived from human genome
MKWRRKSAYWKALKVFKLPVEFLLLLTVPV

SEQ ID NO: 22770 - protein, 30 aa, Artificial Sequence
  Quasi-synthetic sequence derived from human genome
RKPWFQLGHSMNPRARKNRSRIPLLRKRRF

SEQ ID NO: 22771 - protein, 30 aa, Artificial Sequence
  Quasi-synthetic sequence derived from human genome
RPLSSFVRKARHRRPLSSFVRKARHRRTLF

SEQ ID NO: 22772 - protein, 30 aa, Artificial Sequence
  Quasi-synthetic sequence derived from human genome
RRRRARLRFMKQKFNIVCLKISGFTTCCCF

SEQ ID NO: 22773 - protein, 30 aa, Artificial Sequence
  Quasi-synthetic sequence derived from human genome
LVFFVSRKRRILISGSRRRDVIKSIVKIPH

SEQ ID NO: 22774 - protein, 30 aa, Artificial Sequence
  Quasi-synthetic sequence derived from human genome
KMRRPSLLLKDILKCTLLVFGVWILYILKL

SEQ ID NO: 22775 - protein, 30 aa, Artificial Sequence
  Quasi-synthetic sequence derived from human genome
RLLRRTLMRYVNLTSLLIFRSVSTAVYKRF

SEQ ID NO: 22776 - protein, 30 aa, Artificial Sequence
  Quasi-synthetic sequence derived from human genome
LTLVSFLIFILFIIVQLFIMKLRKAHVIWK

SEQ ID NO: 22777 - protein, 30 aa, Artificial Sequence
  Quasi-synthetic sequence derived from human genome
LAIILLIFISLFPEILLIVLKNVRRRSARR

SEQ ID NO: 22778 - protein, 30 aa, Artificial Sequence
  Quasi-synthetic sequence derived from human genome
RPRKPPPRKHTRSWAVLKLLLLLLLFGVAG

SEQ ID NO: 22779 - protein, 30 aa, Artificial Sequence
  Quasi-synthetic sequence derived from human genome
KKAMSCHRSQLLWFRRLYIIFSRYMRINSL

SEQ ID NO: 22780 - protein, 30 aa, Artificial Sequence
  Quasi-synthetic sequence derived from human genome
LLMLVLYGRIFRAARFRIRKTVKKVEKTGA

SEQ ID NO: 22781 - protein, 30 aa, Artificial Sequence
  Quasi-synthetic sequence derived from human genome
IGILVAVVLLLLLLLLLFLILRHRRQGKHW

SEQ ID NO: 22782 - protein, 30 aa, Artificial Sequence
  Quasi-synthetic sequence derived from human genome
FNQVVLKRLFMSRTNRPPLSLSRMIRKMKL

SEQ ID NO: 22783 - protein, 30 aa, Artificial Sequence
  Quasi-synthetic sequence derived from human genome
GATIGASILLIFFFIALVFFLYRRRKGSRK

SEQ ID NO: 22784 - protein, 30 aa, Artificial Sequence
  Quasi-synthetic sequence derived from human genome
KILKILITFRISNYFKYVPLKTQCTFIKFF

SEQ ID NO: 22785 - protein, 30 aa, Artificial Sequence
  Quasi-synthetic sequence derived from human genome
TPRGLRLRLPRRESLLRGLCRPLRPLLGFR

SEQ ID NO: 22786 - protein, 30 aa, Artificial Sequence
  Quasi-synthetic sequence derived from human genome
LFPKALGRPGPPFNITPRRARRFFLRCIIW

SEQ ID NO: 22787 - protein, 30 aa, Artificial Sequence
  Quasi-synthetic sequence derived from human genome
KIIYNLRNTLKYAKKNVRAFWKLRANPRLA

SEQ ID NO: 22788 - protein, 30 aa, Artificial Sequence
  Quasi-synthetic sequence derived from human genome
TSYNRFRKFPFFTRPLLSKWCPKSLFKKKP

SEQ ID NO: 22789 - protein, 30 aa, Artificial Sequence
  Quasi-synthetic sequence derived from human genome
LHFRHKVLILFKLILLEKKVLFYISPVNKL

SEQ ID NO: 22790 - protein, 30 aa, Artificial Sequence
  Quasi-synthetic sequence derived from human genome
LHKKGGTQLQLLKWPLRFVIIHKRCVYYFK

SEQ ID NO: 22791 - protein, 30 aa, Artificial Sequence
  Quasi-synthetic sequence derived from human genome
RLWKARVLKLVLKTAKDSRLGLNSKWLSLK

SEQ ID NO: 22792 - protein, 30 aa, Artificial Sequence
  Quasi-synthetic sequence derived from human genome
LVLLLVALSALFLGRWLVVRLATKWCQRKL

SEQ ID NO: 22793 - protein, 30 aa, Artificial Sequence
  Quasi-synthetic sequence derived from human genome
YYLLRQFKIFSDFRMNKAFVTWKLNVKRIK

SEQ ID NO: 22794 - protein, 30 aa, Artificial Sequence
  Quasi-synthetic sequence derived from human genome
RAVRSRRAIAVLSRWPAFPAFRAFLTFLYR

SEQ ID NO: 22795 - protein, 30 aa, Artificial Sequence
  Quasi-synthetic sequence derived from human genome
KICAFLLRKKRFGQWTKLLCVIKDTKLLCY

SEQ ID NO: 22796 - protein, 30 aa, Artificial Sequence
  Quasi-synthetic sequence derived from human genome
CLVIKHFLRKIIMVHPKVRFHFSVKVNGIL

SEQ ID NO: 22797 - protein, 30 aa, Artificial Sequence
  Quasi-synthetic sequence derived from human genome
LMKYLQKWKRYRPLWKLDKAIVMEKFAAKK

SEQ ID NO: 22798 - protein, 30 aa, Artificial Sequence
  Quasi-synthetic sequence derived from human genome
AKLLKKRSKQPLGEVKRRLSLYLTKIHFWL

SEQ ID NO: 22799 - protein, 30 aa, Artificial Sequence
  Quasi-synthetic sequence derived from human genome
LVHRRIYPFLLMVVVLMAILSFQVRQFKRL

SEQ ID NO: 22800 - protein, 30 aa, Artificial Sequence
  Quasi-synthetic sequence derived from human genome
IYRRGARRWRKLYRANGHLFQAKRFNRRAY

SEQ ID NO: 22801 - protein, 30 aa, Artificial Sequence
  Quasi-synthetic sequence derived from human genome
FYTIIIPLLNPFIYSLRNKKVMHALRRVIR

SEQ ID NO: 22802 - protein, 30 aa, Artificial Sequence
  Quasi-synthetic sequence derived from human genome
VRAKARRRLVMGLREVTKHMKLNKIKCVII

SEQ ID NO: 22803 - protein, 30 aa, Artificial Sequence
  Quasi-synthetic sequence derived from human genome
LFWGWARHRSLCFLVVACLKVKTCLVCRFR

SEQ ID NO: 22804 - protein, 30 aa, Artificial Sequence
  Quasi-synthetic sequence derived from human genome
YWAVVVLFVIGLFAAGAFILYKFKRKRPGR

SEQ ID NO: 22805 - protein, 30 aa, Artificial Sequence
  Quasi-synthetic sequence derived from human genome
RGLPFSSFLILPFQRITRLKLLVQNILKRV

SEQ ID NO: 22806 - protein, 30 aa, Artificial Sequence
  Quasi-synthetic sequence derived from human genome
RRTLRKPKRVPSIYKLKLRPRIRPRRDHRP

SEQ ID NO: 22807 - protein, 30 aa, Artificial Sequence
  Quasi-synthetic sequence derived from human genome
YLYHRELTKIPIFSLFRKWKAFSVWRKNVR

SEQ ID NO: 22808 - protein, 30 aa, Artificial Sequence
  Quasi-synthetic sequence derived from human genome
IIIKGSVGGLLVLIVILVILFKCGFFKRKY

SEQ ID NO: 22809 - protein, 30 aa, Artificial Sequence
  Quasi-synthetic sequence derived from human genome
ISRQRVLPRMQARMRGFQARKRYLRRRAAL

SEQ ID NO: 22810 - protein, 30 aa, Artificial Sequence
  Quasi-synthetic sequence derived from human genome
RAVILHFFRGLLYWKNTLALAAILVLLRVR

SEQ ID NO: 22811 - protein, 30 aa, Artificial Sequence
  Quasi-synthetic sequence derived from human genome
LLVGNHTQRTAILGLWKIARKWMRRKMGKW

SEQ ID NO: 22812 - protein, 30 aa, Artificial Sequence
  Quasi-synthetic sequence derived from human genome
KWAKKSHMTWAHARLCFLLGRLSIRKVKLS

SEQ ID NO: 22813 - protein, 30 aa, Artificial Sequence
  Quasi-synthetic sequence derived from human genome
SLSVLRSFRLLRVFKLAKSWPTLNTLIKII

SEQ ID NO: 22814 - protein, 30 aa, Artificial Sequence
  Quasi-synthetic sequence derived from human genome
FILRRKPVEQKKIFTIQGCYPVIRCLLRRR

SEQ ID NO: 22815 - protein, 30 aa, Artificial Sequence
  Quasi-synthetic sequence derived from human genome
RRGRRRTRAAGSLLSRAAILLFISAFLVRV

SEQ ID NO: 22816 - protein, 30 aa, Artificial Sequence
  Quasi-synthetic sequence derived from human genome
LMLLSSIGRRKSLPSVTRPRLRVKMYNFLR

SEQ ID NO: 22817 - protein, 30 aa, Artificial Sequence
  Quasi-synthetic sequence derived from human genome
HLGKVVQVFRLMRIFRVLKLARHSTGLRSL

SEQ ID NO: 22818 - protein, 30 aa, Artificial Sequence
  Quasi-synthetic sequence derived from human genome
IIFAFCIAVVYITYHNKRKIFLLVQSRKWR

SEQ ID NO: 22819 - protein, 30 aa, Artificial Sequence
  Quasi-synthetic sequence derived from human genome
RWKRWFKFRKRKGEKRPRPNHKAVARRAKL

SEQ ID NO: 22820 - protein, 30 aa, Artificial Sequence
  Quasi-synthetic sequence derived from human genome
WRRRKSLWLALSASWLLLVLLGGFSLLRLA

SEQ ID NO: 22821 - protein, 30 aa, Artificial Sequence
  Quasi-synthetic sequence derived from human genome
KFWARGRKPWKLAIQILKIAMVTIQLVLFG

SEQ ID NO: 22822 - protein, 30 aa, Artificial Sequence
  Quasi-synthetic sequence derived from human genome
LKHSLLSFKRRRAMETLKLYFLFSLQLLIK

SEQ ID NO: 22823 - protein, 30 aa, Artificial Sequence
  Quasi-synthetic sequence derived from human genome
RVRKLRSAGRCGKFHQVRRVMTILFLTMVI

SEQ ID NO: 22824 - protein, 30 aa, Artificial Sequence
  Quasi-synthetic sequence derived from human genome
KKRVRFTKRKQKVPGFPKRFTVKPVVLGFP

SEQ ID NO: 22825 - protein, 30 aa, Artificial Sequence
  Quasi-synthetic sequence derived from human genome
RKVLQLLRLRQIFNGTFVKLNKASINMLRI

SEQ ID NO: 22826 - protein, 30 aa, Artificial Sequence
  Quasi-synthetic sequence derived from human genome
ALYRRLATVHMSRMINKYKRRRFQKTKNLL

SEQ ID NO: 22827 - protein, 30 aa, Artificial Sequence
  Quasi-synthetic sequence derived from human genome
RIKIFFALAPVFSTKYLKSPLIRMTYKWKS

SEQ ID NO: 22828 - protein, 30 aa, Artificial Sequence
  Quasi-synthetic sequence derived from human genome
FLKRQKAPRSKLISVLKILYQIVPSHKLML

SEQ ID NO: 22829 - protein, 30 aa, Artificial Sequence
  Quasi-synthetic sequence derived from human genome
IRMWLCKRRHKPRIDGLVKVGTLKKRLDKF

SEQ ID NO: 22830 - protein, 30 aa, Artificial Sequence
  Quasi-synthetic sequence derived from human genome
LRLRVHGPFFPRILRRRKGKREFGKTITHI

SEQ ID NO: 22831 - protein, 30 aa, Artificial Sequence
  Quasi-synthetic sequence derived from human genome
LLSFGIITVIGLAVALVLYIRKKKRLEKLR

SEQ ID NO: 22832 - protein, 30 aa, Artificial Sequence
  Quasi-synthetic sequence derived from human genome
FLTCISVHRCLGVLRPLRSLRWGRARYARR

SEQ ID NO: 22833 - protein, 30 aa, Artificial Sequence
  Quasi-synthetic sequence derived from human genome
RIFRPWRLRCPALHLPSLSVFSLRWKLPSL

SEQ ID NO: 22834 - protein, 30 aa, Artificial Sequence
  Quasi-synthetic sequence derived from human genome
LMKRKIIVLMPWLLRLSVLVSLSFSFPLSR

SEQ ID NO: 22835 - protein, 30 aa, Artificial Sequence
  Quasi-synthetic sequence derived from human genome
RMRAFHLSLPGGAQLLTYLVKVLKRRTWRR

SEQ ID NO: 22836 - protein, 30 aa, Artificial Sequence
  Quasi-synthetic sequence derived from human genome
CGLVWVPIIKKKQKHRQKSNFLRSLKSFFL

SEQ ID NO: 22837 - protein, 30 aa, Artificial Sequence
  Quasi-synthetic sequence derived from human genome
FRCILLRWARLLGFATVYGTVTLKLHRVLK

SEQ ID NO: 22838 - protein, 30 aa, Artificial Sequence
  Quasi-synthetic sequence derived from human genome
RRLRLQQLATLIQKIYRGWRCRTHYQLMRK

SEQ ID NO: 22839 - protein, 30 aa, Artificial Sequence
  Quasi-synthetic sequence derived from human genome
RRKMPSLGWLRKCYQQIDRRLRKNLKSLII

SEQ ID NO: 22840 - protein, 30 aa, Artificial Sequence
  Quasi-synthetic sequence derived from human genome
VLWVLMCALAMWFPRRYLPKIFRNDRGRFK

SEQ ID NO: 22841 - protein, 30 aa, Artificial Sequence
  Quasi-synthetic sequence derived from human genome
RVFVEGWTHLVRLLRLIILIRIFHLLHQKR

SEQ ID NO: 22842 - protein, 30 aa, Artificial Sequence
  Quasi-synthetic sequence derived from human genome
LLYIFNITVTSLVHLLKTVRLLRLLRLLQK

SEQ ID NO: 22843 - protein, 30 aa, Artificial Sequence
  Quasi-synthetic sequence derived from human genome
LSMKKFAVRRFFSVYLRRKSRSKSSSLSRL

SEQ ID NO: 22844 - protein, 30 aa, Artificial Sequence
  Quasi-synthetic sequence derived from human genome
KVGLVLRVLRALRILYVMRLARHSLGLQTL

SEQ ID NO: 22845 - protein, 30 aa, Artificial Sequence
  Quasi-synthetic sequence derived from human genome
WKRYQPCWVLMVSVLLHHWKALKKVNMKLL

SEQ ID NO: 22846 - protein, 30 aa, Artificial Sequence
  Quasi-synthetic sequence derived from human genome
LILIKGSFRILKLIVRRRNAPVSRPHSWHV

SEQ ID NO: 22847 - protein, 30 aa, Artificial Sequence
  Quasi-synthetic sequence derived from human genome
EFRGVIIKQGCLLKQGHRRKNWKVRKFILR

SEQ ID NO: 22848 - protein, 30 aa, Artificial Sequence
  Quasi-synthetic sequence derived from human genome
LASLNQILDPWVYLLLRKILLRKFCQMRKR

SEQ ID NO: 22849 - protein, 30 aa, Artificial Sequence
  Quasi-synthetic sequence derived from human genome
WSKILLHYKFNNRTSVMLKDRWRTMKKLKL

SEQ ID NO: 22850 - protein, 30 aa, Artificial Sequence
  Quasi-synthetic sequence derived from human genome
KFIIGYLFPLLTMSICYLCLIFKVKKRSIL

SEQ ID NO: 22851 - protein, 30 aa, Artificial Sequence
  Quasi-synthetic sequence derived from human genome
LNIIIHQLCQEKPRVKKRKGKFRKSRLKLK

SEQ ID NO: 22852 - protein, 30 aa, Artificial Sequence
  Quasi-synthetic sequence derived from human genome
FCLLVMLFLLKLARHSKFGMKGFVLFHKIP

SEQ ID NO: 22853 - protein, 30 aa, Artificial Sequence
  Quasi-synthetic sequence derived from human genome
ALCNRTFRKTFKMLLLCRWKKKKVEEKLYW

SEQ ID NO: 22854 - protein, 30 aa, Artificial Sequence
  Quasi-synthetic sequence derived from human genome
CYGKIKASVLLIQAFVRGWKARKNYRKYFR

SEQ ID NO: 22855 - protein, 30 aa, Artificial Sequence
  Quasi-synthetic sequence derived from human genome
IIRIMRVLRIARVLKLLKMATGMRALLDTV

SEQ ID NO: 22856 - protein, 30 aa, Artificial Sequence
  Quasi-synthetic sequence derived from human genome
KVRRQLKVILCFSPVGSVLRVRARKFPAVV

SEQ ID NO: 22857 - protein, 30 aa, Artificial Sequence
  Quasi-synthetic sequence derived from human genome
KIALREIRMLKQLKHPNLVNLLEVFRRKRR

SEQ ID NO: 22858 - protein, 30 aa, Artificial Sequence
  Quasi-synthetic sequence derived from human genome
VFLPALCRKMGVPYCIIKGKARLGRLVHRK

SEQ ID NO: 22859 - protein, 30 aa, Artificial Sequence
  Quasi-synthetic sequence derived from human genome
KRKKRVHFHGFMLDVHKRIHRLKQSLPKRK

SEQ ID NO: 22860 - protein, 30 aa, Artificial Sequence
  Quasi-synthetic sequence derived from human genome
FIFLIIKSYRKYRRERLPISPGPLLRWVPL

SEQ ID NO: 22861 - protein, 30 aa, Artificial Sequence
  Quasi-synthetic sequence derived from human genome
KKPRTFIIKLIKWLMIAIPATFVNSAIRYL

SEQ ID NO: 22862 - protein, 30 aa, Artificial Sequence
  Quasi-synthetic sequence derived from human genome
VVIALVGLIFILLLVFVLIIRGQSKKYAKK

SEQ ID NO: 22863 - protein, 30 aa, Artificial Sequence
  Quasi-synthetic sequence derived from human genome
RIQGFRKTLLLWQVRLKSNRPSYYMFPRFL

SEQ ID NO: 22864 - protein, 30 aa, Artificial Sequence
  Quasi-synthetic sequence derived from human genome
RRLLILILKIGRRWTELIRTMESRVLLRTF

SEQ ID NO: 22865 - protein, 30 aa, Artificial Sequence
  Quasi-synthetic sequence derived from human genome
RKKFMITPKLIRMVTVMQAHVRGWLERKRL

SEQ ID NO: 22866 - protein, 30 aa, Artificial Sequence
  Quasi-synthetic sequence derived from human genome
LPPVLNPIVYSVRTKQIRLGILHKFVLRRR

SEQ ID NO: 22867 - protein, 30 aa, Artificial Sequence
  Quasi-synthetic sequence derived from human genome
RYLRVKIPLRYKMVVTPRRAAVAIAGCWIL

SEQ ID NO: 22868 - protein, 30 aa, Artificial Sequence
  Quasi-synthetic sequence derived from human genome
RNWLYFVPLLLLVPLLLCCVWRLCRKQTVK

SEQ ID NO: 22869 - protein, 30 aa, Artificial Sequence
  Quasi-synthetic sequence derived from human genome
LWTGRRTAILPWGSWLRVLGRLVKLSLKQK

SEQ ID NO: 22870 - protein, 30 aa, Artificial Sequence
  Quasi-synthetic sequence derived from human genome
GKKQRLSKKLRRKLQMWLWSQTFCPVLYAW

SEQ ID NO: 22871 - protein, 30 aa, Artificial Sequence
  Quasi-synthetic sequence derived from human genome
KPQNMKHSGYLWAIGKNVWKRWKKRFFVLV

SEQ ID NO: 22872 - protein, 30 aa, Artificial Sequence
  Quasi-synthetic sequence derived from human genome
RIPLLRKHRFQLYRSMNSRARKNRSQIVLF

SEQ ID NO: 22873 - protein, 30 aa, Artificial Sequence
  Quasi-synthetic sequence derived from human genome
RYVKIKRNWRKPRGIDNRVRRRFKGQILMP

SEQ ID NO: 22874 - protein, 30 aa, Artificial Sequence
  Quasi-synthetic sequence derived from human genome
LLLLVRCSVQRIETRPRSKKRKKIRRQFPV

SEQ ID NO: 22875 - protein, 30 aa, Artificial Sequence
  Quasi-synthetic sequence derived from human genome
LFIVLILVGYISVKVMLKSIKTRLGRRVPA

SEQ ID NO: 22876 - protein, 30 aa, Artificial Sequence
  Quasi-synthetic sequence derived from human genome
HMILVLRTALNLFFKLKNFKTAATFARRLL

SEQ ID NO: 22877 - protein, 30 aa, Artificial Sequence
  Quasi-synthetic sequence derived from human genome
LIISSILGSVWLAYKTPKLLRTARGRRIKK

SEQ ID NO: 22878 - protein, 30 aa, Artificial Sequence
  Quasi-synthetic sequence derived from human genome
KVKFDIRYIVLLRSVRPLRLFVYDVFWLRF

SEQ ID NO: 22879 - protein, 30 aa, Artificial Sequence
  Quasi-synthetic sequence derived from human genome
TGWLVKSPPERKLQRYAWRKRWFVLRRGRM

SEQ ID NO: 22880 - protein, 30 aa, Artificial Sequence
  Quasi-synthetic sequence derived from human genome
LARQRGVGQQAMSLAILRVIRLVRVFRIFK

SEQ ID NO: 22881 - protein, 30 aa, Artificial Sequence
  Quasi-synthetic sequence derived from human genome
FVLFLRLRSIRCLRNIIHWNLISAFILRNA

SEQ ID NO: 22882 - protein, 30 aa, Artificial Sequence
  Quasi-synthetic sequence derived from human genome
AFSRRRCEALKLMVQAWPFRRLPLRPLIKM

SEQ ID NO: 22883 - protein, 30 aa, Artificial Sequence
  Quasi-synthetic sequence derived from human genome
LKSFLQERLGIHLIRRKIVKPKHHVLMSRK

SEQ ID NO: 22884 - protein, 30 aa, Artificial Sequence
  Quasi-synthetic sequence derived from human genome
LRKRDKLWGVCVSILALLPRVLRLMLQSLR

SEQ ID NO: 22885 - protein, 30 aa, Artificial Sequence
  Quasi-synthetic sequence derived from human genome
FFHKKERRMRFYIRRMVKTQAFYWTVLSLV

SEQ ID NO: 22886 - protein, 30 aa, Artificial Sequence
  Quasi-synthetic sequence derived from human genome
RFRKLHCTRNFIHMNLFVSFMLRAISVFIK

SEQ ID NO: 22887 - protein, 30 aa, Artificial Sequence
  Quasi-synthetic sequence derived from human genome
RNLTLKGLWRRAVANAKSIGHLIFARLLRL

SEQ ID NO: 22888 - protein, 30 aa, Artificial Sequence
  Quasi-synthetic sequence derived from human genome
RCAADAGMKRALGRRKGVWLRLRKILFCVL

SEQ ID NO: 22889 - protein, 30 aa, Artificial Sequence
  Quasi-synthetic sequence derived from human genome
NLYNAMAVRIQRRWRGYRVRKYLFNYYYLK

SEQ ID NO: 22890 - protein, 30 aa, Artificial Sequence
  Quasi-synthetic sequence derived from human genome
LCHRFHGLWYMKMMWAWLQAKRKPRKAPSR

SEQ ID NO: 22891 - protein, 30 aa, Artificial Sequence
  Quasi-synthetic sequence derived from human genome
AFWARRASRTRLAAWARRALLSLRSPKARR

SEQ ID NO: 22892 - protein, 30 aa, Artificial Sequence
  Quasi-synthetic sequence derived from human genome
RFTLPRFLQRRSSRRKVCTKTFLGPRIIGL

SEQ ID NO: 22893 - protein, 30 aa, Artificial Sequence
  Quasi-synthetic sequence derived from human genome
LKLYRVLQLFLSRTAQRSALLSSGRLLRRL

SEQ ID NO: 22894 - protein, 30 aa, Artificial Sequence
  Quasi-synthetic sequence derived from human genome
LKNLRKQYRNVKKMTAKELVKVLFSFFWML

SEQ ID NO: 22895 - protein, 30 aa, Artificial Sequence
  Quasi-synthetic sequence derived from human genome
RLKKVLIVGAPIWFRVPYSIISLLLKDKVR

SEQ ID NO: 22896 - protein, 30 aa, Artificial Sequence
  Quasi-synthetic sequence derived from human genome
KLSRSARAGVIFPVGRLMRYLKKGTFKYRI

SEQ ID NO: 22897 - protein, 30 aa, Artificial Sequence
  Quasi-synthetic sequence derived from human genome
TKKAVKYQSKARRKKIMIIICCVILGIVIA

SEQ ID NO: 22898 - protein, 30 aa, Artificial Sequence
  Quasi-synthetic sequence derived from human genome
RKLIGAQKKKKLLKPGPLKRKDTKRLVLHM

SEQ ID NO: 22899 - protein, 30 aa, Artificial Sequence
  Quasi-synthetic sequence derived from human genome
LLGLRTFVAFAAKLWSFFIYLLRRQIRTVI

SEQ ID NO: 22900 - protein, 30 aa, Artificial Sequence
  Quasi-synthetic sequence derived from human genome
AKKLFVVTAVSAISVIFLAHHFKRKRGKKK

SEQ ID NO: 22901 - protein, 30 aa, Artificial Sequence
  Quasi-synthetic sequence derived from human genome
KLKNILLRIQQIIYCHKLTIILTKWRNTAR

SEQ ID NO: 22902 - protein, 30 aa, Artificial Sequence
  Quasi-synthetic sequence derived from human genome
FCLAWCTFFLIPSIIFAVKTSKYFRPIRKR

SEQ ID NO: 22903 - protein, 30 aa, Artificial Sequence
  Quasi-synthetic sequence derived from human genome
KILIHRILTLFPNAIARKLLLMLTFILIFW

SEQ ID NO: 22904 - protein, 30 aa, Artificial Sequence
  Quasi-synthetic sequence derived from human genome
MKLFRSQRNLYISGFSLFFWLVLRRLVTLI

SEQ ID NO: 22905 - protein, 30 aa, Artificial Sequence
  Quasi-synthetic sequence derived from human genome
LRLMRIFRILKLARHSVGLRSLGATLRHSY

SEQ ID NO: 22906 - protein, 30 aa, Artificial Sequence
  Quasi-synthetic sequence derived from human genome
YRTIWFKSYRTIFSCLNRIKSFRYPWARLY

SEQ ID NO: 22907 - protein, 30 aa, Artificial Sequence
  Quasi-synthetic sequence derived from human genome
LWVLGLLVGLLLLLLGLGACYTWRRRRVCK

SEQ ID NO: 22908 - protein, 30 aa, Artificial Sequence
  Quasi-synthetic sequence derived from human genome
KVIYKALKRYEGPLWKSSRFFGWRLFWVVL

SEQ ID NO: 22909 - protein, 30 aa, Artificial Sequence
  Quasi-synthetic sequence derived from human genome
VKKHVGLLRIKGRKMNMHKIPLHTVRQFFM

SEQ ID NO: 22910 - protein, 30 aa, Artificial Sequence
  Quasi-synthetic sequence derived from human genome
FLILYFSHCMIKVFLSSLKFHIRRFIFLFF

SEQ ID NO: 22911 - protein, 30 aa, Artificial Sequence
  Quasi-synthetic sequence derived from human genome
CWGVYQAVRWLRWKASLIKLRALRRPGGVL

SEQ ID NO: 22912 - protein, 30 aa, Artificial Sequence
  Quasi-synthetic sequence derived from human genome
QILVRALNPLDYMKWRRKSAYWKALKVFKL

SEQ ID NO: 22913 - protein, 30 aa, Artificial Sequence
  Quasi-synthetic sequence derived from human genome
KFKHLKKLLLAHGHLYYVRIAHLVQYFFYK

SEQ ID NO: 22914 - protein, 30 aa, Artificial Sequence
  Quasi-synthetic sequence derived from human genome
YRLYTVVPRLVKFVDILTNWYVRMNRRRLK

SEQ ID NO: 22915 - protein, 30 aa, Artificial Sequence
  Quasi-synthetic sequence derived from human genome
LWLRAKFQRLLFKLGCYIQKNCGKFLVVGL

SEQ ID NO: 22916 - protein, 30 aa, Artificial Sequence
  Quasi-synthetic sequence derived from human genome
RARRIPKLVQRINSIYNAKRGKKRLKKLSM

SEQ ID NO: 22917 - protein, 30 aa, Artificial Sequence
  Quasi-synthetic sequence derived from human genome
LAAATIILYFIPLRYIILIWGINKFTKKLR

SEQ ID NO: 22918 - protein, 30 aa, Artificial Sequence
  Quasi-synthetic sequence derived from human genome
FVFKLLLHRPFFRCAILMFQREFALRLVAK

SEQ ID NO: 22919 - protein, 30 aa, Artificial Sequence
  Quasi-synthetic sequence derived from human genome
LCVCLVIVLWGIRLLLQRKKKLVSTSKNGK

SEQ ID NO: 22920 - protein, 30 aa, Artificial Sequence
  Quasi-synthetic sequence derived from human genome
RRCSQLLAKIYKMPLKPIFLSGRLAGLPRR

SEQ ID NO: 22921 - protein, 30 aa, Artificial Sequence
  Quasi-synthetic sequence derived from human genome
KLIIYLFSQNNRIRFSKLLLKILFYISIFS

SEQ ID NO: 22922 - protein, 30 aa, Artificial Sequence
  Quasi-synthetic sequence derived from human genome
PQLRALLVVVNALLRKRRYHAALAVLKGFR

SEQ ID NO: 22923 - protein, 30 aa, Artificial Sequence
  Quasi-synthetic sequence derived from human genome
RNVKFPLPIYKSKKGWTAYKLQLFKMFPII

SEQ ID NO: 22924 - protein, 30 aa, Artificial Sequence
  Quasi-synthetic sequence derived from human genome
RRQRRLVRSQVLKYMVPGARVIRGLDWKWR

SEQ ID NO: 22925 - protein, 30 aa, Artificial Sequence
  Quasi-synthetic sequence derived from human genome
LVPVMKKLVPVRRRAWGQLCLPPQRLRVTR

SEQ ID NO: 22926 - protein, 30 aa, Artificial Sequence
  Quasi-synthetic sequence derived from human genome
RRTLLHAALRAWIIQCWWRMTLSRVLEKKR

SEQ ID NO: 22927 - protein, 30 aa, Artificial Sequence
  Quasi-synthetic sequence derived from human genome
RIRRQLKVTLCFSPVGNKLRVRSRKFPAIV

SEQ ID NO: 22928 - protein, 30 aa, Artificial Sequence
  Quasi-synthetic sequence derived from human genome
RRLHRASTPGPAWGWLLRRRRWAALLVLGL

SEQ ID NO: 22929 - protein, 30 aa, Artificial Sequence
  Quasi-synthetic sequence derived from human genome
VVVFLFLILIRRALSASQKKKVIIAALRTP

SEQ ID NO: 22930 - protein, 30 aa, Artificial Sequence
  Quasi-synthetic sequence derived from human genome
WLRSPVQNFCYIFWKRYRFKLIAFMVISII

SEQ ID NO: 22931 - protein, 30 aa, Artificial Sequence
  Quasi-synthetic sequence derived from human genome
KKRKRAIKLIVTVLAMYLICFTPSNLLLVV

SEQ ID NO: 22932 - protein, 30 aa, Artificial Sequence
  Quasi-synthetic sequence derived from human genome
RYLRVKLTVRFRIPGLPGCILSFQLKVCFL

SEQ ID NO: 22933 - protein, 30 aa, Artificial Sequence
  Quasi-synthetic sequence derived from human genome
ALKHTIKLLTVIKWHGPKCNKLNSKFWKRL

SEQ ID NO: 22934 - protein, 30 aa, Artificial Sequence
  Quasi-synthetic sequence derived from human genome
RLQRGDRSRLLLLLCIFLGTLRGFRARQIR

SEQ ID NO: 22935 - protein, 30 aa, Artificial Sequence
  Quasi-synthetic sequence derived from human genome
RMIIAVTSYKRYLWATVTIQRHWRAYLRRK

SEQ ID NO: 22936 - protein, 30 aa, Artificial Sequence
  Quasi-synthetic sequence derived from human genome
SFDKGTMRRMALSMIERRKRWRTIKLLLRR

SEQ ID NO: 22937 - protein, 30 aa, Artificial Sequence
  Quasi-synthetic sequence derived from human genome
ARRKHAVAVIWAYWLGLKVRREYRKFFRAN

SEQ ID NO: 22938 - protein, 30 aa, Artificial Sequence
  Quasi-synthetic sequence derived from human genome
VPETLKKKRRNFAELKIKRLRKKFAQKMLR

SEQ ID NO: 22939 - protein, 30 aa, Artificial Sequence
  Quasi-synthetic sequence derived from human genome
WWWARAARLARLRFRRSLLPPQRPRSGGAR

SEQ ID NO: 22940 - protein, 30 aa, Artificial Sequence
  Quasi-synthetic sequence derived from human genome
LWITQWLFLRYKSIVGRRFCFIIGTLYLYR

SEQ ID NO: 22941 - protein, 30 aa, Artificial Sequence
  Quasi-synthetic sequence derived from human genome
HKLFAPVRISITLVSVPLIVRYFRKVGFFK

SEQ ID NO: 22942 - protein, 30 aa, Artificial Sequence
  Quasi-synthetic sequence derived from human genome
RLRAIYTIMRWFRRHKVRAHLAELQRRFQA

SEQ ID NO: 22943 - protein, 30 aa, Artificial Sequence
  Quasi-synthetic sequence derived from human genome
RLRTKMPWKTCWRYLTSGGFFLLILMIFSK

SEQ ID NO: 22944 - protein, 30 aa, Artificial Sequence
  Quasi-synthetic sequence derived from human genome
RWLPSLVLARLVFVPLLLLCNIKPRRYLTV

SEQ ID NO: 22945 - protein, 30 aa, Artificial Sequence
  Quasi-synthetic sequence derived from human genome
IRSRLRKVPRFKTMFSNLIHYPRYSLYWSK

SEQ ID NO: 22946 - protein, 30 aa, Artificial Sequence
  Quasi-synthetic sequence derived from human genome
RAYLVRKAFRHRLWAVLTVQAYARGMIARR

SEQ ID NO: 22947 - protein, 30 aa, Artificial Sequence
  Quasi-synthetic sequence derived from human genome
GRSRRQGSRFLWLLKILVIILVLGIVGFMF

SEQ ID NO: 22948 - protein, 30 aa, Artificial Sequence
  Quasi-synthetic sequence derived from human genome
RKAQLAILGMTSLKERLLAIRRILVIITRK

SEQ ID NO: 22949 - protein, 30 aa, Artificial Sequence
  Quasi-synthetic sequence derived from human genome
LRSQLIVLLKHKVFVERSNLGLVQRRLRLK

SEQ ID NO: 22950 - protein, 30 aa, Artificial Sequence
  Quasi-synthetic sequence derived from human genome
IVKQGYVKMKSRKLGIYRRCWLVFRKSSSK

SEQ ID NO: 22951 - protein, 30 aa, Artificial Sequence
  Quasi-synthetic sequence derived from human genome
SIQAVVAILLCILTITVITLLIFLRRRLRK

SEQ ID NO: 22952 - protein, 30 aa, Artificial Sequence
  Quasi-synthetic sequence derived from human genome
IRKLQKSTHLLIRKLPFSRLAREICVKFTR

SEQ ID NO: 22953 - protein, 30 aa, Artificial Sequence
  Quasi-synthetic sequence derived from human genome
RRDLLHLCCKKLKILGMPFRNIRSILKMVN

SEQ ID NO: 22954 - protein, 30 aa, Artificial Sequence
  Quasi-synthetic sequence derived from human genome
RLLCSRLCQQLRSKRKFFGTVPISRLHRRV

SEQ ID NO: 22955 - protein, 30 aa, Artificial Sequence
  Quasi-synthetic sequence derived from human genome
RGCQVRAYIRHLNRIVTIIQKWWRSFLGRK

SEQ ID NO: 22956 - protein, 30 aa, Artificial Sequence
  Quasi-synthetic sequence derived from human genome
KLLRRAWRRRAALGLGTLALCGAALLYLAR

SEQ ID NO: 22957 - protein, 30 aa, Artificial Sequence
  Quasi-synthetic sequence derived from human genome
KPRVSKSWRKIKNMVHWSPFVMSFKKKYPW

SEQ ID NO: 22958 - protein, 30 aa, Artificial Sequence
  Quasi-synthetic sequence derived from human genome
IIFFAFVLLLSGALAYCLALQLYVRRRKKL

SEQ ID NO: 22959 - protein, 30 aa, Artificial Sequence
  Quasi-synthetic sequence derived from human genome
TLIMFTIFSFFAEQLIALKRKIFPRRRIHK

SEQ ID NO: 22960 - protein, 30 aa, Artificial Sequence
  Quasi-synthetic sequence derived from human genome
ASLVFFIYMISFIFRKRRKNSGLWSFYFFF

SEQ ID NO: 22961 - protein, 30 aa, Artificial Sequence
  Quasi-synthetic sequence derived from human genome
ALSKHTKKKKLIAAVVLGILFINTLRCVLR

SEQ ID NO: 22962 - protein, 30 aa, Artificial Sequence
  Quasi-synthetic sequence derived from human genome
LLLLIVSVLACNFSVILNLIRMHRRSRRSR

SEQ ID NO: 22963 - protein, 30 aa, Artificial Sequence
  Quasi-synthetic sequence derived from human genome
CRPFLAFCRRHVRAARPVPWNALLRRRARG

SEQ ID NO: 22964 - protein, 30 aa, Artificial Sequence
  Quasi-synthetic sequence derived from human genome
IIFGVIFCIIIVAIALLILSGIWQRRRKNK

SEQ ID NO: 22965 - protein, 30 aa, Artificial Sequence
  Quasi-synthetic sequence derived from human genome
RLKWAVLVLVLVQMLACWLVRGLAWRWLLF

SEQ ID NO: 22966 - protein, 30 aa, Artificial Sequence
  Quasi-synthetic sequence derived from human genome
RYFRYILKQDHQILGKKIKRMKRSVKKYSI

SEQ ID NO: 22967 - protein, 30 aa, Artificial Sequence
  Quasi-synthetic sequence derived from human genome
IFCKKCILRWLARQKTCPCCRKEVKRKKVV

SEQ ID NO: 22968 - protein, 30 aa, Artificial Sequence
  Quasi-synthetic sequence derived from human genome
LKRRVKSVILVMLLGPLLFLACQLFVINMK

SEQ ID NO: 22969 - protein, 30 aa, Artificial Sequence
  Quasi-synthetic sequence derived from human genome
RLQRVKFCLLGALLAPIRVLLAFIVLFLLW

SEQ ID NO: 22970 - protein, 30 aa, Artificial Sequence
  Quasi-synthetic sequence derived from human genome
IFYFLYGKTRSRIPLVRNRRFQLCRCMNPR

SEQ ID NO: 22971 - protein, 30 aa, Artificial Sequence
  Quasi-synthetic sequence derived from human genome
IKRHFKSRLVGTVLNGYLCLRKLVVQRTKL

SEQ ID NO: 22972 - protein, 30 aa, Artificial Sequence
  Quasi-synthetic sequence derived from human genome
AGVIGGLFILVIVGLTFAVYVRRKSIKKKR

SEQ ID NO: 22973 - protein, 30 aa, Artificial Sequence
  Quasi-synthetic sequence derived from human genome
RRSRWPFSKARSFCKTHASLFKKILLGLLC

SEQ ID NO: 22974 - protein, 30 aa, Artificial Sequence
  Quasi-synthetic sequence derived from human genome
FNKHKIKLGGSNIFITVKQRKQYRRLKKLM

SEQ ID NO: 22975 - protein, 30 aa, Artificial Sequence
  Quasi-synthetic sequence derived from human genome
RFFLLENVRNFVSFKRSMVLKLTLRCLVRM

SEQ ID NO: 22976 - protein, 30 aa, Artificial Sequence
  Quasi-synthetic sequence derived from human genome
LFFYNCYKGYLPRQCLKFRSALLIGKKKPK

SEQ ID NO: 22977 - protein, 30 aa, Artificial Sequence
  Quasi-synthetic sequence derived from human genome
KVRRVFVRKVYTILLIQLLVTLAVVALFTF

SEQ ID NO: 22978 - protein, 30 aa, Artificial Sequence
  Quasi-synthetic sequence derived from human genome
FYCIKVSSFTHHIFLWLRWRILRLFPWILL

SEQ ID NO: 22979 - protein, 30 aa, Artificial Sequence
  Quasi-synthetic sequence derived from human genome
LFICPFVLLLLLLISLLCLYWKARKLSTLR

SEQ ID NO: 22980 - protein, 30 aa, Artificial Sequence
  Quasi-synthetic sequence derived from human genome
WFNSFVNPLLYPLCHKRFQKAFLKIFCIKK

SEQ ID NO: 22981 - protein, 30 aa, Artificial Sequence
  Quasi-synthetic sequence derived from human genome
RVRFLNLKKTIIKFQAHVRKHQQRQKYKKM

SEQ ID NO: 22982 - protein, 30 aa, Artificial Sequence
  Quasi-synthetic sequence derived from human genome
RKILRLITIRKLFTAIGVLFPSVILVSLPW

SEQ ID NO: 22983 - protein, 30 aa, Artificial Sequence
  Quasi-synthetic sequence derived from human genome
LLRRRLFSYPTKYYFMVLVLSLITFSVLRI

SEQ ID NO: 22984 - protein, 30 aa, Artificial Sequence
  Quasi-synthetic sequence derived from human genome
LLFMMTVFFAKKLYLLKTENTKLRRTNKFR

SEQ ID NO: 22985 - protein, 30 aa, Artificial Sequence
  Quasi-synthetic sequence derived from human genome
RKLHFVVGGFAYLLPKTAVVLRCPARRVRK

SEQ ID NO: 22986 - protein, 30 aa, Artificial Sequence
  Quasi-synthetic sequence derived from human genome
RIRSNSSAANLMAKKRVIRMLIVIVVLFFL

SEQ ID NO: 22987 - protein, 30 aa, Artificial Sequence
  Quasi-synthetic sequence derived from human genome
FNLVPSPKSFYYLIMRIKMCLIKLCKSKAK

SEQ ID NO: 22988 - protein, 30 aa, Artificial Sequence
  Quasi-synthetic sequence derived from human genome
MLGSLVLRRKALAPRLLLRLLRSPTLRGHG

SEQ ID NO: 22989 - protein, 30 aa, Artificial Sequence
  Quasi-synthetic sequence derived from human genome
KFPLPIYKSKKGWTAYKLQLFKMFPIILAI

SEQ ID NO: 22990 - protein, 30 aa, Artificial Sequence
  Quasi-synthetic sequence derived from human genome
LSAAGLSLLTLAPFLLWLRKCLRKAKKFVP

SEQ ID NO: 22991 - protein, 30 aa, Artificial Sequence
  Quasi-synthetic sequence derived from human genome
FSIFSMFCLIGLATWQVFYLRRFFKAKKLI

SEQ ID NO: 22992 - protein, 30 aa, Artificial Sequence
  Quasi-synthetic sequence derived from human genome
MVSKALLRLVSAVNRRRMKLLLGIALLAYV

SEQ ID NO: 22993 - protein, 30 aa, Artificial Sequence
  Quasi-synthetic sequence derived from human genome
KRRRHRATRKIGIAIATFLICFAPYVMTRL

SEQ ID NO: 22994 - protein, 30 aa, Artificial Sequence
  Quasi-synthetic sequence derived from human genome
IGKRKGTANARMPEKVTWMRRMRILRRLLR

SEQ ID NO: 22995 - protein, 30 aa, Artificial Sequence
  Quasi-synthetic sequence derived from human genome
RCASVIFPAWYWRRRPKRLSAVVCALLWVL

SEQ ID NO: 22996 - protein, 30 aa, Artificial Sequence
  Quasi-synthetic sequence derived from human genome
LFRKQPFLWRAALLYYTIHRAARMSFRQLF

SEQ ID NO: 22997 - protein, 30 aa, Artificial Sequence
  Quasi-synthetic sequence derived from human genome
MILKPVQKLFAIIVGRGIRKWWQALPPNKK

SEQ ID NO: 22998 - protein, 30 aa, Artificial Sequence
  Quasi-synthetic sequence derived from human genome
FKLGLAKSIHHARVLIRQRHIRVRKQVVNI

SEQ ID NO: 22999 - protein, 30 aa, Artificial Sequence
  Quasi-synthetic sequence derived from human genome
KIALREIRMLKQLKHPNLVNLIEVFRRKRK

SEQ ID NO: 23000 - protein, 30 aa, Artificial Sequence
  Quasi-synthetic sequence derived from human genome
RLAYIAHPKLGKRARARIAKGLRLCRPKAK

SEQ ID NO: 23001 - protein, 31 aa, Artificial Sequence
  Quasi-synthetic sequence derived from human genome
RIFKRKKRIKRRALLFLSYILTHFIFLALLL

SEQ ID NO: 23002 - protein, 31 aa, Artificial Sequence
  Quasi-synthetic sequence derived from human genome
KRKKKKKFCYLCILLLIVLFILLCCLYRLCK

SEQ ID NO: 23003 - protein, 31 aa, Artificial Sequence
  Quasi-synthetic sequence derived from human genome
LLRLLRLIILLRIFHLFHQKRQLEKLIRRRV

SEQ ID NO: 23004 - protein, 31 aa, Artificial Sequence
  Quasi-synthetic sequence derived from human genome
KRFLKHAGKWSLRWFLSPRWILQFRRWARKW

SEQ ID NO: 23005 - protein, 31 aa, Artificial Sequence
  Quasi-synthetic sequence derived from human genome
LKRLVKLHIKRHYHKKFWKLGAVIFFFIIVL

SEQ ID NO: 23006 - protein, 31 aa, Artificial Sequence
  Quasi-synthetic sequence derived from human genome
LFLLFFLTLRFSVVKRGRKKLLYIFKQPFMR

SEQ ID NO: 23007 - protein, 31 aa, Artificial Sequence
  Quasi-synthetic sequence derived from human genome
RRKSWRLEFLFLRRRCFLLTFYLWFLFFSRF

SEQ ID NO: 23008 - protein, 31 aa, Artificial Sequence
  Quasi-synthetic sequence derived from human genome
LSVLRTFRLLRVLKLVRFLPALRRQLVVLVK

SEQ ID NO: 23009 - protein, 31 aa, Artificial Sequence
  Quasi-synthetic sequence derived from human genome
ALLLLLVVALGIGLFMRRRHIVRKRTLRRLL

SEQ ID NO: 23010 - protein, 31 aa, Artificial Sequence
  Quasi-synthetic sequence derived from human genome
RKLTHLRKRIHRPRRRTTRRWKRWFKFRKRK

SEQ ID NO: 23011 - protein, 31 aa, Artificial Sequence
  Quasi-synthetic sequence derived from human genome
KTARALRIVRFTKILSLLRLLRLSRLIRYIH

SEQ ID NO: 23012 - protein, 31 aa, Artificial Sequence
  Quasi-synthetic sequence derived from human genome
LLLQKAWRGTLARWRCRRLRAIYTIMRWFRR

SEQ ID NO: 23013 - protein, 31 aa, Artificial Sequence
  Quasi-synthetic sequence derived from human genome
LSVLRTFRLLRVLKLVRFMPALRRQLVVLMK

SEQ ID NO: 23014 - protein, 31 aa, Artificial Sequence
  Quasi-synthetic sequence derived from human genome
IFLLLVILAMGLWVIRVQKRHKMPRMKKLMR

SEQ ID NO: 23015 - protein, 31 aa, Artificial Sequence
  Quasi-synthetic sequence derived from human genome
MVVVMKFFRWVRRAWQRIISWVFFWRQKIKP

SEQ ID NO: 23016 - protein, 31 aa, Artificial Sequence
  Quasi-synthetic sequence derived from human genome
LFRIVRLARIGRILRLVRAARGIRTLLFALM

SEQ ID NO: 23017 - protein, 31 aa, Artificial Sequence
  Quasi-synthetic sequence derived from human genome
KLLKRLRLLPALLILRAFKPHRKIRDYRVVV

SEQ ID NO: 23018 - protein, 31 aa, Artificial Sequence
  Quasi-synthetic sequence derived from human genome
LFRVIRLARIGRILRLIRGAKGIRTLLFALM

SEQ ID NO: 23019 - protein, 31 aa, Artificial Sequence
  Quasi-synthetic sequence derived from human genome
RKITSRPFTRFRTAVRVVIAILRLRFLVKKW

SEQ ID NO: 23020 - protein, 31 aa, Artificial Sequence
  Quasi-synthetic sequence derived from human genome
RFLKIIRPLRNIFLKKPVFAKTVSIFIWFFL

SEQ ID NO: 23021 - protein, 31 aa, Artificial Sequence
  Quasi-synthetic sequence derived from human genome
LFRLLLRFLRLCRSFYITCRRLRCFPQPPRR

SEQ ID NO: 23022 - protein, 31 aa, Artificial Sequence
  Quasi-synthetic sequence derived from human genome
FRVIRLARIGRILRLIRAAKGIRTLLFALMM

SEQ ID NO: 23023 - protein, 31 aa, Artificial Sequence
  Quasi-synthetic sequence derived from human genome
FLRVVRFVRILRIFKLTRHFVGLRVLGHTLR

SEQ ID NO: 23024 - protein, 31 aa, Artificial Sequence
  Quasi-synthetic sequence derived from human genome
LLRNIPRWTHLVRLLRLIILIRIFHLLHQKR

SEQ ID NO: 23025 - protein, 31 aa, Artificial Sequence
  Quasi-synthetic sequence derived from human genome
FFRRKLIDAVGFSPLRILRKRNKALRKIRKL

SEQ ID NO: 23026 - protein, 31 aa, Artificial Sequence
  Quasi-synthetic sequence derived from human genome
ILAMGLWVIRVQKRHKMPRMKKLMRNRMKLR

SEQ ID NO: 23027 - protein, 31 aa, Artificial Sequence
  Quasi-synthetic sequence derived from human genome
RRRGFGLFFFLRLHRLLLLFLVLRGTLANKL

SEQ ID NO: 23028 - protein, 31 aa, Artificial Sequence
  Quasi-synthetic sequence derived from human genome
LLKRLLGPKLRRFLKPQGHPRLLLWFKRGLA

SEQ ID NO: 23029 - protein, 31 aa, Artificial Sequence
  Quasi-synthetic sequence derived from human genome
RKQYRKVLYCVVIIQKNYRAFLLRRRFLHLK

SEQ ID NO: 23030 - protein, 31 aa, Artificial Sequence
  Quasi-synthetic sequence derived from human genome
LVRLLRLIILIRIFHLLHQKRQLEKLMRRLV

SEQ ID NO: 23031 - protein, 31 aa, Artificial Sequence
  Quasi-synthetic sequence derived from human genome
MRRLTRRLVLPVFGVLWITVLLFFWVTKRKL

SEQ ID NO: 23032 - protein, 31 aa, Artificial Sequence
  Quasi-synthetic sequence derived from human genome
RRKMSKKLPPVIIKYIIINRFRGRKNMLVKL

SEQ ID NO: 23033 - protein, 31 aa, Artificial Sequence
  Quasi-synthetic sequence derived from human genome
LGRRKGVWLRLRKILFCVLGLYIAIPFLIKL

SEQ ID NO: 23034 - protein, 31 aa, Artificial Sequence
  Quasi-synthetic sequence derived from human genome
MKHFLRMLIQVCLYFYCKFLWRCLKFVMRKL

SEQ ID NO: 23035 - protein, 31 aa, Artificial Sequence
  Quasi-synthetic sequence derived from human genome
LVTLLIWVPVKVILHKKRYIYRKIKGWRPVL

SEQ ID NO: 23036 - protein, 31 aa, Artificial Sequence
  Quasi-synthetic sequence derived from human genome
KKARRHLKMMHIAATLIQRRFRTLMMRRRFL

SEQ ID NO: 23037 - protein, 31 aa, Artificial Sequence
  Quasi-synthetic sequence derived from human genome
RRFRTLMMRRRFLSLKKTAILIQRKYRAHLC

SEQ ID NO: 23038 - protein, 31 aa, Artificial Sequence
  Quasi-synthetic sequence derived from human genome
VTGRIRASLVLILKTIRRRLPFSKWRLAFRF

SEQ ID NO: 23039 - protein, 31 aa, Artificial Sequence
  Quasi-synthetic sequence derived from human genome
RLCLRLLLLLGYRRRCPPLLRGLVQRWRYGK

SEQ ID NO: 23040 - protein, 31 aa, Artificial Sequence
  Quasi-synthetic sequence derived from human genome
RRWRRWNRFNRRRCRAAVKSVTFYWLVIVLV

SEQ ID NO: 23041 - protein, 31 aa, Artificial Sequence
  Quasi-synthetic sequence derived from human genome
FLRLHCGLWVRRKAGYKKKLWKKTPARKKRL

SEQ ID NO: 23042 - protein, 31 aa, Artificial Sequence
  Quasi-synthetic sequence derived from human genome
TRAAGVFYPWRFRLLCLLRRWLPRPRAWFIR

SEQ ID NO: 23043 - protein, 31 aa, Artificial Sequence
  Quasi-synthetic sequence derived from human genome
RIWVFRLKRRKRIARRLVDTLRNCFMFGCFL

SEQ ID NO: 23044 - protein, 31 aa, Artificial Sequence
  Quasi-synthetic sequence derived from human genome
WRRWNRFCRRKCRAAVKSNVFYWLVIFLVFL

SEQ ID NO: 23045 - protein, 31 aa, Artificial Sequence
  Quasi-synthetic sequence derived from human genome
LTLQRCLRGFFIKRRFRSLRHKIILLQSRAR

SEQ ID NO: 23046 - protein, 31 aa, Artificial Sequence
  Quasi-synthetic sequence derived from human genome
KAKRCNRRLKSQILLKKYLMKRRWKKNFIAV

SEQ ID NO: 23047 - protein, 31 aa, Artificial Sequence
  Quasi-synthetic sequence derived from human genome
FRVIRLARIGRVLRLIRGAKGIRTLLFALMM

SEQ ID NO: 23048 - protein, 31 aa, Artificial Sequence
  Quasi-synthetic sequence derived from human genome
LCLRLLLFFRFKRTLDRICVLFLLGWHRKPR

SEQ ID NO: 23049 - protein, 31 aa, Artificial Sequence
  Quasi-synthetic sequence derived from human genome
FMIAVFLPIVVLIFKSILFLPCLRKKILKIR

SEQ ID NO: 23050 - protein, 31 aa, Artificial Sequence
  Quasi-synthetic sequence derived from human genome
GFILPVLGAVLALLFLLLVLLLLVRKKRKIK

SEQ ID NO: 23051 - protein, 31 aa, Artificial Sequence
  Quasi-synthetic sequence derived from human genome
KQGLRLLRGLRRRNVQKKVALAKKLLAKLRF

SEQ ID NO: 23052 - protein, 31 aa, Artificial Sequence
  Quasi-synthetic sequence derived from human genome
LLHALLLVLLLCRLRRLRARARARAAARLSL

SEQ ID NO: 23053 - protein, 31 aa, Artificial Sequence
  Quasi-synthetic sequence derived from human genome
QRLRKRVNAALVIQKYWRRVLAQRKLLMLKK

SEQ ID NO: 23054 - protein, 31 aa, Artificial Sequence
  Quasi-synthetic sequence derived from human genome
FLLRRRFLHLKKAAIVFQKQLRGQIARRVYR

SEQ ID NO: 23055 - protein, 31 aa, Artificial Sequence
  Quasi-synthetic sequence derived from human genome
LWRMQVFAMARLRFLKLKRQTKVLLTLLLVF

SEQ ID NO: 23056 - protein, 31 aa, Artificial Sequence
  Quasi-synthetic sequence derived from human genome
ALFVYLNRKIVQVMRKQKTINRFLMRKRLLF

SEQ ID NO: 23057 - protein, 31 aa, Artificial Sequence
  Quasi-synthetic sequence derived from human genome
FRVIRLARIGRILRLVKGAKGIRTLLFALMM

SEQ ID NO: 23058 - protein, 31 aa, Artificial Sequence
  Quasi-synthetic sequence derived from human genome
ILRRVLVLMASKHAFLALCALRFKRKIIGLK

SEQ ID NO: 23059 - protein, 31 aa, Artificial Sequence
  Quasi-synthetic sequence derived from human genome
LLFLMRKDKKKLRRLLKYMFIRDYKSKIVKG

SEQ ID NO: 23060 - protein, 31 aa, Artificial Sequence
  Quasi-synthetic sequence derived from human genome
RTRAGAARVARWRRLRLQQLRRLRGLLRVLR

SEQ ID NO: 23061 - protein, 31 aa, Artificial Sequence
  Quasi-synthetic sequence derived from human genome
FRRKIYYLPRRYKFMSRIDKQISRFRRWLPK

SEQ ID NO: 23062 - protein, 31 aa, Artificial Sequence
  Quasi-synthetic sequence derived from human genome
ILLVVVLGVVFGILIKRRQQKIRKYTMRRLL

SEQ ID NO: 23063 - protein, 31 aa, Artificial Sequence
  Quasi-synthetic sequence derived from human genome
SPYKTMKFILWRRFRWAIILFIILFILLLFL

SEQ ID NO: 23064 - protein, 31 aa, Artificial Sequence
  Quasi-synthetic sequence derived from human genome
KYFFSPTLFRVIRLARIGRILRLIRGAKGIR

SEQ ID NO: 23065 - protein, 31 aa, Artificial Sequence
  Quasi-synthetic sequence derived from human genome
IYLIMIFLGLYINFRHLYKQRRRRYGQKKKK

SEQ ID NO: 23066 - protein, 31 aa, Artificial Sequence
  Quasi-synthetic sequence derived from human genome
AGVIAGILLFVIIFLGVVLVMKKRKLAKKRK

SEQ ID NO: 23067 - protein, 31 aa, Artificial Sequence
  Quasi-synthetic sequence derived from human genome
LLRLLLSCLLLPAARLARQYLLPLLRRLARR

SEQ ID NO: 23068 - protein, 31 aa, Artificial Sequence
  Quasi-synthetic sequence derived from human genome
LLRLLGLRRGLRRLRRLWAGPRVQRGRGRGR

SEQ ID NO: 23069 - protein, 31 aa, Artificial Sequence
  Quasi-synthetic sequence derived from human genome
WKFFMARVRLQLKIILCFSPVGRTLRVRARK

SEQ ID NO: 23070 - protein, 31 aa, Artificial Sequence
  Quasi-synthetic sequence derived from human genome
RRLQARRFRRSRRTGRLVVLIILTFAAFWLP

SEQ ID NO: 23071 - protein, 31 aa, Artificial Sequence
  Quasi-synthetic sequence derived from human genome
FWKKKKSMIGMSTKLWKVKKALKMTIFWRGL

SEQ ID NO: 23072 - protein, 31 aa, Artificial Sequence
  Quasi-synthetic sequence derived from human genome
KILGVLRVLRLLRTLRPLRVISRAPGLKLVV

SEQ ID NO: 23073 - protein, 31 aa, Artificial Sequence
  Quasi-synthetic sequence derived from human genome
KKKIKPTLPLRIFINVSRFFCVQLKKMVRLM

SEQ ID NO: 23074 - protein, 31 aa, Artificial Sequence
  Quasi-synthetic sequence derived from human genome
IFGRIIWHKFKQWVIPWHLNKRYNRKRFFAL

SEQ ID NO: 23075 - protein, 31 aa, Artificial Sequence
  Quasi-synthetic sequence derived from human genome
IAMFLVIFPMFTFPKKLPPRHKKKKKKKFSV

SEQ ID NO: 23076 - protein, 31 aa, Artificial Sequence
  Quasi-synthetic sequence derived from human genome
LASRHFRARFRRLWPCGRRRRHRARRALRRV

SEQ ID NO: 23077 - protein, 31 aa, Artificial Sequence
  Quasi-synthetic sequence derived from human genome
RRRRLRRRPRGLRCSRLPPPPPLPLLLGLLL

SEQ ID NO: 23078 - protein, 31 aa, Artificial Sequence
  Quasi-synthetic sequence derived from human genome
KGFLLKKRKWPLKGWHKRFFYLDKGILKYAK

SEQ ID NO: 23079 - protein, 31 aa, Artificial Sequence
  Quasi-synthetic sequence derived from human genome
RDIKTIKSLRVLRVLRPLKTIKRLPKLKAVF

SEQ ID NO: 23080 - protein, 31 aa, Artificial Sequence
  Quasi-synthetic sequence derived from human genome
RVLVRAHRHRGLRPRRQKALRMILAVVLVFF

SEQ ID NO: 23081 - protein, 31 aa, Artificial Sequence
  Quasi-synthetic sequence derived from human genome
LRICRVLRSLKLLAQFRQIQIIILVLVRALK

SEQ ID NO: 23082 - protein, 31 aa, Artificial Sequence
  Quasi-synthetic sequence derived from human genome
CKNVLKIRRRKMNHHKYRKLVKKTRFLRRKV

SEQ ID NO: 23083 - protein, 31 aa, Artificial Sequence
  Quasi-synthetic sequence derived from human genome
AKMKKKTFKGLIRIFRKGVIAVLAANRLKIL

SEQ ID NO: 23084 - protein, 31 aa, Artificial Sequence
  Quasi-synthetic sequence derived from human genome
KKKKKKKKKRQCFAFLIYFRLGIKMGKQGII

SEQ ID NO: 23085 - protein, 31 aa, Artificial Sequence
  Quasi-synthetic sequence derived from human genome
LACVATVIFIITKFCLFCFRKLAKKGKKKKR

SEQ ID NO: 23086 - protein, 31 aa, Artificial Sequence
  Quasi-synthetic sequence derived from human genome
KKKKKRYLRASSNRNFLLTMRPFLKRAILVL

SEQ ID NO: 23087 - protein, 31 aa, Artificial Sequence
  Quasi-synthetic sequence derived from human genome
PRAARPPLLLRPVKLLRRRFRLLLALAVVSV

SEQ ID NO: 23088 - protein, 31 aa, Artificial Sequence
  Quasi-synthetic sequence derived from human genome
LLSAFAGLLLLMLLILALWKIGFFKRPLKKK

SEQ ID NO: 23089 - protein, 31 aa, Artificial Sequence
  Quasi-synthetic sequence derived from human genome
KILGMLRVLRLLRTLRPLRVISRAQGLKLVV

SEQ ID NO: 23090 - protein, 31 aa, Artificial Sequence
  Quasi-synthetic sequence derived from human genome
KRFLLLFTFLKKNRKKKLMVFFSSCMSVKYH

SEQ ID NO: 23091 - protein, 31 aa, Artificial Sequence
  Quasi-synthetic sequence derived from human genome
LLKRLLGPKLRRFLKPQGHPRLLLWFKRDPR

SEQ ID NO: 23092 - protein, 31 aa, Artificial Sequence
  Quasi-synthetic sequence derived from human genome
LRRKKKKTIKMLMLVVVLFALCWFPLNCYVL

SEQ ID NO: 23093 - protein, 31 aa, Artificial Sequence
  Quasi-synthetic sequence derived from human genome
SAFRLQRALRFLLGRLPWRVASGARRFRRWL

SEQ ID NO: 23094 - protein, 31 aa, Artificial Sequence
  Quasi-synthetic sequence derived from human genome
VLALVLPSIVILGKIILFLPCISRKLKRIKK

SEQ ID NO: 23095 - protein, 31 aa, Artificial Sequence
  Quasi-synthetic sequence derived from human genome
KLKRKYWWKNCKMMIMLGAICAIIVVVIVRR

SEQ ID NO: 23096 - protein, 31 aa, Artificial Sequence
  Quasi-synthetic sequence derived from human genome
RARRRRRRRRRRDLLLSQLCFLASVALLLWS

SEQ ID NO: 23097 - protein, 31 aa, Artificial Sequence
  Quasi-synthetic sequence derived from human genome
KAKQRLKRLRNIHYLFNTALFLIAWRLLIAR

SEQ ID NO: 23098 - protein, 31 aa, Artificial Sequence
  Quasi-synthetic sequence derived from human genome
VLVKRKRTKGKKLLLSIGVLLHKWKNVCIVL

SEQ ID NO: 23099 - protein, 31 aa, Artificial Sequence
  Quasi-synthetic sequence derived from human genome
LRKYIYIRSCVVIIQKRFRCFQAQKLYKRRK

SEQ ID NO: 23100 - protein, 31 aa, Artificial Sequence
  Quasi-synthetic sequence derived from human genome
HVLYSGWLRKSPPEKKLRLFAWRKRWFILRR

SEQ ID NO: 23101 - protein, 31 aa, Artificial Sequence
  Quasi-synthetic sequence derived from human genome
PRASGRCVIAPVRAVLRLRRRVCVLRKRRLL

SEQ ID NO: 23102 - protein, 31 aa, Artificial Sequence
  Quasi-synthetic sequence derived from human genome
VGKIKRLKKSAFVVLILLITAKLLVLPLLCR

SEQ ID NO: 23103 - protein, 31 aa, Artificial Sequence
  Quasi-synthetic sequence derived from human genome
RIFGKLVFLPLRLVWKEVILRKILILVLVQK

SEQ ID NO: 23104 - protein, 31 aa, Artificial Sequence
  Quasi-synthetic sequence derived from human genome
LRIRCVARKFLYLWIRMTFGRVFPSKARFYY

SEQ ID NO: 23105 - protein, 31 aa, Artificial Sequence
  Quasi-synthetic sequence derived from human genome
KDVLGFLRVVRFVRILRIFKLTRHFVGLRVL

SEQ ID NO: 23106 - protein, 31 aa, Artificial Sequence
  Quasi-synthetic sequence derived from human genome
LSVLRTFRLMRVLKLVRFLPALQRQLVVLMK

SEQ ID NO: 23107 - protein, 31 aa, Artificial Sequence
  Quasi-synthetic sequence derived from human genome
ILRIIRLVRVFRIFKLSRHSKGLQILGHTLR

SEQ ID NO: 23108 - protein, 31 aa, Artificial Sequence
  Quasi-synthetic sequence derived from human genome
LWRRQIYAVATLRFLKLRRERRALLCLLLVL

SEQ ID NO: 23109 - protein, 31 aa, Artificial Sequence
  Quasi-synthetic sequence derived from human genome
PVKAKTKRRLVLGLREVLKHLKLKKLKCVII

SEQ ID NO: 23110 - protein, 31 aa, Artificial Sequence
  Quasi-synthetic sequence derived from human genome
IALLFLCLLPLIVKHIRKKQAKKAAAIRAKK

SEQ ID NO: 23111 - protein, 31 aa, Artificial Sequence
  Quasi-synthetic sequence derived from human genome
VVGGVIGLLILILLIKKLIIFILKKTREKKK

SEQ ID NO: 23112 - protein, 31 aa, Artificial Sequence
  Quasi-synthetic sequence derived from human genome
LRVLRMMRIFWVIKLARHFIGLQTLGLTLKR

SEQ ID NO: 23113 - protein, 31 aa, Artificial Sequence
  Quasi-synthetic sequence derived from human genome
IRHKCKQRFTKITQYLIRIRKLTLKRQRKLV

SEQ ID NO: 23114 - protein, 31 aa, Artificial Sequence
  Quasi-synthetic sequence derived from human genome
VLRVMRLMRIFRILKLARHSTGLRAFGFTLR

SEQ ID NO: 23115 - protein, 31 aa, Artificial Sequence
  Quasi-synthetic sequence derived from human genome
RVIRLARIGRILRLIKGAKGIRTLLFALMMS

SEQ ID NO: 23116 - protein, 31 aa, Artificial Sequence
  Quasi-synthetic sequence derived from human genome
FIFYLLASVLLSLLLILKAGRRWNKYFKSRR

SEQ ID NO: 23117 - protein, 31 aa, Artificial Sequence
  Quasi-synthetic sequence derived from human genome
LSLKLAKIILALKVSRKNLLNVCKLIFKISR

SEQ ID NO: 23118 - protein, 31 aa, Artificial Sequence
  Quasi-synthetic sequence derived from human genome
YWKTWIFWKTWIFWKTWIFRKTYIGWKTWIF

SEQ ID NO: 23119 - protein, 31 aa, Artificial Sequence
  Quasi-synthetic sequence derived from human genome
KLKRKYWWKNCKMWAIGITVLVIFIIIIIVW

SEQ ID NO: 23120 - protein, 31 aa, Artificial Sequence
  Quasi-synthetic sequence derived from human genome
TYLKRFKVMKPKVLRSWCRQILKGLLFLHTR

SEQ ID NO: 23121 - protein, 31 aa, Artificial Sequence
  Quasi-synthetic sequence derived from human genome
ALFVLTCVVLTFLGHRLLKRLLGPKLRRFLK

SEQ ID NO: 23122 - protein, 31 aa, Artificial Sequence
  Quasi-synthetic sequence derived from human genome
IFYLLKIANFSNLIFLRLKRRVKSVILVVLL

SEQ ID NO: 23123 - protein, 31 aa, Artificial Sequence
  Quasi-synthetic sequence derived from human genome
LILMLGTFFIAFFLRKFRNSRFLGGKARRII

SEQ ID NO: 23124 - protein, 31 aa, Artificial Sequence
  Quasi-synthetic sequence derived from human genome
PLLAWLLLPLLLLLLVLLLAAYFFRFRKQRK

SEQ ID NO: 23125 - protein, 31 aa, Artificial Sequence
  Quasi-synthetic sequence derived from human genome
LRADKLRAACIRIQKTIRGWLLRKKYLRMRK

SEQ ID NO: 23126 - protein, 31 aa, Artificial Sequence
  Quasi-synthetic sequence derived from human genome
CFSFCLWFVLQVLIVVLRIVRYRKSSKLIKK

SEQ ID NO: 23127 - protein, 31 aa, Artificial Sequence
  Quasi-synthetic sequence derived from human genome
QSLFRILKVFKSLRALRAIRVLRRLSFLTSV

SEQ ID NO: 23128 - protein, 31 aa, Artificial Sequence
  Quasi-synthetic sequence derived from human genome
FRYLQRLLLVHGRWSYIRMCKFLRYFFYKNF

SEQ ID NO: 23129 - protein, 31 aa, Artificial Sequence
  Quasi-synthetic sequence derived from human genome
THLVRLLRLIILIRIFHLLHQKRQLEKLMRR

SEQ ID NO: 23130 - protein, 31 aa, Artificial Sequence
  Quasi-synthetic sequence derived from human genome
IRIVLFLQKVWRGTLARMRYKRTKAALTIIR

SEQ ID NO: 23131 - protein, 31 aa, Artificial Sequence
  Quasi-synthetic sequence derived from human genome
NLKRRYSFRLHIGRNIARPWKLIYYRAKKMF

SEQ ID NO: 23132 - protein, 31 aa, Artificial Sequence
  Quasi-synthetic sequence derived from human genome
IIKILLRRPNEKKSKAVRLIFVIMIIFFLFW

SEQ ID NO: 23133 - protein, 31 aa, Artificial Sequence
  Quasi-synthetic sequence derived from human genome
KVARKFWWKNVKMIVLICVIVFIIILFIVLF

SEQ ID NO: 23134 - protein, 31 aa, Artificial Sequence
  Quasi-synthetic sequence derived from human genome
IRNIGIWFFWIRLYKIRRGRTRPQALLFLCM

SEQ ID NO: 23135 - protein, 31 aa, Artificial Sequence
  Quasi-synthetic sequence derived from human genome
REFKRAFLRLLRCQCRRRRRRRPLWRVYGHH

SEQ ID NO: 23136 - protein, 31 aa, Artificial Sequence
  Quasi-synthetic sequence derived from human genome
TCCRCRGRKRCIKKFSIQRFPKILVLHLKRF

SEQ ID NO: 23137 - protein, 31 aa, Artificial Sequence
  Quasi-synthetic sequence derived from human genome
RKRMGLKMLMMMALLVPLVYTIKRHKWSVLK

SEQ ID NO: 23138 - protein, 31 aa, Artificial Sequence
  Quasi-synthetic sequence derived from human genome
LFLLALLGLVVKRAVERRKALSRRARRLAVR

SEQ ID NO: 23139 - protein, 31 aa, Artificial Sequence
  Quasi-synthetic sequence derived from human genome
IILALVLLVVLLVVCGPLAYKKLVKKFRQKK

SEQ ID NO: 23140 - protein, 31 aa, Artificial Sequence
  Quasi-synthetic sequence derived from human genome
RRLRRLAHLVLFCPFSKRLQGRLPGLRVRCI

SEQ ID NO: 23141 - protein, 31 aa, Artificial Sequence
  Quasi-synthetic sequence derived from human genome
LIAVMVVFIILVIGVCTCCHPLRKRRKRKKK

SEQ ID NO: 23142 - protein, 31 aa, Artificial Sequence
  Quasi-synthetic sequence derived from human genome
KRWFQLGRSMNPRARKKRSRIPLLRKRRFQL

SEQ ID NO: 23143 - protein, 31 aa, Artificial Sequence
  Quasi-synthetic sequence derived from human genome
LLLLVLFILFLTWCRVQKQKHLPLRVSTRRR

SEQ ID NO: 23144 - protein, 31 aa, Artificial Sequence
  Quasi-synthetic sequence derived from human genome
VRRALLHAALSACIIQCWWRLILSKILKKRR

SEQ ID NO: 23145 - protein, 31 aa, Artificial Sequence
  Quasi-synthetic sequence derived from human genome
FLVVVALLCVPWMLLFKPLVLRRQYLRRKHL

SEQ ID NO: 23146 - protein, 31 aa, Artificial Sequence
  Quasi-synthetic sequence derived from human genome
KIKTFLSLVWKRRILFFVVTLVSVFLVWKFT

SEQ ID NO: 23147 - protein, 31 aa, Artificial Sequence
  Quasi-synthetic sequence derived from human genome
MFYLLRIANFSNLIFLRIKRRVKSVVLVILL

SEQ ID NO: 23148 - protein, 31 aa, Artificial Sequence
  Quasi-synthetic sequence derived from human genome
LRLLRALRVLYVMRLARHSLGLRSLGLTMRR

SEQ ID NO: 23149 - protein, 31 aa, Artificial Sequence
  Quasi-synthetic sequence derived from human genome
LIRHKLKEVRLFLKNYSKTRFGYRIKWRIIC

SEQ ID NO: 23150 - protein, 31 aa, Artificial Sequence
  Quasi-synthetic sequence derived from human genome
RRRYKIRRAATIVLQSYLRGFLARNRYRKIL

SEQ ID NO: 23151 - protein, 31 aa, Artificial Sequence
  Quasi-synthetic sequence derived from human genome
ALFALRYNILTLMRMLSLKSLKKQMKKVKKM

SEQ ID NO: 23152 - protein, 31 aa, Artificial Sequence
  Quasi-synthetic sequence derived from human genome
ILRIIRLVRVFRIFKLSRHSKGLQILGQTLK

SEQ ID NO: 23153 - protein, 31 aa, Artificial Sequence
  Quasi-synthetic sequence derived from human genome
RCYAKFLRRTKAATIIQKYWRMYVVRRRYKI

SEQ ID NO: 23154 - protein, 31 aa, Artificial Sequence
  Quasi-synthetic sequence derived from human genome
KTFLPKCIRAKIQDYHILTRKRIRYRFRRFI

SEQ ID NO: 23155 - protein, 31 aa, Artificial Sequence
  Quasi-synthetic sequence derived from human genome
WLRRKLRGKRRPVIAFCLLMILSAMAVTRFP

SEQ ID NO: 23156 - protein, 31 aa, Artificial Sequence
  Quasi-synthetic sequence derived from human genome
ILRTLFRSRSKRRHRTVKLIFAIVVAYFLSW

SEQ ID NO: 23157 - protein, 31 aa, Artificial Sequence
  Quasi-synthetic sequence derived from human genome
TWLRVRKARPQLILSRRPRRRLGSLRWCGRR

SEQ ID NO: 23158 - protein, 31 aa, Artificial Sequence
  Quasi-synthetic sequence derived from human genome
MRKNVRVLSRTSKFRRLRQLLRRRKKRWQGR

SEQ ID NO: 23159 - protein, 31 aa, Artificial Sequence
  Quasi-synthetic sequence derived from human genome
RKKIHRRVLKKNPLKNLRIMLKLNPYAKTMR

SEQ ID NO: 23160 - protein, 31 aa, Artificial Sequence
  Quasi-synthetic sequence derived from human genome
IKLEAHWRGALARKAIQRRKWAVRIIRKFIK

SEQ ID NO: 23161 - protein, 31 aa, Artificial Sequence
  Quasi-synthetic sequence derived from human genome
RVKRSVTRIKKRSRSVFYRLTILILVFAVSW

SEQ ID NO: 23162 - protein, 31 aa, Artificial Sequence
  Quasi-synthetic sequence derived from human genome
RLKLFFIKNQRSSLRIRLFNFSLKLLTCLLY

SEQ ID NO: 23163 - protein, 31 aa, Artificial Sequence
  Quasi-synthetic sequence derived from human genome
LAILRVIRLVRVFRIFKLSRHSKGLQILGKT

SEQ ID NO: 23164 - protein, 31 aa, Artificial Sequence
  Quasi-synthetic sequence derived from human genome
LKVVAKVIRALLRILCCLLKAICRVLSIPVR

SEQ ID NO: 23165 - protein, 31 aa, Artificial Sequence
  Quasi-synthetic sequence derived from human genome
KTAFRIYAVSTLLLFLLFFLFRLLLRFLRLC

SEQ ID NO: 23166 - protein, 31 aa, Artificial Sequence
  Quasi-synthetic sequence derived from human genome
LIVLVTLIFCLIVLSLSTFHIHKRRMKKRKM

SEQ ID NO: 23167 - protein, 31 aa, Artificial Sequence
  Quasi-synthetic sequence derived from human genome
RLKLFFIKNQRSSLRIRLFNFSLKLLSCLLY

SEQ ID NO: 23168 - protein, 31 aa, Artificial Sequence
  Quasi-synthetic sequence derived from human genome
LLVRRRFISLKKATIFVQRKYRATICAKHKL

SEQ ID NO: 23169 - protein, 31 aa, Artificial Sequence
  Quasi-synthetic sequence derived from human genome
MSIMALLLLLLLLLLYKYKQKPKYQVRWKII

SEQ ID NO: 23170 - protein, 31 aa, Artificial Sequence
  Quasi-synthetic sequence derived from human genome
KMMQRRPRSAEVKYFYFFKILLRLRLAILKY

SEQ ID NO: 23171 - protein, 31 aa, Artificial Sequence
  Quasi-synthetic sequence derived from human genome
IFKKKAHKLTSAPLKQNFQKLLKLFYIKKLK

SEQ ID NO: 23172 - protein, 31 aa, Artificial Sequence
  Quasi-synthetic sequence derived from human genome
LRLFRAARLIKLLRQGYTIRILLWTFVQSFK

SEQ ID NO: 23173 - protein, 31 aa, Artificial Sequence
  Quasi-synthetic sequence derived from human genome
RIPRPLIMIRAFRIYFRFELPRTRITNILKR

SEQ ID NO: 23174 - protein, 31 aa, Artificial Sequence
  Quasi-synthetic sequence derived from human genome
PLRIRRLLRPFFLLQNSSMMKKTLKCIRWSL

SEQ ID NO: 23175 - protein, 31 aa, Artificial Sequence
  Quasi-synthetic sequence derived from human genome
TYLKRFKVMKIKVLRSWCRQILKGLQFLHTR

SEQ ID NO: 23176 - protein, 31 aa, Artificial Sequence
  Quasi-synthetic sequence derived from human genome
KFKLLSSLPRWRRIAQKIIRERRKKRVPKKP

SEQ ID NO: 23177 - protein, 31 aa, Artificial Sequence
  Quasi-synthetic sequence derived from human genome
WWRGTLGRRKAAKRKWAAQTIRRLIRGFVLR

SEQ ID NO: 23178 - protein, 31 aa, Artificial Sequence
  Quasi-synthetic sequence derived from human genome
RTWWRWLTFWRRLQSAFLKNRSLRTKSSLWR

SEQ ID NO: 23179 - protein, 31 aa, Artificial Sequence
  Quasi-synthetic sequence derived from human genome
LLRRVLVLMNSKHTFLALCALRFMRRIIGLK

SEQ ID NO: 23180 - protein, 31 aa, Artificial Sequence
  Quasi-synthetic sequence derived from human genome
IRRGIGYLKLICFLIPFLLSLKKKMKVPYLS

SEQ ID NO: 23181 - protein, 31 aa, Artificial Sequence
  Quasi-synthetic sequence derived from human genome
LVLRGNTKINTFNWAKIRKLSFKRKHFLIKL

SEQ ID NO: 23182 - protein, 31 aa, Artificial Sequence
  Quasi-synthetic sequence derived from human genome
AGISAGILVFILLLLVVILIVKKSKLAKKRK

SEQ ID NO: 23183 - protein, 31 aa, Artificial Sequence
  Quasi-synthetic sequence derived from human genome
MAKFRRRTCIILALFILFIFSLMMGLKMLRP

SEQ ID NO: 23184 - protein, 31 aa, Artificial Sequence
  Quasi-synthetic sequence derived from human genome
RLRVRKAIGKYRIKLLDTLPLPGRLIRYLKY

SEQ ID NO: 23185 - protein, 31 aa, Artificial Sequence
  Quasi-synthetic sequence derived from human genome
LRIARFRFRAFHFLNRFPSVYLRCKMVVCRA

SEQ ID NO: 23186 - protein, 31 aa, Artificial Sequence
  Quasi-synthetic sequence derived from human genome
IVFIKVVQFFRILRIFKLIAPKLLQIIDKRM

SEQ ID NO: 23187 - protein, 31 aa, Artificial Sequence
  Quasi-synthetic sequence derived from human genome
CFLGVAVLVSILAGCLLNRRRAARRRRKRLR

SEQ ID NO: 23188 - protein, 31 aa, Artificial Sequence
  Quasi-synthetic sequence derived from human genome
LLSKAKQKLLRHLVPAAALRRKRKALWAHLF

SEQ ID NO: 23189 - protein, 31 aa, Artificial Sequence
  Quasi-synthetic sequence derived from human genome
MRKNMRVLSRISKFRRLRQLLRRRKKTRQGR

SEQ ID NO: 23190 - protein, 31 aa, Artificial Sequence
  Quasi-synthetic sequence derived from human genome
AIAAAIALLALTALLLVAMICRRRRRRKKAR

SEQ ID NO: 23191 - protein, 31 aa, Artificial Sequence
  Quasi-synthetic sequence derived from human genome
KFILISSLAILLMVSLLLLSLWKLWRVKKFL

SEQ ID NO: 23192 - protein, 31 aa, Artificial Sequence
  Quasi-synthetic sequence derived from human genome
LRIIRFLPLFKIIVPILIRIADVQIKKRLSL

SEQ ID NO: 23193 - protein, 31 aa, Artificial Sequence
  Quasi-synthetic sequence derived from human genome
LVVLALAMVPILLLGTPLHLLHRHRRRLRRR

SEQ ID NO: 23194 - protein, 31 aa, Artificial Sequence
  Quasi-synthetic sequence derived from human genome
LKLFRAARLIKLLRQGYTIRILLWTFVQSFK

SEQ ID NO: 23195 - protein, 31 aa, Artificial Sequence
  Quasi-synthetic sequence derived from human genome
AIRIRILCCLTFLVKVKSKALLKNRLLPPLL

SEQ ID NO: 23196 - protein, 31 aa, Artificial Sequence
  Quasi-synthetic sequence derived from human genome
NPCKTMKFIVWRRFKWVIIGLLFLLILLLFV

SEQ ID NO: 23197 - protein, 31 aa, Artificial Sequence
  Quasi-synthetic sequence derived from human genome
IKIYIVLRRRRKRVNTKRSSRAFRAHLRAPL

SEQ ID NO: 23198 - protein, 31 aa, Artificial Sequence
  Quasi-synthetic sequence derived from human genome
LKLLLPGLLLLLVVIILILAFWVLPKYKTRK

SEQ ID NO: 23199 - protein, 31 aa, Artificial Sequence
  Quasi-synthetic sequence derived from human genome
KKSRKKMCILVLVLSVIILILGLIIWLVYKT

SEQ ID NO: 23200 - protein, 31 aa, Artificial Sequence
  Quasi-synthetic sequence derived from human genome
KRSWPFLRSFRVLRVFKLAKSWPTLNTLIKI

SEQ ID NO: 23201 - protein, 31 aa, Artificial Sequence
  Quasi-synthetic sequence derived from human genome
PWITAVLPTVIICVMVFCLILWKWKKKKRPR

SEQ ID NO: 23202 - protein, 31 aa, Artificial Sequence
  Quasi-synthetic sequence derived from human genome
FRVFRALKAISVVSRLKVIVGALLRSVKKLV

SEQ ID NO: 23203 - protein, 31 aa, Artificial Sequence
  Quasi-synthetic sequence derived from human genome
LGLLIMFITIVFCAAGIVVLVLHRRRRYKKK

SEQ ID NO: 23204 - protein, 31 aa, Artificial Sequence
  Quasi-synthetic sequence derived from human genome
RRRNTPFHERFFRFLLRKLYVFRRSFLMTCI

SEQ ID NO: 23205 - protein, 31 aa, Artificial Sequence
  Quasi-synthetic sequence derived from human genome
KFKKFDHRYLRKILIRKNLPKSSIVSLYKKL

SEQ ID NO: 23206 - protein, 31 aa, Artificial Sequence
  Quasi-synthetic sequence derived from human genome
WVKMYGYFAGLCRRLQKFWRVTVKGFFVKKK

SEQ ID NO: 23207 - protein, 31 aa, Artificial Sequence
  Quasi-synthetic sequence derived from human genome
VIRLARIGRILRLIKGAKGIRTLLFALMMSL

SEQ ID NO: 23208 - protein, 31 aa, Artificial Sequence
  Quasi-synthetic sequence derived from human genome
ILRVIRLVRVFRIFKLSRHSKGLQILGQTLK

SEQ ID NO: 23209 - protein, 31 aa, Artificial Sequence
  Quasi-synthetic sequence derived from human genome
GIVAAVLVKKYQAVLRRKALLIFLVVHRLRW

SEQ ID NO: 23210 - protein, 31 aa, Artificial Sequence
  Quasi-synthetic sequence derived from human genome
LRAWKRIFWRQILLTLGLLGLFLYGLPKFRH

SEQ ID NO: 23211 - protein, 31 aa, Artificial Sequence
  Quasi-synthetic sequence derived from human genome
HKCKKKQKSTKKFWIQKLPKVLCLHLKRFHW

SEQ ID NO: 23212 - protein, 31 aa, Artificial Sequence
  Quasi-synthetic sequence derived from human genome
RHLMKVKLKKYTKFLFVRDPFVRLISAFRSK

SEQ ID NO: 23213 - protein, 31 aa, Artificial Sequence
  Quasi-synthetic sequence derived from human genome
RRLFVRRGQPFTIILYFRAPVRAFLPALKKV

SEQ ID NO: 23214 - protein, 31 aa, Artificial Sequence
  Quasi-synthetic sequence derived from human genome
LILIQWNIRAFMAVKNWPWMRLFFKIKPLVK

SEQ ID NO: 23215 - protein, 31 aa, Artificial Sequence
  Quasi-synthetic sequence derived from human genome
WRFIRVFIKTIRRDIFGGLVLLKVKAKVRQC

SEQ ID NO: 23216 - protein, 31 aa, Artificial Sequence
  Quasi-synthetic sequence derived from human genome
RRKARRLLKTVLMILLAFLVCWGPLFGLLLA

SEQ ID NO: 23217 - protein, 31 aa, Artificial Sequence
  Quasi-synthetic sequence derived from human genome
LLRKRRFQLGRSMNPRARKNRSRIPLLRKRR

SEQ ID NO: 23218 - protein, 31 aa, Artificial Sequence
  Quasi-synthetic sequence derived from human genome
YKNRVRMNTFPWLKIVKISFKCKQFFIQLRK

SEQ ID NO: 23219 - protein, 31 aa, Artificial Sequence
  Quasi-synthetic sequence derived from human genome
FYLSLFFWMLFKALLIIYGILVIFRRMMKSR

SEQ ID NO: 23220 - protein, 31 aa, Artificial Sequence
  Quasi-synthetic sequence derived from human genome
FLKTVLHRIYGKFLGLRAFIRKQINNIFLRF

SEQ ID NO: 23221 - protein, 31 aa, Artificial Sequence
  Quasi-synthetic sequence derived from human genome
RKRIRYRFRRFIQQFSQCKATARNLKLKYLI

SEQ ID NO: 23222 - protein, 31 aa, Artificial Sequence
  Quasi-synthetic sequence derived from human genome
IHFTKVFSAFALVRTIRYLYRRLQRMLGLRR

SEQ ID NO: 23223 - protein, 31 aa, Artificial Sequence
  Quasi-synthetic sequence derived from human genome
SLRFGFGFRRGRSFLLRSWHHLMKRVQIKIF

SEQ ID NO: 23224 - protein, 31 aa, Artificial Sequence
  Quasi-synthetic sequence derived from human genome
KLRGLKRKWIRCSAQATVLHLKKFIAKKLNL

SEQ ID NO: 23225 - protein, 31 aa, Artificial Sequence
  Quasi-synthetic sequence derived from human genome
IIAISLLVGILIFLLLAVLLWKMGFFRRRYK

SEQ ID NO: 23226 - protein, 31 aa, Artificial Sequence
  Quasi-synthetic sequence derived from human genome
LTCFAGFWLIWGLIVLLCCFCSFLRRRLKRR

SEQ ID NO: 23227 - protein, 31 aa, Artificial Sequence
  Quasi-synthetic sequence derived from human genome
VIVAFAFTTLLIACLLLRVFRSGKRLKKTRK

SEQ ID NO: 23228 - protein, 31 aa, Artificial Sequence
  Quasi-synthetic sequence derived from human genome
RFWPFLVIIVILSALFLGTLACFCVWRRKRK

SEQ ID NO: 23229 - protein, 31 aa, Artificial Sequence
  Quasi-synthetic sequence derived from human genome
LVVFKSAPILKRALKVKQAMLQLYVLKLLKL

SEQ ID NO: 23230 - protein, 31 aa, Artificial Sequence
  Quasi-synthetic sequence derived from human genome
LLLSIAIFQRQKRRKFWKAKNLQHIPLKKGK

SEQ ID NO: 23231 - protein, 31 aa, Artificial Sequence
  Quasi-synthetic sequence derived from human genome
LRTFRLLRVLKLVRFMPALRRQLVVLMKTMD

SEQ ID NO: 23232 - protein, 31 aa, Artificial Sequence
  Quasi-synthetic sequence derived from human genome
VFTLLLLSIVILYCRIYSLVRTRSRRLTFRK

SEQ ID NO: 23233 - protein, 31 aa, Artificial Sequence
  Quasi-synthetic sequence derived from human genome
LRPLKKFLRKLHLPRDLPQKKKLKYMKQSLV

SEQ ID NO: 23234 - protein, 31 aa, Artificial Sequence
  Quasi-synthetic sequence derived from human genome
VVKMRKEVKRIRVLVIRKLVRSVGRLKSKKG

SEQ ID NO: 23235 - protein, 31 aa, Artificial Sequence
  Quasi-synthetic sequence derived from human genome
RSLKHLCRLKIRKCMGRLHLRCPVFMSFLPL

SEQ ID NO: 23236 - protein, 31 aa, Artificial Sequence
  Quasi-synthetic sequence derived from human genome
PILTRLMNFFVFSRGLLQYINQRKKFRRRWV

SEQ ID NO: 23237 - protein, 31 aa, Artificial Sequence
  Quasi-synthetic sequence derived from human genome
KKRILFLYNDLLKKRAAFTKLRRAAILRRER

SEQ ID NO: 23238 - protein, 31 aa, Artificial Sequence
  Quasi-synthetic sequence derived from human genome
YLTFPLIFGLFIILLVIFLIWRCFLRNKTRR

SEQ ID NO: 23239 - protein, 31 aa, Artificial Sequence
  Quasi-synthetic sequence derived from human genome
KLAFVIRIRGINGVSPKVRKVLQLLRLRQIF

SEQ ID NO: 23240 - protein, 31 aa, Artificial Sequence
  Quasi-synthetic sequence derived from human genome
LTLVSFLIFILFIIVQLFIMKLRKAHVIWKK

SEQ ID NO: 23241 - protein, 31 aa, Artificial Sequence
  Quasi-synthetic sequence derived from human genome
RLFSKKIFCCLFFITLFFIRLLSYMFFHVRF

SEQ ID NO: 23242 - protein, 31 aa, Artificial Sequence
  Quasi-synthetic sequence derived from human genome
YSSIVSFYVPFIVTLLVYIKIYIVLRRRRKR

SEQ ID NO: 23243 - protein, 31 aa, Artificial Sequence
  Quasi-synthetic sequence derived from human genome
KRMRVKKLPMILALHLKRFKYMEQLHRYTKL

SEQ ID NO: 23244 - protein, 31 aa, Artificial Sequence
  Quasi-synthetic sequence derived from human genome
RTQLLYLLAVAVVIILFIILLGVIMAKRKRK

SEQ ID NO: 23245 - protein, 31 aa, Artificial Sequence
  Quasi-synthetic sequence derived from human genome
AVIVLVALLLLWRRRQKRRTGALVLSRGGKR

SEQ ID NO: 23246 - protein, 31 aa, Artificial Sequence
  Quasi-synthetic sequence derived from human genome
RAWLARRRFQSIRRFVLNIQLTYRVQRLQKK

SEQ ID NO: 23247 - protein, 31 aa, Artificial Sequence
  Quasi-synthetic sequence derived from human genome
LLRKRRFQLYRSTNPRARKNRSRIPLLRKRR

SEQ ID NO: 23248 - protein, 31 aa, Artificial Sequence
  Quasi-synthetic sequence derived from human genome
VPLVLLVTLITTLVIGLVLCKRKRRTKTIRR

SEQ ID NO: 23249 - protein, 31 aa, Artificial Sequence
  Quasi-synthetic sequence derived from human genome
KRKKNVLRLCCKKLKIFAMPMQDIKMILKMV

SEQ ID NO: 23250 - protein, 31 aa, Artificial Sequence
  Quasi-synthetic sequence derived from human genome
LTRFVKWPRYIRLQRQRAILYKRLKVPPAIN

SEQ ID NO: 23251 - protein, 31 aa, Artificial Sequence
  Quasi-synthetic sequence derived from human genome
KLWFKFQRYFRRKPVRFFTFLALYLTAGSLV

SEQ ID NO: 23252 - protein, 31 aa, Artificial Sequence
  Quasi-synthetic sequence derived from human genome
MIIVIFCYLRIWILVLQVRQRVKPDRKPKLK

SEQ ID NO: 23253 - protein, 31 aa, Artificial Sequence
  Quasi-synthetic sequence derived from human genome
PVRIRNRCVMTSRPRGVKRRWRLSRIVFRHL

SEQ ID NO: 23254 - protein, 31 aa, Artificial Sequence
  Quasi-synthetic sequence derived from human genome
RRFQLRRCMNPRARKNRSQIVLFQKRRFHFF

SEQ ID NO: 23255 - protein, 31 aa, Artificial Sequence
  Quasi-synthetic sequence derived from human genome
GKLRYLSLLCLLPLVAFLLFCLHVLFKKRTK

SEQ ID NO: 23256 - protein, 31 aa, Artificial Sequence
  Quasi-synthetic sequence derived from human genome
MLLCYRHLKTKRILRRNLLALIHRMIEFVVR

SEQ ID NO: 23257 - protein, 31 aa, Artificial Sequence
  Quasi-synthetic sequence derived from human genome
RRRGRPSRRFLGKKYRKYYYKSPKPLLRPFL

SEQ ID NO: 23258 - protein, 31 aa, Artificial Sequence
  Quasi-synthetic sequence derived from human genome
PRPVLLRGARAALLLLLPPRLLARPSLLLRR

SEQ ID NO: 23259 - protein, 31 aa, Artificial Sequence
  Quasi-synthetic sequence derived from human genome
FRLARRRKKILFYCHFPDLLLTKRDSFLKRL

SEQ ID NO: 23260 - protein, 31 aa, Artificial Sequence
  Quasi-synthetic sequence derived from human genome
LLLRKAPGGFMGPRWRRRWFVLKGHTLYWYR

SEQ ID NO: 23261 - protein, 31 aa, Artificial Sequence
  Quasi-synthetic sequence derived from human genome
ERLFKLKPPVWYLRSLVQNLLLIRRFKKTII

SEQ ID NO: 23262 - protein, 31 aa, Artificial Sequence
  Quasi-synthetic sequence derived from human genome
VIVIMATICFILLILSLICKIKLGPVRRKLK

SEQ ID NO: 23263 - protein, 31 aa, Artificial Sequence
  Quasi-synthetic sequence derived from human genome
LLIYKDRLRINRFAWPKILKISYKRSNFYIK

SEQ ID NO: 23264 - protein, 31 aa, Artificial Sequence
  Quasi-synthetic sequence derived from human genome
LLLKKIMAILIKRFHHTRRNWKGLIAQVILP

SEQ ID NO: 23265 - protein, 31 aa, Artificial Sequence
  Quasi-synthetic sequence derived from human genome
RLLNKLTKWKHSRTMMLVVFKSAPILKRALK

SEQ ID NO: 23266 - protein, 31 aa, Artificial Sequence
  Quasi-synthetic sequence derived from human genome
IFYLLKIVNFSRLIFHHLKRKAKSVVLVIVL

SEQ ID NO: 23267 - protein, 31 aa, Artificial Sequence
  Quasi-synthetic sequence derived from human genome
RYLRVKLTVRYKRVTTHRRIWLALGLCWLVS

SEQ ID NO: 23268 - protein, 31 aa, Artificial Sequence
  Quasi-synthetic sequence derived from human genome
VVKILRVLRVLRPLRAINRAKGLKHVVQCMF

SEQ ID NO: 23269 - protein, 31 aa, Artificial Sequence
  Quasi-synthetic sequence derived from human genome
GMAFILLVLLCLLLYYCRRKCLKPRQHHRKL

SEQ ID NO: 23270 - protein, 31 aa, Artificial Sequence
  Quasi-synthetic sequence derived from human genome
GVIAGAFVGILLFLILVGLLIFFLKRRNKKK

SEQ ID NO: 23271 - protein, 31 aa, Artificial Sequence
  Quasi-synthetic sequence derived from human genome
LLKKINFHKITLRLWNTKDKMSRKVRYYRLK

SEQ ID NO: 23272 - protein, 31 aa, Artificial Sequence
  Quasi-synthetic sequence derived from human genome
LLLILLCMSLLLFQVIRLYQRRRWMIRALHL

SEQ ID NO: 23273 - protein, 31 aa, Artificial Sequence
  Quasi-synthetic sequence derived from human genome
MLLRKRYRHRPCRLQFLLLLLMLGCVLMMVA

SEQ ID NO: 23274 - protein, 31 aa, Artificial Sequence
  Quasi-synthetic sequence derived from human genome
IILAVVGGVIGLLILILLIKKLIIFILKKTR

SEQ ID NO: 23275 - protein, 31 aa, Artificial Sequence
  Quasi-synthetic sequence derived from human genome
RNMSWPRLIRKLRCYLKEMKNLRKLVFSRCL

SEQ ID NO: 23276 - protein, 31 aa, Artificial Sequence
  Quasi-synthetic sequence derived from human genome
TQFFHVKVLNINLKRKFIKKRIIIISNYSKR

SEQ ID NO: 23277 - protein, 31 aa, Artificial Sequence
  Quasi-synthetic sequence derived from human genome
KRMKVKKLPMILALHLKRFKYMDQLHRYTKL

SEQ ID NO: 23278 - protein, 31 aa, Artificial Sequence
  Quasi-synthetic sequence derived from human genome
VVKILRVLRVLRPLRAINRAKGLKHVVQCVF

SEQ ID NO: 23279 - protein, 31 aa, Artificial Sequence
  Quasi-synthetic sequence derived from human genome
WKWLKSPRSWRLGLALLLGGALLFWVLLHRR

SEQ ID NO: 23280 - protein, 31 aa, Artificial Sequence
  Quasi-synthetic sequence derived from human genome
RPKGFTRFRSAVRVSIAISRMKFLVRRWHRV

SEQ ID NO: 23281 - protein, 31 aa, Artificial Sequence
  Quasi-synthetic sequence derived from human genome
LINWFICSLCVPRVRKLWSSRRPRTRRNLLL

SEQ ID NO: 23282 - protein, 31 aa, Artificial Sequence
  Quasi-synthetic sequence derived from human genome
AGCVIFLLIIIFLTVLLLKLRKRHRKHTQQR

SEQ ID NO: 23283 - protein, 31 aa, Artificial Sequence
  Quasi-synthetic sequence derived from human genome
RLRHLRRPRVARLLCLGVWALILVFAVPAAR

SEQ ID NO: 23284 - protein, 31 aa, Artificial Sequence
  Quasi-synthetic sequence derived from human genome
KNWTLRKRQKIRFVVELVWPLSLFLVLIWLR

SEQ ID NO: 23285 - protein, 31 aa, Artificial Sequence
  Quasi-synthetic sequence derived from human genome
LLRKRRFQLGRSMNLRARKNRSQIVLFQKRR

SEQ ID NO: 23286 - protein, 31 aa, Artificial Sequence
  Quasi-synthetic sequence derived from human genome
KDINTIKSLRVLRVLRPLKTIKRLPKLKAVF

SEQ ID NO: 23287 - protein, 31 aa, Artificial Sequence
  Quasi-synthetic sequence derived from human genome
MRRHFRMKLRNLFTKFIRKFGFELVKRLLPE

SEQ ID NO: 23288 - protein, 31 aa, Artificial Sequence
  Quasi-synthetic sequence derived from human genome
RIPLLRKRRFQLYRSTNPRARKNRSRIPLLR

SEQ ID NO: 23289 - protein, 31 aa, Artificial Sequence
  Quasi-synthetic sequence derived from human genome
KRLFVIRPSRFYDRRFLKLLRFYIALTGIPV

SEQ ID NO: 23290 - protein, 31 aa, Artificial Sequence
  Quasi-synthetic sequence derived from human genome
ILRFPVFLAILINFFIFVRIVQLLVAKLRAR

SEQ ID NO: 23291 - protein, 31 aa, Artificial Sequence
  Quasi-synthetic sequence derived from human genome
LRLLVKLYRFLARRTNSTFNQVVLKRLFMSR

SEQ ID NO: 23292 - protein, 31 aa, Artificial Sequence
  Quasi-synthetic sequence derived from human genome
LALQLYVRRRKKLPSVLLFKKPSPFIFISQR

SEQ ID NO: 23293 - protein, 31 aa, Artificial Sequence
  Quasi-synthetic sequence derived from human genome
ARRGWRRAPLRRGVGSSPRARRLMRPLWLLL

SEQ ID NO: 23294 - protein, 31 aa, Artificial Sequence
  Quasi-synthetic sequence derived from human genome
RILNKLTKWKHSRTMMLVVFKSAPILKRALK

SEQ ID NO: 23295 - protein, 31 aa, Artificial Sequence
  Quasi-synthetic sequence derived from human genome
GYVKIRSRKLGIFRRCWLVFKKASSKGPRRL

SEQ ID NO: 23296 - protein, 31 aa, Artificial Sequence
  Quasi-synthetic sequence derived from human genome
LRMPLSRWQRRLRRAARRQVLSGHLPFCRFR

SEQ ID NO: 23297 - protein, 31 aa, Artificial Sequence
  Quasi-synthetic sequence derived from human genome
WMRRMRILRRLLRRYRESKKIDRHMYHSLYL

SEQ ID NO: 23298 - protein, 31 aa, Artificial Sequence
  Quasi-synthetic sequence derived from human genome
KKIVPKKKKPLKLGPIKKKDLKKLVLYLKNG

SEQ ID NO: 23299 - protein, 31 aa, Artificial Sequence
  Quasi-synthetic sequence derived from human genome
YLLQLKGKKHVLHLWPKRLLLPRHLRVFSFT

SEQ ID NO: 23300 - protein, 31 aa, Artificial Sequence
  Quasi-synthetic sequence derived from human genome
YVQMRLKKHRWYKKILKSRDPIIFSVGWRRF

SEQ ID NO: 23301 - protein, 31 aa, Artificial Sequence
  Quasi-synthetic sequence derived from human genome
MPQYLRKRFGGRRIRLYLSVLSLFLYIFTKI

SEQ ID NO: 23302 - protein, 31 aa, Artificial Sequence
  Quasi-synthetic sequence derived from human genome
RKLKFSPIKYGYQPRRNFWPARLATRLLKLR

SEQ ID NO: 23303 - protein, 31 aa, Artificial Sequence
  Quasi-synthetic sequence derived from human genome
VCQRLSLKSFLILPFQRITRLKLLLQNILKR

SEQ ID NO: 23304 - protein, 31 aa, Artificial Sequence
  Quasi-synthetic sequence derived from human genome
FKGLKLLCRDKIRLNNAIWRAWYIQYVKRRK

SEQ ID NO: 23305 - protein, 31 aa, Artificial Sequence
  Quasi-synthetic sequence derived from human genome
IRNMSWPRLIRKLRCYLKEMKNLRKLVFSRC

SEQ ID NO: 23306 - protein, 31 aa, Artificial Sequence
  Quasi-synthetic sequence derived from human genome
LACVATVIFIITKFCLFCFWKFARKGKKGKR

SEQ ID NO: 23307 - protein, 31 aa, Artificial Sequence
  Quasi-synthetic sequence derived from human genome
RLRHPRTRWKNWWVRGILTLAMIAFFFIIIY

SEQ ID NO: 23308 - protein, 31 aa, Artificial Sequence
  Quasi-synthetic sequence derived from human genome
ILASQKVKKIWQKQFRWPKNRLQILKFCKAR

SEQ ID NO: 23309 - protein, 31 aa, Artificial Sequence
  Quasi-synthetic sequence derived from human genome
ARRRQRGRLMRRLVRRLRRWGLLPRTNTPAR

SEQ ID NO: 23310 - protein, 31 aa, Artificial Sequence
  Quasi-synthetic sequence derived from human genome
IILFCSFKIVWSLRRRQQLARQARMKKATRF

SEQ ID NO: 23311 - protein, 31 aa, Artificial Sequence
  Quasi-synthetic sequence derived from human genome
LWRQQVCAIAKVRFLKLKKERKSLWTILLLF

SEQ ID NO: 23312 - protein, 31 aa, Artificial Sequence
  Quasi-synthetic sequence derived from human genome
YRRSQRASFKRARRPGARALRLVLGIVLLFW

SEQ ID NO: 23313 - protein, 31 aa, Artificial Sequence
  Quasi-synthetic sequence derived from human genome
RKGIVRVVFFPFFFRWWLQVTSKVIFFWLLV

SEQ ID NO: 23314 - protein, 31 aa, Artificial Sequence
  Quasi-synthetic sequence derived from human genome
AICYFRRLHLYSGHKLKWWIGYLQRKFKRNL

SEQ ID NO: 23315 - protein, 31 aa, Artificial Sequence
  Quasi-synthetic sequence derived from human genome
LASLILCTRSIVLALRLRKRFLNFFLEKYKR

SEQ ID NO: 23316 - protein, 31 aa, Artificial Sequence
  Quasi-synthetic sequence derived from human genome
RRLRRANRVLRARCRRAVKSNACYWAVLLLV

SEQ ID NO: 23317 - protein, 31 aa, Artificial Sequence
  Quasi-synthetic sequence derived from human genome
VWVSSIFFFLPVFCLTVLYSLIGRKLWRRRR

SEQ ID NO: 23318 - protein, 31 aa, Artificial Sequence
  Quasi-synthetic sequence derived from human genome
LLVYKDKLRINRFPWPKVLKISYKRSSFFIK

SEQ ID NO: 23319 - protein, 31 aa, Artificial Sequence
  Quasi-synthetic sequence derived from human genome
FLKKLLGKKLTRCLKPFENSRLRLWTKWVFA

SEQ ID NO: 23320 - protein, 31 aa, Artificial Sequence
  Quasi-synthetic sequence derived from human genome
LCLLQAFGYRLRRVIAAFYFPKREKKRILFL

SEQ ID NO: 23321 - protein, 31 aa, Artificial Sequence
  Quasi-synthetic sequence derived from human genome
FRRKEKMFRFFIRRMVKAQSFYWVVLCVVAL

SEQ ID NO: 23322 - protein, 31 aa, Artificial Sequence
  Quasi-synthetic sequence derived from human genome
FYFLYGKTRSRIPLLRKRRFQLCRCMNPRAR

SEQ ID NO: 23323 - protein, 31 aa, Artificial Sequence
  Quasi-synthetic sequence derived from human genome
FKFLQRLLLVHGRWSYLRMCKFLCYFFYKNF

SEQ ID NO: 23324 - protein, 31 aa, Artificial Sequence
  Quasi-synthetic sequence derived from human genome
LVLLALCLLLPLLLLGGWKRWRRGRAARHVV

SEQ ID NO: 23325 - protein, 31 aa, Artificial Sequence
  Quasi-synthetic sequence derived from human genome
LRLPKRLRVVYFLARTRLAQRLIMAGTVVWI

SEQ ID NO: 23326 - protein, 31 aa, Artificial Sequence
  Quasi-synthetic sequence derived from human genome
ICLRPPRPGLRRQWKCVQRRCLRHLAHRLRR

SEQ ID NO: 23327 - protein, 31 aa, Artificial Sequence
  Quasi-synthetic sequence derived from human genome
RVAARVQRRPWGAWLSARLWKWLKSPRSWRL

SEQ ID NO: 23328 - protein, 31 aa, Artificial Sequence
  Quasi-synthetic sequence derived from human genome
LKTLLRCRNEKKRHRAVRVIFTIMIVYFLFW

SEQ ID NO: 23329 - protein, 31 aa, Artificial Sequence
  Quasi-synthetic sequence derived from human genome
WALFFRKRRADMPRVFVFRALLLVLIFLFVV

SEQ ID NO: 23330 - protein, 31 aa, Artificial Sequence
  Quasi-synthetic sequence derived from human genome
RLRRANRVLRARCRRAVKSNACYWAVLLLVF

SEQ ID NO: 23331 - protein, 31 aa, Artificial Sequence
  Quasi-synthetic sequence derived from human genome
AARKHLNKLRNIRYGFNTILVILIWRIFIAR

SEQ ID NO: 23332 - protein, 31 aa, Artificial Sequence
  Quasi-synthetic sequence derived from human genome
KVLRFLRLFGPGKNVPSVWRSARRKRKKKHR

SEQ ID NO: 23333 - protein, 31 aa, Artificial Sequence
  Quasi-synthetic sequence derived from human genome
LLRRWKHWLLLLGICCPKPHGRVSSRLRLSR

SEQ ID NO: 23334 - protein, 31 aa, Artificial Sequence
  Quasi-synthetic sequence derived from human genome
TYLKRFKVMKPKVLRSWCRQILKGLQFLHTR

SEQ ID NO: 23335 - protein, 31 aa, Artificial Sequence
  Quasi-synthetic sequence derived from human genome
LVFGEKFKLFTLVSACIPVFRLARRRKKILF

SEQ ID NO: 23336 - protein, 31 aa, Artificial Sequence
  Quasi-synthetic sequence derived from human genome
PKWRLPRISARAPYRLRRLRRHTYWPPRRPV

SEQ ID NO: 23337 - protein, 31 aa, Artificial Sequence
  Quasi-synthetic sequence derived from human genome
RILRRLFNLCKRCHRQPRFRLPKERSLSYWW

SEQ ID NO: 23338 - protein, 31 aa, Artificial Sequence
  Quasi-synthetic sequence derived from human genome
LVLLALAAWASRWLRRKLRARRKGGAPVHVR

SEQ ID NO: 23339 - protein, 31 aa, Artificial Sequence
  Quasi-synthetic sequence derived from human genome
MVLQRRKFLQMKRRKYGFIYKTHLFGRPTVR

SEQ ID NO: 23340 - protein, 31 aa, Artificial Sequence
  Quasi-synthetic sequence derived from human genome
MLSILSLIGIFNRSFRTGIKRRILLLIPKWL

SEQ ID NO: 23341 - protein, 31 aa, Artificial Sequence
  Quasi-synthetic sequence derived from human genome
KFKKFAARKKWKQSVRLISLCQRLSRSFLSR

SEQ ID NO: 23342 - protein, 31 aa, Artificial Sequence
  Quasi-synthetic sequence derived from human genome
PLRAPALRRLLPPLLLLLLSLPPRARAKYVR

SEQ ID NO: 23343 - protein, 31 aa, Artificial Sequence
  Quasi-synthetic sequence derived from human genome
VLVSLLQKPRHRCRKRKPLLAIGFYLYRMNK

SEQ ID NO: 23344 - protein, 31 aa, Artificial Sequence
  Quasi-synthetic sequence derived from human genome
LAFLLKAVKFRERVLQRGLVARIYYKVKTKK

SEQ ID NO: 23345 - protein, 31 aa, Artificial Sequence
  Quasi-synthetic sequence derived from human genome
RLPVKKIRKQMKLLLLLLLLSCAAWLTYVHL

SEQ ID NO: 23346 - protein, 31 aa, Artificial Sequence
  Quasi-synthetic sequence derived from human genome
VVKGLMKKFIRCSTRVTVGTIKKFLSLKLKL

SEQ ID NO: 23347 - protein, 31 aa, Artificial Sequence
  Quasi-synthetic sequence derived from human genome
LKLFFIKNQRSSLRIRLFNFSLKLLTCLLYI

SEQ ID NO: 23348 - protein, 31 aa, Artificial Sequence
  Quasi-synthetic sequence derived from human genome
LLLKRFLLARRSRRGLFAQIVLPALFVGLAL

SEQ ID NO: 23349 - protein, 31 aa, Artificial Sequence
  Quasi-synthetic sequence derived from human genome
IVLAKKMLRKALKLLNRIFPYNLISLFLHIH

SEQ ID NO: 23350 - protein, 31 aa, Artificial Sequence
  Quasi-synthetic sequence derived from human genome
MKKFLYIKSVFHTLRMAQRRHKRVRTWTRHI

SEQ ID NO: 23351 - protein, 31 aa, Artificial Sequence
  Quasi-synthetic sequence derived from human genome
IRGGATRAAGVFYPWRFRLLCLLRRWLPRPR

SEQ ID NO: 23352 - protein, 31 aa, Artificial Sequence
  Quasi-synthetic sequence derived from human genome
IIRIMRVLRIARVLKLLKMAVGMRALLDTLW

SEQ ID NO: 23353 - protein, 31 aa, Artificial Sequence
  Quasi-synthetic sequence derived from human genome
LLKKKYPLAKYLCVLLIVAGVALFMYKPKKV

SEQ ID NO: 23354 - protein, 31 aa, Artificial Sequence
  Quasi-synthetic sequence derived from human genome
RRPRGSTARTLLRLLLRLLLFLGLLALALHF

SEQ ID NO: 23355 - protein, 31 aa, Artificial Sequence
  Quasi-synthetic sequence derived from human genome
KIPSRFKRSYNYKTIVKKILAKLKRARSKKL

SEQ ID NO: 23356 - protein, 31 aa, Artificial Sequence
  Quasi-synthetic sequence derived from human genome
IPLGRRFRSLKMWFVFRMYGVKGLQAYIRKH

SEQ ID NO: 23357 - protein, 31 aa, Artificial Sequence
  Quasi-synthetic sequence derived from human genome
LIILVALLMLVFRSKREVKRQKYRLSQLYKW

SEQ ID NO: 23358 - protein, 31 aa, Artificial Sequence
  Quasi-synthetic sequence derived from human genome
WRGVLVRRTLLVAALRAWMIQCWWRTLVQRR

SEQ ID NO: 23359 - protein, 31 aa, Artificial Sequence
  Quasi-synthetic sequence derived from human genome
MIRFRYRILRSQHFRTKSKVCKLRKAQRSWV

SEQ ID NO: 23360 - protein, 31 aa, Artificial Sequence
  Quasi-synthetic sequence derived from human genome
RKAPLWLRAKFQRLLFKLGCYIQKNCGKFLV

SEQ ID NO: 23361 - protein, 31 aa, Artificial Sequence
  Quasi-synthetic sequence derived from human genome
WALFFRRPKASLPRVFVLRALLMVLVFLLVV

SEQ ID NO: 23362 - protein, 31 aa, Artificial Sequence
  Quasi-synthetic sequence derived from human genome
LLVIQWNIRAFMGVKNWPWMKLYFKIKPLLK

SEQ ID NO: 23363 - protein, 31 aa, Artificial Sequence
  Quasi-synthetic sequence derived from human genome
LIKPFGARKKRSWYLTWKYKLTNQRALRRFC

SEQ ID NO: 23364 - protein, 31 aa, Artificial Sequence
  Quasi-synthetic sequence derived from human genome
RRGRGGLRLGLRGPLRKLVLQSLVPLLLRLH

SEQ ID NO: 23365 - protein, 31 aa, Artificial Sequence
  Quasi-synthetic sequence derived from human genome
LVFQGTTKINTFNWSKVRKLSFKRKRFLIKL

SEQ ID NO: 23366 - protein, 31 aa, Artificial Sequence
  Quasi-synthetic sequence derived from human genome
SLIRKKFRMMKIPKPILFGLNIAMKKQTKIS

SEQ ID NO: 23367 - protein, 31 aa, Artificial Sequence
  Quasi-synthetic sequence derived from human genome
LRVIRLVRVFRIFKLSRHSKGLQILGKTLQA

SEQ ID NO: 23368 - protein, 31 aa, Artificial Sequence
  Quasi-synthetic sequence derived from human genome
LRVIRLVRVFRIFKLSRHSKGLQILGQTLKA

SEQ ID NO: 23369 - protein, 31 aa, Artificial Sequence
  Quasi-synthetic sequence derived from human genome
HRLLLRRTYARNLPAFVNRLGILTVRHLKRL

SEQ ID NO: 23370 - protein, 31 aa, Artificial Sequence
  Quasi-synthetic sequence derived from human genome
LMVLRCLRPLRIFKLVPQMRKVVRELFSGFK

SEQ ID NO: 23371 - protein, 31 aa, Artificial Sequence
  Quasi-synthetic sequence derived from human genome
RVPLRQLLRLQRVSRAFRSLVQLHLAGLRRF

SEQ ID NO: 23372 - protein, 31 aa, Artificial Sequence
  Quasi-synthetic sequence derived from human genome
MARRRRRACIALFLVLLFAFGTLMGLRTLKA

SEQ ID NO: 23373 - protein, 31 aa, Artificial Sequence
  Quasi-synthetic sequence derived from human genome
LLSVLAMFFLLVLILSSVFLFRLFKRRQGRI

SEQ ID NO: 23374 - protein, 31 aa, Artificial Sequence
  Quasi-synthetic sequence derived from human genome
RKYKKNIKALYIVHPTMFIKTLLILFKPLIS

SEQ ID NO: 23375 - protein, 31 aa, Artificial Sequence
  Quasi-synthetic sequence derived from human genome
MVRRFLVTLRIRRACGPPRVRVFVVHIPRLT

SEQ ID NO: 23376 - protein, 31 aa, Artificial Sequence
  Quasi-synthetic sequence derived from human genome
LKTFVFFIWRRYWRTLVLLLLVLLTVFLLLV

SEQ ID NO: 23377 - protein, 31 aa, Artificial Sequence
  Quasi-synthetic sequence derived from human genome
NLPRLCIRKFFPKKKCFVFDLPIHRRKLAQL

SEQ ID NO: 23378 - protein, 31 aa, Artificial Sequence
  Quasi-synthetic sequence derived from human genome
KQLRRQMWWRGCKIKAIMALVAAILLLVIII

SEQ ID NO: 23379 - protein, 31 aa, Artificial Sequence
  Quasi-synthetic sequence derived from human genome
SRKKQKIIKMLLIVALLFILSWLPLWTLMML

SEQ ID NO: 23380 - protein, 31 aa, Artificial Sequence
  Quasi-synthetic sequence derived from human genome
YLRGFLARNRYRKILREHKAVIIQKRVRGWL

SEQ ID NO: 23381 - protein, 31 aa, Artificial Sequence
  Quasi-synthetic sequence derived from human genome
LKSARYFLWHTYRWLLLKLLLLLLLLLLLAL

SEQ ID NO: 23382 - protein, 31 aa, Artificial Sequence
  Quasi-synthetic sequence derived from human genome
FLTALLWRGRIPGRQWIGKHRRPRFVSLRAK

SEQ ID NO: 23383 - protein, 31 aa, Artificial Sequence
  Quasi-synthetic sequence derived from human genome
KIAGISAGILVFILLLLVVILIVKKSKLAKK

SEQ ID NO: 23384 - protein, 31 aa, Artificial Sequence
  Quasi-synthetic sequence derived from human genome
LFCYCRISRRLRRPPHVGRARRNSLRIIFAI

SEQ ID NO: 23385 - protein, 31 aa, Artificial Sequence
  Quasi-synthetic sequence derived from human genome
ILLQRWFRVLLCRQHFLHLRQASVIIQRFWR

SEQ ID NO: 23386 - protein, 31 aa, Artificial Sequence
  Quasi-synthetic sequence derived from human genome
VYRKYICTSFYPWVNILKISFKRKKFFIHQR

SEQ ID NO: 23387 - protein, 31 aa, Artificial Sequence
  Quasi-synthetic sequence derived from human genome
NKKLKQIFLSVLRHVRYWVKDRSLRLHRFTR

SEQ ID NO: 23388 - protein, 31 aa, Artificial Sequence
  Quasi-synthetic sequence derived from human genome
LNRFLLLFIGFVCVLLSFFMARVFMRMKLPR

SEQ ID NO: 23389 - protein, 31 aa, Artificial Sequence
  Quasi-synthetic sequence derived from human genome
AMVWRRLLRKRWVLALVFGLSLVYFLSSTFK

SEQ ID NO: 23390 - protein, 31 aa, Artificial Sequence
  Quasi-synthetic sequence derived from human genome
LMFRTMQRRCLPSMAFKKPWRGPVRLQILKR

SEQ ID NO: 23391 - protein, 31 aa, Artificial Sequence
  Quasi-synthetic sequence derived from human genome
RRLRKNLRALVVVHATWYVKAFLALLRPFIS

SEQ ID NO: 23392 - protein, 31 aa, Artificial Sequence
  Quasi-synthetic sequence derived from human genome
AVILLLLLLLLLFLILRHRRQGKHWTSTQRK

SEQ ID NO: 23393 - protein, 31 aa, Artificial Sequence
  Quasi-synthetic sequence derived from human genome
LHRWLRIKLWISTVALALVPFLLLIPKFARW

SEQ ID NO: 23394 - protein, 31 aa, Artificial Sequence
  Quasi-synthetic sequence derived from human genome
WWIIRGPMMLCVTVNFFIFLKILKLLISKLK

SEQ ID NO: 23395 - protein, 31 aa, Artificial Sequence
  Quasi-synthetic sequence derived from human genome
RALRYYYNKRILHKTKGKRFTYKFNFNKLVL

SEQ ID NO: 23396 - protein, 31 aa, Artificial Sequence
  Quasi-synthetic sequence derived from human genome
LVVFKSAPILKRALKVKQAMMQLYVLKLLKV

SEQ ID NO: 23397 - protein, 31 aa, Artificial Sequence
  Quasi-synthetic sequence derived from human genome
WRKWKQLSRLQRNMILFLLAFLLFCGLLFYI

SEQ ID NO: 23398 - protein, 31 aa, Artificial Sequence
  Quasi-synthetic sequence derived from human genome
LASLNQILDPWVYLLLRKILLRKFCQMRKRR

SEQ ID NO: 23399 - protein, 31 aa, Artificial Sequence
  Quasi-synthetic sequence derived from human genome
RLLIYKQGRKLFPIKLKNKKGLVSLIDLLVL

SEQ ID NO: 23400 - protein, 31 aa, Artificial Sequence
  Quasi-synthetic sequence derived from human genome
PLFLKLFICFIFIRSSPTIVSNKRVSKRKFI

SEQ ID NO: 23401 - protein, 31 aa, Artificial Sequence
  Quasi-synthetic sequence derived from human genome
NLPRLCIRKFFPKKKCFVFDRPVHRRKLAQL

SEQ ID NO: 23402 - protein, 31 aa, Artificial Sequence
  Quasi-synthetic sequence derived from human genome
PFFKYCLLRKSFTCWKKNVRLQGLHRLQKFL

SEQ ID NO: 23403 - protein, 31 aa, Artificial Sequence
  Quasi-synthetic sequence derived from human genome
TIVSQRKQIKRKAPRGFLKRVFKRKKPQLRL

SEQ ID NO: 23404 - protein, 31 aa, Artificial Sequence
  Quasi-synthetic sequence derived from human genome
LRALRLLRIFKVTKYWASLRNLVVSLLNSMK

SEQ ID NO: 23405 - protein, 31 aa, Artificial Sequence
  Quasi-synthetic sequence derived from human genome
WRLTWRVVSPLLLTIFVAYIILLFWKPLRYK

SEQ ID NO: 23406 - protein, 31 aa, Artificial Sequence
  Quasi-synthetic sequence derived from human genome
KGRRRRRREYCKFALLLVLYTLVLLLVPSVL

SEQ ID NO: 23407 - protein, 31 aa, Artificial Sequence
  Quasi-synthetic sequence derived from human genome
VRRTMNIVPRTKVKTIKMFLILNLLFLLSWL

SEQ ID NO: 23408 - protein, 31 aa, Artificial Sequence
  Quasi-synthetic sequence derived from human genome
AALFCLQYLGVRVLLRFQRKLSVLLLLLGRR

SEQ ID NO: 23409 - protein, 31 aa, Artificial Sequence
  Quasi-synthetic sequence derived from human genome
IFLLIILSYIKIGKNLLRISKRRSKFPNSGK

SEQ ID NO: 23410 - protein, 31 aa, Artificial Sequence
  Quasi-synthetic sequence derived from human genome
MWRRYRAKKYLCKVKAACKIQAWYRCWRAHK

SEQ ID NO: 23411 - protein, 31 aa, Artificial Sequence
  Quasi-synthetic sequence derived from human genome
HIPWITAVLPTVIICVMVFCLILWKWKKKKR

SEQ ID NO: 23412 - protein, 31 aa, Artificial Sequence
  Quasi-synthetic sequence derived from human genome
FRKKSFKIHQKAIKKKGNLYGFALLRRRALQ

SEQ ID NO: 23413 - protein, 31 aa, Artificial Sequence
  Quasi-synthetic sequence derived from human genome
FVWFLNPLKSIKYLICTRYKWLIIKIVLALL

SEQ ID NO: 23414 - protein, 31 aa, Artificial Sequence
  Quasi-synthetic sequence derived from human genome
QLRCFLKLTVNRVIWKIAKPPTCVLVRVRWW

SEQ ID NO: 23415 - protein, 31 aa, Artificial Sequence
  Quasi-synthetic sequence derived from human genome
KYRRRPALGWLARLLRSRAGSRKRPLTLLQR

SEQ ID NO: 23416 - protein, 31 aa, Artificial Sequence
  Quasi-synthetic sequence derived from human genome
LIQKIYRGWKCRTHFLLMKKSQIVIAAWYRR

SEQ ID NO: 23417 - protein, 31 aa, Artificial Sequence
  Quasi-synthetic sequence derived from human genome
RALALFVITCLVIFVLVHSFLKKLLGKKLTR

SEQ ID NO: 23418 - protein, 31 aa, Artificial Sequence
  Quasi-synthetic sequence derived from human genome
PLALGLAITALLLLMVACRLRLVKQKLKKAR

SEQ ID NO: 23419 - protein, 31 aa, Artificial Sequence
  Quasi-synthetic sequence derived from human genome
LGRKKAPHRLCGRFSRISMKLPRIPLRRQKL

SEQ ID NO: 23420 - protein, 31 aa, Artificial Sequence
  Quasi-synthetic sequence derived from human genome
FLFAFFIFIMSLLLISGQRPVNLTMRRKLRK

SEQ ID NO: 23421 - protein, 31 aa, Artificial Sequence
  Quasi-synthetic sequence derived from human genome
FRIIQTLFSCKNHKKAKAIKLILLVVIVFFL

SEQ ID NO: 23422 - protein, 31 aa, Artificial Sequence
  Quasi-synthetic sequence derived from human genome
LRALRLLRIFKITKYWASLRNLVVSLMSSMK

SEQ ID NO: 23423 - protein, 31 aa, Artificial Sequence
  Quasi-synthetic sequence derived from human genome
PFILLSHLQLFIKRVVLKTPAKRHKQLKNKL

SEQ ID NO: 23424 - protein, 31 aa, Artificial Sequence
  Quasi-synthetic sequence derived from human genome
FFRLFRVMRLIKLLSRAEGVRTLLWTFIKSF

SEQ ID NO: 23425 - protein, 31 aa, Artificial Sequence
  Quasi-synthetic sequence derived from human genome
IFYLLKIANFSNLLFLHLKRRVRSVILVILL

SEQ ID NO: 23426 - protein, 31 aa, Artificial Sequence
  Quasi-synthetic sequence derived from human genome
RWARPFYLAFVFCLALGLLQAIKLYLRRQRL

SEQ ID NO: 23427 - protein, 31 aa, Artificial Sequence
  Quasi-synthetic sequence derived from human genome
RARLAFRNLGALLPRLHQLCCRMPRTLRRLF

SEQ ID NO: 23428 - protein, 31 aa, Artificial Sequence
  Quasi-synthetic sequence derived from human genome
RYLRRFREMKPRVLQRWSRQILRGLHFLHSR

SEQ ID NO: 23429 - protein, 31 aa, Artificial Sequence
  Quasi-synthetic sequence derived from human genome
KLKRKYWWKNCKMMIMLGAICAIIVVVIVSK

SEQ ID NO: 23430 - protein, 31 aa, Artificial Sequence
  Quasi-synthetic sequence derived from human genome
FRYLQRLLLVHGRWSYFRMCKFLCYFFYKNF

SEQ ID NO: 23431 - protein, 31 aa, Artificial Sequence
  Quasi-synthetic sequence derived from human genome
LVAGVLVLLVSLGVAIHLCCRRRRARLRFMK

SEQ ID NO: 23432 - protein, 31 aa, Artificial Sequence
  Quasi-synthetic sequence derived from human genome
LLWKRLLIARRSRKGFFAQIVLPAVFVCIAL

SEQ ID NO: 23433 - protein, 31 aa, Artificial Sequence
  Quasi-synthetic sequence derived from human genome
FFRQLNLYGFRKRRQCTFRTFTRIFSAKRLV

SEQ ID NO: 23434 - protein, 31 aa, Artificial Sequence
  Quasi-synthetic sequence derived from human genome
PRKPQPCRCRRRVRPSIRLLSPVLSLILLLI

SEQ ID NO: 23435 - protein, 31 aa, Artificial Sequence
  Quasi-synthetic sequence derived from human genome
RALRYYYNKRILHKTKGKRFTYKFNFSKLIV

SEQ ID NO: 23436 - protein, 31 aa, Artificial Sequence
  Quasi-synthetic sequence derived from human genome
WLVWLRFHKKKWQLQARQRLARRKRQRLESA

SEQ ID NO: 23437 - protein, 31 aa, Artificial Sequence
  Quasi-synthetic sequence derived from human genome
WKRWFKFRKRKGEKRPRPNHKAVARRAKLKF

SEQ ID NO: 23438 - protein, 31 aa, Artificial Sequence
  Quasi-synthetic sequence derived from human genome
CYRLAVRTVIRAFVKCTKARYLKKKNMRTLW

SEQ ID NO: 23439 - protein, 31 aa, Artificial Sequence
  Quasi-synthetic sequence derived from human genome
RYPLLLPKGVVLKLKPVATRFPRKAWRQKRS

SEQ ID NO: 23440 - protein, 31 aa, Artificial Sequence
  Quasi-synthetic sequence derived from human genome
KLRIRTKAAVKIQAWWRGTLVRRTLLHAALR

SEQ ID NO: 23441 - protein, 31 aa, Artificial Sequence
  Quasi-synthetic sequence derived from human genome
ILATLGVALLFIVRKKRKEKRLKRLRDAKSL

SEQ ID NO: 23442 - protein, 31 aa, Artificial Sequence
  Quasi-synthetic sequence derived from human genome
KTLLRCRNEKKRHRAVRLIFTIMIVYFLFWA

SEQ ID NO: 23443 - protein, 31 aa, Artificial Sequence
  Quasi-synthetic sequence derived from human genome
KAKPKKQSKKKVPFWNVQNKIILFTVFLFIL

SEQ ID NO: 23444 - protein, 31 aa, Artificial Sequence
  Quasi-synthetic sequence derived from human genome
LVILTFQWRFYLSFRKLMRWILILVIALWFI

SEQ ID NO: 23445 - protein, 31 aa, Artificial Sequence
  Quasi-synthetic sequence derived from human genome
LRKTFWFFFQRHKLKGTSFLLGGVVIVLLRW

SEQ ID NO: 23446 - protein, 31 aa, Artificial Sequence
  Quasi-synthetic sequence derived from human genome
PFNVIPSPKSLWYLIKWIWTHLCKKKMRRKP

SEQ ID NO: 23447 - protein, 31 aa, Artificial Sequence
  Quasi-synthetic sequence derived from human genome
LRRVKVLLVLNLIAVAGFVLFLAKCRPIAVR

SEQ ID NO: 23448 - protein, 31 aa, Artificial Sequence
  Quasi-synthetic sequence derived from human genome
KTRRWRGLGSLFRRACCVALPLQLLLLLFLL

SEQ ID NO: 23449 - protein, 31 aa, Artificial Sequence
  Quasi-synthetic sequence derived from human genome
FKHTLQQKVFILFLTLWLLSLLKLLNVRRLF

SEQ ID NO: 23450 - protein, 31 aa, Artificial Sequence
  Quasi-synthetic sequence derived from human genome
PYFRLKKVVKWYLSGFYKKPKGLKKPYNPIL

SEQ ID NO: 23451 - protein, 31 aa, Artificial Sequence
  Quasi-synthetic sequence derived from human genome
RRRMPGIGWLKKCYQMIDRRLRKNLKSLIIV

SEQ ID NO: 23452 - protein, 31 aa, Artificial Sequence
  Quasi-synthetic sequence derived from human genome
MFAKTWRVHAIFKNVKMKKKIIKDQKLLVIV

SEQ ID NO: 23453 - protein, 31 aa, Artificial Sequence
  Quasi-synthetic sequence derived from human genome
RLLRGLWQRWRRYKYRFVPWIALNLSHNPRT

SEQ ID NO: 23454 - protein, 31 aa, Artificial Sequence
  Quasi-synthetic sequence derived from human genome
ILMVLIPLILLVLLLLSVVFLATYYKRKRTK

SEQ ID NO: 23455 - protein, 31 aa, Artificial Sequence
  Quasi-synthetic sequence derived from human genome
RLQSWVRMWCVRQRYCRLLNAVRIIQVYWRW

SEQ ID NO: 23456 - protein, 31 aa, Artificial Sequence
  Quasi-synthetic sequence derived from human genome
KKPLIFLGCCFFSTLVLLLSIAIFQRQKRRK

SEQ ID NO: 23457 - protein, 31 aa, Artificial Sequence
  Quasi-synthetic sequence derived from human genome
RRKTARMLMIVLLVFAICYLPISILNVLKRV

SEQ ID NO: 23458 - protein, 31 aa, Artificial Sequence
  Quasi-synthetic sequence derived from human genome
MYRWLVRILGTIFRFCDRSVPPARALLKRRR

SEQ ID NO: 23459 - protein, 31 aa, Artificial Sequence
  Quasi-synthetic sequence derived from human genome
RVLSVARPGLWLYTHPLIKLLFLPRRSRCKF

SEQ ID NO: 23460 - protein, 31 aa, Artificial Sequence
  Quasi-synthetic sequence derived from human genome
RLKNIRKVYGRCMWYRLRLLKPQPNIIPTVK

SEQ ID NO: 23461 - protein, 31 aa, Artificial Sequence
  Quasi-synthetic sequence derived from human genome
LIAIAIVAVLLVLTCCFCICKKCLFKKKNKK

SEQ ID NO: 23462 - protein, 31 aa, Artificial Sequence
  Quasi-synthetic sequence derived from human genome
IILVAILAGILMLALLVFILWKCGFFKRNKK

SEQ ID NO: 23463 - protein, 31 aa, Artificial Sequence
  Quasi-synthetic sequence derived from human genome
IIRTPILMTILINFLIFIRILGILLSKLRTR

SEQ ID NO: 23464 - protein, 31 aa, Artificial Sequence
  Quasi-synthetic sequence derived from human genome
KICAFLLRKKRFGQWTKLLCVIKDTKLLCYK

SEQ ID NO: 23465 - protein, 31 aa, Artificial Sequence
  Quasi-synthetic sequence derived from human genome
FHFLYGKNRSRIPLLRKRRFQLYRSMNPRAR

SEQ ID NO: 23466 - protein, 31 aa, Artificial Sequence
  Quasi-synthetic sequence derived from human genome
KINRPRTELKKKLFKRRRVLNRERRLRHRVV

SEQ ID NO: 23467 - protein, 31 aa, Artificial Sequence
  Quasi-synthetic sequence derived from human genome
LLTILAALALLVLILLCLLIYYCRRRCLKPR

SEQ ID NO: 23468 - protein, 31 aa, Artificial Sequence
  Quasi-synthetic sequence derived from human genome
YILFRATRKPLSGRTPRLVYKWFLLIYKLSY

SEQ ID NO: 23469 - protein, 31 aa, Artificial Sequence
  Quasi-synthetic sequence derived from human genome
LLLLHNQLLYERFKRQQHALRNRRLLRKVIK

SEQ ID NO: 23470 - protein, 31 aa, Artificial Sequence
  Quasi-synthetic sequence derived from human genome
FIAVGILGVVLLAIFVALFFLTKKRRQRQRL

SEQ ID NO: 23471 - protein, 31 aa, Artificial Sequence
  Quasi-synthetic sequence derived from human genome
IVAAVVVVVIIIFTVVLILLKMYNRKMRTRR

SEQ ID NO: 23472 - protein, 31 aa, Artificial Sequence
  Quasi-synthetic sequence derived from human genome
NLIHLFIFRKSNFIFDKLHKVGIKTRRQWRR

SEQ ID NO: 23473 - protein, 31 aa, Artificial Sequence
  Quasi-synthetic sequence derived from human genome
MARGSIFKAIAHFKRTTFLKKHRMLGRLKYK

SEQ ID NO: 23474 - protein, 31 aa, Artificial Sequence
  Quasi-synthetic sequence derived from human genome
FVRGYLVRKQMRLQRKAVISLQSYFRMRKAR

SEQ ID NO: 23475 - protein, 31 aa, Artificial Sequence
  Quasi-synthetic sequence derived from human genome
AVVLLLLLLLLLFLILRHRRQGKHWTSTQRK

SEQ ID NO: 23476 - protein, 31 aa, Artificial Sequence
  Quasi-synthetic sequence derived from human genome
KFFLLKRFNKEKLGLLLLTFLGIVAAVLVKK

SEQ ID NO: 23477 - protein, 31 aa, Artificial Sequence
  Quasi-synthetic sequence derived from human genome
ISGYLSRCKRGKRHWKKLWFVIKGKVLYTYM

SEQ ID NO: 23478 - protein, 31 aa, Artificial Sequence
  Quasi-synthetic sequence derived from human genome
KKKIRWDPVRRRFIQSCPIIRIPNRFLRGHR

SEQ ID NO: 23479 - protein, 31 aa, Artificial Sequence
  Quasi-synthetic sequence derived from human genome
KRKYWWKNLKMMIILGVICAIILIIIIVYFS

SEQ ID NO: 23480 - protein, 31 aa, Artificial Sequence
  Quasi-synthetic sequence derived from human genome
AKLLPLRALPLLFNLIKVVPRVFGRMVGKSR

SEQ ID NO: 23481 - protein, 31 aa, Artificial Sequence
  Quasi-synthetic sequence derived from human genome
MHKNMRVLSRTSKFRRLRQLLRRRKKRRQGR

SEQ ID NO: 23482 - protein, 31 aa, Artificial Sequence
  Quasi-synthetic sequence derived from human genome
ILLRLWRVARIINGIIISVKTRSERQLLRLK

SEQ ID NO: 23483 - protein, 31 aa, Artificial Sequence
  Quasi-synthetic sequence derived from human genome
TFVCLILLIAVLVYWRGCNKIKSKGFPRRFR

SEQ ID NO: 23484 - protein, 31 aa, Artificial Sequence
  Quasi-synthetic sequence derived from human genome
RKRLRCRRKTVLVLMCILTAYVLCWAPFYGF

SEQ ID NO: 23485 - protein, 31 aa, Artificial Sequence
  Quasi-synthetic sequence derived from human genome
LACVATVIFVVTKFCLFCFWKFARKGKKGKR

SEQ ID NO: 23486 - protein, 31 aa, Artificial Sequence
  Quasi-synthetic sequence derived from human genome
KVFIKYTKLKKIFLQHNCIRHISRKAFFGLC

SEQ ID NO: 23487 - protein, 31 aa, Artificial Sequence
  Quasi-synthetic sequence derived from human genome
REGSRALSRRYLRRLLLLLLLLLLRQPVTRA

SEQ ID NO: 23488 - protein, 31 aa, Artificial Sequence
  Quasi-synthetic sequence derived from human genome
LFCIQYNVRAFMNVKHWPWMKLFFKIKPLLK

SEQ ID NO: 23489 - protein, 31 aa, Artificial Sequence
  Quasi-synthetic sequence derived from human genome
ITILVVVLVLVIVGIGVLILLVRYRKCIKLK

SEQ ID NO: 23490 - protein, 31 aa, Artificial Sequence
  Quasi-synthetic sequence derived from human genome
LILAFCAGVLLTLLLIAFIFLIIKSYRKYRR

SEQ ID NO: 23491 - protein, 31 aa, Artificial Sequence
  Quasi-synthetic sequence derived from human genome
LRRRYLRLRYEDLVRQPRAQLRRLLRFSGLR

SEQ ID NO: 23492 - protein, 31 aa, Artificial Sequence
  Quasi-synthetic sequence derived from human genome
FFRLFRVMRLVKLLSRGEGIRTLLWTFIKSF

SEQ ID NO: 23493 - protein, 31 aa, Artificial Sequence
  Quasi-synthetic sequence derived from human genome
PFLLLILLCMSLLLFQVIRLYQRRRWTIRAM

SEQ ID NO: 23494 - protein, 31 aa, Artificial Sequence
  Quasi-synthetic sequence derived from human genome
LLRKRRFQLYRSMNSRARKNRSQIVLFQKRR

SEQ ID NO: 23495 - protein, 31 aa, Artificial Sequence
  Quasi-synthetic sequence derived from human genome
KKAGLLMALARLCFLLGRLCSRRLKLSQARV

SEQ ID NO: 23496 - protein, 31 aa, Artificial Sequence
  Quasi-synthetic sequence derived from human genome
VLVMAYGSLVFVLLFIFVKRQIMRFAMKSRR

SEQ ID NO: 23497 - protein, 31 aa, Artificial Sequence
  Quasi-synthetic sequence derived from human genome
FIRILGILLSKLRTRQMRCRDYRLRLARSTL

SEQ ID NO: 23498 - protein, 31 aa, Artificial Sequence
  Quasi-synthetic sequence derived from human genome
YRKVKLLNQVRLLRVQLCHMKNMFKTCRLAK

SEQ ID NO: 23499 - protein, 31 aa, Artificial Sequence
  Quasi-synthetic sequence derived from human genome
LYHARLWLHVLPTLPGTLCLRIFRWGPRRRR

SEQ ID NO: 23500 - protein, 31 aa, Artificial Sequence
  Quasi-synthetic sequence derived from human genome
VLYFNPWMRIFIQAKRVKTKHLCYCLYRPRK

SEQ ID NO: 23501 - protein, 31 aa, Artificial Sequence
  Quasi-synthetic sequence derived from human genome
WLSLLFKKLVGTKVLMASVQGSKRRKLRVYL

SEQ ID NO: 23502 - protein, 31 aa, Artificial Sequence
  Quasi-synthetic sequence derived from human genome
IFCIQYNIRSFMNVKHWPWMKLFFKIKPLLK

SEQ ID NO: 23503 - protein, 31 aa, Artificial Sequence
  Quasi-synthetic sequence derived from human genome
LFRIKCVTRIQAYWRGCVVRKWYRNLRKTVP

SEQ ID NO: 23504 - protein, 31 aa, Artificial Sequence
  Quasi-synthetic sequence derived from human genome
FIFLKILKLLISKLKAHQMCFRDYKYRLAKS

SEQ ID NO: 23505 - protein, 31 aa, Artificial Sequence
  Quasi-synthetic sequence derived from human genome
KCLYYLIWKNYKKYIIIAFILIILIIFLVLF

SEQ ID NO: 23506 - protein, 31 aa, Artificial Sequence
  Quasi-synthetic sequence derived from human genome
ILGFCGLTALYFLIRAFRLKKPQRRRYGLLA

SEQ ID NO: 23507 - protein, 31 aa, Artificial Sequence
  Quasi-synthetic sequence derived from human genome
LWRQQICAIARVRLLKLKHERKALLALLLIL

SEQ ID NO: 23508 - protein, 31 aa, Artificial Sequence
  Quasi-synthetic sequence derived from human genome
YIWLLVLLLHKHRSILLRRLCSLMGTVFLLR

SEQ ID NO: 23509 - protein, 31 aa, Artificial Sequence
  Quasi-synthetic sequence derived from human genome
LACVATVLFIITKCCLFCFWKFARKGKKGKR

SEQ ID NO: 23510 - protein, 31 aa, Artificial Sequence
  Quasi-synthetic sequence derived from human genome
FRKRRADMPRVFVFRALLLVLIFLFVVSYWL

SEQ ID NO: 23511 - protein, 31 aa, Artificial Sequence
  Quasi-synthetic sequence derived from human genome
RSRSRRISLRKKLKLPIGKRNWLKRSSLSGL

SEQ ID NO: 23512 - protein, 31 aa, Artificial Sequence
  Quasi-synthetic sequence derived from human genome
KLKRKYWWKNCKMMIMLGAICAIIVVVIVIY

SEQ ID NO: 23513 - protein, 31 aa, Artificial Sequence
  Quasi-synthetic sequence derived from human genome
KVPRKKVNVKVFIIIAVFFICFVPFHFARIP

SEQ ID NO: 23514 - protein, 31 aa, Artificial Sequence
  Quasi-synthetic sequence derived from human genome
LVAGVLVLLVSLGVAMHLCCRRRRARLRFMK

SEQ ID NO: 23515 - protein, 31 aa, Artificial Sequence
  Quasi-synthetic sequence derived from human genome
RKLLALGTWLLALLLTLPVMLAMRLVRRGPK

SEQ ID NO: 23516 - protein, 31 aa, Artificial Sequence
  Quasi-synthetic sequence derived from human genome
RILINLMKYLQKWKRYRPLWKLDKAIVMEKF

SEQ ID NO: 23517 - protein, 31 aa, Artificial Sequence
  Quasi-synthetic sequence derived from human genome
LLQRIAMLWGSGKCKALTKFKFVFFLRLSRA

SEQ ID NO: 23518 - protein, 31 aa, Artificial Sequence
  Quasi-synthetic sequence derived from human genome
LNMKQKHYVRGRALRSRLLRKQAWKQKWRKK

SEQ ID NO: 23519 - protein, 31 aa, Artificial Sequence
  Quasi-synthetic sequence derived from human genome
KLIRMGPQERWLLRTKRLHWSRLLFLLGMLI

SEQ ID NO: 23520 - protein, 31 aa, Artificial Sequence
  Quasi-synthetic sequence derived from human genome
ALFLKIPSDKIRISKIRGKSLRRKRSMGFII

SEQ ID NO: 23521 - protein, 31 aa, Artificial Sequence
  Quasi-synthetic sequence derived from human genome
FTRAQVRRILQRVPGKQRFGIYRFLPFFFVL

SEQ ID NO: 23522 - protein, 31 aa, Artificial Sequence
  Quasi-synthetic sequence derived from human genome
RQRYQQMRRSLVKFRSLVHAYVSRRRYLKLR

SEQ ID NO: 23523 - protein, 31 aa, Artificial Sequence
  Quasi-synthetic sequence derived from human genome
LVKPKIVKKRTKKFIRHQSDRYVKIKRNWRK

SEQ ID NO: 23524 - protein, 31 aa, Artificial Sequence
  Quasi-synthetic sequence derived from human genome
LRGLGKLRQVSLRRNRLRALPRALFRNLSSL

SEQ ID NO: 23525 - protein, 31 aa, Artificial Sequence
  Quasi-synthetic sequence derived from human genome
KCRGLPFSSFLILPFQRITRLKLLVQNILKR

SEQ ID NO: 23526 - protein, 31 aa, Artificial Sequence
  Quasi-synthetic sequence derived from human genome
LAKLKLFRHYYVLIVCYIYFTRIIAFLLKLA

SEQ ID NO: 23527 - protein, 31 aa, Artificial Sequence
  Quasi-synthetic sequence derived from human genome
RRLRGLRRAAAGTSRLLFQRLLPCGVIKFRY

SEQ ID NO: 23528 - protein, 31 aa, Artificial Sequence
  Quasi-synthetic sequence derived from human genome
LMQLYSARQRRRLNRGLRRKQHSLLKRLRKA

SEQ ID NO: 23529 - protein, 31 aa, Artificial Sequence
  Quasi-synthetic sequence derived from human genome
VKHWWVRLLYRPYCKKNPQHLYSFIAKILWR

SEQ ID NO: 23530 - protein, 31 aa, Artificial Sequence
  Quasi-synthetic sequence derived from human genome
LIFAGLAFIVGLLILLSRRFRCGGNKKRRQI

SEQ ID NO: 23531 - protein, 31 aa, Artificial Sequence
  Quasi-synthetic sequence derived from human genome
IMPPLFNPIIYSLRNKQIKVAIKKIMKRIFY

SEQ ID NO: 23532 - protein, 31 aa, Artificial Sequence
  Quasi-synthetic sequence derived from human genome
FEKKKDIRRGIGYLKLICFLIPFLLSLKKKM

SEQ ID NO: 23533 - protein, 31 aa, Artificial Sequence
  Quasi-synthetic sequence derived from human genome
SWVLLALALLAWCRRSRGLKALRLCRALALL

SEQ ID NO: 23534 - protein, 31 aa, Artificial Sequence
  Quasi-synthetic sequence derived from human genome
GYWRRYSTRQRFLKLKYYSIILQSRIRMIIA

SEQ ID NO: 23535 - protein, 31 aa, Artificial Sequence
  Quasi-synthetic sequence derived from human genome
KKIDKISRIGFPMAFLIFNMFYWIIYKIVRR

SEQ ID NO: 23536 - protein, 31 aa, Artificial Sequence
  Quasi-synthetic sequence derived from human genome
LLLLRWRRPALHRPIKVNLLIPVAYLVFWAF

SEQ ID NO: 23537 - protein, 31 aa, Artificial Sequence
  Quasi-synthetic sequence derived from human genome
PFVLLLLLLISLLCLYWKARKLSTLRSNTRK

SEQ ID NO: 23538 - protein, 31 aa, Artificial Sequence
  Quasi-synthetic sequence derived from human genome
FHRWKVVLLVRTDKRSDSLIRKKFRMMKIPK

SEQ ID NO: 23539 - protein, 31 aa, Artificial Sequence
  Quasi-synthetic sequence derived from human genome
MLQVSKKRLISVKNYRMIKKRKGLRLIDALV

SEQ ID NO: 23540 - protein, 31 aa, Artificial Sequence
  Quasi-synthetic sequence derived from human genome
QFRLFKFCTCLATVFSFLKRLICRSGRGRKL

SEQ ID NO: 23541 - protein, 31 aa, Artificial Sequence
  Quasi-synthetic sequence derived from human genome
IFYLLKIANFSNLIFLHLKRRVKSVILVMLL

SEQ ID NO: 23542 - protein, 31 aa, Artificial Sequence
  Quasi-synthetic sequence derived from human genome
IFYLLKIANFSNFIFLHLKRRVKSVILVMLL

SEQ ID NO: 23543 - protein, 31 aa, Artificial Sequence
  Quasi-synthetic sequence derived from human genome
ITRNPVFPRFIKIIEVKNKKLVELLRRKVRL

SEQ ID NO: 23544 - protein, 31 aa, Artificial Sequence
  Quasi-synthetic sequence derived from human genome
VALAVAVLKTVILGLLCLLLLWWRRRKGSRA

SEQ ID NO: 23545 - protein, 31 aa, Artificial Sequence
  Quasi-synthetic sequence derived from human genome
RKQLMIYRLPQVLRLHLKRFRWSGRNHREKI

SEQ ID NO: 23546 - protein, 31 aa, Artificial Sequence
  Quasi-synthetic sequence derived from human genome
WLRHRATQSGQRRWRHALHRRLLNRRLLLAV

SEQ ID NO: 23547 - protein, 31 aa, Artificial Sequence
  Quasi-synthetic sequence derived from human genome
AFLLKHVRRNKLGYVSVKLLTSFKKVKHLTR

SEQ ID NO: 23548 - protein, 31 aa, Artificial Sequence
  Quasi-synthetic sequence derived from human genome
ILVTILCLLAAGFVVYLKRKTLIRLLFTNKK

SEQ ID NO: 23549 - protein, 31 aa, Artificial Sequence
  Quasi-synthetic sequence derived from human genome
LPCTTRLKSMLRLLLVKKPSVRSLALKLLAF

SEQ ID NO: 23550 - protein, 31 aa, Artificial Sequence
  Quasi-synthetic sequence derived from human genome
LVFFVSRKRRILISGSRRRDVIKSIVKIPHL

SEQ ID NO: 23551 - protein, 31 aa, Artificial Sequence
  Quasi-synthetic sequence derived from human genome
FYFLKIANFSNSIFLYLKWRVKKVVLVLLLV

SEQ ID NO: 23552 - protein, 31 aa, Artificial Sequence
  Quasi-synthetic sequence derived from human genome
RALRYYYNKRILHKTKGKRFTYKFNFNKLVM

SEQ ID NO: 23553 - protein, 31 aa, Artificial Sequence
  Quasi-synthetic sequence derived from human genome
KVIVVRNRRLGVLYRAVQLLILLYFVWYVFI

SEQ ID NO: 23554 - protein, 31 aa, Artificial Sequence
  Quasi-synthetic sequence derived from human genome
HRRIKLSPLMMYEKLSMIRFRYRILRSQHFR

SEQ ID NO: 23555 - protein, 31 aa, Artificial Sequence
  Quasi-synthetic sequence derived from human genome
KMLVTISCILVGVLLLFVLLLVVRRRRREQR

SEQ ID NO: 23556 - protein, 31 aa, Artificial Sequence
  Quasi-synthetic sequence derived from human genome
IFYLLKIANFSNLIFLHLKRRVKSVVLVILL

SEQ ID NO: 23557 - protein, 31 aa, Artificial Sequence
  Quasi-synthetic sequence derived from human genome
FRKQYVRRRWKLSFSIVSLCNHLTRSLMKKV

SEQ ID NO: 23558 - protein, 31 aa, Artificial Sequence
  Quasi-synthetic sequence derived from human genome
RRLRKNLKSLIIVHPSWFIRTLLAVTRPFIS

SEQ ID NO: 23559 - protein, 31 aa, Artificial Sequence
  Quasi-synthetic sequence derived from human genome
ALRVMQRNCAAYLKLRHWQWWRLFTKVKPLL

SEQ ID NO: 23560 - protein, 31 aa, Artificial Sequence
  Quasi-synthetic sequence derived from human genome
LRGRGAPLGPWLRALGPWLRVRRGLLVLRLA

SEQ ID NO: 23561 - protein, 31 aa, Artificial Sequence
  Quasi-synthetic sequence derived from human genome
RLWKARVLKLVLKTAKDSRLGLNSKWLSLKL

SEQ ID NO: 23562 - protein, 31 aa, Artificial Sequence
  Quasi-synthetic sequence derived from human genome
KKIALREIRMLKQLKHPNLVNLLEVFRRKRR

SEQ ID NO: 23563 - protein, 31 aa, Artificial Sequence
  Quasi-synthetic sequence derived from human genome
KQRRDLLHLCCKKLKILGMPFRNIRSILKMV

SEQ ID NO: 23564 - protein, 31 aa, Artificial Sequence
  Quasi-synthetic sequence derived from human genome
LWFAAWLKVFYCLRIANFNHPLFFLMKRKII

SEQ ID NO: 23565 - protein, 31 aa, Artificial Sequence
  Quasi-synthetic sequence derived from human genome
SRIVLWGFRWLIFRIMLGAGLIKIRGDRCWR

SEQ ID NO: 23566 - protein, 31 aa, Artificial Sequence
  Quasi-synthetic sequence derived from human genome
MLSLGVGILVGCLCLLLAVYFIARKIRKKRL

SEQ ID NO: 23567 - protein, 31 aa, Artificial Sequence
  Quasi-synthetic sequence derived from human genome
RRLRAIYTIMRWFRRHKVRAHLAELQRRFQA

SEQ ID NO: 23568 - protein, 31 aa, Artificial Sequence
  Quasi-synthetic sequence derived from human genome
KRWFQLGHSMNPRARKNRSRIPLLRKRRFQL

SEQ ID NO: 23569 - protein, 31 aa, Artificial Sequence
  Quasi-synthetic sequence derived from human genome
RRRMPGLGWMKKCYQMIDRRLRKNLKSFIIV

SEQ ID NO: 23570 - protein, 31 aa, Artificial Sequence
  Quasi-synthetic sequence derived from human genome
LRCLYHWHRPVLNRRWSRLCLPKQYLFTMKL

SEQ ID NO: 23571 - protein, 31 aa, Artificial Sequence
  Quasi-synthetic sequence derived from human genome
RALRYYYNKRILHKTKGKRFTYKFNFSKVVL

SEQ ID NO: 23572 - protein, 31 aa, Artificial Sequence
  Quasi-synthetic sequence derived from human genome
VRRRSFSISPVRLRRSRTPLRRRFSRSPIRR

SEQ ID NO: 23573 - protein, 31 aa, Artificial Sequence
  Quasi-synthetic sequence derived from human genome
WRVLHALLCLHRTLTSWLRVRFGTWNWIWRR

SEQ ID NO: 23574 - protein, 31 aa, Artificial Sequence
  Quasi-synthetic sequence derived from human genome
CKRKQLLKPVFLNSWIDLRATYKLFYRRKPK

SEQ ID NO: 23575 - protein, 31 aa, Artificial Sequence
  Quasi-synthetic sequence derived from human genome
KIRKALDRLRKKRHLLRRQRTRREFPVISVV

SEQ ID NO: 23576 - protein, 31 aa, Artificial Sequence
  Quasi-synthetic sequence derived from human genome
LPFFCFLLGKCFKKGLKGKGFVLLVKLACIV

SEQ ID NO: 23577 - protein, 31 aa, Artificial Sequence
  Quasi-synthetic sequence derived from human genome
KFKLLSSLPHWRRIAQKIIREPRKKRVPKKP

SEQ ID NO: 23578 - protein, 31 aa, Artificial Sequence
  Quasi-synthetic sequence derived from human genome
FFSGLIILLIFRLIWRSVKKWQIIKGTGIIL

SEQ ID NO: 23579 - protein, 31 aa, Artificial Sequence
  Quasi-synthetic sequence derived from human genome
LLVMAICYTGIIKTLLRCPSKKKYKAIRLIF

SEQ ID NO: 23580 - protein, 31 aa, Artificial Sequence
  Quasi-synthetic sequence derived from human genome
FFILRRKPVEQKKIFTIQGCYPVIRCLLRRR

SEQ ID NO: 23581 - protein, 31 aa, Artificial Sequence
  Quasi-synthetic sequence derived from human genome
FHFLYRKNRSRIPLLRKRWFQLGHSMNPRAR

SEQ ID NO: 23582 - protein, 31 aa, Artificial Sequence
  Quasi-synthetic sequence derived from human genome
LGWLCLLLLPIPLIVWVKRKEVQKTCRKHRK

SEQ ID NO: 23583 - protein, 31 aa, Artificial Sequence
  Quasi-synthetic sequence derived from human genome
RFTLPRFLQRRSSRRKVCTKTFLGPRIIGLR

SEQ ID NO: 23584 - protein, 31 aa, Artificial Sequence
  Quasi-synthetic sequence derived from human genome
RQRGVGQQAMSLAILRVIRLVRVFRIFKLSR

SEQ ID NO: 23585 - protein, 31 aa, Artificial Sequence
  Quasi-synthetic sequence derived from human genome
WRKRCLYLFVLLLLIILVVNLALTIWILKVM

SEQ ID NO: 23586 - protein, 31 aa, Artificial Sequence
  Quasi-synthetic sequence derived from human genome
FKNLFYRTYMLFKNASGKRRFLLCLLLFTVI

SEQ ID NO: 23587 - protein, 31 aa, Artificial Sequence
  Quasi-synthetic sequence derived from human genome
LLVCVATVIFIVTKCCLFCFWKFARKAKKGK

SEQ ID NO: 23588 - protein, 31 aa, Artificial Sequence
  Quasi-synthetic sequence derived from human genome
RALWFWAFSLQAKVWATWLAFVLERRRKKAR

SEQ ID NO: 23589 - protein, 31 aa, Artificial Sequence
  Quasi-synthetic sequence derived from human genome
KRNNGQLMKTIIRKINKMKTLKRKKLLNQIL

SEQ ID NO: 23590 - protein, 31 aa, Artificial Sequence
  Quasi-synthetic sequence derived from human genome
WMIVLFLLLVLVVIVVCSIRKSSRTLKKGPR

SEQ ID NO: 23591 - protein, 31 aa, Artificial Sequence
  Quasi-synthetic sequence derived from human genome
LFLTCISVHRCLGVLRPLRSLRWGRARYARR

SEQ ID NO: 23592 - protein, 31 aa, Artificial Sequence
  Quasi-synthetic sequence derived from human genome
IAFWARRASRTRLAAWARRALLSLRSPKARR

SEQ ID NO: 23593 - protein, 31 aa, Artificial Sequence
  Quasi-synthetic sequence derived from human genome
IIRIMRVLRIARVLKLLKMAVGMRALLDTVM

SEQ ID NO: 23594 - protein, 31 aa, Artificial Sequence
  Quasi-synthetic sequence derived from human genome
IRGWLLRKKYLRMRKAAITMQRYVRGYQARC

SEQ ID NO: 23595 - protein, 31 aa, Artificial Sequence
  Quasi-synthetic sequence derived from human genome
IFCIQYNIRAFMNVKHWPWMKLYFKIKPLLK

SEQ ID NO: 23596 - protein, 31 aa, Artificial Sequence
  Quasi-synthetic sequence derived from human genome
RRLRKNLKSFIIVHPSWFIRTILAVTRPFIS

SEQ ID NO: 23597 - protein, 31 aa, Artificial Sequence
  Quasi-synthetic sequence derived from human genome
IAGALFILGALYSIKVMNRRRRNGFKRHKRK

SEQ ID NO: 23598 - protein, 31 aa, Artificial Sequence
  Quasi-synthetic sequence derived from human genome
LTVLMVVSGAVLVYFVVRTVRMRRRNRKTRR

SEQ ID NO: 23599 - protein, 31 aa, Artificial Sequence
  Quasi-synthetic sequence derived from human genome
KKTRFLRRKVQEGRLRRKQIKFEKDLRRIWL

SEQ ID NO: 23600 - protein, 31 aa, Artificial Sequence
  Quasi-synthetic sequence derived from human genome
NMRKNMRVLSRTSKFRRLRQLLRRRKKRQQV

SEQ ID NO: 23601 - protein, 31 aa, Artificial Sequence
  Quasi-synthetic sequence derived from human genome
KKLDLWRLPPILIIHLKRFQFVNGRWIKSQK

SEQ ID NO: 23602 - protein, 31 aa, Artificial Sequence
  Quasi-synthetic sequence derived from human genome
FFAVLFFLWRSFRSVRSRLYVGREKKLALML

SEQ ID NO: 23603 - protein, 31 aa, Artificial Sequence
  Quasi-synthetic sequence derived from human genome
LLYKRHKGRKLTVPVRRHAYLQQLFSKPFFR

SEQ ID NO: 23604 - protein, 31 aa, Artificial Sequence
  Quasi-synthetic sequence derived from human genome
RRFQLYRSMNPRARKNRSHIPLVRKRRFQLR

SEQ ID NO: 23605 - protein, 31 aa, Artificial Sequence
  Quasi-synthetic sequence derived from human genome
MVVLAFFVVQINKAKSRPKRRKPRVKRPQLM

SEQ ID NO: 23606 - protein, 31 aa, Artificial Sequence
  Quasi-synthetic sequence derived from human genome
LRRQRRLVRSQVLKYMVPGARVIRGLDWKWR

SEQ ID NO: 23607 - protein, 31 aa, Artificial Sequence
  Quasi-synthetic sequence derived from human genome
LLIIRSLRQGLRVEKRLKTKAVRMIAIVLAI

SEQ ID NO: 23608 - protein, 31 aa, Artificial Sequence
  Quasi-synthetic sequence derived from human genome
RRLRKNLKSLIIVHPSWFIRTVLAISRPFIS

SEQ ID NO: 23609 - protein, 31 aa, Artificial Sequence
  Quasi-synthetic sequence derived from human genome
LVGILHLQRALVLRRKRKRMTDPTRRFFKVT

SEQ ID NO: 23610 - protein, 31 aa, Artificial Sequence
  Quasi-synthetic sequence derived from human genome
KFYIHAIGIGKCKRRIVKCGKLHKKGRKLCV

SEQ ID NO: 23611 - protein, 31 aa, Artificial Sequence
  Quasi-synthetic sequence derived from human genome
LMMLVCGLVWVPIIKKKQKHRQKSNFLRSLK

SEQ ID NO: 23612 - protein, 31 aa, Artificial Sequence
  Quasi-synthetic sequence derived from human genome
KKGSLSVLRSFRLLRVFKLAKSWPTLNTLIK

SEQ ID NO: 23613 - protein, 31 aa, Artificial Sequence
  Quasi-synthetic sequence derived from human genome
KCYGKIKASVLLIQAFVRGWKARKNYRKYFR

SEQ ID NO: 23614 - protein, 31 aa, Artificial Sequence
  Quasi-synthetic sequence derived from human genome
KRVRFTKRKQKVPGFPKRFTVKPVVLGFPYF

SEQ ID NO: 23615 - protein, 31 aa, Artificial Sequence
  Quasi-synthetic sequence derived from human genome
KQRKDLLHLCCKKLKILGMPFRNIRSILKMV

SEQ ID NO: 23616 - protein, 31 aa, Artificial Sequence
  Quasi-synthetic sequence derived from human genome
QRKKLKDFSGGWRMRVALARALFIRPFMLLL

SEQ ID NO: 23617 - protein, 31 aa, Artificial Sequence
  Quasi-synthetic sequence derived from human genome
WRFLRIVCKTARRDLFGLSVLIRVRLELRRH

SEQ ID NO: 23618 - protein, 31 aa, Artificial Sequence
  Quasi-synthetic sequence derived from human genome
KVRKVLQLLRLRQIFNGTFVKLNKASINMLR

SEQ ID NO: 23619 - protein, 31 aa, Artificial Sequence
  Quasi-synthetic sequence derived from human genome
GARLYCLKIHGLSSLWRLFRGKKWNVLRQRV

SEQ ID NO: 23620 - protein, 31 aa, Artificial Sequence
  Quasi-synthetic sequence derived from human genome
KLQRNRLAKTKKPFKIIVTIIITFFLCWCPY

SEQ ID NO: 23621 - protein, 31 aa, Artificial Sequence
  Quasi-synthetic sequence derived from human genome
ALKVLQRNCAAYLKLRHWQWWRVFTKVKPLL

SEQ ID NO: 23622 - protein, 31 aa, Artificial Sequence
  Quasi-synthetic sequence derived from human genome
FIIFRSPVFRIFFHKIFIRPLRYRSRCSNST

SEQ ID NO: 23623 - protein, 31 aa, Artificial Sequence
  Quasi-synthetic sequence derived from human genome
MRAWRPLVRPSLQCVKLGRATARWWWVVKVK

SEQ ID NO: 23624 - protein, 31 aa, Artificial Sequence
  Quasi-synthetic sequence derived from human genome
LLIISSILGSVWLAYKTPKLLRTARGRRIKK

SEQ ID NO: 23625 - protein, 31 aa, Artificial Sequence
  Quasi-synthetic sequence derived from human genome
RNTKLWIGLFLMVCLLCVGIFSWCIWKRKGR

SEQ ID NO: 23626 - protein, 31 aa, Artificial Sequence
  Quasi-synthetic sequence derived from human genome
LVIPLLNPFIYSLRNKEVINIMKKIMKKRKF

SEQ ID NO: 23627 - protein, 31 aa, Artificial Sequence
  Quasi-synthetic sequence derived from human genome
LALLIPYLHFLIFLFILRCLEMNCRKKLMRK

SEQ ID NO: 23628 - protein, 31 aa, Artificial Sequence
  Quasi-synthetic sequence derived from human genome
ALVGVLILFMFRRLRQFRQAQPTPQYRFRKR

SEQ ID NO: 23629 - protein, 31 aa, Artificial Sequence
  Quasi-synthetic sequence derived from human genome
RRFQLCRCMNPRARKNRSQIVLFQKLRFQFF

SEQ ID NO: 23630 - protein, 31 aa, Artificial Sequence
  Quasi-synthetic sequence derived from human genome
LACVATMIFMITKCCLFCFRKLAKTGKKKKR

SEQ ID NO: 23631 - protein, 31 aa, Artificial Sequence
  Quasi-synthetic sequence derived from human genome
LLKSFLQERLGIHLIRRKIVKPKHHVLMSRK

SEQ ID NO: 23632 - protein, 31 aa, Artificial Sequence
  Quasi-synthetic sequence derived from human genome
TLLVPCVVILAKALFLLPCISRRLARIRRGW

SEQ ID NO: 23633 - protein, 31 aa, Artificial Sequence
  Quasi-synthetic sequence derived from human genome
RRTRRPRFVLMNKMDDLNLHYRFLNWRRRIR

SEQ ID NO: 23634 - protein, 31 aa, Artificial Sequence
  Quasi-synthetic sequence derived from human genome
PPIRRRSKFANLGRIFKPWKWRKKKSEKFKH

SEQ ID NO: 23635 - protein, 31 aa, Artificial Sequence
  Quasi-synthetic sequence derived from human genome
IKLKNKIKYRAEACIKMQKTIRMWLCKRRHK

SEQ ID NO: 23636 - protein, 31 aa, Artificial Sequence
  Quasi-synthetic sequence derived from human genome
LLFAALKALKYLFRFIIQSRVLYLRFYGQSK

SEQ ID NO: 23637 - protein, 31 aa, Artificial Sequence
  Quasi-synthetic sequence derived from human genome
KPYIRKKAVLIMYKVFLKYPESLRPAFPRLK

SEQ ID NO: 23638 - protein, 31 aa, Artificial Sequence
  Quasi-synthetic sequence derived from human genome
LFALPFGRTAKPAHIAKVKMKFRFLGKLMAK

SEQ ID NO: 23639 - protein, 31 aa, Artificial Sequence
  Quasi-synthetic sequence derived from human genome
KLRSKIHKKVDRKASKGRKLRFHVLSKLLSF

SEQ ID NO: 23640 - protein, 31 aa, Artificial Sequence
  Quasi-synthetic sequence derived from human genome
RLILKAFLLKFVNAYSPIFYVAFFKGRFVGR

SEQ ID NO: 23641 - protein, 31 aa, Artificial Sequence
  Quasi-synthetic sequence derived from human genome
VRRVVQIFRIMRILRILKLARHSTGLQSLGF

SEQ ID NO: 23642 - protein, 31 aa, Artificial Sequence
  Quasi-synthetic sequence derived from human genome
LRLKRKFIQMRRPFLERRDLIIQHIPGFWVK

SEQ ID NO: 23643 - protein, 31 aa, Artificial Sequence
  Quasi-synthetic sequence derived from human genome
RPRFFLLENVRNFVSFKRSMVLKLTLRCLVR

SEQ ID NO: 23644 - protein, 31 aa, Artificial Sequence
  Quasi-synthetic sequence derived from human genome
IIFSIAFITVLIFKVYMFKCVWRCYRLIKCM

SEQ ID NO: 23645 - protein, 31 aa, Artificial Sequence
  Quasi-synthetic sequence derived from human genome
KALYRRLATVHMSRMINKYKRRRFQKTKNLL

SEQ ID NO: 23646 - protein, 31 aa, Artificial Sequence
  Quasi-synthetic sequence derived from human genome
FRVFHLSLWRLMKKVQITKPPPNFKFAFRAM

SEQ ID NO: 23647 - protein, 31 aa, Artificial Sequence
  Quasi-synthetic sequence derived from human genome
WSKILLHYKFNNRTSVMLKDRWRTMKKLKLI

SEQ ID NO: 23648 - protein, 31 aa, Artificial Sequence
  Quasi-synthetic sequence derived from human genome
WRGRYGRRRPFIWALSLGILLSLFLIPRAGW

SEQ ID NO: 23649 - protein, 31 aa, Artificial Sequence
  Quasi-synthetic sequence derived from human genome
RRPKRREIPLKVLVKAVLFACMLMRKTMASR

SEQ ID NO: 23650 - protein, 31 aa, Artificial Sequence
  Quasi-synthetic sequence derived from human genome
RIRMIIAVTSYKRYLWATVTIQRHWRAYLRR

SEQ ID NO: 23651 - protein, 31 aa, Artificial Sequence
  Quasi-synthetic sequence derived from human genome
RKAFRHRLWAVLTVQAYARGMIARRLHQRLR

SEQ ID NO: 23652 - protein, 31 aa, Artificial Sequence
  Quasi-synthetic sequence derived from human genome
KILKILITFRISNYFKYVPLKTQCTFIKFFL

SEQ ID NO: 23653 - protein, 31 aa, Artificial Sequence
  Quasi-synthetic sequence derived from human genome
KKHLILAFCAGVLLTLLLIAFIFLIIKSYRK

SEQ ID NO: 23654 - protein, 31 aa, Artificial Sequence
  Quasi-synthetic sequence derived from human genome
ILSILLFMLVIVWQSVFNKRKSRVRHYLVKC

SEQ ID NO: 23655 - protein, 31 aa, Artificial Sequence
  Quasi-synthetic sequence derived from human genome
FTKINAFNWAKVRKLSFKRKRFLIKLRPDAN

SEQ ID NO: 23656 - protein, 31 aa, Artificial Sequence
  Quasi-synthetic sequence derived from human genome
LVFLIPFLHFIIFLFTLRCLEWKFGKKSMRK

SEQ ID NO: 23657 - protein, 31 aa, Artificial Sequence
  Quasi-synthetic sequence derived from human genome
PKYFMKLVNLYKGAVLYLLRGRKTFLIPVLF

SEQ ID NO: 23658 - protein, 31 aa, Artificial Sequence
  Quasi-synthetic sequence derived from human genome
LLAILLVVAVFCILWNWNKRKKRQVPYLRVT

SEQ ID NO: 23659 - protein, 31 aa, Artificial Sequence
  Quasi-synthetic sequence derived from human genome
LCGLLKMWEDLRLRVHGPFFPRILRRRKGKR

SEQ ID NO: 23660 - protein, 31 aa, Artificial Sequence
  Quasi-synthetic sequence derived from human genome
KKIALREIRMLKQLKHPNLVNLIEVFRRKRK

SEQ ID NO: 23661 - protein, 31 aa, Artificial Sequence
  Quasi-synthetic sequence derived from human genome
LFYTIIIPLLNPFIYSLRNKKVMHALRRVIR

SEQ ID NO: 23662 - protein, 31 aa, Artificial Sequence
  Quasi-synthetic sequence derived from human genome
LLPPVLNPIVYSVRTKQIRLGILHKFVLRRR

SEQ ID NO: 23663 - protein, 31 aa, Artificial Sequence
  Quasi-synthetic sequence derived from human genome
RRQIIRALCLLLLLLHAGSAKNIWKRALPAR

SEQ ID NO: 23664 - protein, 31 aa, Artificial Sequence
  Quasi-synthetic sequence derived from human genome
LIRSRLRKVPRFKTMFSNLIHYPRYSLYWSK

SEQ ID NO: 23665 - protein, 31 aa, Artificial Sequence
  Quasi-synthetic sequence derived from human genome
GRGRRLGLALGLLLALVLAPRVLRAKPTVRK

SEQ ID NO: 23666 - protein, 31 aa, Artificial Sequence
  Quasi-synthetic sequence derived from human genome
LRRRLKYFFMSPCDKFRAKGRKPCKLMLQVV

SEQ ID NO: 23667 - protein, 31 aa, Artificial Sequence
  Quasi-synthetic sequence derived from human genome
KRGGKLCLLIRVANLRKSLLIGSHIYGKLLK

SEQ ID NO: 23668 - protein, 31 aa, Artificial Sequence
  Quasi-synthetic sequence derived from human genome
HRYQQLGAGLKVLFKKTHRILRRLFNLCKRC

SEQ ID NO: 23669 - protein, 31 aa, Artificial Sequence
  Quasi-synthetic sequence derived from human genome
KPRVSKSWRKIKNMVHWSPFVMSFKKKYPWI

SEQ ID NO: 23670 - protein, 31 aa, Artificial Sequence
  Quasi-synthetic sequence derived from human genome
LRTAMRRQMRRHASRRGPSRRRLGRLWNRLF

SEQ ID NO: 23671 - protein, 31 aa, Artificial Sequence
  Quasi-synthetic sequence derived from human genome
LFTIQWNIRAFNAVKNWSWMKLFFKMKPLLR

SEQ ID NO: 23672 - protein, 31 aa, Artificial Sequence
  Quasi-synthetic sequence derived from human genome
VFQKQFYRLGGFRVCHKLIFMIIQKLFRSHK

SEQ ID NO: 23673 - protein, 31 aa, Artificial Sequence
  Quasi-synthetic sequence derived from human genome
LRNLTLKGLWRRAVANAKSIGHLIFARLLRL

SEQ ID NO: 23674 - protein, 31 aa, Artificial Sequence
  Quasi-synthetic sequence derived from human genome
RQKCPPWWYRFAHKFLIWNCSPYWIKFKKCI

SEQ ID NO: 23675 - protein, 31 aa, Artificial Sequence
  Quasi-synthetic sequence derived from human genome
LIIFAFCIAVVYITYHNKRKIFLLVQSRKWR

SEQ ID NO: 23676 - protein, 31 aa, Artificial Sequence
  Quasi-synthetic sequence derived from human genome
KFWARGRKPWKLAIQILKIAMVTIQLVLFGL

SEQ ID NO: 23677 - protein, 31 aa, Artificial Sequence
  Quasi-synthetic sequence derived from human genome
RRSRWPFSKARSFCKTHASLFKKILLGLLCL

SEQ ID NO: 23678 - protein, 31 aa, Artificial Sequence
  Quasi-synthetic sequence derived from human genome
RRMFRVRNCLRGLGLFLLVFSFFFLLTWASF

SEQ ID NO: 23679 - protein, 31 aa, Artificial Sequence
  Quasi-synthetic sequence derived from human genome
LKNLRKQYRNVKKMTAKELVKVLFSFFWMLF

SEQ ID NO: 23680 - protein, 31 aa, Artificial Sequence
  Quasi-synthetic sequence derived from human genome
SMFVSKRRFILKTCGTTLLLKALVPLLKLAR

SEQ ID NO: 23681 - protein, 31 aa, Artificial Sequence
  Quasi-synthetic sequence derived from human genome
VHWFKKLSQKRFKQLVERLLQFISLRLFPAK

SEQ ID NO: 23682 - protein, 31 aa, Artificial Sequence
  Quasi-synthetic sequence derived from human genome
KYIVSTLQRWRLNVLRLNFRGCLLRPKTFRS

SEQ ID NO: 23683 - protein, 31 aa, Artificial Sequence
  Quasi-synthetic sequence derived from human genome
KLLFTPQHKMLRLRLPNLKMVRLRVSFSAVV

SEQ ID NO: 23684 - protein, 31 aa, Artificial Sequence
  Quasi-synthetic sequence derived from human genome
RWLNKLMKLLQRLPNSVVRRLHRERYKKPSW

SEQ ID NO: 23685 - protein, 31 aa, Artificial Sequence
  Quasi-synthetic sequence derived from human genome
RRHYYLLRQFKIFSDFRMNKAFVTWKLNVKR

SEQ ID NO: 23686 - protein, 31 aa, Artificial Sequence
  Quasi-synthetic sequence derived from human genome
MLWKLLLRSQSCRLCSFRKMRSPPKYRPFLA

SEQ ID NO: 23687 - protein, 31 aa, Artificial Sequence
  Quasi-synthetic sequence derived from human genome
VFWPILVMYFIMLFCITMKRQIKHMIKYRYI

SEQ ID NO: 23688 - protein, 31 aa, Artificial Sequence
  Quasi-synthetic sequence derived from human genome
FLINPTKTFYYKSRFWLLKLLFRVFTAPFHK

SEQ ID NO: 23689 - protein, 31 aa, Artificial Sequence
  Quasi-synthetic sequence derived from human genome
RKRYLRRRAALGQLNTILLVAQPLLQRRQRL

SEQ ID NO: 23690 - protein, 31 aa, Artificial Sequence
  Quasi-synthetic sequence derived from human genome
RFRRAFVTVTHRLLLLCLGVVMVCVVLRYMK

SEQ ID NO: 23691 - protein, 31 aa, Artificial Sequence
  Quasi-synthetic sequence derived from human genome
MKRKKRVHFHGFMLDVHKRIHRLKQSLPKRK

SEQ ID NO: 23692 - protein, 31 aa, Artificial Sequence
  Quasi-synthetic sequence derived from human genome
TRFKHLKKLLLVHGHWCYSRLARMVVYYLYK

SEQ ID NO: 23693 - protein, 31 aa, Artificial Sequence
  Quasi-synthetic sequence derived from human genome
IGKRKGTANARMPEKVTWMRRMRILRRLLRR

SEQ ID NO: 23694 - protein, 31 aa, Artificial Sequence
  Quasi-synthetic sequence derived from human genome
VLSKLKFYYNPNFKRGYPQLLVRVKRRIGVK

SEQ ID NO: 23695 - protein, 31 aa, Artificial Sequence
  Quasi-synthetic sequence derived from human genome
RYLLYRAQRAIRLRHALRLHPQLHRAPIRTW

SEQ ID NO: 23696 - protein, 31 aa, Artificial Sequence
  Quasi-synthetic sequence derived from human genome
LRFKRTHIKMKKQPKGYGLRCHRAIITICRL

SEQ ID NO: 23697 - protein, 31 aa, Artificial Sequence
  Quasi-synthetic sequence derived from human genome
SRSAFLGRYLKKKKSVVSRLKKAKRTAKVLL

SEQ ID NO: 23698 - protein, 31 aa, Artificial Sequence
  Quasi-synthetic sequence derived from human genome
RNVKFPLPIYKSKKGWTAYKLQLFKMFPIIL

SEQ ID NO: 23699 - protein, 31 aa, Artificial Sequence
  Quasi-synthetic sequence derived from human genome
ANFRHIFLATLACLCPVWRRRRKRPAFSRKA

SEQ ID NO: 23700 - protein, 31 aa, Artificial Sequence
  Quasi-synthetic sequence derived from human genome
LFWGWARHRSLCFLVVACLKVKTCLVCRFRI

SEQ ID NO: 23701 - protein, 31 aa, Artificial Sequence
  Quasi-synthetic sequence derived from human genome
FWKKKKSMIGMSTKAVLWRCFSTVVIFLFLL

SEQ ID NO: 23702 - protein, 31 aa, Artificial Sequence
  Quasi-synthetic sequence derived from human genome
LARFLLKRGLRNKRIGHFLFWFLRSEIAQSR

SEQ ID NO: 23703 - protein, 31 aa, Artificial Sequence
  Quasi-synthetic sequence derived from human genome
RRLHRASTPGPAWGWLLRRRRWAALLVLGLL

SEQ ID NO: 23704 - protein, 31 aa, Artificial Sequence
  Quasi-synthetic sequence derived from human genome
RRARRIPKLVQRINSIYNAKRGKKRLKKLSM

SEQ ID NO: 23705 - protein, 31 aa, Artificial Sequence
  Quasi-synthetic sequence derived from human genome
RTLLRRRLFSYPTKYYFMVLVLSLITFSVLR

SEQ ID NO: 23706 - protein, 31 aa, Artificial Sequence
  Quasi-synthetic sequence derived from human genome
PLNLAMVYRYCCKINKKLKSITMLRKKIVHF

SEQ ID NO: 23707 - protein, 31 aa, Artificial Sequence
  Quasi-synthetic sequence derived from human genome
FIFLIIKSYRKYRRERLPISPGPLLRWVPLL

SEQ ID NO: 23708 - protein, 31 aa, Artificial Sequence
  Quasi-synthetic sequence derived from human genome
LLVLLLVALSALFLGRWLVVRLATKWCQRKL

SEQ ID NO: 23709 - protein, 31 aa, Artificial Sequence
  Quasi-synthetic sequence derived from human genome
MKRMVSWSFHKLKTMKHLLLLLLCVFLVKSQ

SEQ ID NO: 23710 - protein, 31 aa, Artificial Sequence
  Quasi-synthetic sequence derived from human genome
PFLRWAGYRPGPVRRRGKVELIKFVRVQWRR

SEQ ID NO: 23711 - protein, 31 aa, Artificial Sequence
  Quasi-synthetic sequence derived from human genome
LLVPPLMNPIIYSIKTKQIRQRIIKKFQFIK

SEQ ID NO: 23712 - protein, 31 aa, Artificial Sequence
  Quasi-synthetic sequence derived from human genome
LTLLIPYILTLRKKWKDCKLRIYVGGKINRI

SEQ ID NO: 23713 - protein, 31 aa, Artificial Sequence
  Quasi-synthetic sequence derived from human genome
KFFKRKPKVLGVVRILIALMSLSMGIIMMCV

SEQ ID NO: 23714 - protein, 31 aa, Artificial Sequence
  Quasi-synthetic sequence derived from human genome
VFPMWTLKRQILILFNIILISKLLGARWFPK

SEQ ID NO: 23715 - protein, 31 aa, Artificial Sequence
  Quasi-synthetic sequence derived from human genome
MKAVINMYGRLIHRVRYRRGLWRTRQILNLA

SEQ ID NO: 23716 - protein, 31 aa, Artificial Sequence
  Quasi-synthetic sequence derived from human genome
RRRIRLWHRGAMVIQATWRGYRVRRNLAHLC

SEQ ID NO: 23717 - protein, 31 aa, Artificial Sequence
  Quasi-synthetic sequence derived from human genome
FHFLYGKNRSRIPLLRKRWFQLGRSMNPRAR

SEQ ID NO: 23718 - protein, 31 aa, Artificial Sequence
  Quasi-synthetic sequence derived from human genome
AMKVLQRNCAAYLKLRNWQWWRLFTKVKPLL

SEQ ID NO: 23719 - protein, 31 aa, Artificial Sequence
  Quasi-synthetic sequence derived from human genome
RKFFLFYRQQKWASGVIAIAWLLYCHKTRLK

SEQ ID NO: 23720 - protein, 31 aa, Artificial Sequence
  Quasi-synthetic sequence derived from human genome
LYHRELTKIPIFSLFRKWKAFSVWRKNVRSK

SEQ ID NO: 23721 - protein, 31 aa, Artificial Sequence
  Quasi-synthetic sequence derived from human genome
ILKLYRVLQLFLSRTAQRSALLSSGRLLRRL

SEQ ID NO: 23722 - protein, 31 aa, Artificial Sequence
  Quasi-synthetic sequence derived from human genome
IKKIKKVQSFLRGWLCRRKWKTIIQDYIRSP

SEQ ID NO: 23723 - protein, 31 aa, Artificial Sequence
  Quasi-synthetic sequence derived from human genome
IFLKRSQQKKKTSPLNFKKRLFLLTVHKLSY

SEQ ID NO: 23724 - protein, 31 aa, Artificial Sequence
  Quasi-synthetic sequence derived from human genome
IKRHFKSRLVGTVLNGYLCLRKLVVQRTKLI

SEQ ID NO: 23725 - protein, 31 aa, Artificial Sequence
  Quasi-synthetic sequence derived from human genome
RLIFKAFLLKFVNSYTPIFYVAFFKGRFVGR

SEQ ID NO: 23726 - protein, 31 aa, Artificial Sequence
  Quasi-synthetic sequence derived from human genome
WFQLGHSMNPRARKNRSRIPLLRKRRFQLYR

SEQ ID NO: 23727 - protein, 31 aa, Artificial Sequence
  Quasi-synthetic sequence derived from human genome
CKAFKIRKHYLHLRATVVSIQRRYRKLTAVR

SEQ ID NO: 23728 - protein, 31 aa, Artificial Sequence
  Quasi-synthetic sequence derived from human genome
FLKRHKKKCIFLGTVLGGVYILGKYGQKKIR

SEQ ID NO: 23729 - protein, 31 aa, Artificial Sequence
  Quasi-synthetic sequence derived from human genome
FRIKRFLAKKQKQNRPIPQWIRMKTGNKIRY

SEQ ID NO: 23730 - protein, 31 aa, Artificial Sequence
  Quasi-synthetic sequence derived from human genome
NRVAKMGLILAIRSILLVIPFPFTLRRLKYC

SEQ ID NO: 23731 - protein, 31 aa, Artificial Sequence
  Quasi-synthetic sequence derived from human genome
CSGWLRKSPPEKKLKRYAWKRRWFVLRSGRL

SEQ ID NO: 23732 - protein, 31 aa, Artificial Sequence
  Quasi-synthetic sequence derived from human genome
ILRLMRIFRILKLARHSVGLRSLGATLRHSY

SEQ ID NO: 23733 - protein, 31 aa, Artificial Sequence
  Quasi-synthetic sequence derived from human genome
FVLKYITIALKCLIVALPKIILAVKSKGKFY

SEQ ID NO: 23734 - protein, 31 aa, Artificial Sequence
  Quasi-synthetic sequence derived from human genome
KKIFVFLEHQTKVLKKRHTKEKVLRRAKRRW

SEQ ID NO: 23735 - protein, 31 aa, Artificial Sequence
  Quasi-synthetic sequence derived from human genome
WRRRKSLWLALSASWLLLVLLGGFSLLRLAL

SEQ ID NO: 23736 - protein, 31 aa, Artificial Sequence
  Quasi-synthetic sequence derived from human genome
RVSYQKLLKYYVLNALKHRPPKAQKKRYLFR

SEQ ID NO: 23737 - protein, 31 aa, Artificial Sequence
  Quasi-synthetic sequence derived from human genome
RKLIGAQKKKKLLKPGPLKRKDTKRLVLHMK

SEQ ID NO: 23738 - protein, 31 aa, Artificial Sequence
  Quasi-synthetic sequence derived from human genome
KRYLVKFICLSIWGLSLLLALPVLLFRRTVY

SEQ ID NO: 23739 - protein, 31 aa, Artificial Sequence
  Quasi-synthetic sequence derived from human genome
KRKHFRLVLRLVLRGGRELGTFHSRLIKVIS

SEQ ID NO: 23740 - protein, 31 aa, Artificial Sequence
  Quasi-synthetic sequence derived from human genome
LILFMFRRLRQFRQAQPTPQYRFRKRDKVMF

SEQ ID NO: 23741 - protein, 31 aa, Artificial Sequence
  Quasi-synthetic sequence derived from human genome
CTGWLRKSPPEKKLRRYAWKKRWFILRSGRM

SEQ ID NO: 23742 - protein, 31 aa, Artificial Sequence
  Quasi-synthetic sequence derived from human genome
SMKLHNLISKLKKWIKILEAKTKQLPKFFLI

SEQ ID NO: 23743 - protein, 31 aa, Artificial Sequence
  Quasi-synthetic sequence derived from human genome
RRRCCRLCIWLLQTLVHLLQLGQVWRYLRAL

SEQ ID NO: 23744 - protein, 31 aa, Artificial Sequence
  Quasi-synthetic sequence derived from human genome
VLFYLAVGIMFLVNTVLWVTIRKELKRKKKW

SEQ ID NO: 23745 - protein, 31 aa, Artificial Sequence
  Quasi-synthetic sequence derived from human genome
RKKLRGKKMAPLKIKLGLLGGKRKKGGSYVF

SEQ ID NO: 23746 - protein, 31 aa, Artificial Sequence
  Quasi-synthetic sequence derived from human genome
LLLFMMTVFFAKKLYLLKTENTKLRRTNKFR

SEQ ID NO: 23747 - protein, 31 aa, Artificial Sequence
  Quasi-synthetic sequence derived from human genome
SMLLRGGRRLFLSGAPRFRHRGKVIAFQLKK

SEQ ID NO: 23748 - protein, 31 aa, Artificial Sequence
  Quasi-synthetic sequence derived from human genome
FLMKRKIIVLMPWLLRLSVLVSLSFSFPLSR

SEQ ID NO: 23749 - protein, 31 aa, Artificial Sequence
  Quasi-synthetic sequence derived from human genome
ETLKKKRRNFAELKIKRLRKKFAQKMLRKAR

SEQ ID NO: 23750 - protein, 31 aa, Artificial Sequence
  Quasi-synthetic sequence derived from human genome
IRNLQRVIPIRRAPLRSKIEIVRRILGVQKF

SEQ ID NO: 23751 - protein, 31 aa, Artificial Sequence
  Quasi-synthetic sequence derived from human genome
EKKFIWNHGITLPLKNVRKRRFRKTAKKKYI

SEQ ID NO: 23752 - protein, 31 aa, Artificial Sequence
  Quasi-synthetic sequence derived from human genome
KQLLLWRLPNVLIVQLKRFSFRSFIWRDKIN

SEQ ID NO: 23753 - protein, 31 aa, Artificial Sequence
  Quasi-synthetic sequence derived from human genome
KLKEKQVRWKFIKRWKTRYFTLAGNQLLFQK

SEQ ID NO: 23754 - protein, 31 aa, Artificial Sequence
  Quasi-synthetic sequence derived from human genome
MRRAKRIRNAALQHLFIRKSFRPFKCLQCGK

SEQ ID NO: 23755 - protein, 31 aa, Artificial Sequence
  Quasi-synthetic sequence derived from human genome
LRVFVEGWTHLVRLLRLIILIRIFHLLHQKR

SEQ ID NO: 23756 - protein, 31 aa, Artificial Sequence
  Quasi-synthetic sequence derived from human genome
LWLRAKFQRLLFKLGCYIQKNCGKFLVVGLL

SEQ ID NO: 23757 - protein, 31 aa, Artificial Sequence
  Quasi-synthetic sequence derived from human genome
KKKVKRLLSFQRYFHASRLLRGIIPQAPLHL

SEQ ID NO: 23758 - protein, 31 aa, Artificial Sequence
  Quasi-synthetic sequence derived from human genome
LFVNKRLVLRTKLHKLIDFLLRKESIICKPK

SEQ ID NO: 23759 - protein, 31 aa, Artificial Sequence
  Quasi-synthetic sequence derived from human genome
LLTGVLCHRFHGLWYMKMMWAWLQAKRKPRK

SEQ ID NO: 23760 - protein, 31 aa, Artificial Sequence
  Quasi-synthetic sequence derived from human genome
IRRLLILILKIGRRWTELIRTMESRVLLRTF

SEQ ID NO: 23761 - protein, 31 aa, Artificial Sequence
  Quasi-synthetic sequence derived from human genome
VTPRGLRLRLPRRESLLRGLCRPLRPLLGFR

SEQ ID NO: 23762 - protein, 31 aa, Artificial Sequence
  Quasi-synthetic sequence derived from human genome
GVRFKRSKKIMPAGLVAGLSLMMILRLVLLL

SEQ ID NO: 23763 - protein, 31 aa, Artificial Sequence
  Quasi-synthetic sequence derived from human genome
KIKRAITFIMVVAIVFVICFLPSVVVRIRIF

SEQ ID NO: 23764 - protein, 31 aa, Artificial Sequence
  Quasi-synthetic sequence derived from human genome
LMILKPVQKLFAIIVGRGIRKWWQALPPNKK

SEQ ID NO: 23765 - protein, 31 aa, Artificial Sequence
  Quasi-synthetic sequence derived from human genome
SHAAAKRWLGRWRRKRRWRRVRKAGPRDLLP

SEQ ID NO: 23766 - protein, 31 aa, Artificial Sequence
  Quasi-synthetic sequence derived from human genome
LRLMRIFRILKLARHSTGLRSLGATLKYSYK

SEQ ID NO: 23767 - protein, 31 aa, Artificial Sequence
  Quasi-synthetic sequence derived from human genome
KPVPVLLGSLLKRKMLPRAALLVTTRPRALR

SEQ ID NO: 23768 - protein, 31 aa, Artificial Sequence
  Quasi-synthetic sequence derived from human genome
MAKKRVIRMLIVIVVLFFLCWMPIFSANAWR

SEQ ID NO: 23769 - protein, 31 aa, Artificial Sequence
  Quasi-synthetic sequence derived from human genome
MRARRGLLRLPRRSLLAALFFFSLSSSLLYF

SEQ ID NO: 23770 - protein, 31 aa, Artificial Sequence
  Quasi-synthetic sequence derived from human genome
ILVRALNPLDYMKWRRKSAYWKALKVFKLPV

SEQ ID NO: 23771 - protein, 31 aa, Artificial Sequence
  Quasi-synthetic sequence derived from human genome
RLLQSRCPRVLPKKLQNWNFLPLWMRSLKPW

SEQ ID NO: 23772 - protein, 31 aa, Artificial Sequence
  Quasi-synthetic sequence derived from human genome
IRAVILHFFRGLLYWKNTLALAAILVLLRVR

SEQ ID NO: 23773 - protein, 31 aa, Artificial Sequence
  Quasi-synthetic sequence derived from human genome
RRANMHIRDFLQVFIYRLFWKSKDRPRRIRM

SEQ ID NO: 23774 - protein, 31 aa, Artificial Sequence
  Quasi-synthetic sequence derived from human genome
PKQRIIPFLPGKILFRRSHIRDVAVKRLKPI

SEQ ID NO: 23775 - protein, 31 aa, Artificial Sequence
  Quasi-synthetic sequence derived from human genome
LRTLRAVRVLRPLKLVSGIPSLQIVLKSIMK

SEQ ID NO: 23776 - protein, 31 aa, Artificial Sequence
  Quasi-synthetic sequence derived from human genome
FRCIALRWVRLLGFAIVYGTIILKLYRVLQL

SEQ ID NO: 23777 - protein, 31 aa, Artificial Sequence
  Quasi-synthetic sequence derived from human genome
RRKMPSLGWLRKCYQQIDRRLRKNLKSLIIV

SEQ ID NO: 23778 - protein, 31 aa, Artificial Sequence
  Quasi-synthetic sequence derived from human genome
AMKVIQRNCAAYLKLRNWQWWRLFTKVKPLL

SEQ ID NO: 23779 - protein, 31 aa, Artificial Sequence
  Quasi-synthetic sequence derived from human genome
LAPLKPALWTRLRTLRAPELRRLRRRQTALR

SEQ ID NO: 23780 - protein, 31 aa, Artificial Sequence
  Quasi-synthetic sequence derived from human genome
ITGYIQICFWVIAAARQIQKMRKFYFRRIMR

SEQ ID NO: 23781 - protein, 31 aa, Artificial Sequence
  Quasi-synthetic sequence derived from human genome
IRLVRVFRIFKLSRHSKGLQILGQTLRASMR

SEQ ID NO: 23782 - protein, 31 aa, Artificial Sequence
  Quasi-synthetic sequence derived from human genome
LVVIALVGLIFILLLVFVLIIRGQSKKYAKK

SEQ ID NO: 23783 - protein, 31 aa, Artificial Sequence
  Quasi-synthetic sequence derived from human genome
RRRTRFVFQKALRSLRRYPLPLRSGKEAKIL

SEQ ID NO: 23784 - protein, 31 aa, Artificial Sequence
  Quasi-synthetic sequence derived from human genome
KLLKKRSKQPLGEVKRRLSLYLTKIHFWLPV

SEQ ID NO: 23785 - protein, 31 aa, Artificial Sequence
  Quasi-synthetic sequence derived from human genome
RGQKKKKVVKYGMGGMIIVLLICIVWFPLLF

SEQ ID NO: 23786 - protein, 31 aa, Artificial Sequence
  Quasi-synthetic sequence derived from human genome
RKSLLAFIAFLFFASIISLSLIFYYSKKGRR

SEQ ID NO: 23787 - protein, 31 aa, Artificial Sequence
  Quasi-synthetic sequence derived from human genome
LRVLRALRILYVMRLARHSLGLQTLGLTARR

SEQ ID NO: 23788 - protein, 31 aa, Artificial Sequence
  Quasi-synthetic sequence derived from human genome
LLPRRRRCFPARAPLLRVALCLLCWTPAAVR

SEQ ID NO: 23789 - protein, 31 aa, Artificial Sequence
  Quasi-synthetic sequence derived from human genome
LILKVAVGTRLHRVPVKIKRMCVNGLCRARK

SEQ ID NO: 23790 - protein, 31 aa, Artificial Sequence
  Quasi-synthetic sequence derived from human genome
LLQGLFIVLILVGYISVKVMLKSIKTRLGRR

SEQ ID NO: 23791 - protein, 31 aa, Artificial Sequence
  Quasi-synthetic sequence derived from human genome
FRNWLYFVPLLLLVPLLLCCVWRLCRKQTVK

SEQ ID NO: 23792 - protein, 31 aa, Artificial Sequence
  Quasi-synthetic sequence derived from human genome
ILLVIYVSWKRYPASMKQLQQRSLMRRHRKK

SEQ ID NO: 23793 - protein, 31 aa, Artificial Sequence
  Quasi-synthetic sequence derived from human genome
LVLFPRFLGTAFMLWLLDFLCIRKHFLGRRR

SEQ ID NO: 23794 - protein, 31 aa, Artificial Sequence
  Quasi-synthetic sequence derived from human genome
RTLHQRFLAQLRKYFNMRVFRQRTYRIWAFG

SEQ ID NO: 23795 - protein, 31 aa, Artificial Sequence
  Quasi-synthetic sequence derived from human genome
ISHLIFFIFYLRNMKKKYTKMVKLLHKSAPA

SEQ ID NO: 23796 - protein, 31 aa, Artificial Sequence
  Quasi-synthetic sequence derived from human genome
KGFAIAFVVLLFLFLIVMIFRCAKLVKNPYK

SEQ ID NO: 23797 - protein, 31 aa, Artificial Sequence
  Quasi-synthetic sequence derived from human genome
KLFVVTAVSAISVIFLAHHFKRKRGKKKGKI

SEQ ID NO: 23798 - protein, 31 aa, Artificial Sequence
  Quasi-synthetic sequence derived from human genome
LLLLLIVSVLACNFSVILNLIRMHRRSRRSR

SEQ ID NO: 23799 - protein, 31 aa, Artificial Sequence
  Quasi-synthetic sequence derived from human genome
VLMLLSSIGRRKSLPSVTRPRLRVKMYNFLR

SEQ ID NO: 23800 - protein, 31 aa, Artificial Sequence
  Quasi-synthetic sequence derived from human genome
LIILIRIFHLLHQKRQLEKLMRRLVSENKRR

SEQ ID NO: 23801 - protein, 31 aa, Artificial Sequence
  Quasi-synthetic sequence derived from human genome
PQRVAWVWLLVLEKWLAREKKLLPVVFRRKL

SEQ ID NO: 23802 - protein, 31 aa, Artificial Sequence
  Quasi-synthetic sequence derived from human genome
LWWFWLLWTVLILFSCCCAFRHRRAKLRLQQ

SEQ ID NO: 23803 - protein, 31 aa, Artificial Sequence
  Quasi-synthetic sequence derived from human genome
KFIIGYLFPLLTMSICYLCLIFKVKKRSILI

SEQ ID NO: 23804 - protein, 31 aa, Artificial Sequence
  Quasi-synthetic sequence derived from human genome
MQKTIRMWLCKRRHKPRIDGLVKVGTLKKRL

SEQ ID NO: 23805 - protein, 31 aa, Artificial Sequence
  Quasi-synthetic sequence derived from human genome
GLVVIFMMLGGTFLYWRGRRIQNKRAMRRYL

SEQ ID NO: 23806 - protein, 31 aa, Artificial Sequence
  Quasi-synthetic sequence derived from human genome
VYNHYLFSGCFLVVLLAILLYLLRLRRIHRR

SEQ ID NO: 23807 - protein, 31 aa, Artificial Sequence
  Quasi-synthetic sequence derived from human genome
SLRRHRLTRKLVVLITPQVSSLLRVILSKVF

SEQ ID NO: 23808 - protein, 31 aa, Artificial Sequence
  Quasi-synthetic sequence derived from human genome
IGYFLKVAAVGRRVRSYGKRRPARTILRAFL

SEQ ID NO: 23809 - protein, 31 aa, Artificial Sequence
  Quasi-synthetic sequence derived from human genome
MIPTLKAAIRAVRILQFRLYKKKFKETLRPY

SEQ ID NO: 23810 - protein, 31 aa, Artificial Sequence
  Quasi-synthetic sequence derived from human genome
AKHKLYQFLHLRKAAITIQSSYRRLMVKKKL

SEQ ID NO: 23811 - protein, 31 aa, Artificial Sequence
  Quasi-synthetic sequence derived from human genome
RVRFLNLKKTIIKFQAHVRKHQQRQKYKKMK

SEQ ID NO: 23812 - protein, 31 aa, Artificial Sequence
  Quasi-synthetic sequence derived from human genome
MCKNMRVLSRTSKFRRLRELLRRRKKRRQGR

SEQ ID NO: 23813 - protein, 31 aa, Artificial Sequence
  Quasi-synthetic sequence derived from human genome
LLWVLGLLVGLLLLLLGLGACYTWRRRRVCK

SEQ ID NO: 23814 - protein, 31 aa, Artificial Sequence
  Quasi-synthetic sequence derived from human genome
SRHPAWWFMSVKVKLKRKKRQKTPNRKLPRR

SEQ ID NO: 23815 - protein, 31 aa, Artificial Sequence
  Quasi-synthetic sequence derived from human genome
TWALNYRTGVRLRGAILTMAFKKILKLKNIK

SEQ ID NO: 23816 - protein, 31 aa, Artificial Sequence
  Quasi-synthetic sequence derived from human genome
RKARKYEIPHFRLKKVENIKIWLSLRSYLKR

SEQ ID NO: 23817 - protein, 31 aa, Artificial Sequence
  Quasi-synthetic sequence derived from human genome
FMLKKRKWPLKGWHKRFFVLDNGMLKYSKAP

SEQ ID NO: 23818 - protein, 31 aa, Artificial Sequence
  Quasi-synthetic sequence derived from human genome
IHKLFAPVRISITLVSVPLIVRYFRKVGFFK

SEQ ID NO: 23819 - protein, 31 aa, Artificial Sequence
  Quasi-synthetic sequence derived from human genome
WFLALSSMVCVPLFVVITLLKTRGPFRKRLR

SEQ ID NO: 23820 - protein, 31 aa, Artificial Sequence
  Quasi-synthetic sequence derived from human genome
RVRAARLHQRLLHQLRRGPFQRCQLLRLLCY

SEQ ID NO: 23821 - protein, 31 aa, Artificial Sequence
  Quasi-synthetic sequence derived from human genome
RKYKQLTWIALKFALYKKMTQAAILIQSKFR

SEQ ID NO: 23822 - protein, 31 aa, Artificial Sequence
  Quasi-synthetic sequence derived from human genome
MKWRRKSAYWKALKVFKLPVEFLLLLTVPVV

SEQ ID NO: 23823 - protein, 31 aa, Artificial Sequence
  Quasi-synthetic sequence derived from human genome
FRLTRWRTRYKTIRINLGLWAASFILALPVW

SEQ ID NO: 23824 - protein, 31 aa, Artificial Sequence
  Quasi-synthetic sequence derived from human genome
LLCKNCLKKWRMKRQTLLEWLFSFLLVLFLY

SEQ ID NO: 23825 - protein, 31 aa, Artificial Sequence
  Quasi-synthetic sequence derived from human genome
QFIRQKRRGAFNSKQLLYLEKYRPKMRLRFR

SEQ ID NO: 23826 - protein, 31 aa, Artificial Sequence
  Quasi-synthetic sequence derived from human genome
RKLHQQYRLARQRIIQFQARCRAYLVRKAFR

SEQ ID NO: 23827 - protein, 31 aa, Artificial Sequence
  Quasi-synthetic sequence derived from human genome
AKFRLILIESRIHRLARYYKTKRVLPPNWKY

SEQ ID NO: 23828 - protein, 31 aa, Artificial Sequence
  Quasi-synthetic sequence derived from human genome
LRLLHRRQKRIIGGKNSLRGGWPWQVSLRLK

SEQ ID NO: 23829 - protein, 31 aa, Artificial Sequence
  Quasi-synthetic sequence derived from human genome
NRLGKLLLHLFMVLCLTLFLNNIIKKILNLK

SEQ ID NO: 23830 - protein, 31 aa, Artificial Sequence
  Quasi-synthetic sequence derived from human genome
RTQCLLGLRTFVAFAAKLWSFFIYLLRRQIR

SEQ ID NO: 23831 - protein, 31 aa, Artificial Sequence
  Quasi-synthetic sequence derived from human genome
MNLYNAMAVRIQRRWRGYRVRKYLFNYYYLK

SEQ ID NO: 23832 - protein, 31 aa, Artificial Sequence
  Quasi-synthetic sequence derived from human genome
FKCIKCSKSFFMLSCLIRHKRIHIRQNIYKC

SEQ ID NO: 23833 - protein, 31 aa, Artificial Sequence
  Quasi-synthetic sequence derived from human genome
FLCLFFYNCYKGYLPRQCLKFRSALLIGKKK

SEQ ID NO: 23834 - protein, 31 aa, Artificial Sequence
  Quasi-synthetic sequence derived from human genome
TFRLLLLCRWDKRRWRKIPKRPGSVHRTPSR

SEQ ID NO: 23835 - protein, 31 aa, Artificial Sequence
  Quasi-synthetic sequence derived from human genome
KLVSPKWKNFKGLKLQWRDKIRLNNAIWRAW

SEQ ID NO: 23836 - protein, 31 aa, Artificial Sequence
  Quasi-synthetic sequence derived from human genome
FWCVILFFTTFFLSSFLKQFKTKRYFPTKVR

SEQ ID NO: 23837 - protein, 31 aa, Artificial Sequence
  Quasi-synthetic sequence derived from human genome
RRIKSLLPKLSCGVKNRMHIRRKRIVGGKRA

SEQ ID NO: 23838 - protein, 31 aa, Artificial Sequence
  Quasi-synthetic sequence derived from human genome
RNLVRNKLAVITRLLQNLIMGLFLLFFVLRV

SEQ ID NO: 23839 - protein, 31 aa, Artificial Sequence
  Quasi-synthetic sequence derived from human genome
LLACVATVIFIITKCLFCVWKFVRTGKKGKR

SEQ ID NO: 23840 - protein, 31 aa, Artificial Sequence
  Quasi-synthetic sequence derived from human genome
LNEAIRLSLIMQLVALLLVVLWIRWKCRRLR

SEQ ID NO: 23841 - protein, 31 aa, Artificial Sequence
  Quasi-synthetic sequence derived from human genome
FVRKARHRRPLSSFVRKARHRRTLFASPLAK

SEQ ID NO: 23842 - protein, 31 aa, Artificial Sequence
  Quasi-synthetic sequence derived from human genome
RGRRRRMHVLRRRWDLGSLCRALLTRGLAAL

SEQ ID NO: 23843 - protein, 31 aa, Artificial Sequence
  Quasi-synthetic sequence derived from human genome
EFIYIYMNFFFFFSVGRKFKKFNKVRVVRAL

SEQ ID NO: 23844 - protein, 31 aa, Artificial Sequence
  Quasi-synthetic sequence derived from human genome
RFVVIDNCIALKKVASRLKKKRKKKNIKTKV

SEQ ID NO: 23845 - protein, 31 aa, Artificial Sequence
  Quasi-synthetic sequence derived from human genome
SFGKVLLAKRKLDGKFYAVKVLQKKIVLNRK

SEQ ID NO: 23846 - protein, 31 aa, Artificial Sequence
  Quasi-synthetic sequence derived from human genome
RLAHRLLVLLLMCFLGFAIFAMIILLPFRLK

SEQ ID NO: 23847 - protein, 31 aa, Artificial Sequence
  Quasi-synthetic sequence derived from human genome
LPIIIKGSVGGLLVLIVILVILFKCGFFKRK

SEQ ID NO: 23848 - protein, 31 aa, Artificial Sequence
  Quasi-synthetic sequence derived from human genome
LKEHRRVFQAMWLSFLKHKLPLSLYKKVLLI

SEQ ID NO: 23849 - protein, 31 aa, Artificial Sequence
  Quasi-synthetic sequence derived from human genome
ILLVIYVSWKRYPASMKQLQQHSLMKRRRKK

SEQ ID NO: 23850 - protein, 31 aa, Artificial Sequence
  Quasi-synthetic sequence derived from human genome
ILAAATIILYFIPLRYIILIWGINKFTKKLR

SEQ ID NO: 23851 - protein, 31 aa, Artificial Sequence
  Quasi-synthetic sequence derived from human genome
LLRKHRFQLYRSMNSRARKNRSQIVLFQKRR

SEQ ID NO: 23852 - protein, 31 aa, Artificial Sequence
  Quasi-synthetic sequence derived from human genome
LLLLVRCSVQRIETRPRSKKRKKIRRQFPVY

SEQ ID NO: 23853 - protein, 31 aa, Artificial Sequence
  Quasi-synthetic sequence derived from human genome
MRIFRPWRLRCPALHLPSLSVFSLRWKLPSL

SEQ ID NO: 23854 - protein, 31 aa, Artificial Sequence
  Quasi-synthetic sequence derived from human genome
QGLSVLRSFRLLRVFKLAKSWPTLNMLIKII

SEQ ID NO: 23855 - protein, 31 aa, Artificial Sequence
  Quasi-synthetic sequence derived from human genome
PFSLVPSPKSFVYFIMRIVNFPKCRRRRLQK

SEQ ID NO: 23856 - protein, 31 aa, Artificial Sequence
  Quasi-synthetic sequence derived from human genome
RFGRLLLRLPALRAVPASLISQLFFMRLVGK

SEQ ID NO: 23857 - protein, 31 aa, Artificial Sequence
  Quasi-synthetic sequence derived from human genome
LKLPVRSLTYFSARKGKRKTVKAVIDRFLRL

SEQ ID NO: 23858 - protein, 31 aa, Artificial Sequence
  Quasi-synthetic sequence derived from human genome
LVSGIRTPPVRRNSKLATLGRIFKPWKWRKK

SEQ ID NO: 23859 - protein, 31 aa, Artificial Sequence
  Quasi-synthetic sequence derived from human genome
RLVVSCISSFLILSLLLFMVHRLRQRRRERI

SEQ ID NO: 23860 - protein, 31 aa, Artificial Sequence
  Quasi-synthetic sequence derived from human genome
KVCYLPLNTFLLKPIQRLLHYRLLLRRLCGH

SEQ ID NO: 23861 - protein, 31 aa, Artificial Sequence
  Quasi-synthetic sequence derived from human genome
RLLCSRLCQQLRSKRKFFGTVPISRLHRRVV

SEQ ID NO: 23862 - protein, 31 aa, Artificial Sequence
  Quasi-synthetic sequence derived from human genome
SVLILSLLLVFIMSVFVAAGLFVLVMKRRKK

SEQ ID NO: 23863 - protein, 31 aa, Artificial Sequence
  Quasi-synthetic sequence derived from human genome
RYNKLRHSVIYIQAIFRGKKARRHLKMMHIA

SEQ ID NO: 23864 - protein, 31 aa, Artificial Sequence
  Quasi-synthetic sequence derived from human genome
NRKSFRLRRRDLLLGFNKRAIDKCWKIRHFP

SEQ ID NO: 23865 - protein, 31 aa, Artificial Sequence
  Quasi-synthetic sequence derived from human genome
RRARKSEVPHFRLKKVQNIKMWLSLRSYLKR

SEQ ID NO: 23866 - protein, 31 aa, Artificial Sequence
  Quasi-synthetic sequence derived from human genome
VLKHSLLSFKRRRAMETLKLYFLFSLQLLIK

SEQ ID NO: 23867 - protein, 31 aa, Artificial Sequence
  Quasi-synthetic sequence derived from human genome
LFRKPQRSFFGKLLREFRLVAADRRSWKILL

SEQ ID NO: 23868 - protein, 31 aa, Artificial Sequence
  Quasi-synthetic sequence derived from human genome
YLHKKGGTQLQLLKWPLRFVIIHKRCVYYFK

SEQ ID NO: 23869 - protein, 31 aa, Artificial Sequence
  Quasi-synthetic sequence derived from human genome
LLLVLQYFGPLCFIFICYFKIYIRLKRRNNM

SEQ ID NO: 23870 - protein, 31 aa, Artificial Sequence
  Quasi-synthetic sequence derived from human genome
VIGSYKKWCRSILRRTSLILARVFGLHLRLT

SEQ ID NO: 23871 - protein, 31 aa, Artificial Sequence
  Quasi-synthetic sequence derived from human genome
FILFLPVVFYLSSFLHSEQKKRKLILPKRLK

SEQ ID NO: 23872 - protein, 31 aa, Artificial Sequence
  Quasi-synthetic sequence derived from human genome
RAVRSRRAIAVLSRWPAFPAFRAFLTFLYRY

SEQ ID NO: 23873 - protein, 31 aa, Artificial Sequence
  Quasi-synthetic sequence derived from human genome
LLVIIWFLLLLISYTVILVMLRSHSGKARRK

SEQ ID NO: 23874 - protein, 31 aa, Artificial Sequence
  Quasi-synthetic sequence derived from human genome
RRHLKSMHSSATLIQSRFRSLLVRRRFISLK

SEQ ID NO: 23875 - protein, 31 aa, Artificial Sequence
  Quasi-synthetic sequence derived from human genome
RRLQTQVFKLGLAKSIHHARVLIRQRHIRVR

SEQ ID NO: 23876 - protein, 31 aa, Artificial Sequence
  Quasi-synthetic sequence derived from human genome
LRVIGRGSYAKVLLVRLKKTDRIYAMKVVKK

SEQ ID NO: 23877 - protein, 31 aa, Artificial Sequence
  Quasi-synthetic sequence derived from human genome
LVLHFRHKVLILFKLILLEKKVLFYISPVNK

SEQ ID NO: 23878 - protein, 31 aa, Artificial Sequence
  Quasi-synthetic sequence derived from human genome
WLLAILTGLIAGKFLFHQRLFGQLLRLKMFR

SEQ ID NO: 23879 - protein, 31 aa, Artificial Sequence
  Quasi-synthetic sequence derived from human genome
KIKNTFCLWKRLIKLKDNHCEQLRVKIRKLK

SEQ ID NO: 23880 - protein, 31 aa, Artificial Sequence
  Quasi-synthetic sequence derived from human genome
RMWGRLVGLVYILPAAYFWRKGWLSRGMKGR

SEQ ID NO: 23881 - protein, 31 aa, Artificial Sequence
  Quasi-synthetic sequence derived from human genome
KFMVLLWKNFILKRRRCIALVVEMVLTFLFS

SEQ ID NO: 23882 - protein, 31 aa, Artificial Sequence
  Quasi-synthetic sequence derived from human genome
FRCILLRWARLLGFATVYGTVTLKLHRVLKV

SEQ ID NO: 23883 - protein, 31 aa, Artificial Sequence
  Quasi-synthetic sequence derived from human genome
RRFQLCRCMNPRARKNRSQIALFQKLRFQFF

SEQ ID NO: 23884 - protein, 31 aa, Artificial Sequence
  Quasi-synthetic sequence derived from human genome
VLWVLMCALAMWFPRRYLPKIFRNDRGRFKV

SEQ ID NO: 23885 - protein, 31 aa, Artificial Sequence
  Quasi-synthetic sequence derived from human genome
AWRRAWPRRRRRLQQVGTVAKLWIYPVKSCK

SEQ ID NO: 23886 - protein, 31 aa, Artificial Sequence
  Quasi-synthetic sequence derived from human genome
KLSLAGRRKKLFKKKYKASYVRSRSIRSVAI

SEQ ID NO: 23887 - protein, 31 aa, Artificial Sequence
  Quasi-synthetic sequence derived from human genome
LRHKIILLQSRARGYLARQRYQQMRRSLVKF

SEQ ID NO: 23888 - protein, 31 aa, Artificial Sequence
  Quasi-synthetic sequence derived from human genome
WKRYQPCWVLMVSVLLHHWKALKKVNMKLLV

SEQ ID NO: 23889 - protein, 31 aa, Artificial Sequence
  Quasi-synthetic sequence derived from human genome
CNLFCSLLFIIPKKLMIFLRTVIRLERKTPR

SEQ ID NO: 23890 - protein, 31 aa, Artificial Sequence
  Quasi-synthetic sequence derived from human genome
LFARHRTKMRRKKRFAKQGNKWYKQHLSYRL

SEQ ID NO: 23891 - protein, 31 aa, Artificial Sequence
  Quasi-synthetic sequence derived from human genome
IIIFGVIFCIIIVAIALLILSGIWQRRRKNK

SEQ ID NO: 23892 - protein, 31 aa, Artificial Sequence
  Quasi-synthetic sequence derived from human genome
LLRIQQIIYCHKLTIILTKWRNTARHKSKKK

SEQ ID NO: 23893 - protein, 31 aa, Artificial Sequence
  Quasi-synthetic sequence derived from human genome
VKRVNHWLTCSRWKKVQWCSLSVIKLKNKIK

SEQ ID NO: 23894 - protein, 31 aa, Artificial Sequence
  Quasi-synthetic sequence derived from human genome
RFLCGKEIKKKKCIFRLRIRVPPNPPGKLLP

SEQ ID NO: 23895 - protein, 31 aa, Artificial Sequence
  Quasi-synthetic sequence derived from human genome
IAAFLPARQLWKWFGKPTQRRGMKGKARKLF

SEQ ID NO: 23896 - protein, 31 aa, Artificial Sequence
  Quasi-synthetic sequence derived from human genome
LLPQWPRRPGRRWPASPLGMKVFRRKALVLC

SEQ ID NO: 23897 - protein, 31 aa, Artificial Sequence
  Quasi-synthetic sequence derived from human genome
WLKVRQFHGLLVKRFHCARRNSKALFSQILL

SEQ ID NO: 23898 - protein, 31 aa, Artificial Sequence
  Quasi-synthetic sequence derived from human genome
LKAKRKVVKMMIIVVMTFAICWLPYHIYFIL

SEQ ID NO: 23899 - protein, 31 aa, Artificial Sequence
  Quasi-synthetic sequence derived from human genome
KKKKKSGTKKDVPKSWLMKALFKTFYMVLLK

SEQ ID NO: 23900 - protein, 31 aa, Artificial Sequence
  Quasi-synthetic sequence derived from human genome
IIRIMRVLRIARVLKLLKMATGMRALLDTVV

SEQ ID NO: 23901 - protein, 31 aa, Artificial Sequence
  Quasi-synthetic sequence derived from human genome
TIIRIMRVLRIARVLKLLKMAVGMRALLDTV

SEQ ID NO: 23902 - protein, 31 aa, Artificial Sequence
  Quasi-synthetic sequence derived from human genome
WYKRNFAITFFMGKVALERIWNKLKQKQKKR

SEQ ID NO: 23903 - protein, 31 aa, Artificial Sequence
  Quasi-synthetic sequence derived from human genome
RLKWAVLVLVLVQMLACWLVRGLAWRWLLFW

SEQ ID NO: 23904 - protein, 31 aa, Artificial Sequence
  Quasi-synthetic sequence derived from human genome
YALCNRTFRKTFKMLLLCRWKKKKVEEKLYW

SEQ ID NO: 23905 - protein, 31 aa, Artificial Sequence
  Quasi-synthetic sequence derived from human genome
KILIHRILTLFPNAIARKLLLMLTFILIFWI

SEQ ID NO: 23906 - protein, 31 aa, Artificial Sequence
  Quasi-synthetic sequence derived from human genome
MRRAKRIRLELQNAALQHLFIRKSFRPFKCL

SEQ ID NO: 23907 - protein, 31 aa, Artificial Sequence
  Quasi-synthetic sequence derived from human genome
IISAVVGILLVVVLGVVFGILIKRRQQKIRK

SEQ ID NO: 23908 - protein, 31 aa, Artificial Sequence
  Quasi-synthetic sequence derived from human genome
QFIRQKRRGAFNSKQLLYLEKYRPKMRLRFK

SEQ ID NO: 23909 - protein, 31 aa, Artificial Sequence
  Quasi-synthetic sequence derived from human genome
YWRRLLVLCWYLPGWRAGRVTWLRLATWAGR

SEQ ID NO: 23910 - protein, 31 aa, Artificial Sequence
  Quasi-synthetic sequence derived from human genome
LKVLKKYPRLWCMTKPPSRRPKLYIVNLQWT

SEQ ID NO: 23911 - protein, 31 aa, Artificial Sequence
  Quasi-synthetic sequence derived from human genome
FLILYFSHCMIKVFLSSLKFHIRRFIFLFFI

SEQ ID NO: 23912 - protein, 31 aa, Artificial Sequence
  Quasi-synthetic sequence derived from human genome
FLILGVLSLLLLVTGAFGFHLWRRQWRPRRF

SEQ ID NO: 23913 - protein, 31 aa, Artificial Sequence
  Quasi-synthetic sequence derived from human genome
RRGLVHLCCSKLVNYLTPIKYLRKSLKIIYI

SEQ ID NO: 23914 - protein, 31 aa, Artificial Sequence
  Quasi-synthetic sequence derived from human genome
IFLRRADTRRWKKKQLRRPSLLLLGCCSFGI

SEQ ID NO: 23915 - protein, 31 aa, Artificial Sequence
  Quasi-synthetic sequence derived from human genome
KWLSRRFQKVKLRCRKGIPSSLRAKAWQYLS

SEQ ID NO: 23916 - protein, 31 aa, Artificial Sequence
  Quasi-synthetic sequence derived from human genome
VIGILVAVVLLLLLLLLLFLILRHRRQGKHW

SEQ ID NO: 23917 - protein, 31 aa, Artificial Sequence
  Quasi-synthetic sequence derived from human genome
RLLATLLHNLISYMLLMKVNKNDIRKKVRRL

SEQ ID NO: 23918 - protein, 31 aa, Artificial Sequence
  Quasi-synthetic sequence derived from human genome
VRQRCLIQQKRRRHRATRKIGIAIATFLICF

SEQ ID NO: 23919 - protein, 31 aa, Artificial Sequence
  Quasi-synthetic sequence derived from human genome
PRWILQFRRWARKWSRFTRSSFQVRWAAVPA

SEQ ID NO: 23920 - protein, 31 aa, Artificial Sequence
  Quasi-synthetic sequence derived from human genome
FLARRRYRKMLEEHKAVILQKYARAWLARRR

SEQ ID NO: 23921 - protein, 31 aa, Artificial Sequence
  Quasi-synthetic sequence derived from human genome
VKRRYLDWRALMKRKRMKANIKLVGSGFPLP

SEQ ID NO: 23922 - protein, 31 aa, Artificial Sequence
  Quasi-synthetic sequence derived from human genome
LRARVLVTRRRVRALIAVLWAVALLSAGPFL

SEQ ID NO: 23923 - protein, 31 aa, Artificial Sequence
  Quasi-synthetic sequence derived from human genome
RRKHMWALVWTCSGLLLLSCSICLFWWAKRR

SEQ ID NO: 23924 - protein, 31 aa, Artificial Sequence
  Quasi-synthetic sequence derived from human genome
VHMILVLRTALNLFFKLKNFKTAATFARRLL

SEQ ID NO: 23925 - protein, 31 aa, Artificial Sequence
  Quasi-synthetic sequence derived from human genome
RKAQLAILGMTSLKERLLAIRRILVIITRKM

SEQ ID NO: 23926 - protein, 31 aa, Artificial Sequence
  Quasi-synthetic sequence derived from human genome
VRRTLLHAALRAWIIQCWWRMTLSRVLEKKR

SEQ ID NO: 23927 - protein, 31 aa, Artificial Sequence
  Quasi-synthetic sequence derived from human genome
KPLISMKFLRPLRVLSQFERMKVVVRALIKT

SEQ ID NO: 23928 - protein, 31 aa, Artificial Sequence
  Quasi-synthetic sequence derived from human genome
RMSNLSVLRSFRLLRVFKLAKSWPTLNTLIK

SEQ ID NO: 23929 - protein, 31 aa, Artificial Sequence
  Quasi-synthetic sequence derived from human genome
QVVLKRLFMSRTNRPPLSLSRMIRKMKLPGR

SEQ ID NO: 23930 - protein, 31 aa, Artificial Sequence
  Quasi-synthetic sequence derived from human genome
LHLLMCQLSQEKPRVRKRKGNFKRSRLLKLR

SEQ ID NO: 23931 - protein, 31 aa, Artificial Sequence
  Quasi-synthetic sequence derived from human genome
RMVRAATLIQALWKGYLVRSLLRSKKKRGKG

SEQ ID NO: 23932 - protein, 31 aa, Artificial Sequence
  Quasi-synthetic sequence derived from human genome
RLPPRLPALLTATRRAVRKRGLLRSLLPPPL

SEQ ID NO: 23933 - protein, 31 aa, Artificial Sequence
  Quasi-synthetic sequence derived from human genome
RISITFFRLFRVMRLVKLLSRGEGIRTLLWT

SEQ ID NO: 23934 - protein, 31 aa, Artificial Sequence
  Quasi-synthetic sequence derived from human genome
ADAGMKRALGRRKGVWLRLRKILFCVLGLYI

SEQ ID NO: 23935 - protein, 31 aa, Artificial Sequence
  Quasi-synthetic sequence derived from human genome
MKLLRRAWRRRAALGLGTLALCGAALLYLAR

SEQ ID NO: 23936 - protein, 31 aa, Artificial Sequence
  Quasi-synthetic sequence derived from human genome
LPPSLRDLIQGLSFVTRRRIRRTVRRALRRV

SEQ ID NO: 23937 - protein, 31 aa, Artificial Sequence
  Quasi-synthetic sequence derived from human genome
IKTIQQRNLKTNIRLKKMASLARKASLWLFL

SEQ ID NO: 23938 - protein, 31 aa, Artificial Sequence
  Quasi-synthetic sequence derived from human genome
LLYAFNVTVVSLVHLLKTVRLLRLLRLLQKL

SEQ ID NO: 23939 - protein, 31 aa, Artificial Sequence
  Quasi-synthetic sequence derived from human genome
LRKRDKLWGVCVSILALLPRVLRLMLQSLRV

SEQ ID NO: 23940 - protein, 31 aa, Artificial Sequence
  Quasi-synthetic sequence derived from human genome
FFFIIGLWWCTKSILKYICKKQKRTCYLGSK

SEQ ID NO: 23941 - protein, 31 aa, Artificial Sequence
  Quasi-synthetic sequence derived from human genome
KWLLLLGLVALSECIMYKVPLIRKKSLRRTL

SEQ ID NO: 23942 - protein, 31 aa, Artificial Sequence
  Quasi-synthetic sequence derived from human genome
IVNQLKKIIKRKHTLPNYKIRFKPFFPYQTL

SEQ ID NO: 23943 - protein, 31 aa, Artificial Sequence
  Quasi-synthetic sequence derived from human genome
KYRARRQIPWKLGLQILKIVMVTTQLVRFGL

SEQ ID NO: 23944 - protein, 31 aa, Artificial Sequence
  Quasi-synthetic sequence derived from human genome
FLSVFKKGRRRVPVRNLGKVVHYAKVQLRFQ

SEQ ID NO: 23945 - protein, 31 aa, Artificial Sequence
  Quasi-synthetic sequence derived from human genome
IRVYNKRLKALRKIQKLIKSGQLRATKNGII

SEQ ID NO: 23946 - protein, 31 aa, Artificial Sequence
  Quasi-synthetic sequence derived from human genome
FGRVYLGLSIALRFPALVLYIVFIFAMKKKF

SEQ ID NO: 23947 - protein, 31 aa, Artificial Sequence
  Quasi-synthetic sequence derived from human genome
RKMRKLMLDLNKAKSMGQRLSLISKFRFNFL

SEQ ID NO: 23948 - protein, 31 aa, Artificial Sequence
  Quasi-synthetic sequence derived from human genome
KKYPQPKGQKKKKIVKYGMGGLIILFLIAII

SEQ ID NO: 23949 - protein, 31 aa, Artificial Sequence
  Quasi-synthetic sequence derived from human genome
RKYKKNLKALYVVHPTSFIKVLWNILKPLIS

SEQ ID NO: 23950 - protein, 31 aa, Artificial Sequence
  Quasi-synthetic sequence derived from human genome
FNKHKIKLGGSNIFITVKQRKQYRRLKKLMY

SEQ ID NO: 23951 - protein, 31 aa, Artificial Sequence
  Quasi-synthetic sequence derived from human genome
LVSLMVICRGIIKLVIHFRMYCPPRLKAKHI

SEQ ID NO: 23952 - protein, 31 aa, Artificial Sequence
  Quasi-synthetic sequence derived from human genome
FWQIWCALFPFLVMLVCYGFIFRVARVKARK

SEQ ID NO: 23953 - protein, 31 aa, Artificial Sequence
  Quasi-synthetic sequence derived from human genome
LLLFIGLGIFFCVRCRHRRRQAERMSQIKRL

SEQ ID NO: 23954 - protein, 31 aa, Artificial Sequence
  Quasi-synthetic sequence derived from human genome
LRTLRAVRVLRPLKLVSGIPSLQVVLKSIMK

SEQ ID NO: 23955 - protein, 31 aa, Artificial Sequence
  Quasi-synthetic sequence derived from human genome
RLRSGAKALGKARRKVTVLVLVVLAVCLLCW

SEQ ID NO: 23956 - protein, 31 aa, Artificial Sequence
  Quasi-synthetic sequence derived from human genome
KRKIPKLVLRINAIYEVRRGKKRVKRLSQSM

SEQ ID NO: 23957 - protein, 31 aa, Artificial Sequence
  Quasi-synthetic sequence derived from human genome
LRLRKILFCVLGLYIAIPFLIKLCPGIQAKL

SEQ ID NO: 23958 - protein, 31 aa, Artificial Sequence
  Quasi-synthetic sequence derived from human genome
RVLTFLPAKALLRVACVCRLWRECVRRVLRT

SEQ ID NO: 23959 - protein, 31 aa, Artificial Sequence
  Quasi-synthetic sequence derived from human genome
GKLAGLLRTFMRSRPSRQRLRQRGILRQRVF

SEQ ID NO: 23960 - protein, 31 aa, Artificial Sequence
  Quasi-synthetic sequence derived from human genome
LVHRRIYPFLLMVVVLMAILSFQVRQFKRLY

SEQ ID NO: 23961 - protein, 31 aa, Artificial Sequence
  Quasi-synthetic sequence derived from human genome
RARRRRTFCLLVVIVVVFAVCWLPLHVFNLL

SEQ ID NO: 23962 - protein, 31 aa, Artificial Sequence
  Quasi-synthetic sequence derived from human genome
KKAVWHKLLSKQRKRAVVACFRMAPLYNLPR

SEQ ID NO: 23963 - protein, 31 aa, Artificial Sequence
  Quasi-synthetic sequence derived from human genome
IIILGCLALFLLLQRKNLRRPPCIKGWIPWI

SEQ ID NO: 23964 - protein, 31 aa, Artificial Sequence
  Quasi-synthetic sequence derived from human genome
WVILLAVLAGLLVLALLVLLLWKMGFFKRAK

SEQ ID NO: 23965 - protein, 31 aa, Artificial Sequence
  Quasi-synthetic sequence derived from human genome
IYRRGARRWRKLYRANGHLFQAKRFNRRAYC

SEQ ID NO: 23966 - protein, 31 aa, Artificial Sequence
  Quasi-synthetic sequence derived from human genome
RRAKRKVTRMILIVAALFCLCWMPHHALILC

SEQ ID NO: 23967 - protein, 31 aa, Artificial Sequence
  Quasi-synthetic sequence derived from human genome
IWRLKKPKMVSKKLKTVFHAPDLSRMLQMFR

SEQ ID NO: 23968 - protein, 31 aa, Artificial Sequence
  Quasi-synthetic sequence derived from human genome
FRLFRVMRLVKLLSRGEGIRTLLWTFIKSFQ

SEQ ID NO: 23969 - protein, 31 aa, Artificial Sequence
  Quasi-synthetic sequence derived from human genome
ILRKRNKALRKIRKLQKQGLLQVTPKGFICT

SEQ ID NO: 23970 - protein, 31 aa, Artificial Sequence
  Quasi-synthetic sequence derived from human genome
CRRRRARLRFMKQKFNIVCLKISGFTTCCCF

SEQ ID NO: 23971 - protein, 31 aa, Artificial Sequence
  Quasi-synthetic sequence derived from human genome
RICAFLWRKKWLGQWAKQLCVIKDNRLLCYK

SEQ ID NO: 23972 - protein, 31 aa, Artificial Sequence
  Quasi-synthetic sequence derived from human genome
KSNTVYNPVIYVFMIRKFRRSLLQLLCLRLL

SEQ ID NO: 23973 - protein, 31 aa, Artificial Sequence
  Quasi-synthetic sequence derived from human genome
MRLRTKMPWKTCWRYLTSGGFFLLILMIFSK

SEQ ID NO: 23974 - protein, 31 aa, Artificial Sequence
  Quasi-synthetic sequence derived from human genome
RQRVLQAAAKNIRVWFIKVRKMKAIYHTLNL

SEQ ID NO: 23975 - protein, 31 aa, Artificial Sequence
  Quasi-synthetic sequence derived from human genome
LSRLLFFLLGFLRIRVRGQRASRLQAPVLVA

SEQ ID NO: 23976 - protein, 31 aa, Artificial Sequence
  Quasi-synthetic sequence derived from human genome
CISRQRVLPRMQARMRGFQARKRYLRRRAAL

SEQ ID NO: 23977 - protein, 31 aa, Artificial Sequence
  Quasi-synthetic sequence derived from human genome
GLRKVLFATALGTVALALAAHQLKRRRRRKK

SEQ ID NO: 23978 - protein, 31 aa, Artificial Sequence
  Quasi-synthetic sequence derived from human genome
RMRGLLARRLRNHMAVAFVLSLGVAALYKFR

SEQ ID NO: 23979 - protein, 31 aa, Artificial Sequence
  Quasi-synthetic sequence derived from human genome
VVVVFLFLILIRRALSASQKKKVIIAALRTP

SEQ ID NO: 23980 - protein, 31 aa, Artificial Sequence
  Quasi-synthetic sequence derived from human genome
LFLKMLERFCRSRGNLVVQNKQKKRRKKKKK

SEQ ID NO: 23981 - protein, 31 aa, Artificial Sequence
  Quasi-synthetic sequence derived from human genome
LSLLFKKLVGTKVLMASVQGSKRRKLRVYLH

SEQ ID NO: 23982 - protein, 31 aa, Artificial Sequence
  Quasi-synthetic sequence derived from human genome
KSKYASYLSFIKILLKRGGVRVSTKNLIKLF

SEQ ID NO: 23983 - protein, 31 aa, Artificial Sequence
  Quasi-synthetic sequence derived from human genome
RRRMALRPGSRRPTAFFFHSRWLVPNLLAFF

SEQ ID NO: 23984 - protein, 31 aa, Artificial Sequence
  Quasi-synthetic sequence derived from human genome
IVQRWIRGFLVRKNLSPVFFHKKKQQEKIIR

SEQ ID NO: 23985 - protein, 31 aa, Artificial Sequence
  Quasi-synthetic sequence derived from human genome
YRKRWREINARPIKKVAEAKARKKRRMLKRL

SEQ ID NO: 23986 - protein, 31 aa, Artificial Sequence
  Quasi-synthetic sequence derived from human genome
KRIHLLTRRNFLLGKWIIFSGQMFGRILCQL

SEQ ID NO: 23987 - protein, 31 aa, Artificial Sequence
  Quasi-synthetic sequence derived from human genome
LRKINQVLLFLLIVTLCVILYKKVHKGTVPK

SEQ ID NO: 23988 - protein, 31 aa, Artificial Sequence
  Quasi-synthetic sequence derived from human genome
PTQAKLLAKKRVVRMLLVIVVLFFLCWLPVY

SEQ ID NO: 23989 - protein, 31 aa, Artificial Sequence
  Quasi-synthetic sequence derived from human genome
SGCLRWFQHRRNRRRRKPQRNLLRNFLVQAF

SEQ ID NO: 23990 - protein, 31 aa, Artificial Sequence
  Quasi-synthetic sequence derived from human genome
RRRLVKVINNRAKLLSLCSFIIETCLFILWR

SEQ ID NO: 23991 - protein, 31 aa, Artificial Sequence
  Quasi-synthetic sequence derived from human genome
SPKSSWVKRHRSSFRNRFPLLKVLILQRNKL

SEQ ID NO: 23992 - protein, 31 aa, Artificial Sequence
  Quasi-synthetic sequence derived from human genome
LLILKRVLEMRKKALFILPFVSVAKEKKYYL

SEQ ID NO: 23993 - protein, 31 aa, Artificial Sequence
  Quasi-synthetic sequence derived from human genome
FPPRRRLRLGPRGLPLLLSGLLLPLCRAFNL

SEQ ID NO: 23994 - protein, 31 aa, Artificial Sequence
  Quasi-synthetic sequence derived from human genome
KIVYMFLFLLCLTLFQVYYSLWRKLLKAFWW

SEQ ID NO: 23995 - protein, 31 aa, Artificial Sequence
  Quasi-synthetic sequence derived from human genome
RIMAKDLVRTRRYVRKFVLMRANIQAVSLKI

SEQ ID NO: 23996 - protein, 31 aa, Artificial Sequence
  Quasi-synthetic sequence derived from human genome
RMVWRLLHGQVLTRRERRRLLRTCVDFFRLV

SEQ ID NO: 23997 - protein, 31 aa, Artificial Sequence
  Quasi-synthetic sequence derived from human genome
KLCSRFLLKCGFITIPWRCIKKCSPLMPSWR

SEQ ID NO: 23998 - protein, 31 aa, Artificial Sequence
  Quasi-synthetic sequence derived from human genome
RRSRHRLLLLLLRYLVVALGYHKAYGFSAPK

SEQ ID NO: 23999 - protein, 31 aa, Artificial Sequence
  Quasi-synthetic sequence derived from human genome
KIMVRRCLVTLRPFRLFVLGIGFFTLCFLMT

SEQ ID NO: 24000 - protein, 31 aa, Artificial Sequence
  Quasi-synthetic sequence derived from human genome
RKKLEQHIRRRLIQRRWGLPRRIHESLSLLR

SEQ ID NO: 24001 - protein, 32 aa, Artificial Sequence
  Quasi-synthetic sequence derived from human genome
VKRFLKHAGKWSLRWFLSPRWILQFRRWARKW

SEQ ID NO: 24002 - protein, 32 aa, Artificial Sequence
  Quasi-synthetic sequence derived from human genome
LLFLLFFLTLRFSVVKRGRKKLLYIFKQPFMR

SEQ ID NO: 24003 - protein, 32 aa, Artificial Sequence
  Quasi-synthetic sequence derived from human genome
LKRLVKLHIKRHYHKKFWKLGAVIFFFIIVLV

SEQ ID NO: 24004 - protein, 32 aa, Artificial Sequence
  Quasi-synthetic sequence derived from human genome
HLLRLLRLIILLRIFHLFHQKRQLEKLIRRRV

SEQ ID NO: 24005 - protein, 32 aa, Artificial Sequence
  Quasi-synthetic sequence derived from human genome
FKRAFLRLLRCQCRRRRRRRPLWRVYGHHWRA

SEQ ID NO: 24006 - protein, 32 aa, Artificial Sequence
  Quasi-synthetic sequence derived from human genome
RLLKRLLGPKLRRFLKPQGHPRLLLWFKRGLA

SEQ ID NO: 24007 - protein, 32 aa, Artificial Sequence
  Quasi-synthetic sequence derived from human genome
LGHRLLKRLLGPKLRRFLKPQGHPRLLLWFKR

SEQ ID NO: 24008 - protein, 32 aa, Artificial Sequence
  Quasi-synthetic sequence derived from human genome
FLFRLLLRFLRLCRSFYITCRRLRCFPQPPRR

SEQ ID NO: 24009 - protein, 32 aa, Artificial Sequence
  Quasi-synthetic sequence derived from human genome
LKVLFKKTHRILRRLFNLCKRCHRQPRFRLPK

SEQ ID NO: 24010 - protein, 32 aa, Artificial Sequence
  Quasi-synthetic sequence derived from human genome
KSWRRRSCWRKWKQLSRLQRNMILFLLAFLLF

SEQ ID NO: 24011 - protein, 32 aa, Artificial Sequence
  Quasi-synthetic sequence derived from human genome
ILAMGLWVIRVQKRHKMPRMKKLMRNRMKLRK

SEQ ID NO: 24012 - protein, 32 aa, Artificial Sequence
  Quasi-synthetic sequence derived from human genome
LLRKRWFQLGRSMNPRARKKRSRIPLLRKRRF

SEQ ID NO: 24013 - protein, 32 aa, Artificial Sequence
  Quasi-synthetic sequence derived from human genome
RKQYRKVLYCVVIIQKNYRAFLLRRRFLHLKK

SEQ ID NO: 24014 - protein, 32 aa, Artificial Sequence
  Quasi-synthetic sequence derived from human genome
RFLKIIRPLRNIFLKKPVFAKTVSIFIWFFLF

SEQ ID NO: 24015 - protein, 32 aa, Artificial Sequence
  Quasi-synthetic sequence derived from human genome
KTMKFILWRRFRWAIILFIILFILLLFLAIFI

SEQ ID NO: 24016 - protein, 32 aa, Artificial Sequence
  Quasi-synthetic sequence derived from human genome
KRRKMSKKLPPVIIKYIIINRFRGRKNMLVKL

SEQ ID NO: 24017 - protein, 32 aa, Artificial Sequence
  Quasi-synthetic sequence derived from human genome
KLLKRLRLLPALLILRAFKPHRKIRDYRVVVV

SEQ ID NO: 24018 - protein, 32 aa, Artificial Sequence
  Quasi-synthetic sequence derived from human genome
WLRVRKARPQLILSRRPRRRLGSLRWCGRRRL

SEQ ID NO: 24019 - protein, 32 aa, Artificial Sequence
  Quasi-synthetic sequence derived from human genome
RRWRRWNRFNRRRCRAAVKSVTFYWLVIVLVF

SEQ ID NO: 24020 - protein, 32 aa, Artificial Sequence
  Quasi-synthetic sequence derived from human genome
LFRVIRLARIGRILRLIRGAKGIRTLLFALMM

SEQ ID NO: 24021 - protein, 32 aa, Artificial Sequence
  Quasi-synthetic sequence derived from human genome
KQGLRLLRGLRRRNVQKKVALAKKLLAKLRFL

SEQ ID NO: 24022 - protein, 32 aa, Artificial Sequence
  Quasi-synthetic sequence derived from human genome
WRGTLARWRCRRLRAIYTIMRWFRRHKVRAHL

SEQ ID NO: 24023 - protein, 32 aa, Artificial Sequence
  Quasi-synthetic sequence derived from human genome
RFLRLHCGLWVRRKAGYKKKLWKKTPARKKRL

SEQ ID NO: 24024 - protein, 32 aa, Artificial Sequence
  Quasi-synthetic sequence derived from human genome
FIVTLLVYIKIYIVLRRRRKRVNTKRSSRAFR

SEQ ID NO: 24025 - protein, 32 aa, Artificial Sequence
  Quasi-synthetic sequence derived from human genome
RRHLKMMHIAATLIQRRFRTLMMRRRFLSLKK

SEQ ID NO: 24026 - protein, 32 aa, Artificial Sequence
  Quasi-synthetic sequence derived from human genome
GALLLLLVVALGIGLFMRRRHIVRKRTLRRLL

SEQ ID NO: 24027 - protein, 32 aa, Artificial Sequence
  Quasi-synthetic sequence derived from human genome
RYWRRWNRFCRRKCRAAVKSNVFYWLVIFLVF

SEQ ID NO: 24028 - protein, 32 aa, Artificial Sequence
  Quasi-synthetic sequence derived from human genome
TRKLTHLRKRIHRPRRRTTRRWKRWFKFRKRK

SEQ ID NO: 24029 - protein, 32 aa, Artificial Sequence
  Quasi-synthetic sequence derived from human genome
FRLQRALRFLLGRLPWRVASGARRFRRWLNRY

SEQ ID NO: 24030 - protein, 32 aa, Artificial Sequence
  Quasi-synthetic sequence derived from human genome
LFRVIRLARIGRVLRLIRGAKGIRTLLFALMM

SEQ ID NO: 24031 - protein, 32 aa, Artificial Sequence
  Quasi-synthetic sequence derived from human genome
VVVMKFFRWVRRAWQRIISWVFFWRQKIKPTI

SEQ ID NO: 24032 - protein, 32 aa, Artificial Sequence
  Quasi-synthetic sequence derived from human genome
KGLLIFLLLVILAMGLWVIRVQKRHKMPRMKK

SEQ ID NO: 24033 - protein, 32 aa, Artificial Sequence
  Quasi-synthetic sequence derived from human genome
KQRLRKRVNAALVIQKYWRRVLAQRKLLMLKK

SEQ ID NO: 24034 - protein, 32 aa, Artificial Sequence
  Quasi-synthetic sequence derived from human genome
RCLRGFFIKRRFRSLRHKIILLQSRARGYLAR

SEQ ID NO: 24035 - protein, 32 aa, Artificial Sequence
  Quasi-synthetic sequence derived from human genome
LLFLMRKDKKKLRRLLKYMFIRDYKSKIVKGI

SEQ ID NO: 24036 - protein, 32 aa, Artificial Sequence
  Quasi-synthetic sequence derived from human genome
LSVLRTFRLLRVLKLVRFMPALRRQLVVLMKT

SEQ ID NO: 24037 - protein, 32 aa, Artificial Sequence
  Quasi-synthetic sequence derived from human genome
LVVMFWLIFLLIILSYIKIGKNLLRISKRRSK

SEQ ID NO: 24038 - protein, 32 aa, Artificial Sequence
  Quasi-synthetic sequence derived from human genome
FRRKIYYLPRRYKFMSRIDKQISRFRRWLPKK

SEQ ID NO: 24039 - protein, 32 aa, Artificial Sequence
  Quasi-synthetic sequence derived from human genome
KTAFRIYAVSTLLLFLLFFLFRLLLRFLRLCR

SEQ ID NO: 24040 - protein, 32 aa, Artificial Sequence
  Quasi-synthetic sequence derived from human genome
RLCLRLLLLLGYRRRCPPLLRGLVQRWRYGKV

SEQ ID NO: 24041 - protein, 32 aa, Artificial Sequence
  Quasi-synthetic sequence derived from human genome
RRRRRLRRRPRGLRCSRLPPPPPLPLLLGLLL

SEQ ID NO: 24042 - protein, 32 aa, Artificial Sequence
  Quasi-synthetic sequence derived from human genome
IYLIMIFLGLYINFRHLYKQRRRRYGQKKKKI

SEQ ID NO: 24043 - protein, 32 aa, Artificial Sequence
  Quasi-synthetic sequence derived from human genome
FLRVVRFVRILRIFKLTRHFVGLRVLGHTLRA

SEQ ID NO: 24044 - protein, 32 aa, Artificial Sequence
  Quasi-synthetic sequence derived from human genome
LLACVATVIFIITKFCLFCFRKLAKKGKKKKR

SEQ ID NO: 24045 - protein, 32 aa, Artificial Sequence
  Quasi-synthetic sequence derived from human genome
KIAGVIAGILLFVIIFLGVVLVMKKRKLAKKR

SEQ ID NO: 24046 - protein, 32 aa, Artificial Sequence
  Quasi-synthetic sequence derived from human genome
LLLRLLLSCLLLPAARLARQYLLPLLRRLARR

SEQ ID NO: 24047 - protein, 32 aa, Artificial Sequence
  Quasi-synthetic sequence derived from human genome
LASRHFRARFRRLWPCGRRRRHRARRALRRVR

SEQ ID NO: 24048 - protein, 32 aa, Artificial Sequence
  Quasi-synthetic sequence derived from human genome
HLVRLLRLIILIRIFHLLHQKRQLEKLMRRLV

SEQ ID NO: 24049 - protein, 32 aa, Artificial Sequence
  Quasi-synthetic sequence derived from human genome
RARRRRRRRRRRDLLLSQLCFLASVALLLWSL

SEQ ID NO: 24050 - protein, 32 aa, Artificial Sequence
  Quasi-synthetic sequence derived from human genome
IWVPVKVILHKKRYIYRKIKGWRPVLMMCVVL

SEQ ID NO: 24051 - protein, 32 aa, Artificial Sequence
  Quasi-synthetic sequence derived from human genome
WFFWIRLYKIRRGRTRPQALLFLCMILLLIVL

SEQ ID NO: 24052 - protein, 32 aa, Artificial Sequence
  Quasi-synthetic sequence derived from human genome
WFRSWGYVLLIVLFCLFIFVLIYVRVFRKSRR

SEQ ID NO: 24053 - protein, 32 aa, Artificial Sequence
  Quasi-synthetic sequence derived from human genome
FWKKKKSMIGMSTKLWKVKKALKMTIFWRGLM

SEQ ID NO: 24054 - protein, 32 aa, Artificial Sequence
  Quasi-synthetic sequence derived from human genome
LLRICRVLRSLKLLAQFRQIQIIILVLVRALK

SEQ ID NO: 24055 - protein, 32 aa, Artificial Sequence
  Quasi-synthetic sequence derived from human genome
SRRRGFGLFFFLRLHRLLLLFLVLRGTLANKL

SEQ ID NO: 24056 - protein, 32 aa, Artificial Sequence
  Quasi-synthetic sequence derived from human genome
KTMKFIVWRRFKWVIIGLLFLLILLLFVAVLL

SEQ ID NO: 24057 - protein, 32 aa, Artificial Sequence
  Quasi-synthetic sequence derived from human genome
IGRRLQARRFRRSRRTGRLVVLIILTFAAFWL

SEQ ID NO: 24058 - protein, 32 aa, Artificial Sequence
  Quasi-synthetic sequence derived from human genome
KTYLKRFKVMKPKVLRSWCRQILKGLLFLHTR

SEQ ID NO: 24059 - protein, 32 aa, Artificial Sequence
  Quasi-synthetic sequence derived from human genome
FRIVRLARIGRILRLVRAARGIRTLLFALMMS

SEQ ID NO: 24060 - protein, 32 aa, Artificial Sequence
  Quasi-synthetic sequence derived from human genome
MKHFLRMLIQVCLYFYCKFLWRCLKFVMRKLT

SEQ ID NO: 24061 - protein, 32 aa, Artificial Sequence
  Quasi-synthetic sequence derived from human genome
IGGLFILVIVGLTFAVYVRRKSIKKKRALRRF

SEQ ID NO: 24062 - protein, 32 aa, Artificial Sequence
  Quasi-synthetic sequence derived from human genome
VKKKIKPTLPLRIFINVSRFFCVQLKKMVRLM

SEQ ID NO: 24063 - protein, 32 aa, Artificial Sequence
  Quasi-synthetic sequence derived from human genome
RKKSGILLLTLVSFLIFILFIIVQLFIMKLRK

SEQ ID NO: 24064 - protein, 32 aa, Artificial Sequence
  Quasi-synthetic sequence derived from human genome
LRRKKKKTIKMLMLVVVLFALCWFPLNCYVLL

SEQ ID NO: 24065 - protein, 32 aa, Artificial Sequence
  Quasi-synthetic sequence derived from human genome
FVLALVLPSIVILGKIILFLPCISRKLKRIKK

SEQ ID NO: 24066 - protein, 32 aa, Artificial Sequence
  Quasi-synthetic sequence derived from human genome
RIRASLVLILKTIRRRLPFSKWRLAFRFAGPH

SEQ ID NO: 24067 - protein, 32 aa, Artificial Sequence
  Quasi-synthetic sequence derived from human genome
VRVLVRAHRHRGLRPRRQKALRMILAVVLVFF

SEQ ID NO: 24068 - protein, 32 aa, Artificial Sequence
  Quasi-synthetic sequence derived from human genome
YRAFLLRRRFLHLKKAAIVFQKQLRGQIARRV

SEQ ID NO: 24069 - protein, 32 aa, Artificial Sequence
  Quasi-synthetic sequence derived from human genome
RRYGKLSRHLMKVKLKKYTKFLFVRDPFVRLI

SEQ ID NO: 24070 - protein, 32 aa, Artificial Sequence
  Quasi-synthetic sequence derived from human genome
RAARPPLLLRPVKLLRRRFRLLLALAVVSVGL

SEQ ID NO: 24071 - protein, 32 aa, Artificial Sequence
  Quasi-synthetic sequence derived from human genome
ILLSAFAGLLLLMLLILALWKIGFFKRPLKKK

SEQ ID NO: 24072 - protein, 32 aa, Artificial Sequence
  Quasi-synthetic sequence derived from human genome
ARTRAGAARVARWRRLRLQQLRRLRGLLRVLR

SEQ ID NO: 24073 - protein, 32 aa, Artificial Sequence
  Quasi-synthetic sequence derived from human genome
KLRADKLRAACIRIQKTIRGWLLRKKYLRMRK

SEQ ID NO: 24074 - protein, 32 aa, Artificial Sequence
  Quasi-synthetic sequence derived from human genome
LVRRTLLVAALRAWMIQCWWRTLVQRRIRQRR

SEQ ID NO: 24075 - protein, 32 aa, Artificial Sequence
  Quasi-synthetic sequence derived from human genome
RRLRRLAHLVLFCPFSKRLQGRLPGLRVRCIF

SEQ ID NO: 24076 - protein, 32 aa, Artificial Sequence
  Quasi-synthetic sequence derived from human genome
LLRKRRFQLGRSMNPRARKNRSRIPLLRKRRF

SEQ ID NO: 24077 - protein, 32 aa, Artificial Sequence
  Quasi-synthetic sequence derived from human genome
RTWWRWLTFWRRLQSAFLKNRSLRTKSSLWRR

SEQ ID NO: 24078 - protein, 32 aa, Artificial Sequence
  Quasi-synthetic sequence derived from human genome
WKGGFILPVLGAVLALLFLLLVLLLLVRKKRK

SEQ ID NO: 24079 - protein, 32 aa, Artificial Sequence
  Quasi-synthetic sequence derived from human genome
WTHLVRLLRLIILIRIFHLLHQKRQLEKLMRR

SEQ ID NO: 24080 - protein, 32 aa, Artificial Sequence
  Quasi-synthetic sequence derived from human genome
RRRYKIRRAATIVLQSYLRGFLARNRYRKILR

SEQ ID NO: 24081 - protein, 32 aa, Artificial Sequence
  Quasi-synthetic sequence derived from human genome
RCYAKFLRRTKAATIIQKYWRMYVVRRRYKIR

SEQ ID NO: 24082 - protein, 32 aa, Artificial Sequence
  Quasi-synthetic sequence derived from human genome
KLRYLSLLCLLPLVAFLLFCLHVLFKKRTKSK

SEQ ID NO: 24083 - protein, 32 aa, Artificial Sequence
  Quasi-synthetic sequence derived from human genome
GLCLRLLLFFRFKRTLDRICVLFLLGWHRKPR

SEQ ID NO: 24084 - protein, 32 aa, Artificial Sequence
  Quasi-synthetic sequence derived from human genome
KTYLKRFKVMKIKVLRSWCRQILKGLQFLHTR

SEQ ID NO: 24085 - protein, 32 aa, Artificial Sequence
  Quasi-synthetic sequence derived from human genome
FILIMGNSKLREAFLKMLRFVKCFLRRRKPFV

SEQ ID NO: 24086 - protein, 32 aa, Artificial Sequence
  Quasi-synthetic sequence derived from human genome
LVRRALLHAALSACIIQCWWRLILSKILKKRR

SEQ ID NO: 24087 - protein, 32 aa, Artificial Sequence
  Quasi-synthetic sequence derived from human genome
IIKTLLRCPSKKKYKAIRLIFVIMAVFFIFWT

SEQ ID NO: 24088 - protein, 32 aa, Artificial Sequence
  Quasi-synthetic sequence derived from human genome
ALLRLLGLRRGLRRLRRLWAGPRVQRGRGRGR

SEQ ID NO: 24089 - protein, 32 aa, Artificial Sequence
  Quasi-synthetic sequence derived from human genome
LALLTVNALLVLLALAAWASRWLRRKLRARRK

SEQ ID NO: 24090 - protein, 32 aa, Artificial Sequence
  Quasi-synthetic sequence derived from human genome
FLLALLGLVVKRAVERRKALSRRARRLAVRMR

SEQ ID NO: 24091 - protein, 32 aa, Artificial Sequence
  Quasi-synthetic sequence derived from human genome
RKKIHRRVLKKNPLKNLRIMLKLNPYAKTMRR

SEQ ID NO: 24092 - protein, 32 aa, Artificial Sequence
  Quasi-synthetic sequence derived from human genome
WRRDIFGRIIWHKFKQWVIPWHLNKRYNRKRF

SEQ ID NO: 24093 - protein, 32 aa, Artificial Sequence
  Quasi-synthetic sequence derived from human genome
RGMLPVAVLVALLAVIVLVALLLLWRRRQKRR

SEQ ID NO: 24094 - protein, 32 aa, Artificial Sequence
  Quasi-synthetic sequence derived from human genome
LLRKRRFQLYRSTNPRARKNRSRIPLLRKRRF

SEQ ID NO: 24095 - protein, 32 aa, Artificial Sequence
  Quasi-synthetic sequence derived from human genome
GRRKGVWLRLRKILFCVLGLYIAIPFLIKLCP

SEQ ID NO: 24096 - protein, 32 aa, Artificial Sequence
  Quasi-synthetic sequence derived from human genome
MVGKIKRLKKSAFVVLILLITAKLLVLPLLCR

SEQ ID NO: 24097 - protein, 32 aa, Artificial Sequence
  Quasi-synthetic sequence derived from human genome
AKILGVLRVLRLLRTLRPLRVISRAPGLKLVV

SEQ ID NO: 24098 - protein, 32 aa, Artificial Sequence
  Quasi-synthetic sequence derived from human genome
LAILRVIRLVRVFRIFKLSRHSKGLQILGKTL

SEQ ID NO: 24099 - protein, 32 aa, Artificial Sequence
  Quasi-synthetic sequence derived from human genome
ALFCLQYLGVRVLLRFQRKLSVLLLLLGRRRV

SEQ ID NO: 24100 - protein, 32 aa, Artificial Sequence
  Quasi-synthetic sequence derived from human genome
KLSKFILISSLAILLMVSLLLLSLWKLWRVKK

SEQ ID NO: 24101 - protein, 32 aa, Artificial Sequence
  Quasi-synthetic sequence derived from human genome
KIHFTKVFSAFALVRTIRYLYRRLQRMLGLRR

SEQ ID NO: 24102 - protein, 32 aa, Artificial Sequence
  Quasi-synthetic sequence derived from human genome
KMMQRRPRSAEVKYFYFFKILLRLRLAILKYL

SEQ ID NO: 24103 - protein, 32 aa, Artificial Sequence
  Quasi-synthetic sequence derived from human genome
LLRKRWFQLGHSMNPRARKNRSRIPLLRKRRF

SEQ ID NO: 24104 - protein, 32 aa, Artificial Sequence
  Quasi-synthetic sequence derived from human genome
GILLVVVLGVVFGILIKRRQQKIRKYTMRRLL

SEQ ID NO: 24105 - protein, 32 aa, Artificial Sequence
  Quasi-synthetic sequence derived from human genome
MRKNVRVLSRTSKFRRLRQLLRRRKKRWQGRR

SEQ ID NO: 24106 - protein, 32 aa, Artificial Sequence
  Quasi-synthetic sequence derived from human genome
LIGIAVVLFVIFILVVLFIVFRKKVFRKNYSR

SEQ ID NO: 24107 - protein, 32 aa, Artificial Sequence
  Quasi-synthetic sequence derived from human genome
LSRKQLVLRRGLLLLGVFLILLVGILVRFYVR

SEQ ID NO: 24108 - protein, 32 aa, Artificial Sequence
  Quasi-synthetic sequence derived from human genome
RRKLKFFFMNPCEKFWARGRKPWKLAIQILKI

SEQ ID NO: 24109 - protein, 32 aa, Artificial Sequence
  Quasi-synthetic sequence derived from human genome
SIPWKVLKVVAKVIRALLRILCCLLKAICRVL

SEQ ID NO: 24110 - protein, 32 aa, Artificial Sequence
  Quasi-synthetic sequence derived from human genome
KLNRFLLLFIGFVCVLLSFFMARVFMRMKLPR

SEQ ID NO: 24111 - protein, 32 aa, Artificial Sequence
  Quasi-synthetic sequence derived from human genome
LVLIVLVTLIFCLIVLSLSTFHIHKRRMKKRK

SEQ ID NO: 24112 - protein, 32 aa, Artificial Sequence
  Quasi-synthetic sequence derived from human genome
ILALVLLVVLLVVCGPLAYKKLVKKFRQKKQR

SEQ ID NO: 24113 - protein, 32 aa, Artificial Sequence
  Quasi-synthetic sequence derived from human genome
KLKRKYWWKNCKMWAIGITVLVIFIIIIIVWV

SEQ ID NO: 24114 - protein, 32 aa, Artificial Sequence
  Quasi-synthetic sequence derived from human genome
RYLAICRPLRARVLVTRRRVRALIAVLWAVAL

SEQ ID NO: 24115 - protein, 32 aa, Artificial Sequence
  Quasi-synthetic sequence derived from human genome
RHKCKQRFTKITQYLIRIRKLTLKRQRKLVPL

SEQ ID NO: 24116 - protein, 32 aa, Artificial Sequence
  Quasi-synthetic sequence derived from human genome
KKIWWIIRGPMMLCVTVNFFIFLKILKLLISK

SEQ ID NO: 24117 - protein, 32 aa, Artificial Sequence
  Quasi-synthetic sequence derived from human genome
IWVKMYGYFAGLCRRLQKFWRVTVKGFFVKKK

SEQ ID NO: 24118 - protein, 32 aa, Artificial Sequence
  Quasi-synthetic sequence derived from human genome
LLRKRRFQLYRSMNPRARKNRSHIPLVRKRRF

SEQ ID NO: 24119 - protein, 32 aa, Artificial Sequence
  Quasi-synthetic sequence derived from human genome
KAAKDVLGFLRVVRFVRILRIFKLTRHFVGLR

SEQ ID NO: 24120 - protein, 32 aa, Artificial Sequence
  Quasi-synthetic sequence derived from human genome
LLRKRRFQLGRSMNLRARKNRSQIVLFQKRRF

SEQ ID NO: 24121 - protein, 32 aa, Artificial Sequence
  Quasi-synthetic sequence derived from human genome
FLKLFRAARLIKLLRQGYTIRILLWTFVQSFK

SEQ ID NO: 24122 - protein, 32 aa, Artificial Sequence
  Quasi-synthetic sequence derived from human genome
AKLKRKYWWKNCKMMIMLGAICAIIVVVIVRR

SEQ ID NO: 24123 - protein, 32 aa, Artificial Sequence
  Quasi-synthetic sequence derived from human genome
WRLPPILIIHLKRFQFVNGRWIKSQKIVKFPR

SEQ ID NO: 24124 - protein, 32 aa, Artificial Sequence
  Quasi-synthetic sequence derived from human genome
LFLCGLLSKAKQKLLRHLVPAAALRRKRKALW

SEQ ID NO: 24125 - protein, 32 aa, Artificial Sequence
  Quasi-synthetic sequence derived from human genome
KLFFIKNQRSSLRIRLFNFSLKLLSCLLYIIR

SEQ ID NO: 24126 - protein, 32 aa, Artificial Sequence
  Quasi-synthetic sequence derived from human genome
LCRLRVRKAIGKYRIKLLDTLPLPGRLIRYLK

SEQ ID NO: 24127 - protein, 32 aa, Artificial Sequence
  Quasi-synthetic sequence derived from human genome
LAEKAKRCNRRLKSQILLKKYLMKRRWKKNFI

SEQ ID NO: 24128 - protein, 32 aa, Artificial Sequence
  Quasi-synthetic sequence derived from human genome
WRFIRVFIKTIRRDIFGGLVLLKVKAKVRQCL

SEQ ID NO: 24129 - protein, 32 aa, Artificial Sequence
  Quasi-synthetic sequence derived from human genome
APRASGRCVIAPVRAVLRLRRRVCVLRKRRLL

SEQ ID NO: 24130 - protein, 32 aa, Artificial Sequence
  Quasi-synthetic sequence derived from human genome
KRSWPFLRSFRVLRVFKLAKSWPTLNTLIKII

SEQ ID NO: 24131 - protein, 32 aa, Artificial Sequence
  Quasi-synthetic sequence derived from human genome
AFSRSKKKKKKKKKRQCFAFLIYFRLGIKMGK

SEQ ID NO: 24132 - protein, 32 aa, Artificial Sequence
  Quasi-synthetic sequence derived from human genome
KIAGISAGILVFILLLLVVILIVKKSKLAKKR

SEQ ID NO: 24133 - protein, 32 aa, Artificial Sequence
  Quasi-synthetic sequence derived from human genome
LLAWLLLPLLLLLLVLLLAAYFFRFRKQRKAV

SEQ ID NO: 24134 - protein, 32 aa, Artificial Sequence
  Quasi-synthetic sequence derived from human genome
RAWLARRRFQSIRRFVLNIQLTYRVQRLQKKL

SEQ ID NO: 24135 - protein, 32 aa, Artificial Sequence
  Quasi-synthetic sequence derived from human genome
RLPIRMAKALGKRTAKYRWFAVLYLLVCFLLL

SEQ ID NO: 24136 - protein, 32 aa, Artificial Sequence
  Quasi-synthetic sequence derived from human genome
IYKNRVRMNTFPWLKIVKISFKCKQFFIQLRK

SEQ ID NO: 24137 - protein, 32 aa, Artificial Sequence
  Quasi-synthetic sequence derived from human genome
LLRKRRFQLCRCMNPRARKNRSQIVLFQKLRF

SEQ ID NO: 24138 - protein, 32 aa, Artificial Sequence
  Quasi-synthetic sequence derived from human genome
KGFLLKKRKWPLKGWHKRFFYLDKGILKYAKS

SEQ ID NO: 24139 - protein, 32 aa, Artificial Sequence
  Quasi-synthetic sequence derived from human genome
FRFLLRKLYVFRRSFLMTCISLRNLILGRPSL

SEQ ID NO: 24140 - protein, 32 aa, Artificial Sequence
  Quasi-synthetic sequence derived from human genome
GRDIKTIKSLRVLRVLRPLKTIKRLPKLKAVF

SEQ ID NO: 24141 - protein, 32 aa, Artificial Sequence
  Quasi-synthetic sequence derived from human genome
LINFLIFIRILGILLSKLRTRQMRCRDYRLRL

SEQ ID NO: 24142 - protein, 32 aa, Artificial Sequence
  Quasi-synthetic sequence derived from human genome
LVRKRRFQLRRCMNPRARKNRSQIVLFQKRRF

SEQ ID NO: 24143 - protein, 32 aa, Artificial Sequence
  Quasi-synthetic sequence derived from human genome
LGIVAAVLVKKYQAVLRRKALLIFLVVHRLRW

SEQ ID NO: 24144 - protein, 32 aa, Artificial Sequence
  Quasi-synthetic sequence derived from human genome
TLKKKRRNFAELKIKRLRKKFAQKMLRKARRK

SEQ ID NO: 24145 - protein, 32 aa, Artificial Sequence
  Quasi-synthetic sequence derived from human genome
AILRIIRLVRVFRIFKLSRHSKGLQILGHTLR

SEQ ID NO: 24146 - protein, 32 aa, Artificial Sequence
  Quasi-synthetic sequence derived from human genome
IPWITAVLPTVIICVMVFCLILWKWKKKKRPR

SEQ ID NO: 24147 - protein, 32 aa, Artificial Sequence
  Quasi-synthetic sequence derived from human genome
YKTFLPKCIRAKIQDYHILTRKRIRYRFRRFI

SEQ ID NO: 24148 - protein, 32 aa, Artificial Sequence
  Quasi-synthetic sequence derived from human genome
LRVLRMMRIFWVIKLARHFIGLQTLGLTLKRC

SEQ ID NO: 24149 - protein, 32 aa, Artificial Sequence
  Quasi-synthetic sequence derived from human genome
NPVIYVFMIRKFRRSLLQLLCLRLLRCQRPAK

SEQ ID NO: 24150 - protein, 32 aa, Artificial Sequence
  Quasi-synthetic sequence derived from human genome
VLVLRGNTKINTFNWAKIRKLSFKRKHFLIKL

SEQ ID NO: 24151 - protein, 32 aa, Artificial Sequence
  Quasi-synthetic sequence derived from human genome
RRIILLQRWFRVLLCRQHFLHLRQASVIIQRF

SEQ ID NO: 24152 - protein, 32 aa, Artificial Sequence
  Quasi-synthetic sequence derived from human genome
SKKKKKRYLRASSNRNFLLTMRPFLKRAILVL

SEQ ID NO: 24153 - protein, 32 aa, Artificial Sequence
  Quasi-synthetic sequence derived from human genome
LLVRRRFISLKKATIFVQRKYRATICAKHKLY

SEQ ID NO: 24154 - protein, 32 aa, Artificial Sequence
  Quasi-synthetic sequence derived from human genome
LRAWKRIFWRQILLTLGLLGLFLYGLPKFRHL

SEQ ID NO: 24155 - protein, 32 aa, Artificial Sequence
  Quasi-synthetic sequence derived from human genome
FALRYNILTLMRMLSLKSLKKQMKKVKKMTVK

SEQ ID NO: 24156 - protein, 32 aa, Artificial Sequence
  Quasi-synthetic sequence derived from human genome
LVYKDKLRINRFPWPKVLKISYKRSSFFIKIR

SEQ ID NO: 24157 - protein, 32 aa, Artificial Sequence
  Quasi-synthetic sequence derived from human genome
LRLLNKLTKWKHSRTMMLVVFKSAPILKRALK

SEQ ID NO: 24158 - protein, 32 aa, Artificial Sequence
  Quasi-synthetic sequence derived from human genome
LRMPLSRWQRRLRRAARRQVLSGHLPFCRFRL

SEQ ID NO: 24159 - protein, 32 aa, Artificial Sequence
  Quasi-synthetic sequence derived from human genome
RTFRVFRALKAISVVSRLKVIVGALLRSVKKL

SEQ ID NO: 24160 - protein, 32 aa, Artificial Sequence
  Quasi-synthetic sequence derived from human genome
CGAFLALFKAAEFAKLSIKWMIKIRKRYLKRR

SEQ ID NO: 24161 - protein, 32 aa, Artificial Sequence
  Quasi-synthetic sequence derived from human genome
WLLLRKAPGGFMGPRWRRRWFVLKGHTLYWYR

SEQ ID NO: 24162 - protein, 32 aa, Artificial Sequence
  Quasi-synthetic sequence derived from human genome
MSKFKLLSSLPRWRRIAQKIIRERRKKRVPKK

SEQ ID NO: 24163 - protein, 32 aa, Artificial Sequence
  Quasi-synthetic sequence derived from human genome
LRKLKFSPIKYGYQPRRNFWPARLATRLLKLR

SEQ ID NO: 24164 - protein, 32 aa, Artificial Sequence
  Quasi-synthetic sequence derived from human genome
FLKTVLHRIYGKFLGLRAFIRKQINNIFLRFI

SEQ ID NO: 24165 - protein, 32 aa, Artificial Sequence
  Quasi-synthetic sequence derived from human genome
LVTISCILVGVLLLFVLLLVVRRRRREQRLKR

SEQ ID NO: 24166 - protein, 32 aa, Artificial Sequence
  Quasi-synthetic sequence derived from human genome
KRALKVKQAMLQLYVLKLLKLQTKYLGRQWRK

SEQ ID NO: 24167 - protein, 32 aa, Artificial Sequence
  Quasi-synthetic sequence derived from human genome
KIKTFLSLVWKRRILFFVVTLVSVFLVWKFTY

SEQ ID NO: 24168 - protein, 32 aa, Artificial Sequence
  Quasi-synthetic sequence derived from human genome
KLFFIKNQRSSLRIRLFNFSLKLLTCLLYIVR

SEQ ID NO: 24169 - protein, 32 aa, Artificial Sequence
  Quasi-synthetic sequence derived from human genome
GRRGFSGRLGGYWKTWIFWKTWIFWKTWIFRK

SEQ ID NO: 24170 - protein, 32 aa, Artificial Sequence
  Quasi-synthetic sequence derived from human genome
WMRRMRILRRLLRRYRESKKIDRHMYHSLYLK

SEQ ID NO: 24171 - protein, 32 aa, Artificial Sequence
  Quasi-synthetic sequence derived from human genome
VLVKRKRTKGKKLLLSIGVLLHKWKNVCIVLT

SEQ ID NO: 24172 - protein, 32 aa, Artificial Sequence
  Quasi-synthetic sequence derived from human genome
VIFLLIIIFLTVLLLKLRKRHRKHTQQRAAAL

SEQ ID NO: 24173 - protein, 32 aa, Artificial Sequence
  Quasi-synthetic sequence derived from human genome
LVRRGRGGLRLGLRGPLRKLVLQSLVPLLLRL

SEQ ID NO: 24174 - protein, 32 aa, Artificial Sequence
  Quasi-synthetic sequence derived from human genome
FFHVKVLNINLKRKFIKKRIIIISNYSKRNSL

SEQ ID NO: 24175 - protein, 32 aa, Artificial Sequence
  Quasi-synthetic sequence derived from human genome
RLASLNQILDPWVYLLLRKILLRKFCQMRKRR

SEQ ID NO: 24176 - protein, 32 aa, Artificial Sequence
  Quasi-synthetic sequence derived from human genome
FLTCFAGFWLIWGLIVLLCCFCSFLRRRLKRR

SEQ ID NO: 24177 - protein, 32 aa, Artificial Sequence
  Quasi-synthetic sequence derived from human genome
LRILNKLTKWKHSRTMMLVVFKSAPILKRALK

SEQ ID NO: 24178 - protein, 32 aa, Artificial Sequence
  Quasi-synthetic sequence derived from human genome
RRLRRANRVLRARCRRAVKSNACYWAVLLLVF

SEQ ID NO: 24179 - protein, 32 aa, Artificial Sequence
  Quasi-synthetic sequence derived from human genome
FRYLQRLLLVHGRWSYIRMCKFLRYFFYKNFA

SEQ ID NO: 24180 - protein, 32 aa, Artificial Sequence
  Quasi-synthetic sequence derived from human genome
FRFWPFLVIIVILSALFLGTLACFCVWRRKRK

SEQ ID NO: 24181 - protein, 32 aa, Artificial Sequence
  Quasi-synthetic sequence derived from human genome
CLIAVMVVFIILVIGVCTCCHPLRKRRKRKKK

SEQ ID NO: 24182 - protein, 32 aa, Artificial Sequence
  Quasi-synthetic sequence derived from human genome
RYLRVKLTVRYKRVTTHRRIWLALGLCWLVSF

SEQ ID NO: 24183 - protein, 32 aa, Artificial Sequence
  Quasi-synthetic sequence derived from human genome
LIYKDRLRINRFAWPKILKISYKRSNFYIKVR

SEQ ID NO: 24184 - protein, 32 aa, Artificial Sequence
  Quasi-synthetic sequence derived from human genome
RFLGKKYRKYYYKSPKPLLRPFLCRICGSRFL

SEQ ID NO: 24185 - protein, 32 aa, Artificial Sequence
  Quasi-synthetic sequence derived from human genome
IVPLVLLVTLITTLVIGLVLCKRKRRTKTIRR

SEQ ID NO: 24186 - protein, 32 aa, Artificial Sequence
  Quasi-synthetic sequence derived from human genome
KVFYCLRIANFNHPLFFLMKRKIIVLMPWLLR

SEQ ID NO: 24187 - protein, 32 aa, Artificial Sequence
  Quasi-synthetic sequence derived from human genome
GHVLYSGWLRKSPPEKKLRLFAWRKRWFILRR

SEQ ID NO: 24188 - protein, 32 aa, Artificial Sequence
  Quasi-synthetic sequence derived from human genome
ASILLIFFFIALVFFLYRRRKGSRKDVTLRKL

SEQ ID NO: 24189 - protein, 32 aa, Artificial Sequence
  Quasi-synthetic sequence derived from human genome
IRNMSWPRLIRKLRCYLKEMKNLRKLVFSRCL

SEQ ID NO: 24190 - protein, 32 aa, Artificial Sequence
  Quasi-synthetic sequence derived from human genome
FFYLSLFFWMLFKALLIIYGILVIFRRMMKSR

SEQ ID NO: 24191 - protein, 32 aa, Artificial Sequence
  Quasi-synthetic sequence derived from human genome
NIGFFRRKLIDAVGFSPLRILRKRNKALRKIR

SEQ ID NO: 24192 - protein, 32 aa, Artificial Sequence
  Quasi-synthetic sequence derived from human genome
KLWFKFQRYFRRKPVRFFTFLALYLTAGSLVF

SEQ ID NO: 24193 - protein, 32 aa, Artificial Sequence
  Quasi-synthetic sequence derived from human genome
QRIFGKLVFLPLRLVWKEVILRKILILVLVQK

SEQ ID NO: 24194 - protein, 32 aa, Artificial Sequence
  Quasi-synthetic sequence derived from human genome
HRKRMGLKMLMMMALLVPLVYTIKRHKWSVLK

SEQ ID NO: 24195 - protein, 32 aa, Artificial Sequence
  Quasi-synthetic sequence derived from human genome
LRIIRFLPLFKIIVPILIRIADVQIKKRLSLM

SEQ ID NO: 24196 - protein, 32 aa, Artificial Sequence
  Quasi-synthetic sequence derived from human genome
MARLRFLKLKRQTKVLLTLLLVFGIAIFPLIV

SEQ ID NO: 24197 - protein, 32 aa, Artificial Sequence
  Quasi-synthetic sequence derived from human genome
LRIARFRFRAFHFLNRFPSVYLRCKMVVCRAY

SEQ ID NO: 24198 - protein, 32 aa, Artificial Sequence
  Quasi-synthetic sequence derived from human genome
LLRKRRFQLYRSTNPRARKNRSRIPLLRKHRF

SEQ ID NO: 24199 - protein, 32 aa, Artificial Sequence
  Quasi-synthetic sequence derived from human genome
KVARKFWWKNVKMIVLICVIVFIIILFIVLFA

SEQ ID NO: 24200 - protein, 32 aa, Artificial Sequence
  Quasi-synthetic sequence derived from human genome
LRPLKKFLRKLHLPRDLPQKKKLKYMKQSLVV

SEQ ID NO: 24201 - protein, 32 aa, Artificial Sequence
  Quasi-synthetic sequence derived from human genome
FLFLRRRCFLLTFYLWFLFFSRFLLMLFLPLL

SEQ ID NO: 24202 - protein, 32 aa, Artificial Sequence
  Quasi-synthetic sequence derived from human genome
KKQKSTKKFWIQKLPKVLCLHLKRFHWTAYLR

SEQ ID NO: 24203 - protein, 32 aa, Artificial Sequence
  Quasi-synthetic sequence derived from human genome
LLSIAIFQRQKRRKFWKAKNLQHIPLKKGKRV

SEQ ID NO: 24204 - protein, 32 aa, Artificial Sequence
  Quasi-synthetic sequence derived from human genome
FIMLFCITMKRQIKHMIKYRYIPFTHGKRRYR

SEQ ID NO: 24205 - protein, 32 aa, Artificial Sequence
  Quasi-synthetic sequence derived from human genome
LLACVATVIFIITKFCLFCFWKFARKGKKGKR

SEQ ID NO: 24206 - protein, 32 aa, Artificial Sequence
  Quasi-synthetic sequence derived from human genome
QVLRVMRLMRIFRILKLARHSTGLRAFGFTLR

SEQ ID NO: 24207 - protein, 32 aa, Artificial Sequence
  Quasi-synthetic sequence derived from human genome
RLARRRKKILFYCHFPDLLLTKRDSFLKRLYR

SEQ ID NO: 24208 - protein, 32 aa, Artificial Sequence
  Quasi-synthetic sequence derived from human genome
LLLLSIVILYCRIYSLVRTRSRRLTFRKNISK

SEQ ID NO: 24209 - protein, 32 aa, Artificial Sequence
  Quasi-synthetic sequence derived from human genome
FYLTFPLIFGLFIILLVIFLIWRCFLRNKTRR

SEQ ID NO: 24210 - protein, 32 aa, Artificial Sequence
  Quasi-synthetic sequence derived from human genome
CFLVVVALLCVPWMLLFKPLVLRRQYLRRKHL

SEQ ID NO: 24211 - protein, 32 aa, Artificial Sequence
  Quasi-synthetic sequence derived from human genome
FKLLILLIGTWALFFRKRRADMPRVFVFRALL

SEQ ID NO: 24212 - protein, 32 aa, Artificial Sequence
  Quasi-synthetic sequence derived from human genome
LRLRHLRRPRVARLLCLGVWALILVFAVPAAR

SEQ ID NO: 24213 - protein, 32 aa, Artificial Sequence
  Quasi-synthetic sequence derived from human genome
LSLKLAKIILALKVSRKNLLNVCKLIFKISRN

SEQ ID NO: 24214 - protein, 32 aa, Artificial Sequence
  Quasi-synthetic sequence derived from human genome
KTYLKRFKVMKPKVLRSWCRQILKGLQFLHTR

SEQ ID NO: 24215 - protein, 32 aa, Artificial Sequence
  Quasi-synthetic sequence derived from human genome
VIRLARIGRILRLIRAAKGIRTLLFALMMSLP

SEQ ID NO: 24216 - protein, 32 aa, Artificial Sequence
  Quasi-synthetic sequence derived from human genome
FRTLMMRRRFLSLKKTAILIQRKYRAHLCTKH

SEQ ID NO: 24217 - protein, 32 aa, Artificial Sequence
  Quasi-synthetic sequence derived from human genome
AIKLEAHWRGALARKAIQRRKWAVRIIRKFIK

SEQ ID NO: 24218 - protein, 32 aa, Artificial Sequence
  Quasi-synthetic sequence derived from human genome
WKWLKSPRSWRLGLALLLGGALLFWVLLHRRW

SEQ ID NO: 24219 - protein, 32 aa, Artificial Sequence
  Quasi-synthetic sequence derived from human genome
LSIFYLLKIANFSNLIFLRLKRRVKSVILVVL

SEQ ID NO: 24220 - protein, 32 aa, Artificial Sequence
  Quasi-synthetic sequence derived from human genome
WKNWTLRKRQKIRFVVELVWPLSLFLVLIWLR

SEQ ID NO: 24221 - protein, 32 aa, Artificial Sequence
  Quasi-synthetic sequence derived from human genome
TNLKRRYSFRLHIGRNIARPWKLIYYRAKKMF

SEQ ID NO: 24222 - protein, 32 aa, Artificial Sequence
  Quasi-synthetic sequence derived from human genome
LILMLGTFFIAFFLRKFRNSRFLGGKARRIIG

SEQ ID NO: 24223 - protein, 32 aa, Artificial Sequence
  Quasi-synthetic sequence derived from human genome
WLRRKLRGKRRPVIAFCLLMILSAMAVTRFPP

SEQ ID NO: 24224 - protein, 32 aa, Artificial Sequence
  Quasi-synthetic sequence derived from human genome
IIKILLRRPNEKKSKAVRLIFVIMIIFFLFWT

SEQ ID NO: 24225 - protein, 32 aa, Artificial Sequence
  Quasi-synthetic sequence derived from human genome
LLRKRYRHRPCRLQFLLLLLMLGCVLMMVAML

SEQ ID NO: 24226 - protein, 32 aa, Artificial Sequence
  Quasi-synthetic sequence derived from human genome
FRKKSFKIHQKAIKKKGNLYGFALLRRRALQL

SEQ ID NO: 24227 - protein, 32 aa, Artificial Sequence
  Quasi-synthetic sequence derived from human genome
WWRGTLGRRKAAKRKWAAQTIRRLIRGFVLRH

SEQ ID NO: 24228 - protein, 32 aa, Artificial Sequence
  Quasi-synthetic sequence derived from human genome
FLKTILHRIYGKFLGLRAYIRRQINHIFYRFI

SEQ ID NO: 24229 - protein, 32 aa, Artificial Sequence
  Quasi-synthetic sequence derived from human genome
RLFSKKIFCCLFFITLFFIRLLSYMFFHVRFI

SEQ ID NO: 24230 - protein, 32 aa, Artificial Sequence
  Quasi-synthetic sequence derived from human genome
LRILRKRNKALRKIRKLQKQGLLQVTPKGFIC

SEQ ID NO: 24231 - protein, 32 aa, Artificial Sequence
  Quasi-synthetic sequence derived from human genome
YRLRRVIAAFYFPKREKKRILFLYNDLLKKRA

SEQ ID NO: 24232 - protein, 32 aa, Artificial Sequence
  Quasi-synthetic sequence derived from human genome
LIRKKFRMMKIPKPILFGLNIAMKKQTKISGK

SEQ ID NO: 24233 - protein, 32 aa, Artificial Sequence
  Quasi-synthetic sequence derived from human genome
RWLLRTKRLHWSRLLFLLGMLIIGSTYQHLRR

SEQ ID NO: 24234 - protein, 32 aa, Artificial Sequence
  Quasi-synthetic sequence derived from human genome
RLAVRTVIRAFVKCTKARYLKKKNMRTLWINR

SEQ ID NO: 24235 - protein, 32 aa, Artificial Sequence
  Quasi-synthetic sequence derived from human genome
PLRIRRLLRPFFLLQNSSMMKKTLKCIRWSLP

SEQ ID NO: 24236 - protein, 32 aa, Artificial Sequence
  Quasi-synthetic sequence derived from human genome
RPVLLRGARAALLLLLPPRLLARPSLLLRRSL

SEQ ID NO: 24237 - protein, 32 aa, Artificial Sequence
  Quasi-synthetic sequence derived from human genome
LIAIAIVAVLLVLTCCFCICKKCLFKKKNKKK

SEQ ID NO: 24238 - protein, 32 aa, Artificial Sequence
  Quasi-synthetic sequence derived from human genome
LVAAICYFRRLHLYSGHKLKWWIGYLQRKFKR

SEQ ID NO: 24239 - protein, 32 aa, Artificial Sequence
  Quasi-synthetic sequence derived from human genome
MARRGWRRAPLRRGVGSSPRARRLMRPLWLLL

SEQ ID NO: 24240 - protein, 32 aa, Artificial Sequence
  Quasi-synthetic sequence derived from human genome
RLFRAARLIKLLRQGYTIRILLWTFVQSFKAL

SEQ ID NO: 24241 - protein, 32 aa, Artificial Sequence
  Quasi-synthetic sequence derived from human genome
LLLILLCMSLLLFQVIRLYQRRRWMIRALHLF

SEQ ID NO: 24242 - protein, 32 aa, Artificial Sequence
  Quasi-synthetic sequence derived from human genome
LACSLSWNVIRYSLQKLRLVRWLLKKVFQCRR

SEQ ID NO: 24243 - protein, 32 aa, Artificial Sequence
  Quasi-synthetic sequence derived from human genome
MNPIIYSIKTKQIRQRIIKKFQFIKSLRCFWK

SEQ ID NO: 24244 - protein, 32 aa, Artificial Sequence
  Quasi-synthetic sequence derived from human genome
FCYLCILLLIVLFILLCCLYRLCKKSKPIKKQ

SEQ ID NO: 24245 - protein, 32 aa, Artificial Sequence
  Quasi-synthetic sequence derived from human genome
LIILAVVGGVIGLLILILLIKKLIIFILKKTR

SEQ ID NO: 24246 - protein, 32 aa, Artificial Sequence
  Quasi-synthetic sequence derived from human genome
LLRKPWFQLGHSMNPRARKNRSRIPLLRKRRF

SEQ ID NO: 24247 - protein, 32 aa, Artificial Sequence
  Quasi-synthetic sequence derived from human genome
WILRFPVFLAILINFFIFVRIVQLLVAKLRAR

SEQ ID NO: 24248 - protein, 32 aa, Artificial Sequence
  Quasi-synthetic sequence derived from human genome
RLRHPRTRWKNWWVRGILTLAMIAFFFIIIYL

SEQ ID NO: 24249 - protein, 32 aa, Artificial Sequence
  Quasi-synthetic sequence derived from human genome
LRIANFSNLIFLRIKRRVKSVVLVILLGPLLF

SEQ ID NO: 24250 - protein, 32 aa, Artificial Sequence
  Quasi-synthetic sequence derived from human genome
LLLLVLFILFLTWCRVQKQKHLPLRVSTRRRG

SEQ ID NO: 24251 - protein, 32 aa, Artificial Sequence
  Quasi-synthetic sequence derived from human genome
LKIRRRKMNHHKYRKLVKKTRFLRRKVQEGRL

SEQ ID NO: 24252 - protein, 32 aa, Artificial Sequence
  Quasi-synthetic sequence derived from human genome
LLRKRRFQLYRSMNSRARKNRSQIVLFQKRRF

SEQ ID NO: 24253 - protein, 32 aa, Artificial Sequence
  Quasi-synthetic sequence derived from human genome
PFVPAVAKSIPRKRISLKRPKKCFRNLFHIRR

SEQ ID NO: 24254 - protein, 32 aa, Artificial Sequence
  Quasi-synthetic sequence derived from human genome
VIRLARIGRILRLIRGAKGIRTLLFALMMSLP

SEQ ID NO: 24255 - protein, 32 aa, Artificial Sequence
  Quasi-synthetic sequence derived from human genome
WLVWGVILFVYLVIRALRLWRTAKLQVTLKKY

SEQ ID NO: 24256 - protein, 32 aa, Artificial Sequence
  Quasi-synthetic sequence derived from human genome
LVVLALAMVPILLLGTPLHLLHRHRRRLRRRP

SEQ ID NO: 24257 - protein, 32 aa, Artificial Sequence
  Quasi-synthetic sequence derived from human genome
ILKTLLRCRNEKKRHRAVRVIFTIMIVYFLFW

SEQ ID NO: 24258 - protein, 32 aa, Artificial Sequence
  Quasi-synthetic sequence derived from human genome
AIRIRILCCLTFLVKVKSKALLKNRLLPPLLH

SEQ ID NO: 24259 - protein, 32 aa, Artificial Sequence
  Quasi-synthetic sequence derived from human genome
KNIKKKKVSIMVSVDGVKVILKKKKKLLLLQK

SEQ ID NO: 24260 - protein, 32 aa, Artificial Sequence
  Quasi-synthetic sequence derived from human genome
VVKILRVLRVLRPLRAINRAKGLKHVVQCVFV

SEQ ID NO: 24261 - protein, 32 aa, Artificial Sequence
  Quasi-synthetic sequence derived from human genome
TLLHCFVILPVFLTFFPPSKKHHKKKKRAKRK

SEQ ID NO: 24262 - protein, 32 aa, Artificial Sequence
  Quasi-synthetic sequence derived from human genome
KRMAKTSAGLKLILKRYKIGASRKTFWKRKKI

SEQ ID NO: 24263 - protein, 32 aa, Artificial Sequence
  Quasi-synthetic sequence derived from human genome
LIQAMWRRYRAKKYLCKVKAACKIQAWYRCWR

SEQ ID NO: 24264 - protein, 32 aa, Artificial Sequence
  Quasi-synthetic sequence derived from human genome
VLILSLLVLFFSAVFVAAGLFAYVLRRRRKKL

SEQ ID NO: 24265 - protein, 32 aa, Artificial Sequence
  Quasi-synthetic sequence derived from human genome
ILRTLFRSRSKRRHRTVKLIFAIVVAYFLSWG

SEQ ID NO: 24266 - protein, 32 aa, Artificial Sequence
  Quasi-synthetic sequence derived from human genome
CLKLLLPGLLLLLVVIILILAFWVLPKYKTRK

SEQ ID NO: 24267 - protein, 32 aa, Artificial Sequence
  Quasi-synthetic sequence derived from human genome
AILRVIRLVRVFRIFKLSRHSKGLQILGQTLK

SEQ ID NO: 24268 - protein, 32 aa, Artificial Sequence
  Quasi-synthetic sequence derived from human genome
VKIRSRKLGIFRRCWLVFKKASSKGPRRLEKF

SEQ ID NO: 24269 - protein, 32 aa, Artificial Sequence
  Quasi-synthetic sequence derived from human genome
LVLFPRFLGTAFMLWLLDFLCIRKHFLGRRRR

SEQ ID NO: 24270 - protein, 32 aa, Artificial Sequence
  Quasi-synthetic sequence derived from human genome
VIRLARIGRILRLIKGAKGIRTLLFALMMSLP

SEQ ID NO: 24271 - protein, 32 aa, Artificial Sequence
  Quasi-synthetic sequence derived from human genome
FEKKKDIRRGIGYLKLICFLIPFLLSLKKKMK

SEQ ID NO: 24272 - protein, 32 aa, Artificial Sequence
  Quasi-synthetic sequence derived from human genome
LWVKQRRDLLHLCCKKLKILGMPFRNIRSILK

SEQ ID NO: 24273 - protein, 32 aa, Artificial Sequence
  Quasi-synthetic sequence derived from human genome
RRLFVRRGQPFTIILYFRAPVRAFLPALKKVA

SEQ ID NO: 24274 - protein, 32 aa, Artificial Sequence
  Quasi-synthetic sequence derived from human genome
LRGFLARNRYRKILREHKAVIIQKRVRGWLAR

SEQ ID NO: 24275 - protein, 32 aa, Artificial Sequence
  Quasi-synthetic sequence derived from human genome
FGGALFVYLNRKIVQVMRKQKTINRFLMRKRL

SEQ ID NO: 24276 - protein, 32 aa, Artificial Sequence
  Quasi-synthetic sequence derived from human genome
RKFLYLWIRMTFGRVFPSKARFYYEQRLLRKV

SEQ ID NO: 24277 - protein, 32 aa, Artificial Sequence
  Quasi-synthetic sequence derived from human genome
WQIPLGRRFRSLKMWFVFRMYGVKGLQAYIRK

SEQ ID NO: 24278 - protein, 32 aa, Artificial Sequence
  Quasi-synthetic sequence derived from human genome
FFMARVRLQLKIILCFSPVGRTLRVRARKFPA

SEQ ID NO: 24279 - protein, 32 aa, Artificial Sequence
  Quasi-synthetic sequence derived from human genome
RAVRNLKKKLLPWQRRGLLRAQGLRGWKARRA

SEQ ID NO: 24280 - protein, 32 aa, Artificial Sequence
  Quasi-synthetic sequence derived from human genome
ALILIQWNIRAFMAVKNWPWMRLFFKIKPLVK

SEQ ID NO: 24281 - protein, 32 aa, Artificial Sequence
  Quasi-synthetic sequence derived from human genome
MVLQRRKFLQMKRRKYGFIYKTHLFGRPTVRV

SEQ ID NO: 24282 - protein, 32 aa, Artificial Sequence
  Quasi-synthetic sequence derived from human genome
RKPQPCRCRRRVRPSIRLLSPVLSLILLLIAL

SEQ ID NO: 24283 - protein, 32 aa, Artificial Sequence
  Quasi-synthetic sequence derived from human genome
RVRVLSVARPGLWLYTHPLIKLLFLPRRSRCK

SEQ ID NO: 24284 - protein, 32 aa, Artificial Sequence
  Quasi-synthetic sequence derived from human genome
RGRLLRRTLIRYANLASVLVLRSVSTRVLKRF

SEQ ID NO: 24285 - protein, 32 aa, Artificial Sequence
  Quasi-synthetic sequence derived from human genome
FIPFFKYCLLRKSFTCWKKNVRLQGLHRLQKF

SEQ ID NO: 24286 - protein, 32 aa, Artificial Sequence
  Quasi-synthetic sequence derived from human genome
RLKNIRKVYGRCMWYRLRLLKPQPNIIPTVKK

SEQ ID NO: 24287 - protein, 32 aa, Artificial Sequence
  Quasi-synthetic sequence derived from human genome
RLLIYKQGRKLFPIKLKNKKGLVSLIDLLVLF

SEQ ID NO: 24288 - protein, 32 aa, Artificial Sequence
  Quasi-synthetic sequence derived from human genome
RNLVRNKLAVITRLLQNLIMGLFLLFFVLRVR

SEQ ID NO: 24289 - protein, 32 aa, Artificial Sequence
  Quasi-synthetic sequence derived from human genome
WLRRRYLRLRYEDLVRQPRAQLRRLLRFSGLR

SEQ ID NO: 24290 - protein, 32 aa, Artificial Sequence
  Quasi-synthetic sequence derived from human genome
YLRLLVKLYRFLARRTNSTFNQVVLKRLFMSR

SEQ ID NO: 24291 - protein, 32 aa, Artificial Sequence
  Quasi-synthetic sequence derived from human genome
RSKQLRRQMWWRGCKIKAIMALVAAILLLVII

SEQ ID NO: 24292 - protein, 32 aa, Artificial Sequence
  Quasi-synthetic sequence derived from human genome
TAIAAAIALLALTALLLVAMICRRRRRRKKAR

SEQ ID NO: 24293 - protein, 32 aa, Artificial Sequence
  Quasi-synthetic sequence derived from human genome
MAKFRRRTCIILALFILFIFSLMMGLKMLRPN

SEQ ID NO: 24294 - protein, 32 aa, Artificial Sequence
  Quasi-synthetic sequence derived from human genome
KYKKNIKALYIVHPTMFIKTLLILFKPLISFK

SEQ ID NO: 24295 - protein, 32 aa, Artificial Sequence
  Quasi-synthetic sequence derived from human genome
LWVKQRKDLLHLCCKKLKILGMPFRNIRSILK

SEQ ID NO: 24296 - protein, 32 aa, Artificial Sequence
  Quasi-synthetic sequence derived from human genome
KQLRRQMWWRGCKIKAIMALVAAILLLVIIIL

SEQ ID NO: 24297 - protein, 32 aa, Artificial Sequence
  Quasi-synthetic sequence derived from human genome
FKIVWSLRRRQQLARQARMKKATRFIMVVAIV

SEQ ID NO: 24298 - protein, 32 aa, Artificial Sequence
  Quasi-synthetic sequence derived from human genome
CPVRIRNRCVMTSRPRGVKRRWRLSRIVFRHL

SEQ ID NO: 24299 - protein, 32 aa, Artificial Sequence
  Quasi-synthetic sequence derived from human genome
LKHLCRLKIRKCMGRLHLRCPVFMSFLPLPNR

SEQ ID NO: 24300 - protein, 32 aa, Artificial Sequence
  Quasi-synthetic sequence derived from human genome
RLLRGLWQRWRRYKYRFVPWIALNLSHNPRTL

SEQ ID NO: 24301 - protein, 32 aa, Artificial Sequence
  Quasi-synthetic sequence derived from human genome
PKLAFVIRIRGINGVSPKVRKVLQLLRLRQIF

SEQ ID NO: 24302 - protein, 32 aa, Artificial Sequence
  Quasi-synthetic sequence derived from human genome
LTRKRIRYRFRRFIQQFSQCKATARNLKLKYL

SEQ ID NO: 24303 - protein, 32 aa, Artificial Sequence
  Quasi-synthetic sequence derived from human genome
LLVAGVLVLLVSLGVAIHLCCRRRRARLRFMK

SEQ ID NO: 24304 - protein, 32 aa, Artificial Sequence
  Quasi-synthetic sequence derived from human genome
NEAIRLSLIMQLVALLLVVLWIRWKCRRLRIR

SEQ ID NO: 24305 - protein, 32 aa, Artificial Sequence
  Quasi-synthetic sequence derived from human genome
YLKTVLHRIYGKFLGLRAFIRKQINNIFLRFV

SEQ ID NO: 24306 - protein, 32 aa, Artificial Sequence
  Quasi-synthetic sequence derived from human genome
LYRKVKLLNQVRLLRVQLCHMKNMFKTCRLAK

SEQ ID NO: 24307 - protein, 32 aa, Artificial Sequence
  Quasi-synthetic sequence derived from human genome
QKKSRKKMCILVLVLSVIILILGLIIWLVYKT

SEQ ID NO: 24308 - protein, 32 aa, Artificial Sequence
  Quasi-synthetic sequence derived from human genome
MRRLTRRLVLPVFGVLWITVLLFFWVTKRKLE

SEQ ID NO: 24309 - protein, 32 aa, Artificial Sequence
  Quasi-synthetic sequence derived from human genome
RIIQTLFSCKNHKKAKAIKLILLVVIVFFLFW

SEQ ID NO: 24310 - protein, 32 aa, Artificial Sequence
  Quasi-synthetic sequence derived from human genome
FILILGNKKLKQIFLSVLRHVRYWVKDRSLRL

SEQ ID NO: 24311 - protein, 32 aa, Artificial Sequence
  Quasi-synthetic sequence derived from human genome
LLLPKGVVLKLKPVATRFPRKAWRQKRSSVLK

SEQ ID NO: 24312 - protein, 32 aa, Artificial Sequence
  Quasi-synthetic sequence derived from human genome
RWKRWFKFRKRKGEKRPRPNHKAVARRAKLKF

SEQ ID NO: 24313 - protein, 32 aa, Artificial Sequence
  Quasi-synthetic sequence derived from human genome
RKNMRVLSRTSKFRRLRQLLRRRKKRQQVRSI

SEQ ID NO: 24314 - protein, 32 aa, Artificial Sequence
  Quasi-synthetic sequence derived from human genome
LLSVLAMFFLLVLILSSVFLFRLFKRRQGRIF

SEQ ID NO: 24315 - protein, 32 aa, Artificial Sequence
  Quasi-synthetic sequence derived from human genome
LFLCLLPLIVKHIRKKQAKKAAAIRAKKSSKV

SEQ ID NO: 24316 - protein, 32 aa, Artificial Sequence
  Quasi-synthetic sequence derived from human genome
RLKKHRWYKKILKSRDPIIFSVGWRRFQTIPL

SEQ ID NO: 24317 - protein, 32 aa, Artificial Sequence
  Quasi-synthetic sequence derived from human genome
MFLTALLWRGRIPGRQWIGKHRRPRFVSLRAK

SEQ ID NO: 24318 - protein, 32 aa, Artificial Sequence
  Quasi-synthetic sequence derived from human genome
VLVFQGTTKINTFNWSKVRKLSFKRKRFLIKL

SEQ ID NO: 24319 - protein, 32 aa, Artificial Sequence
  Quasi-synthetic sequence derived from human genome
VIRGGATRAAGVFYPWRFRLLCLLRRWLPRPR

SEQ ID NO: 24320 - protein, 32 aa, Artificial Sequence
  Quasi-synthetic sequence derived from human genome
RVAKMGLILAIRSILLVIPFPFTLRRLKYCQK

SEQ ID NO: 24321 - protein, 32 aa, Artificial Sequence
  Quasi-synthetic sequence derived from human genome
RKAPLWLRAKFQRLLFKLGCYIQKNCGKFLVV

SEQ ID NO: 24322 - protein, 32 aa, Artificial Sequence
  Quasi-synthetic sequence derived from human genome
RWARPFYLAFVFCLALGLLQAIKLYLRRQRLL

SEQ ID NO: 24323 - protein, 32 aa, Artificial Sequence
  Quasi-synthetic sequence derived from human genome
RALRYYYNKRILHKTKGKRFTYKFNFNKLVLV

SEQ ID NO: 24324 - protein, 32 aa, Artificial Sequence
  Quasi-synthetic sequence derived from human genome
LLRGLGKLRQVSLRRNRLRALPRALFRNLSSL

SEQ ID NO: 24325 - protein, 32 aa, Artificial Sequence
  Quasi-synthetic sequence derived from human genome
FRPGKVLRFLRLFGPGKNVPSVWRSARRKRKK

SEQ ID NO: 24326 - protein, 32 aa, Artificial Sequence
  Quasi-synthetic sequence derived from human genome
KKPLIFLGCCFFSTLVLLLSIAIFQRQKRRKF

SEQ ID NO: 24327 - protein, 32 aa, Artificial Sequence
  Quasi-synthetic sequence derived from human genome
LHRWLRIKLWISTVALALVPFLLLIPKFARWF

SEQ ID NO: 24328 - protein, 32 aa, Artificial Sequence
  Quasi-synthetic sequence derived from human genome
RTQLLYLLAVAVVIILFIILLGVIMAKRKRKH

SEQ ID NO: 24329 - protein, 32 aa, Artificial Sequence
  Quasi-synthetic sequence derived from human genome
VIRLARIGRILRLVKGAKGIRTLLFALMMSLP

SEQ ID NO: 24330 - protein, 32 aa, Artificial Sequence
  Quasi-synthetic sequence derived from human genome
WKFFIEKVRRQLKVILCFSPVGSVLRVRARKF

SEQ ID NO: 24331 - protein, 32 aa, Artificial Sequence
  Quasi-synthetic sequence derived from human genome
LFVITCLVIFVLVHSFLKKLLGKKLTRCLKPF

SEQ ID NO: 24332 - protein, 32 aa, Artificial Sequence
  Quasi-synthetic sequence derived from human genome
VRLNMKQKHYVRGRALRSRLLRKQAWKQKWRK

SEQ ID NO: 24333 - protein, 32 aa, Artificial Sequence
  Quasi-synthetic sequence derived from human genome
PMIIVIFCYLRIWILVLQVRQRVKPDRKPKLK

SEQ ID NO: 24334 - protein, 32 aa, Artificial Sequence
  Quasi-synthetic sequence derived from human genome
LLKKKYPLAKYLCVLLIVAGVALFMYKPKKVV

SEQ ID NO: 24335 - protein, 32 aa, Artificial Sequence
  Quasi-synthetic sequence derived from human genome
RARRRRTFCLLVVIVVVFAVCWLPLHVFNLLR

SEQ ID NO: 24336 - protein, 32 aa, Artificial Sequence
  Quasi-synthetic sequence derived from human genome
ACLSKGRRTLRKPKRVPSIYKLKLRPRIRPRR

SEQ ID NO: 24337 - protein, 32 aa, Artificial Sequence
  Quasi-synthetic sequence derived from human genome
VTLAYLIFCLCSLVGILHLQRALVLRRKRKRM

SEQ ID NO: 24338 - protein, 32 aa, Artificial Sequence
  Quasi-synthetic sequence derived from human genome
AERLFKLKPPVWYLRSLVQNLLLIRRFKKTII

SEQ ID NO: 24339 - protein, 32 aa, Artificial Sequence
  Quasi-synthetic sequence derived from human genome
LKRALKVKQAMMQLYVLKLLKVQTKYLGRQWR

SEQ ID NO: 24340 - protein, 32 aa, Artificial Sequence
  Quasi-synthetic sequence derived from human genome
RKKAPHRLCGRFSRISMKLPRIPLRRQKLPKV

SEQ ID NO: 24341 - protein, 32 aa, Artificial Sequence
  Quasi-synthetic sequence derived from human genome
LTRLMNFFVFSRGLLQYINQRKKFRRRWVGAL

SEQ ID NO: 24342 - protein, 32 aa, Artificial Sequence
  Quasi-synthetic sequence derived from human genome
KKIVPKKKKPLKLGPIKKKDLKKLVLYLKNGA

SEQ ID NO: 24343 - protein, 32 aa, Artificial Sequence
  Quasi-synthetic sequence derived from human genome
HKRMKVKKLPMILALHLKRFKYMDQLHRYTKL

SEQ ID NO: 24344 - protein, 32 aa, Artificial Sequence
  Quasi-synthetic sequence derived from human genome
HIRLRLSKLRRCVQWLKVMGLFAFVVLCSILF

SEQ ID NO: 24345 - protein, 32 aa, Artificial Sequence
  Quasi-synthetic sequence derived from human genome
KCYFKHTLQQKVFILFLTLWLLSLLKLLNVRR

SEQ ID NO: 24346 - protein, 32 aa, Artificial Sequence
  Quasi-synthetic sequence derived from human genome
LKTFVFFIWRRYWRTLVLLLLVLLTVFLLLVF

SEQ ID NO: 24347 - protein, 32 aa, Artificial Sequence
  Quasi-synthetic sequence derived from human genome
LQSLRFGFGFRRGRSFLLRSWHHLMKRVQIKI

SEQ ID NO: 24348 - protein, 32 aa, Artificial Sequence
  Quasi-synthetic sequence derived from human genome
SKLRGLKRKWIRCSAQATVLHLKKFIAKKLNL

SEQ ID NO: 24349 - protein, 32 aa, Artificial Sequence
  Quasi-synthetic sequence derived from human genome
LILLRLWRVARIINGIIISVKTRSERQLLRLK

SEQ ID NO: 24350 - protein, 32 aa, Artificial Sequence
  Quasi-synthetic sequence derived from human genome
LKSARYFLWHTYRWLLLKLLLLLLLLLLLALF

SEQ ID NO: 24351 - protein, 32 aa, Artificial Sequence
  Quasi-synthetic sequence derived from human genome
VVKMRKEVKRIRVLVIRKLVRSVGRLKSKKGT

SEQ ID NO: 24352 - protein, 32 aa, Artificial Sequence
  Quasi-synthetic sequence derived from human genome
KTRRWRGLGSLFRRACCVALPLQLLLLLFLLL

SEQ ID NO: 24353 - protein, 32 aa, Artificial Sequence
  Quasi-synthetic sequence derived from human genome
ARRRQRGRLMRRLVRRLRRWGLLPRTNTPARA

SEQ ID NO: 24354 - protein, 32 aa, Artificial Sequence
  Quasi-synthetic sequence derived from human genome
VFHRLKIKQILPTIYKRKNLSLFLSISLLIFW

SEQ ID NO: 24355 - protein, 32 aa, Artificial Sequence
  Quasi-synthetic sequence derived from human genome
RALRYYYNKRILHKTKGKRFTYKFNFSKLIVV

SEQ ID NO: 24356 - protein, 32 aa, Artificial Sequence
  Quasi-synthetic sequence derived from human genome
RRLRGLRRAAAGTSRLLFQRLLPCGVIKFRYI

SEQ ID NO: 24357 - protein, 32 aa, Artificial Sequence
  Quasi-synthetic sequence derived from human genome
LVFGEKFKLFTLVSACIPVFRLARRRKKILFY

SEQ ID NO: 24358 - protein, 32 aa, Artificial Sequence
  Quasi-synthetic sequence derived from human genome
KKIMAILIKRFHHTRRNWKGLIAQVILPIVFV

SEQ ID NO: 24359 - protein, 32 aa, Artificial Sequence
  Quasi-synthetic sequence derived from human genome
WLARLLRSRAGSRKRPLTLLQRAGLLLLLGLL

SEQ ID NO: 24360 - protein, 32 aa, Artificial Sequence
  Quasi-synthetic sequence derived from human genome
NFFIFLKILKLLISKLKAHQMCFRDYKYRLAK

SEQ ID NO: 24361 - protein, 32 aa, Artificial Sequence
  Quasi-synthetic sequence derived from human genome
RYLRRFREMKPRVLQRWSRQILRGLHFLHSRV

SEQ ID NO: 24362 - protein, 32 aa, Artificial Sequence
  Quasi-synthetic sequence derived from human genome
RDLTRFVKWPRYIRLQRQRAILYKRLKVPPAI

SEQ ID NO: 24363 - protein, 32 aa, Artificial Sequence
  Quasi-synthetic sequence derived from human genome
IPKLNRFLLLFIGFVCVLLSFFMARVFMRMKL

SEQ ID NO: 24364 - protein, 32 aa, Artificial Sequence
  Quasi-synthetic sequence derived from human genome
LYFNPWMRIFIQAKRVKTKHLCYCLYRPRKYL

SEQ ID NO: 24365 - protein, 32 aa, Artificial Sequence
  Quasi-synthetic sequence derived from human genome
IRNMSWPRLIRKLRCYLKEMKNLRKLVFSRCH

SEQ ID NO: 24366 - protein, 32 aa, Artificial Sequence
  Quasi-synthetic sequence derived from human genome
LLLYKRHKGRKLTVPVRRHAYLQQLFSKPFFR

SEQ ID NO: 24367 - protein, 32 aa, Artificial Sequence
  Quasi-synthetic sequence derived from human genome
RAYRRSQRASFKRARRPGARALRLVLGIVLLF

SEQ ID NO: 24368 - protein, 32 aa, Artificial Sequence
  Quasi-synthetic sequence derived from human genome
IRKRLRCRRKTVLVLMCILTAYVLCWAPFYGF

SEQ ID NO: 24369 - protein, 32 aa, Artificial Sequence
  Quasi-synthetic sequence derived from human genome
LLVAGVLVLLVSLGVAMHLCCRRRRARLRFMK

SEQ ID NO: 24370 - protein, 32 aa, Artificial Sequence
  Quasi-synthetic sequence derived from human genome
MPLFLKLFICFIFIRSSPTIVSNKRVSKRKFI

SEQ ID NO: 24371 - protein, 32 aa, Artificial Sequence
  Quasi-synthetic sequence derived from human genome
IILLIFISLFPEILLIVLKNVRRRSARVTKRL

SEQ ID NO: 24372 - protein, 32 aa, Artificial Sequence
  Quasi-synthetic sequence derived from human genome
RIRMIIAVTSYKRYLWATVTIQRHWRAYLRRK

SEQ ID NO: 24373 - protein, 32 aa, Artificial Sequence
  Quasi-synthetic sequence derived from human genome
RKFFLFYRQQKWASGVIAIAWLLYCHKTRLKK

SEQ ID NO: 24374 - protein, 32 aa, Artificial Sequence
  Quasi-synthetic sequence derived from human genome
MKGRRRRRREYCKFALLLVLYTLVLLLVPSVL

SEQ ID NO: 24375 - protein, 32 aa, Artificial Sequence
  Quasi-synthetic sequence derived from human genome
FRQPLSSLWRSLVPLFCWLRATFWLLATKRRK

SEQ ID NO: 24376 - protein, 32 aa, Artificial Sequence
  Quasi-synthetic sequence derived from human genome
YRKYICTSFYPWVNILKISFKRKKFFIHQRQK

SEQ ID NO: 24377 - protein, 32 aa, Artificial Sequence
  Quasi-synthetic sequence derived from human genome
WIILVAILAGILMLALLVFILWKCGFFKRNKK

SEQ ID NO: 24378 - protein, 32 aa, Artificial Sequence
  Quasi-synthetic sequence derived from human genome
RRIKLSPLMMYEKLSMIRFRYRILRSQHFRTK

SEQ ID NO: 24379 - protein, 32 aa, Artificial Sequence
  Quasi-synthetic sequence derived from human genome
VILATLGVALLFIVRKKRKEKRLKRLRDAKSL

SEQ ID NO: 24380 - protein, 32 aa, Artificial Sequence
  Quasi-synthetic sequence derived from human genome
WRGTLARMRYKRTKAALTIIRYYRRYKVKSYI

SEQ ID NO: 24381 - protein, 32 aa, Artificial Sequence
  Quasi-synthetic sequence derived from human genome
VLRALRLLRIFKVTKYWASLRNLVVSLLNSMK

SEQ ID NO: 24382 - protein, 32 aa, Artificial Sequence
  Quasi-synthetic sequence derived from human genome
FIRHWRQWNRIFRWKCHDIVKSKVFYWLVILI

SEQ ID NO: 24383 - protein, 32 aa, Artificial Sequence
  Quasi-synthetic sequence derived from human genome
LRPLVKPKIVKKRTKKFIRHQSDRYVKIKRNW

SEQ ID NO: 24384 - protein, 32 aa, Artificial Sequence
  Quasi-synthetic sequence derived from human genome
RLVVYKIVYMFLFLLCLTLFQVYYSLWRKLLK

SEQ ID NO: 24385 - protein, 32 aa, Artificial Sequence
  Quasi-synthetic sequence derived from human genome
ILRRVLVLMASKHAFLALCALRFKRKIIGLKD

SEQ ID NO: 24386 - protein, 32 aa, Artificial Sequence
  Quasi-synthetic sequence derived from human genome
FILMVLIPLILLVLLLLSVVFLATYYKRKRTK

SEQ ID NO: 24387 - protein, 32 aa, Artificial Sequence
  Quasi-synthetic sequence derived from human genome
LLACVATMIFMITKCCLFCFRKLAKTGKKKKR

SEQ ID NO: 24388 - protein, 32 aa, Artificial Sequence
  Quasi-synthetic sequence derived from human genome
RKILRLITIRKLFTAIGVLFPSVILVSLPWVR

SEQ ID NO: 24389 - protein, 32 aa, Artificial Sequence
  Quasi-synthetic sequence derived from human genome
QKRMRVKKLPMILALHLKRFKYMEQLHRYTKL

SEQ ID NO: 24390 - protein, 32 aa, Artificial Sequence
  Quasi-synthetic sequence derived from human genome
PIYRHLRRFILSVIVFGSIVLLMLWLPIRIIK

SEQ ID NO: 24391 - protein, 32 aa, Artificial Sequence
  Quasi-synthetic sequence derived from human genome
ALWRQQVCAIAKVRFLKLKKERKSLWTILLLF

SEQ ID NO: 24392 - protein, 32 aa, Artificial Sequence
  Quasi-synthetic sequence derived from human genome
VAVILLLLLLLLLFLILRHRRQGKHWTSTQRK

SEQ ID NO: 24393 - protein, 32 aa, Artificial Sequence
  Quasi-synthetic sequence derived from human genome
WKFFIDRIRRQLKVTLCFSPVGNKLRVRSRKF

SEQ ID NO: 24394 - protein, 32 aa, Artificial Sequence
  Quasi-synthetic sequence derived from human genome
FLLTILAALALLVLILLCLLIYYCRRRCLKPR

SEQ ID NO: 24395 - protein, 32 aa, Artificial Sequence
  Quasi-synthetic sequence derived from human genome
VSRKKQKIIKMLLIVALLFILSWLPLWTLMML

SEQ ID NO: 24396 - protein, 32 aa, Artificial Sequence
  Quasi-synthetic sequence derived from human genome
KRKKNVLRLCCKKLKIFAMPMQDIKMILKMVQ

SEQ ID NO: 24397 - protein, 32 aa, Artificial Sequence
  Quasi-synthetic sequence derived from human genome
KLKRKYWWKNCKMMIMLGAICAIIVVVIVIYF

SEQ ID NO: 24398 - protein, 32 aa, Artificial Sequence
  Quasi-synthetic sequence derived from human genome
PKWRLPRISARAPYRLRRLRRHTYWPPRRPVA

SEQ ID NO: 24399 - protein, 32 aa, Artificial Sequence
  Quasi-synthetic sequence derived from human genome
LKSIKYLICTRYKWLIIKIVLALLGLLMLGLF

SEQ ID NO: 24400 - protein, 32 aa, Artificial Sequence
  Quasi-synthetic sequence derived from human genome
LLKKINFHKITLRLWNTKDKMSRKVRYYRLKT

SEQ ID NO: 24401 - protein, 32 aa, Artificial Sequence
  Quasi-synthetic sequence derived from human genome
KFLYIKSVFHTLRMAQRRHKRVRTWTRHINIF

SEQ ID NO: 24402 - protein, 32 aa, Artificial Sequence
  Quasi-synthetic sequence derived from human genome
LPLKKPPMKSLRKKGSGKILTPAKKSFLRRLF

SEQ ID NO: 24403 - protein, 32 aa, Artificial Sequence
  Quasi-synthetic sequence derived from human genome
LMQLYSARQRRRLNRGLRRKQHSLLKRLRKAK

SEQ ID NO: 24404 - protein, 32 aa, Artificial Sequence
  Quasi-synthetic sequence derived from human genome
RCLGVLRPLRSLRWGRARYARRVAGAVWVLVL

SEQ ID NO: 24405 - protein, 32 aa, Artificial Sequence
  Quasi-synthetic sequence derived from human genome
LLKYYVLNALKHRPPKAQKKRYLFRSFKATKF

SEQ ID NO: 24406 - protein, 32 aa, Artificial Sequence
  Quasi-synthetic sequence derived from human genome
VKKIRKQMKLLLLLLLLSCAAWLTYVHLGLVR

SEQ ID NO: 24407 - protein, 32 aa, Artificial Sequence
  Quasi-synthetic sequence derived from human genome
CLVLLALCLLLPLLLLGGWKRWRRGRAARHVV

SEQ ID NO: 24408 - protein, 32 aa, Artificial Sequence
  Quasi-synthetic sequence derived from human genome
VVRRRSFSISPVRLRRSRTPLRRRFSRSPIRR

SEQ ID NO: 24409 - protein, 32 aa, Artificial Sequence
  Quasi-synthetic sequence derived from human genome
ILFRATRKPLSGRTPRLVYKWFLLIYKLSYAF

SEQ ID NO: 24410 - protein, 32 aa, Artificial Sequence
  Quasi-synthetic sequence derived from human genome
KSNTVYNPVIYVFMIRKFRRSLLQLLCLRLLR

SEQ ID NO: 24411 - protein, 32 aa, Artificial Sequence
  Quasi-synthetic sequence derived from human genome
FLLLILLCMSLLLFQVIRLYQRRRWTIRAMHL

SEQ ID NO: 24412 - protein, 32 aa, Artificial Sequence
  Quasi-synthetic sequence derived from human genome
LSIFYLLKIVNFSRLIFHHLKRKAKSVVLVIV

SEQ ID NO: 24413 - protein, 32 aa, Artificial Sequence
  Quasi-synthetic sequence derived from human genome
FSWVLLALALLAWCRRSRGLKALRLCRALALL

SEQ ID NO: 24414 - protein, 32 aa, Artificial Sequence
  Quasi-synthetic sequence derived from human genome
RRRIRLWHRGAMVIQATWRGYRVRRNLAHLCR

SEQ ID NO: 24415 - protein, 32 aa, Artificial Sequence
  Quasi-synthetic sequence derived from human genome
IKVVQFFRILRIFKLIAPKLLQIIDKRMSHQK

SEQ ID NO: 24416 - protein, 32 aa, Artificial Sequence
  Quasi-synthetic sequence derived from human genome
FFIKNQRSSLRIRLFNFSLKLLTCLLYIVRVL

SEQ ID NO: 24417 - protein, 32 aa, Artificial Sequence
  Quasi-synthetic sequence derived from human genome
KKRVRFTKRKQKVPGFPKRFTVKPVVLGFPYF

SEQ ID NO: 24418 - protein, 32 aa, Artificial Sequence
  Quasi-synthetic sequence derived from human genome
VLLLSGALAYCLALQLYVRRRKKLPSVLLFKK

SEQ ID NO: 24419 - protein, 32 aa, Artificial Sequence
  Quasi-synthetic sequence derived from human genome
FLLVCVATVIFIVTKCCLFCFWKFARKAKKGK

SEQ ID NO: 24420 - protein, 32 aa, Artificial Sequence
  Quasi-synthetic sequence derived from human genome
LLNPFIYSLRNKEVINIMKKIMKKRKFCHILK

SEQ ID NO: 24421 - protein, 32 aa, Artificial Sequence
  Quasi-synthetic sequence derived from human genome
RALWFWAFSLQAKVWATWLAFVLERRRKKARL

SEQ ID NO: 24422 - protein, 32 aa, Artificial Sequence
  Quasi-synthetic sequence derived from human genome
LYHRELTKIPIFSLFRKWKAFSVWRKNVRSKK

SEQ ID NO: 24423 - protein, 32 aa, Artificial Sequence
  Quasi-synthetic sequence derived from human genome
FKFLQRLLLVHGRWSYLRMCKFLCYFFYKNFA

SEQ ID NO: 24424 - protein, 32 aa, Artificial Sequence
  Quasi-synthetic sequence derived from human genome
RWLNKLMKLLQRLPNSVVRRLHRERYKKPSWL

SEQ ID NO: 24425 - protein, 32 aa, Artificial Sequence
  Quasi-synthetic sequence derived from human genome
LRRRLKYFFMSPCDKFRAKGRKPCKLMLQVVK

SEQ ID NO: 24426 - protein, 32 aa, Artificial Sequence
  Quasi-synthetic sequence derived from human genome
FVALLWKRLLIARRSRKGFFAQIVLPAVFVCI

SEQ ID NO: 24427 - protein, 32 aa, Artificial Sequence
  Quasi-synthetic sequence derived from human genome
WRQKFLRVKRSAICIQSWWRGTLGRRKAAKRK

SEQ ID NO: 24428 - protein, 32 aa, Artificial Sequence
  Quasi-synthetic sequence derived from human genome
CYALCNKAFRDTFRLLLLCRWDKRRWRKIPKR

SEQ ID NO: 24429 - protein, 32 aa, Artificial Sequence
  Quasi-synthetic sequence derived from human genome
ILSTSYNRFRKFPFFTRPLLSKWCPKSLFKKK

SEQ ID NO: 24430 - protein, 32 aa, Artificial Sequence
  Quasi-synthetic sequence derived from human genome
VVKGLMKKFIRCSTRVTVGTIKKFLSLKLKLP

SEQ ID NO: 24431 - protein, 32 aa, Artificial Sequence
  Quasi-synthetic sequence derived from human genome
KELRKYIYIRSCVVIIQKRFRCFQAQKLYKRR

SEQ ID NO: 24432 - protein, 32 aa, Artificial Sequence
  Quasi-synthetic sequence derived from human genome
RGIRYLLYRAQRAIRLRHALRLHPQLHRAPIR

SEQ ID NO: 24433 - protein, 32 aa, Artificial Sequence
  Quasi-synthetic sequence derived from human genome
LFFRKRRADMPRVFVFRALLLVLIFLFVVSYW

SEQ ID NO: 24434 - protein, 32 aa, Artificial Sequence
  Quasi-synthetic sequence derived from human genome
VNLIHLFIFRKSNFIFDKLHKVGIKTRRQWRR

SEQ ID NO: 24435 - protein, 32 aa, Artificial Sequence
  Quasi-synthetic sequence derived from human genome
KRKHFRLVLRLVLRGGRELGTFHSRLIKVISK

SEQ ID NO: 24436 - protein, 32 aa, Artificial Sequence
  Quasi-synthetic sequence derived from human genome
LRFKRTHIKMKKQPKGYGLRCHRAIITICRLI

SEQ ID NO: 24437 - protein, 32 aa, Artificial Sequence
  Quasi-synthetic sequence derived from human genome
QLINWFICSLCVPRVRKLWSSRRPRTRRNLLL

SEQ ID NO: 24438 - protein, 32 aa, Artificial Sequence
  Quasi-synthetic sequence derived from human genome
KKGSLSVLRSFRLLRVFKLAKSWPTLNTLIKI

SEQ ID NO: 24439 - protein, 32 aa, Artificial Sequence
  Quasi-synthetic sequence derived from human genome
KKTRFLRRKVQEGRLRRKQIKFEKDLRRIWLK

SEQ ID NO: 24440 - protein, 32 aa, Artificial Sequence
  Quasi-synthetic sequence derived from human genome
GKDINTIKSLRVLRVLRPLKTIKRLPKLKAVF

SEQ ID NO: 24441 - protein, 32 aa, Artificial Sequence
  Quasi-synthetic sequence derived from human genome
VRLQSWVRMWCVRQRYCRLLNAVRIIQVYWRW

SEQ ID NO: 24442 - protein, 32 aa, Artificial Sequence
  Quasi-synthetic sequence derived from human genome
LLIFISLFPEILLIVLKNVRRRSARRNLSCRR

SEQ ID NO: 24443 - protein, 32 aa, Artificial Sequence
  Quasi-synthetic sequence derived from human genome
LLIIRSLRQGLRVEKRLKTKAVRMIAIVLAIF

SEQ ID NO: 24444 - protein, 32 aa, Artificial Sequence
  Quasi-synthetic sequence derived from human genome
LIQGYWRRYSTRQRFLKLKYYSIILQSRIRMI

SEQ ID NO: 24445 - protein, 32 aa, Artificial Sequence
  Quasi-synthetic sequence derived from human genome
KVRKVLQLLRLRQIFNGTFVKLNKASINMLRI

SEQ ID NO: 24446 - protein, 32 aa, Artificial Sequence
  Quasi-synthetic sequence derived from human genome
PLIKPFGARKKRSWYLTWKYKLTNQRALRRFC

SEQ ID NO: 24447 - protein, 32 aa, Artificial Sequence
  Quasi-synthetic sequence derived from human genome
KLKRKYWWKNCKMMIMLGAICAIIVVVIVSKY

SEQ ID NO: 24448 - protein, 32 aa, Artificial Sequence
  Quasi-synthetic sequence derived from human genome
ILLIISSILGSVWLAYKTPKLLRTARGRRIKK

SEQ ID NO: 24449 - protein, 32 aa, Artificial Sequence
  Quasi-synthetic sequence derived from human genome
KASKGLCLFKKHFMALIFSAKRLKIIPFICMY

SEQ ID NO: 24450 - protein, 32 aa, Artificial Sequence
  Quasi-synthetic sequence derived from human genome
WLLRKKYLRMRKAAITMQRYVRGYQARCYAKF

SEQ ID NO: 24451 - protein, 32 aa, Artificial Sequence
  Quasi-synthetic sequence derived from human genome
RKHLNKLRNIRYGFNTILVILIWRIFIARSQM

SEQ ID NO: 24452 - protein, 32 aa, Artificial Sequence
  Quasi-synthetic sequence derived from human genome
TMPQYLRKRFGGRRIRLYLSVLSLFLYIFTKI

SEQ ID NO: 24453 - protein, 32 aa, Artificial Sequence
  Quasi-synthetic sequence derived from human genome
MAKLLPLRALPLLFNLIKVVPRVFGRMVGKSR

SEQ ID NO: 24454 - protein, 32 aa, Artificial Sequence
  Quasi-synthetic sequence derived from human genome
TILASQKVKKIWQKQFRWPKNRLQILKFCKAR

SEQ ID NO: 24455 - protein, 32 aa, Artificial Sequence
  Quasi-synthetic sequence derived from human genome
FLPARQLWKWFGKPTQRRGMKGKARKLFYKAI

SEQ ID NO: 24456 - protein, 32 aa, Artificial Sequence
  Quasi-synthetic sequence derived from human genome
WWVRLLYRPYCKKNPQHLYSFIAKILWRSAKK

SEQ ID NO: 24457 - protein, 32 aa, Artificial Sequence
  Quasi-synthetic sequence derived from human genome
LLLLRWRRPALHRPIKVNLLIPVAYLVFWAFL

SEQ ID NO: 24458 - protein, 32 aa, Artificial Sequence
  Quasi-synthetic sequence derived from human genome
LLSPVPKLCRIKASKALKKKIRRFQPTALKVM

SEQ ID NO: 24459 - protein, 32 aa, Artificial Sequence
  Quasi-synthetic sequence derived from human genome
YWRLTWRVVSPLLLTIFVAYIILLFWKPLRYK

SEQ ID NO: 24460 - protein, 32 aa, Artificial Sequence
  Quasi-synthetic sequence derived from human genome
FLRLKRKFIQMRRPFLERRDLIIQHIPGFWVK

SEQ ID NO: 24461 - protein, 32 aa, Artificial Sequence
  Quasi-synthetic sequence derived from human genome
GVCFLGVAVLVSILAGCLLNRRRAARRRRKRL

SEQ ID NO: 24462 - protein, 32 aa, Artificial Sequence
  Quasi-synthetic sequence derived from human genome
FKGLKLLCRDKIRLNNAIWRAWYIQYVKRRKS

SEQ ID NO: 24463 - protein, 32 aa, Artificial Sequence
  Quasi-synthetic sequence derived from human genome
LLVAFVLFLRLRSIRCLRNIIHWNLISAFILR

SEQ ID NO: 24464 - protein, 32 aa, Artificial Sequence
  Quasi-synthetic sequence derived from human genome
GVIGLLILILLIKKLIIFILKKTREKKKECLV

SEQ ID NO: 24465 - protein, 32 aa, Artificial Sequence
  Quasi-synthetic sequence derived from human genome
LLRKHRFQLYRSMNSRARKNRSQIVLFQKRRF

SEQ ID NO: 24466 - protein, 32 aa, Artificial Sequence
  Quasi-synthetic sequence derived from human genome
KRKQLLKPVFLNSWIDLRATYKLFYRRKPKGL

SEQ ID NO: 24467 - protein, 32 aa, Artificial Sequence
  Quasi-synthetic sequence derived from human genome
KVLMLLSSIGRRKSLPSVTRPRLRVKMYNFLR

SEQ ID NO: 24468 - protein, 32 aa, Artificial Sequence
  Quasi-synthetic sequence derived from human genome
CIPRSFRRHIRQHSALTRLRLRNVFRRFLRDF

SEQ ID NO: 24469 - protein, 32 aa, Artificial Sequence
  Quasi-synthetic sequence derived from human genome
RALRYYYNKRILHKTKGKRFTYKFNFSKVVLV

SEQ ID NO: 24470 - protein, 32 aa, Artificial Sequence
  Quasi-synthetic sequence derived from human genome
ALLVIQWNIRAFMGVKNWPWMKLYFKIKPLLK

SEQ ID NO: 24471 - protein, 32 aa, Artificial Sequence
  Quasi-synthetic sequence derived from human genome
LFFRRPKASLPRVFVLRALLMVLVFLLVVSYW

SEQ ID NO: 24472 - protein, 32 aa, Artificial Sequence
  Quasi-synthetic sequence derived from human genome
LVRKQMRLQRKAVISLQSYFRMRKARQYYLKM

SEQ ID NO: 24473 - protein, 32 aa, Artificial Sequence
  Quasi-synthetic sequence derived from human genome
RKARKYEIPHFRLKKVENIKIWLSLRSYLKRR

SEQ ID NO: 24474 - protein, 32 aa, Artificial Sequence
  Quasi-synthetic sequence derived from human genome
VAVVLLLLLLLLLFLILRHRRQGKHWTSTQRK

SEQ ID NO: 24475 - protein, 32 aa, Artificial Sequence
  Quasi-synthetic sequence derived from human genome
RRQIIRALCLLLLLLHAGSAKNIWKRALPARL

SEQ ID NO: 24476 - protein, 32 aa, Artificial Sequence
  Quasi-synthetic sequence derived from human genome
FLILKVAVGTRLHRVPVKIKRMCVNGLCRARK

SEQ ID NO: 24477 - protein, 32 aa, Artificial Sequence
  Quasi-synthetic sequence derived from human genome
KLRSKIHKKVDRKASKGRKLRFHVLSKLLSFM

SEQ ID NO: 24478 - protein, 32 aa, Artificial Sequence
  Quasi-synthetic sequence derived from human genome
WWFMSVKVKLKRKKRQKTPNRKLPRRGAPTLR

SEQ ID NO: 24479 - protein, 32 aa, Artificial Sequence
  Quasi-synthetic sequence derived from human genome
YLKTILHRVYGKFLGLRAYIRKQCNHIFLRFI

SEQ ID NO: 24480 - protein, 32 aa, Artificial Sequence
  Quasi-synthetic sequence derived from human genome
MARRRRRACIALFLVLLFAFGTLMGLRTLKAP

SEQ ID NO: 24481 - protein, 32 aa, Artificial Sequence
  Quasi-synthetic sequence derived from human genome
AMWRRYRAKKYLCKVKAACKIQAWYRCWRAHK

SEQ ID NO: 24482 - protein, 32 aa, Artificial Sequence
  Quasi-synthetic sequence derived from human genome
KPMRWPFFLFIPFFIIFCVLIAIMVKVNFQRK

SEQ ID NO: 24483 - protein, 32 aa, Artificial Sequence
  Quasi-synthetic sequence derived from human genome
KLFVVTAVSAISVIFLAHHFKRKRGKKKGKIL

SEQ ID NO: 24484 - protein, 32 aa, Artificial Sequence
  Quasi-synthetic sequence derived from human genome
MFLVIFPMFTFPKKLPPRHKKKKKKKFSVDAV

SEQ ID NO: 24485 - protein, 32 aa, Artificial Sequence
  Quasi-synthetic sequence derived from human genome
MFTRAQVRRILQRVPGKQRFGIYRFLPFFFVL

SEQ ID NO: 24486 - protein, 32 aa, Artificial Sequence
  Quasi-synthetic sequence derived from human genome
IQAVVAILLCILTITVITLLIFLRRRLRKQAR

SEQ ID NO: 24487 - protein, 32 aa, Artificial Sequence
  Quasi-synthetic sequence derived from human genome
LTLLVPCVVILAKALFLLPCISRRLARIRRGW

SEQ ID NO: 24488 - protein, 32 aa, Artificial Sequence
  Quasi-synthetic sequence derived from human genome
RLTRKRLCSFLIALYCLFSLYAAYHVFFGRRR

SEQ ID NO: 24489 - protein, 32 aa, Artificial Sequence
  Quasi-synthetic sequence derived from human genome
FLLIQIFGRKSYPMLKLVRLKLWFPRFMNVNP

SEQ ID NO: 24490 - protein, 32 aa, Artificial Sequence
  Quasi-synthetic sequence derived from human genome
KLLFTPQHKMLRLRLPNLKMVRLRVSFSAVVF

SEQ ID NO: 24491 - protein, 32 aa, Artificial Sequence
  Quasi-synthetic sequence derived from human genome
VVLVMAYGSLVFVLLFIFVKRQIMRFAMKSRR

SEQ ID NO: 24492 - protein, 32 aa, Artificial Sequence
  Quasi-synthetic sequence derived from human genome
KKAGLLMALARLCFLLGRLCSRRLKLSQARVY

SEQ ID NO: 24493 - protein, 32 aa, Artificial Sequence
  Quasi-synthetic sequence derived from human genome
MRLWKARVLKLVLKTAKDSRLGLNSKWLSLKL

SEQ ID NO: 24494 - protein, 32 aa, Artificial Sequence
  Quasi-synthetic sequence derived from human genome
NHYLFSGCFLVVLLAILLYLLRLRRIHRRTPR

SEQ ID NO: 24495 - protein, 32 aa, Artificial Sequence
  Quasi-synthetic sequence derived from human genome
VIKLKNKIKYRAEACIKMQKTIRMWLCKRRHK

SEQ ID NO: 24496 - protein, 32 aa, Artificial Sequence
  Quasi-synthetic sequence derived from human genome
FRRKEKMFRFFIRRMVKAQSFYWVVLCVVALN

SEQ ID NO: 24497 - protein, 32 aa, Artificial Sequence
  Quasi-synthetic sequence derived from human genome
WRGRYGRRRPFIWALSLGILLSLFLIPRAGWL

SEQ ID NO: 24498 - protein, 32 aa, Artificial Sequence
  Quasi-synthetic sequence derived from human genome
YWLSLLFKKLVGTKVLMASVQGSKRRKLRVYL

SEQ ID NO: 24499 - protein, 32 aa, Artificial Sequence
  Quasi-synthetic sequence derived from human genome
KKKVKRLLSFQRYFHASRLLRGIIPQAPLHLL

SEQ ID NO: 24500 - protein, 32 aa, Artificial Sequence
  Quasi-synthetic sequence derived from human genome
KCRGLPFSSFLILPFQRITRLKLLVQNILKRV

SEQ ID NO: 24501 - protein, 32 aa, Artificial Sequence
  Quasi-synthetic sequence derived from human genome
MHKNMRVLSRTSKFRRLRQLLRRRKKRRQGRC

SEQ ID NO: 24502 - protein, 32 aa, Artificial Sequence
  Quasi-synthetic sequence derived from human genome
LRITLRFFASVLIRRIHKVDIPSIITKKLLKA

SEQ ID NO: 24503 - protein, 32 aa, Artificial Sequence
  Quasi-synthetic sequence derived from human genome
AAMVWRRLLRKRWVLALVFGLSLVYFLSSTFK

SEQ ID NO: 24504 - protein, 32 aa, Artificial Sequence
  Quasi-synthetic sequence derived from human genome
RALLPQWPRRPGRRWPASPLGMKVFRRKALVL

SEQ ID NO: 24505 - protein, 32 aa, Artificial Sequence
  Quasi-synthetic sequence derived from human genome
SLILCTRSIVLALRLRKRFLNFFLEKYKRPVC

SEQ ID NO: 24506 - protein, 32 aa, Artificial Sequence
  Quasi-synthetic sequence derived from human genome
AGIPKAKQRLKRLRNIHYLFNTALFLIAWRLL

SEQ ID NO: 24507 - protein, 32 aa, Artificial Sequence
  Quasi-synthetic sequence derived from human genome
KLSRALRYYYNKRILHKTKGKRFTYKFNFNKL

SEQ ID NO: 24508 - protein, 32 aa, Artificial Sequence
  Quasi-synthetic sequence derived from human genome
MKKKTFKGLIRIFRKGVIAVLAANRLKILGQS

SEQ ID NO: 24509 - protein, 32 aa, Artificial Sequence
  Quasi-synthetic sequence derived from human genome
LLRRWKHWLLLLGICCPKPHGRVSSRLRLSRS

SEQ ID NO: 24510 - protein, 32 aa, Artificial Sequence
  Quasi-synthetic sequence derived from human genome
WKRRLIRLLLYHFKQEEKLLKSQRNLVAKMKK

SEQ ID NO: 24511 - protein, 32 aa, Artificial Sequence
  Quasi-synthetic sequence derived from human genome
KLLKKRSKQPLGEVKRRLSLYLTKIHFWLPVL

SEQ ID NO: 24512 - protein, 32 aa, Artificial Sequence
  Quasi-synthetic sequence derived from human genome
LRFLRLFGPGKNVPSVWRSARRKRKKKHRELI

SEQ ID NO: 24513 - protein, 32 aa, Artificial Sequence
  Quasi-synthetic sequence derived from human genome
FLRHRYQSRSAFLGRYLKKKKSVVSRLKKAKR

SEQ ID NO: 24514 - protein, 32 aa, Artificial Sequence
  Quasi-synthetic sequence derived from human genome
RPRTELKKKLFKRRRVLNRERRLRHRVVGAVI

SEQ ID NO: 24515 - protein, 32 aa, Artificial Sequence
  Quasi-synthetic sequence derived from human genome
RVLYFSIFSMFCLIGLATWQVFYLRRFFKAKK

SEQ ID NO: 24516 - protein, 32 aa, Artificial Sequence
  Quasi-synthetic sequence derived from human genome
KFFLLKRFNKEKLGLLLLTFLGIVAAVLVKKY

SEQ ID NO: 24517 - protein, 32 aa, Artificial Sequence
  Quasi-synthetic sequence derived from human genome
IFRPGTSFGISVLRALRLLRIFKITKYWASLR

SEQ ID NO: 24518 - protein, 32 aa, Artificial Sequence
  Quasi-synthetic sequence derived from human genome
MLRCLYHWHRPVLNRRWSRLCLPKQYLFTMKL

SEQ ID NO: 24519 - protein, 32 aa, Artificial Sequence
  Quasi-synthetic sequence derived from human genome
MRRTRRPRFVLMNKMDDLNLHYRFLNWRRRIR

SEQ ID NO: 24520 - protein, 32 aa, Artificial Sequence
  Quasi-synthetic sequence derived from human genome
RIKKRSRSVFYRLTILILVFAVSWMPLHLFHV

SEQ ID NO: 24521 - protein, 32 aa, Artificial Sequence
  Quasi-synthetic sequence derived from human genome
ITRFKHLKKLLLVHGHWCYSRLARMVVYYLYK

SEQ ID NO: 24522 - protein, 32 aa, Artificial Sequence
  Quasi-synthetic sequence derived from human genome
PLRAPALRRLLPPLLLLLLSLPPRARAKYVRG

SEQ ID NO: 24523 - protein, 32 aa, Artificial Sequence
  Quasi-synthetic sequence derived from human genome
LRVLRVLRPLRAINRAKGLKHVVQCVFVAIRT

SEQ ID NO: 24524 - protein, 32 aa, Artificial Sequence
  Quasi-synthetic sequence derived from human genome
LLLLFMMTVFFAKKLYLLKTENTKLRRTNKFR

SEQ ID NO: 24525 - protein, 32 aa, Artificial Sequence
  Quasi-synthetic sequence derived from human genome
RCIKKFSIQRFPKILVLHLKRFSESRIRTSKL

SEQ ID NO: 24526 - protein, 32 aa, Artificial Sequence
  Quasi-synthetic sequence derived from human genome
FVLLIFIVSMIYLACKKPKKPQRRQNNRLKPL

SEQ ID NO: 24527 - protein, 32 aa, Artificial Sequence
  Quasi-synthetic sequence derived from human genome
FFLINPTKTFYYKSRFWLLKLLFRVFTAPFHK

SEQ ID NO: 24528 - protein, 32 aa, Artificial Sequence
  Quasi-synthetic sequence derived from human genome
RWNRFNRRRCRAAVKSVTFYWLVIVLVFLNTL

SEQ ID NO: 24529 - protein, 32 aa, Artificial Sequence
  Quasi-synthetic sequence derived from human genome
LTWALNYRTGVRLRGAILTMAFKKILKLKNIK

SEQ ID NO: 24530 - protein, 32 aa, Artificial Sequence
  Quasi-synthetic sequence derived from human genome
FMLKKRKWPLKGWHKRFFVLDNGMLKYSKAPL

SEQ ID NO: 24531 - protein, 32 aa, Artificial Sequence
  Quasi-synthetic sequence derived from human genome
FLFAFFIFIMSLLLISGQRPVNLTMRRKLRKH

SEQ ID NO: 24532 - protein, 32 aa, Artificial Sequence
  Quasi-synthetic sequence derived from human genome
INLAKLKLFRHYYVLIVCYIYFTRIIAFLLKL

SEQ ID NO: 24533 - protein, 32 aa, Artificial Sequence
  Quasi-synthetic sequence derived from human genome
GKIPSRFKRSYNYKTIVKKILAKLKRARSKKL

SEQ ID NO: 24534 - protein, 32 aa, Artificial Sequence
  Quasi-synthetic sequence derived from human genome
KLRIRTKAAVKIQAWWRGTLVRRTLLHAALRA

SEQ ID NO: 24535 - protein, 32 aa, Artificial Sequence
  Quasi-synthetic sequence derived from human genome
FLFVNKRLVLRTKLHKLIDFLLRKESIICKPK

SEQ ID NO: 24536 - protein, 32 aa, Artificial Sequence
  Quasi-synthetic sequence derived from human genome
LLVLLCLLLYYCRRKCLKPRQHHRKLQLPAGL

SEQ ID NO: 24537 - protein, 32 aa, Artificial Sequence
  Quasi-synthetic sequence derived from human genome
KFYIHAIGIGKCKRRIVKCGKLHKKGRKLCVY

SEQ ID NO: 24538 - protein, 32 aa, Artificial Sequence
  Quasi-synthetic sequence derived from human genome
LLMILKPVQKLFAIIVGRGIRKWWQALPPNKK

SEQ ID NO: 24539 - protein, 32 aa, Artificial Sequence
  Quasi-synthetic sequence derived from human genome
KKKIFVFLEHQTKVLKKRHTKEKVLRRAKRRW

SEQ ID NO: 24540 - protein, 32 aa, Artificial Sequence
  Quasi-synthetic sequence derived from human genome
LRLLQSRCPRVLPKKLQNWNFLPLWMRSLKPW

SEQ ID NO: 24541 - protein, 32 aa, Artificial Sequence
  Quasi-synthetic sequence derived from human genome
LRTLLRRRLFSYPTKYYFMVLVLSLITFSVLR

SEQ ID NO: 24542 - protein, 32 aa, Artificial Sequence
  Quasi-synthetic sequence derived from human genome
FRYLQRLLLVHGRWSYFRMCKFLCYFFYKNFA

SEQ ID NO: 24543 - protein, 32 aa, Artificial Sequence
  Quasi-synthetic sequence derived from human genome
LITGYIQICFWVIAAARQIQKMRKFYFRRIMR

SEQ ID NO: 24544 - protein, 32 aa, Artificial Sequence
  Quasi-synthetic sequence derived from human genome
SAILKSLQSYFSPTLFRVIRLARIGRILRLIR

SEQ ID NO: 24545 - protein, 32 aa, Artificial Sequence
  Quasi-synthetic sequence derived from human genome
SLLVIQWNIRAFMGVKNWPWMKLYFKIKPLLK

SEQ ID NO: 24546 - protein, 32 aa, Artificial Sequence
  Quasi-synthetic sequence derived from human genome
IILKLYRVLQLFLSRTAQRSALLSSGRLLRRL

SEQ ID NO: 24547 - protein, 32 aa, Artificial Sequence
  Quasi-synthetic sequence derived from human genome
PRRRMPGIGWLKKCYQMIDRRLRKNLKSLIIV

SEQ ID NO: 24548 - protein, 32 aa, Artificial Sequence
  Quasi-synthetic sequence derived from human genome
KEKKFIWNHGITLPLKNVRKRRFRKTAKKKYI

SEQ ID NO: 24549 - protein, 32 aa, Artificial Sequence
  Quasi-synthetic sequence derived from human genome
LVKRVNHWLTCSRWKKVQWCSLSVIKLKNKIK

SEQ ID NO: 24550 - protein, 32 aa, Artificial Sequence
  Quasi-synthetic sequence derived from human genome
LKPFLLGCPRFVVIDNCIALKKVASRLKKKRK

SEQ ID NO: 24551 - protein, 32 aa, Artificial Sequence
  Quasi-synthetic sequence derived from human genome
FWFCLAWCTFFLIPSIIFAVKTSKYFRPIRKR

SEQ ID NO: 24552 - protein, 32 aa, Artificial Sequence
  Quasi-synthetic sequence derived from human genome
CFRLGRQLSKALQVNCVVRKLLVQLRRLYWWV

SEQ ID NO: 24553 - protein, 32 aa, Artificial Sequence
  Quasi-synthetic sequence derived from human genome
LAKLKLFRHYYVLIVCYIYFTRIIAFLLKLAV

SEQ ID NO: 24554 - protein, 32 aa, Artificial Sequence
  Quasi-synthetic sequence derived from human genome
RTLHQRFLAQLRKYFNMRVFRQRTYRIWAFGI

SEQ ID NO: 24555 - protein, 32 aa, Artificial Sequence
  Quasi-synthetic sequence derived from human genome
RKLWWLPAHLPRFVRIVLSTLPNKHGILQKLR

SEQ ID NO: 24556 - protein, 32 aa, Artificial Sequence
  Quasi-synthetic sequence derived from human genome
KVPRKKVNVKVFIIIAVFFICFVPFHFARIPY

SEQ ID NO: 24557 - protein, 32 aa, Artificial Sequence
  Quasi-synthetic sequence derived from human genome
VRKAFRHRLWAVLTVQAYARGMIARRLHQRLR

SEQ ID NO: 24558 - protein, 32 aa, Artificial Sequence
  Quasi-synthetic sequence derived from human genome
KAKPKKQSKKKVPFWNVQNKIILFTVFLFILA

SEQ ID NO: 24559 - protein, 32 aa, Artificial Sequence
  Quasi-synthetic sequence derived from human genome
YRKLLALGTWLLALLLTLPVMLAMRLVRRGPK

SEQ ID NO: 24560 - protein, 32 aa, Artificial Sequence
  Quasi-synthetic sequence derived from human genome
WRVHAIFKNVKMKKKIIKDQKLLVIVGGMLLI

SEQ ID NO: 24561 - protein, 32 aa, Artificial Sequence
  Quasi-synthetic sequence derived from human genome
LRLKAFILFGKLARVVGMSKKHFFKGEVKKAW

SEQ ID NO: 24562 - protein, 32 aa, Artificial Sequence
  Quasi-synthetic sequence derived from human genome
LLLVLLLCRLRRLRARARARAAARLSLTDPLV

SEQ ID NO: 24563 - protein, 32 aa, Artificial Sequence
  Quasi-synthetic sequence derived from human genome
LARQRYQQMRRSLVKFRSLVHAYVSRRRYLKL

SEQ ID NO: 24564 - protein, 32 aa, Artificial Sequence
  Quasi-synthetic sequence derived from human genome
MSKFKLLSSLPHWRRIAQKIIREPRKKRVPKK

SEQ ID NO: 24565 - protein, 32 aa, Artificial Sequence
  Quasi-synthetic sequence derived from human genome
MQRKKLKDFSGGWRMRVALARALFIRPFMLLL

SEQ ID NO: 24566 - protein, 32 aa, Artificial Sequence
  Quasi-synthetic sequence derived from human genome
YLIYNLLQAVFFVLFVLSVHYLWKKWKKHQKK

SEQ ID NO: 24567 - protein, 32 aa, Artificial Sequence
  Quasi-synthetic sequence derived from human genome
LTVLMVVSGAVLVYFVVRTVRMRRRNRKTRRY

SEQ ID NO: 24568 - protein, 32 aa, Artificial Sequence
  Quasi-synthetic sequence derived from human genome
VWRVLHALLCLHRTLTSWLRVRFGTWNWIWRR

SEQ ID NO: 24569 - protein, 32 aa, Artificial Sequence
  Quasi-synthetic sequence derived from human genome
LRWFQHRRNRRRRKPQRNLLRNFLVQAFGGCF

SEQ ID NO: 24570 - protein, 32 aa, Artificial Sequence
  Quasi-synthetic sequence derived from human genome
FVLKYITIALKCLIVALPKIILAVKSKGKFYL

SEQ ID NO: 24571 - protein, 32 aa, Artificial Sequence
  Quasi-synthetic sequence derived from human genome
FLARRRYRKMLEEHKAVILQKYARAWLARRRF

SEQ ID NO: 24572 - protein, 32 aa, Artificial Sequence
  Quasi-synthetic sequence derived from human genome
KLLLFYILGTVVAILLLLALALGLLVYRKRRA

SEQ ID NO: 24573 - protein, 32 aa, Artificial Sequence
  Quasi-synthetic sequence derived from human genome
FLKQRPTKLKSLIRLVKHWYQNCKKKLGKLPP

SEQ ID NO: 24574 - protein, 32 aa, Artificial Sequence
  Quasi-synthetic sequence derived from human genome
LRVIRLVRVFRIFKLSRHSKGLQILGQTLKAS

SEQ ID NO: 24575 - protein, 32 aa, Artificial Sequence
  Quasi-synthetic sequence derived from human genome
RFKKGKIVLLFSLLCWVLFNLGIGFVKPATLR

SEQ ID NO: 24576 - protein, 32 aa, Artificial Sequence
  Quasi-synthetic sequence derived from human genome
LPFFCFLLGKCFKKGLKGKGFVLLVKLACIVV

SEQ ID NO: 24577 - protein, 32 aa, Artificial Sequence
  Quasi-synthetic sequence derived from human genome
RRHLKSMHSSATLIQSRFRSLLVRRRFISLKK

SEQ ID NO: 24578 - protein, 32 aa, Artificial Sequence
  Quasi-synthetic sequence derived from human genome
MSLCVVLYVASSLFLMVMYFFFRVRSRRWKVK

SEQ ID NO: 24579 - protein, 32 aa, Artificial Sequence
  Quasi-synthetic sequence derived from human genome
RRLRKNLKSLIIVHPSWFIRTVLAISRPFISV

SEQ ID NO: 24580 - protein, 32 aa, Artificial Sequence
  Quasi-synthetic sequence derived from human genome
NRVPLRQLLRLQRVSRAFRSLVQLHLAGLRRF

SEQ ID NO: 24581 - protein, 32 aa, Artificial Sequence
  Quasi-synthetic sequence derived from human genome
LKVFYKFLNSNRPKIRHTEKKSFKCKKRVKLF

SEQ ID NO: 24582 - protein, 32 aa, Artificial Sequence
  Quasi-synthetic sequence derived from human genome
ILLTGVLCHRFHGLWYMKMMWAWLQAKRKPRK

SEQ ID NO: 24583 - protein, 32 aa, Artificial Sequence
  Quasi-synthetic sequence derived from human genome
MVRRFLVTLRIRRACGPPRVRVFVVHIPRLTG

SEQ ID NO: 24584 - protein, 32 aa, Artificial Sequence
  Quasi-synthetic sequence derived from human genome
RLLCSRLCQQLRSKRKFFGTVPISRLHRRVVI

SEQ ID NO: 24585 - protein, 32 aa, Artificial Sequence
  Quasi-synthetic sequence derived from human genome
KVIVVRNRRLGVLYRAVQLLILLYFVWYVFIV

SEQ ID NO: 24586 - protein, 32 aa, Artificial Sequence
  Quasi-synthetic sequence derived from human genome
LILLATAVILGSAVLLFHFCIFHRRKMKAIRR

SEQ ID NO: 24587 - protein, 32 aa, Artificial Sequence
  Quasi-synthetic sequence derived from human genome
RKTFWFFFQRHKLKGTSFLLGGVVIVLLRWPL

SEQ ID NO: 24588 - protein, 32 aa, Artificial Sequence
  Quasi-synthetic sequence derived from human genome
AKICAFLLRKKRFGQWTKLLCVIKDTKLLCYK

SEQ ID NO: 24589 - protein, 32 aa, Artificial Sequence
  Quasi-synthetic sequence derived from human genome
RPRFFLLENVRNFVSFKRSMVLKLTLRCLVRM

SEQ ID NO: 24590 - protein, 32 aa, Artificial Sequence
  Quasi-synthetic sequence derived from human genome
RGARGVRVDFWWRRLRASLRLTVWAPLLPLRI

SEQ ID NO: 24591 - protein, 32 aa, Artificial Sequence
  Quasi-synthetic sequence derived from human genome
RVRYWDLLLLIPNVLFLIFLLWKLPSARAKIR

SEQ ID NO: 24592 - protein, 32 aa, Artificial Sequence
  Quasi-synthetic sequence derived from human genome
LLLLHNQLLYERFKRQQHALRNRRLLRKVIKA

SEQ ID NO: 24593 - protein, 32 aa, Artificial Sequence
  Quasi-synthetic sequence derived from human genome
IIRLVRVFRIFKLSRHSKGLQILGQTLKASMR

SEQ ID NO: 24594 - protein, 32 aa, Artificial Sequence
  Quasi-synthetic sequence derived from human genome
AIRSWLTRKHIQRLHAAATVIKRAWQKWRIRM

SEQ ID NO: 24595 - protein, 32 aa, Artificial Sequence
  Quasi-synthetic sequence derived from human genome
LFLCLFFYNCYKGYLPRQCLKFRSALLIGKKK

SEQ ID NO: 24596 - protein, 32 aa, Artificial Sequence
  Quasi-synthetic sequence derived from human genome
RRLRKNLRALVVVHATWYVKAFLALLRPFISS

SEQ ID NO: 24597 - protein, 32 aa, Artificial Sequence
  Quasi-synthetic sequence derived from human genome
FRPGKVLRFLHLFGPGKNVPSVWRSARRKRKK

SEQ ID NO: 24598 - protein, 32 aa, Artificial Sequence
  Quasi-synthetic sequence derived from human genome
VCSGWLRKSPPEKKLKRYAWKRRWFVLRSGRL

SEQ ID NO: 24599 - protein, 32 aa, Artificial Sequence
  Quasi-synthetic sequence derived from human genome
IRRMFRVRNCLRGLGLFLLVFSFFFLLTWASF

SEQ ID NO: 24600 - protein, 32 aa, Artificial Sequence
  Quasi-synthetic sequence derived from human genome
RLRTKMPWKTCWRYLTSGGFFLLILMIFSKLL

SEQ ID NO: 24601 - protein, 32 aa, Artificial Sequence
  Quasi-synthetic sequence derived from human genome
FLLACVATVIFIITKCLFCVWKFVRTGKKGKR

SEQ ID NO: 24602 - protein, 32 aa, Artificial Sequence
  Quasi-synthetic sequence derived from human genome
KKYPQPKGQKKKKIVKYGMGGLIILFLIAIIW

SEQ ID NO: 24603 - protein, 32 aa, Artificial Sequence
  Quasi-synthetic sequence derived from human genome
FRVFHLSLWRLMKKVQITKPPPNFKFAFRAMV

SEQ ID NO: 24604 - protein, 32 aa, Artificial Sequence
  Quasi-synthetic sequence derived from human genome
LVSGIRTPPVRRNSKLATLGRIFKPWKWRKKK

SEQ ID NO: 24605 - protein, 32 aa, Artificial Sequence
  Quasi-synthetic sequence derived from human genome
VCTGWLRKSPPEKKLRRYAWKKRWFILRSGRM

SEQ ID NO: 24606 - protein, 32 aa, Artificial Sequence
  Quasi-synthetic sequence derived from human genome
RLLWPILGGALSLTFVLGLLSGFLVWRRCRRR

SEQ ID NO: 24607 - protein, 32 aa, Artificial Sequence
  Quasi-synthetic sequence derived from human genome
RGKLAGLLRTFMRSRPSRQRLRQRGILRQRVF

SEQ ID NO: 24608 - protein, 32 aa, Artificial Sequence
  Quasi-synthetic sequence derived from human genome
LFRIKCVTRIQAYWRGCVVRKWYRNLRKTVPP

SEQ ID NO: 24609 - protein, 32 aa, Artificial Sequence
  Quasi-synthetic sequence derived from human genome
LSTIVSQRKQIKRKAPRGFLKRVFKRKKPQLR

SEQ ID NO: 24610 - protein, 32 aa, Artificial Sequence
  Quasi-synthetic sequence derived from human genome
FIAVGILGVVLLAIFVALFFLTKKRRQRQRLA

SEQ ID NO: 24611 - protein, 32 aa, Artificial Sequence
  Quasi-synthetic sequence derived from human genome
LWLRAKFQRLLFKLGCYIQKNCGKFLVVGLLI

SEQ ID NO: 24612 - protein, 32 aa, Artificial Sequence
  Quasi-synthetic sequence derived from human genome
KTFKCIKCSKSFFMLSCLIRHKRIHIRQNIYK

SEQ ID NO: 24613 - protein, 32 aa, Artificial Sequence
  Quasi-synthetic sequence derived from human genome
KYIVSTLQRWRLNVLRLNFRGCLLRPKTFRSV

SEQ ID NO: 24614 - protein, 32 aa, Artificial Sequence
  Quasi-synthetic sequence derived from human genome
RLLRYLIHLRFQSSKSGKIYLHRDVRLLFSRK

SEQ ID NO: 24615 - protein, 32 aa, Artificial Sequence
  Quasi-synthetic sequence derived from human genome
RSKKIFLSKLIVCFLSTWLPFVLLQVIIVLLK

SEQ ID NO: 24616 - protein, 32 aa, Artificial Sequence
  Quasi-synthetic sequence derived from human genome
IGKRKGTANARMPEKVTWMRRMRILRRLLRRY

SEQ ID NO: 24617 - protein, 32 aa, Artificial Sequence
  Quasi-synthetic sequence derived from human genome
QPAKKKRKKGLRIKGKRRRKKLILAKKFSKDL

SEQ ID NO: 24618 - protein, 32 aa, Artificial Sequence
  Quasi-synthetic sequence derived from human genome
KIIRTIFKRLKSFICPKLHMGFKSSLRSQLSK

SEQ ID NO: 24619 - protein, 32 aa, Artificial Sequence
  Quasi-synthetic sequence derived from human genome
LWKLLLRSQSCRLCSFRKMRSPPKYRPFLACF

SEQ ID NO: 24620 - protein, 32 aa, Artificial Sequence
  Quasi-synthetic sequence derived from human genome
LFRKPQRSFFGKLLREFRLVAADRRSWKILLF

SEQ ID NO: 24621 - protein, 32 aa, Artificial Sequence
  Quasi-synthetic sequence derived from human genome
GQLRCFLKLTVNRVIWKIAKPPTCVLVRVRWW

SEQ ID NO: 24622 - protein, 32 aa, Artificial Sequence
  Quasi-synthetic sequence derived from human genome
GQIVLAKKMLRKALKLLNRIFPYNLISLFLHI

SEQ ID NO: 24623 - protein, 32 aa, Artificial Sequence
  Quasi-synthetic sequence derived from human genome
EELLKYVGHIFRKVKRRSLRLYARWQSRWRKK

SEQ ID NO: 24624 - protein, 32 aa, Artificial Sequence
  Quasi-synthetic sequence derived from human genome
ALFCIQYNVRAFMNVKHWPWMKLFFKIKPLLK

SEQ ID NO: 24625 - protein, 32 aa, Artificial Sequence
  Quasi-synthetic sequence derived from human genome
IFPKQKYLSKKTTKRKRGYIKNKLVFKKGKKI

SEQ ID NO: 24626 - protein, 32 aa, Artificial Sequence
  Quasi-synthetic sequence derived from human genome
LRVMQRNCAAYLKLRHWQWWRLFTKVKPLLQV

SEQ ID NO: 24627 - protein, 32 aa, Artificial Sequence
  Quasi-synthetic sequence derived from human genome
SLKRSIKLLSLIKWKGSKSSKLNSKFWKHLVY

SEQ ID NO: 24628 - protein, 32 aa, Artificial Sequence
  Quasi-synthetic sequence derived from human genome
RVRFLNLKKTIIKFQAHVRKHQQRQKYKKMKK

SEQ ID NO: 24629 - protein, 32 aa, Artificial Sequence
  Quasi-synthetic sequence derived from human genome
KLFLNLATLLPFCVCLMSFFLLILSLRRHIRR

SEQ ID NO: 24630 - protein, 32 aa, Artificial Sequence
  Quasi-synthetic sequence derived from human genome
RIKIFFALAPVFSTKYLKSPLIRMTYKWKSIV

SEQ ID NO: 24631 - protein, 32 aa, Artificial Sequence
  Quasi-synthetic sequence derived from human genome
SIFYLLKIANFSNLLFLHLKRRVRSVILVILL

SEQ ID NO: 24632 - protein, 32 aa, Artificial Sequence
  Quasi-synthetic sequence derived from human genome
RLLLRRTYARNLPAFVNRLGILTVRHLKRLER

SEQ ID NO: 24633 - protein, 32 aa, Artificial Sequence
  Quasi-synthetic sequence derived from human genome
FRCIALRWVRLLGFAIVYGTIILKLYRVLQLF

SEQ ID NO: 24634 - protein, 32 aa, Artificial Sequence
  Quasi-synthetic sequence derived from human genome
FQKNRLFFYRKSVWSKLQSIGIRQHLKRVQLR

SEQ ID NO: 24635 - protein, 32 aa, Artificial Sequence
  Quasi-synthetic sequence derived from human genome
FLVVIALVGLIFILLLVFVLIIRGQSKKYAKK

SEQ ID NO: 24636 - protein, 32 aa, Artificial Sequence
  Quasi-synthetic sequence derived from human genome
LKNLRKQYRNVKKMTAKELVKVLFSFFWMLFV

SEQ ID NO: 24637 - protein, 32 aa, Artificial Sequence
  Quasi-synthetic sequence derived from human genome
AIFCIQYNIRSFMNVKHWPWMKLFFKIKPLLK

SEQ ID NO: 24638 - protein, 32 aa, Artificial Sequence
  Quasi-synthetic sequence derived from human genome
LFWCVILFFTTFFLSSFLKQFKTKRYFPTKVR

SEQ ID NO: 24639 - protein, 32 aa, Artificial Sequence
  Quasi-synthetic sequence derived from human genome
HLILAFCAGVLLTLLLIAFIFLIIKSYRKYRR

SEQ ID NO: 24640 - protein, 32 aa, Artificial Sequence
  Quasi-synthetic sequence derived from human genome
RRAKRIRNAALQHLFIRKSFRPFKCLQCGKAF

SEQ ID NO: 24641 - protein, 32 aa, Artificial Sequence
  Quasi-synthetic sequence derived from human genome
SFFRQLNLYGFRKRRQCTFRTFTRIFSAKRLV

SEQ ID NO: 24642 - protein, 32 aa, Artificial Sequence
  Quasi-synthetic sequence derived from human genome
LIVQRWIRGFLVRKNLSPVFFHKKKQQEKIIR

SEQ ID NO: 24643 - protein, 32 aa, Artificial Sequence
  Quasi-synthetic sequence derived from human genome
KCPPWWYRFAHKFLIWNCSPYWIKFKKCIYFI

SEQ ID NO: 24644 - protein, 32 aa, Artificial Sequence
  Quasi-synthetic sequence derived from human genome
LLAILLVVAVFCILWNWNKRKKRQVPYLRVTV

SEQ ID NO: 24645 - protein, 32 aa, Artificial Sequence
  Quasi-synthetic sequence derived from human genome
VLAPLKPALWTRLRTLRAPELRRLRRRQTALR

SEQ ID NO: 24646 - protein, 32 aa, Artificial Sequence
  Quasi-synthetic sequence derived from human genome
RHLHAVIRYSVAIILFTILPFFLLHRWCSKKK

SEQ ID NO: 24647 - protein, 32 aa, Artificial Sequence
  Quasi-synthetic sequence derived from human genome
LYKRYGGFLRRIRPKLKWDNQKRYGGFLRRQF

SEQ ID NO: 24648 - protein, 32 aa, Artificial Sequence
  Quasi-synthetic sequence derived from human genome
RLTGWEPGALLMRRPPVPPPPRRRRRRRLLFW

SEQ ID NO: 24649 - protein, 32 aa, Artificial Sequence
  Quasi-synthetic sequence derived from human genome
RYFAICFPLRAKVVVTKGRVKLVIFVIWAVAF

SEQ ID NO: 24650 - protein, 32 aa, Artificial Sequence
  Quasi-synthetic sequence derived from human genome
PTPFNVIPSPKSLWYLIKWIWTHLCKKKMRRK

SEQ ID NO: 24651 - protein, 32 aa, Artificial Sequence
  Quasi-synthetic sequence derived from human genome
LVRRTLLHAALRAWIIQCWWRMTLSRVLEKKR

SEQ ID NO: 24652 - protein, 32 aa, Artificial Sequence
  Quasi-synthetic sequence derived from human genome
VLILFMFRRLRQFRQAQPTPQYRFRKRDKVMF

SEQ ID NO: 24653 - protein, 32 aa, Artificial Sequence
  Quasi-synthetic sequence derived from human genome
VLALASYRRLCLRLRLADCLVPYSRALYRRRR

SEQ ID NO: 24654 - protein, 32 aa, Artificial Sequence
  Quasi-synthetic sequence derived from human genome
LTSIIVNQLKKIIKRKHTLPNYKIRFKPFFPY

SEQ ID NO: 24655 - protein, 32 aa, Artificial Sequence
  Quasi-synthetic sequence derived from human genome
PPTFMIAVFLPIVVLIFKSILFLPCLRKKILK

SEQ ID NO: 24656 - protein, 32 aa, Artificial Sequence
  Quasi-synthetic sequence derived from human genome
ASFLLKLQKWTQKKEKGKKLSRMKLLLKHLTL

SEQ ID NO: 24657 - protein, 32 aa, Artificial Sequence
  Quasi-synthetic sequence derived from human genome
HLLNALNSYKSRFLCGKEIKKKKCIFRLRIRV

SEQ ID NO: 24658 - protein, 32 aa, Artificial Sequence
  Quasi-synthetic sequence derived from human genome
RLRRVAERVAARVQRRPWGAWLSARLWKWLKS

SEQ ID NO: 24659 - protein, 32 aa, Artificial Sequence
  Quasi-synthetic sequence derived from human genome
VIRNLQRVIPIRRAPLRSKIEIVRRILGVQKF

SEQ ID NO: 24660 - protein, 32 aa, Artificial Sequence
  Quasi-synthetic sequence derived from human genome
KKMLRKALKLLNRIFPYNLISLFLHIHVEKNR

SEQ ID NO: 24661 - protein, 32 aa, Artificial Sequence
  Quasi-synthetic sequence derived from human genome
CPFVLLLLLLISLLCLYWKARKLSTLRSNTRK

SEQ ID NO: 24662 - protein, 32 aa, Artificial Sequence
  Quasi-synthetic sequence derived from human genome
KTKDAFYKNIVKKGYLLKKGKGKRWKNLYFIL

SEQ ID NO: 24663 - protein, 32 aa, Artificial Sequence
  Quasi-synthetic sequence derived from human genome
ITRNPVFPRFIKIIEVKNKKLVELLRRKVRLA

SEQ ID NO: 24664 - protein, 32 aa, Artificial Sequence
  Quasi-synthetic sequence derived from human genome
AKIRKALDRLRKKRHLLRRQRTRREFPVISVV

SEQ ID NO: 24665 - protein, 32 aa, Artificial Sequence
  Quasi-synthetic sequence derived from human genome
VQFIRQKRRGAFNSKQLLYLEKYRPKMRLRFR

SEQ ID NO: 24666 - protein, 32 aa, Artificial Sequence
  Quasi-synthetic sequence derived from human genome
ISLVILTFQWRFYLSFRKLMRWILILVIALWF

SEQ ID NO: 24667 - protein, 32 aa, Artificial Sequence
  Quasi-synthetic sequence derived from human genome
LLLFIGLGIFFCVRCRHRRRQAERMSQIKRLL

SEQ ID NO: 24668 - protein, 32 aa, Artificial Sequence
  Quasi-synthetic sequence derived from human genome
KTYLRRFREMKPRVLQRWSRQILRGLHFLHSR

SEQ ID NO: 24669 - protein, 32 aa, Artificial Sequence
  Quasi-synthetic sequence derived from human genome
RWILQFRRWARKWSRFTRSSFQVRWAAVPAGK

SEQ ID NO: 24670 - protein, 32 aa, Artificial Sequence
  Quasi-synthetic sequence derived from human genome
LRFLKLRRERRALLCLLLVLGIAFIPIILEKI

SEQ ID NO: 24671 - protein, 32 aa, Artificial Sequence
  Quasi-synthetic sequence derived from human genome
SLRRVKVLLVLNLIAVAGFVLFLAKCRPIAVR

SEQ ID NO: 24672 - protein, 32 aa, Artificial Sequence
  Quasi-synthetic sequence derived from human genome
IFRNWLYFVPLLLLVPLLLCCVWRLCRKQTVK

SEQ ID NO: 24673 - protein, 32 aa, Artificial Sequence
  Quasi-synthetic sequence derived from human genome
KRFLLARRSRRGLFAQIVLPALFVGLALVFSL

SEQ ID NO: 24674 - protein, 32 aa, Artificial Sequence
  Quasi-synthetic sequence derived from human genome
LRAVRLRSGAKALGKARRKVTVLVLVVLAVCL

SEQ ID NO: 24675 - protein, 32 aa, Artificial Sequence
  Quasi-synthetic sequence derived from human genome
VLRLMRIFRILKLARHSTGLRSLGATLKYSYK

SEQ ID NO: 24676 - protein, 32 aa, Artificial Sequence
  Quasi-synthetic sequence derived from human genome
LMNRRKFLYQFKNVRWAKGRRETYLCYVVKRR

SEQ ID NO: 24677 - protein, 32 aa, Artificial Sequence
  Quasi-synthetic sequence derived from human genome
SVVSFYLPFGVTVLVYARIYVVLKQRRRKRIL

SEQ ID NO: 24678 - protein, 32 aa, Artificial Sequence
  Quasi-synthetic sequence derived from human genome
KIKSKYASYLSFIKILLKRGGVKVSTKNLIKL

SEQ ID NO: 24679 - protein, 32 aa, Artificial Sequence
  Quasi-synthetic sequence derived from human genome
RFLRIVCKTARRDLFGLSVLIRVRLELRRHQR

SEQ ID NO: 24680 - protein, 32 aa, Artificial Sequence
  Quasi-synthetic sequence derived from human genome
LREIRMLKQLKHPNLVNLLEVFRRKRRLHLVF

SEQ ID NO: 24681 - protein, 32 aa, Artificial Sequence
  Quasi-synthetic sequence derived from human genome
KFIRIFQLSNNIRSVVLRHCKKRQSHLRLTLK

SEQ ID NO: 24682 - protein, 32 aa, Artificial Sequence
  Quasi-synthetic sequence derived from human genome
VIRLVRVFRIFKLSRHSKGLQILGQTLRASMR

SEQ ID NO: 24683 - protein, 32 aa, Artificial Sequence
  Quasi-synthetic sequence derived from human genome
LLCKNCLKKWRMKRQTLLEWLFSFLLVLFLYL

SEQ ID NO: 24684 - protein, 32 aa, Artificial Sequence
  Quasi-synthetic sequence derived from human genome
RVYLGLSIALRFPALVLYIVFIFAMKKKFQGK

SEQ ID NO: 24685 - protein, 32 aa, Artificial Sequence
  Quasi-synthetic sequence derived from human genome
PRRRMPGLGWMKKCYQMIDRRLRKNLKSFIIV

SEQ ID NO: 24686 - protein, 32 aa, Artificial Sequence
  Quasi-synthetic sequence derived from human genome
FILLNVWINVVTLLWKHLKSSLRILFRHFFPK

SEQ ID NO: 24687 - protein, 32 aa, Artificial Sequence
  Quasi-synthetic sequence derived from human genome
LNRLGKLLLHLFMVLCLTLFLNNIIKKILNLK

SEQ ID NO: 24688 - protein, 32 aa, Artificial Sequence
  Quasi-synthetic sequence derived from human genome
RAKKIDKISRIGFPMAFLIFNMFYWIIYKIVR

SEQ ID NO: 24689 - protein, 32 aa, Artificial Sequence
  Quasi-synthetic sequence derived from human genome
IFLKRSQQKKKTSPLNFKKRLFLLTVHKLSYY

SEQ ID NO: 24690 - protein, 32 aa, Artificial Sequence
  Quasi-synthetic sequence derived from human genome
LKVLQRNCAAYLKLRHWQWWRVFTKVKPLLQV

SEQ ID NO: 24691 - protein, 32 aa, Artificial Sequence
  Quasi-synthetic sequence derived from human genome
MYRWLVRILGTIFRFCDRSVPPARALLKRRRS

SEQ ID NO: 24692 - protein, 32 aa, Artificial Sequence
  Quasi-synthetic sequence derived from human genome
RLRPRRTKLYVMASVFVCLLLSGLAVFFLFPR

SEQ ID NO: 24693 - protein, 32 aa, Artificial Sequence
  Quasi-synthetic sequence derived from human genome
RFTLPRFLQRRSSRRKVCTKTFLGPRIIGLRH

SEQ ID NO: 24694 - protein, 32 aa, Artificial Sequence
  Quasi-synthetic sequence derived from human genome
LFLKMLERFCRSRGNLVVQNKQKKRRKKKKKV

SEQ ID NO: 24695 - protein, 32 aa, Artificial Sequence
  Quasi-synthetic sequence derived from human genome
RRWGQAISKSKLSRRWRRWNRFNRRRCRAAVK

SEQ ID NO: 24696 - protein, 32 aa, Artificial Sequence
  Quasi-synthetic sequence derived from human genome
RRRMALRPGSRRPTAFFFHSRWLVPNLLAFFL

SEQ ID NO: 24697 - protein, 32 aa, Artificial Sequence
  Quasi-synthetic sequence derived from human genome
LHILFSLYTRTLYLRYRPKVKFLFGIWPVILF

SEQ ID NO: 24698 - protein, 32 aa, Artificial Sequence
  Quasi-synthetic sequence derived from human genome
RLCIRKFFPKKKCFVFDLPIHRRKLAQLEKLQ

SEQ ID NO: 24699 - protein, 32 aa, Artificial Sequence
  Quasi-synthetic sequence derived from human genome
RMSNLSVLRSFRLLRVFKLAKSWPTLNTLIKI

SEQ ID NO: 24700 - protein, 32 aa, Artificial Sequence
  Quasi-synthetic sequence derived from human genome
PIAFWARRASRTRLAAWARRALLSLRSPKARR

SEQ ID NO: 24701 - protein, 32 aa, Artificial Sequence
  Quasi-synthetic sequence derived from human genome
DAGMKRALGRRKGVWLRLRKILFCVLGLYIAI

SEQ ID NO: 24702 - protein, 32 aa, Artificial Sequence
  Quasi-synthetic sequence derived from human genome
FYFLYGKTRSRIPLVRNRRFQLCRCMNPRARK

SEQ ID NO: 24703 - protein, 32 aa, Artificial Sequence
  Quasi-synthetic sequence derived from human genome
RRVVQIFRIMRILRILKLARHSTGLQSLGFTL

SEQ ID NO: 24704 - protein, 32 aa, Artificial Sequence
  Quasi-synthetic sequence derived from human genome
RVVQIFRIMRILRILKLARHSTGLQSLGFTLR

SEQ ID NO: 24705 - protein, 32 aa, Artificial Sequence
  Quasi-synthetic sequence derived from human genome
KVVQVFRLMRIFRVLKLARHSTGLRSLGATLK

SEQ ID NO: 24706 - protein, 32 aa, Artificial Sequence
  Quasi-synthetic sequence derived from human genome
RFRKYLRQLFHRRVAVHLVKWLPFLSVDRLER

SEQ ID NO: 24707 - protein, 32 aa, Artificial Sequence
  Quasi-synthetic sequence derived from human genome
RILFLKPSCMLEVITWPIQAFVKRKVIIFLKK

SEQ ID NO: 24708 - protein, 32 aa, Artificial Sequence
  Quasi-synthetic sequence derived from human genome
RVALARVSSVKLISKAKIRTVKMTFIIVLAFI

SEQ ID NO: 24709 - protein, 32 aa, Artificial Sequence
  Quasi-synthetic sequence derived from human genome
RRWKKKQLRRPSLLLLGCCSFGIMAPSLWKGL

SEQ ID NO: 24710 - protein, 32 aa, Artificial Sequence
  Quasi-synthetic sequence derived from human genome
LILAAATIILYFIPLRYIILIWGINKFTKKLR

SEQ ID NO: 24711 - protein, 32 aa, Artificial Sequence
  Quasi-synthetic sequence derived from human genome
LLSSRRARRIPKLVQRINSIYNAKRGKKRLKK

SEQ ID NO: 24712 - protein, 32 aa, Artificial Sequence
  Quasi-synthetic sequence derived from human genome
KLCSRFLLKCGFITIPWRCIKKCSPLMPSWRF

SEQ ID NO: 24713 - protein, 32 aa, Artificial Sequence
  Quasi-synthetic sequence derived from human genome
QAVMIPQNVHRILINLMKYLQKWKRYRPLWKL

SEQ ID NO: 24714 - protein, 32 aa, Artificial Sequence
  Quasi-synthetic sequence derived from human genome
RVQGWALTRQQLQALLLKRFLLARRSRRGLFA

SEQ ID NO: 24715 - protein, 32 aa, Artificial Sequence
  Quasi-synthetic sequence derived from human genome
RISITFFRLFRVMRLVKLLSRGEGIRTLLWTF

SEQ ID NO: 24716 - protein, 32 aa, Artificial Sequence
  Quasi-synthetic sequence derived from human genome
ISIVDPWIFIIFRSPVFRIFFHKIFIRPLRYR

SEQ ID NO: 24717 - protein, 32 aa, Artificial Sequence
  Quasi-synthetic sequence derived from human genome
RRLERWLSRLLLWASLGLLLVFLGILWVKMGK

SEQ ID NO: 24718 - protein, 32 aa, Artificial Sequence
  Quasi-synthetic sequence derived from human genome
AMVVLAFFVVQINKAKSRPKRRKPRVKRPQLM

SEQ ID NO: 24719 - protein, 32 aa, Artificial Sequence
  Quasi-synthetic sequence derived from human genome
ARQRGVGQQAMSLAILRVIRLVRVFRIFKLSR

SEQ ID NO: 24720 - protein, 32 aa, Artificial Sequence
  Quasi-synthetic sequence derived from human genome
WIIIFGVIFCIIIVAIALLILSGIWQRRRKNK

SEQ ID NO: 24721 - protein, 32 aa, Artificial Sequence
  Quasi-synthetic sequence derived from human genome
KLNRNRMSMIPPKIFKLPHLQFLELKRNRIKI

SEQ ID NO: 24722 - protein, 32 aa, Artificial Sequence
  Quasi-synthetic sequence derived from human genome
CLHVVLSSKVCRGYLVKMGGKIKSWKKRWFVF

SEQ ID NO: 24723 - protein, 32 aa, Artificial Sequence
  Quasi-synthetic sequence derived from human genome
VAWRRAWPRRRRRLQQVGTVAKLWIYPVKSCK

SEQ ID NO: 24724 - protein, 32 aa, Artificial Sequence
  Quasi-synthetic sequence derived from human genome
LSVLILSLLLVFIMSVFVAAGLFVLVMKRRKK

SEQ ID NO: 24725 - protein, 32 aa, Artificial Sequence
  Quasi-synthetic sequence derived from human genome
KLFKSLLGKKKMRILILSLDTAGKTTILYKLK

SEQ ID NO: 24726 - protein, 32 aa, Artificial Sequence
  Quasi-synthetic sequence derived from human genome
KKHLILAFCAGVLLTLLLIAFIFLIIKSYRKY

SEQ ID NO: 24727 - protein, 32 aa, Artificial Sequence
  Quasi-synthetic sequence derived from human genome
TFFRLFRVMRLVKLLSRGEGIRTLLWTFIKSF

SEQ ID NO: 24728 - protein, 32 aa, Artificial Sequence
  Quasi-synthetic sequence derived from human genome
RTRMRAFHLSLPGGAQLLTYLVKVLKRRTWRR

SEQ ID NO: 24729 - protein, 32 aa, Artificial Sequence
  Quasi-synthetic sequence derived from human genome
MVFPMWTLKRQILILFNIILISKLLGARWFPK

SEQ ID NO: 24730 - protein, 32 aa, Artificial Sequence
  Quasi-synthetic sequence derived from human genome
RRAHRRFVTKKALCIRVFQETQKLKKRRRALK

SEQ ID NO: 24731 - protein, 32 aa, Artificial Sequence
  Quasi-synthetic sequence derived from human genome
MGVRFKRSKKIMPAGLVAGLSLMMILRLVLLL

SEQ ID NO: 24732 - protein, 32 aa, Artificial Sequence
  Quasi-synthetic sequence derived from human genome
KLLFFRIRPIFVFDGDAPLLKKQTLVKRRQRK

SEQ ID NO: 24733 - protein, 32 aa, Artificial Sequence
  Quasi-synthetic sequence derived from human genome
VLSDIIQKYFFSPTLFRVIRLARIGRILRLIR

SEQ ID NO: 24734 - protein, 32 aa, Artificial Sequence
  Quasi-synthetic sequence derived from human genome
LVLHFRHKVLILFKLILLEKKVLFYISPVNKL

SEQ ID NO: 24735 - protein, 32 aa, Artificial Sequence
  Quasi-synthetic sequence derived from human genome
KYIAIGIGVGLLLSGFLVIFYCYIRKRCLKLK

SEQ ID NO: 24736 - protein, 32 aa, Artificial Sequence
  Quasi-synthetic sequence derived from human genome
RFRYRILRSQHFRTKSKVCKLRKAQRSWVQKV

SEQ ID NO: 24737 - protein, 32 aa, Artificial Sequence
  Quasi-synthetic sequence derived from human genome
KVFIKYTKLKKIFLQHNCIRHISRKAFFGLCN

SEQ ID NO: 24738 - protein, 32 aa, Artificial Sequence
  Quasi-synthetic sequence derived from human genome
GREGSRALSRRYLRRLLLLLLLLLLRQPVTRA

SEQ ID NO: 24739 - protein, 32 aa, Artificial Sequence
  Quasi-synthetic sequence derived from human genome
FIRPKLVTIIRSGVKPRKAVRILLNKKTAHSF

SEQ ID NO: 24740 - protein, 32 aa, Artificial Sequence
  Quasi-synthetic sequence derived from human genome
VLKLPVRSLTYFSARKGKRKTVKAVIDRFLRL

SEQ ID NO: 24741 - protein, 32 aa, Artificial Sequence
  Quasi-synthetic sequence derived from human genome
NITILVVVLVLVIVGIGVLILLVRYRKCIKLK

SEQ ID NO: 24742 - protein, 32 aa, Artificial Sequence
  Quasi-synthetic sequence derived from human genome
RGQKKKKVVKYGMGGMIIVLLICIVWFPLLFM

SEQ ID NO: 24743 - protein, 32 aa, Artificial Sequence
  Quasi-synthetic sequence derived from human genome
VSANFRHIFLATLACLCPVWRRRRKRPAFSRK

SEQ ID NO: 24744 - protein, 32 aa, Artificial Sequence
  Quasi-synthetic sequence derived from human genome
VQFIRQKRRGAFNSKQLLYLEKYRPKMRLRFK

SEQ ID NO: 24745 - protein, 32 aa, Artificial Sequence
  Quasi-synthetic sequence derived from human genome
LFRAARLIKLLRQGYTIRILLWTFVQSFKALP

SEQ ID NO: 24746 - protein, 32 aa, Artificial Sequence
  Quasi-synthetic sequence derived from human genome
FRAFRRANARCFWNARLARAASRLAFQGWLRR

SEQ ID NO: 24747 - protein, 32 aa, Artificial Sequence
  Quasi-synthetic sequence derived from human genome
KIQRFHARSLWTNHKRYGYKKHSYRLVKKLKL

SEQ ID NO: 24748 - protein, 32 aa, Artificial Sequence
  Quasi-synthetic sequence derived from human genome
MRARRGLLRLPRRSLLAALFFFSLSSSLLYFV

SEQ ID NO: 24749 - protein, 32 aa, Artificial Sequence
  Quasi-synthetic sequence derived from human genome
LYHARLWLHVLPTLPGTLCLRIFRWGPRRRRQ

SEQ ID NO: 24750 - protein, 32 aa, Artificial Sequence
  Quasi-synthetic sequence derived from human genome
LRRNFMNIRPVKLKNLILLVKHWYRQVAAQNK

SEQ ID NO: 24751 - protein, 32 aa, Artificial Sequence
  Quasi-synthetic sequence derived from human genome
RLCIRKFFPKKKCFVFDRPVHRRKLAQLEKLQ

SEQ ID NO: 24752 - protein, 32 aa, Artificial Sequence
  Quasi-synthetic sequence derived from human genome
PWMIVLFLLLVLVVIVVCSIRKSSRTLKKGPR

SEQ ID NO: 24753 - protein, 32 aa, Artificial Sequence
  Quasi-synthetic sequence derived from human genome
SIFCIQYNIRSFMNVKHWPWMKLFFKIKPLLK

SEQ ID NO: 24754 - protein, 32 aa, Artificial Sequence
  Quasi-synthetic sequence derived from human genome
WKGFQTRKRLKKLPSAVIALQRSFRSKRSKML

SEQ ID NO: 24755 - protein, 32 aa, Artificial Sequence
  Quasi-synthetic sequence derived from human genome
LLRKINQVLLFLLIVTLCVILYKKVHKGTVPK

SEQ ID NO: 24756 - protein, 32 aa, Artificial Sequence
  Quasi-synthetic sequence derived from human genome
GLTLLIPYLLGRKRRWSKCKIRVFVGGQINRM

SEQ ID NO: 24757 - protein, 32 aa, Artificial Sequence
  Quasi-synthetic sequence derived from human genome
LKRIYGKYLRAESFRKALIYQKKYLLLLLGGF

SEQ ID NO: 24758 - protein, 32 aa, Artificial Sequence
  Quasi-synthetic sequence derived from human genome
WVKFIIGYLFPLLTMSICYLCLIFKVKKRSIL

SEQ ID NO: 24759 - protein, 32 aa, Artificial Sequence
  Quasi-synthetic sequence derived from human genome
LLFLILGVLSLLLLVTGAFGFHLWRRQWRPRR

SEQ ID NO: 24760 - protein, 32 aa, Artificial Sequence
  Quasi-synthetic sequence derived from human genome
IKIIEVKNKKLVELLRRKVRLAQPYVGVFLKR

SEQ ID NO: 24761 - protein, 32 aa, Artificial Sequence
  Quasi-synthetic sequence derived from human genome
MRAWRPLVRPSLQCVKLGRATARWWWVVKVKP

SEQ ID NO: 24762 - protein, 32 aa, Artificial Sequence
  Quasi-synthetic sequence derived from human genome
RRKKRLRHRVPPRKPEPLVKLHRTALHWACLK

SEQ ID NO: 24763 - protein, 32 aa, Artificial Sequence
  Quasi-synthetic sequence derived from human genome
TLLQRIAMLWGSGKCKALTKFKFVFFLRLSRA

SEQ ID NO: 24764 - protein, 32 aa, Artificial Sequence
  Quasi-synthetic sequence derived from human genome
RLAHRLLVLLLMCFLGFAIFAMIILLPFRLKL

SEQ ID NO: 24765 - protein, 32 aa, Artificial Sequence
  Quasi-synthetic sequence derived from human genome
LRAAKWLHFPQLALRRRLGQLSCMSRPALKLR

SEQ ID NO: 24766 - protein, 32 aa, Artificial Sequence
  Quasi-synthetic sequence derived from human genome
PLLKSFLQERLGIHLIRRKIVKPKHHVLMSRK

SEQ ID NO: 24767 - protein, 32 aa, Artificial Sequence
  Quasi-synthetic sequence derived from human genome
KLQRNRLAKTKKPFKIIVTIIITFFLCWCPYH

SEQ ID NO: 24768 - protein, 32 aa, Artificial Sequence
  Quasi-synthetic sequence derived from human genome
RKQKTINRFLMRKRLLFPALVTLLISTLTFPP

SEQ ID NO: 24769 - protein, 32 aa, Artificial Sequence
  Quasi-synthetic sequence derived from human genome
KWKKHRQIVKPGFNISILKIFITMMSKSVRMM

SEQ ID NO: 24770 - protein, 32 aa, Artificial Sequence
  Quasi-synthetic sequence derived from human genome
RILSKYHRFISFTLYLIGFCMFVLSLVKKHYR

SEQ ID NO: 24771 - protein, 32 aa, Artificial Sequence
  Quasi-synthetic sequence derived from human genome
LFALPFGRTAKPAHIAKVKMKFRFLGKLMAKA

SEQ ID NO: 24772 - protein, 32 aa, Artificial Sequence
  Quasi-synthetic sequence derived from human genome
YLSLPKTPKMLKMSKGLDARSKRWLKIIWRRH

SEQ ID NO: 24773 - protein, 32 aa, Artificial Sequence
  Quasi-synthetic sequence derived from human genome
VGILSILLFMLVIVWQSVFNKRKSRVRHYLVK

SEQ ID NO: 24774 - protein, 32 aa, Artificial Sequence
  Quasi-synthetic sequence derived from human genome
LGVGILVGCLCLLLAVYFIARKIRKKRLENRK

SEQ ID NO: 24775 - protein, 32 aa, Artificial Sequence
  Quasi-synthetic sequence derived from human genome
FIINGIEKVIRMLIMPRRNFPIAMIRPKWKTR

SEQ ID NO: 24776 - protein, 32 aa, Artificial Sequence
  Quasi-synthetic sequence derived from human genome
LQKVCYLPLNTFLLKPIQRLLHYRLLLRRLCG

SEQ ID NO: 24777 - protein, 32 aa, Artificial Sequence
  Quasi-synthetic sequence derived from human genome
LLRRLPKLRKRMRKMCLTFMKESPLPRLVEGL

SEQ ID NO: 24778 - protein, 32 aa, Artificial Sequence
  Quasi-synthetic sequence derived from human genome
LRAFCGILYMKPRMKIFLRQKKVTTQMIAKSL

SEQ ID NO: 24779 - protein, 32 aa, Artificial Sequence
  Quasi-synthetic sequence derived from human genome
RKKFMITPKLIRMVTVMQAHVRGWLERKRLQR

SEQ ID NO: 24780 - protein, 32 aa, Artificial Sequence
  Quasi-synthetic sequence derived from human genome
IIVLAILLFLAAMLFVLMNWYYRTVHKRKLKA

SEQ ID NO: 24781 - protein, 32 aa, Artificial Sequence
  Quasi-synthetic sequence derived from human genome
RRIRSLQRSVQVLRAIVVMYVICWLPYHARRL

SEQ ID NO: 24782 - protein, 32 aa, Artificial Sequence
  Quasi-synthetic sequence derived from human genome
FRLVQASGQKAPRPAARRKARRLLKTVLMILL

SEQ ID NO: 24783 - protein, 32 aa, Artificial Sequence
  Quasi-synthetic sequence derived from human genome
YRRRCCRLCIWLLQTLVHLLQLGQVWRYLRAL

SEQ ID NO: 24784 - protein, 32 aa, Artificial Sequence
  Quasi-synthetic sequence derived from human genome
RAGRPGLGAGLRLPRLLSPPLRPRLLLLLLLL

SEQ ID NO: 24785 - protein, 32 aa, Artificial Sequence
  Quasi-synthetic sequence derived from human genome
LRKVLFATALGTVALALAAHQLKRRRRRKKQV

SEQ ID NO: 24786 - protein, 32 aa, Artificial Sequence
  Quasi-synthetic sequence derived from human genome
TQFRLFKFCTCLATVFSFLKRLICRSGRGRKL

SEQ ID NO: 24787 - protein, 32 aa, Artificial Sequence
  Quasi-synthetic sequence derived from human genome
YVYINYLFYSRGPRRQPRRHRRPRRVIARYRY

SEQ ID NO: 24788 - protein, 32 aa, Artificial Sequence
  Quasi-synthetic sequence derived from human genome
YMLFLLVLVFFLMGLVGFMICHVLKKKGYRCR

SEQ ID NO: 24789 - protein, 32 aa, Artificial Sequence
  Quasi-synthetic sequence derived from human genome
LVPAAALRRKRKALWAHLFSSLRGYLKSLPRV

SEQ ID NO: 24790 - protein, 32 aa, Artificial Sequence
  Quasi-synthetic sequence derived from human genome
VKFPLPIYKSKKGWTAYKLQLFKMFPIILAIL

SEQ ID NO: 24791 - protein, 32 aa, Artificial Sequence
  Quasi-synthetic sequence derived from human genome
WLRHRATQSGQRRWRHALHRRLLNRRLLLAVT

SEQ ID NO: 24792 - protein, 32 aa, Artificial Sequence
  Quasi-synthetic sequence derived from human genome
MRTQCLLGLRTFVAFAAKLWSFFIYLLRRQIR

SEQ ID NO: 24793 - protein, 32 aa, Artificial Sequence
  Quasi-synthetic sequence derived from human genome
LKEVTLFVKRLRRKTYLSNMAKTMRMVLKSKR

SEQ ID NO: 24794 - protein, 32 aa, Artificial Sequence
  Quasi-synthetic sequence derived from human genome
FKRAFVRILGCQCRGRGRRRRRRRRRLGGCAY

SEQ ID NO: 24795 - protein, 32 aa, Artificial Sequence
  Quasi-synthetic sequence derived from human genome
IRILAVITIQAGVRGYLARRRIRLWHRGAMVI

SEQ ID NO: 24796 - protein, 32 aa, Artificial Sequence
  Quasi-synthetic sequence derived from human genome
GLIFAGLAFIVGLLILLSRRFRCGGNKKRRQI

SEQ ID NO: 24797 - protein, 32 aa, Artificial Sequence
  Quasi-synthetic sequence derived from human genome
VLKTLTKPVTLSRSKINKTKVLKMIFVHLIIF

SEQ ID NO: 24798 - protein, 32 aa, Artificial Sequence
  Quasi-synthetic sequence derived from human genome
FLQRLLLVHGRWSYVRICKFLRYFFYKSMASM

SEQ ID NO: 24799 - protein, 32 aa, Artificial Sequence
  Quasi-synthetic sequence derived from human genome
ILVTILCLLAAGFVVYLKRKTLIRLLFTNKKT

SEQ ID NO: 24800 - protein, 32 aa, Artificial Sequence
  Quasi-synthetic sequence derived from human genome
LASCTRCLNKIMKTRVCRRLRRANRVLRARCR

SEQ ID NO: 24801 - protein, 32 aa, Artificial Sequence
  Quasi-synthetic sequence derived from human genome
LLVCLACLAKCVRFSRCVLLNYWKVLPKSFLR

SEQ ID NO: 24802 - protein, 32 aa, Artificial Sequence
  Quasi-synthetic sequence derived from human genome
MKRKKRVHFHGFMLDVHKRIHRLKQSLPKRKP

SEQ ID NO: 24803 - protein, 32 aa, Artificial Sequence
  Quasi-synthetic sequence derived from human genome
FRLTRWRTRYKTIRINLGLWAASFILALPVWV

SEQ ID NO: 24804 - protein, 32 aa, Artificial Sequence
  Quasi-synthetic sequence derived from human genome
PRRGRLARCWARCRDWRRMALVSALLLMLFCV

SEQ ID NO: 24805 - protein, 32 aa, Artificial Sequence
  Quasi-synthetic sequence derived from human genome
FLRRPGAPASWIWWRMLRQVLRRGLQSFCHRL

SEQ ID NO: 24806 - protein, 32 aa, Artificial Sequence
  Quasi-synthetic sequence derived from human genome
RLILKAFLLKFVNAYSPIFYVAFFKGRFVGRP

SEQ ID NO: 24807 - protein, 32 aa, Artificial Sequence
  Quasi-synthetic sequence derived from human genome
MKVLQRNCAAYLKLRNWQWWRLFTKVKPLLQV

SEQ ID NO: 24808 - protein, 32 aa, Artificial Sequence
  Quasi-synthetic sequence derived from human genome
RYVKIKRNWRKPRGIDNRVRRRFKGQILMPNI

SEQ ID NO: 24809 - protein, 32 aa, Artificial Sequence
  Quasi-synthetic sequence derived from human genome
RFRIYKRKVLILTLVVAACGFVLWSSNGRQRK

SEQ ID NO: 24810 - protein, 32 aa, Artificial Sequence
  Quasi-synthetic sequence derived from human genome
TFYFLKIANFSNSIFLYLKWRVKKVVLVLLLV

SEQ ID NO: 24811 - protein, 32 aa, Artificial Sequence
  Quasi-synthetic sequence derived from human genome
MEFIYIYMNFFFFFSVGRKFKKFNKVRVVRAL

SEQ ID NO: 24812 - protein, 32 aa, Artificial Sequence
  Quasi-synthetic sequence derived from human genome
LWRRNLWIFVSKFTEFDARKLHKLYKMAHKKR

SEQ ID NO: 24813 - protein, 32 aa, Artificial Sequence
  Quasi-synthetic sequence derived from human genome
CPKYFMKLVNLYKGAVLYLLRGRKTFLIPVLF

SEQ ID NO: 24814 - protein, 32 aa, Artificial Sequence
  Quasi-synthetic sequence derived from human genome
VIIIAVCCASLVFLTVLVIICYKAIKRKPLRK

SEQ ID NO: 24815 - protein, 32 aa, Artificial Sequence
  Quasi-synthetic sequence derived from human genome
WRQQICAIARVRLLKLKHERKALLALLLILMA

SEQ ID NO: 24816 - protein, 32 aa, Artificial Sequence
  Quasi-synthetic sequence derived from human genome
KFLLLYALLKLSLIRGKSLLFVNTLERSYRLR

SEQ ID NO: 24817 - protein, 32 aa, Artificial Sequence
  Quasi-synthetic sequence derived from human genome
SIFYLLKIANFSNLIFLHLKRRVKSVILVMLL

SEQ ID NO: 24818 - protein, 32 aa, Artificial Sequence
  Quasi-synthetic sequence derived from human genome
SIFYLLKIANFSNFIFLHLKRRVKSVILVMLL

SEQ ID NO: 24819 - protein, 32 aa, Artificial Sequence
  Quasi-synthetic sequence derived from human genome
VPFTFKSFLFGHSMEIRPWKRKGRTLFRRLLF

SEQ ID NO: 24820 - protein, 32 aa, Artificial Sequence
  Quasi-synthetic sequence derived from human genome
RRLLFKDRHFTCSKIIGRRFACFAQRLSHRRK

SEQ ID NO: 24821 - protein, 32 aa, Artificial Sequence
  Quasi-synthetic sequence derived from human genome
KLVSPKWKNFKGLKLQWRDKIRLNNAIWRAWY

SEQ ID NO: 24822 - protein, 32 aa, Artificial Sequence
  Quasi-synthetic sequence derived from human genome
KVMLKSIKTRLGRRVPAAPPALRRNLLLQAWK

SEQ ID NO: 24823 - protein, 32 aa, Artificial Sequence
  Quasi-synthetic sequence derived from human genome
WRVIGYHVVVWMMAGIPLLLFRWKPLWGVRLR

SEQ ID NO: 24824 - protein, 32 aa, Artificial Sequence
  Quasi-synthetic sequence derived from human genome
RRRRARLRFMKQKFNIVCLKISGFTTCCCFQI

SEQ ID NO: 24825 - protein, 32 aa, Artificial Sequence
  Quasi-synthetic sequence derived from human genome
KRVALKKMPNVFQNLVSCKRVFRELKMLCFFK

SEQ ID NO: 24826 - protein, 32 aa, Artificial Sequence
  Quasi-synthetic sequence derived from human genome
LSRILKSPEIQRALRAPRKKIHRRVLKKNPLK

SEQ ID NO: 24827 - protein, 32 aa, Artificial Sequence
  Quasi-synthetic sequence derived from human genome
LRNTLKYAKKNVRAFWKLRANPRLANATKRLL

SEQ ID NO: 24828 - protein, 32 aa, Artificial Sequence
  Quasi-synthetic sequence derived from human genome
RMWGRLVGLVYILPAAYFWRKGWLSRGMKGRV

SEQ ID NO: 24829 - protein, 32 aa, Artificial Sequence
  Quasi-synthetic sequence derived from human genome
FLILYFSHCMIKVFLSSLKFHIRRFIFLFFIL

SEQ ID NO: 24830 - protein, 32 aa, Artificial Sequence
  Quasi-synthetic sequence derived from human genome
RPRLRLGERGLMEPLLPPKRRLLPRVRLLPLL

SEQ ID NO: 24831 - protein, 32 aa, Artificial Sequence
  Quasi-synthetic sequence derived from human genome
TSRIVLWGFRWLIFRIMLGAGLIKIRGDRCWR

SEQ ID NO: 24832 - protein, 32 aa, Artificial Sequence
  Quasi-synthetic sequence derived from human genome
FILRRKPVEQKKIFTIQGCYPVIRCLLRRRGW

SEQ ID NO: 24833 - protein, 32 aa, Artificial Sequence
  Quasi-synthetic sequence derived from human genome
MRLVVSCISSFLILSLLLFMVHRLRQRRRERI

SEQ ID NO: 24834 - protein, 32 aa, Artificial Sequence
  Quasi-synthetic sequence derived from human genome
RKRDKLWGVCVSILALLPRVLRLMLQSLRVNR

SEQ ID NO: 24835 - protein, 32 aa, Artificial Sequence
  Quasi-synthetic sequence derived from human genome
LSIFYLLKIANFSNLIFLHLKRRVKSVVLVIL

SEQ ID NO: 24836 - protein, 32 aa, Artificial Sequence
  Quasi-synthetic sequence derived from human genome
WGVILFVYLVIRALRLWRTAKLQVTLKKYSVH

SEQ ID NO: 24837 - protein, 32 aa, Artificial Sequence
  Quasi-synthetic sequence derived from human genome
RRLRKNLKSLIIVHPSWFIRTLLAVTRPFISS

SEQ ID NO: 24838 - protein, 32 aa, Artificial Sequence
  Quasi-synthetic sequence derived from human genome
IKRRKTKPVLSIRMKKLTERTSVRILFFKNGM

SEQ ID NO: 24839 - protein, 32 aa, Artificial Sequence
  Quasi-synthetic sequence derived from human genome
LDLLRQKLKKVFQQHYTNKIRALRNRLIVLLL

SEQ ID NO: 24840 - protein, 32 aa, Artificial Sequence
  Quasi-synthetic sequence derived from human genome
LKEHRRVFQAMWLSFLKHKLPLSLYKKVLLIV

SEQ ID NO: 24841 - protein, 32 aa, Artificial Sequence
  Quasi-synthetic sequence derived from human genome
RRSRWPFSKARSFCKTHASLFKKILLGLLCLA

SEQ ID NO: 24842 - protein, 32 aa, Artificial Sequence
  Quasi-synthetic sequence derived from human genome
KLRQSCVMVQKHMRGWLQRKKFLRERRAALII

SEQ ID NO: 24843 - protein, 32 aa, Artificial Sequence
  Quasi-synthetic sequence derived from human genome
RFSFRLRPVFNASVQFLHCQLSRCRRLRGVRR

SEQ ID NO: 24844 - protein, 32 aa, Artificial Sequence
  Quasi-synthetic sequence derived from human genome
RLLATLLHNLISYMLLMKVNKNDIRKKVRRLM

SEQ ID NO: 24845 - protein, 32 aa, Artificial Sequence
  Quasi-synthetic sequence derived from human genome
FRDFFFSRGRFSSGFRRTLILSSGFRLVKKKL

SEQ ID NO: 24846 - protein, 32 aa, Artificial Sequence
  Quasi-synthetic sequence derived from human genome
LTLLVGNHTQRTAILGLWKIARKWMRRKMGKW

SEQ ID NO: 24847 - protein, 32 aa, Artificial Sequence
  Quasi-synthetic sequence derived from human genome
RFLGVLYPLSSKRWRRRRYAVAACAGTWLLLL

SEQ ID NO: 24848 - protein, 32 aa, Artificial Sequence
  Quasi-synthetic sequence derived from human genome
MCKNMRVLSRTSKFRRLRELLRRRKKRRQGRC

SEQ ID NO: 24849 - protein, 32 aa, Artificial Sequence
  Quasi-synthetic sequence derived from human genome
FFFFPICVVFAWVADRRLLFYKYVYKRYRAGK

SEQ ID NO: 24850 - protein, 32 aa, Artificial Sequence
  Quasi-synthetic sequence derived from human genome
TFFSGLIILLIFRLIWRSVKKWQIIKGTGIIL

SEQ ID NO: 24851 - protein, 32 aa, Artificial Sequence
  Quasi-synthetic sequence derived from human genome
FFHKKERRMRFYIRRMVKTQAFYWTVLSLVAL

SEQ ID NO: 24852 - protein, 32 aa, Artificial Sequence
  Quasi-synthetic sequence derived from human genome
HQQYRLARQRIIQFQARCRAYLVRKAFRHRLW

SEQ ID NO: 24853 - protein, 32 aa, Artificial Sequence
  Quasi-synthetic sequence derived from human genome
LLLPKGVVLKLKPVADRFPKKAWRQKRSSVLK

SEQ ID NO: 24854 - protein, 32 aa, Artificial Sequence
  Quasi-synthetic sequence derived from human genome
KILIHRILTLFPNAIARKLLLMLTFILIFWII

SEQ ID NO: 24855 - protein, 32 aa, Artificial Sequence
  Quasi-synthetic sequence derived from human genome
FWRVLLLIFVIALLSLGIAYYRRTLRLGSFAR

SEQ ID NO: 24856 - protein, 32 aa, Artificial Sequence
  Quasi-synthetic sequence derived from human genome
KKINKLFCFNFLVQCFRGKSKPSKCQIRKKVK

SEQ ID NO: 24857 - protein, 32 aa, Artificial Sequence
  Quasi-synthetic sequence derived from human genome
WRLPPFLIIHLKRFQFVNDQWIKSQKIVRFLR

SEQ ID NO: 24858 - protein, 32 aa, Artificial Sequence
  Quasi-synthetic sequence derived from human genome
KALKQMGLRKLILRLHKLMDGSLQRARIALVK

SEQ ID NO: 24859 - protein, 32 aa, Artificial Sequence
  Quasi-synthetic sequence derived from human genome
MKVIQRNCAAYLKLRNWQWWRLFTKVKPLLQV

SEQ ID NO: 24860 - protein, 32 aa, Artificial Sequence
  Quasi-synthetic sequence derived from human genome
VRKKLEQHIRRRLIQRRWGLPRRIHESLSLLR

SEQ ID NO: 24861 - protein, 32 aa, Artificial Sequence
  Quasi-synthetic sequence derived from human genome
FWKTWIFWKTWIFRKTYIGWKTWIFSGRCGLT

SEQ ID NO: 24862 - protein, 32 aa, Artificial Sequence
  Quasi-synthetic sequence derived from human genome
PPFLRWAGYRPGPVRRRGKVELIKFVRVQWRR

SEQ ID NO: 24863 - protein, 32 aa, Artificial Sequence
  Quasi-synthetic sequence derived from human genome
VFILFLPVVFYLSSFLHSEQKKRKLILPKRLK

SEQ ID NO: 24864 - protein, 32 aa, Artificial Sequence
  Quasi-synthetic sequence derived from human genome
YKIRHTKKKTFKCMKCSKSFFMLSHLIQHKRI

SEQ ID NO: 24865 - protein, 32 aa, Artificial Sequence
  Quasi-synthetic sequence derived from human genome
RFLLKCGFITIPWRCIKKCSPLMPRAAVPRFV

SEQ ID NO: 24866 - protein, 32 aa, Artificial Sequence
  Quasi-synthetic sequence derived from human genome
LLAKKRVVRMLLVIVVLFFLCWLPVYSANTWR

SEQ ID NO: 24867 - protein, 32 aa, Artificial Sequence
  Quasi-synthetic sequence derived from human genome
ALFTIQWNIRAFNAVKNWSWMKLFFKMKPLLR

SEQ ID NO: 24868 - protein, 32 aa, Artificial Sequence
  Quasi-synthetic sequence derived from human genome
IHSSAISVVKILRVLRVLRPLRAINRAKGLKH

SEQ ID NO: 24869 - protein, 32 aa, Artificial Sequence
  Quasi-synthetic sequence derived from human genome
SQCGKYLKVFYKFINLNRYKIRHTRKKPFKCK

SEQ ID NO: 24870 - protein, 32 aa, Artificial Sequence
  Quasi-synthetic sequence derived from human genome
KTIRMWLCKRRHKPRIDGLVKVGTLKKRLDKF

SEQ ID NO: 24871 - protein, 32 aa, Artificial Sequence
  Quasi-synthetic sequence derived from human genome
HCKAFKIRKHYLHLRATVVSIQRRYRKLTAVR

SEQ ID NO: 24872 - protein, 32 aa, Artificial Sequence
  Quasi-synthetic sequence derived from human genome
LFYLAVGIMFLVNTVLWVTIRKELKRKKKWNL

SEQ ID NO: 24873 - protein, 32 aa, Artificial Sequence
  Quasi-synthetic sequence derived from human genome
RVRGWLARTHYKRSMHAIIYLQCCFRRMMAKR

SEQ ID NO: 24874 - protein, 32 aa, Artificial Sequence
  Quasi-synthetic sequence derived from human genome
LWVLMCALAMWFPRRYLPKIFRNDRGRFKVVV

SEQ ID NO: 24875 - protein, 32 aa, Artificial Sequence
  Quasi-synthetic sequence derived from human genome
LRNRLIRKRFLCLGWGLPALVVAISVGFTKAK

SEQ ID NO: 24876 - protein, 32 aa, Artificial Sequence
  Quasi-synthetic sequence derived from human genome
NLGWLCLLLLPIPLIVWVKRKEVQKTCRKHRK

SEQ ID NO: 24877 - protein, 32 aa, Artificial Sequence
  Quasi-synthetic sequence derived from human genome
RRRFVQQKRAAITLQHYFRTWQTRKQFLLYRK

SEQ ID NO: 24878 - protein, 32 aa, Artificial Sequence
  Quasi-synthetic sequence derived from human genome
YMKWRRKSAYWKALKVFKLPVEFLLLLTVPVV

SEQ ID NO: 24879 - protein, 32 aa, Artificial Sequence
  Quasi-synthetic sequence derived from human genome
KKLNKKRLKKRKGYQGAMVEKKILMKVHSRFI

SEQ ID NO: 24880 - protein, 32 aa, Artificial Sequence
  Quasi-synthetic sequence derived from human genome
KRILFLYNDLLKKRAAFTKLRRAAILRRERQQ

SEQ ID NO: 24881 - protein, 32 aa, Artificial Sequence
  Quasi-synthetic sequence derived from human genome
KILCHKFMRFMMMRAENFFILRRKPVEQKKIF

SEQ ID NO: 24882 - protein, 32 aa, Artificial Sequence
  Quasi-synthetic sequence derived from human genome
MRMGKKKRAMKGKKPSFMVIRFPGRRGYGRLR

SEQ ID NO: 24883 - protein, 32 aa, Artificial Sequence
  Quasi-synthetic sequence derived from human genome
ALARFLLKRGLRNKRIGHFLFWFLRSEIAQSR

SEQ ID NO: 24884 - protein, 32 aa, Artificial Sequence
  Quasi-synthetic sequence derived from human genome
KRNNGQLMKTIIRKINKMKTLKRKKLLNQILS

SEQ ID NO: 24885 - protein, 32 aa, Artificial Sequence
  Quasi-synthetic sequence derived from human genome
LLRLWRVARIINGIIISVKTRSERQLLRLKQM

SEQ ID NO: 24886 - protein, 32 aa, Artificial Sequence
  Quasi-synthetic sequence derived from human genome
WLRRGVLLVRAPPACLQVLRDAWRRRALRPPR

SEQ ID NO: 24887 - protein, 32 aa, Artificial Sequence
  Quasi-synthetic sequence derived from human genome
RRLLILILKIGRRWTELIRTMESRVLLRTFCL

SEQ ID NO: 24888 - protein, 32 aa, Artificial Sequence
  Quasi-synthetic sequence derived from human genome
AMRRQMRRHASRRGPSRRRLGRLWNRLFHRPR

SEQ ID NO: 24889 - protein, 32 aa, Artificial Sequence
  Quasi-synthetic sequence derived from human genome
KDLLRKALILMNSKHTHLILCVLRFMRRMICL

SEQ ID NO: 24890 - protein, 32 aa, Artificial Sequence
  Quasi-synthetic sequence derived from human genome
IFCIQYNIRAFMNVKHWPWMKLYFKIKPLLKS

SEQ ID NO: 24891 - protein, 32 aa, Artificial Sequence
  Quasi-synthetic sequence derived from human genome
IHNRYKPLRRRVIWLIGQWISVKFKSDLRPML

SEQ ID NO: 24892 - protein, 32 aa, Artificial Sequence
  Quasi-synthetic sequence derived from human genome
RRLRKNLKSFIIVHPSWFIRTILAVTRPFISS

SEQ ID NO: 24893 - protein, 32 aa, Artificial Sequence
  Quasi-synthetic sequence derived from human genome
GIAGALFILGALYSIKVMNRRRRNGFKRHKRK

SEQ ID NO: 24894 - protein, 32 aa, Artificial Sequence
  Quasi-synthetic sequence derived from human genome
RSVFYLLMKMFVTSSHLQLKSLTKLLIMKILR

SEQ ID NO: 24895 - protein, 32 aa, Artificial Sequence
  Quasi-synthetic sequence derived from human genome
LRRIIQNRILLVILGIIVVITILMAITFSVRR

SEQ ID NO: 24896 - protein, 32 aa, Artificial Sequence
  Quasi-synthetic sequence derived from human genome
VRIMAKDLVRTRRYVRKFVLMRANIQAVSLKI

SEQ ID NO: 24897 - protein, 32 aa, Artificial Sequence
  Quasi-synthetic sequence derived from human genome
GFFAVLFFLWRSFRSVRSRLYVGREKKLALML

SEQ ID NO: 24898 - protein, 32 aa, Artificial Sequence
  Quasi-synthetic sequence derived from human genome
IIFHTKKKLSVCANPKQTWVKYIVRLLSKKVK

SEQ ID NO: 24899 - protein, 32 aa, Artificial Sequence
  Quasi-synthetic sequence derived from human genome
MKWLLLLGLVALSECIMYKVPLIRKKSLRRTL

SEQ ID NO: 24900 - protein, 32 aa, Artificial Sequence
  Quasi-synthetic sequence derived from human genome
HISVMGGMIALLLSILCLVMILYTRRRWCKRR

SEQ ID NO: 24901 - protein, 32 aa, Artificial Sequence
  Quasi-synthetic sequence derived from human genome
KSRKKPEILKVCQISRLYRLLVVTIIHLHFLK

SEQ ID NO: 24902 - protein, 32 aa, Artificial Sequence
  Quasi-synthetic sequence derived from human genome
IGSALAAIMLLLLVFLVACFINRKCQKQRKKK

SEQ ID NO: 24903 - protein, 32 aa, Artificial Sequence
  Quasi-synthetic sequence derived from human genome
LLTPLLNLLIYSLRNSEMKRALMKLWRRRVVL

SEQ ID NO: 24904 - protein, 32 aa, Artificial Sequence
  Quasi-synthetic sequence derived from human genome
FLVCFIPYFQTLLFVFVLRCMELKCGKKRMRK

SEQ ID NO: 24905 - protein, 32 aa, Artificial Sequence
  Quasi-synthetic sequence derived from human genome
AFIFLIIKSYRKYRRERLPISPGPLLRWVPLL

SEQ ID NO: 24906 - protein, 32 aa, Artificial Sequence
  Quasi-synthetic sequence derived from human genome
RWFRRRRNQDRPSLLKKFREASWRFTFYLIAF

SEQ ID NO: 24907 - protein, 32 aa, Artificial Sequence
  Quasi-synthetic sequence derived from human genome
RYLRRRLVPRYRLQLLGIACMVICTRFISKEI

SEQ ID NO: 24908 - protein, 32 aa, Artificial Sequence
  Quasi-synthetic sequence derived from human genome
LCRFRKLHCTRNFIHMNLFVSFMLRAISVFIK

SEQ ID NO: 24909 - protein, 32 aa, Artificial Sequence
  Quasi-synthetic sequence derived from human genome
RAVKILKKKKLRRIPNGEANVKKEIQLLRRLR

SEQ ID NO: 24910 - protein, 32 aa, Artificial Sequence
  Quasi-synthetic sequence derived from human genome
RKLSGLLILLVLFAIGYFLQRIICPSPRRYPR

SEQ ID NO: 24911 - protein, 32 aa, Artificial Sequence
  Quasi-synthetic sequence derived from human genome
VRRKHMWALVWTCSGLLLLSCSICLFWWAKRR

SEQ ID NO: 24912 - protein, 32 aa, Artificial Sequence
  Quasi-synthetic sequence derived from human genome
KTFRIKRFLAKKQKQNRPIPQWIRMKTGNKIR

SEQ ID NO: 24913 - protein, 32 aa, Artificial Sequence
  Quasi-synthetic sequence derived from human genome
PPIRRRSKFANLGRIFKPWKWRKKKSEKFKHT

SEQ ID NO: 24914 - protein, 32 aa, Artificial Sequence
  Quasi-synthetic sequence derived from human genome
RMRGLLARRLRNHMAVAFVLSLGVAALYKFRV

SEQ ID NO: 24915 - protein, 32 aa, Artificial Sequence
  Quasi-synthetic sequence derived from human genome
KFFKRKPKVLGVVRILIALMSLSMGIIMMCVA

SEQ ID NO: 24916 - protein, 32 aa, Artificial Sequence
  Quasi-synthetic sequence derived from human genome
LLIALLSINGFAYFIRRRINKIQLIKGPNRIL

SEQ ID NO: 24917 - protein, 32 aa, Artificial Sequence
  Quasi-synthetic sequence derived from human genome
RLPIRMAKGLGNISAKYRWFAVFYLIIFFFLI

SEQ ID NO: 24918 - protein, 32 aa, Artificial Sequence
  Quasi-synthetic sequence derived from human genome
LRLRVHGPFFPRILRRRKGKREFGKTITHIVA

SEQ ID NO: 24919 - protein, 32 aa, Artificial Sequence
  Quasi-synthetic sequence derived from human genome
RLKMFLTPHMCVMASLICSRQLFGWLFRRVRF

SEQ ID NO: 24920 - protein, 32 aa, Artificial Sequence
  Quasi-synthetic sequence derived from human genome
KQRKDLLHLCCKKLKILGMPFRNIRSILKMVN

SEQ ID NO: 24921 - protein, 32 aa, Artificial Sequence
  Quasi-synthetic sequence derived from human genome
LWLVLRYRHKRLSYQSVFLFLCLFWASLRTVL

SEQ ID NO: 24922 - protein, 32 aa, Artificial Sequence
  Quasi-synthetic sequence derived from human genome
RGGRGRRLGLALGLLLALVLAPRVLRAKPTVR

SEQ ID NO: 24923 - protein, 32 aa, Artificial Sequence
  Quasi-synthetic sequence derived from human genome
TKPYIRKKAVLIMYKVFLKYPESLRPAFPRLK

SEQ ID NO: 24924 - protein, 32 aa, Artificial Sequence
  Quasi-synthetic sequence derived from human genome
ALLVLLLVALSALFLGRWLVVRLATKWCQRKL

SEQ ID NO: 24925 - protein, 32 aa, Artificial Sequence
  Quasi-synthetic sequence derived from human genome
RRKMPSLGWLRKCYQQIDRRLRKNLKSLIIVH

SEQ ID NO: 24926 - protein, 32 aa, Artificial Sequence
  Quasi-synthetic sequence derived from human genome
RRKHAVAVIWAYWLGLKVRREYRKFFRANAGK

SEQ ID NO: 24927 - protein, 32 aa, Artificial Sequence
  Quasi-synthetic sequence derived from human genome
FLTLKMNISVLVLPLFIFTFLYVQMRKTLRFR

SEQ ID NO: 24928 - protein, 32 aa, Artificial Sequence
  Quasi-synthetic sequence derived from human genome
KALYRRLATVHMSRMINKYKRRRFQKTKNLLT

SEQ ID NO: 24929 - protein, 32 aa, Artificial Sequence
  Quasi-synthetic sequence derived from human genome
RLIFKAFLLKFVNSYTPIFYVAFFKGRFVGRP

SEQ ID NO: 24930 - protein, 32 aa, Artificial Sequence
  Quasi-synthetic sequence derived from human genome
LRKSLKPLLEKRRRARINQSLSQLKGLILPLL

SEQ ID NO: 24931 - protein, 32 aa, Artificial Sequence
  Quasi-synthetic sequence derived from human genome
WAARRQYLRRLHYFQKNVNSIVKIQAFFRARK

SEQ ID NO: 24932 - protein, 32 aa, Artificial Sequence
  Quasi-synthetic sequence derived from human genome
CAKHKLYQFLHLRKAAITIQSSYRRLMVKKKL

SEQ ID NO: 24933 - protein, 32 aa, Artificial Sequence
  Quasi-synthetic sequence derived from human genome
FVVRKTVQRSVAKGSRRCKKRMFKFHQMKHIF

SEQ ID NO: 24934 - protein, 32 aa, Artificial Sequence
  Quasi-synthetic sequence derived from human genome
LRVLRALRILYVMRLARHSLGLQTLGLTARRC

SEQ ID NO: 24935 - protein, 32 aa, Artificial Sequence
  Quasi-synthetic sequence derived from human genome
KAKVIYLMRNPRDVLVSGYFFWKNMKFIKKPK

SEQ ID NO: 24936 - protein, 32 aa, Artificial Sequence
  Quasi-synthetic sequence derived from human genome
VCTGWLVKSPPERKLQRYAWRKRWFVLRRGRM

SEQ ID NO: 24937 - protein, 32 aa, Artificial Sequence
  Quasi-synthetic sequence derived from human genome
LSLLLLLLTFVLPLVVTLFCYCRISRRLRRPP

SEQ ID NO: 24938 - protein, 32 aa, Artificial Sequence
  Quasi-synthetic sequence derived from human genome
LFGFLLLYFPVFILYFKPSVFRCIALRWVRLL

SEQ ID NO: 24939 - protein, 32 aa, Artificial Sequence
  Quasi-synthetic sequence derived from human genome
LYLLSKMWSTVSFPKISVPMRIYIKIKQWILR

SEQ ID NO: 24940 - protein, 32 aa, Artificial Sequence
  Quasi-synthetic sequence derived from human genome
VRKKLEQHIRKRLIQRRWGLPRRIHESLSLLR

SEQ ID NO: 24941 - protein, 32 aa, Artificial Sequence
  Quasi-synthetic sequence derived from human genome
RGVGWRILKVLLWLLAILTGLIAGKFLFHQRL

SEQ ID NO: 24942 - protein, 32 aa, Artificial Sequence
  Quasi-synthetic sequence derived from human genome
PPRLTKPQSVAIKRKRPFVLKKKRGRKRRRIN

SEQ ID NO: 24943 - protein, 32 aa, Artificial Sequence
  Quasi-synthetic sequence derived from human genome
KTLRLRKNTVKFSLYRHFKNTLIFAVLASIVF

SEQ ID NO: 24944 - protein, 32 aa, Artificial Sequence
  Quasi-synthetic sequence derived from human genome
RRAKRKVTRMILIVAALFCLCWMPHHALILCV

SEQ ID NO: 24945 - protein, 32 aa, Artificial Sequence
  Quasi-synthetic sequence derived from human genome
HVLFYLAVGIMFLVNTVLWVTIRKELKRKKKW

SEQ ID NO: 24946 - protein, 32 aa, Artificial Sequence
  Quasi-synthetic sequence derived from human genome
WKIILCLFIIPLVGCGFVSFRKKPVDKHKKLL

SEQ ID NO: 24947 - protein, 32 aa, Artificial Sequence
  Quasi-synthetic sequence derived from human genome
RLAYIAHPKLGKRARARIAKGLRLCRPKAKAK

SEQ ID NO: 24948 - protein, 32 aa, Artificial Sequence
  Quasi-synthetic sequence derived from human genome
KKRQAALIAYATRERAVIKLQSLVRMWRVRWR

SEQ ID NO: 24949 - protein, 32 aa, Artificial Sequence
  Quasi-synthetic sequence derived from human genome
KYASYLSFIKILLKRGGVRVSTKNLIKLFQII

SEQ ID NO: 24950 - protein, 32 aa, Artificial Sequence
  Quasi-synthetic sequence derived from human genome
ASKQLLLWRLPNVLIVQLKRFSFRSFIWRDKI

SEQ ID NO: 24951 - protein, 32 aa, Artificial Sequence
  Quasi-synthetic sequence derived from human genome
RWLRRKLRARRKGGAPVHVRHMYSTRRPLRSM

SEQ ID NO: 24952 - protein, 32 aa, Artificial Sequence
  Quasi-synthetic sequence derived from human genome
WRRRKSLWLALSASWLLLVLLGGFSLLRLALP

SEQ ID NO: 24953 - protein, 32 aa, Artificial Sequence
  Quasi-synthetic sequence derived from human genome
LRTLRAVRVLRPLKLVSGIPSLQIVLKSIMKA

SEQ ID NO: 24954 - protein, 32 aa, Artificial Sequence
  Quasi-synthetic sequence derived from human genome
IFCKKCILRWLARQKTCPCCRKEVKRKKVVHM

SEQ ID NO: 24955 - protein, 32 aa, Artificial Sequence
  Quasi-synthetic sequence derived from human genome
NWSKILLHYKFNNRTSVMLKDRWRTMKKLKLI

SEQ ID NO: 24956 - protein, 32 aa, Artificial Sequence
  Quasi-synthetic sequence derived from human genome
RIRSNSSAANLMAKKRVIRMLIVIVVLFFLCW

SEQ ID NO: 24957 - protein, 32 aa, Artificial Sequence
  Quasi-synthetic sequence derived from human genome
RAVWSMMRYLRASSNRNFLLTMRPFLKRAILV

SEQ ID NO: 24958 - protein, 32 aa, Artificial Sequence
  Quasi-synthetic sequence derived from human genome
KKRIIKLLVSITVTFVLCFTPFHVMLLIRCIL

SEQ ID NO: 24959 - protein, 32 aa, Artificial Sequence
  Quasi-synthetic sequence derived from human genome
MIVWFKYQKYPFWPAVIKSIRRKERKASVLFV

SEQ ID NO: 24960 - protein, 32 aa, Artificial Sequence
  Quasi-synthetic sequence derived from human genome
RASLTFNRGFKAGRNMRRKLFGVLRLKCHSLF

SEQ ID NO: 24961 - protein, 32 aa, Artificial Sequence
  Quasi-synthetic sequence derived from human genome
VRKRFFESIIKEAARCMRRDFVKHLKKKLKRM

SEQ ID NO: 24962 - protein, 32 aa, Artificial Sequence
  Quasi-synthetic sequence derived from human genome
RVRAARLHQRLLHQLRRGPFQRCQLLRLLCYC

SEQ ID NO: 24963 - protein, 32 aa, Artificial Sequence
  Quasi-synthetic sequence derived from human genome
LLPRRRRCFPARAPLLRVALCLLCWTPAAVRA

SEQ ID NO: 24964 - protein, 32 aa, Artificial Sequence
  Quasi-synthetic sequence derived from human genome
LVKNRLISREWVNRAPSIHFLRVLICLRLLMR

SEQ ID NO: 24965 - protein, 32 aa, Artificial Sequence
  Quasi-synthetic sequence derived from human genome
VIAGLVVIFMMLGGTFLYWRGRRIQNKRAMRR

SEQ ID NO: 24966 - protein, 32 aa, Artificial Sequence
  Quasi-synthetic sequence derived from human genome
LRNLTFLLPVYRWGKGLTLLRIQIFKMFPIML

SEQ ID NO: 24967 - protein, 32 aa, Artificial Sequence
  Quasi-synthetic sequence derived from human genome
TLIRSRLRKVPRFKTMFSNLIHYPRYSLYWSK

SEQ ID NO: 24968 - protein, 32 aa, Artificial Sequence
  Quasi-synthetic sequence derived from human genome
LVLVAVGAGLLLLGLIILLLWKCGFFKRARTR

SEQ ID NO: 24969 - protein, 32 aa, Artificial Sequence
  Quasi-synthetic sequence derived from human genome
VRIRSRRLGIYQRCWLVFKKASSKGPKRLEKF

SEQ ID NO: 24970 - protein, 32 aa, Artificial Sequence
  Quasi-synthetic sequence derived from human genome
KDLLRRVLVLMNSKHTFLALCALRFMRRIIGL

SEQ ID NO: 24971 - protein, 32 aa, Artificial Sequence
  Quasi-synthetic sequence derived from human genome
KKKVLFALCSLLRHFPYAQRQFLKLGGLQVLR

SEQ ID NO: 24972 - protein, 32 aa, Artificial Sequence
  Quasi-synthetic sequence derived from human genome
IAAGVIGGLFILVIVGLTFAVYVRRKSIKKKR

SEQ ID NO: 24973 - protein, 32 aa, Artificial Sequence
  Quasi-synthetic sequence derived from human genome
KRGGKLCLLIRVANLRKSLLIGSHIYGKLLKT

SEQ ID NO: 24974 - protein, 32 aa, Artificial Sequence
  Quasi-synthetic sequence derived from human genome
FWQIWCALFPFLVMLVCYGFIFRVARVKARKV

SEQ ID NO: 24975 - protein, 32 aa, Artificial Sequence
  Quasi-synthetic sequence derived from human genome
VMRRHCRTLRQRSRRPKMRPARRRGGRRQLLL

SEQ ID NO: 24976 - protein, 32 aa, Artificial Sequence
  Quasi-synthetic sequence derived from human genome
ITMFATFFFFKLLIKVFLALLTHFYIVKGNRK

SEQ ID NO: 24977 - protein, 32 aa, Artificial Sequence
  Quasi-synthetic sequence derived from human genome
VRHFLLRKKQEKFTSGIIKIQALWRGYSWRKK

SEQ ID NO: 24978 - protein, 32 aa, Artificial Sequence
  Quasi-synthetic sequence derived from human genome
IVRRKAVLALYKFHLIAPNQVQHIHIKFRKAL

SEQ ID NO: 24979 - protein, 32 aa, Artificial Sequence
  Quasi-synthetic sequence derived from human genome
RGRLYRRTLMRYAGLSAVLILRSVSTAVFKRF

SEQ ID NO: 24980 - protein, 32 aa, Artificial Sequence
  Quasi-synthetic sequence derived from human genome
FVLGQFCFLQRLLLVHGRWSYVRICKFLRYFF

SEQ ID NO: 24981 - protein, 32 aa, Artificial Sequence
  Quasi-synthetic sequence derived from human genome
LARCPHCRKVSSIGRRYPRKRCICCFLLGLLL

SEQ ID NO: 24982 - protein, 32 aa, Artificial Sequence
  Quasi-synthetic sequence derived from human genome
IFKAIAHFKRTTFLKKHRMLGRLKYKVTPQMG

SEQ ID NO: 24983 - protein, 32 aa, Artificial Sequence
  Quasi-synthetic sequence derived from human genome
VIIILGCLALFLLLQRKNLRRPPCIKGWIPWI

SEQ ID NO: 24984 - protein, 32 aa, Artificial Sequence
  Quasi-synthetic sequence derived from human genome
LKKHTLIRFLPRPIRQQLLYKRRYIFSVVENL

SEQ ID NO: 24985 - protein, 32 aa, Artificial Sequence
  Quasi-synthetic sequence derived from human genome
LNTLVPYRCFKRRFPGISRSTYYNWRRKALRR

SEQ ID NO: 24986 - protein, 32 aa, Artificial Sequence
  Quasi-synthetic sequence derived from human genome
RFLKRASNNLQHSLRMVLPSRRLALLERRRIL

SEQ ID NO: 24987 - protein, 32 aa, Artificial Sequence
  Quasi-synthetic sequence derived from human genome
HLMKMIRDFSILFYRCRKAGLALSKHYKVYKR

SEQ ID NO: 24988 - protein, 32 aa, Artificial Sequence
  Quasi-synthetic sequence derived from human genome
VRFQTPGRFSWFCKRRRAFWHTPRLPTLPKRV

SEQ ID NO: 24989 - protein, 32 aa, Artificial Sequence
  Quasi-synthetic sequence derived from human genome
KRLRVVYFLARTRLAQRLIMAGTVVWIGILVY

SEQ ID NO: 24990 - protein, 32 aa, Artificial Sequence
  Quasi-synthetic sequence derived from human genome
SLFYTIIIPLLNPFIYSLRNKKVMHALRRVIR

SEQ ID NO: 24991 - protein, 32 aa, Artificial Sequence
  Quasi-synthetic sequence derived from human genome
RRRFCPRPFLVGLVVAICLFYQTLTLRGSRKL

SEQ ID NO: 24992 - protein, 32 aa, Artificial Sequence
  Quasi-synthetic sequence derived from human genome
YRRWMIRKRMREMHRAATFIQSTFRMHRLHMR

SEQ ID NO: 24993 - protein, 32 aa, Artificial Sequence
  Quasi-synthetic sequence derived from human genome
TTRLKSMLRLLLVKKPSVRSLALKLLAFHLTS

SEQ ID NO: 24994 - protein, 32 aa, Artificial Sequence
  Quasi-synthetic sequence derived from human genome
MRKRKISVCQQTWALLCKNFLKKWRMKRESLM

SEQ ID NO: 24995 - protein, 32 aa, Artificial Sequence
  Quasi-synthetic sequence derived from human genome
VAVNILKTFKNSFFNYRKKLASYFMGRKLRPW

SEQ ID NO: 24996 - protein, 32 aa, Artificial Sequence
  Quasi-synthetic sequence derived from human genome
LATLIMFTIFSFFAEQLIALKRKIFPRRRIHK

SEQ ID NO: 24997 - protein, 32 aa, Artificial Sequence
  Quasi-synthetic sequence derived from human genome
LREIRMLKQLKHPNLVNLIEVFRRKRKMHLVF

SEQ ID NO: 24998 - protein, 32 aa, Artificial Sequence
  Quasi-synthetic sequence derived from human genome
RRPPRLRLCARLPDFFLLLLFRGCLIGAVNLK

SEQ ID NO: 24999 - protein, 32 aa, Artificial Sequence
  Quasi-synthetic sequence derived from human genome
KILSPKVKIALRTSGHLLLGVVRIYNRKAKYL

SEQ ID NO: 25000 - protein, 32 aa, Artificial Sequence
  Quasi-synthetic sequence derived from human genome
LMIRRLRGVRLLSGSREKDRNLRRITRLVLVV

SEQ ID NO: 25001 - protein, 33 aa, Artificial Sequence
  Quasi-synthetic sequence derived from human genome
IFKRKKRIKRRALLFLSYILTHFIFLALLLILI

SEQ ID NO: 25002 - protein, 33 aa, Artificial Sequence
  Quasi-synthetic sequence derived from human genome
LKRLVKLHIKRHYHKKFWKLGAVIFFFIIVLVL

SEQ ID NO: 25003 - protein, 33 aa, Artificial Sequence
  Quasi-synthetic sequence derived from human genome
KRFLKHAGKWSLRWFLSPRWILQFRRWARKWSR

SEQ ID NO: 25004 - protein, 33 aa, Artificial Sequence
  Quasi-synthetic sequence derived from human genome
RLLKRLLGPKLRRFLKPQGHPRLLLWFKRGLAL

SEQ ID NO: 25005 - protein, 33 aa, Artificial Sequence
  Quasi-synthetic sequence derived from human genome
FFLFRLLLRFLRLCRSFYITCRRLRCFPQPPRR

SEQ ID NO: 25006 - protein, 33 aa, Artificial Sequence
  Quasi-synthetic sequence derived from human genome
ALLFLLFFLTLRFSVVKRGRKKLLYIFKQPFMR

SEQ ID NO: 25007 - protein, 33 aa, Artificial Sequence
  Quasi-synthetic sequence derived from human genome
RRWRRWNRFNRRRCRAAVKSVTFYWLVIVLVFL

SEQ ID NO: 25008 - protein, 33 aa, Artificial Sequence
  Quasi-synthetic sequence derived from human genome
WLRVRKARPQLILSRRPRRRLGSLRWCGRRRLR

SEQ ID NO: 25009 - protein, 33 aa, Artificial Sequence
  Quasi-synthetic sequence derived from human genome
RWTHLLRLLRLIILLRIFHLFHQKRQLEKLIRR

SEQ ID NO: 25010 - protein, 33 aa, Artificial Sequence
  Quasi-synthetic sequence derived from human genome
RFLKIIRPLRNIFLKKPVFAKTVSIFIWFFLFF

SEQ ID NO: 25011 - protein, 33 aa, Artificial Sequence
  Quasi-synthetic sequence derived from human genome
RFLRLHCGLWVRRKAGYKKKLWKKTPARKKRLR

SEQ ID NO: 25012 - protein, 33 aa, Artificial Sequence
  Quasi-synthetic sequence derived from human genome
LIYWPRFIRHKCKQRFTKITQYLIRIRKLTLKR

SEQ ID NO: 25013 - protein, 33 aa, Artificial Sequence
  Quasi-synthetic sequence derived from human genome
RYWRRWNRFCRRKCRAAVKSNVFYWLVIFLVFL

SEQ ID NO: 25014 - protein, 33 aa, Artificial Sequence
  Quasi-synthetic sequence derived from human genome
KIAGVIAGILLFVIIFLGVVLVMKKRKLAKKRK

SEQ ID NO: 25015 - protein, 33 aa, Artificial Sequence
  Quasi-synthetic sequence derived from human genome
LQKAWRGTLARWRCRRLRAIYTIMRWFRRHKVR

SEQ ID NO: 25016 - protein, 33 aa, Artificial Sequence
  Quasi-synthetic sequence derived from human genome
PLLRKRWFQLGRSMNPRARKKRSRIPLLRKRRF

SEQ ID NO: 25017 - protein, 33 aa, Artificial Sequence
  Quasi-synthetic sequence derived from human genome
KSWRRRSCWRKWKQLSRLQRNMILFLLAFLLFC

SEQ ID NO: 25018 - protein, 33 aa, Artificial Sequence
  Quasi-synthetic sequence derived from human genome
FKRAFLRLLRCQCRRRRRRRPLWRVYGHHWRAS

SEQ ID NO: 25019 - protein, 33 aa, Artificial Sequence
  Quasi-synthetic sequence derived from human genome
ARKQYRKVLYCVVIIQKNYRAFLLRRRFLHLKK

SEQ ID NO: 25020 - protein, 33 aa, Artificial Sequence
  Quasi-synthetic sequence derived from human genome
YKTMKFILWRRFRWAIILFIILFILLLFLAIFI

SEQ ID NO: 25021 - protein, 33 aa, Artificial Sequence
  Quasi-synthetic sequence derived from human genome
FLLACVATVIFIITKFCLFCFRKLAKKGKKKKR

SEQ ID NO: 25022 - protein, 33 aa, Artificial Sequence
  Quasi-synthetic sequence derived from human genome
KGGFILPVLGAVLALLFLLLVLLLLVRKKRKIK

SEQ ID NO: 25023 - protein, 33 aa, Artificial Sequence
  Quasi-synthetic sequence derived from human genome
VGALLLLLVVALGIGLFMRRRHIVRKRTLRRLL

SEQ ID NO: 25024 - protein, 33 aa, Artificial Sequence
  Quasi-synthetic sequence derived from human genome
RWTHLVRLLRLIILIRIFHLLHQKRQLEKLMRR

SEQ ID NO: 25025 - protein, 33 aa, Artificial Sequence
  Quasi-synthetic sequence derived from human genome
MVVVMKFFRWVRRAWQRIISWVFFWRQKIKPTI

SEQ ID NO: 25026 - protein, 33 aa, Artificial Sequence
  Quasi-synthetic sequence derived from human genome
KVRFSFFLQIYLIMIFLGLYINFRHLYKQRRRR

SEQ ID NO: 25027 - protein, 33 aa, Artificial Sequence
  Quasi-synthetic sequence derived from human genome
LLAKQGLRLLRGLRRRNVQKKVALAKKLLAKLR

SEQ ID NO: 25028 - protein, 33 aa, Artificial Sequence
  Quasi-synthetic sequence derived from human genome
VRMPFRRKIYYLPRRYKFMSRIDKQISRFRRWL

SEQ ID NO: 25029 - protein, 33 aa, Artificial Sequence
  Quasi-synthetic sequence derived from human genome
LSVLRTFRLLRVLKLVRFMPALRRQLVVLMKTM

SEQ ID NO: 25030 - protein, 33 aa, Artificial Sequence
  Quasi-synthetic sequence derived from human genome
CTRKLTHLRKRIHRPRRRTTRRWKRWFKFRKRK

SEQ ID NO: 25031 - protein, 33 aa, Artificial Sequence
  Quasi-synthetic sequence derived from human genome
LKTYLKRFKVMKPKVLRSWCRQILKGLLFLHTR

SEQ ID NO: 25032 - protein, 33 aa, Artificial Sequence
  Quasi-synthetic sequence derived from human genome
KLSRKQLVLRRGLLLLGVFLILLVGILVRFYVR

SEQ ID NO: 25033 - protein, 33 aa, Artificial Sequence
  Quasi-synthetic sequence derived from human genome
LGFLRVVRFVRILRIFKLTRHFVGLRVLGHTLR

SEQ ID NO: 25034 - protein, 33 aa, Artificial Sequence
  Quasi-synthetic sequence derived from human genome
RAFLLRRRFLHLKKAAIVFQKQLRGQIARRVYR

SEQ ID NO: 25035 - protein, 33 aa, Artificial Sequence
  Quasi-synthetic sequence derived from human genome
LAKQRLRKRVNAALVIQKYWRRVLAQRKLLMLK

SEQ ID NO: 25036 - protein, 33 aa, Artificial Sequence
  Quasi-synthetic sequence derived from human genome
LLLRLLLSCLLLPAARLARQYLLPLLRRLARRL

SEQ ID NO: 25037 - protein, 33 aa, Artificial Sequence
  Quasi-synthetic sequence derived from human genome
PFIVTLLVYIKIYIVLRRRRKRVNTKRSSRAFR

SEQ ID NO: 25038 - protein, 33 aa, Artificial Sequence
  Quasi-synthetic sequence derived from human genome
ARRHLKMMHIAATLIQRRFRTLMMRRRFLSLKK

SEQ ID NO: 25039 - protein, 33 aa, Artificial Sequence
  Quasi-synthetic sequence derived from human genome
KHFLRMLIQVCLYFYCKFLWRCLKFVMRKLTGR

SEQ ID NO: 25040 - protein, 33 aa, Artificial Sequence
  Quasi-synthetic sequence derived from human genome
QKLLKRLRLLPALLILRAFKPHRKIRDYRVVVV

SEQ ID NO: 25041 - protein, 33 aa, Artificial Sequence
  Quasi-synthetic sequence derived from human genome
RKMSKKLPPVIIKYIIINRFRGRKNMLVKLGKI

SEQ ID NO: 25042 - protein, 33 aa, Artificial Sequence
  Quasi-synthetic sequence derived from human genome
TLFRVIRLARIGRILRLIRGAKGIRTLLFALMM

SEQ ID NO: 25043 - protein, 33 aa, Artificial Sequence
  Quasi-synthetic sequence derived from human genome
AFRLQRALRFLLGRLPWRVASGARRFRRWLNRY

SEQ ID NO: 25044 - protein, 33 aa, Artificial Sequence
  Quasi-synthetic sequence derived from human genome
LFVYLNRKIVQVMRKQKTINRFLMRKRLLFPAL

SEQ ID NO: 25045 - protein, 33 aa, Artificial Sequence
  Quasi-synthetic sequence derived from human genome
RAARPPLLLRPVKLLRRRFRLLLALAVVSVGLW

SEQ ID NO: 25046 - protein, 33 aa, Artificial Sequence
  Quasi-synthetic sequence derived from human genome
IWFFWIRLYKIRRGRTRPQALLFLCMILLLIVL

SEQ ID NO: 25047 - protein, 33 aa, Artificial Sequence
  Quasi-synthetic sequence derived from human genome
RRLRRLAHLVLFCPFSKRLQGRLPGLRVRCIFL

SEQ ID NO: 25048 - protein, 33 aa, Artificial Sequence
  Quasi-synthetic sequence derived from human genome
LRRKKKKTIKMLMLVVVLFALCWFPLNCYVLLL

SEQ ID NO: 25049 - protein, 33 aa, Artificial Sequence
  Quasi-synthetic sequence derived from human genome
KKKIKPTLPLRIFINVSRFFCVQLKKMVRLMYI

SEQ ID NO: 25050 - protein, 33 aa, Artificial Sequence
  Quasi-synthetic sequence derived from human genome
TLKKKRRNFAELKIKRLRKKFAQKMLRKARRKL

SEQ ID NO: 25051 - protein, 33 aa, Artificial Sequence
  Quasi-synthetic sequence derived from human genome
RCYAKFLRRTKAATIIQKYWRMYVVRRRYKIRR

SEQ ID NO: 25052 - protein, 33 aa, Artificial Sequence
  Quasi-synthetic sequence derived from human genome
LKTYLKRFKVMKIKVLRSWCRQILKGLQFLHTR

SEQ ID NO: 25053 - protein, 33 aa, Artificial Sequence
  Quasi-synthetic sequence derived from human genome
RLCLRLLLLLGYRRRCPPLLRGLVQRWRYGKVC

SEQ ID NO: 25054 - protein, 33 aa, Artificial Sequence
  Quasi-synthetic sequence derived from human genome
RRRRRLRRRPRGLRCSRLPPPPPLPLLLGLLLA

SEQ ID NO: 25055 - protein, 33 aa, Artificial Sequence
  Quasi-synthetic sequence derived from human genome
KIAGISAGILVFILLLLVVILIVKKSKLAKKRK

SEQ ID NO: 25056 - protein, 33 aa, Artificial Sequence
  Quasi-synthetic sequence derived from human genome
LFLLALLGLVVKRAVERRKALSRRARRLAVRMR

SEQ ID NO: 25057 - protein, 33 aa, Artificial Sequence
  Quasi-synthetic sequence derived from human genome
VIGGLFILVIVGLTFAVYVRRKSIKKKRALRRF

SEQ ID NO: 25058 - protein, 33 aa, Artificial Sequence
  Quasi-synthetic sequence derived from human genome
WRRDIFGRIIWHKFKQWVIPWHLNKRYNRKRFF

SEQ ID NO: 25059 - protein, 33 aa, Artificial Sequence
  Quasi-synthetic sequence derived from human genome
HRLLKRLLGPKLRRFLKPQGHPRLLLWFKRDPR

SEQ ID NO: 25060 - protein, 33 aa, Artificial Sequence
  Quasi-synthetic sequence derived from human genome
WKFFMARVRLQLKIILCFSPVGRTLRVRARKFP

SEQ ID NO: 25061 - protein, 33 aa, Artificial Sequence
  Quasi-synthetic sequence derived from human genome
WTHLVRLLRLIILIRIFHLLHQKRQLEKLMRRL

SEQ ID NO: 25062 - protein, 33 aa, Artificial Sequence
  Quasi-synthetic sequence derived from human genome
KVLKVVAKVIRALLRILCCLLKAICRVLSIPVR

SEQ ID NO: 25063 - protein, 33 aa, Artificial Sequence
  Quasi-synthetic sequence derived from human genome
RRRGFGLFFFLRLHRLLLLFLVLRGTLANKLNV

SEQ ID NO: 25064 - protein, 33 aa, Artificial Sequence
  Quasi-synthetic sequence derived from human genome
RTRAGAARVARWRRLRLQQLRRLRGLLRVLRGR

SEQ ID NO: 25065 - protein, 33 aa, Artificial Sequence
  Quasi-synthetic sequence derived from human genome
ALASRHFRARFRRLWPCGRRRRHRARRALRRVR

SEQ ID NO: 25066 - protein, 33 aa, Artificial Sequence
  Quasi-synthetic sequence derived from human genome
VRRRYKIRRAATIVLQSYLRGFLARNRYRKILR

SEQ ID NO: 25067 - protein, 33 aa, Artificial Sequence
  Quasi-synthetic sequence derived from human genome
RLWKWLKSPRSWRLGLALLLGGALLFWVLLHRR

SEQ ID NO: 25068 - protein, 33 aa, Artificial Sequence
  Quasi-synthetic sequence derived from human genome
KTAFRIYAVSTLLLFLLFFLFRLLLRFLRLCRS

SEQ ID NO: 25069 - protein, 33 aa, Artificial Sequence
  Quasi-synthetic sequence derived from human genome
KMMQRRPRSAEVKYFYFFKILLRLRLAILKYLF

SEQ ID NO: 25070 - protein, 33 aa, Artificial Sequence
  Quasi-synthetic sequence derived from human genome
VRTWWRWLTFWRRLQSAFLKNRSLRTKSSLWRR

SEQ ID NO: 25071 - protein, 33 aa, Artificial Sequence
  Quasi-synthetic sequence derived from human genome
VLVRRTLLVAALRAWMIQCWWRTLVQRRIRQRR

SEQ ID NO: 25072 - protein, 33 aa, Artificial Sequence
  Quasi-synthetic sequence derived from human genome
RVIRLARIGRILRLIRAAKGIRTLLFALMMSLP

SEQ ID NO: 25073 - protein, 33 aa, Artificial Sequence
  Quasi-synthetic sequence derived from human genome
MRWPFFLFIPFFIIFCVLIAIMVKVNFQRKKWR

SEQ ID NO: 25074 - protein, 33 aa, Artificial Sequence
  Quasi-synthetic sequence derived from human genome
LLRLLGLRRGLRRLRRLWAGPRVQRGRGRGRGR

SEQ ID NO: 25075 - protein, 33 aa, Artificial Sequence
  Quasi-synthetic sequence derived from human genome
RRKGVWLRLRKILFCVLGLYIAIPFLIKLCPGI

SEQ ID NO: 25076 - protein, 33 aa, Artificial Sequence
  Quasi-synthetic sequence derived from human genome
ILLSAFAGLLLLMLLILALWKIGFFKRPLKKKM

SEQ ID NO: 25077 - protein, 33 aa, Artificial Sequence
  Quasi-synthetic sequence derived from human genome
IMSKFKLLSSLPRWRRIAQKIIRERRKKRVPKK

SEQ ID NO: 25078 - protein, 33 aa, Artificial Sequence
  Quasi-synthetic sequence derived from human genome
KFCYLCILLLIVLFILLCCLYRLCKKSKPIKKQ

SEQ ID NO: 25079 - protein, 33 aa, Artificial Sequence
  Quasi-synthetic sequence derived from human genome
ISFWKKKKSMIGMSTKLWKVKKALKMTIFWRGL

SEQ ID NO: 25080 - protein, 33 aa, Artificial Sequence
  Quasi-synthetic sequence derived from human genome
KLSKFILISSLAILLMVSLLLLSLWKLWRVKKF

SEQ ID NO: 25081 - protein, 33 aa, Artificial Sequence
  Quasi-synthetic sequence derived from human genome
LIYKNRVRMNTFPWLKIVKISFKCKQFFIQLRK

SEQ ID NO: 25082 - protein, 33 aa, Artificial Sequence
  Quasi-synthetic sequence derived from human genome
KGRDIKTIKSLRVLRVLRPLKTIKRLPKLKAVF

SEQ ID NO: 25083 - protein, 33 aa, Artificial Sequence
  Quasi-synthetic sequence derived from human genome
RYLAICRPLRARVLVTRRRVRALIAVLWAVALL

SEQ ID NO: 25084 - protein, 33 aa, Artificial Sequence
  Quasi-synthetic sequence derived from human genome
IGRRLQARRFRRSRRTGRLVVLIILTFAAFWLP

SEQ ID NO: 25085 - protein, 33 aa, Artificial Sequence
  Quasi-synthetic sequence derived from human genome
RVLRMMRIFWVIKLARHFIGLQTLGLTLKRCYR

SEQ ID NO: 25086 - protein, 33 aa, Artificial Sequence
  Quasi-synthetic sequence derived from human genome
IILALVLLVVLLVVCGPLAYKKLVKKFRQKKQR

SEQ ID NO: 25087 - protein, 33 aa, Artificial Sequence
  Quasi-synthetic sequence derived from human genome
KLLLPGLLLLLVVIILILAFWVLPKYKTRKAMR

SEQ ID NO: 25088 - protein, 33 aa, Artificial Sequence
  Quasi-synthetic sequence derived from human genome
LWRLPPILIIHLKRFQFVNGRWIKSQKIVKFPR

SEQ ID NO: 25089 - protein, 33 aa, Artificial Sequence
  Quasi-synthetic sequence derived from human genome
LFALRYNILTLMRMLSLKSLKKQMKKVKKMTVK

SEQ ID NO: 25090 - protein, 33 aa, Artificial Sequence
  Quasi-synthetic sequence derived from human genome
CKTMKFIVWRRFKWVIIGLLFLLILLLFVAVLL

SEQ ID NO: 25091 - protein, 33 aa, Artificial Sequence
  Quasi-synthetic sequence derived from human genome
RIVRLARIGRILRLVRAARGIRTLLFALMMSLP

SEQ ID NO: 25092 - protein, 33 aa, Artificial Sequence
  Quasi-synthetic sequence derived from human genome
LAKGLLIFLLLVILAMGLWVIRVQKRHKMPRMK

SEQ ID NO: 25093 - protein, 33 aa, Artificial Sequence
  Quasi-synthetic sequence derived from human genome
KKKDIRRGIGYLKLICFLIPFLLSLKKKMKVPY

SEQ ID NO: 25094 - protein, 33 aa, Artificial Sequence
  Quasi-synthetic sequence derived from human genome
IYNLLQAVFFVLFVLSVHYLWKKWKKHQKKLKK

SEQ ID NO: 25095 - protein, 33 aa, Artificial Sequence
  Quasi-synthetic sequence derived from human genome
VGLCLRLLLFFRFKRTLDRICVLFLLGWHRKPR

SEQ ID NO: 25096 - protein, 33 aa, Artificial Sequence
  Quasi-synthetic sequence derived from human genome
LKRALKVKQAMLQLYVLKLLKLQTKYLGRQWRK

SEQ ID NO: 25097 - protein, 33 aa, Artificial Sequence
  Quasi-synthetic sequence derived from human genome
RRFLGKKYRKYYYKSPKPLLRPFLCRICGSRFL

SEQ ID NO: 25098 - protein, 33 aa, Artificial Sequence
  Quasi-synthetic sequence derived from human genome
VMFWLIFLLIILSYIKIGKNLLRISKRRSKFPN

SEQ ID NO: 25099 - protein, 33 aa, Artificial Sequence
  Quasi-synthetic sequence derived from human genome
RARRRRRRRRRRDLLLSQLCFLASVALLLWSLS

SEQ ID NO: 25100 - protein, 33 aa, Artificial Sequence
  Quasi-synthetic sequence derived from human genome
RVIRLARIGRILRLIRGAKGIRTLLFALMMSLP

SEQ ID NO: 25101 - protein, 33 aa, Artificial Sequence
  Quasi-synthetic sequence derived from human genome
RVLVRAHRHRGLRPRRQKALRMILAVVLVFFVC

SEQ ID NO: 25102 - protein, 33 aa, Artificial Sequence
  Quasi-synthetic sequence derived from human genome
LLVYKDKLRINRFPWPKVLKISYKRSSFFIKIR

SEQ ID NO: 25103 - protein, 33 aa, Artificial Sequence
  Quasi-synthetic sequence derived from human genome
LLRLLNKLTKWKHSRTMMLVVFKSAPILKRALK

SEQ ID NO: 25104 - protein, 33 aa, Artificial Sequence
  Quasi-synthetic sequence derived from human genome
RRLRRANRVLRARCRRAVKSNACYWAVLLLVFL

SEQ ID NO: 25105 - protein, 33 aa, Artificial Sequence
  Quasi-synthetic sequence derived from human genome
RSKKKKKKKKKRQCFAFLIYFRLGIKMGKQGII

SEQ ID NO: 25106 - protein, 33 aa, Artificial Sequence
  Quasi-synthetic sequence derived from human genome
LRTFRVFRALKAISVVSRLKVIVGALLRSVKKL

SEQ ID NO: 25107 - protein, 33 aa, Artificial Sequence
  Quasi-synthetic sequence derived from human genome
IPKAKQRLKRLRNIHYLFNTALFLIAWRLLIAR

SEQ ID NO: 25108 - protein, 33 aa, Artificial Sequence
  Quasi-synthetic sequence derived from human genome
LCGAFLALFKAAEFAKLSIKWMIKIRKRYLKRR

SEQ ID NO: 25109 - protein, 33 aa, Artificial Sequence
  Quasi-synthetic sequence derived from human genome
FAILRIIRLVRVFRIFKLSRHSKGLQILGHTLR

SEQ ID NO: 25110 - protein, 33 aa, Artificial Sequence
  Quasi-synthetic sequence derived from human genome
FKAKNIKKKKVSIMVSVDGVKVILKKKKKLLLL

SEQ ID NO: 25111 - protein, 33 aa, Artificial Sequence
  Quasi-synthetic sequence derived from human genome
RKKSGILLLTLVSFLIFILFIIVQLFIMKLRKA

SEQ ID NO: 25112 - protein, 33 aa, Artificial Sequence
  Quasi-synthetic sequence derived from human genome
RIRASLVLILKTIRRRLPFSKWRLAFRFAGPHA

SEQ ID NO: 25113 - protein, 33 aa, Artificial Sequence
  Quasi-synthetic sequence derived from human genome
ILAMGLWVIRVQKRHKMPRMKKLMRNRMKLRKE

SEQ ID NO: 25114 - protein, 33 aa, Artificial Sequence
  Quasi-synthetic sequence derived from human genome
RKRMGLKMLMMMALLVPLVYTIKRHKWSVLKSR

SEQ ID NO: 25115 - protein, 33 aa, Artificial Sequence
  Quasi-synthetic sequence derived from human genome
PLLRKRRFQLGRSMNPRARKNRSRIPLLRKRRF

SEQ ID NO: 25116 - protein, 33 aa, Artificial Sequence
  Quasi-synthetic sequence derived from human genome
MRRKLKFFFMNPCEKFWARGRKPWKLAIQILKI

SEQ ID NO: 25117 - protein, 33 aa, Artificial Sequence
  Quasi-synthetic sequence derived from human genome
KINTFNWAKIRKLSFKRKHFLIKLHANILVLCK

SEQ ID NO: 25118 - protein, 33 aa, Artificial Sequence
  Quasi-synthetic sequence derived from human genome
KKIWWIIRGPMMLCVTVNFFIFLKILKLLISKL

SEQ ID NO: 25119 - protein, 33 aa, Artificial Sequence
  Quasi-synthetic sequence derived from human genome
VGILLVVVLGVVFGILIKRRQQKIRKYTMRRLL

SEQ ID NO: 25120 - protein, 33 aa, Artificial Sequence
  Quasi-synthetic sequence derived from human genome
FFHVKVLNINLKRKFIKKRIIIISNYSKRNSLL

SEQ ID NO: 25121 - protein, 33 aa, Artificial Sequence
  Quasi-synthetic sequence derived from human genome
RLSLIMQLVALLLVVLWIRWKCRRLRIREAWLL

SEQ ID NO: 25122 - protein, 33 aa, Artificial Sequence
  Quasi-synthetic sequence derived from human genome
RVIRLARIGRILRLIKGAKGIRTLLFALMMSLP

SEQ ID NO: 25123 - protein, 33 aa, Artificial Sequence
  Quasi-synthetic sequence derived from human genome
FLGIVAAVLVKKYQAVLRRKALLIFLVVHRLRW

SEQ ID NO: 25124 - protein, 33 aa, Artificial Sequence
  Quasi-synthetic sequence derived from human genome
LLRILNKLTKWKHSRTMMLVVFKSAPILKRALK

SEQ ID NO: 25125 - protein, 33 aa, Artificial Sequence
  Quasi-synthetic sequence derived from human genome
LRPLKKFLRKLHLPRDLPQKKKLKYMKQSLVVL

SEQ ID NO: 25126 - protein, 33 aa, Artificial Sequence
  Quasi-synthetic sequence derived from human genome
WFRSWGYVLLIVLFCLFIFVLIYVRVFRKSRRS

SEQ ID NO: 25127 - protein, 33 aa, Artificial Sequence
  Quasi-synthetic sequence derived from human genome
LAALFCLQYLGVRVLLRFQRKLSVLLLLLGRRR

SEQ ID NO: 25128 - protein, 33 aa, Artificial Sequence
  Quasi-synthetic sequence derived from human genome
LIVLVTLIFCLIVLSLSTFHIHKRRMKKRKMQR

SEQ ID NO: 25129 - protein, 33 aa, Artificial Sequence
  Quasi-synthetic sequence derived from human genome
LFVKRLRRKTYLSNMAKTMRMVLKSKRRVSVLK

SEQ ID NO: 25130 - protein, 33 aa, Artificial Sequence
  Quasi-synthetic sequence derived from human genome
RRIILLQRWFRVLLCRQHFLHLRQASVIIQRFW

SEQ ID NO: 25131 - protein, 33 aa, Artificial Sequence
  Quasi-synthetic sequence derived from human genome
QLLRICRVLRSLKLLAQFRQIQIIILVLVRALK

SEQ ID NO: 25132 - protein, 33 aa, Artificial Sequence
  Quasi-synthetic sequence derived from human genome
LLIYKDRLRINRFAWPKILKISYKRSNFYIKVR

SEQ ID NO: 25133 - protein, 33 aa, Artificial Sequence
  Quasi-synthetic sequence derived from human genome
RKRRFQLRRCMNPRARKNRSQIVLFQKRRFHFF

SEQ ID NO: 25134 - protein, 33 aa, Artificial Sequence
  Quasi-synthetic sequence derived from human genome
RFRTLMMRRRFLSLKKTAILIQRKYRAHLCTKH

SEQ ID NO: 25135 - protein, 33 aa, Artificial Sequence
  Quasi-synthetic sequence derived from human genome
RWARPFYLAFVFCLALGLLQAIKLYLRRQRLLR

SEQ ID NO: 25136 - protein, 33 aa, Artificial Sequence
  Quasi-synthetic sequence derived from human genome
LGRRGFSGRLGGYWKTWIFWKTWIFWKTWIFRK

SEQ ID NO: 25137 - protein, 33 aa, Artificial Sequence
  Quasi-synthetic sequence derived from human genome
RALALFVLTCVVLTFLGHRLLKRLLGPKLRRFL

SEQ ID NO: 25138 - protein, 33 aa, Artificial Sequence
  Quasi-synthetic sequence derived from human genome
KPTCCRCRGRKRCIKKFSIQRFPKILVLHLKRF

SEQ ID NO: 25139 - protein, 33 aa, Artificial Sequence
  Quasi-synthetic sequence derived from human genome
LKTYLKRFKVMKPKVLRSWCRQILKGLQFLHTR

SEQ ID NO: 25140 - protein, 33 aa, Artificial Sequence
  Quasi-synthetic sequence derived from human genome
LAVVGGVIGLLILILLIKKLIIFILKKTREKKK

SEQ ID NO: 25141 - protein, 33 aa, Artificial Sequence
  Quasi-synthetic sequence derived from human genome
RLASLNQILDPWVYLLLRKILLRKFCQMRKRRL

SEQ ID NO: 25142 - protein, 33 aa, Artificial Sequence
  Quasi-synthetic sequence derived from human genome
ICLIAVMVVFIILVIGVCTCCHPLRKRRKRKKK

SEQ ID NO: 25143 - protein, 33 aa, Artificial Sequence
  Quasi-synthetic sequence derived from human genome
KKKQKSTKKFWIQKLPKVLCLHLKRFHWTAYLR

SEQ ID NO: 25144 - protein, 33 aa, Artificial Sequence
  Quasi-synthetic sequence derived from human genome
VLALVLPSIVILGKIILFLPCISRKLKRIKKGW

SEQ ID NO: 25145 - protein, 33 aa, Artificial Sequence
  Quasi-synthetic sequence derived from human genome
RYLRVKLTVRYKRVTTHRRIWLALGLCWLVSFL

SEQ ID NO: 25146 - protein, 33 aa, Artificial Sequence
  Quasi-synthetic sequence derived from human genome
FRLARRRKKILFYCHFPDLLLTKRDSFLKRLYR

SEQ ID NO: 25147 - protein, 33 aa, Artificial Sequence
  Quasi-synthetic sequence derived from human genome
IFKKKAHKLTSAPLKQNFQKLLKLFYIKKLKPL

SEQ ID NO: 25148 - protein, 33 aa, Artificial Sequence
  Quasi-synthetic sequence derived from human genome
PLLRKRRFQLYRSTNPRARKNRSRIPLLRKRRF

SEQ ID NO: 25149 - protein, 33 aa, Artificial Sequence
  Quasi-synthetic sequence derived from human genome
RVIRLARIGRVLRLIRGAKGIRTLLFALMMSLP

SEQ ID NO: 25150 - protein, 33 aa, Artificial Sequence
  Quasi-synthetic sequence derived from human genome
FRYLQRLLLVHGRWSYIRMCKFLRYFFYKNFAF

SEQ ID NO: 25151 - protein, 33 aa, Artificial Sequence
  Quasi-synthetic sequence derived from human genome
IIVPLVLLVTLITTLVIGLVLCKRKRRTKTIRR

SEQ ID NO: 25152 - protein, 33 aa, Artificial Sequence
  Quasi-synthetic sequence derived from human genome
ITNLKRRYSFRLHIGRNIARPWKLIYYRAKKMF

SEQ ID NO: 25153 - protein, 33 aa, Artificial Sequence
  Quasi-synthetic sequence derived from human genome
RLAVRTVIRAFVKCTKARYLKKKNMRTLWINRI

SEQ ID NO: 25154 - protein, 33 aa, Artificial Sequence
  Quasi-synthetic sequence derived from human genome
RRYGKLSRHLMKVKLKKYTKFLFVRDPFVRLIS

SEQ ID NO: 25155 - protein, 33 aa, Artificial Sequence
  Quasi-synthetic sequence derived from human genome
KLKRKYWWKNCKMWAIGITVLVIFIIIIIVWVV

SEQ ID NO: 25156 - protein, 33 aa, Artificial Sequence
  Quasi-synthetic sequence derived from human genome
IIKTLLRCPSKKKYKAIRLIFVIMAVFFIFWTP

SEQ ID NO: 25157 - protein, 33 aa, Artificial Sequence
  Quasi-synthetic sequence derived from human genome
KLWFKFQRYFRRKPVRFFTFLALYLTAGSLVFL

SEQ ID NO: 25158 - protein, 33 aa, Artificial Sequence
  Quasi-synthetic sequence derived from human genome
KLFFIKNQRSSLRIRLFNFSLKLLSCLLYIIRV

SEQ ID NO: 25159 - protein, 33 aa, Artificial Sequence
  Quasi-synthetic sequence derived from human genome
LCRLRVRKAIGKYRIKLLDTLPLPGRLIRYLKY

SEQ ID NO: 25160 - protein, 33 aa, Artificial Sequence
  Quasi-synthetic sequence derived from human genome
PLLRKRWFQLGHSMNPRARKNRSRIPLLRKRRF

SEQ ID NO: 25161 - protein, 33 aa, Artificial Sequence
  Quasi-synthetic sequence derived from human genome
RVIRLARIGRILRLVKGAKGIRTLLFALMMSLP

SEQ ID NO: 25162 - protein, 33 aa, Artificial Sequence
  Quasi-synthetic sequence derived from human genome
LKVFYCLRIANFNHPLFFLMKRKIIVLMPWLLR

SEQ ID NO: 25163 - protein, 33 aa, Artificial Sequence
  Quasi-synthetic sequence derived from human genome
RLLRGLWQRWRRYKYRFVPWIALNLSHNPRTLR

SEQ ID NO: 25164 - protein, 33 aa, Artificial Sequence
  Quasi-synthetic sequence derived from human genome
LMNPIIYSIKTKQIRQRIIKKFQFIKSLRCFWK

SEQ ID NO: 25165 - protein, 33 aa, Artificial Sequence
  Quasi-synthetic sequence derived from human genome
WMRRMRILRRLLRRYRESKKIDRHMYHSLYLKV

SEQ ID NO: 25166 - protein, 33 aa, Artificial Sequence
  Quasi-synthetic sequence derived from human genome
RIWVFRLKRRKRIARRLVDTLRNCFMFGCFLST

SEQ ID NO: 25167 - protein, 33 aa, Artificial Sequence
  Quasi-synthetic sequence derived from human genome
LWRRQIYAVATLRFLKLRRERRALLCLLLVLGI

SEQ ID NO: 25168 - protein, 33 aa, Artificial Sequence
  Quasi-synthetic sequence derived from human genome
KKKKKRYLRASSNRNFLLTMRPFLKRAILVLSY

SEQ ID NO: 25169 - protein, 33 aa, Artificial Sequence
  Quasi-synthetic sequence derived from human genome
IKLEAHWRGALARKAIQRRKWAVRIIRKFIKGF

SEQ ID NO: 25170 - protein, 33 aa, Artificial Sequence
  Quasi-synthetic sequence derived from human genome
RMPLSRWQRRLRRAARRQVLSGHLPFCRFRLRY

SEQ ID NO: 25171 - protein, 33 aa, Artificial Sequence
  Quasi-synthetic sequence derived from human genome
FRSLLVRRRFISLKKATIFVQRKYRATICAKHK

SEQ ID NO: 25172 - protein, 33 aa, Artificial Sequence
  Quasi-synthetic sequence derived from human genome
LLAWLLLPLLLLLLVLLLAAYFFRFRKQRKAVV

SEQ ID NO: 25173 - protein, 33 aa, Artificial Sequence
  Quasi-synthetic sequence derived from human genome
KHLCRLKIRKCMGRLHLRCPVFMSFLPLPNRLK

SEQ ID NO: 25174 - protein, 33 aa, Artificial Sequence
  Quasi-synthetic sequence derived from human genome
LVKRKRTKGKKLLLSIGVLLHKWKNVCIVLTAL

SEQ ID NO: 25175 - protein, 33 aa, Artificial Sequence
  Quasi-synthetic sequence derived from human genome
LLSIAIFQRQKRRKFWKAKNLQHIPLKKGKRVV

SEQ ID NO: 25176 - protein, 33 aa, Artificial Sequence
  Quasi-synthetic sequence derived from human genome
TLVRRALLHAALSACIIQCWWRLILSKILKKRR

SEQ ID NO: 25177 - protein, 33 aa, Artificial Sequence
  Quasi-synthetic sequence derived from human genome
FKLLILLIGTWALFFRKRRADMPRVFVFRALLL

SEQ ID NO: 25178 - protein, 33 aa, Artificial Sequence
  Quasi-synthetic sequence derived from human genome
TLALLTVNALLVLLALAAWASRWLRRKLRARRK

SEQ ID NO: 25179 - protein, 33 aa, Artificial Sequence
  Quasi-synthetic sequence derived from human genome
LRKLKFSPIKYGYQPRRNFWPARLATRLLKLRY

SEQ ID NO: 25180 - protein, 33 aa, Artificial Sequence
  Quasi-synthetic sequence derived from human genome
MLVTISCILVGVLLLFVLLLVVRRRRREQRLKR

SEQ ID NO: 25181 - protein, 33 aa, Artificial Sequence
  Quasi-synthetic sequence derived from human genome
GKLRYLSLLCLLPLVAFLLFCLHVLFKKRTKSK

SEQ ID NO: 25182 - protein, 33 aa, Artificial Sequence
  Quasi-synthetic sequence derived from human genome
PLLRKRRFQLYRSMNPRARKNRSHIPLVRKRRF

SEQ ID NO: 25183 - protein, 33 aa, Artificial Sequence
  Quasi-synthetic sequence derived from human genome
SFILIMGNSKLREAFLKMLRFVKCFLRRRKPFV

SEQ ID NO: 25184 - protein, 33 aa, Artificial Sequence
  Quasi-synthetic sequence derived from human genome
LAILRVIRLVRVFRIFKLSRHSKGLQILGQTLR

SEQ ID NO: 25185 - protein, 33 aa, Artificial Sequence
  Quasi-synthetic sequence derived from human genome
YNPVIYVFMIRKFRRSLLQLLCLRLLRCQRPAK

SEQ ID NO: 25186 - protein, 33 aa, Artificial Sequence
  Quasi-synthetic sequence derived from human genome
RGMLPVAVLVALLAVIVLVALLLLWRRRQKRRT

SEQ ID NO: 25187 - protein, 33 aa, Artificial Sequence
  Quasi-synthetic sequence derived from human genome
PLLRKRRFQLGRSMNLRARKNRSQIVLFQKRRF

SEQ ID NO: 25188 - protein, 33 aa, Artificial Sequence
  Quasi-synthetic sequence derived from human genome
LSIFYLLKIANFSNLIFLRLKRRVKSVILVVLL

SEQ ID NO: 25189 - protein, 33 aa, Artificial Sequence
  Quasi-synthetic sequence derived from human genome
LWKNWTLRKRQKIRFVVELVWPLSLFLVLIWLR

SEQ ID NO: 25190 - protein, 33 aa, Artificial Sequence
  Quasi-synthetic sequence derived from human genome
AIRVALAVAVLKTVILGLLCLLLLWWRRRKGSR

SEQ ID NO: 25191 - protein, 33 aa, Artificial Sequence
  Quasi-synthetic sequence derived from human genome
KLFFIKNQRSSLRIRLFNFSLKLLTCLLYIVRV

SEQ ID NO: 25192 - protein, 33 aa, Artificial Sequence
  Quasi-synthetic sequence derived from human genome
LRLFRAARLIKLLRQGYTIRILLWTFVQSFKAL

SEQ ID NO: 25193 - protein, 33 aa, Artificial Sequence
  Quasi-synthetic sequence derived from human genome
FLRLFRAARLIKLLRQGYTIRILLWTFVQSFKA

SEQ ID NO: 25194 - protein, 33 aa, Artificial Sequence
  Quasi-synthetic sequence derived from human genome
LKIRRRKMNHHKYRKLVKKTRFLRRKVQEGRLR

SEQ ID NO: 25195 - protein, 33 aa, Artificial Sequence
  Quasi-synthetic sequence derived from human genome
LAEKAKRCNRRLKSQILLKKYLMKRRWKKNFIA

SEQ ID NO: 25196 - protein, 33 aa, Artificial Sequence
  Quasi-synthetic sequence derived from human genome
TMVGKIKRLKKSAFVVLILLITAKLLVLPLLCR

SEQ ID NO: 25197 - protein, 33 aa, Artificial Sequence
  Quasi-synthetic sequence derived from human genome
AAPRASGRCVIAPVRAVLRLRRRVCVLRKRRLL

SEQ ID NO: 25198 - protein, 33 aa, Artificial Sequence
  Quasi-synthetic sequence derived from human genome
FGLLLLVLFILFLTWCRVQKQKHLPLRVSTRRR

SEQ ID NO: 25199 - protein, 33 aa, Artificial Sequence
  Quasi-synthetic sequence derived from human genome
FGYRLRRVIAAFYFPKREKKRILFLYNDLLKKR

SEQ ID NO: 25200 - protein, 33 aa, Artificial Sequence
  Quasi-synthetic sequence derived from human genome
LLLTLVSFLIFILFIIVQLFIMKLRKAHVIWKK

SEQ ID NO: 25201 - protein, 33 aa, Artificial Sequence
  Quasi-synthetic sequence derived from human genome
GAKILGVLRVLRLLRTLRPLRVISRAPGLKLVV

SEQ ID NO: 25202 - protein, 33 aa, Artificial Sequence
  Quasi-synthetic sequence derived from human genome
PLLRKRRFQLCRCMNPRARKNRSQIVLFQKLRF

SEQ ID NO: 25203 - protein, 33 aa, Artificial Sequence
  Quasi-synthetic sequence derived from human genome
ILTRKRIRYRFRRFIQQFSQCKATARNLKLKYL

SEQ ID NO: 25204 - protein, 33 aa, Artificial Sequence
  Quasi-synthetic sequence derived from human genome
LFLCGLLSKAKQKLLRHLVPAAALRRKRKALWA

SEQ ID NO: 25205 - protein, 33 aa, Artificial Sequence
  Quasi-synthetic sequence derived from human genome
LAILRVIRLVRVFRIFKLSRHSKGLQILGQTLK

SEQ ID NO: 25206 - protein, 33 aa, Artificial Sequence
  Quasi-synthetic sequence derived from human genome
SLAILRVIRLVRVFRIFKLSRHSKGLQILGKTL

SEQ ID NO: 25207 - protein, 33 aa, Artificial Sequence
  Quasi-synthetic sequence derived from human genome
ARAWLARRRFQSIRRFVLNIQLTYRVQRLQKKL

SEQ ID NO: 25208 - protein, 33 aa, Artificial Sequence
  Quasi-synthetic sequence derived from human genome
IRLKNIRKVYGRCMWYRLRLLKPQPNIIPTVKK

SEQ ID NO: 25209 - protein, 33 aa, Artificial Sequence
  Quasi-synthetic sequence derived from human genome
KDILRRVLVLMASKHAFLALCALRFKRKIIGLK

SEQ ID NO: 25210 - protein, 33 aa, Artificial Sequence
  Quasi-synthetic sequence derived from human genome
AAKLKRKYWWKNCKMMIMLGAICAIIVVVIVRR

SEQ ID NO: 25211 - protein, 33 aa, Artificial Sequence
  Quasi-synthetic sequence derived from human genome
FLKLFRAARLIKLLRQGYTIRILLWTFVQSFKA

SEQ ID NO: 25212 - protein, 33 aa, Artificial Sequence
  Quasi-synthetic sequence derived from human genome
RRLFVRRGQPFTIILYFRAPVRAFLPALKKVAL

SEQ ID NO: 25213 - protein, 33 aa, Artificial Sequence
  Quasi-synthetic sequence derived from human genome
LFLCLLPLIVKHIRKKQAKKAAAIRAKKSSKVR

SEQ ID NO: 25214 - protein, 33 aa, Artificial Sequence
  Quasi-synthetic sequence derived from human genome
RKFLYLWIRMTFGRVFPSKARFYYEQRLLRKVF

SEQ ID NO: 25215 - protein, 33 aa, Artificial Sequence
  Quasi-synthetic sequence derived from human genome
IRARRKTARMLMIVLLVFAICYLPISILNVLKR

SEQ ID NO: 25216 - protein, 33 aa, Artificial Sequence
  Quasi-synthetic sequence derived from human genome
LRIANFSNLIFLRIKRRVKSVVLVILLGPLLFL

SEQ ID NO: 25217 - protein, 33 aa, Artificial Sequence
  Quasi-synthetic sequence derived from human genome
MPFVPAVAKSIPRKRISLKRPKKCFRNLFHIRR

SEQ ID NO: 25218 - protein, 33 aa, Artificial Sequence
  Quasi-synthetic sequence derived from human genome
LIGIAVVLFVIFILVVLFIVFRKKVFRKNYSRN

SEQ ID NO: 25219 - protein, 33 aa, Artificial Sequence
  Quasi-synthetic sequence derived from human genome
RLPIRMAKALGKRTAKYRWFAVLYLLVCFLLLP

SEQ ID NO: 25220 - protein, 33 aa, Artificial Sequence
  Quasi-synthetic sequence derived from human genome
RVRVLSVARPGLWLYTHPLIKLLFLPRRSRCKF

SEQ ID NO: 25221 - protein, 33 aa, Artificial Sequence
  Quasi-synthetic sequence derived from human genome
WWILRFPVFLAILINFFIFVRIVQLLVAKLRAR

SEQ ID NO: 25222 - protein, 33 aa, Artificial Sequence
  Quasi-synthetic sequence derived from human genome
YFIMLFCITMKRQIKHMIKYRYIPFTHGKRRYR

SEQ ID NO: 25223 - protein, 33 aa, Artificial Sequence
  Quasi-synthetic sequence derived from human genome
FFYLSLFFWMLFKALLIIYGILVIFRRMMKSRM

SEQ ID NO: 25224 - protein, 33 aa, Artificial Sequence
  Quasi-synthetic sequence derived from human genome
LRLRHLRRPRVARLLCLGVWALILVFAVPAARV

SEQ ID NO: 25225 - protein, 33 aa, Artificial Sequence
  Quasi-synthetic sequence derived from human genome
LLLKKIMAILIKRFHHTRRNWKGLIAQVILPIV

SEQ ID NO: 25226 - protein, 33 aa, Artificial Sequence
  Quasi-synthetic sequence derived from human genome
FLLLILLCMSLLLFQVIRLYQRRRWMIRALHLF

SEQ ID NO: 25227 - protein, 33 aa, Artificial Sequence
  Quasi-synthetic sequence derived from human genome
LLWVKQRKDLLHLCCKKLKILGMPFRNIRSILK

SEQ ID NO: 25228 - protein, 33 aa, Artificial Sequence
  Quasi-synthetic sequence derived from human genome
KTARLFSKKIFCCLFFITLFFIRLLSYMFFHVR

SEQ ID NO: 25229 - protein, 33 aa, Artificial Sequence
  Quasi-synthetic sequence derived from human genome
MRKNMRVLSRTSKFRRLRQLLRRRKKRQQVRSI

SEQ ID NO: 25230 - protein, 33 aa, Artificial Sequence
  Quasi-synthetic sequence derived from human genome
RRQMWWRGCKIKAIMALVAAILLLVIIILIVMK

SEQ ID NO: 25231 - protein, 33 aa, Artificial Sequence
  Quasi-synthetic sequence derived from human genome
LKRALKVKQAMMQLYVLKLLKVQTKYLGRQWRK

SEQ ID NO: 25232 - protein, 33 aa, Artificial Sequence
  Quasi-synthetic sequence derived from human genome
WRQKFLRVKRSAICIQSWWRGTLGRRKAAKRKW

SEQ ID NO: 25233 - protein, 33 aa, Artificial Sequence
  Quasi-synthetic sequence derived from human genome
RIRILCCLTFLVKVKSKALLKNRLLPPLLHTLF

SEQ ID NO: 25234 - protein, 33 aa, Artificial Sequence
  Quasi-synthetic sequence derived from human genome
RAYRRSQRASFKRARRPGARALRLVLGIVLLFW

SEQ ID NO: 25235 - protein, 33 aa, Artificial Sequence
  Quasi-synthetic sequence derived from human genome
HIPWITAVLPTVIICVMVFCLILWKWKKKKRPR

SEQ ID NO: 25236 - protein, 33 aa, Artificial Sequence
  Quasi-synthetic sequence derived from human genome
KLLILLIGTWALFFRKRRADMPRVFVFRALLLV

SEQ ID NO: 25237 - protein, 33 aa, Artificial Sequence
  Quasi-synthetic sequence derived from human genome
LLFLMRKDKKKLRRLLKYMFIRDYKSKIVKGID

SEQ ID NO: 25238 - protein, 33 aa, Artificial Sequence
  Quasi-synthetic sequence derived from human genome
IYLRLLVKLYRFLARRTNSTFNQVVLKRLFMSR

SEQ ID NO: 25239 - protein, 33 aa, Artificial Sequence
  Quasi-synthetic sequence derived from human genome
YLRIIRFLPLFKIIVPILIRIADVQIKKRLSLM

SEQ ID NO: 25240 - protein, 33 aa, Artificial Sequence
  Quasi-synthetic sequence derived from human genome
LQKRSWPFLRSFRVLRVFKLAKSWPTLNTLIKI

SEQ ID NO: 25241 - protein, 33 aa, Artificial Sequence
  Quasi-synthetic sequence derived from human genome
RRLRGLRRAAAGTSRLLFQRLLPCGVIKFRYIW

SEQ ID NO: 25242 - protein, 33 aa, Artificial Sequence
  Quasi-synthetic sequence derived from human genome
KYKKNIKALYIVHPTMFIKTLLILFKPLISFKF

SEQ ID NO: 25243 - protein, 33 aa, Artificial Sequence
  Quasi-synthetic sequence derived from human genome
MLLRKRYRHRPCRLQFLLLLLMLGCVLMMVAML

SEQ ID NO: 25244 - protein, 33 aa, Artificial Sequence
  Quasi-synthetic sequence derived from human genome
KAERKITSRPFTRFRTAVRVVIAILRLRFLVKK

SEQ ID NO: 25245 - protein, 33 aa, Artificial Sequence
  Quasi-synthetic sequence derived from human genome
WVPVKVILHKKRYIYRKIKGWRPVLMMCVVLTT

SEQ ID NO: 25246 - protein, 33 aa, Artificial Sequence
  Quasi-synthetic sequence derived from human genome
YFIHSLCLLGRLLIYKQGRKLFPIKLKNKKGLV

SEQ ID NO: 25247 - protein, 33 aa, Artificial Sequence
  Quasi-synthetic sequence derived from human genome
QIWVKMYGYFAGLCRRLQKFWRVTVKGFFVKKK

SEQ ID NO: 25248 - protein, 33 aa, Artificial Sequence
  Quasi-synthetic sequence derived from human genome
AGVLVLLVSLGVAIHLCCRRRRARLRFMKQLRL

SEQ ID NO: 25249 - protein, 33 aa, Artificial Sequence
  Quasi-synthetic sequence derived from human genome
FLLACVATVIFVVTKFCLFCFWKFARKGKKGKR

SEQ ID NO: 25250 - protein, 33 aa, Artificial Sequence
  Quasi-synthetic sequence derived from human genome
CVIFLLIIIFLTVLLLKLRKRHRKHTQQRAAAL

SEQ ID NO: 25251 - protein, 33 aa, Artificial Sequence
  Quasi-synthetic sequence derived from human genome
KHLILAFCAGVLLTLLLIAFIFLIIKSYRKYRR

SEQ ID NO: 25252 - protein, 33 aa, Artificial Sequence
  Quasi-synthetic sequence derived from human genome
PLLRKRRFQLYRSTNPRARKNRSRIPLLRKHRF

SEQ ID NO: 25253 - protein, 33 aa, Artificial Sequence
  Quasi-synthetic sequence derived from human genome
GWRFIRVFIKTIRRDIFGGLVLLKVKAKVRQCL

SEQ ID NO: 25254 - protein, 33 aa, Artificial Sequence
  Quasi-synthetic sequence derived from human genome
LVRRGRGGLRLGLRGPLRKLVLQSLVPLLLRLH

SEQ ID NO: 25255 - protein, 33 aa, Artificial Sequence
  Quasi-synthetic sequence derived from human genome
RWKVVLLVRTDKRSDSLIRKKFRMMKIPKPILF

SEQ ID NO: 25256 - protein, 33 aa, Artificial Sequence
  Quasi-synthetic sequence derived from human genome
RRWKRWFKFRKRKGEKRPRPNHKAVARRAKLKF

SEQ ID NO: 25257 - protein, 33 aa, Artificial Sequence
  Quasi-synthetic sequence derived from human genome
FLLACVATVLFIITKCCLFCFWKFARKGKKGKR

SEQ ID NO: 25258 - protein, 33 aa, Artificial Sequence
  Quasi-synthetic sequence derived from human genome
MVLQRRKFLQMKRRKYGFIYKTHLFGRPTVRVM

SEQ ID NO: 25259 - protein, 33 aa, Artificial Sequence
  Quasi-synthetic sequence derived from human genome
KIKTFLSLVWKRRILFFVVTLVSVFLVWKFTYA

SEQ ID NO: 25260 - protein, 33 aa, Artificial Sequence
  Quasi-synthetic sequence derived from human genome
KKPLIFLGCCFFSTLVLLLSIAIFQRQKRRKFW

SEQ ID NO: 25261 - protein, 33 aa, Artificial Sequence
  Quasi-synthetic sequence derived from human genome
FFIKRRFRSLRHKIILLQSRARGYLARQRYQQM

SEQ ID NO: 25262 - protein, 33 aa, Artificial Sequence
  Quasi-synthetic sequence derived from human genome
LLLLYKRHKGRKLTVPVRRHAYLQQLFSKPFFR

SEQ ID NO: 25263 - protein, 33 aa, Artificial Sequence
  Quasi-synthetic sequence derived from human genome
KGFLLKKRKWPLKGWHKRFFYLDKGILKYAKSQ

SEQ ID NO: 25264 - protein, 33 aa, Artificial Sequence
  Quasi-synthetic sequence derived from human genome
MASWLRRKLRGKRRPVIAFCLLMILSAMAVTRF

SEQ ID NO: 25265 - protein, 33 aa, Artificial Sequence
  Quasi-synthetic sequence derived from human genome
LILGNKKLKQIFLSVLRHVRYWVKDRSLRLHRF

SEQ ID NO: 25266 - protein, 33 aa, Artificial Sequence
  Quasi-synthetic sequence derived from human genome
LQSLRFGFGFRRGRSFLLRSWHHLMKRVQIKIF

SEQ ID NO: 25267 - protein, 33 aa, Artificial Sequence
  Quasi-synthetic sequence derived from human genome
FLKTILHRIYGKFLGLRAYIRRQINHIFYRFIY

SEQ ID NO: 25268 - protein, 33 aa, Artificial Sequence
  Quasi-synthetic sequence derived from human genome
PVKAKTKRRLVLGLREVLKHLKLKKLKCVIISP

SEQ ID NO: 25269 - protein, 33 aa, Artificial Sequence
  Quasi-synthetic sequence derived from human genome
KLLFTPQHKMLRLRLPNLKMVRLRVSFSAVVFK

SEQ ID NO: 25270 - protein, 33 aa, Artificial Sequence
  Quasi-synthetic sequence derived from human genome
LLKYYVLNALKHRPPKAQKKRYLFRSFKATKFF

SEQ ID NO: 25271 - protein, 33 aa, Artificial Sequence
  Quasi-synthetic sequence derived from human genome
FRPGKVLRFLRLFGPGKNVPSVWRSARRKRKKK

SEQ ID NO: 25272 - protein, 33 aa, Artificial Sequence
  Quasi-synthetic sequence derived from human genome
YVKIRSRKLGIFRRCWLVFKKASSKGPRRLEKF

SEQ ID NO: 25273 - protein, 33 aa, Artificial Sequence
  Quasi-synthetic sequence derived from human genome
RRWNRFNRRRCRAAVKSVTFYWLVIVLVFLNTL

SEQ ID NO: 25274 - protein, 33 aa, Artificial Sequence
  Quasi-synthetic sequence derived from human genome
LLWRGRIPGRQWIGKHRRPRFVSLRAKQNMIRR

SEQ ID NO: 25275 - protein, 33 aa, Artificial Sequence
  Quasi-synthetic sequence derived from human genome
KKFLYIKSVFHTLRMAQRRHKRVRTWTRHINIF

SEQ ID NO: 25276 - protein, 33 aa, Artificial Sequence
  Quasi-synthetic sequence derived from human genome
ISYKTFLPKCIRAKIQDYHILTRKRIRYRFRRF

SEQ ID NO: 25277 - protein, 33 aa, Artificial Sequence
  Quasi-synthetic sequence derived from human genome
YLKVFYKFINLNRYKIRHTRKKPFKCKNCVKSF

SEQ ID NO: 25278 - protein, 33 aa, Artificial Sequence
  Quasi-synthetic sequence derived from human genome
VLRVMRLMRIFRILKLARHSTGLRAFGFTLRQC

SEQ ID NO: 25279 - protein, 33 aa, Artificial Sequence
  Quasi-synthetic sequence derived from human genome
FRIIQTLFSCKNHKKAKAIKLILLVVIVFFLFW

SEQ ID NO: 25280 - protein, 33 aa, Artificial Sequence
  Quasi-synthetic sequence derived from human genome
ILTRLMNFFVFSRGLLQYINQRKKFRRRWVGAL

SEQ ID NO: 25281 - protein, 33 aa, Artificial Sequence
  Quasi-synthetic sequence derived from human genome
AKMKKKTFKGLIRIFRKGVIAVLAANRLKILGQ

SEQ ID NO: 25282 - protein, 33 aa, Artificial Sequence
  Quasi-synthetic sequence derived from human genome
HQRIFGKLVFLPLRLVWKEVILRKILILVLVQK

SEQ ID NO: 25283 - protein, 33 aa, Artificial Sequence
  Quasi-synthetic sequence derived from human genome
KRKKNVLRLCCKKLKIFAMPMQDIKMILKMVQL

SEQ ID NO: 25284 - protein, 33 aa, Artificial Sequence
  Quasi-synthetic sequence derived from human genome
LRPLVKPKIVKKRTKKFIRHQSDRYVKIKRNWR

SEQ ID NO: 25285 - protein, 33 aa, Artificial Sequence
  Quasi-synthetic sequence derived from human genome
RLRTKMPWKTCWRYLTSGGFFLLILMIFSKLLK

SEQ ID NO: 25286 - protein, 33 aa, Artificial Sequence
  Quasi-synthetic sequence derived from human genome
LLILLRLWRVARIINGIIISVKTRSERQLLRLK

SEQ ID NO: 25287 - protein, 33 aa, Artificial Sequence
  Quasi-synthetic sequence derived from human genome
YLRGFLARNRYRKILREHKAVIIQKRVRGWLAR

SEQ ID NO: 25288 - protein, 33 aa, Artificial Sequence
  Quasi-synthetic sequence derived from human genome
WLLRKKYLRMRKAAITMQRYVRGYQARCYAKFL

SEQ ID NO: 25289 - protein, 33 aa, Artificial Sequence
  Quasi-synthetic sequence derived from human genome
GLRAWKRIFWRQILLTLGLLGLFLYGLPKFRHL

SEQ ID NO: 25290 - protein, 33 aa, Artificial Sequence
  Quasi-synthetic sequence derived from human genome
VRLNMKQKHYVRGRALRSRLLRKQAWKQKWRKK

SEQ ID NO: 25291 - protein, 33 aa, Artificial Sequence
  Quasi-synthetic sequence derived from human genome
KLSMIRFRYRILRSQHFRTKSKVCKLRKAQRSW

SEQ ID NO: 25292 - protein, 33 aa, Artificial Sequence
  Quasi-synthetic sequence derived from human genome
RKKAPHRLCGRFSRISMKLPRIPLRRQKLPKVV

SEQ ID NO: 25293 - protein, 33 aa, Artificial Sequence
  Quasi-synthetic sequence derived from human genome
KGKDINTIKSLRVLRVLRPLKTIKRLPKLKAVF

SEQ ID NO: 25294 - protein, 33 aa, Artificial Sequence
  Quasi-synthetic sequence derived from human genome
GWLLLRKAPGGFMGPRWRRRWFVLKGHTLYWYR

SEQ ID NO: 25295 - protein, 33 aa, Artificial Sequence
  Quasi-synthetic sequence derived from human genome
HFRKKSFKIHQKAIKKKGNLYGFALLRRRALQL

SEQ ID NO: 25296 - protein, 33 aa, Artificial Sequence
  Quasi-synthetic sequence derived from human genome
WWRGTLGRRKAAKRKWAAQTIRRLIRGFVLRHA

SEQ ID NO: 25297 - protein, 33 aa, Artificial Sequence
  Quasi-synthetic sequence derived from human genome
RGGATRAAGVFYPWRFRLLCLLRRWLPRPRAWF

SEQ ID NO: 25298 - protein, 33 aa, Artificial Sequence
  Quasi-synthetic sequence derived from human genome
HRRVLKKNPLKNLRIMLKLNPYAKTMRRNTILR

SEQ ID NO: 25299 - protein, 33 aa, Artificial Sequence
  Quasi-synthetic sequence derived from human genome
LRRRLKYFFMSPCDKFRAKGRKPCKLMLQVVKI

SEQ ID NO: 25300 - protein, 33 aa, Artificial Sequence
  Quasi-synthetic sequence derived from human genome
LILSLLVLFFSAVFVAAGLFAYVLRRRRKKLPF

SEQ ID NO: 25301 - protein, 33 aa, Artificial Sequence
  Quasi-synthetic sequence derived from human genome
PLRILRKRNKALRKIRKLQKQGLLQVTPKGFIC

SEQ ID NO: 25302 - protein, 33 aa, Artificial Sequence
  Quasi-synthetic sequence derived from human genome
KKFQLNQHRRIKLSPLMMYEKLSMIRFRYRILR

SEQ ID NO: 25303 - protein, 33 aa, Artificial Sequence
  Quasi-synthetic sequence derived from human genome
RKFFLFYRQQKWASGVIAIAWLLYCHKTRLKKI

SEQ ID NO: 25304 - protein, 33 aa, Artificial Sequence
  Quasi-synthetic sequence derived from human genome
MRLKKHRWYKKILKSRDPIIFSVGWRRFQTIPL

SEQ ID NO: 25305 - protein, 33 aa, Artificial Sequence
  Quasi-synthetic sequence derived from human genome
TFLTCFAGFWLIWGLIVLLCCFCSFLRRRLKRR

SEQ ID NO: 25306 - protein, 33 aa, Artificial Sequence
  Quasi-synthetic sequence derived from human genome
FKCYFKHTLQQKVFILFLTLWLLSLLKLLNVRR

SEQ ID NO: 25307 - protein, 33 aa, Artificial Sequence
  Quasi-synthetic sequence derived from human genome
IRTPILMTILINFLIFIRILGILLSKLRTRQMR

SEQ ID NO: 25308 - protein, 33 aa, Artificial Sequence
  Quasi-synthetic sequence derived from human genome
KACLSKGRRTLRKPKRVPSIYKLKLRPRIRPRR

SEQ ID NO: 25309 - protein, 33 aa, Artificial Sequence
  Quasi-synthetic sequence derived from human genome
KTRRWRGLGSLFRRACCVALPLQLLLLLFLLLL

SEQ ID NO: 25310 - protein, 33 aa, Artificial Sequence
  Quasi-synthetic sequence derived from human genome
RAKKIDKISRIGFPMAFLIFNMFYWIIYKIVRR

SEQ ID NO: 25311 - protein, 33 aa, Artificial Sequence
  Quasi-synthetic sequence derived from human genome
FVFHRLKIKQILPTIYKRKNLSLFLSISLLIFW

SEQ ID NO: 25312 - protein, 33 aa, Artificial Sequence
  Quasi-synthetic sequence derived from human genome
KELRKYIYIRSCVVIIQKRFRCFQAQKLYKRRK

SEQ ID NO: 25313 - protein, 33 aa, Artificial Sequence
  Quasi-synthetic sequence derived from human genome
PLLRKPWFQLGHSMNPRARKNRSRIPLLRKRRF

SEQ ID NO: 25314 - protein, 33 aa, Artificial Sequence
  Quasi-synthetic sequence derived from human genome
RRLRKNLKSLIIVHPSWFIRTVLAISRPFISVK

SEQ ID NO: 25315 - protein, 33 aa, Artificial Sequence
  Quasi-synthetic sequence derived from human genome
KLLKKRSKQPLGEVKRRLSLYLTKIHFWLPVLK

SEQ ID NO: 25316 - protein, 33 aa, Artificial Sequence
  Quasi-synthetic sequence derived from human genome
FKDCIPRSFRRHIRQHSALTRLRLRNVFRRFLR

SEQ ID NO: 25317 - protein, 33 aa, Artificial Sequence
  Quasi-synthetic sequence derived from human genome
MARRGWRRAPLRRGVGSSPRARRLMRPLWLLLA

SEQ ID NO: 25318 - protein, 33 aa, Artificial Sequence
  Quasi-synthetic sequence derived from human genome
IIKILLRRPNEKKSKAVRLIFVIMIIFFLFWTP

SEQ ID NO: 25319 - protein, 33 aa, Artificial Sequence
  Quasi-synthetic sequence derived from human genome
RRRRAMRAFRMLLYSKSTSLTFHWKLWGRHRGR

SEQ ID NO: 25320 - protein, 33 aa, Artificial Sequence
  Quasi-synthetic sequence derived from human genome
LYHRELTKIPIFSLFRKWKAFSVWRKNVRSKKI

SEQ ID NO: 25321 - protein, 33 aa, Artificial Sequence
  Quasi-synthetic sequence derived from human genome
RSGHVLYSGWLRKSPPEKKLRLFAWRKRWFILR

SEQ ID NO: 25322 - protein, 33 aa, Artificial Sequence
  Quasi-synthetic sequence derived from human genome
RVIGYHVVVWMMAGIPLLLFRWKPLWGVRLRLR

SEQ ID NO: 25323 - protein, 33 aa, Artificial Sequence
  Quasi-synthetic sequence derived from human genome
FFLLVLILSSVFLFRLFKRRQGRIFPEGKMWKL

SEQ ID NO: 25324 - protein, 33 aa, Artificial Sequence
  Quasi-synthetic sequence derived from human genome
GASILLIFFFIALVFFLYRRRKGSRKDVTLRKL

SEQ ID NO: 25325 - protein, 33 aa, Artificial Sequence
  Quasi-synthetic sequence derived from human genome
IRNMSWPRLIRKLRCYLKEMKNLRKLVFSRCLQ

SEQ ID NO: 25326 - protein, 33 aa, Artificial Sequence
  Quasi-synthetic sequence derived from human genome
LSTIVSQRKQIKRKAPRGFLKRVFKRKKPQLRL

SEQ ID NO: 25327 - protein, 33 aa, Artificial Sequence
  Quasi-synthetic sequence derived from human genome
RILRRLFNLCKRCHRQPRFRLPKERSLSYWWNR

SEQ ID NO: 25328 - protein, 33 aa, Artificial Sequence
  Quasi-synthetic sequence derived from human genome
LLRKRRFQLYRSMNSRARKNRSQIVLFQKRRFH

SEQ ID NO: 25329 - protein, 33 aa, Artificial Sequence
  Quasi-synthetic sequence derived from human genome
LVNLIHLFIFRKSNFIFDKLHKVGIKTRRQWRR

SEQ ID NO: 25330 - protein, 33 aa, Artificial Sequence
  Quasi-synthetic sequence derived from human genome
ALIAIAIVAVLLVLTCCFCICKKCLFKKKNKKK

SEQ ID NO: 25331 - protein, 33 aa, Artificial Sequence
  Quasi-synthetic sequence derived from human genome
KVARKFWWKNVKMIVLICVIVFIIILFIVLFAT

SEQ ID NO: 25332 - protein, 33 aa, Artificial Sequence
  Quasi-synthetic sequence derived from human genome
WLLRTKRLHWSRLLFLLGMLIIGSTYQHLRRPR

SEQ ID NO: 25333 - protein, 33 aa, Artificial Sequence
  Quasi-synthetic sequence derived from human genome
KKLFVVTAVSAISVIFLAHHFKRKRGKKKGKIL

SEQ ID NO: 25334 - protein, 33 aa, Artificial Sequence
  Quasi-synthetic sequence derived from human genome
LACSLSWNVIRYSLQKLRLVRWLLKKVFQCRRA

SEQ ID NO: 25335 - protein, 33 aa, Artificial Sequence
  Quasi-synthetic sequence derived from human genome
RRLRKNLRALVVVHATWYVKAFLALLRPFISSK

SEQ ID NO: 25336 - protein, 33 aa, Artificial Sequence
  Quasi-synthetic sequence derived from human genome
PRPVLLRGARAALLLLLPPRLLARPSLLLRRSL

SEQ ID NO: 25337 - protein, 33 aa, Artificial Sequence
  Quasi-synthetic sequence derived from human genome
SLRIARFRFRAFHFLNRFPSVYLRCKMVVCRAY

SEQ ID NO: 25338 - protein, 33 aa, Artificial Sequence
  Quasi-synthetic sequence derived from human genome
CTLLHCFVILPVFLTFFPPSKKHHKKKKRAKRK

SEQ ID NO: 25339 - protein, 33 aa, Artificial Sequence
  Quasi-synthetic sequence derived from human genome
RFRRAFVTVTHRLLLLCLGVVMVCVVLRYMKYR

SEQ ID NO: 25340 - protein, 33 aa, Artificial Sequence
  Quasi-synthetic sequence derived from human genome
FLFLRRRCFLLTFYLWFLFFSRFLLMLFLPLLT

SEQ ID NO: 25341 - protein, 33 aa, Artificial Sequence
  Quasi-synthetic sequence derived from human genome
VWRGTLARMRYKRTKAALTIIRYYRRYKVKSYI

SEQ ID NO: 25342 - protein, 33 aa, Artificial Sequence
  Quasi-synthetic sequence derived from human genome
FIKVVQFFRILRIFKLIAPKLLQIIDKRMSHQK

SEQ ID NO: 25343 - protein, 33 aa, Artificial Sequence
  Quasi-synthetic sequence derived from human genome
FVLLLSGALAYCLALQLYVRRRKKLPSVLLFKK

SEQ ID NO: 25344 - protein, 33 aa, Artificial Sequence
  Quasi-synthetic sequence derived from human genome
IKSFFRQLNLYGFRKRRQCTFRTFTRIFSAKRL

SEQ ID NO: 25345 - protein, 33 aa, Artificial Sequence
  Quasi-synthetic sequence derived from human genome
LVAVILLLLLLLLLFLILRHRRQGKHWTSTQRK

SEQ ID NO: 25346 - protein, 33 aa, Artificial Sequence
  Quasi-synthetic sequence derived from human genome
RRPKRREIPLKVLVKAVLFACMLMRKTMASRVR

SEQ ID NO: 25347 - protein, 33 aa, Artificial Sequence
  Quasi-synthetic sequence derived from human genome
KLLAKKRVVRMLLVIVVLFFLCWLPVYSANTWR

SEQ ID NO: 25348 - protein, 33 aa, Artificial Sequence
  Quasi-synthetic sequence derived from human genome
KKGSLSVLRSFRLLRVFKLAKSWPTLNTLIKII

SEQ ID NO: 25349 - protein, 33 aa, Artificial Sequence
  Quasi-synthetic sequence derived from human genome
WWIILVAILAGILMLALLVFILWKCGFFKRNKK

SEQ ID NO: 25350 - protein, 33 aa, Artificial Sequence
  Quasi-synthetic sequence derived from human genome
QFYLTFPLIFGLFIILLVIFLIWRCFLRNKTRR

SEQ ID NO: 25351 - protein, 33 aa, Artificial Sequence
  Quasi-synthetic sequence derived from human genome
QCFLVVVALLCVPWMLLFKPLVLRRQYLRRKHL

SEQ ID NO: 25352 - protein, 33 aa, Artificial Sequence
  Quasi-synthetic sequence derived from human genome
KLKRKYWWKNCKMMIMLGAICAIIVVVIVIYFF

SEQ ID NO: 25353 - protein, 33 aa, Artificial Sequence
  Quasi-synthetic sequence derived from human genome
MRRLTRRLVLPVFGVLWITVLLFFWVTKRKLEV

SEQ ID NO: 25354 - protein, 33 aa, Artificial Sequence
  Quasi-synthetic sequence derived from human genome
LIQGYWRRYSTRQRFLKLKYYSIILQSRIRMII

SEQ ID NO: 25355 - protein, 33 aa, Artificial Sequence
  Quasi-synthetic sequence derived from human genome
LLIIRSLRQGLRVEKRLKTKAVRMIAIVLAIFL

SEQ ID NO: 25356 - protein, 33 aa, Artificial Sequence
  Quasi-synthetic sequence derived from human genome
LLVQRTIARLRLKKIFSGVFVKVTPQNLKMLRI

SEQ ID NO: 25357 - protein, 33 aa, Artificial Sequence
  Quasi-synthetic sequence derived from human genome
LIQAMWRRYRAKKYLCKVKAACKIQAWYRCWRA

SEQ ID NO: 25358 - protein, 33 aa, Artificial Sequence
  Quasi-synthetic sequence derived from human genome
RTPKWRLPRISARAPYRLRRLRRHTYWPPRRPV

SEQ ID NO: 25359 - protein, 33 aa, Artificial Sequence
  Quasi-synthetic sequence derived from human genome
LMQLYSARQRRRLNRGLRRKQHSLLKRLRKAKK

SEQ ID NO: 25360 - protein, 33 aa, Artificial Sequence
  Quasi-synthetic sequence derived from human genome
LKSARYFLWHTYRWLLLKLLLLLLLLLLLALFL

SEQ ID NO: 25361 - protein, 33 aa, Artificial Sequence
  Quasi-synthetic sequence derived from human genome
KLRIRTKAAVKIQAWWRGTLVRRTLLHAALRAW

SEQ ID NO: 25362 - protein, 33 aa, Artificial Sequence
  Quasi-synthetic sequence derived from human genome
LVAGVLVLLVSLGVAIHLCCRRRRARLRFMKQK

SEQ ID NO: 25363 - protein, 33 aa, Artificial Sequence
  Quasi-synthetic sequence derived from human genome
RHWQIPLGRRFRSLKMWFVFRMYGVKGLQAYIR

SEQ ID NO: 25364 - protein, 33 aa, Artificial Sequence
  Quasi-synthetic sequence derived from human genome
KNFNLPRLCIRKFFPKKKCFVFDLPIHRRKLAQ

SEQ ID NO: 25365 - protein, 33 aa, Artificial Sequence
  Quasi-synthetic sequence derived from human genome
IMSVFPVVMYFWKRFCFWKATRSYLQYRGKKFK

SEQ ID NO: 25366 - protein, 33 aa, Artificial Sequence
  Quasi-synthetic sequence derived from human genome
YLKTVLHRIYGKFLGLRAFIRKQINNIFLRFVY

SEQ ID NO: 25367 - protein, 33 aa, Artificial Sequence
  Quasi-synthetic sequence derived from human genome
LVVLALAMVPILLLGTPLHLLHRHRRRLRRRPA

SEQ ID NO: 25368 - protein, 33 aa, Artificial Sequence
  Quasi-synthetic sequence derived from human genome
VLPLKKPPMKSLRKKGSGKILTPAKKSFLRRLF

SEQ ID NO: 25369 - protein, 33 aa, Artificial Sequence
  Quasi-synthetic sequence derived from human genome
LVVTLFCYCRISRRLRRPPHVGRARRNSLRIIF

SEQ ID NO: 25370 - protein, 33 aa, Artificial Sequence
  Quasi-synthetic sequence derived from human genome
LSIFYLLKIVNFSRLIFHHLKRKAKSVVLVIVL

SEQ ID NO: 25371 - protein, 33 aa, Artificial Sequence
  Quasi-synthetic sequence derived from human genome
LFFIKNQRSSLRIRLFNFSLKLLTCLLYIVRVL

SEQ ID NO: 25372 - protein, 33 aa, Artificial Sequence
  Quasi-synthetic sequence derived from human genome
VYRKYICTSFYPWVNILKISFKRKKFFIHQRQK

SEQ ID NO: 25373 - protein, 33 aa, Artificial Sequence
  Quasi-synthetic sequence derived from human genome
LFLKMLERFCRSRGNLVVQNKQKKRRKKKKKVL

SEQ ID NO: 25374 - protein, 33 aa, Artificial Sequence
  Quasi-synthetic sequence derived from human genome
IMSKFKLLSSLPHWRRIAQKIIREPRKKRVPKK

SEQ ID NO: 25375 - protein, 33 aa, Artificial Sequence
  Quasi-synthetic sequence derived from human genome
ILRTLFRSRSKRRHRTVKLIFAIVVAYFLSWGP

SEQ ID NO: 25376 - protein, 33 aa, Artificial Sequence
  Quasi-synthetic sequence derived from human genome
KKAGLLMALARLCFLLGRLCSRRLKLSQARVYF

SEQ ID NO: 25377 - protein, 33 aa, Artificial Sequence
  Quasi-synthetic sequence derived from human genome
FKFLQRLLLVHGRWSYLRMCKFLCYFFYKNFAF

SEQ ID NO: 25378 - protein, 33 aa, Artificial Sequence
  Quasi-synthetic sequence derived from human genome
LPIYRHLRRFILSVIVFGSIVLLMLWLPIRIIK

SEQ ID NO: 25379 - protein, 33 aa, Artificial Sequence
  Quasi-synthetic sequence derived from human genome
LLWKRLLIARRSRKGFFAQIVLPAVFVCIALVF

SEQ ID NO: 25380 - protein, 33 aa, Artificial Sequence
  Quasi-synthetic sequence derived from human genome
VLYFNPWMRIFIQAKRVKTKHLCYCLYRPRKYL

SEQ ID NO: 25381 - protein, 33 aa, Artificial Sequence
  Quasi-synthetic sequence derived from human genome
ILLIFISLFPEILLIVLKNVRRRSARRNLSCRR

SEQ ID NO: 25382 - protein, 33 aa, Artificial Sequence
  Quasi-synthetic sequence derived from human genome
LARQRYQQMRRSLVKFRSLVHAYVSRRRYLKLR

SEQ ID NO: 25383 - protein, 33 aa, Artificial Sequence
  Quasi-synthetic sequence derived from human genome
RAMLYSRAVRNLKKKLLPWQRRGLLRAQGLRGW

SEQ ID NO: 25384 - protein, 33 aa, Artificial Sequence
  Quasi-synthetic sequence derived from human genome
LLRRVTRNLVRNKLAVITRLLQNLIMGLFLLFF

SEQ ID NO: 25385 - protein, 33 aa, Artificial Sequence
  Quasi-synthetic sequence derived from human genome
CLVLFPRFLGTAFMLWLLDFLCIRKHFLGRRRR

SEQ ID NO: 25386 - protein, 33 aa, Artificial Sequence
  Quasi-synthetic sequence derived from human genome
LLKIKNTFCLWKRLIKLKDNHCEQLRVKIRKLK

SEQ ID NO: 25387 - protein, 33 aa, Artificial Sequence
  Quasi-synthetic sequence derived from human genome
LKPFLLGCPRFVVIDNCIALKKVASRLKKKRKK

SEQ ID NO: 25388 - protein, 33 aa, Artificial Sequence
  Quasi-synthetic sequence derived from human genome
ITMPQYLRKRFGGRRIRLYLSVLSLFLYIFTKI

SEQ ID NO: 25389 - protein, 33 aa, Artificial Sequence
  Quasi-synthetic sequence derived from human genome
RLFRIKCVTRIQAYWRGCVVRKWYRNLRKTVPP

SEQ ID NO: 25390 - protein, 33 aa, Artificial Sequence
  Quasi-synthetic sequence derived from human genome
LKSIKYLICTRYKWLIIKIVLALLGLLMLGLFL

SEQ ID NO: 25391 - protein, 33 aa, Artificial Sequence
  Quasi-synthetic sequence derived from human genome
LLRRWKHWLLLLGICCPKPHGRVSSRLRLSRSL

SEQ ID NO: 25392 - protein, 33 aa, Artificial Sequence
  Quasi-synthetic sequence derived from human genome
IMAKLLPLRALPLLFNLIKVVPRVFGRMVGKSR

SEQ ID NO: 25393 - protein, 33 aa, Artificial Sequence
  Quasi-synthetic sequence derived from human genome
RMRVKKLPMILALHLKRFKYMEQLHRYTKLSYR

SEQ ID NO: 25394 - protein, 33 aa, Artificial Sequence
  Quasi-synthetic sequence derived from human genome
LVRKAFRHRLWAVLTVQAYARGMIARRLHQRLR

SEQ ID NO: 25395 - protein, 33 aa, Artificial Sequence
  Quasi-synthetic sequence derived from human genome
IFLLTILAALALLVLILLCLLIYYCRRRCLKPR

SEQ ID NO: 25396 - protein, 33 aa, Artificial Sequence
  Quasi-synthetic sequence derived from human genome
LSRALRYYYNKRILHKTKGKRFTYKFNFNKLVL

SEQ ID NO: 25397 - protein, 33 aa, Artificial Sequence
  Quasi-synthetic sequence derived from human genome
FLLLILLCMSLLLFQVIRLYQRRRWTIRAMHLF

SEQ ID NO: 25398 - protein, 33 aa, Artificial Sequence
  Quasi-synthetic sequence derived from human genome
RGRLLRRTLIRYANLASVLVLRSVSTRVLKRFP

SEQ ID NO: 25399 - protein, 33 aa, Artificial Sequence
  Quasi-synthetic sequence derived from human genome
FLVHWFKKLSQKRFKQLVERLLQFISLRLFPAK

SEQ ID NO: 25400 - protein, 33 aa, Artificial Sequence
  Quasi-synthetic sequence derived from human genome
CPVRIRNRCVMTSRPRGVKRRWRLSRIVFRHLA

SEQ ID NO: 25401 - protein, 33 aa, Artificial Sequence
  Quasi-synthetic sequence derived from human genome
RLQRKAVISLQSYFRMRKARQYYLKMYKAIIVI

SEQ ID NO: 25402 - protein, 33 aa, Artificial Sequence
  Quasi-synthetic sequence derived from human genome
AWLRRRYLRLRYEDLVRQPRAQLRRLLRFSGLR

SEQ ID NO: 25403 - protein, 33 aa, Artificial Sequence
  Quasi-synthetic sequence derived from human genome
VFRQPLSSLWRSLVPLFCWLRATFWLLATKRRK

SEQ ID NO: 25404 - protein, 33 aa, Artificial Sequence
  Quasi-synthetic sequence derived from human genome
PRKPQPCRCRRRVRPSIRLLSPVLSLILLLIAL

SEQ ID NO: 25405 - protein, 33 aa, Artificial Sequence
  Quasi-synthetic sequence derived from human genome
MCYALCNKAFRDTFRLLLLCRWDKRRWRKIPKR

SEQ ID NO: 25406 - protein, 33 aa, Artificial Sequence
  Quasi-synthetic sequence derived from human genome
MTILASQKVKKIWQKQFRWPKNRLQILKFCKAR

SEQ ID NO: 25407 - protein, 33 aa, Artificial Sequence
  Quasi-synthetic sequence derived from human genome
SRLRHPRTRWKNWWVRGILTLAMIAFFFIIIYL

SEQ ID NO: 25408 - protein, 33 aa, Artificial Sequence
  Quasi-synthetic sequence derived from human genome
KRLLLVLVSAFFIFWSPFNVVLLVHLWRRVMLK

SEQ ID NO: 25409 - protein, 33 aa, Artificial Sequence
  Quasi-synthetic sequence derived from human genome
AIAAAIALLALTALLLVAMICRRRRRRKKARGP

SEQ ID NO: 25410 - protein, 33 aa, Artificial Sequence
  Quasi-synthetic sequence derived from human genome
HISVMGGMIALLLSILCLVMILYTRRRWCKRRR

SEQ ID NO: 25411 - protein, 33 aa, Artificial Sequence
  Quasi-synthetic sequence derived from human genome
LVAVVLLLLLLLLLFLILRHRRQGKHWTSTQRK

SEQ ID NO: 25412 - protein, 33 aa, Artificial Sequence
  Quasi-synthetic sequence derived from human genome
VFLRHRYQSRSAFLGRYLKKKKSVVSRLKKAKR

SEQ ID NO: 25413 - protein, 33 aa, Artificial Sequence
  Quasi-synthetic sequence derived from human genome
FLPARQLWKWFGKPTQRRGMKGKARKLFYKAIV

SEQ ID NO: 25414 - protein, 33 aa, Artificial Sequence
  Quasi-synthetic sequence derived from human genome
LLRLKAFILFGKLARVVGMSKKHFFKGEVKKAW

SEQ ID NO: 25415 - protein, 33 aa, Artificial Sequence
  Quasi-synthetic sequence derived from human genome
ILKTLLRCRNEKKRHRAVRVIFTIMIVYFLFWT

SEQ ID NO: 25416 - protein, 33 aa, Artificial Sequence
  Quasi-synthetic sequence derived from human genome
RMKVKKLPMILALHLKRFKYMDQLHRYTKLSYR

SEQ ID NO: 25417 - protein, 33 aa, Artificial Sequence
  Quasi-synthetic sequence derived from human genome
LSRALRYYYNKRILHKTKGKRFTYKFNFSKLIV

SEQ ID NO: 25418 - protein, 33 aa, Artificial Sequence
  Quasi-synthetic sequence derived from human genome
ALYRKVKLLNQVRLLRVQLCHMKNMFKTCRLAK

SEQ ID NO: 25419 - protein, 33 aa, Artificial Sequence
  Quasi-synthetic sequence derived from human genome
KKTFKCIKCSKSFFMLSCLIRHKRIHIRQNIYK

SEQ ID NO: 25420 - protein, 33 aa, Artificial Sequence
  Quasi-synthetic sequence derived from human genome
SWLVWGVILFVYLVIRALRLWRTAKLQVTLKKY

SEQ ID NO: 25421 - protein, 33 aa, Artificial Sequence
  Quasi-synthetic sequence derived from human genome
FIRHWRQWNRIFRWKCHDIVKSKVFYWLVILIV

SEQ ID NO: 25422 - protein, 33 aa, Artificial Sequence
  Quasi-synthetic sequence derived from human genome
LLLLRWRRPALHRPIKVNLLIPVAYLVFWAFLL

SEQ ID NO: 25423 - protein, 33 aa, Artificial Sequence
  Quasi-synthetic sequence derived from human genome
RRRPALGWLARLLRSRAGSRKRPLTLLQRAGLL

SEQ ID NO: 25424 - protein, 33 aa, Artificial Sequence
  Quasi-synthetic sequence derived from human genome
RFLRRKVQEGRLRRKQIKFEKDLRRIWLKAGLK

SEQ ID NO: 25425 - protein, 33 aa, Artificial Sequence
  Quasi-synthetic sequence derived from human genome
RRAKRIRNAALQHLFIRKSFRPFKCLQCGKAFR

SEQ ID NO: 25426 - protein, 33 aa, Artificial Sequence
  Quasi-synthetic sequence derived from human genome
VLVFQGTTKINTFNWSKVRKLSFKRKRFLIKLH

SEQ ID NO: 25427 - protein, 33 aa, Artificial Sequence
  Quasi-synthetic sequence derived from human genome
LLLMILKPVQKLFAIIVGRGIRKWWQALPPNKK

SEQ ID NO: 25428 - protein, 33 aa, Artificial Sequence
  Quasi-synthetic sequence derived from human genome
LFFRRPKASLPRVFVLRALLMVLVFLLVVSYWL

SEQ ID NO: 25429 - protein, 33 aa, Artificial Sequence
  Quasi-synthetic sequence derived from human genome
LAAMVWRRLLRKRWVLALVFGLSLVYFLSSTFK

SEQ ID NO: 25430 - protein, 33 aa, Artificial Sequence
  Quasi-synthetic sequence derived from human genome
LLMNRRKFLYQFKNVRWAKGRRETYLCYVVKRR

SEQ ID NO: 25431 - protein, 33 aa, Artificial Sequence
  Quasi-synthetic sequence derived from human genome
KVRKVLQLLRLRQIFNGTFVKLNKASINMLRIV

SEQ ID NO: 25432 - protein, 33 aa, Artificial Sequence
  Quasi-synthetic sequence derived from human genome
AAYIFRKLRLDRAFHFTAMPKLLSYRMKKKIHR

SEQ ID NO: 25433 - protein, 33 aa, Artificial Sequence
  Quasi-synthetic sequence derived from human genome
FSAILKSLQSYFSPTLFRVIRLARIGRILRLIR

SEQ ID NO: 25434 - protein, 33 aa, Artificial Sequence
  Quasi-synthetic sequence derived from human genome
KRMAKTSAGLKLILKRYKIGASRKTFWKRKKIN

SEQ ID NO: 25435 - protein, 33 aa, Artificial Sequence
  Quasi-synthetic sequence derived from human genome
VRALWFWAFSLQAKVWATWLAFVLERRRKKARL

SEQ ID NO: 25436 - protein, 33 aa, Artificial Sequence
  Quasi-synthetic sequence derived from human genome
CWKFFIEKVRRQLKVILCFSPVGSVLRVRARKF

SEQ ID NO: 25437 - protein, 33 aa, Artificial Sequence
  Quasi-synthetic sequence derived from human genome
RVLYFSIFSMFCLIGLATWQVFYLRRFFKAKKL

SEQ ID NO: 25438 - protein, 33 aa, Artificial Sequence
  Quasi-synthetic sequence derived from human genome
KKYPQPKGQKKKKIVKYGMGGLIILFLIAIIWF

SEQ ID NO: 25439 - protein, 33 aa, Artificial Sequence
  Quasi-synthetic sequence derived from human genome
KLSRALRYYYNKRILHKTKGKRFTYKFNFNKLV

SEQ ID NO: 25440 - protein, 33 aa, Artificial Sequence
  Quasi-synthetic sequence derived from human genome
VLRFLRLFGPGKNVPSVWRSARRKRKKKHRELI

SEQ ID NO: 25441 - protein, 33 aa, Artificial Sequence
  Quasi-synthetic sequence derived from human genome
RALALFVITCLVIFVLVHSFLKKLLGKKLTRCL

SEQ ID NO: 25442 - protein, 33 aa, Artificial Sequence
  Quasi-synthetic sequence derived from human genome
LKTFVFFIWRRYWRTLVLLLLVLLTVFLLLVFY

SEQ ID NO: 25443 - protein, 33 aa, Artificial Sequence
  Quasi-synthetic sequence derived from human genome
WKGFQTRKRLKKLPSAVIALQRSFRSKRSKMLL

SEQ ID NO: 25444 - protein, 33 aa, Artificial Sequence
  Quasi-synthetic sequence derived from human genome
RKTKDAFYKNIVKKGYLLKKGKGKRWKNLYFIL

SEQ ID NO: 25445 - protein, 33 aa, Artificial Sequence
  Quasi-synthetic sequence derived from human genome
TRRPRGSTARTLLRLLLRLLLFLGLLALALHFL

SEQ ID NO: 25446 - protein, 33 aa, Artificial Sequence
  Quasi-synthetic sequence derived from human genome
WLAIQKLRSKIHKKVDRKASKGRKLRFHVLSKL

SEQ ID NO: 25447 - protein, 33 aa, Artificial Sequence
  Quasi-synthetic sequence derived from human genome
LRLTGWEPGALLMRRPPVPPPPRRRRRRRLLFW

SEQ ID NO: 25448 - protein, 33 aa, Artificial Sequence
  Quasi-synthetic sequence derived from human genome
RTLTQKRYLVKFICLSIWGLSLLLALPVLLFRR

SEQ ID NO: 25449 - protein, 33 aa, Artificial Sequence
  Quasi-synthetic sequence derived from human genome
LILLTGVLCHRFHGLWYMKMMWAWLQAKRKPRK

SEQ ID NO: 25450 - protein, 33 aa, Artificial Sequence
  Quasi-synthetic sequence derived from human genome
ILLVLLCLLLYYCRRKCLKPRQHHRKLQLPAGL

SEQ ID NO: 25451 - protein, 33 aa, Artificial Sequence
  Quasi-synthetic sequence derived from human genome
RLPVKKIRKQMKLLLLLLLLSCAAWLTYVHLGL

SEQ ID NO: 25452 - protein, 33 aa, Artificial Sequence
  Quasi-synthetic sequence derived from human genome
VVSRKKQKIIKMLLIVALLFILSWLPLWTLMML

SEQ ID NO: 25453 - protein, 33 aa, Artificial Sequence
  Quasi-synthetic sequence derived from human genome
LLSVLAMFFLLVLILSSVFLFRLFKRRQGRIFP

SEQ ID NO: 25454 - protein, 33 aa, Artificial Sequence
  Quasi-synthetic sequence derived from human genome
LVLLALCLLLPLLLLGGWKRWRRGRAARHVVAV

SEQ ID NO: 25455 - protein, 33 aa, Artificial Sequence
  Quasi-synthetic sequence derived from human genome
LKTYLRRFREMKPRVLQRWSRQILRGLHFLHSR

SEQ ID NO: 25456 - protein, 33 aa, Artificial Sequence
  Quasi-synthetic sequence derived from human genome
PMIIVIFCYLRIWILVLQVRQRVKPDRKPKLKP

SEQ ID NO: 25457 - protein, 33 aa, Artificial Sequence
  Quasi-synthetic sequence derived from human genome
KIKSKYASYLSFIKILLKRGGVKVSTKNLIKLF

SEQ ID NO: 25458 - protein, 33 aa, Artificial Sequence
  Quasi-synthetic sequence derived from human genome
FRYLQRLLLVHGRWSYFRMCKFLCYFFYKNFAF

SEQ ID NO: 25459 - protein, 33 aa, Artificial Sequence
  Quasi-synthetic sequence derived from human genome
VKFYIHAIGIGKCKRRIVKCGKLHKKGRKLCVY

SEQ ID NO: 25460 - protein, 33 aa, Artificial Sequence
  Quasi-synthetic sequence derived from human genome
YILFRATRKPLSGRTPRLVYKWFLLIYKLSYAF

SEQ ID NO: 25461 - protein, 33 aa, Artificial Sequence
  Quasi-synthetic sequence derived from human genome
FWFCLAWCTFFLIPSIIFAVKTSKYFRPIRKRL

SEQ ID NO: 25462 - protein, 33 aa, Artificial Sequence
  Quasi-synthetic sequence derived from human genome
LYGFIFYLLASVLLSLLLILKAGRRWNKYFKSR

SEQ ID NO: 25463 - protein, 33 aa, Artificial Sequence
  Quasi-synthetic sequence derived from human genome
AVTLAYLIFCLCSLVGILHLQRALVLRRKRKRM

SEQ ID NO: 25464 - protein, 33 aa, Artificial Sequence
  Quasi-synthetic sequence derived from human genome
AAERLFKLKPPVWYLRSLVQNLLLIRRFKKTII

SEQ ID NO: 25465 - protein, 33 aa, Artificial Sequence
  Quasi-synthetic sequence derived from human genome
WRTRMRAFHLSLPGGAQLLTYLVKVLKRRTWRR

SEQ ID NO: 25466 - protein, 33 aa, Artificial Sequence
  Quasi-synthetic sequence derived from human genome
KDLLRRVLVLMNSKHTFLALCALRFMRRIIGLK

SEQ ID NO: 25467 - protein, 33 aa, Artificial Sequence
  Quasi-synthetic sequence derived from human genome
RFLLLFIGFVCVLLSFFMARVFMRMKLPRSLAL

SEQ ID NO: 25468 - protein, 33 aa, Artificial Sequence
  Quasi-synthetic sequence derived from human genome
LVFGEKFKLFTLVSACIPVFRLARRRKKILFYC

SEQ ID NO: 25469 - protein, 33 aa, Artificial Sequence
  Quasi-synthetic sequence derived from human genome
FRVFHLSLWRLMKKVQITKPPPNFKFAFRAMVL

SEQ ID NO: 25470 - protein, 33 aa, Artificial Sequence
  Quasi-synthetic sequence derived from human genome
FLKKLLGKKLTRCLKPFENSRLRLWTKWVFAGV

SEQ ID NO: 25471 - protein, 33 aa, Artificial Sequence
  Quasi-synthetic sequence derived from human genome
MAKFRRRTCIILALFILFIFSLMMGLKMLRPNT

SEQ ID NO: 25472 - protein, 33 aa, Artificial Sequence
  Quasi-synthetic sequence derived from human genome
WRFLRIVCKTARRDLFGLSVLIRVRLELRRHQR

SEQ ID NO: 25473 - protein, 33 aa, Artificial Sequence
  Quasi-synthetic sequence derived from human genome
FKCLYYLIWKNYKKYIIIAFILIILIIFLVLFI

SEQ ID NO: 25474 - protein, 33 aa, Artificial Sequence
  Quasi-synthetic sequence derived from human genome
WKRRLIRLLLYHFKQEEKLLKSQRNLVAKMKKV

SEQ ID NO: 25475 - protein, 33 aa, Artificial Sequence
  Quasi-synthetic sequence derived from human genome
IFYFLYGKTRSRIPLVRNRRFQLCRCMNPRARK

SEQ ID NO: 25476 - protein, 33 aa, Artificial Sequence
  Quasi-synthetic sequence derived from human genome
LVWRVLHALLCLHRTLTSWLRVRFGTWNWIWRR

SEQ ID NO: 25477 - protein, 33 aa, Artificial Sequence
  Quasi-synthetic sequence derived from human genome
RDKFKKFDHRYLRKILIRKNLPKSSIVSLYKKL

SEQ ID NO: 25478 - protein, 33 aa, Artificial Sequence
  Quasi-synthetic sequence derived from human genome
LYKRYGGFLRRIRPKLKWDNQKRYGGFLRRQFK

SEQ ID NO: 25479 - protein, 33 aa, Artificial Sequence
  Quasi-synthetic sequence derived from human genome
ALTFVCLILLIAVLVYWRGCNKIKSKGFPRRFR

SEQ ID NO: 25480 - protein, 33 aa, Artificial Sequence
  Quasi-synthetic sequence derived from human genome
LVLALASYRRLCLRLRLADCLVPYSRALYRRRR

SEQ ID NO: 25481 - protein, 33 aa, Artificial Sequence
  Quasi-synthetic sequence derived from human genome
CTRCLNKIMKTRVCRRLRRANRVLRARCRRAVK

SEQ ID NO: 25482 - protein, 33 aa, Artificial Sequence
  Quasi-synthetic sequence derived from human genome
PRYLRRFREMKPRVLQRWSRQILRGLHFLHSRV

SEQ ID NO: 25483 - protein, 33 aa, Artificial Sequence
  Quasi-synthetic sequence derived from human genome
LVIRNLQRVIPIRRAPLRSKIEIVRRILGVQKF

SEQ ID NO: 25484 - protein, 33 aa, Artificial Sequence
  Quasi-synthetic sequence derived from human genome
LRTLLRRRLFSYPTKYYFMVLVLSLITFSVLRI

SEQ ID NO: 25485 - protein, 33 aa, Artificial Sequence
  Quasi-synthetic sequence derived from human genome
RKTFWFFFQRHKLKGTSFLLGGVVIVLLRWPLL

SEQ ID NO: 25486 - protein, 33 aa, Artificial Sequence
  Quasi-synthetic sequence derived from human genome
IRNMSWPRLIRKLRCYLKEMKNLRKLVFSRCHH

SEQ ID NO: 25487 - protein, 33 aa, Artificial Sequence
  Quasi-synthetic sequence derived from human genome
RALLTAVTNVLIFFWCLAFLWGLLILLKYRWRK

SEQ ID NO: 25488 - protein, 33 aa, Artificial Sequence
  Quasi-synthetic sequence derived from human genome
MRLTRKRLCSFLIALYCLFSLYAAYHVFFGRRR

SEQ ID NO: 25489 - protein, 33 aa, Artificial Sequence
  Quasi-synthetic sequence derived from human genome
RKLVIVRAGCPIRLFAIVRGRPAPKVTWRKVGI

SEQ ID NO: 25490 - protein, 33 aa, Artificial Sequence
  Quasi-synthetic sequence derived from human genome
LRAPALRRLLPPLLLLLLSLPPRARAKYVRGNL

SEQ ID NO: 25491 - protein, 33 aa, Artificial Sequence
  Quasi-synthetic sequence derived from human genome
RRLRKNLKSFIIVHPSWFIRTILAVTRPFISSK

SEQ ID NO: 25492 - protein, 33 aa, Artificial Sequence
  Quasi-synthetic sequence derived from human genome
KLLKKIGISWNKKYRKQHGPLRKFLQLHSQIFL

SEQ ID NO: 25493 - protein, 33 aa, Artificial Sequence
  Quasi-synthetic sequence derived from human genome
CWKFFIDRIRRQLKVTLCFSPVGNKLRVRSRKF

SEQ ID NO: 25494 - protein, 33 aa, Artificial Sequence
  Quasi-synthetic sequence derived from human genome
RGVGKVPRKKVNVKVFIIIAVFFICFVPFHFAR

SEQ ID NO: 25495 - protein, 33 aa, Artificial Sequence
  Quasi-synthetic sequence derived from human genome
PKLAFVIRIRGINGVSPKVRKVLQLLRLRQIFN

SEQ ID NO: 25496 - protein, 33 aa, Artificial Sequence
  Quasi-synthetic sequence derived from human genome
GLLVAGVLVLLVSLGVAIHLCCRRRRARLRFMK

SEQ ID NO: 25497 - protein, 33 aa, Artificial Sequence
  Quasi-synthetic sequence derived from human genome
PVILATLGVALLFIVRKKRKEKRLKRLRDAKSL

SEQ ID NO: 25498 - protein, 33 aa, Artificial Sequence
  Quasi-synthetic sequence derived from human genome
HRYQQLGAGLKVLFKKTHRILRRLFNLCKRCHR

SEQ ID NO: 25499 - protein, 33 aa, Artificial Sequence
  Quasi-synthetic sequence derived from human genome
KLWRRNLWIFVSKFTEFDARKLHKLYKMAHKKR

SEQ ID NO: 25500 - protein, 33 aa, Artificial Sequence
  Quasi-synthetic sequence derived from human genome
KRRLLPRVRLLPLLLALAVGSAFYTIWSGWHRR

SEQ ID NO: 25501 - protein, 33 aa, Artificial Sequence
  Quasi-synthetic sequence derived from human genome
LRALRLLRIFKVTKYWASLRNLVVSLLNSMKSI

SEQ ID NO: 25502 - protein, 33 aa, Artificial Sequence
  Quasi-synthetic sequence derived from human genome
MPLFLKLFICFIFIRSSPTIVSNKRVSKRKFIP

SEQ ID NO: 25503 - protein, 33 aa, Artificial Sequence
  Quasi-synthetic sequence derived from human genome
KSTLLQRIAMLWGSGKCKALTKFKFVFFLRLSR

SEQ ID NO: 25504 - protein, 33 aa, Artificial Sequence
  Quasi-synthetic sequence derived from human genome
FRLLWPILGGALSLTFVLGLLSGFLVWRRCRRR

SEQ ID NO: 25505 - protein, 33 aa, Artificial Sequence
  Quasi-synthetic sequence derived from human genome
RARLAFRNLGALLPRLHQLCCRMPRTLRRLFVA

SEQ ID NO: 25506 - protein, 33 aa, Artificial Sequence
  Quasi-synthetic sequence derived from human genome
LWLRAKFQRLLFKLGCYIQKNCGKFLVVGLLIF

SEQ ID NO: 25507 - protein, 33 aa, Artificial Sequence
  Quasi-synthetic sequence derived from human genome
IRKKFRMMKIPKPILFGLNIAMKKQTKISGKMQ

SEQ ID NO: 25508 - protein, 33 aa, Artificial Sequence
  Quasi-synthetic sequence derived from human genome
IKLKNKIKYRAEACIKMQKTIRMWLCKRRHKPR

SEQ ID NO: 25509 - protein, 33 aa, Artificial Sequence
  Quasi-synthetic sequence derived from human genome
LAIILLIFISLFPEILLIVLKNVRRRSARVTKR

SEQ ID NO: 25510 - protein, 33 aa, Artificial Sequence
  Quasi-synthetic sequence derived from human genome
ITQYLIRIRKLTLKRQRKLVPLSKKVERREKRR

SEQ ID NO: 25511 - protein, 33 aa, Artificial Sequence
  Quasi-synthetic sequence derived from human genome
LIAITRNPVFPRFIKIIEVKNKKLVELLRRKVR

SEQ ID NO: 25512 - protein, 33 aa, Artificial Sequence
  Quasi-synthetic sequence derived from human genome
REHVLNLAALTLQRCLRGFFIKRRFRSLRHKII

SEQ ID NO: 25513 - protein, 33 aa, Artificial Sequence
  Quasi-synthetic sequence derived from human genome
ILKSPEIQRALRAPRKKIHRRVLKKNPLKNLRI

SEQ ID NO: 25514 - protein, 33 aa, Artificial Sequence
  Quasi-synthetic sequence derived from human genome
KLFKSLLGKKKMRILILSLDTAGKTTILYKLKL

SEQ ID NO: 25515 - protein, 33 aa, Artificial Sequence
  Quasi-synthetic sequence derived from human genome
LLKKINFHKITLRLWNTKDKMSRKVRYYRLKTA

SEQ ID NO: 25516 - protein, 33 aa, Artificial Sequence
  Quasi-synthetic sequence derived from human genome
VKRVNHWLTCSRWKKVQWCSLSVIKLKNKIKYR

SEQ ID NO: 25517 - protein, 33 aa, Artificial Sequence
  Quasi-synthetic sequence derived from human genome
LRRQWKCVQRRCLRHLAHRLRRRHQRCQRRTPL

SEQ ID NO: 25518 - protein, 33 aa, Artificial Sequence
  Quasi-synthetic sequence derived from human genome
IKLVVTFKSGKFIRIFQLSNNIRSVVLRHCKKR

SEQ ID NO: 25519 - protein, 33 aa, Artificial Sequence
  Quasi-synthetic sequence derived from human genome
VVCSGWLRKSPPEKKLKRYAWKRRWFVLRSGRL

SEQ ID NO: 25520 - protein, 33 aa, Artificial Sequence
  Quasi-synthetic sequence derived from human genome
NRVAKMGLILAIRSILLVIPFPFTLRRLKYCQK

SEQ ID NO: 25521 - protein, 33 aa, Artificial Sequence
  Quasi-synthetic sequence derived from human genome
YLLLPPVLNPIVYSVRTKQIRLGILHKFVLRRR

SEQ ID NO: 25522 - protein, 33 aa, Artificial Sequence
  Quasi-synthetic sequence derived from human genome
KKRVRFTKRKQKVPGFPKRFTVKPVVLGFPYFH

SEQ ID NO: 25523 - protein, 33 aa, Artificial Sequence
  Quasi-synthetic sequence derived from human genome
IPLFRRFGRQRKIGGRGRIISPYRTPVLRRHRY

SEQ ID NO: 25524 - protein, 33 aa, Artificial Sequence
  Quasi-synthetic sequence derived from human genome
RALRLLRIFKVTKYWASLRNLVVSLLNSMKSII

SEQ ID NO: 25525 - protein, 33 aa, Artificial Sequence
  Quasi-synthetic sequence derived from human genome
YLKTILHRVYGKFLGLRAYIRKQCNHIFLRFIY

SEQ ID NO: 25526 - protein, 33 aa, Artificial Sequence
  Quasi-synthetic sequence derived from human genome
LSRALRYYYNKRILHKTKGKRFTYKFNFSKVVL

SEQ ID NO: 25527 - protein, 33 aa, Artificial Sequence
  Quasi-synthetic sequence derived from human genome
VTLLKKKYPLAKYLCVLLIVAGVALFMYKPKKV

SEQ ID NO: 25528 - protein, 33 aa, Artificial Sequence
  Quasi-synthetic sequence derived from human genome
VLGQFCFLQRLLLVHGRWSYVRICKFLRYFFYK

SEQ ID NO: 25529 - protein, 33 aa, Artificial Sequence
  Quasi-synthetic sequence derived from human genome
RRLGLALGLLLALVLAPRVLRAKPTVRKERVVR

SEQ ID NO: 25530 - protein, 33 aa, Artificial Sequence
  Quasi-synthetic sequence derived from human genome
VVCTGWLRKSPPEKKLRRYAWKKRWFILRSGRM

SEQ ID NO: 25531 - protein, 33 aa, Artificial Sequence
  Quasi-synthetic sequence derived from human genome
KIALREIRMLKQLKHPNLVNLLEVFRRKRRLHL

SEQ ID NO: 25532 - protein, 33 aa, Artificial Sequence
  Quasi-synthetic sequence derived from human genome
ARRRIRLWHRGAMVIQATWRGYRVRRNLAHLCR

SEQ ID NO: 25533 - protein, 33 aa, Artificial Sequence
  Quasi-synthetic sequence derived from human genome
VLMVVSGAVLVYFVVRTVRMRRRNRKTRRYGVL

SEQ ID NO: 25534 - protein, 33 aa, Artificial Sequence
  Quasi-synthetic sequence derived from human genome
VLLLLFMMTVFFAKKLYLLKTENTKLRRTNKFR

SEQ ID NO: 25535 - protein, 33 aa, Artificial Sequence
  Quasi-synthetic sequence derived from human genome
RLVVYKIVYMFLFLLCLTLFQVYYSLWRKLLKA

SEQ ID NO: 25536 - protein, 33 aa, Artificial Sequence
  Quasi-synthetic sequence derived from human genome
LHRWLRIKLWISTVALALVPFLLLIPKFARWFS

SEQ ID NO: 25537 - protein, 33 aa, Artificial Sequence
  Quasi-synthetic sequence derived from human genome
RTQLLYLLAVAVVIILFIILLGVIMAKRKRKHG

SEQ ID NO: 25538 - protein, 33 aa, Artificial Sequence
  Quasi-synthetic sequence derived from human genome
RQKCPPWWYRFAHKFLIWNCSPYWIKFKKCIYF

SEQ ID NO: 25539 - protein, 33 aa, Artificial Sequence
  Quasi-synthetic sequence derived from human genome
KSNTVYNPVIYVFMIRKFRRSLLQLLCLRLLRC

SEQ ID NO: 25540 - protein, 33 aa, Artificial Sequence
  Quasi-synthetic sequence derived from human genome
LITGYIQICFWVIAAARQIQKMRKFYFRRIMRM

SEQ ID NO: 25541 - protein, 33 aa, Artificial Sequence
  Quasi-synthetic sequence derived from human genome
RKKRSWYLTWKYKLTNQRALRRFCQTGAVLFLL

SEQ ID NO: 25542 - protein, 33 aa, Artificial Sequence
  Quasi-synthetic sequence derived from human genome
RFIKIIEVKNKKLVELLRRKVRLAQPYVGVFLK

SEQ ID NO: 25543 - protein, 33 aa, Artificial Sequence
  Quasi-synthetic sequence derived from human genome
KLRLFCLQLRTVDRKLKLVCGSHSFIKVIKAKK

SEQ ID NO: 25544 - protein, 33 aa, Artificial Sequence
  Quasi-synthetic sequence derived from human genome
RRRRARLRFMKQKFNIVCLKISGFTTCCCFQIL

SEQ ID NO: 25545 - protein, 33 aa, Artificial Sequence
  Quasi-synthetic sequence derived from human genome
RVRYWDLLLLIPNVLFLIFLLWKLPSARAKIRI

SEQ ID NO: 25546 - protein, 33 aa, Artificial Sequence
  Quasi-synthetic sequence derived from human genome
LRGLKRKWIRCSAQATVLHLKKFIAKKLNLSSF

SEQ ID NO: 25547 - protein, 33 aa, Artificial Sequence
  Quasi-synthetic sequence derived from human genome
KWKKHRQIVKPGFNISILKIFITMMSKSVRMML

SEQ ID NO: 25548 - protein, 33 aa, Artificial Sequence
  Quasi-synthetic sequence derived from human genome
ILSTSYNRFRKFPFFTRPLLSKWCPKSLFKKKP

SEQ ID NO: 25549 - protein, 33 aa, Artificial Sequence
  Quasi-synthetic sequence derived from human genome
RIKKRSRSVFYRLTILILVFAVSWMPLHLFHVV

SEQ ID NO: 25550 - protein, 33 aa, Artificial Sequence
  Quasi-synthetic sequence derived from human genome
PLLNPFIYSLRNKEVINIMKKIMKKRKFCHILK

SEQ ID NO: 25551 - protein, 33 aa, Artificial Sequence
  Quasi-synthetic sequence derived from human genome
KRKHFRLVLRLVLRGGRELGTFHSRLIKVISKP

SEQ ID NO: 25552 - protein, 33 aa, Artificial Sequence
  Quasi-synthetic sequence derived from human genome
IFRLVQASGQKAPRPAARRKARRLLKTVLMILL

SEQ ID NO: 25553 - protein, 33 aa, Artificial Sequence
  Quasi-synthetic sequence derived from human genome
YNHYLFSGCFLVVLLAILLYLLRLRRIHRRTPR

SEQ ID NO: 25554 - protein, 33 aa, Artificial Sequence
  Quasi-synthetic sequence derived from human genome
QIVLAKKMLRKALKLLNRIFPYNLISLFLHIHV

SEQ ID NO: 25555 - protein, 33 aa, Artificial Sequence
  Quasi-synthetic sequence derived from human genome
LKRFLLARRSRRGLFAQIVLPALFVGLALVFSL

SEQ ID NO: 25556 - protein, 33 aa, Artificial Sequence
  Quasi-synthetic sequence derived from human genome
VFFLINPTKTFYYKSRFWLLKLLFRVFTAPFHK

SEQ ID NO: 25557 - protein, 33 aa, Artificial Sequence
  Quasi-synthetic sequence derived from human genome
PGARRRQRGRLMRRLVRRLRRWGLLPRTNTPAR

SEQ ID NO: 25558 - protein, 33 aa, Artificial Sequence
  Quasi-synthetic sequence derived from human genome
RYKIRHTKKKTFKCMKCSKSFFMLSHLIQHKRI

SEQ ID NO: 25559 - protein, 33 aa, Artificial Sequence
  Quasi-synthetic sequence derived from human genome
LSIFYLLKIANFSNLLFLHLKRRVRSVILVILL

SEQ ID NO: 25560 - protein, 33 aa, Artificial Sequence
  Quasi-synthetic sequence derived from human genome
CKRKQLLKPVFLNSWIDLRATYKLFYRRKPKGL

SEQ ID NO: 25561 - protein, 33 aa, Artificial Sequence
  Quasi-synthetic sequence derived from human genome
FFIFLKILKLLISKLKAHQMCFRDYKYRLAKST

SEQ ID NO: 25562 - protein, 33 aa, Artificial Sequence
  Quasi-synthetic sequence derived from human genome
RFWPFLVIIVILSALFLGTLACFCVWRRKRKEK

SEQ ID NO: 25563 - protein, 33 aa, Artificial Sequence
  Quasi-synthetic sequence derived from human genome
RKHRFQLYRSMNSRARKNRSQIVLFQKRRFHFF

SEQ ID NO: 25564 - protein, 33 aa, Artificial Sequence
  Quasi-synthetic sequence derived from human genome
YLVSGIRTPPVRRNSKLATLGRIFKPWKWRKKK

SEQ ID NO: 25565 - protein, 33 aa, Artificial Sequence
  Quasi-synthetic sequence derived from human genome
FLCLFFYNCYKGYLPRQCLKFRSALLIGKKKPK

SEQ ID NO: 25566 - protein, 33 aa, Artificial Sequence
  Quasi-synthetic sequence derived from human genome
LILKVAVGTRLHRVPVKIKRMCVNGLCRARKHR

SEQ ID NO: 25567 - protein, 33 aa, Artificial Sequence
  Quasi-synthetic sequence derived from human genome
PLLSPVPKLCRIKASKALKKKIRRFQPTALKVM

SEQ ID NO: 25568 - protein, 33 aa, Artificial Sequence
  Quasi-synthetic sequence derived from human genome
WGKFFLLKRFNKEKLGLLLLTFLGIVAAVLVKK

SEQ ID NO: 25569 - protein, 33 aa, Artificial Sequence
  Quasi-synthetic sequence derived from human genome
AWWFMSVKVKLKRKKRQKTPNRKLPRRGAPTLR

SEQ ID NO: 25570 - protein, 33 aa, Artificial Sequence
  Quasi-synthetic sequence derived from human genome
MLWKLLLRSQSCRLCSFRKMRSPPKYRPFLACF

SEQ ID NO: 25571 - protein, 33 aa, Artificial Sequence
  Quasi-synthetic sequence derived from human genome
KQPAKKKRKKGLRIKGKRRRKKLILAKKFSKDL

SEQ ID NO: 25572 - protein, 33 aa, Artificial Sequence
  Quasi-synthetic sequence derived from human genome
IVWSLRRRQQLARQARMKKATRFIMVVAIVFIT

SEQ ID NO: 25573 - protein, 33 aa, Artificial Sequence
  Quasi-synthetic sequence derived from human genome
VRLQSWVRMWCVRQRYCRLLNAVRIIQVYWRWH

SEQ ID NO: 25574 - protein, 33 aa, Artificial Sequence
  Quasi-synthetic sequence derived from human genome
IAGALFILGALYSIKVMNRRRRNGFKRHKRKQR

SEQ ID NO: 25575 - protein, 33 aa, Artificial Sequence
  Quasi-synthetic sequence derived from human genome
ICPFVLLLLLLISLLCLYWKARKLSTLRSNTRK

SEQ ID NO: 25576 - protein, 33 aa, Artificial Sequence
  Quasi-synthetic sequence derived from human genome
KRVRGWLARTHYKRSMHAIIYLQCCFRRMMAKR

SEQ ID NO: 25577 - protein, 33 aa, Artificial Sequence
  Quasi-synthetic sequence derived from human genome
AKLKRKYWWKNCKMMIMLGAICAIIVVVIVSKY

SEQ ID NO: 25578 - protein, 33 aa, Artificial Sequence
  Quasi-synthetic sequence derived from human genome
FKGLKLLCRDKIRLNNAIWRAWYIQYVKRRKSP

SEQ ID NO: 25579 - protein, 33 aa, Artificial Sequence
  Quasi-synthetic sequence derived from human genome
LFALPFGRTAKPAHIAKVKMKFRFLGKLMAKAI

SEQ ID NO: 25580 - protein, 33 aa, Artificial Sequence
  Quasi-synthetic sequence derived from human genome
KKRILFLYNDLLKKRAAFTKLRRAAILRRERQQ

SEQ ID NO: 25581 - protein, 33 aa, Artificial Sequence
  Quasi-synthetic sequence derived from human genome
RRRKSLWLALSASWLLLVLLGGFSLLRLALPPR

SEQ ID NO: 25582 - protein, 33 aa, Artificial Sequence
  Quasi-synthetic sequence derived from human genome
FFILRRKPVEQKKIFTIQGCYPVIRCLLRRRGW

SEQ ID NO: 25583 - protein, 33 aa, Artificial Sequence
  Quasi-synthetic sequence derived from human genome
KTWRVHAIFKNVKMKKKIIKDQKLLVIVGGMLL

SEQ ID NO: 25584 - protein, 33 aa, Artificial Sequence
  Quasi-synthetic sequence derived from human genome
LGRRFRSLKMWFVFRMYGVKGLQAYIRKHVQLS

SEQ ID NO: 25585 - protein, 33 aa, Artificial Sequence
  Quasi-synthetic sequence derived from human genome
KHWWVRLLYRPYCKKNPQHLYSFIAKILWRSAK

SEQ ID NO: 25586 - protein, 33 aa, Artificial Sequence
  Quasi-synthetic sequence derived from human genome
GLLVAGVLVLLVSLGVAMHLCCRRRRARLRFMK

SEQ ID NO: 25587 - protein, 33 aa, Artificial Sequence
  Quasi-synthetic sequence derived from human genome
FVLKYITIALKCLIVALPKIILAVKSKGKFYLV

SEQ ID NO: 25588 - protein, 33 aa, Artificial Sequence
  Quasi-synthetic sequence derived from human genome
SRIRMIIAVTSYKRYLWATVTIQRHWRAYLRRK

SEQ ID NO: 25589 - protein, 33 aa, Artificial Sequence
  Quasi-synthetic sequence derived from human genome
ITQFRLFKFCTCLATVFSFLKRLICRSGRGRKL

SEQ ID NO: 25590 - protein, 33 aa, Artificial Sequence
  Quasi-synthetic sequence derived from human genome
KQRRDLLHLCCKKLKILGMPFRNIRSILKMVNL

SEQ ID NO: 25591 - protein, 33 aa, Artificial Sequence
  Quasi-synthetic sequence derived from human genome
ARKARKYEIPHFRLKKVENIKIWLSLRSYLKRR

SEQ ID NO: 25592 - protein, 33 aa, Artificial Sequence
  Quasi-synthetic sequence derived from human genome
KLHQQYRLARQRIIQFQARCRAYLVRKAFRHRL

SEQ ID NO: 25593 - protein, 33 aa, Artificial Sequence
  Quasi-synthetic sequence derived from human genome
AFLRLKRKFIQMRRPFLERRDLIIQHIPGFWVK

SEQ ID NO: 25594 - protein, 33 aa, Artificial Sequence
  Quasi-synthetic sequence derived from human genome
SRRRRSRSVVRRRSFSISPVRLRRSRTPLRRRF

SEQ ID NO: 25595 - protein, 33 aa, Artificial Sequence
  Quasi-synthetic sequence derived from human genome
RLLLRRTYARNLPAFVNRLGILTVRHLKRLERV

SEQ ID NO: 25596 - protein, 33 aa, Artificial Sequence
  Quasi-synthetic sequence derived from human genome
FLKTTLHRIYGKFLGLRAYIRKQINNIFYRFIY

SEQ ID NO: 25597 - protein, 33 aa, Artificial Sequence
  Quasi-synthetic sequence derived from human genome
LLCKNCLKKWRMKRQTLLEWLFSFLLVLFLYLF

SEQ ID NO: 25598 - protein, 33 aa, Artificial Sequence
  Quasi-synthetic sequence derived from human genome
CRRQIIRALCLLLLLLHAGSAKNIWKRALPARL

SEQ ID NO: 25599 - protein, 33 aa, Artificial Sequence
  Quasi-synthetic sequence derived from human genome
FILMVLIPLILLVLLLLSVVFLATYYKRKRTKQ

SEQ ID NO: 25600 - protein, 33 aa, Artificial Sequence
  Quasi-synthetic sequence derived from human genome
YEELLKYVGHIFRKVKRRSLRLYARWQSRWRKK

SEQ ID NO: 25601 - protein, 33 aa, Artificial Sequence
  Quasi-synthetic sequence derived from human genome
LLLGKGCRYFRYILKQDHQILGKKIKRMKRSVK

SEQ ID NO: 25602 - protein, 33 aa, Artificial Sequence
  Quasi-synthetic sequence derived from human genome
FLNRLGKLLLHLFMVLCLTLFLNNIIKKILNLK

SEQ ID NO: 25603 - protein, 33 aa, Artificial Sequence
  Quasi-synthetic sequence derived from human genome
FFKDKLKQLLHKHQRKSIFKIKKKSLSTSIVWI

SEQ ID NO: 25604 - protein, 33 aa, Artificial Sequence
  Quasi-synthetic sequence derived from human genome
RIKIFFALAPVFSTKYLKSPLIRMTYKWKSIVM

SEQ ID NO: 25605 - protein, 33 aa, Artificial Sequence
  Quasi-synthetic sequence derived from human genome
LRLRVHGPFFPRILRRRKGKREFGKTITHIVAK

SEQ ID NO: 25606 - protein, 33 aa, Artificial Sequence
  Quasi-synthetic sequence derived from human genome
TRFVKWPRYIRLQRQRAILYKRLKVPPAINQFT

SEQ ID NO: 25607 - protein, 33 aa, Artificial Sequence
  Quasi-synthetic sequence derived from human genome
LPWMIVLFLLLVLVVIVVCSIRKSSRTLKKGPR

SEQ ID NO: 25608 - protein, 33 aa, Artificial Sequence
  Quasi-synthetic sequence derived from human genome
RKILRLITIRKLFTAIGVLFPSVILVSLPWVRS

SEQ ID NO: 25609 - protein, 33 aa, Artificial Sequence
  Quasi-synthetic sequence derived from human genome
LKRATLKNLRKQYRNVKKMTAKELVKVLFSFFW

SEQ ID NO: 25610 - protein, 33 aa, Artificial Sequence
  Quasi-synthetic sequence derived from human genome
LWVIRVQKRHKMPRMKKLMRNRMKLRKEAKPGS

SEQ ID NO: 25611 - protein, 33 aa, Artificial Sequence
  Quasi-synthetic sequence derived from human genome
FIFIMSLLLISGQRPVNLTMRRKLRKHNCLQRR

SEQ ID NO: 25612 - protein, 33 aa, Artificial Sequence
  Quasi-synthetic sequence derived from human genome
RALRLLRIFKVTKYWSSLRNLVVSLLNSMKSII

SEQ ID NO: 25613 - protein, 33 aa, Artificial Sequence
  Quasi-synthetic sequence derived from human genome
KIIRTIFKRLKSFICPKLHMGFKSSLRSQLSKY

SEQ ID NO: 25614 - protein, 33 aa, Artificial Sequence
  Quasi-synthetic sequence derived from human genome
RALLPQWPRRPGRRWPASPLGMKVFRRKALVLC

SEQ ID NO: 25615 - protein, 33 aa, Artificial Sequence
  Quasi-synthetic sequence derived from human genome
RMWGRLVGLVYILPAAYFWRKGWLSRGMKGRVL

SEQ ID NO: 25616 - protein, 33 aa, Artificial Sequence
  Quasi-synthetic sequence derived from human genome
RPRLRLGERGLMEPLLPPKRRLLPRVRLLPLLL

SEQ ID NO: 25617 - protein, 33 aa, Artificial Sequence
  Quasi-synthetic sequence derived from human genome
ITFFRLFRVMRLVKLLSRGEGIRTLLWTFIKSF

SEQ ID NO: 25618 - protein, 33 aa, Artificial Sequence
  Quasi-synthetic sequence derived from human genome
IMGVRFKRSKKIMPAGLVAGLSLMMILRLVLLL

SEQ ID NO: 25619 - protein, 33 aa, Artificial Sequence
  Quasi-synthetic sequence derived from human genome
VVLSSKVCRGYLVKMGGKIKSWKKRWFVFDRLK

SEQ ID NO: 25620 - protein, 33 aa, Artificial Sequence
  Quasi-synthetic sequence derived from human genome
KLKQAFTCTPKKIRNIIYMFLPITKWLPAYKFK

SEQ ID NO: 25621 - protein, 33 aa, Artificial Sequence
  Quasi-synthetic sequence derived from human genome
RASLTFNRGFKAGRNMRRKLFGVLRLKCHSLFL

SEQ ID NO: 25622 - protein, 33 aa, Artificial Sequence
  Quasi-synthetic sequence derived from human genome
LRKRDKLWGVCVSILALLPRVLRLMLQSLRVNR

SEQ ID NO: 25623 - protein, 33 aa, Artificial Sequence
  Quasi-synthetic sequence derived from human genome
YRPRFFLLENVRNFVSFKRSMVLKLTLRCLVRM

SEQ ID NO: 25624 - protein, 33 aa, Artificial Sequence
  Quasi-synthetic sequence derived from human genome
LRILSKYHRFISFTLYLIGFCMFVLSLVKKHYR

SEQ ID NO: 25625 - protein, 33 aa, Artificial Sequence
  Quasi-synthetic sequence derived from human genome
AIAKVRFLKLKKERKSLWTILLLFGISFIPQLL

SEQ ID NO: 25626 - protein, 33 aa, Artificial Sequence
  Quasi-synthetic sequence derived from human genome
RKLLALGTWLLALLLTLPVMLAMRLVRRGPKSL

SEQ ID NO: 25627 - protein, 33 aa, Artificial Sequence
  Quasi-synthetic sequence derived from human genome
YRRAHRRFVTKKALCIRVFQETQKLKKRRRALK

SEQ ID NO: 25628 - protein, 33 aa, Artificial Sequence
  Quasi-synthetic sequence derived from human genome
IAFWARRASRTRLAAWARRALLSLRSPKARRGK

SEQ ID NO: 25629 - protein, 33 aa, Artificial Sequence
  Quasi-synthetic sequence derived from human genome
RFVVRKTVQRSVAKGSRRCKKRMFKFHQMKHIF

SEQ ID NO: 25630 - protein, 33 aa, Artificial Sequence
  Quasi-synthetic sequence derived from human genome
LRQKLKKVFQQHYTNKIRALRNRLIVLLLECKR

SEQ ID NO: 25631 - protein, 33 aa, Artificial Sequence
  Quasi-synthetic sequence derived from human genome
KQRKDLLHLCCKKLKILGMPFRNIRSILKMVNL

SEQ ID NO: 25632 - protein, 33 aa, Artificial Sequence
  Quasi-synthetic sequence derived from human genome
RRRCCRLCIWLLQTLVHLLQLGQVWRYLRALYL

SEQ ID NO: 25633 - protein, 33 aa, Artificial Sequence
  Quasi-synthetic sequence derived from human genome
FRALLFIPRRAPFDLFENKKKKNNIKLYVRRVF

SEQ ID NO: 25634 - protein, 33 aa, Artificial Sequence
  Quasi-synthetic sequence derived from human genome
RLRTVLKNLSLLKLLKSSNRRIQELHKLAKRCW

SEQ ID NO: 25635 - protein, 33 aa, Artificial Sequence
  Quasi-synthetic sequence derived from human genome
RLFRMLRIFKLGKYWPTFQILMWSLSNSWVALK

SEQ ID NO: 25636 - protein, 33 aa, Artificial Sequence
  Quasi-synthetic sequence derived from human genome
RWLNKLMKLLQRLPNSVVRRLHRERYKKPSWLT

SEQ ID NO: 25637 - protein, 33 aa, Artificial Sequence
  Quasi-synthetic sequence derived from human genome
ICAKHKLYQFLHLRKAAITIQSSYRRLMVKKKL

SEQ ID NO: 25638 - protein, 33 aa, Artificial Sequence
  Quasi-synthetic sequence derived from human genome
IQAVVAILLCILTITVITLLIFLRRRLRKQARA

SEQ ID NO: 25639 - protein, 33 aa, Artificial Sequence
  Quasi-synthetic sequence derived from human genome
LSFSWVLLALALLAWCRRSRGLKALRLCRALAL

SEQ ID NO: 25640 - protein, 33 aa, Artificial Sequence
  Quasi-synthetic sequence derived from human genome
KKKIFVFLEHQTKVLKKRHTKEKVLRRAKRRWA

SEQ ID NO: 25641 - protein, 33 aa, Artificial Sequence
  Quasi-synthetic sequence derived from human genome
KRYQPCWVLMVSVLLHHWKALKKVNMKLLVNIR

SEQ ID NO: 25642 - protein, 33 aa, Artificial Sequence
  Quasi-synthetic sequence derived from human genome
RVMQRNCAAYLKLRHWQWWRLFTKVKPLLQVTR

SEQ ID NO: 25643 - protein, 33 aa, Artificial Sequence
  Quasi-synthetic sequence derived from human genome
LLIQIFGRKSYPMLKLVRLKLWFPRFMNVNPFP

SEQ ID NO: 25644 - protein, 33 aa, Artificial Sequence
  Quasi-synthetic sequence derived from human genome
TNRPKGFTRFRSAVRVSIAISRMKFLVRRWHRV

SEQ ID NO: 25645 - protein, 33 aa, Artificial Sequence
  Quasi-synthetic sequence derived from human genome
RQKALYRRLATVHMSRMINKYKRRRFQKTKNLL

SEQ ID NO: 25646 - protein, 33 aa, Artificial Sequence
  Quasi-synthetic sequence derived from human genome
QKKCYGKIKASVLLIQAFVRGWKARKNYRKYFR

SEQ ID NO: 25647 - protein, 33 aa, Artificial Sequence
  Quasi-synthetic sequence derived from human genome
LVIIIAVCCASLVFLTVLVIICYKAIKRKPLRK

SEQ ID NO: 25648 - protein, 33 aa, Artificial Sequence
  Quasi-synthetic sequence derived from human genome
LQQGNMHKNMRVLSRTSKFRRLRQLLRRRKKRR

SEQ ID NO: 25649 - protein, 33 aa, Artificial Sequence
  Quasi-synthetic sequence derived from human genome
LINWFICSLCVPRVRKLWSSRRPRTRRNLLLGT

SEQ ID NO: 25650 - protein, 33 aa, Artificial Sequence
  Quasi-synthetic sequence derived from human genome
GFLLVCVATVIFIVTKCCLFCFWKFARKAKKGK

SEQ ID NO: 25651 - protein, 33 aa, Artificial Sequence
  Quasi-synthetic sequence derived from human genome
KFLLLYALLKLSLIRGKSLLFVNTLERSYRLRL

SEQ ID NO: 25652 - protein, 33 aa, Artificial Sequence
  Quasi-synthetic sequence derived from human genome
IWIIIFGVIFCIIIVAIALLILSGIWQRRRKNK

SEQ ID NO: 25653 - protein, 33 aa, Artificial Sequence
  Quasi-synthetic sequence derived from human genome
LRITLRFFASVLIRRIHKVDIPSIITKKLLKAA

SEQ ID NO: 25654 - protein, 33 aa, Artificial Sequence
  Quasi-synthetic sequence derived from human genome
HWRGRYGRRRPFIWALSLGILLSLFLIPRAGWL

SEQ ID NO: 25655 - protein, 33 aa, Artificial Sequence
  Quasi-synthetic sequence derived from human genome
VLFWCVILFFTTFFLSSFLKQFKTKRYFPTKVR

SEQ ID NO: 25656 - protein, 33 aa, Artificial Sequence
  Quasi-synthetic sequence derived from human genome
VRSKKIFLSKLIVCFLSTWLPFVLLQVIIVLLK

SEQ ID NO: 25657 - protein, 33 aa, Artificial Sequence
  Quasi-synthetic sequence derived from human genome
ISLVILTFQWRFYLSFRKLMRWILILVIALWFI

SEQ ID NO: 25658 - protein, 33 aa, Artificial Sequence
  Quasi-synthetic sequence derived from human genome
KPRMRGLLARRLRNHMAVAFVLSLGVAALYKFR

SEQ ID NO: 25659 - protein, 33 aa, Artificial Sequence
  Quasi-synthetic sequence derived from human genome
RRWKKKQLRRPSLLLLGCCSFGIMAPSLWKGLV

SEQ ID NO: 25660 - protein, 33 aa, Artificial Sequence
  Quasi-synthetic sequence derived from human genome
RSWLTRKHIQRLHAAATVIKRAWQKWRIRMACL

SEQ ID NO: 25661 - protein, 33 aa, Artificial Sequence
  Quasi-synthetic sequence derived from human genome
VFRAFRRANARCFWNARLARAASRLAFQGWLRR

SEQ ID NO: 25662 - protein, 33 aa, Artificial Sequence
  Quasi-synthetic sequence derived from human genome
SWFRGCQVRAYIRHLNRIVTIIQKWWRSFLGRK

SEQ ID NO: 25663 - protein, 33 aa, Artificial Sequence
  Quasi-synthetic sequence derived from human genome
RWFRRRRNQDRPSLLKKFREASWRFTFYLIAFI

SEQ ID NO: 25664 - protein, 33 aa, Artificial Sequence
  Quasi-synthetic sequence derived from human genome
KLFLNLATLLPFCVCLMSFFLLILSLRRHIRRM

SEQ ID NO: 25665 - protein, 33 aa, Artificial Sequence
  Quasi-synthetic sequence derived from human genome
VVKGLMKKFIRCSTRVTVGTIKKFLSLKLKLPS

SEQ ID NO: 25666 - protein, 33 aa, Artificial Sequence
  Quasi-synthetic sequence derived from human genome
WNFLKRHKKKCIFLGTVLGGVYILGKYGQKKIR

SEQ ID NO: 25667 - protein, 33 aa, Artificial Sequence
  Quasi-synthetic sequence derived from human genome
CLRWFQHRRNRRRRKPQRNLLRNFLVQAFGGCF

SEQ ID NO: 25668 - protein, 33 aa, Artificial Sequence
  Quasi-synthetic sequence derived from human genome
RALLLWGRRLRPLLRAPALAAVPGGKPILCPRR

SEQ ID NO: 25669 - protein, 33 aa, Artificial Sequence
  Quasi-synthetic sequence derived from human genome
LMRRILTRNEKNRPRRRFLCHLSRQQLRMAMRI

SEQ ID NO: 25670 - protein, 33 aa, Artificial Sequence
  Quasi-synthetic sequence derived from human genome
NLKLFRPKKLLPKAFKQYWFIFKDTSIAYFKNK

SEQ ID NO: 25671 - protein, 33 aa, Artificial Sequence
  Quasi-synthetic sequence derived from human genome
RPGPVRRRGKVELIKFVRVQWRRPQVEWRRRRW

SEQ ID NO: 25672 - protein, 33 aa, Artificial Sequence
  Quasi-synthetic sequence derived from human genome
ISLRFKRTHIKMKKQPKGYGLRCHRAIITICRL

SEQ ID NO: 25673 - protein, 33 aa, Artificial Sequence
  Quasi-synthetic sequence derived from human genome
RSQVIYPESYYFTRRKYLLKALFKALKRLKSLR

SEQ ID NO: 25674 - protein, 33 aa, Artificial Sequence
  Quasi-synthetic sequence derived from human genome
RYLRRRLVPRYRLQLLGIACMVICTRFISKEIL

SEQ ID NO: 25675 - protein, 33 aa, Artificial Sequence
  Quasi-synthetic sequence derived from human genome
VKLNRNRMSMIPPKIFKLPHLQFLELKRNRIKI

SEQ ID NO: 25676 - protein, 33 aa, Artificial Sequence
  Quasi-synthetic sequence derived from human genome
RILKVLLWLLAILTGLIAGKFLFHQRLFGQLLR

SEQ ID NO: 25677 - protein, 33 aa, Artificial Sequence
  Quasi-synthetic sequence derived from human genome
VLILFMFRRLRQFRQAQPTPQYRFRKRDKVMFY

SEQ ID NO: 25678 - protein, 33 aa, Artificial Sequence
  Quasi-synthetic sequence derived from human genome
AIFRPGTSFGISVLRALRLLRIFKITKYWASLR

SEQ ID NO: 25679 - protein, 33 aa, Artificial Sequence
  Quasi-synthetic sequence derived from human genome
LKVLKKYPRLWCMTKPPSRRPKLYIVNLQWTPK

SEQ ID NO: 25680 - protein, 33 aa, Artificial Sequence
  Quasi-synthetic sequence derived from human genome
KKLNKKRLKKRKGYQGAMVEKKILMKVHSRFIV

SEQ ID NO: 25681 - protein, 33 aa, Artificial Sequence
  Quasi-synthetic sequence derived from human genome
KLRNAFRCSSAKIKAVVFGLLPVLSWLPKYKIK

SEQ ID NO: 25682 - protein, 33 aa, Artificial Sequence
  Quasi-synthetic sequence derived from human genome
NKSVLQFQNVRRVVQIFRIMRILRILKLARHST

SEQ ID NO: 25683 - protein, 33 aa, Artificial Sequence
  Quasi-synthetic sequence derived from human genome
ALTWALNYRTGVRLRGAILTMAFKKILKLKNIK

SEQ ID NO: 25684 - protein, 33 aa, Artificial Sequence
  Quasi-synthetic sequence derived from human genome
AITRFKHLKKLLLVHGHWCYSRLARMVVYYLYK

SEQ ID NO: 25685 - protein, 33 aa, Artificial Sequence
  Quasi-synthetic sequence derived from human genome
LILMRNLMNVRNVKRLLGKVHILLNIKEFILVR

SEQ ID NO: 25686 - protein, 33 aa, Artificial Sequence
  Quasi-synthetic sequence derived from human genome
KPLVLSEARKQLMIYRLPQVLRLHLKRFRWSGR

SEQ ID NO: 25687 - protein, 33 aa, Artificial Sequence
  Quasi-synthetic sequence derived from human genome
LYMLFLLVLVFFLMGLVGFMICHVLKKKGYRCR

SEQ ID NO: 25688 - protein, 33 aa, Artificial Sequence
  Quasi-synthetic sequence derived from human genome
FAGLLAILLVVAVFCILWNWNKRKKRQVPYLRV

SEQ ID NO: 25689 - protein, 33 aa, Artificial Sequence
  Quasi-synthetic sequence derived from human genome
RFRKYLRQLFHRRVAVHLVKWLPFLSVDRLERV

SEQ ID NO: 25690 - protein, 33 aa, Artificial Sequence
  Quasi-synthetic sequence derived from human genome
PRRRMPGIGWLKKCYQMIDRRLRKNLKSLIIVH

SEQ ID NO: 25691 - protein, 33 aa, Artificial Sequence
  Quasi-synthetic sequence derived from human genome
RNVKFPLPIYKSKKGWTAYKLQLFKMFPIILAI

SEQ ID NO: 25692 - protein, 33 aa, Artificial Sequence
  Quasi-synthetic sequence derived from human genome
KRLTFLKKRRCIQWRFSYGIELPFKDIHLARRL

SEQ ID NO: 25693 - protein, 33 aa, Artificial Sequence
  Quasi-synthetic sequence derived from human genome
WVKFIIGYLFPLLTMSICYLCLIFKVKKRSILI

SEQ ID NO: 25694 - protein, 33 aa, Artificial Sequence
  Quasi-synthetic sequence derived from human genome
KILSPKVKIALRTSGHLLLGVVRIYNRKAKYLL

SEQ ID NO: 25695 - protein, 33 aa, Artificial Sequence
  Quasi-synthetic sequence derived from human genome
WMKKCYQMIDRRLRKNLKSFIIVHPSWFIRTIL

SEQ ID NO: 25696 - protein, 33 aa, Artificial Sequence
  Quasi-synthetic sequence derived from human genome
RKLWWLPAHLPRFVRIVLSTLPNKHGILQKLRC

SEQ ID NO: 25697 - protein, 33 aa, Artificial Sequence
  Quasi-synthetic sequence derived from human genome
IGILVTILCLLAAGFVVYLKRKTLIRLLFTNKK

SEQ ID NO: 25698 - protein, 33 aa, Artificial Sequence
  Quasi-synthetic sequence derived from human genome
RPAVHRGIRYLLYRAQRAIRLRHALRLHPQLHR

SEQ ID NO: 25699 - protein, 33 aa, Artificial Sequence
  Quasi-synthetic sequence derived from human genome
RKHAVAVIWAYWLGLKVRREYRKFFRANAGKKI

SEQ ID NO: 25700 - protein, 33 aa, Artificial Sequence
  Quasi-synthetic sequence derived from human genome
RFLLLFTFLKKNRKKKLMVFFSSCMSVKYHYEL

SEQ ID NO: 25701 - protein, 33 aa, Artificial Sequence
  Quasi-synthetic sequence derived from human genome
RKKFMITPKLIRMVTVMQAHVRGWLERKRLQRV

SEQ ID NO: 25702 - protein, 33 aa, Artificial Sequence
  Quasi-synthetic sequence derived from human genome
KKAVWHKLLSKQRKRAVVACFRMAPLYNLPRHR

SEQ ID NO: 25703 - protein, 33 aa, Artificial Sequence
  Quasi-synthetic sequence derived from human genome
RRHLKSMHSSATLIQSRFRSLLVRRRFISLKKA

SEQ ID NO: 25704 - protein, 33 aa, Artificial Sequence
  Quasi-synthetic sequence derived from human genome
LKKKLFLTLKENEKLRKRLQAQRLVMRRMSSRL

SEQ ID NO: 25705 - protein, 33 aa, Artificial Sequence
  Quasi-synthetic sequence derived from human genome
LSIFYLLKIANFSNFIFLHLKRRVKSVILVMLL

SEQ ID NO: 25706 - protein, 33 aa, Artificial Sequence
  Quasi-synthetic sequence derived from human genome
LSIFYLLKIANFSNLIFLHLKRRVKSVILVMLL

SEQ ID NO: 25707 - protein, 33 aa, Artificial Sequence
  Quasi-synthetic sequence derived from human genome
GVIGLLILILLIKKLIIFILKKTREKKKECLVS

SEQ ID NO: 25708 - protein, 33 aa, Artificial Sequence
  Quasi-synthetic sequence derived from human genome
IFRGNQMRLKRACIRKAKISAVAFRKAFCHHKL

SEQ ID NO: 25709 - protein, 33 aa, Artificial Sequence
  Quasi-synthetic sequence derived from human genome
RAVWSMMRYLRASSNRNFLLTMRPFLKRAILVL

SEQ ID NO: 25710 - protein, 33 aa, Artificial Sequence
  Quasi-synthetic sequence derived from human genome
IIVLAILLFLAAMLFVLMNWYYRTVHKRKLKAI

SEQ ID NO: 25711 - protein, 33 aa, Artificial Sequence
  Quasi-synthetic sequence derived from human genome
FWRNKKSNKVLPMRRVLRKRPSPAPRTIRIEWL

SEQ ID NO: 25712 - protein, 33 aa, Artificial Sequence
  Quasi-synthetic sequence derived from human genome
HCFRLGRQLSKALQVNCVVRKLLVQLRRLYWWV

SEQ ID NO: 25713 - protein, 33 aa, Artificial Sequence
  Quasi-synthetic sequence derived from human genome
RLRKILFCVLGLYIAIPFLIKLCPGIQAKLIFL

SEQ ID NO: 25714 - protein, 33 aa, Artificial Sequence
  Quasi-synthetic sequence derived from human genome
KVLMLLSSIGRRKSLPSVTRPRLRVKMYNFLRS

SEQ ID NO: 25715 - protein, 33 aa, Artificial Sequence
  Quasi-synthetic sequence derived from human genome
LSIFYLLKIANFSNLIFLHLKRRVKSVVLVILL

SEQ ID NO: 25716 - protein, 33 aa, Artificial Sequence
  Quasi-synthetic sequence derived from human genome
LIAAGVIGGLFILVIVGLTFAVYVRRKSIKKKR

SEQ ID NO: 25717 - protein, 33 aa, Artificial Sequence
  Quasi-synthetic sequence derived from human genome
RRFRLSSHFIRHRRAHMRRRLYICAGCGRDFKL

SEQ ID NO: 25718 - protein, 33 aa, Artificial Sequence
  Quasi-synthetic sequence derived from human genome
AINLAKLKLFRHYYVLIVCYIYFTRIIAFLLKL

SEQ ID NO: 25719 - protein, 33 aa, Artificial Sequence
  Quasi-synthetic sequence derived from human genome
ALLLVLLLCRLRRLRARARARAAARLSLTDPLV

SEQ ID NO: 25720 - protein, 33 aa, Artificial Sequence
  Quasi-synthetic sequence derived from human genome
SLKLAKIILALKVSRKNLLNVCKLIFKISRNEK

SEQ ID NO: 25721 - protein, 33 aa, Artificial Sequence
  Quasi-synthetic sequence derived from human genome
IFWKTWIFWKTWIFRKTYIGWKTWIFSGRCGLT

SEQ ID NO: 25722 - protein, 33 aa, Artificial Sequence
  Quasi-synthetic sequence derived from human genome
KTKMAFLLVGICFLCKLCTIIFTTIAFFIYKRR

SEQ ID NO: 25723 - protein, 33 aa, Artificial Sequence
  Quasi-synthetic sequence derived from human genome
ALLVIQWNIRAFMGVKNWPWMKLYFKIKPLLKS

SEQ ID NO: 25724 - protein, 33 aa, Artificial Sequence
  Quasi-synthetic sequence derived from human genome
LLVIQWNIRAFMGVKNWPWMKLYFKIKPLLKSA

SEQ ID NO: 25725 - protein, 33 aa, Artificial Sequence
  Quasi-synthetic sequence derived from human genome
VQWLRHRATQSGQRRWRHALHRRLLNRRLLLAV

SEQ ID NO: 25726 - protein, 33 aa, Artificial Sequence
  Quasi-synthetic sequence derived from human genome
VKVMLKSIKTRLGRRVPAAPPALRRNLLLQAWK

SEQ ID NO: 25727 - protein, 33 aa, Artificial Sequence
  Quasi-synthetic sequence derived from human genome
FGPLNLAMVYRYCCKINKKLKSITMLRKKIVHF

SEQ ID NO: 25728 - protein, 33 aa, Artificial Sequence
  Quasi-synthetic sequence derived from human genome
RKSALHLFRLGNAMLRIVRSKARPLLHVMRCWS

SEQ ID NO: 25729 - protein, 33 aa, Artificial Sequence
  Quasi-synthetic sequence derived from human genome
RRAKRKVTRMILIVAALFCLCWMPHHALILCVW

SEQ ID NO: 25730 - protein, 33 aa, Artificial Sequence
  Quasi-synthetic sequence derived from human genome
WKIILCLFIIPLVGCGFVSFRKKPVDKHKKLLW

SEQ ID NO: 25731 - protein, 33 aa, Artificial Sequence
  Quasi-synthetic sequence derived from human genome
RFKKGKIVLLFSLLCWVLFNLGIGFVKPATLRC

SEQ ID NO: 25732 - protein, 33 aa, Artificial Sequence
  Quasi-synthetic sequence derived from human genome
AMQRKKLKDFSGGWRMRVALARALFIRPFMLLL

SEQ ID NO: 25733 - protein, 33 aa, Artificial Sequence
  Quasi-synthetic sequence derived from human genome
KFFKRKPKVLGVVRILIALMSLSMGIIMMCVAF

SEQ ID NO: 25734 - protein, 33 aa, Artificial Sequence
  Quasi-synthetic sequence derived from human genome
MRFRIYKRKVLILTLVVAACGFVLWSSNGRQRK

SEQ ID NO: 25735 - protein, 33 aa, Artificial Sequence
  Quasi-synthetic sequence derived from human genome
RRRPARTLGLLLLVVLGFLVLRRLDWSTLVPLR

SEQ ID NO: 25736 - protein, 33 aa, Artificial Sequence
  Quasi-synthetic sequence derived from human genome
RRNVFDLVRTLRVLLDSPVKRRLLPMLRLVIPR

SEQ ID NO: 25737 - protein, 33 aa, Artificial Sequence
  Quasi-synthetic sequence derived from human genome
PRGKLAGLLRTFMRSRPSRQRLRQRGILRQRVF

SEQ ID NO: 25738 - protein, 33 aa, Artificial Sequence
  Quasi-synthetic sequence derived from human genome
KIFYGHLLKKFRQPNFARKLCIYIWGVVLGIII

SEQ ID NO: 25739 - protein, 33 aa, Artificial Sequence
  Quasi-synthetic sequence derived from human genome
RVRFLNLKKTIIKFQAHVRKHQQRQKYKKMKKA

SEQ ID NO: 25740 - protein, 33 aa, Artificial Sequence
  Quasi-synthetic sequence derived from human genome
FRALLFVPRRAPFDLFENRKKKNNIKLYVRRVF

SEQ ID NO: 25741 - protein, 33 aa, Artificial Sequence
  Quasi-synthetic sequence derived from human genome
RFHARSLWTNHKRYGYKKHSYRLVKKLKLQKMK

SEQ ID NO: 25742 - protein, 33 aa, Artificial Sequence
  Quasi-synthetic sequence derived from human genome
RLAWIKSFKPWLEIFKQNQQKKIVRRKRPVKCP

SEQ ID NO: 25743 - protein, 33 aa, Artificial Sequence
  Quasi-synthetic sequence derived from human genome
WASRWLRRKLRARRKGGAPVHVRHMYSTRRPLR

SEQ ID NO: 25744 - protein, 33 aa, Artificial Sequence
  Quasi-synthetic sequence derived from human genome
RYRHKRLSYQSVFLFLCLFWASLRTVLFSFYFK

SEQ ID NO: 25745 - protein, 33 aa, Artificial Sequence
  Quasi-synthetic sequence derived from human genome
AKLKLFRHYYVLIVCYIYFTRIIAFLLKLAVPF

SEQ ID NO: 25746 - protein, 33 aa, Artificial Sequence
  Quasi-synthetic sequence derived from human genome
RLLFRIGYSLYTRTWLGYLFYRQQLRRARNRYP

SEQ ID NO: 25747 - protein, 33 aa, Artificial Sequence
  Quasi-synthetic sequence derived from human genome
KLKEKQVRWKFIKRWKTRYFTLAGNQLLFQKGK

SEQ ID NO: 25748 - protein, 33 aa, Artificial Sequence
  Quasi-synthetic sequence derived from human genome
RSRRRTRFVFQKALRSLRRYPLPLRSGKEAKIL

SEQ ID NO: 25749 - protein, 33 aa, Artificial Sequence
  Quasi-synthetic sequence derived from human genome
QAMWRRYRAKKYLCKVKAACKIQAWYRCWRAHK

SEQ ID NO: 25750 - protein, 33 aa, Artificial Sequence
  Quasi-synthetic sequence derived from human genome
IRRLLILILKIGRRWTELIRTMESRVLLRTFCL

SEQ ID NO: 25751 - protein, 33 aa, Artificial Sequence
  Quasi-synthetic sequence derived from human genome
RRKEKMFRFFIRRMVKAQSFYWVVLCVVALNTL

SEQ ID NO: 25752 - protein, 33 aa, Artificial Sequence
  Quasi-synthetic sequence derived from human genome
WRKTVCHNGVLGLSRLLFFLLGFLRIRVRGQRA

SEQ ID NO: 25753 - protein, 33 aa, Artificial Sequence
  Quasi-synthetic sequence derived from human genome
LLLLHNQLLYERFKRQQHALRNRRLLRKVIKAA

SEQ ID NO: 25754 - protein, 33 aa, Artificial Sequence
  Quasi-synthetic sequence derived from human genome
MFLVIFPMFTFPKKLPPRHKKKKKKKFSVDAVS

SEQ ID NO: 25755 - protein, 33 aa, Artificial Sequence
  Quasi-synthetic sequence derived from human genome
ILYYIVSKQFQARVISVMLYRNYLRSMRRKSFR

SEQ ID NO: 25756 - protein, 33 aa, Artificial Sequence
  Quasi-synthetic sequence derived from human genome
MFTRAQVRRILQRVPGKQRFGIYRFLPFFFVLG

SEQ ID NO: 25757 - protein, 33 aa, Artificial Sequence
  Quasi-synthetic sequence derived from human genome
LRACKKGFIQRISKGGLIKTKRKRKKQRVKIAY

SEQ ID NO: 25758 - protein, 33 aa, Artificial Sequence
  Quasi-synthetic sequence derived from human genome
VGIAGALFILGALYSIKVMNRRRRNGFKRHKRK

SEQ ID NO: 25759 - protein, 33 aa, Artificial Sequence
  Quasi-synthetic sequence derived from human genome
TKKKVKRLLSFQRYFHASRLLRGIIPQAPLHLL

SEQ ID NO: 25760 - protein, 33 aa, Artificial Sequence
  Quasi-synthetic sequence derived from human genome
WFHVLFYLAVGIMFLVNTVLWVTIRKELKRKKK

SEQ ID NO: 25761 - protein, 33 aa, Artificial Sequence
  Quasi-synthetic sequence derived from human genome
LKLYRVLQLFLSRTAQRSALLSSGRLLRRLGLL

SEQ ID NO: 25762 - protein, 33 aa, Artificial Sequence
  Quasi-synthetic sequence derived from human genome
CRRWGQAISKSKLSRRWRRWNRFNRRRCRAAVK

SEQ ID NO: 25763 - protein, 33 aa, Artificial Sequence
  Quasi-synthetic sequence derived from human genome
NVVLVMAYGSLVFVLLFIFVKRQIMRFAMKSRR

SEQ ID NO: 25764 - protein, 33 aa, Artificial Sequence
  Quasi-synthetic sequence derived from human genome
MRLWKARVLKLVLKTAKDSRLGLNSKWLSLKLG

SEQ ID NO: 25765 - protein, 33 aa, Artificial Sequence
  Quasi-synthetic sequence derived from human genome
IAFIFLIIKSYRKYRRERLPISPGPLLRWVPLL

SEQ ID NO: 25766 - protein, 33 aa, Artificial Sequence
  Quasi-synthetic sequence derived from human genome
MVLKTLTKPVTLSRSKINKTKVLKMIFVHLIIF

SEQ ID NO: 25767 - protein, 33 aa, Artificial Sequence
  Quasi-synthetic sequence derived from human genome
ILCRFRKLHCTRNFIHMNLFVSFMLRAISVFIK

SEQ ID NO: 25768 - protein, 33 aa, Artificial Sequence
  Quasi-synthetic sequence derived from human genome
LFISVAFKLLILLLGSWALFFRRPKASLPRVFV

SEQ ID NO: 25769 - protein, 33 aa, Artificial Sequence
  Quasi-synthetic sequence derived from human genome
GIRYLLYRAQRAIRLRHALRLHPQLHRAPIRTW

SEQ ID NO: 25770 - protein, 33 aa, Artificial Sequence
  Quasi-synthetic sequence derived from human genome
VFFGLVLALIGLIFLMVLYLNRRGIQRWMRNLR

SEQ ID NO: 25771 - protein, 33 aa, Artificial Sequence
  Quasi-synthetic sequence derived from human genome
RGHPRSYPYWRRLLVLCWYLPGWRAGRVTWLRL

SEQ ID NO: 25772 - protein, 33 aa, Artificial Sequence
  Quasi-synthetic sequence derived from human genome
KWFVKAGGVAMYAVSWCFMFSIWRFAWRKSIKK

SEQ ID NO: 25773 - protein, 33 aa, Artificial Sequence
  Quasi-synthetic sequence derived from human genome
VISIVDPWIFIIFRSPVFRIFFHKIFIRPLRYR

SEQ ID NO: 25774 - protein, 33 aa, Artificial Sequence
  Quasi-synthetic sequence derived from human genome
WLRKCYQQIDRRLRKNLKSLIIVHPSWFIRTLL

SEQ ID NO: 25775 - protein, 33 aa, Artificial Sequence
  Quasi-synthetic sequence derived from human genome
PKVIVVRNRRLGVLYRAVQLLILLYFVWYVFIV

SEQ ID NO: 25776 - protein, 33 aa, Artificial Sequence
  Quasi-synthetic sequence derived from human genome
REGRLQHGNMRKNMRVLSRISKFRRLRQLLRRR

SEQ ID NO: 25777 - protein, 33 aa, Artificial Sequence
  Quasi-synthetic sequence derived from human genome
RLWLHVLPTLPGTLCLRIFRWGPRRRRQGSRTL

SEQ ID NO: 25778 - protein, 33 aa, Artificial Sequence
  Quasi-synthetic sequence derived from human genome
KHLRKSLKIIYLNSIQQLEIRNMSWPRLIRKLR

SEQ ID NO: 25779 - protein, 33 aa, Artificial Sequence
  Quasi-synthetic sequence derived from human genome
IAGLVVIFMMLGGTFLYWRGRRIQNKRAMRRYL

SEQ ID NO: 25780 - protein, 33 aa, Artificial Sequence
  Quasi-synthetic sequence derived from human genome
LVLHFRHKVLILFKLILLEKKVLFYISPVNKLV

SEQ ID NO: 25781 - protein, 33 aa, Artificial Sequence
  Quasi-synthetic sequence derived from human genome
LLVIYVSWKRYPASMKQLQQRSLMRRHRKKKRQ

SEQ ID NO: 25782 - protein, 33 aa, Artificial Sequence
  Quasi-synthetic sequence derived from human genome
LAKSIHHARVLIRQRHIRVRKQVVNIPSFIVRL

SEQ ID NO: 25783 - protein, 33 aa, Artificial Sequence
  Quasi-synthetic sequence derived from human genome
KMSKLSRSARAGVIFPVGRLMRYLKKGTFKYRI

SEQ ID NO: 25784 - protein, 33 aa, Artificial Sequence
  Quasi-synthetic sequence derived from human genome
RRELSLGRKKAPHRLCGRFSRISMKLPRIPLRR

SEQ ID NO: 25785 - protein, 33 aa, Artificial Sequence
  Quasi-synthetic sequence derived from human genome
ITILVVVLVLVIVGIGVLILLVRYRKCIKLKQV

SEQ ID NO: 25786 - protein, 33 aa, Artificial Sequence
  Quasi-synthetic sequence derived from human genome
LMERGGLGKPRGPRHRGLLRVRLGRFISRLLLW

SEQ ID NO: 25787 - protein, 33 aa, Artificial Sequence
  Quasi-synthetic sequence derived from human genome
LRIRRLLRPFFLLQNSSMMKKTLKCIRWSLPEM

SEQ ID NO: 25788 - protein, 33 aa, Artificial Sequence
  Quasi-synthetic sequence derived from human genome
LCNNRKSFRLRRRDLLLGFNKRAIDKCWKIRHF

SEQ ID NO: 25789 - protein, 33 aa, Artificial Sequence
  Quasi-synthetic sequence derived from human genome
MMRTQCLLGLRTFVAFAAKLWSFFIYLLRRQIR

SEQ ID NO: 25790 - protein, 33 aa, Artificial Sequence
  Quasi-synthetic sequence derived from human genome
LFQGPALGLRNHLGRKLRRRKKKKAKRTTNWKI

SEQ ID NO: 25791 - protein, 33 aa, Artificial Sequence
  Quasi-synthetic sequence derived from human genome
INRPRTELKKKLFKRRRVLNRERRLRHRVVGAV

SEQ ID NO: 25792 - protein, 33 aa, Artificial Sequence
  Quasi-synthetic sequence derived from human genome
RYFALVQPFRLTRWRTRYKTIRINLGLWAASFI

SEQ ID NO: 25793 - protein, 33 aa, Artificial Sequence
  Quasi-synthetic sequence derived from human genome
LRRPPRLRLCARLPDFFLLLLFRGCLIGAVNLK

SEQ ID NO: 25794 - protein, 33 aa, Artificial Sequence
  Quasi-synthetic sequence derived from human genome
LILSILVVLILTVFVAFCLLVFVLRRNKKPTVK

SEQ ID NO: 25795 - protein, 33 aa, Artificial Sequence
  Quasi-synthetic sequence derived from human genome
FLQRLLLVHGRWSYVRICKFLRYFFYKSMASMM

SEQ ID NO: 25796 - protein, 33 aa, Artificial Sequence
  Quasi-synthetic sequence derived from human genome
KTFRIKRFLAKKQKQNRPIPQWIRMKTGNKIRY

SEQ ID NO: 25797 - protein, 33 aa, Artificial Sequence
  Quasi-synthetic sequence derived from human genome
LSRGRRRRMHVLRRRWDLGSLCRALLTRGLAAL

SEQ ID NO: 25798 - protein, 33 aa, Artificial Sequence
  Quasi-synthetic sequence derived from human genome
AARHSRVRRAALRLLTYLSCRFGLARVHWAFKF

SEQ ID NO: 25799 - protein, 33 aa, Artificial Sequence
  Quasi-synthetic sequence derived from human genome
YLHILFSLYTRTLYLRYRPKVKFLFGIWPVILF

SEQ ID NO: 25800 - protein, 33 aa, Artificial Sequence
  Quasi-synthetic sequence derived from human genome
IISIMSSFAIFVLLTITTLYCCRRRKQWKNKKR

SEQ ID NO: 25801 - protein, 33 aa, Artificial Sequence
  Quasi-synthetic sequence derived from human genome
LVGLWLIQWLLLKYKSIISRRFFCIVGTLYLYR

SEQ ID NO: 25802 - protein, 33 aa, Artificial Sequence
  Quasi-synthetic sequence derived from human genome
HLFRKPQRSFFGKLLREFRLVAADRRSWKILLF

SEQ ID NO: 25803 - protein, 33 aa, Artificial Sequence
  Quasi-synthetic sequence derived from human genome
VGRVQGWALTRQQLQALLLKRFLLARRSRRGLF

SEQ ID NO: 25804 - protein, 33 aa, Artificial Sequence
  Quasi-synthetic sequence derived from human genome
MLRCLYHWHRPVLNRRWSRLCLPKQYLFTMKLQ

SEQ ID NO: 25805 - protein, 33 aa, Artificial Sequence
  Quasi-synthetic sequence derived from human genome
KVKFDIRYIVLLRSVRPLRLFVYDVFWLRFSNR

SEQ ID NO: 25806 - protein, 33 aa, Artificial Sequence
  Quasi-synthetic sequence derived from human genome
WLVLVAVGAGLLLLGLIILLLWKCGFFKRARTR

SEQ ID NO: 25807 - protein, 33 aa, Artificial Sequence
  Quasi-synthetic sequence derived from human genome
RWILQFRRWARKWSRFTRSSFQVRWAAVPAGKC

SEQ ID NO: 25808 - protein, 33 aa, Artificial Sequence
  Quasi-synthetic sequence derived from human genome
RLKILETLKLLMQHTWPRVSCRLVVLLKALLKL

SEQ ID NO: 25809 - protein, 33 aa, Artificial Sequence
  Quasi-synthetic sequence derived from human genome
KFKKFAARKKWKQSVRLISLCQRLSRSFLSRSN

SEQ ID NO: 25810 - protein, 33 aa, Artificial Sequence
  Quasi-synthetic sequence derived from human genome
GFIVPFAIIGLCYSLIVRVLVRAHRHRGLRPRR

SEQ ID NO: 25811 - protein, 33 aa, Artificial Sequence
  Quasi-synthetic sequence derived from human genome
KVLRFLHLFGPGKNVPSVWRSARRKRKKHRELI

SEQ ID NO: 25812 - protein, 33 aa, Artificial Sequence
  Quasi-synthetic sequence derived from human genome
FLPARDKRKLGASVVKVNKVGQLRVLLAFRRLK

SEQ ID NO: 25813 - protein, 33 aa, Artificial Sequence
  Quasi-synthetic sequence derived from human genome
AVLAPLKPALWTRLRTLRAPELRRLRRRQTALR

SEQ ID NO: 25814 - protein, 33 aa, Artificial Sequence
  Quasi-synthetic sequence derived from human genome
RHRGKRVVFLKQLASGLLLVTGPLVLNRVPLRR

SEQ ID NO: 25815 - protein, 33 aa, Artificial Sequence
  Quasi-synthetic sequence derived from human genome
RISSAFFRLFRVMRLIKLLSRAEGVRTLLWTFI

SEQ ID NO: 25816 - protein, 33 aa, Artificial Sequence
  Quasi-synthetic sequence derived from human genome
WWFWLLWTVLILFSCCCAFRHRRAKLRLQQQQR

SEQ ID NO: 25817 - protein, 33 aa, Artificial Sequence
  Quasi-synthetic sequence derived from human genome
RLQKFLRRTQFLLFFLTAAYLMTGSLLLLQRVR

SEQ ID NO: 25818 - protein, 33 aa, Artificial Sequence
  Quasi-synthetic sequence derived from human genome
AVQFIRQKRRGAFNSKQLLYLEKYRPKMRLRFR

SEQ ID NO: 25819 - protein, 33 aa, Artificial Sequence
  Quasi-synthetic sequence derived from human genome
YRRRFVQQKRAAITLQHYFRTWQTRKQFLLYRK

SEQ ID NO: 25820 - protein, 33 aa, Artificial Sequence
  Quasi-synthetic sequence derived from human genome
FQRYNKLRHSVIYIQAIFRGKKARRHLKMMHIA

SEQ ID NO: 25821 - protein, 33 aa, Artificial Sequence
  Quasi-synthetic sequence derived from human genome
MQYLSLPKTPKMLKMSKGLDARSKRWLKIIWRR

SEQ ID NO: 25822 - protein, 33 aa, Artificial Sequence
  Quasi-synthetic sequence derived from human genome
MRARRGLLRLPRRSLLAALFFFSLSSSLLYFVY

SEQ ID NO: 25823 - protein, 33 aa, Artificial Sequence
  Quasi-synthetic sequence derived from human genome
VCPKYFMKLVNLYKGAVLYLLRGRKTFLIPVLF

SEQ ID NO: 25824 - protein, 33 aa, Artificial Sequence
  Quasi-synthetic sequence derived from human genome
GFMLKKRKWPLKGWHKRFFVLDNGMLKYSKAPL

SEQ ID NO: 25825 - protein, 33 aa, Artificial Sequence
  Quasi-synthetic sequence derived from human genome
FLLKFIRKMTSRHWCAVPILFLSKALANVPRHK

SEQ ID NO: 25826 - protein, 33 aa, Artificial Sequence
  Quasi-synthetic sequence derived from human genome
YFIINGIEKVIRMLIMPRRNFPIAMIRPKWKTR

SEQ ID NO: 25827 - protein, 33 aa, Artificial Sequence
  Quasi-synthetic sequence derived from human genome
SGKIPSRFKRSYNYKTIVKKILAKLKRARSKKL

SEQ ID NO: 25828 - protein, 33 aa, Artificial Sequence
  Quasi-synthetic sequence derived from human genome
RLRRVAERVAARVQRRPWGAWLSARLWKWLKSP

SEQ ID NO: 25829 - protein, 33 aa, Artificial Sequence
  Quasi-synthetic sequence derived from human genome
PHLLNALNSYKSRFLCGKEIKKKKCIFRLRIRV

SEQ ID NO: 25830 - protein, 33 aa, Artificial Sequence
  Quasi-synthetic sequence derived from human genome
KKEAALRERLKTLRRPRVRDRLPILLQRRMRVK

SEQ ID NO: 25831 - protein, 33 aa, Artificial Sequence
  Quasi-synthetic sequence derived from human genome
LKIKNTFCLWKRLIKLKDNHCEQLRVKIRKLKN

SEQ ID NO: 25832 - protein, 33 aa, Artificial Sequence
  Quasi-synthetic sequence derived from human genome
VFFGRVYLGLSIALRFPALVLYIVFIFAMKKKF

SEQ ID NO: 25833 - protein, 33 aa, Artificial Sequence
  Quasi-synthetic sequence derived from human genome
LFWGWARHRSLCFLVVACLKVKTCLVCRFRISL

SEQ ID NO: 25834 - protein, 33 aa, Artificial Sequence
  Quasi-synthetic sequence derived from human genome
RGFLARRRYRKMLEEHKAVILQKYARAWLARRR

SEQ ID NO: 25835 - protein, 33 aa, Artificial Sequence
  Quasi-synthetic sequence derived from human genome
FITMFATFFFFKLLIKVFLALLTHFYIVKGNRK

SEQ ID NO: 25836 - protein, 33 aa, Artificial Sequence
  Quasi-synthetic sequence derived from human genome
RRARKSEVPHFRLKKVQNIKMWLSLRSYLKRRG

SEQ ID NO: 25837 - protein, 33 aa, Artificial Sequence
  Quasi-synthetic sequence derived from human genome
PKSLWYLIKWIWTHLCKKKMRRKPESFGTIGRR

SEQ ID NO: 25838 - protein, 33 aa, Artificial Sequence
  Quasi-synthetic sequence derived from human genome
LMAKKRVIRMLIVIVVLFFLCWMPIFSANAWRA

SEQ ID NO: 25839 - protein, 33 aa, Artificial Sequence
  Quasi-synthetic sequence derived from human genome
LKKYLMKRRWKKNFIAVSAANRFKKISSSGALM

SEQ ID NO: 25840 - protein, 33 aa, Artificial Sequence
  Quasi-synthetic sequence derived from human genome
RRSRWPFSKARSFCKTHASLFKKILLGLLCLAY

SEQ ID NO: 25841 - protein, 33 aa, Artificial Sequence
  Quasi-synthetic sequence derived from human genome
FLSLGLMMLVCGLVWVPIIKKKQKHRQKSNFLR

SEQ ID NO: 25842 - protein, 33 aa, Artificial Sequence
  Quasi-synthetic sequence derived from human genome
LLLVRCSVQRIETRPRSKKRKKIRRQFPVYVLP

SEQ ID NO: 25843 - protein, 33 aa, Artificial Sequence
  Quasi-synthetic sequence derived from human genome
FRDFFFSRGRFSSGFRRTLILSSGFRLVKKKLY

SEQ ID NO: 25844 - protein, 33 aa, Artificial Sequence
  Quasi-synthetic sequence derived from human genome
RRGFFTKLPPAERRYFKRVVLAARTKRGHLVLK

SEQ ID NO: 25845 - protein, 33 aa, Artificial Sequence
  Quasi-synthetic sequence derived from human genome
RFQTPGRFSWFCKRRRAFWHTPRLPTLPKRVPR

SEQ ID NO: 25846 - protein, 33 aa, Artificial Sequence
  Quasi-synthetic sequence derived from human genome
FRCQFANGIFQLWFHFKRYRYRRPGPCWRPIRH

SEQ ID NO: 25847 - protein, 33 aa, Artificial Sequence
  Quasi-synthetic sequence derived from human genome
PRRRMPGLGWMKKCYQMIDRRLRKNLKSFIIVH

SEQ ID NO: 25848 - protein, 33 aa, Artificial Sequence
  Quasi-synthetic sequence derived from human genome
TRLLCSRLCQQLRSKRKFFGTVPISRLHRRVVI

SEQ ID NO: 25849 - protein, 33 aa, Artificial Sequence
  Quasi-synthetic sequence derived from human genome
IFVFFRKLTTIFPLNWKYRKALSLGCQRVTLHK

SEQ ID NO: 25850 - protein, 33 aa, Artificial Sequence
  Quasi-synthetic sequence derived from human genome
LKLPVLPPKLTLFNAKYNKIKSRGIKANAFKKL

SEQ ID NO: 25851 - protein, 33 aa, Artificial Sequence
  Quasi-synthetic sequence derived from human genome
ARHLHAVIRYSVAIILFTILPFFLLHRWCSKKK

SEQ ID NO: 25852 - protein, 33 aa, Artificial Sequence
  Quasi-synthetic sequence derived from human genome
FRFLLRKLYVFRRSFLMTCISLRNLILGRPSLE

SEQ ID NO: 25853 - protein, 33 aa, Artificial Sequence
  Quasi-synthetic sequence derived from human genome
AKKMLRKALKLLNRIFPYNLISLFLHIHVEKNR

SEQ ID NO: 25854 - protein, 33 aa, Artificial Sequence
  Quasi-synthetic sequence derived from human genome
WRRRHCCFAKMTWNAKRSLFRTHLIGVLSLVFL

SEQ ID NO: 25855 - protein, 33 aa, Artificial Sequence
  Quasi-synthetic sequence derived from human genome
RYKKNLKALYVVHPTSFIKVLWNILKPLISHKF

SEQ ID NO: 25856 - protein, 33 aa, Artificial Sequence
  Quasi-synthetic sequence derived from human genome
KTKSKYASYLSFIKILLKRGGVRVSTKNLIKLF

SEQ ID NO: 25857 - protein, 33 aa, Artificial Sequence
  Quasi-synthetic sequence derived from human genome
RVLRVLRPLRAINRAKGLKHVVQCVFVAIRTIG

SEQ ID NO: 25858 - protein, 33 aa, Artificial Sequence
  Quasi-synthetic sequence derived from human genome
RKKPEILKVCQISRLYRLLVVTIIHLHFLKQVK

SEQ ID NO: 25859 - protein, 33 aa, Artificial Sequence
  Quasi-synthetic sequence derived from human genome
RYVAILHPFRAKLQSTRRRALRILGIVWGFSVL

SEQ ID NO: 25860 - protein, 33 aa, Artificial Sequence
  Quasi-synthetic sequence derived from human genome
KLKILSRGSQTKLLCYMMLFSLFVFFIIYWIIK

SEQ ID NO: 25861 - protein, 33 aa, Artificial Sequence
  Quasi-synthetic sequence derived from human genome
FWRIEVVNRKFGNRIKVLRSRIRFIHLVTGCVL

SEQ ID NO: 25862 - protein, 33 aa, Artificial Sequence
  Quasi-synthetic sequence derived from human genome
QKLLLFYILGTVVAILLLLALALGLLVYRKRRA

SEQ ID NO: 25863 - protein, 33 aa, Artificial Sequence
  Quasi-synthetic sequence derived from human genome
FLKQRPTKLKSLIRLVKHWYQNCKKKLGKLPPQ

SEQ ID NO: 25864 - protein, 33 aa, Artificial Sequence
  Quasi-synthetic sequence derived from human genome
RRFLSKVYSFPMRKLILFLVFPVVRQTPTQHFK

SEQ ID NO: 25865 - protein, 33 aa, Artificial Sequence
  Quasi-synthetic sequence derived from human genome
FNQVVLKRLFMSRTNRPPLSLSRMIRKMKLPGR

SEQ ID NO: 25866 - protein, 33 aa, Artificial Sequence
  Quasi-synthetic sequence derived from human genome
LCARVRKLRSAGRCGKFHQVRRVMTILFLTMVI

SEQ ID NO: 25867 - protein, 33 aa, Artificial Sequence
  Quasi-synthetic sequence derived from human genome
ISFWKKKKSMIGMSTKAVLWRCFSTVVIFLFLL

SEQ ID NO: 25868 - protein, 33 aa, Artificial Sequence
  Quasi-synthetic sequence derived from human genome
LLVLLLHKHRSILLRRLCSLMGTVFLLRCFTMF

SEQ ID NO: 25869 - protein, 33 aa, Artificial Sequence
  Quasi-synthetic sequence derived from human genome
FKILASFYISLVIFYGLICMYTLWWMLRRSLKK

SEQ ID NO: 25870 - protein, 33 aa, Artificial Sequence
  Quasi-synthetic sequence derived from human genome
FLKVIGKGSFGKVLLAKRKLDGKFYAVKVLQKK

SEQ ID NO: 25871 - protein, 33 aa, Artificial Sequence
  Quasi-synthetic sequence derived from human genome
KRKKRVHFHGFMLDVHKRIHRLKQSLPKRKPGF

SEQ ID NO: 25872 - protein, 33 aa, Artificial Sequence
  Quasi-synthetic sequence derived from human genome
RLLWRRLKPLILGKLLFAPDTPFTRKLMAQVNR

SEQ ID NO: 25873 - protein, 33 aa, Artificial Sequence
  Quasi-synthetic sequence derived from human genome
RRRRRAKITGRERKAMRVLPVVVGAFLLCWTPF

SEQ ID NO: 25874 - protein, 33 aa, Artificial Sequence
  Quasi-synthetic sequence derived from human genome
VLWVLMCALAMWFPRRYLPKIFRNDRGRFKVVV

SEQ ID NO: 25875 - protein, 33 aa, Artificial Sequence
  Quasi-synthetic sequence derived from human genome
RYRKEFLRQRRAAVTLQAWWRGYCNRRNFKLIL

SEQ ID NO: 25876 - protein, 33 aa, Artificial Sequence
  Quasi-synthetic sequence derived from human genome
MKFHKKVGKLGVLDKKTIKTINKMKTLKRKNIL

SEQ ID NO: 25877 - protein, 33 aa, Artificial Sequence
  Quasi-synthetic sequence derived from human genome
KVIQQNVHKFLQLRFWGWWKLYNKVKPLLNVAR

SEQ ID NO: 25878 - protein, 33 aa, Artificial Sequence
  Quasi-synthetic sequence derived from human genome
LNLNNEVVKMRKEVKRIRVLVIRKLVRSVGRLK

SEQ ID NO: 25879 - protein, 33 aa, Artificial Sequence
  Quasi-synthetic sequence derived from human genome
LLCFLTALMLLQLLWMLWYVGRSSAHRRLFRLK

SEQ ID NO: 25880 - protein, 33 aa, Artificial Sequence
  Quasi-synthetic sequence derived from human genome
KKRRKVTRKEPPVIIKYIIINRFKGEKNMLVKL

SEQ ID NO: 25881 - protein, 33 aa, Artificial Sequence
  Quasi-synthetic sequence derived from human genome
MKTLRLRKNTVKFSLYRHFKNTLIFAVLASIVF

SEQ ID NO: 25882 - protein, 33 aa, Artificial Sequence
  Quasi-synthetic sequence derived from human genome
KLCSRFLLKCGFITIPWRCIKKCSPLMPSWRFC

SEQ ID NO: 25883 - protein, 33 aa, Artificial Sequence
  Quasi-synthetic sequence derived from human genome
FVLVVLLSVFCWHMHKKGRYTSQKWKYNRGRRK

SEQ ID NO: 25884 - protein, 33 aa, Artificial Sequence
  Quasi-synthetic sequence derived from human genome
CKLLFFRIRPIFVFDGDAPLLKKQTLVKRRQRK

SEQ ID NO: 25885 - protein, 33 aa, Artificial Sequence
  Quasi-synthetic sequence derived from human genome
AKICAFLLRKKRFGQWTKLLCVIKDTKLLCYKS

SEQ ID NO: 25886 - protein, 33 aa, Artificial Sequence
  Quasi-synthetic sequence derived from human genome
ASLRRVKVLLVLNLIAVAGFVLFLAKCRPIAVR

SEQ ID NO: 25887 - protein, 33 aa, Artificial Sequence
  Quasi-synthetic sequence derived from human genome
VVKILKPVKKKKIKREVKILENLRGGTNIIKLI

SEQ ID NO: 25888 - protein, 33 aa, Artificial Sequence
  Quasi-synthetic sequence derived from human genome
KVVQVFRLMRIFRVLKLARHSTGLRSLGATLKH

SEQ ID NO: 25889 - protein, 33 aa, Artificial Sequence
  Quasi-synthetic sequence derived from human genome
LVWGAVGGTLLVLLLLAGGSLAFILLRVRRRRK

SEQ ID NO: 25890 - protein, 33 aa, Artificial Sequence
  Quasi-synthetic sequence derived from human genome
SRGARGVRVDFWWRRLRASLRLTVWAPLLPLRI

SEQ ID NO: 25891 - protein, 33 aa, Artificial Sequence
  Quasi-synthetic sequence derived from human genome
ILNKDLLRKALILMNSKHTHLILCVLRFMRRMI

SEQ ID NO: 25892 - protein, 33 aa, Artificial Sequence
  Quasi-synthetic sequence derived from human genome
ISGYLSRCKRGKRHWKKLWFVIKGKVLYTYMAS

SEQ ID NO: 25893 - protein, 33 aa, Artificial Sequence
  Quasi-synthetic sequence derived from human genome
LRTLRAVRVLRPLKLVSGIPSLQIVLKSIMKAM

SEQ ID NO: 25894 - protein, 33 aa, Artificial Sequence
  Quasi-synthetic sequence derived from human genome
ICSVRRFLWGVLFALCFSCLLSQAWRVRRLVRH

SEQ ID NO: 25895 - protein, 33 aa, Artificial Sequence
  Quasi-synthetic sequence derived from human genome
VTFFSGLIILLIFRLIWRSVKKWQIIKGTGIIL

SEQ ID NO: 25896 - protein, 33 aa, Artificial Sequence
  Quasi-synthetic sequence derived from human genome
VFPMWTLKRQILILFNIILISKLLGARWFPKTL

SEQ ID NO: 25897 - protein, 33 aa, Artificial Sequence
  Quasi-synthetic sequence derived from human genome
ADAGMKRALGRRKGVWLRLRKILFCVLGLYIAI

SEQ ID NO: 25898 - protein, 33 aa, Artificial Sequence
  Quasi-synthetic sequence derived from human genome
AVQFIRQKRRGAFNSKQLLYLEKYRPKMRLRFK

SEQ ID NO: 25899 - protein, 33 aa, Artificial Sequence
  Quasi-synthetic sequence derived from human genome
VGFFAVLFFLWRSFRSVRSRLYVGREKKLALML

SEQ ID NO: 25900 - protein, 33 aa, Artificial Sequence
  Quasi-synthetic sequence derived from human genome
LIVLTGGFTWLCICCCKRQKRTKIRKKTKYTIL

SEQ ID NO: 25901 - protein, 33 aa, Artificial Sequence
  Quasi-synthetic sequence derived from human genome
MRLKMFLTPHMCVMASLICSRQLFGWLFRRVRF

SEQ ID NO: 25902 - protein, 33 aa, Artificial Sequence
  Quasi-synthetic sequence derived from human genome
KNILLRIQQIIYCHKLTIILTKWRNTARHKSKK

SEQ ID NO: 25903 - protein, 33 aa, Artificial Sequence
  Quasi-synthetic sequence derived from human genome
VATICFLAAAILFSTLAACFVNKQRKRKLKRKK

SEQ ID NO: 25904 - protein, 33 aa, Artificial Sequence
  Quasi-synthetic sequence derived from human genome
GFKKCIKSTVGFDAIRVYNKRLKALRKIQKLIK

SEQ ID NO: 25905 - protein, 33 aa, Artificial Sequence
  Quasi-synthetic sequence derived from human genome
WLQWFNSFVNPLLYPLCHKRFQKAFLKIFCIKK

SEQ ID NO: 25906 - protein, 33 aa, Artificial Sequence
  Quasi-synthetic sequence derived from human genome
VRFLKRASNNLQHSLRMVLPSRRLALLERRRIL

SEQ ID NO: 25907 - protein, 33 aa, Artificial Sequence
  Quasi-synthetic sequence derived from human genome
RRGWKMALSGGLRCCRRVLSWVPVLVIVLVVLW

SEQ ID NO: 25908 - protein, 33 aa, Artificial Sequence
  Quasi-synthetic sequence derived from human genome
VLKLPVRSLTYFSARKGKRKTVKAVIDRFLRLH

SEQ ID NO: 25909 - protein, 33 aa, Artificial Sequence
  Quasi-synthetic sequence derived from human genome
YVRIRSRRLGIYQRCWLVFKKASSKGPKRLEKF

SEQ ID NO: 25910 - protein, 33 aa, Artificial Sequence
  Quasi-synthetic sequence derived from human genome
RHMSIMRMRVHSNLTKKRVTLLILLVWAIAIFM

SEQ ID NO: 25911 - protein, 33 aa, Artificial Sequence
  Quasi-synthetic sequence derived from human genome
RMVWRLLHGQVLTRRERRRLLRTCVDFFRLVPF

SEQ ID NO: 25912 - protein, 33 aa, Artificial Sequence
  Quasi-synthetic sequence derived from human genome
GIRRMFRVRNCLRGLGLFLLVFSFFFLLTWASF

SEQ ID NO: 25913 - protein, 33 aa, Artificial Sequence
  Quasi-synthetic sequence derived from human genome
RRANRVLRARCRRAVKSNACYWAVLLLVFLNTL

SEQ ID NO: 25914 - protein, 33 aa, Artificial Sequence
  Quasi-synthetic sequence derived from human genome
VRKLSGLLILLVLFAIGYFLQRIICPSPRRYPR

SEQ ID NO: 25915 - protein, 33 aa, Artificial Sequence
  Quasi-synthetic sequence derived from human genome
GFLLACVATVIFIITKCLFCVWKFVRTGKKGKR

SEQ ID NO: 25916 - protein, 33 aa, Artificial Sequence
  Quasi-synthetic sequence derived from human genome
KCFKKGLKGKGFVLLVKLACIVVASFVLCWLPF

SEQ ID NO: 25917 - protein, 33 aa, Artificial Sequence
  Quasi-synthetic sequence derived from human genome
LKNKLKVRTAYPSLRLIHAVRGYWLTNKVPIKR

SEQ ID NO: 25918 - protein, 33 aa, Artificial Sequence
  Quasi-synthetic sequence derived from human genome
KTCRGFLIKMGGKIKTWKKRWFVFDRNKRTFSY

SEQ ID NO: 25919 - protein, 33 aa, Artificial Sequence
  Quasi-synthetic sequence derived from human genome
FLILYFSHCMIKVFLSSLKFHIRRFIFLFFILV

SEQ ID NO: 25920 - protein, 33 aa, Artificial Sequence
  Quasi-synthetic sequence derived from human genome
LMIRRLRGVRLLSGSREKDRNLRRITRLVLVVV

SEQ ID NO: 25921 - protein, 33 aa, Artificial Sequence
  Quasi-synthetic sequence derived from human genome
CLILAAATIILYFIPLRYIILIWGINKFTKKLR

SEQ ID NO: 25922 - protein, 33 aa, Artificial Sequence
  Quasi-synthetic sequence derived from human genome
KRLNIRKVIPYIASQFRKDKIWLRRTKPSKRQY

SEQ ID NO: 25923 - protein, 33 aa, Artificial Sequence
  Quasi-synthetic sequence derived from human genome
LLLLAFLQRRQRRRQDSRVVARSVRILVASFFL

SEQ ID NO: 25924 - protein, 33 aa, Artificial Sequence
  Quasi-synthetic sequence derived from human genome
FRQRIILRVWWSTWRQRLGQVRVSRALHASALK

SEQ ID NO: 25925 - protein, 33 aa, Artificial Sequence
  Quasi-synthetic sequence derived from human genome
RVLPRMQARMRGFQARKRYLRRRAALGQLNTIL

SEQ ID NO: 25926 - protein, 33 aa, Artificial Sequence
  Quasi-synthetic sequence derived from human genome
LLIISSILGSVWLAYKTPKLLRTARGRRIKKCA

SEQ ID NO: 25927 - protein, 33 aa, Artificial Sequence
  Quasi-synthetic sequence derived from human genome
LARFLLKRGLRNKRIGHFLFWFLRSEIAQSRHY

SEQ ID NO: 25928 - protein, 33 aa, Artificial Sequence
  Quasi-synthetic sequence derived from human genome
RASRRRARVVHMLVMVALFFTLSWLPLWALLLL

SEQ ID NO: 25929 - protein, 33 aa, Artificial Sequence
  Quasi-synthetic sequence derived from human genome
MLRRIIQNRILLVILGIIVVITILMAITFSVRR

SEQ ID NO: 25930 - protein, 33 aa, Artificial Sequence
  Quasi-synthetic sequence derived from human genome
KKRQAALIAYATRERAVIKLQSLVRMWRVRWRY

SEQ ID NO: 25931 - protein, 33 aa, Artificial Sequence
  Quasi-synthetic sequence derived from human genome
RMRTRLVRKRFLCLGWGLPALVVAVSVGFTRTK

SEQ ID NO: 25932 - protein, 33 aa, Artificial Sequence
  Quasi-synthetic sequence derived from human genome
LLPRRRRCFPARAPLLRVALCLLCWTPAAVRAV

SEQ ID NO: 25933 - protein, 33 aa, Artificial Sequence
  Quasi-synthetic sequence derived from human genome
FLNLQKKYPIKSRKLLRVLQRTLSALAHWSVIF

SEQ ID NO: 25934 - protein, 33 aa, Artificial Sequence
  Quasi-synthetic sequence derived from human genome
KRYPQPRGQKKKKVVKYGMGGMIIVLLICIVWF

SEQ ID NO: 25935 - protein, 33 aa, Artificial Sequence
  Quasi-synthetic sequence derived from human genome
KYIVSTLQRWRLNVLRLNFRGCLLRPKTFRSVS

SEQ ID NO: 25936 - protein, 33 aa, Artificial Sequence
  Quasi-synthetic sequence derived from human genome
LLITIYSALIFIPWYFLTNAKKKNAMAKRIKAK

SEQ ID NO: 25937 - protein, 33 aa, Artificial Sequence
  Quasi-synthetic sequence derived from human genome
RLLRYLIHLRFQSSKSGKIYLHRDVRLLFSRKS

SEQ ID NO: 25938 - protein, 33 aa, Artificial Sequence
  Quasi-synthetic sequence derived from human genome
ILKLPQWLKGLLAFLVKPLLPRLSAFLSNMKSR

SEQ ID NO: 25939 - protein, 33 aa, Artificial Sequence
  Quasi-synthetic sequence derived from human genome
GRLPPRLPALLTATRRAVRKRGLLRSLLPPPLL

SEQ ID NO: 25940 - protein, 33 aa, Artificial Sequence
  Quasi-synthetic sequence derived from human genome
FILLGVFGGLWGAFFIRANIAWCRRRKSTKFGK

SEQ ID NO: 25941 - protein, 33 aa, Artificial Sequence
  Quasi-synthetic sequence derived from human genome
LLFRAAQCSFPVAQWYILQLRWARKVMQKIRMK

SEQ ID NO: 25942 - protein, 33 aa, Artificial Sequence
  Quasi-synthetic sequence derived from human genome
ILYFKPSVFRCIALRWVRLLGFAIVYGTIILKL

SEQ ID NO: 25943 - protein, 33 aa, Artificial Sequence
  Quasi-synthetic sequence derived from human genome
LRVKKKALTLQKGMVMAYKRKQLVIKEKAILIS

SEQ ID NO: 25944 - protein, 33 aa, Artificial Sequence
  Quasi-synthetic sequence derived from human genome
VLYLLSKMWSTVSFPKISVPMRIYIKIKQWILR

SEQ ID NO: 25945 - protein, 33 aa, Artificial Sequence
  Quasi-synthetic sequence derived from human genome
KLYIPYIILTIIILTIVGFIWLLKVNGCRKYKL

SEQ ID NO: 25946 - protein, 33 aa, Artificial Sequence
  Quasi-synthetic sequence derived from human genome
IGLWWCTKSILKYICKKQKRTCYLGSKTLFYRL

SEQ ID NO: 25947 - protein, 33 aa, Artificial Sequence
  Quasi-synthetic sequence derived from human genome
LYLKVKGNVFKNKRILMEHIHKLKADKARKKLL

SEQ ID NO: 25948 - protein, 33 aa, Artificial Sequence
  Quasi-synthetic sequence derived from human genome
TILSQKQRKASIQRKLRRACLVVSLCISWRRRV

SEQ ID NO: 25949 - protein, 33 aa, Artificial Sequence
  Quasi-synthetic sequence derived from human genome
RCLAVTRPFLAPRLRSPALARRLLLAVWLAALL

SEQ ID NO: 25950 - protein, 33 aa, Artificial Sequence
  Quasi-synthetic sequence derived from human genome
RRLERWLSRLLLWASLGLLLVFLGILWVKMGKP

SEQ ID NO: 25951 - protein, 33 aa, Artificial Sequence
  Quasi-synthetic sequence derived from human genome
LYNAMAVRIQRRWRGYRVRKYLFNYYYLKEYLK

SEQ ID NO: 25952 - protein, 33 aa, Artificial Sequence
  Quasi-synthetic sequence derived from human genome
GQLRCFLKLTVNRVIWKIAKPPTCVLVRVRWWG

SEQ ID NO: 25953 - protein, 33 aa, Artificial Sequence
  Quasi-synthetic sequence derived from human genome
RSLKPMQTRVVGRLQKPCFFFHWLKLFAIPILL

SEQ ID NO: 25954 - protein, 33 aa, Artificial Sequence
  Quasi-synthetic sequence derived from human genome
FLVPVLIITACYLTIVCKLQRNRLAKTKKPFKI

SEQ ID NO: 25955 - protein, 33 aa, Artificial Sequence
  Quasi-synthetic sequence derived from human genome
WFLALSSMVCVPLFVVITLLKTRGPFRKRLRQL

SEQ ID NO: 25956 - protein, 33 aa, Artificial Sequence
  Quasi-synthetic sequence derived from human genome
MRAWRPLVRPSLQCVKLGRATARWWWVVKVKPH

SEQ ID NO: 25957 - protein, 33 aa, Artificial Sequence
  Quasi-synthetic sequence derived from human genome
FILLGVFGGLWGTLFIRCNIAWCRRRKTTRLGK

SEQ ID NO: 25958 - protein, 33 aa, Artificial Sequence
  Quasi-synthetic sequence derived from human genome
ALFCIQYNVRAFMNVKHWPWMKLFFKIKPLLKS

SEQ ID NO: 25959 - protein, 33 aa, Artificial Sequence
  Quasi-synthetic sequence derived from human genome
PLSVLILSLLLVFIMSVFVAAGLFVLVMKRRKK

SEQ ID NO: 25960 - protein, 33 aa, Artificial Sequence
  Quasi-synthetic sequence derived from human genome
NIFPKQKYLSKKTTKRKRGYIKNKLVFKKGKKI

SEQ ID NO: 25961 - protein, 33 aa, Artificial Sequence
  Quasi-synthetic sequence derived from human genome
KKHLILAFCAGVLLTLLLIAFIFLIIKSYRKYH

SEQ ID NO: 25962 - protein, 33 aa, Artificial Sequence
  Quasi-synthetic sequence derived from human genome
FARHRTKMRRKKRFAKQGNKWYKQHLSYRLVNW

SEQ ID NO: 25963 - protein, 33 aa, Artificial Sequence
  Quasi-synthetic sequence derived from human genome
SLIEYKAAVTLQRAALKFLAKCRKKKKLFAPWR

SEQ ID NO: 25964 - protein, 33 aa, Artificial Sequence
  Quasi-synthetic sequence derived from human genome
VGGVCFLGVAVLVSILAGCLLNRRRAARRRRKR

SEQ ID NO: 25965 - protein, 33 aa, Artificial Sequence
  Quasi-synthetic sequence derived from human genome
IGSFFAPCLIMILVYLRIYLIAKRSNRRGPRAK

SEQ ID NO: 25966 - protein, 33 aa, Artificial Sequence
  Quasi-synthetic sequence derived from human genome
LRKLRNVSNLKPVPLIGPKLKRRWPISYCRELK

SEQ ID NO: 25967 - protein, 33 aa, Artificial Sequence
  Quasi-synthetic sequence derived from human genome
FFRLFRVMRLVKLLSRGEGIRTLLWTFIKSFQA

SEQ ID NO: 25968 - protein, 33 aa, Artificial Sequence
  Quasi-synthetic sequence derived from human genome
FRLFRVMRLVKLLSRGEGIRTLLWTFIKSFQAL

SEQ ID NO: 25969 - protein, 33 aa, Artificial Sequence
  Quasi-synthetic sequence derived from human genome
LCAILKQKAPQQYRIRAKLRSYKPRRLFQSVKL

SEQ ID NO: 25970 - protein, 33 aa, Artificial Sequence
  Quasi-synthetic sequence derived from human genome
IFVAIFWIVFLLLIVFYTAITKKIFKSHLKSSR

SEQ ID NO: 25971 - protein, 33 aa, Artificial Sequence
  Quasi-synthetic sequence derived from human genome
WVIAVIVIAIVVGVAVICVVPYRYLQRRKKKGK

SEQ ID NO: 25972 - protein, 33 aa, Artificial Sequence
  Quasi-synthetic sequence derived from human genome
YRRWMIRKRMREMHRAATFIQSTFRMHRLHMRY

SEQ ID NO: 25973 - protein, 33 aa, Artificial Sequence
  Quasi-synthetic sequence derived from human genome
PPLLKSFLQERLGIHLIRRKIVKPKHHVLMSRK

SEQ ID NO: 25974 - protein, 33 aa, Artificial Sequence
  Quasi-synthetic sequence derived from human genome
VSSMLLRGGRRLFLSGAPRFRHRGKVIAFQLKK

SEQ ID NO: 25975 - protein, 33 aa, Artificial Sequence
  Quasi-synthetic sequence derived from human genome
TAFCLLAKGLLIFLLLVILAMGLWVIRVQKRHK

SEQ ID NO: 25976 - protein, 33 aa, Artificial Sequence
  Quasi-synthetic sequence derived from human genome
VLILLVVRRLRVPKTPAPDGPRYRFRKRDKVLF

SEQ ID NO: 25977 - protein, 33 aa, Artificial Sequence
  Quasi-synthetic sequence derived from human genome
RCYRKYKQLTWIALKFALYKKMTQAAILIQSKF

SEQ ID NO: 25978 - protein, 33 aa, Artificial Sequence
  Quasi-synthetic sequence derived from human genome
KRRRLSKLRTRHCTQAWAIRINPWVEKKKKIKK

SEQ ID NO: 25979 - protein, 33 aa, Artificial Sequence
  Quasi-synthetic sequence derived from human genome
RKRKNSVKVMYKCLWPNCGKVLRSIVGIKRHVK

SEQ ID NO: 25980 - protein, 33 aa, Artificial Sequence
  Quasi-synthetic sequence derived from human genome
IFCIQYNIRSFMNVKHWPWMKLFFKIKPLLKSA

SEQ ID NO: 25981 - protein, 33 aa, Artificial Sequence
  Quasi-synthetic sequence derived from human genome
AIFCIQYNIRSFMNVKHWPWMKLFFKIKPLLKS

SEQ ID NO: 25982 - protein, 33 aa, Artificial Sequence
  Quasi-synthetic sequence derived from human genome
LLLLLLLFLILRHRRQGKHWTSSPAQLPTPRKK

SEQ ID NO: 25983 - protein, 33 aa, Artificial Sequence
  Quasi-synthetic sequence derived from human genome
VGILVGCLCLLLAVYFIARKIRKKRLENRKSVV

SEQ ID NO: 25984 - protein, 33 aa, Artificial Sequence
  Quasi-synthetic sequence derived from human genome
TLVRRTLLHAALRAWIIQCWWRMTLSRVLEKKR

SEQ ID NO: 25985 - protein, 33 aa, Artificial Sequence
  Quasi-synthetic sequence derived from human genome
CVGILSILLFMLVIVWQSVFNKRKSRVRHYLVK

SEQ ID NO: 25986 - protein, 33 aa, Artificial Sequence
  Quasi-synthetic sequence derived from human genome
RVLRALRILYVMRLARHSLGLQTLGLTARRCTR

SEQ ID NO: 25987 - protein, 33 aa, Artificial Sequence
  Quasi-synthetic sequence derived from human genome
RRRFFWKTLTDWKTWISFWKTLIDWKTWISFWK

SEQ ID NO: 25988 - protein, 33 aa, Artificial Sequence
  Quasi-synthetic sequence derived from human genome
LRAFCGILYMKPRMKIFLRQKKVTTQMIAKSLA

SEQ ID NO: 25989 - protein, 33 aa, Artificial Sequence
  Quasi-synthetic sequence derived from human genome
INPQRVAWVWLLVLEKWLAREKKLLPVVFRRKL

SEQ ID NO: 25990 - protein, 33 aa, Artificial Sequence
  Quasi-synthetic sequence derived from human genome
ALLRKINQVLLFLLIVTLCVILYKKVHKGTVPK

SEQ ID NO: 25991 - protein, 33 aa, Artificial Sequence
  Quasi-synthetic sequence derived from human genome
LLSFIRLLLNYRKSSRHLAAFINKFVQFIHKYI

SEQ ID NO: 25992 - protein, 33 aa, Artificial Sequence
  Quasi-synthetic sequence derived from human genome
LPRKKLKHIRQGTNKGLIKKKLKNMLAAVVTKK

SEQ ID NO: 25993 - protein, 33 aa, Artificial Sequence
  Quasi-synthetic sequence derived from human genome
KCGGKCALVRHKFNRLPRVLILHLKRYSFNVAL

SEQ ID NO: 25994 - protein, 33 aa, Artificial Sequence
  Quasi-synthetic sequence derived from human genome
LARRRLVKVINNRAKLLSLCSFIIETCLFILWR

SEQ ID NO: 25995 - protein, 33 aa, Artificial Sequence
  Quasi-synthetic sequence derived from human genome
KWKKFAKHMFFLSFCFYFFYNITLTLVSYYRPR

SEQ ID NO: 25996 - protein, 33 aa, Artificial Sequence
  Quasi-synthetic sequence derived from human genome
KQWRKNLWIFVSKFTEFDARKLHKLYKHAIKKR

SEQ ID NO: 25997 - protein, 33 aa, Artificial Sequence
  Quasi-synthetic sequence derived from human genome
CFLRRPGAPASWIWWRMLRQVLRRGLQSFCHRL

SEQ ID NO: 25998 - protein, 33 aa, Artificial Sequence
  Quasi-synthetic sequence derived from human genome
LGTFYFLKIANFSNSIFLYLKWRVKKVVLVLLL

SEQ ID NO: 25999 - protein, 33 aa, Artificial Sequence
  Quasi-synthetic sequence derived from human genome
LHSKAKYKKVQLVRLVGMMLLIFARKDQCRYIR

SEQ ID NO: 26000 - protein, 33 aa, Artificial Sequence
  Quasi-synthetic sequence derived from human genome
FGTKFSHISFIILFKVFLFPRITISKKTKLVTL

SEQ ID NO: 26001 - protein, 34 aa, Artificial Sequence
  Quasi-synthetic sequence derived from human genome
KRKKKKKFCYLCILLLIVLFILLCCLYRLCKKSK

SEQ ID NO: 26002 - protein, 34 aa, Artificial Sequence
  Quasi-synthetic sequence derived from human genome
RKKRIKRRALLFLSYILTHFIFLALLLILIVLLR

SEQ ID NO: 26003 - protein, 34 aa, Artificial Sequence
  Quasi-synthetic sequence derived from human genome
KRFLKHAGKWSLRWFLSPRWILQFRRWARKWSRF

SEQ ID NO: 26004 - protein, 34 aa, Artificial Sequence
  Quasi-synthetic sequence derived from human genome
RWTHLLRLLRLIILLRIFHLFHQKRQLEKLIRRR

SEQ ID NO: 26005 - protein, 34 aa, Artificial Sequence
  Quasi-synthetic sequence derived from human genome
WLRVRKARPQLILSRRPRRRLGSLRWCGRRRLRW

SEQ ID NO: 26006 - protein, 34 aa, Artificial Sequence
  Quasi-synthetic sequence derived from human genome
LKRLVKLHIKRHYHKKFWKLGAVIFFFIIVLVLM

SEQ ID NO: 26007 - protein, 34 aa, Artificial Sequence
  Quasi-synthetic sequence derived from human genome
LLVILAMGLWVIRVQKRHKMPRMKKLMRNRMKLR

SEQ ID NO: 26008 - protein, 34 aa, Artificial Sequence
  Quasi-synthetic sequence derived from human genome
LVILAMGLWVIRVQKRHKMPRMKKLMRNRMKLRK

SEQ ID NO: 26009 - protein, 34 aa, Artificial Sequence
  Quasi-synthetic sequence derived from human genome
LKKKRRNFAELKIKRLRKKFAQKMLRKARRKLIY

SEQ ID NO: 26010 - protein, 34 aa, Artificial Sequence
  Quasi-synthetic sequence derived from human genome
KRWTHLVRLLRLIILIRIFHLLHQKRQLEKLMRR

SEQ ID NO: 26011 - protein, 34 aa, Artificial Sequence
  Quasi-synthetic sequence derived from human genome
IPLLRKRWFQLGRSMNPRARKKRSRIPLLRKRRF

SEQ ID NO: 26012 - protein, 34 aa, Artificial Sequence
  Quasi-synthetic sequence derived from human genome
RLLKRLLGPKLRRFLKPQGHPRLLLWFKRGLALA

SEQ ID NO: 26013 - protein, 34 aa, Artificial Sequence
  Quasi-synthetic sequence derived from human genome
RFLKIIRPLRNIFLKKPVFAKTVSIFIWFFLFFI

SEQ ID NO: 26014 - protein, 34 aa, Artificial Sequence
  Quasi-synthetic sequence derived from human genome
LLFLLFFLTLRFSVVKRGRKKLLYIFKQPFMRPV

SEQ ID NO: 26015 - protein, 34 aa, Artificial Sequence
  Quasi-synthetic sequence derived from human genome
LARKQYRKVLYCVVIIQKNYRAFLLRRRFLHLKK

SEQ ID NO: 26016 - protein, 34 aa, Artificial Sequence
  Quasi-synthetic sequence derived from human genome
LFRLLLRFLRLCRSFYITCRRLRCFPQPPRRNWL

SEQ ID NO: 26017 - protein, 34 aa, Artificial Sequence
  Quasi-synthetic sequence derived from human genome
KFWRRYGKLSRHLMKVKLKKYTKFLFVRDPFVRL

SEQ ID NO: 26018 - protein, 34 aa, Artificial Sequence
  Quasi-synthetic sequence derived from human genome
RWTHLVRLLRLIILIRIFHLLHQKRQLEKLMRRL

SEQ ID NO: 26019 - protein, 34 aa, Artificial Sequence
  Quasi-synthetic sequence derived from human genome
FLAKQRLRKRVNAALVIQKYWRRVLAQRKLLMLK

SEQ ID NO: 26020 - protein, 34 aa, Artificial Sequence
  Quasi-synthetic sequence derived from human genome
WPRFIRHKCKQRFTKITQYLIRIRKLTLKRQRKL

SEQ ID NO: 26021 - protein, 34 aa, Artificial Sequence
  Quasi-synthetic sequence derived from human genome
RRKMSKKLPPVIIKYIIINRFRGRKNMLVKLGKI

SEQ ID NO: 26022 - protein, 34 aa, Artificial Sequence
  Quasi-synthetic sequence derived from human genome
LIQRRFRTLMMRRRFLSLKKTAILIQRKYRAHLC

SEQ ID NO: 26023 - protein, 34 aa, Artificial Sequence
  Quasi-synthetic sequence derived from human genome
KLSRRWRRWNRFNRRRCRAAVKSVTFYWLVIVLV

SEQ ID NO: 26024 - protein, 34 aa, Artificial Sequence
  Quasi-synthetic sequence derived from human genome
LLIWVPVKVILHKKRYIYRKIKGWRPVLMMCVVL

SEQ ID NO: 26025 - protein, 34 aa, Artificial Sequence
  Quasi-synthetic sequence derived from human genome
WRRRSCWRKWKQLSRLQRNMILFLLAFLLFCGLL

SEQ ID NO: 26026 - protein, 34 aa, Artificial Sequence
  Quasi-synthetic sequence derived from human genome
MVGALLLLLVVALGIGLFMRRRHIVRKRTLRRLL

SEQ ID NO: 26027 - protein, 34 aa, Artificial Sequence
  Quasi-synthetic sequence derived from human genome
KFSRYWRRWNRFCRRKCRAAVKSNVFYWLVIFLV

SEQ ID NO: 26028 - protein, 34 aa, Artificial Sequence
  Quasi-synthetic sequence derived from human genome
LFRVIRLARIGRILRLIRGAKGIRTLLFALMMSL

SEQ ID NO: 26029 - protein, 34 aa, Artificial Sequence
  Quasi-synthetic sequence derived from human genome
FLLRRRFLHLKKAAIVFQKQLRGQIARRVYRQLL

SEQ ID NO: 26030 - protein, 34 aa, Artificial Sequence
  Quasi-synthetic sequence derived from human genome
RLLKRLLGPKLRRFLKPQGHPRLLLWFKRDPRPW

SEQ ID NO: 26031 - protein, 34 aa, Artificial Sequence
  Quasi-synthetic sequence derived from human genome
RLCLRLLLLLGYRRRCPPLLRGLVQRWRYGKVCL

SEQ ID NO: 26032 - protein, 34 aa, Artificial Sequence
  Quasi-synthetic sequence derived from human genome
ILVFQGFTKINAFNWAKVRKLSFKRKRFLIKLRP

SEQ ID NO: 26033 - protein, 34 aa, Artificial Sequence
  Quasi-synthetic sequence derived from human genome
LFRVIRLARIGRILRLIKGAKGIRTLLFALMMSL

SEQ ID NO: 26034 - protein, 34 aa, Artificial Sequence
  Quasi-synthetic sequence derived from human genome
YKTMKFILWRRFRWAIILFIILFILLLFLAIFIY

SEQ ID NO: 26035 - protein, 34 aa, Artificial Sequence
  Quasi-synthetic sequence derived from human genome
RFFRFLLRKLYVFRRSFLMTCISLRNLILGRPSL

SEQ ID NO: 26036 - protein, 34 aa, Artificial Sequence
  Quasi-synthetic sequence derived from human genome
WRGALARKAIQRRKWAVRIIRKFIKGFISRNKPL

SEQ ID NO: 26037 - protein, 34 aa, Artificial Sequence
  Quasi-synthetic sequence derived from human genome
VLGFLRVVRFVRILRIFKLTRHFVGLRVLGHTLR

SEQ ID NO: 26038 - protein, 34 aa, Artificial Sequence
  Quasi-synthetic sequence derived from human genome
RRIILLQRWFRVLLCRQHFLHLRQASVIIQRFWR

SEQ ID NO: 26039 - protein, 34 aa, Artificial Sequence
  Quasi-synthetic sequence derived from human genome
RKIYYLPRRYKFMSRIDKQISRFRRWLPKKPMRL

SEQ ID NO: 26040 - protein, 34 aa, Artificial Sequence
  Quasi-synthetic sequence derived from human genome
VIGGLFILVIVGLTFAVYVRRKSIKKKRALRRFL

SEQ ID NO: 26041 - protein, 34 aa, Artificial Sequence
  Quasi-synthetic sequence derived from human genome
FLQIYLIMIFLGLYINFRHLYKQRRRRYGQKKKK

SEQ ID NO: 26042 - protein, 34 aa, Artificial Sequence
  Quasi-synthetic sequence derived from human genome
AFLLACVATVIFIITKFCLFCFRKLAKKGKKKKR

SEQ ID NO: 26043 - protein, 34 aa, Artificial Sequence
  Quasi-synthetic sequence derived from human genome
MKHFLRMLIQVCLYFYCKFLWRCLKFVMRKLTGR

SEQ ID NO: 26044 - protein, 34 aa, Artificial Sequence
  Quasi-synthetic sequence derived from human genome
THLLRLLRLIILLRIFHLFHQKRQLEKLIRRRVS

SEQ ID NO: 26045 - protein, 34 aa, Artificial Sequence
  Quasi-synthetic sequence derived from human genome
LVTISCILVGVLLLFVLLLVVRRRRREQRLKRLR

SEQ ID NO: 26046 - protein, 34 aa, Artificial Sequence
  Quasi-synthetic sequence derived from human genome
LFRVIRLARIGRVLRLIRGAKGIRTLLFALMMSL

SEQ ID NO: 26047 - protein, 34 aa, Artificial Sequence
  Quasi-synthetic sequence derived from human genome
REFKRAFLRLLRCQCRRRRRRRPLWRVYGHHWRA

SEQ ID NO: 26048 - protein, 34 aa, Artificial Sequence
  Quasi-synthetic sequence derived from human genome
RALALFVLTCVVLTFLGHRLLKRLLGPKLRRFLK

SEQ ID NO: 26049 - protein, 34 aa, Artificial Sequence
  Quasi-synthetic sequence derived from human genome
LFVYLNRKIVQVMRKQKTINRFLMRKRLLFPALV

SEQ ID NO: 26050 - protein, 34 aa, Artificial Sequence
  Quasi-synthetic sequence derived from human genome
MRRLRRLAHLVLFCPFSKRLQGRLPGLRVRCIFL

SEQ ID NO: 26051 - protein, 34 aa, Artificial Sequence
  Quasi-synthetic sequence derived from human genome
RLASLNQILDPWVYLLLRKILLRKFCQMRKRRLR

SEQ ID NO: 26052 - protein, 34 aa, Artificial Sequence
  Quasi-synthetic sequence derived from human genome
GLSVLRTFRLLRVLKLVRFLPALRRQLVVLVKTM

SEQ ID NO: 26053 - protein, 34 aa, Artificial Sequence
  Quasi-synthetic sequence derived from human genome
KPKLSKFILISSLAILLMVSLLLLSLWKLWRVKK

SEQ ID NO: 26054 - protein, 34 aa, Artificial Sequence
  Quasi-synthetic sequence derived from human genome
IPLLRKRRFQLGRSMNPRARKNRSRIPLLRKRRF

SEQ ID NO: 26055 - protein, 34 aa, Artificial Sequence
  Quasi-synthetic sequence derived from human genome
RLWKWLKSPRSWRLGLALLLGGALLFWVLLHRRW

SEQ ID NO: 26056 - protein, 34 aa, Artificial Sequence
  Quasi-synthetic sequence derived from human genome
RQVTGRIRASLVLILKTIRRRLPFSKWRLAFRFA

SEQ ID NO: 26057 - protein, 34 aa, Artificial Sequence
  Quasi-synthetic sequence derived from human genome
VTLLVYIKIYIVLRRRRKRVNTKRSSRAFRAHLR

SEQ ID NO: 26058 - protein, 34 aa, Artificial Sequence
  Quasi-synthetic sequence derived from human genome
AWRGTLARWRCRRLRAIYTIMRWFRRHKVRAHLA

SEQ ID NO: 26059 - protein, 34 aa, Artificial Sequence
  Quasi-synthetic sequence derived from human genome
RNIGIWFFWIRLYKIRRGRTRPQALLFLCMILLL

SEQ ID NO: 26060 - protein, 34 aa, Artificial Sequence
  Quasi-synthetic sequence derived from human genome
ILRGKMMQRRPRSAEVKYFYFFKILLRLRLAILK

SEQ ID NO: 26061 - protein, 34 aa, Artificial Sequence
  Quasi-synthetic sequence derived from human genome
RKRMGLKMLMMMALLVPLVYTIKRHKWSVLKSRK

SEQ ID NO: 26062 - protein, 34 aa, Artificial Sequence
  Quasi-synthetic sequence derived from human genome
VKIAGISAGILVFILLLLVVILIVKKSKLAKKRK

SEQ ID NO: 26063 - protein, 34 aa, Artificial Sequence
  Quasi-synthetic sequence derived from human genome
VVRRRYKIRRAATIVLQSYLRGFLARNRYRKILR

SEQ ID NO: 26064 - protein, 34 aa, Artificial Sequence
  Quasi-synthetic sequence derived from human genome
LVLLLSIAIFQRQKRRKFWKAKNLQHIPLKKGKR

SEQ ID NO: 26065 - protein, 34 aa, Artificial Sequence
  Quasi-synthetic sequence derived from human genome
LPLLLRLLLSCLLLPAARLARQYLLPLLRRLARR

SEQ ID NO: 26066 - protein, 34 aa, Artificial Sequence
  Quasi-synthetic sequence derived from human genome
KTAFRIYAVSTLLLFLLFFLFRLLLRFLRLCRSF

SEQ ID NO: 26067 - protein, 34 aa, Artificial Sequence
  Quasi-synthetic sequence derived from human genome
IPLLRKRRFQLYRSTNPRARKNRSRIPLLRKRRF

SEQ ID NO: 26068 - protein, 34 aa, Artificial Sequence
  Quasi-synthetic sequence derived from human genome
KKKDIRRGIGYLKLICFLIPFLLSLKKKMKVPYL

SEQ ID NO: 26069 - protein, 34 aa, Artificial Sequence
  Quasi-synthetic sequence derived from human genome
MVVVMKFFRWVRRAWQRIISWVFFWRQKIKPTIS

SEQ ID NO: 26070 - protein, 34 aa, Artificial Sequence
  Quasi-synthetic sequence derived from human genome
KLLLFYILGTVVAILLLLALALGLLVYRKRRAKR

SEQ ID NO: 26071 - protein, 34 aa, Artificial Sequence
  Quasi-synthetic sequence derived from human genome
ILKRALKVKQAMLQLYVLKLLKLQTKYLGRQWRK

SEQ ID NO: 26072 - protein, 34 aa, Artificial Sequence
  Quasi-synthetic sequence derived from human genome
FRLQRALRFLLGRLPWRVASGARRFRRWLNRYSY

SEQ ID NO: 26073 - protein, 34 aa, Artificial Sequence
  Quasi-synthetic sequence derived from human genome
LRVLRMMRIFWVIKLARHFIGLQTLGLTLKRCYR

SEQ ID NO: 26074 - protein, 34 aa, Artificial Sequence
  Quasi-synthetic sequence derived from human genome
KVLKVVAKVIRALLRILCCLLKAICRVLSIPVRV

SEQ ID NO: 26075 - protein, 34 aa, Artificial Sequence
  Quasi-synthetic sequence derived from human genome
FLRRTKAATIIQKYWRMYVVRRRYKIRRAATIVL

SEQ ID NO: 26076 - protein, 34 aa, Artificial Sequence
  Quasi-synthetic sequence derived from human genome
LLCGAFLALFKAAEFAKLSIKWMIKIRKRYLKRR

SEQ ID NO: 26077 - protein, 34 aa, Artificial Sequence
  Quasi-synthetic sequence derived from human genome
GLSVLRTFRLLRVLKLVRFMPALRRQLVVLMKTM

SEQ ID NO: 26078 - protein, 34 aa, Artificial Sequence
  Quasi-synthetic sequence derived from human genome
GCTRKLTHLRKRIHRPRRRTTRRWKRWFKFRKRK

SEQ ID NO: 26079 - protein, 34 aa, Artificial Sequence
  Quasi-synthetic sequence derived from human genome
LIYNLLQAVFFVLFVLSVHYLWKKWKKHQKKLKK

SEQ ID NO: 26080 - protein, 34 aa, Artificial Sequence
  Quasi-synthetic sequence derived from human genome
WVILLSAFAGLLLLMLLILALWKIGFFKRPLKKK

SEQ ID NO: 26081 - protein, 34 aa, Artificial Sequence
  Quasi-synthetic sequence derived from human genome
WTHLVRLLRLIILIRIFHLLHQKRQLEKLMRRLV

SEQ ID NO: 26082 - protein, 34 aa, Artificial Sequence
  Quasi-synthetic sequence derived from human genome
ISFWKKKKSMIGMSTKLWKVKKALKMTIFWRGLM

SEQ ID NO: 26083 - protein, 34 aa, Artificial Sequence
  Quasi-synthetic sequence derived from human genome
PRAARPPLLLRPVKLLRRRFRLLLALAVVSVGLW

SEQ ID NO: 26084 - protein, 34 aa, Artificial Sequence
  Quasi-synthetic sequence derived from human genome
KRKTVKAVIDRFLRLHCGLWVRRKAGYKKKLWKK

SEQ ID NO: 26085 - protein, 34 aa, Artificial Sequence
  Quasi-synthetic sequence derived from human genome
WWRGVLVRRTLLVAALRAWMIQCWWRTLVQRRIR

SEQ ID NO: 26086 - protein, 34 aa, Artificial Sequence
  Quasi-synthetic sequence derived from human genome
RRRRRLRRRPRGLRCSRLPPPPPLPLLLGLLLAA

SEQ ID NO: 26087 - protein, 34 aa, Artificial Sequence
  Quasi-synthetic sequence derived from human genome
RRRRRRRRRRDLLLSQLCFLASVALLLWSLSSLR

SEQ ID NO: 26088 - protein, 34 aa, Artificial Sequence
  Quasi-synthetic sequence derived from human genome
LKLLLPGLLLLLVVIILILAFWVLPKYKTRKAMR

SEQ ID NO: 26089 - protein, 34 aa, Artificial Sequence
  Quasi-synthetic sequence derived from human genome
LFLLALLGLVVKRAVERRKALSRRARRLAVRMRA

SEQ ID NO: 26090 - protein, 34 aa, Artificial Sequence
  Quasi-synthetic sequence derived from human genome
ALRRKKKKTIKMLMLVVVLFALCWFPLNCYVLLL

SEQ ID NO: 26091 - protein, 34 aa, Artificial Sequence
  Quasi-synthetic sequence derived from human genome
FAIYHQSLFRILKVFKSLRALRAIRVLRRLSFLT

SEQ ID NO: 26092 - protein, 34 aa, Artificial Sequence
  Quasi-synthetic sequence derived from human genome
KLLKRLRLLPALLILRAFKPHRKIRDYRVVVVGT

SEQ ID NO: 26093 - protein, 34 aa, Artificial Sequence
  Quasi-synthetic sequence derived from human genome
LRLLNKLTKWKHSRTMMLVVFKSAPILKRALKVK

SEQ ID NO: 26094 - protein, 34 aa, Artificial Sequence
  Quasi-synthetic sequence derived from human genome
IPLLRKRWFQLGHSMNPRARKNRSRIPLLRKRRF

SEQ ID NO: 26095 - protein, 34 aa, Artificial Sequence
  Quasi-synthetic sequence derived from human genome
KKHLILAFCAGVLLTLLLIAFIFLIIKSYRKYRR

SEQ ID NO: 26096 - protein, 34 aa, Artificial Sequence
  Quasi-synthetic sequence derived from human genome
KAARDVLGFLRVVRFVRILRIFKLTRHFVGLRVL

SEQ ID NO: 26097 - protein, 34 aa, Artificial Sequence
  Quasi-synthetic sequence derived from human genome
CWKFFMARVRLQLKIILCFSPVGRTLRVRARKFP

SEQ ID NO: 26098 - protein, 34 aa, Artificial Sequence
  Quasi-synthetic sequence derived from human genome
ARTRAGAARVARWRRLRLQQLRRLRGLLRVLRGR

SEQ ID NO: 26099 - protein, 34 aa, Artificial Sequence
  Quasi-synthetic sequence derived from human genome
LVRKRRFQLRRCMNPRARKNRSQIVLFQKRRFHF

SEQ ID NO: 26100 - protein, 34 aa, Artificial Sequence
  Quasi-synthetic sequence derived from human genome
FRSLLVRRRFISLKKATIFVQRKYRATICAKHKL

SEQ ID NO: 26101 - protein, 34 aa, Artificial Sequence
  Quasi-synthetic sequence derived from human genome
LRILNKLTKWKHSRTMMLVVFKSAPILKRALKVK

SEQ ID NO: 26102 - protein, 34 aa, Artificial Sequence
  Quasi-synthetic sequence derived from human genome
IPLLRKRRFQLYRSMNPRARKNRSHIPLVRKRRF

SEQ ID NO: 26103 - protein, 34 aa, Artificial Sequence
  Quasi-synthetic sequence derived from human genome
AWRRDIFGRIIWHKFKQWVIPWHLNKRYNRKRFF

SEQ ID NO: 26104 - protein, 34 aa, Artificial Sequence
  Quasi-synthetic sequence derived from human genome
AGMKRALGRRKGVWLRLRKILFCVLGLYIAIPFL

SEQ ID NO: 26105 - protein, 34 aa, Artificial Sequence
  Quasi-synthetic sequence derived from human genome
WMRRMRILRRLLRRYRESKKIDRHMYHSLYLKVK

SEQ ID NO: 26106 - protein, 34 aa, Artificial Sequence
  Quasi-synthetic sequence derived from human genome
WFRSWGYVLLIVLFCLFIFVLIYVRVFRKSRRSL

SEQ ID NO: 26107 - protein, 34 aa, Artificial Sequence
  Quasi-synthetic sequence derived from human genome
LILSLLVLFFSAVFVAAGLFAYVLRRRRKKLPFR

SEQ ID NO: 26108 - protein, 34 aa, Artificial Sequence
  Quasi-synthetic sequence derived from human genome
IPLLRKRRFQLGRSMNLRARKNRSQIVLFQKRRF

SEQ ID NO: 26109 - protein, 34 aa, Artificial Sequence
  Quasi-synthetic sequence derived from human genome
LRTFRVFRALKAISVVSRLKVIVGALLRSVKKLV

SEQ ID NO: 26110 - protein, 34 aa, Artificial Sequence
  Quasi-synthetic sequence derived from human genome
ILAVVGGVIGLLILILLIKKLIIFILKKTREKKK

SEQ ID NO: 26111 - protein, 34 aa, Artificial Sequence
  Quasi-synthetic sequence derived from human genome
IRLSLIMQLVALLLVVLWIRWKCRRLRIREAWLL

SEQ ID NO: 26112 - protein, 34 aa, Artificial Sequence
  Quasi-synthetic sequence derived from human genome
RRRGFGLFFFLRLHRLLLLFLVLRGTLANKLNVP

SEQ ID NO: 26113 - protein, 34 aa, Artificial Sequence
  Quasi-synthetic sequence derived from human genome
LLVSLGVAIHLCCRRRRARLRFMKQKFNIVCLKI

SEQ ID NO: 26114 - protein, 34 aa, Artificial Sequence
  Quasi-synthetic sequence derived from human genome
LRKLKFSPIKYGYQPRRNFWPARLATRLLKLRYL

SEQ ID NO: 26115 - protein, 34 aa, Artificial Sequence
  Quasi-synthetic sequence derived from human genome
LNLAALTLQRCLRGFFIKRRFRSLRHKIILLQSR

SEQ ID NO: 26116 - protein, 34 aa, Artificial Sequence
  Quasi-synthetic sequence derived from human genome
RRRGRPSRRFLGKKYRKYYYKSPKPLLRPFLCRI

SEQ ID NO: 26117 - protein, 34 aa, Artificial Sequence
  Quasi-synthetic sequence derived from human genome
LKRFKVMKPKVLRSWCRQILKGLLFLHTRTPPII

SEQ ID NO: 26118 - protein, 34 aa, Artificial Sequence
  Quasi-synthetic sequence derived from human genome
LKHLCRLKIRKCMGRLHLRCPVFMSFLPLPNRLK

SEQ ID NO: 26119 - protein, 34 aa, Artificial Sequence
  Quasi-synthetic sequence derived from human genome
LLFLCLLPLIVKHIRKKQAKKAAAIRAKKSSKVR

SEQ ID NO: 26120 - protein, 34 aa, Artificial Sequence
  Quasi-synthetic sequence derived from human genome
IMSKFKLLSSLPRWRRIAQKIIRERRKKRVPKKP

SEQ ID NO: 26121 - protein, 34 aa, Artificial Sequence
  Quasi-synthetic sequence derived from human genome
VLIVLVTLIFCLIVLSLSTFHIHKRRMKKRKMQR

SEQ ID NO: 26122 - protein, 34 aa, Artificial Sequence
  Quasi-synthetic sequence derived from human genome
ILTRKRIRYRFRRFIQQFSQCKATARNLKLKYLI

SEQ ID NO: 26123 - protein, 34 aa, Artificial Sequence
  Quasi-synthetic sequence derived from human genome
IPLLRKRRFQLCRCMNPRARKNRSQIVLFQKLRF

SEQ ID NO: 26124 - protein, 34 aa, Artificial Sequence
  Quasi-synthetic sequence derived from human genome
YLRPLKKFLRKLHLPRDLPQKKKLKYMKQSLVVL

SEQ ID NO: 26125 - protein, 34 aa, Artificial Sequence
  Quasi-synthetic sequence derived from human genome
RVIRLARIGRILRLIRAAKGIRTLLFALMMSLPA

SEQ ID NO: 26126 - protein, 34 aa, Artificial Sequence
  Quasi-synthetic sequence derived from human genome
LLRICRVLRSLKLLAQFRQIQIIILVLVRALKSM

SEQ ID NO: 26127 - protein, 34 aa, Artificial Sequence
  Quasi-synthetic sequence derived from human genome
LTLALLTVNALLVLLALAAWASRWLRRKLRARRK

SEQ ID NO: 26128 - protein, 34 aa, Artificial Sequence
  Quasi-synthetic sequence derived from human genome
YWKTWIFWKTWIFWKTWIFRKTYIGWKTWIFSGR

SEQ ID NO: 26129 - protein, 34 aa, Artificial Sequence
  Quasi-synthetic sequence derived from human genome
WLKVFYCLRIANFNHPLFFLMKRKIIVLMPWLLR

SEQ ID NO: 26130 - protein, 34 aa, Artificial Sequence
  Quasi-synthetic sequence derived from human genome
VFRLARRRKKILFYCHFPDLLLTKRDSFLKRLYR

SEQ ID NO: 26131 - protein, 34 aa, Artificial Sequence
  Quasi-synthetic sequence derived from human genome
CKTMKFIVWRRFKWVIIGLLFLLILLLFVAVLLY

SEQ ID NO: 26132 - protein, 34 aa, Artificial Sequence
  Quasi-synthetic sequence derived from human genome
RYLRVKLTVRYKRVTTHRRIWLALGLCWLVSFLV

SEQ ID NO: 26133 - protein, 34 aa, Artificial Sequence
  Quasi-synthetic sequence derived from human genome
PMRWPFFLFIPFFIIFCVLIAIMVKVNFQRKKWR

SEQ ID NO: 26134 - protein, 34 aa, Artificial Sequence
  Quasi-synthetic sequence derived from human genome
IRLKNIRKVYGRCMWYRLRLLKPQPNIIPTVKKI

SEQ ID NO: 26135 - protein, 34 aa, Artificial Sequence
  Quasi-synthetic sequence derived from human genome
LRLLRALRVLYVMRLARHSLGLRSLGLTMRRCAR

SEQ ID NO: 26136 - protein, 34 aa, Artificial Sequence
  Quasi-synthetic sequence derived from human genome
VLKIRRRKMNHHKYRKLVKKTRFLRRKVQEGRLR

(The sequence listing continues in the following parts.)

1. A method for computationally identifying candidate encrypted peptides with predicted antimicrobial activity comprising:
i) identifying a peptide segment of a first protein sequence from the human proteome, the segment being defined by a first sequence window of 5 to 80 amino acids in length, wherein the first residue within the sequence window represents the first residue within the protein sequence;
ii) assigning the identified peptide segment a score based on a scoring function that determines mean hydrophobicity, net charge, and length of the peptide, increases the determined mean hydrophobicity by 0.9, increases the determined net charge by 1.1, and multiples all obtained values linearly;
iii) identifying a further peptide segment of the protein sequence, the further peptide segment also being defined by the first sequence window length, but wherein the first residue within the sequence window for the further peptide segment represents the second residue within the protein sequence;
iv) assigning the further identified peptide segment a score based on said scoring function;
v) conducting additional scans of the protein sequence until all segments defined by the sequence window have been identified, and assigning each of the identified segments a score based on the scoring function;
vi) ranking all identified segments by score; and,
vii) repeating each of steps i)-vi) for all protein sequences from the human proteome;
wherein the segments that are ranked among the top 1,000 using the scoring function represent the candidate encrypted peptides for the first sequence window length.

2. The method according to claim 1, comprising repeating each of steps i)-vii) for a second sequence window length of 5 to 80 amino acids that is different from the first sequence window length, wherein the segments that are ranked among the top 1,000 using the scoring function represent the candidate encrypted peptides for the second sequence window length.

3. The method according to claim 1, comprising repeating each of steps i)-vii) for at least one other possible sequence window length from 5 to 80 amino acids.

4. The method according to claim 1, comprising repeating each of steps i)-vii) for every other possible sequence window length from 5 to 80 amino acids.

5. The method according to claim 1, wherein said ranking process of step vi) excludes from the ranking consecutive segments having a sequence overlap of about 50% or more.

6. The method according to claim 1, wherein the protein sequences from the human proteome includes all protein sequence isoforms from the human proteome.

7. The method according to claim 1, comprising performing step i) with respect to a second protein sequence at substantially the same time as performing step i) with respect to the first protein sequence, using the same sequence window of 5 to 80 amino acids.

8. A peptide, wherein said peptide is any one of SEQ ID NOS:1-43055.

9. A method of treating a microbial infection comprising administering to a subject in need thereof a pharmaceutically effective amount of a peptide of any one of SEQ ID NOS:1-43055.

10. The method according to claim 9, wherein the microbial infection is bacterial.

11. The method according to claim 10, wherein the microbial infection includes Escherichia coli ATCC11775, Pseudomonas aeruginosa PAO1, Pseudomonas aeruginosa PA14, Staphylococcus aureus ATCC12600, Escherichia coli AIG221, E. coli AIG222, Klebsiella pneumoniae ATCC133883, and Acinetobacter baumannii ATCC19606, or any combination thereof.

12. The method according to claim 9, comprising administering to the subject a pharmaceutically effective amount of a peptide of any one of SEQ ID NOS:43001-43055.

13. The method according to claim 12, comprising administering to the subject two or more peptides of SEQ ID NOS:43001-43055.

14. The method according to claim 13, comprising administering to the subject a combination of any two or more of SEQ ID NO: 43016, SEQ ID NO: 43015, natriuretic peptide A, SEQ ID NO: 43014, SEQ ID NO: 43024, SEQ ID NO: 43032, SEQ ID NO: 43040, SEQ ID NO: 43039, SEQ ID NO: 43041, SEQ ID NO: 43033, SEQ ID NO: 43034, and SEQ ID NO: 43035.

15. The method according to claim 13, comprising administering to the subject a peptide of SEQ ID NO: 43033 and a peptide of SEQ ID NO: 43035.
